United States Patent Application Publication US 2005/0228172 A9 - sequence listing, part 117

SEQ ID NO: 546559 - DNA, 568 bp, Homo sapiens
atgcttttatgtttagagctctgtattattaaccattgtattttgctttttaacagtctcagttcgtggctcagaaattcttatttaaatatcatgaccctgggagagcccagcatatcaaatgtaatttgtgcttttaacgaagagttatttcccaatttgctgtattaaataagatgtatacctctttttccgggcattgcattatttctaagttactgtgaaagaaargtatataatgccatgtgaacagggtatgtaaagtattttatccttcaaaggtatgttagcaaaaaaggaggggggcagggaacaaagctaaacacagatgagaatagctagtgatgcccttgattttgttgtgcgtgctctggatatctttctcctttgttcctcaaggggtgtctggcaccagctttgatctgctgccttcacagtggtatctggtcagtagaacaagtttcaaccatgtgttttgcttgactcctacttaatatggtattggcagcggtggttttgatactgtgagtgatgagaagaggtggtggtgctggagttggtcttgaga

SEQ ID NO: 546560 - DNA, 568 bp, Homo sapiens
atgcttttatgtttagagctctgtattattaaccattgtattttgctttttaacagtctcagttcgtggctcagaaattcttatttaaatatcatgaccctgggagagcccagcatatcaaatgtaatttgtgcttttaacgaagagttatttcccaatttgctgtattaaataagatgtatacctctttttccgggcattgcattatttctaagttactgtgaaagaaaagtatataatgccatgtgaacagggtatgtaaagtattttatccttcaaaggtatgttagcaaaaaaggaggggggcagggaacaaagctaaacacagatgagaatagctagtgatgcccttgattttgttgtgcgtgctctggatatctttctcctttgttcctcaaggggtgtctggcaccagctttgatctgctgccttcacagtggtatctggtcagtagaacaagtttcaaccatgtgttttgcttgactcctacttaatatggtattggcagcggtggttttgatactgtgagtgatgagaagaggtggtggtgcyggagttggtcttgaga

SEQ ID NO: 546561 - DNA, 1472 bp, Homo sapiens
ggagagcactctacttgttgactgtttctcaacctcagcctcaacctcttgtactattaattagtcctcataaggcattcttcagccttacgtctgctgtccacagtatctccttacctctgatacttccagggccacctttccagtaactctacagccctctctgccagagattgatcccttgctttcttttagcttgctggccaggtttctgttgtcaaatttaggaatccctttctcaagtttctttcataatatgaactgtaagatttcagagctttcaagttttcttttgcagggactaatctttcaatttacaacagtcagtaaccagtttgtttgtgtctttgttgtagtggctcattatgagttttatgtaacattctttaatagtagtattttactgccttactcaacagagagacttccattttgacaaggtgttgaaaagagctgaatctttagcctacagttttacccaygtggtggttggaaaagtttcgcatggattagcttctttatacattccaaacctgtttcttctccactacccacctacttcatcaccaggcatagtaggacacacagtaagctctccagcctgtactgttgtgtcctgatgctgagttggcacagtgggcagtgggaatattccagaaagctattcctataccaagagggccagcactacagaaaccacattaaatatgtccccaactcaaatttccccttatctagaccctccaaggttccagggccacaccaaagccaccctacatgaggaaaagtgtgaagtttgaatggaaagaaagtgttcttaacagattgcagttaaaatatctttcttttgcacattctacaaaaatatatgaccatgtaatacattgctagggcctccaaattctacagaaacatgtgaccatgtgaatatgtgccttggcctcccaaggccttggaaggggcctgtgcaagtgaggagccctgaagcttgttctgttagccttgttgtaaattacctccaatcagtctgtatcttccagtagagaaatatcagaacatcatagcaaagtatggttagaaacagtgctttttagagtgttttatacatatagttggcactggagaatcattgagatgaattaactatcattattattgataattattaactattattattatcggtaattaattcatttcaatgattcaatgcagacactttccatttactgggcactgttaagagcacttaacatatcatctcacttaagtcttaggaagttcaattattattattattattattattattttgagatggagtctcgctctgtcacccaggctggagtgcagtggcatgatcttggctcactgcaagctccacctctcgggttcaagccattttcctgcctcagcctccccagtagctgggactacaggcgcccgccaccacacccggctaatttttttgt

SEQ ID NO: 546562 - DNA, 1472 bp, Homo sapiens
ggagagcactctacttgttgactgtttctcaacctcagcctcaacctcttgtactattaattagtcctcataaggcattcttcagccttacgtctgctgtccacagtatctccttacctctgatacttccagggccacctttccagtaactctacagccctctctgccagagattgatcccttgctttcttttagcttgctggccaggtttctgttgtcaaatttaggaatccctttctcaagtttctttcataatatgaactgtaagatttcagagctttcaagttttcttttgcagggactaatctttcaatttacaacagtcagtaaccagtttgtttgtgtctttgttgtagtggctcattatgagttttatgtaacattctttaatagtagtattttactgccttactcaacagagagacttccattttgacaaggtgttgaaaagagctgaatctttagcctacagttttacccacgtggtggttggaaaagtttcgcatggattagcttctttatacattccaaacctgtttcttctccactacccacctacttcatcaccaggcatagtaggacacacagtaagctctccagcctgtactgttgtgtcctgatgctgagttggcacagtgggcagtgggaatattccagaaagctattcctataccaagagggccagcactacagaaaccacattaaatatgtccccaactcaaatttccccttatctagaccctccaaggttccagggccacaccaaagccaccctacatgaggaaaagtgtgaagtttgaatggaaagaaagtgttcttaacagattgcagttaaaatatctttcttttgcacattctacaaaaatatatgaccatgtaatacattgctagggcctccaaattctacagaaacatgtgaccatgtgaatatgtgccttggcctcccaaggccttggaaggggcctgtgcaagtgaggagccctgaagcttgttctgttagccttgttgtaaattacctccaatcagtctgtatcttccagtagagaaatatcagaacatcatagcaaagtatggttagaaacagtgctttttagagtgttttatacatatagttggcactggagaatcattgagatgaattaactatcattattattgataattattaactattattattatcggtaattaattcatttcaatgattcaatgcagacactttccatttactgggcactgttaagagcacttaacatatcatctcacttaagtyttaggaagttcaattattattattattattattattattttgagatggagtctcgctctgtcacccaggctggagtgcagtggcatgatcttggctcactgcaagctccacctctcgggttcaagccattttcctgcctcagcctccccagtagctgggactacaggcgcccgccaccacacccggctaatttttttgt

SEQ ID NO: 546563 - DNA, 533 bp, Homo sapiens
gaaacatcacctcatttgtgaaagcttcctgtcatcaaacccaaggcagaattaattactctcctctctgaccttacattttcctactagatagaataattacctgtttatgccatacttttttaaatacgaatttcagtcttcaaggacctgaatgtgcagcagttttaggtaatctcttcatatcacttccctgcttatgacctttcaataggtccctcttgtctactaaacaaagttcagattcctcagcaggaagtccaatccaagtctaccttcaggccccttaatgcctctttaacctctctcactactccctacacttcagtcatagccayagccctccgagcaccacactcttgaacccccagactctacctaggggcagagggaggccccctcctctctccacaccagtgcccactccccaacccctctaaagacaggtcattaggttcaagcactaagaataagcaacaagaaaggtcagacaccaggtgaactggaatgagaacgaggaagaagaggaggca

SEQ ID NO: 546564 - DNA, 869 bp, Homo sapiens
gtcacctcctctggtctgtcttccctgaccctgtcatctcaggaaagaattaacctcctcttcattttagtgcttatctactttgctcggaccaatgtgtgcgtcacactctactgtaattgtttgtttatttgtctgccccacctactgratagttaatatctcaaggacagggacaatatcatagttttgagtcccttatccctagatcacctgttggactgaatttccacaactaccacccacctttctcgagagtctctcaattgtagctgctttacatccataaagccacccacatcatccacttggatttcaaatcacttgagtaaaactgagggggtaacatactagggatcctactcaccttagacaggagaacacagaaatgcttctggtcatggtattcaagctttgtcccatcaaaccatactaaccaggccatcctaagtctaagggatggacaagaacttctgctgatgattcagccaaaatatctatgacatcttacaagaggtttccatttctacaccagaatttagacaggaggtgaactgtgagttgatttccggaagagtggctctgaatggggggcggggttgttggagacatgctgtcgagaggtgtctgagtctgcagaatttgtgatgatagccggttccttggatagtactcttcctcatcctcttccaaatctcatggtctattacagcttaggtgtccagagattcgtttgtgctgaatattatttggaacattgaatcaagcatacatctttttaatagttagggttatccctctctccggggataatttcacctgggacattgaggaaatggagcttggagtatgtgcacttcctgtcatca

SEQ ID NO: 546565 - DNA, 869 bp, Homo sapiens
gtcacctcctctggtctgtcttccctgaccctgtcatctcaggaaagaattaacctcctcttcattttagtgcttatctactttgctcggaccaatgtgtgcgtcacactctactgtaattgtttgtttatttgtctgccccacctactgaatagttaatatctcaaggacagggacaatatcatagttttgagtcccttatccctagatcacctgttggactgaatttccacaactaccacccacctttctcgagagtctctcaattgtagctgctttacatccataaagccacccacatcatccacttggatttcaaatcacttgagtaaaactgagggggtaacatactagggatcctactcaccttagacaggagaacacagaaatgcttctggtcatggtattcaagctttgtcccatcaaaccatactaaccaggccatcctaagtctaagggatggacaagaacttctgctgatgattcagccaaaatatctatgacatcttacaagaggtttccatttctacaccagaatttagacaggaggtgaactgtgagttgatttccggaagagtggctctgaatggggggcggggttgttggagacatgctgtcgagaggtgtctgagtctgcagaatttgtgatgatagcsggttccttggatagtactcttcctcatcctcttccaaatctcatggtctattacagcttaggtgtccagagattcgtttgtgctgaatattatttggaacattgaatcaagcatacatctttttaatagttagggttatccctctctccggggataatttcacctgggacattgaggaaatggagcttggagtatgtgcacttcctgtcatca

SEQ ID NO: 546566 - DNA, 869 bp, Homo sapiens
gtcacctcctctggtctgtcttccctgaccctgtcatctcaggaaagaattaacctcctcttcattttagtgcttatctactttgctcggaccaatgtgtgcgtcacactctactgtaattgtttgtttatttgtctgccccacctactgaatagttaatatctcaaggacagggacaatatcatagttttgagtcccttatccctagatcacctgttggactgaatttccacaactaccacccacctttctcgagagtctctcaattgtagctgctttacatccataaagccacccacatcatccacttggatttcaaatcacttgagtaaaactgagggggtaacatactagggatcctactcaccttagacaggagaacacagaaatgcttctggtcatggtattcaagctttgtcccatcaaaccatactaaccaggccatcctaagtctaagggatggacaagaacttctgctgatgattcagccaaaatatctatgacatcttacaagaggtttccatttctacaccagaatttagacaggaggtgaactgtgagttgatttccggaagagtggctctgaatggggggcggggttgttggagacatgctgtcgagaggtgtctgagtctgcagaatttgtgatgatagccggttccttggatagtactcttcctcatcctcttccaaatctcatggtctattacrgcttaggtgtccagagattcgtttgtgctgaatattatttggaacattgaatcaagcatacatctttttaatagttagggttatccctctctccggggataatttcacctgggacattgaggaaatggagcttggagtatgtgcacttcctgtcatca

SEQ ID NO: 546567 - DNA, 673 bp, Homo sapiens
tggacaatttggctattatcaatagtgctactgtgaaatatcttgtacatatcttttgtacatttctattggatatcagcgtatcaattaaggtccagtcaggaggcaaaaattgtatagtaatttgaacaaagaaagcttaatataaagaattattaactagtagtattaactagaagataaactactataaaggattaaaagaactccccaaattatgggaayagcagatacaaggagtagccactacataagactgagtcagactacccaagaaaagaacatatttggaaaagggccctctcccatcctccccaaatggagattcagacctcattgaagggggtagtgctgcagtcctctggctagcagagaagttcagtgaggtgctgatgaaactcacctagggtcatcctctggggtccaggtagggcactggtcagctcattgagaagctgctggtggaagttttgtacttgctaggaagctgggtggagctctggcagaattttctggataccagctgtgaggatactagttagtccaccagggtgaattccccagggtatcctacatgctggctgagcactgcatgagcaacatggaagaaagcacaccagaaccagaactcctccctcagtgtccctgcagccccctctgtgacaaagctcca

SEQ ID NO: 546568 - DNA, 673 bp, Homo sapiens
tggacaatttggctattatcaatagtgctactgtgaaatatcttgtacatatcttttgtacatttctattggatatcagcgtatcaattaaggtccagtcaggaggcaaaaattgtatagtaatttgaacaaagaaagcttaatataaagaattattaactagtagtattaactagaagataaactactataaaggattaaaagaactccccaaattatgggaatagcagatacaaggagtagccactacataagactgagtcagactacccaagaaaagaacatatttggaaaagggccctctcccmtcctccccaaatggagattcagacctcattgaagggggtagtgctgcagtcctctggctagcagagaagttcagtgaggtgctgatgaaactcacctagggtcatcctctggggtccaggtagggcactggtcagctcattgagaagctgctggtggaagttttgtacttgctaggaagctgggtggagctctggcagaattttctggataccagctgtgaggatactagttagtccaccagggtgaattccccagggtatcctacatgctggctgagcactgcatgagcaacatggaagaaagcacaccagaaccagaactcctccctcagtgtccctgcagccccctctgtgacaaagctcca

SEQ ID NO: 546569 - DNA, 527 bp, Homo sapiens
ctgtgcccggctaattttttgtatttttagtagagatggggttccaccatgttggccaggctggtcttgaactcctgacctcatgatccacccaccacggcctcccaaagttctgggactacaggtgtgagccaacacacccagccaggtgaacagacttcttagtgtttcatagtcaccttgatcaaggaaaggggatggagacccagtgatgaggtttgcttcatgtgtatatggctaactgagggcagccaagacataacttagtatcgcttgctcagagtttcttccaaactatacttaaattctcaacatgaagtatctttaacttcttttattcttataagcattaccctggattaaacaaggataaaaagtaaaatgaagttctttggggrttttaaaccattttttccattccaaaagtaatacatttcattataggaaaattttaaaatagaatgaaaaattaaaatatttgaaacccatctttcagcagcctaaggacaatcacataacatttttga

SEQ ID NO: 546570 - DNA, 1171 bp, Homo sapiens
tgccattttaactttctaattgttttgttttataaactttgcacattcttagtgtaacatctgtcgttaacaaaaacagagcaatacatttgaaaattgtgatcaactaggaattttgtacaacttaaaaatttagaaaattctgtcattttagcatgatttaattatgttttcaacaaaaattttttattaaaattaaggaatatagattacaagttcctaagttttcaatttttcaaagtgaacacaaaatcaaatataactaaatataaaactagctgtctcagtccattttcttttgctgtaacacaatacccgagagtgggtaaattataaagaaatgaagtttatttagctcagggttatggagattatgggaagtccaaaagcatagtgttggcctctgttgagggccttcttgctgcatcatagcatggcagagggcaagggaatgctcgtcagctcaggtctcttttcttcttcttttgccccaagtcccagtgtgggggtcttaccctgatgactttatctaatcatagttacctcccaaaggcccccctccaatcagcatataaatttgtggattaattttccaacacatgaaatttgggtgacacatttaacacattcagcctttgcctatgttatataaacaacagtgaaaggaatggagctttgacttgaaaatacaggtgggccaggtgcggtggctgatgcctgtaatcccagcactttgggaggccaaggcaggcagatcacttgaggtcaggaattcaagagcagcctggccaacatggtgaaaccccgactctactaaaaatacaaaagttagctgggcgtggtggtatgcacctgtagtcccagctactcaggaggctgaggcaggagaatctcttgaacctgggaggcagaggttgcagtaagctgagactgtgccactgtactccagcgtgagtgacaaagcgagacatctcaaaaaaaaaaaaaaaagaagaatggtgtagggtttttactaaaaggagctcttatgaggaagagcttagacatttgtacagattgagaagataagaaaatagatacaattttaaattctagatcaataagctttccagaaaatgttgtatttggaattgatttttagtgmagtaagctacaaattgagtaatatcta

SEQ ID NO: 546571 - DNA, 3068 bp, Homo sapiens
gggagagggactgagaattggttgatagtcttgtgtgactctggtttctctcatattctcctagcattggtttctctatttaaataagggtggggctttttgttacaatctggggagttattttaaaaaacatcttcataagcagattccagaatacaccaaaaatgaatggaagagaccatacgtcatttatataatcagagattgttgctatggcatttttctctctaaagcccctctggtttaggaacatgatccattgatctagcctatcattcttgcaatcctactatggattctcagctttatttgtcagtcttgcttaatcctccttcctttgttgatgaagagtatctatcactggctggatgaaaattggctgcagtttaatcttggggaaaaaggaagaaaactgccagtcagaggctgaagagttgatcttgtcagatttatagtcatcagttatcagtgctgatcttcatgttcttagatgttgatgattacatgcttttcggcatccaataaacatttgcggaaataatttatagttatatttatggatatttcctttgttgggaaatgttcctgcatttccaggtccatagcaaagggagcctaagcgtatgaattagggattcttaacctatgtgtgttatgtgttgggtggtttgggggagggtacgtgggtagccttcagggaatctgtgacacccagcagtgtcttcagattagaggggtggggagcaggaagaagttaccaagttttcattaggtttacaaaatgctattgttacatgtgtgtgtgtatacatagacacacgtatgtatatgtgtgtatatatatatatgtatacatacacacacgtatacacacacacacactcacaaatacgtgtacaaatacagttcccgacttggagagccttattatcaacagaggaaaacaatgtaacaactttagtaaaagcatatgaaatgatatccttttgtaataaatgtgaatgaaatacatctaacctatatttaaatgcttagtaacatttaatattaattatattaacatcacaggtaggcagaaaagttgaatttataaaaattgagaaaattaatcaagagaggcatagtaattaagtgtgaatcattttaaagaaagcaaggattatttagtggagtagaaaaacagaaaagcaaagctattctaggttggtttgtttgttttttctcctttaatgtgaagatttttaaaagtacagtttgatatagctcaattgatcgtttaattaaggaacttgatttgctttaagaggctcgcaattgataataatcatattatcatgttgaattcccagtggtgaggtgagggtgtcagctgttctactggcgcatttttgctttgcttgatttgctgtatgctcagtttatatcgtggtagatgacagatgtgcaagaaggctatttaaaaatcattgctggtgatgggtggaaaagaatgcctttagtttttagtatgatataattaatctttaatagtgatcgactaatgtatgtttatatgattatatctgaatagatatttattaaatatatattattgatatttctgccggggtaactgtgttattattgagtctctgggactcttttccacttcccatctgaatacttgctttaataagaatatcctactctagcagaagtagtgtaggtacaaagaaccccgttttcttaggttagtggtcaatctatgaaattagatttttgtgagcatgaaagtagagtgtagcccagtgaaatgaaatatggaaacctcagggttcaaagcaatgggttggcagagtcaggtcggagattgaaatgttgtgagtcatctatgagatagatggaaacactggagttgttgagcttttaaaacagtaatagatggaaagaaaaactctagactctgcataaggaaaaggctactagtttgttgaagaagagtagcttgtgagactcgaggagtgtcttgaataagttaggggaagggcaggcaaatggacacttaaggtttatagtgtgaatatcttctatctgctttttgaaaaacacatttaaatgagttcttaatgattcccaggaaccacagtccgattttggcttttgtttcctgtgccctcctgtcagttttgataactgtacctttgtctctgagcccatttttttcaaaattatggtttcattttaattgtttaatagtctgctcttgtctgtaatttccagagtttgaattgtatgatttttgcagcctctatgaaaatggtcagtgaaaaagaatttttggttaactatgacatcctgtatttaatggaaatattttgttttaatgacatgaaaccatagccatgaaaatttttctaatgtaacatcaagaacttctctttgtatattatatgaaccttctgtgaggtccagctaattgcaagacgtcctaagttagatatctcgtgcccattctgattcttctaagaatttactactattttagatcacattaaggttttcagatttttctctaattgcttgataatgtaacacaagcttaatagtgtaataacaaaagcttgatgttctgtagttagattcttttaaataatgtaaaaaaaagttataaatgatttgtagcttggatgactttttacatttctctctgggagtttcagttgctatgattttgttgttgtgttcagcttaattgccattagctactgctgaagtctcctccttactcaccgtgyaggcagtgtccatcagcagcatttagtacaggatgaatgaacgattcctttttgttatgttcaatggaatatgtaaatactttcaaatggccttcttcaactagagttttttaaaaatgagagatacgctggaaaaatactttgaaaaatattcatattctatagtggttagcttatttgttagttgtattatatttggcagttggatgacaggatatgttttagaatacctgaataaattagggaggatatatttctttaatatgattgttttaagttgtagatggcactcat

SEQ ID NO: 546572 - DNA, 658 bp, Homo sapiens
ctttgaaaaatgggcagcaagttatctactctgctgtctatattcttgttttgttaactgacccagtaatgttctatatagcagtatttttgcccctccagtagagaaaccagtttagaatcaggtgtttcatttagttgtctttaaacttgaacatttatagtcttttttttctcttttctgatagtggcacttttgaaaaatatgtatctctccccttttaatacaagtttgtcattttgggtttaaaagatacactttaaacataaaattaaaygtatgagaatggaaagagataaccatgaaatactaataaaaatagctagtattacacaaatacatcagacatttttagaatatataaatgtaattatttgtattatactactatgacatttagaacttgaatacatcaaggcctagatagtatgttatggactatgtaattttacttatggcaaggtcataaaatactttgtgaataagtttttatgacccccccccatctttggcttttacttatgttctgaactgaaaacaattattaaatctgttaggatcctatttagaatactaccatgaggaattagttatgataataaacaaagtaagatatcatgtcttccctaactctgcttactttgtaattgtcagatgt

SEQ ID NO: 546573 - DNA, 553 bp, Homo sapiens
tttcatgggcaaaagacttggacacttcaaaggaagatgtaagaatggccaaatagcacatgaaaggagtttctacatcattagataccagggaactgtacatttaaaacataggaatggcaaaaatcaagaagactgacaatactaattgtctggaaagattgtggagaaaccagaactcactttgctggtgggggtatacaatggcaaaagtcctttgaaaaaaaatgttggcagttccttataaatgtaaagcatacacttgctgtatgatgcaacaagtctagtcctaggtatttacccaagagaaatgaaaatatacatctacaaaaagacttgtacacctatgttcatagcaggtttattcatagtatcaaaaactagcaacaatccgaatggtcatcattgagggaatggagaaacaaaacagacagtattccrctcaactcagtggtatcctgcagaaaggggcaggagagatggcaaagctgattggaatatagggataaaaagcgcagttttctactttatattcatacagtagaacactatt

SEQ ID NO: 546574 - DNA, 607 bp, Homo sapiens
ctccacctcccgggttcacgccattctcctgcctcagcctacggagtggctgggagcgcctgccccaccaccatgcccaaatttttggtatattttagtagagacggggtttcaccatgttagccaggatggttttgatctcctgaccttgtgatctgcccaacttggcctcccaaagtgctgggattacaggcatgagccaccgtgcccagcccgtttttttttttgtttgtttgttttttgagacagagtcttgctctgtcacccaggctggagtgcagtggcacaatctcrgctcattgcagcctccacctccggggttcaagtgattcttctgcctcagcctcttgaggagctgggattacaggtgcatgccaccacgcccagctaaattttgtatttttagaagagatgttgtttcaccatgttggtcaggctgttcttgaattcctgacctcaggtgatctactggcctcggcctcccagagtgctgggattacaggtgtgagccactgcacccggcccccttccttacttctgtataaataatttttaaagtatttggaaaaatggccaaatggctagtatcataaaatattaataaatc

SEQ ID NO: 546575 - DNA, 652 bp, Homo sapiens
tacaaaggatatcaattatacgatcatgtgctgcataaagaccttcagtcaacaatggaccaaatatactgtggaggtcatctaataagctaaggttaatttattatttaagaaaggagaaatttaraaataaatttagcatagcctaagtgtactgtgtttataaggtctgcagtagagcacggtaatatcctaggccttcacattcactcaccactcactcactgactcacccagagcaacttccagtcctgcaagctccattcatggtaagcgccctatacaggtatataagtttatatctcaaaaaaattttttttattttactttaagttctggggtacatgtgcagaacgtgcagttttgttacataggtatacacgtgccatggtggtttgctgcacccatcaacccatcactacatgaggtatttctcctaatgctatccctcccctagcctcccacccgctgacaggccctggtgtgtgatgttcccctccctgtgtccatgtgttctcattgttcaactcccacttatgagtgagaacattcagtgtttgattttctgttcttgtgacagtttgctgagaatgatggtttccagcttcatccatgtcctgcaaaggacatgaactcatccttttttatggct

SEQ ID NO: 546576 - DNA, 652 bp, Homo sapiens
tacaaaggatatcaattatacgatcatgtgctgcataaagaccttcagtcaacaatggaccaaatatactgtggaggtcatctaataagctaaggttaatttattatttaagaaaggagaaatttaaaaataaatttagcatagcctaagtgtactgtgtttataaggtctgcagtagagcayggtaatatcctaggccttcacattcactcaccactcactcactgactcacccagagcaacttccagtcctgcaagctccattcatggtaagcgccctatacaggtatataagtttatatctcaaaaaaattttttttattttactttaagttctggggtacatgtgcagaacgtgcagttttgttacataggtatacacgtgccatggtggtttgctgcacccatcaacccatcactacatgaggtatttctcctaatgctatccctcccctagcctcccacccgctgacaggccctggtgtgtgatgttcccctccctgtgtccatgtgttctcattgttcaactcccacttatgagtgagaacattcagtgtttgattttctgttcttgtgacagtttgctgagaatgatggtttccagcttcatccatgtcctgcaaaggacatgaactcatccttttttatggct

SEQ ID NO: 546577 - DNA, 521 bp, Homo sapiens
cactattaatattaaggaacttgtgtttgggggtggggttggggagggaggaaaataattggcaggctgaatatgmtgatcttttcacacactcctcttttgcttcctctctgcggctgcagttgggtttgcttgctgtctccaccgagctgacgtgtgatgtctgcagcgcgagtcaaagccacctcgcaaaggcagccgtgttccctgccttgacatctcatccctcgtccttactcagatctcgtcagcctacacggtctgctcctccaacagctaatagcgaaatgactgcggggaaggcaatgacagcaatcgctgttcagcatttattttacctttgattttttgctgcacataaaattccaggcctgagctgcggggcagacatagaggagagtgcgggggcttggaagaaggtgggactctgaaatctgcccctcctcccccttcagtacaacgtaatgtgagctgagtggtctctggcaatgatttaatgcctcctttggacatttgccggt

SEQ ID NO: 546578 - DNA, 521 bp, Homo sapiens
cactattaatattaaggaacttgtgtttgggggtggggttggggagggaggaaaataattggcaggctgaatatgctgatcttttcacacactcctcttttgcttcctctctgcggctgcagttgggtttgcttgctgtctccaccgagctgacgtgtgatgtctgcagcgcgagtcaaagccacctcgcaaaggcagccgtgttccctgccttgacatctcatccctcgtccttactcagatctcgtcagcctacacggtctgctcctccaacagctaatagcgaaatgactgcggggaaggcaatgacagcaatcgctgttcagcatttattttacctttgattttttgctgcacataaaattccaggcctgagctgcggggcagacatagaggagagtgcgggggcttggaagaaggtgggactctgaaatctgcccctcctcccccttcagtacaacgtaatgtgagctgagtggtctctggcaatgatttaawgcctcctttggacatttgccggt

SEQ ID NO: 546579 - DNA, 673 bp, Homo sapiens
ggatgagccatgaagaaagagctacccagcaagagagttccaggctttccgtcaccctaaagtttctggctgtgtatttggttgcacaggaaaaagaatgtgttttaatttrgaagagtacagccactggggatccgtaagatggatgaaaatattgaagacaggaaactgtggagcaagagagaagcttcaaatacccagagcagacactggacacagggaaggcatctgggtattaaactgagtaattccctctttaaacctctgctgccaaagcctaaaaacagtctcaaaaaggctagcagaatttaactaccgtctaaggaaaaaaagaaaaacaaaacaaccaatagcttttaaaggtacataacaaaaaactcaattctttaaaacattgtaccaaaaatatgaagccaatacattatatagccaggaaaacagcaatagaaagagaccgagaaatgacagagctattgaaattagtacagaattatttttaagtatatactacattcgtacctagggaaataaagcattatttggacataatgagtaaaaagagtaggttgtcaatagagaaagtaaaactacaaaaaacaacattgaaactgcagaactgaaaaatagaatatgtgaaaaattcatccagtgggattaacaacatattggaaac

SEQ ID NO: 546580 - DNA, 962 bp, Homo sapiens
agcaaaggctagtcattatctgtcttcaattgttgaggcaattctctttagccttcttcaggctaaggagttcacagatccagactccttaaatctacccccagtcactccctcctaccccacagagggaacacctcccctctcctgcgggaatctatgggatgaaaccacatgcacaactgctttgacacatatcatccccttgtctgtccttgagcagggtcagctgtgttctgttgaagatggctgttcctttccttagccaccagccagaaaatggcagagaaaaacaacagtcagcagctcttgggtcacgaagagactttcacctctgactaatgctagaaaatcccagagcctggcatttttgttttggttttgccaccctctcactgggtgactttgacaaaatattttatctccctgtacctcttctttgcaagcaaaccaagcaacccctttttcatgggcctcatccgaagcactgcttatgaaaatgctggttattcagcttttactatggcactaaaatgttaatagtagatatcactggatcactgacatatggctaataattattttatctacttacttctttaagatcttttatgttttctaaaatgtctatagagagcatggattatttctataatagaaagaagcgaattttatgtttttttgtcttgaaaatataaataaatattgaaaagtttgccttaattttcaagggcatgtttctttcttctggagtatttgttgactgctgggattctttatcaagaagttggcaggttaaaggttgtatcttgattatataactaggtccctggctggatgtggtggctcacgcctrtaatcccagcactttgggaggccaaggtaggcagatcacgaggtcaggagttagagaccagcctgaccaacatggtgaaaccccgtctctactaaaaaaaaaaaaaaaa

SEQ ID NO: 546581 - DNA, 592 bp, Homo sapiens
tgaaatgattttttttcccaaaaggtcaaaactgttagatcctcacmctctttctctctatctttctctctcctttcctcatctctgtgtacatttgtgtgtgtgtgtgtgtgtgtgtgtgtgtgtgggtttgaatctgtgactgtagaaaagaaaataaaagataatttattggcatgttagaaaaggaaaaaaatagacatgacagtaattgctgaacaatgcacccatttccattccctatccgtggcctcacttttgaccccagagtagaaaactcttaggtagatattgcttgttgaagagggcatggaaatggatattcctgggccattaacaagctgtgtgtgagtccccatcttttatcctgaagatatctgaaggcttaggttatgttagcacactcagcctgacaagatacagtagacttaataggtattccaaagctctgaaaaggtacagtgttctttcgtctttgctgccagtgcaaagtggtttttctctagtccttttctagcaaagctctcaagctctcctcctatcaacaactcaaaggcgggtgggtgaggagttacttttcattagtatattt

SEQ ID NO: 546582 - DNA, 1572 bp, Homo sapiens
taaaagtctttccaaatagaatgttgaatttatgaaagtgatggtaaccaaatgattgagtaatcaaaccacattccagaggagaaaagcaaactgggccaatgataagtgaaagcttttgcttaggacagcaaatgctgggtacagaagtctgtgagttcaaagtgaacggagaattactcactccgcacatctctgaattgaatctgaaaattcaaattgcaattgcccatcatcttgttaacaactactatctctcctaataatgtacagcattttcccagtggacttgctgttagagcttctaatagagaaaggaggactcttgaatcccatggtgttggggactggggacccggcaatagctgagggattactgtcacagatatgcagaaatcccaagtcagtcttctgagatcagcaagttttacctgcgctgcactaatttctgaagtaatgctcattgaaacaaataagaaatatataaaaacaaaaacaacctcaaatcatgtaaatgacttactggttttgtttttctgtgttaaatgctttattgtctcttttgtaatttaggactcatgccccttgcccttctgtaatgttttgtttttagatatgctatactttacacattataaggaagatcagagaaatcatgatcttagctttttctattaattttaaacaaatatgtagaatttttgctttgtttttccttgcaagagaaactggacattggtaacttcgtaaggttaacccctctggagaatattctccctgattctgtcataatagatttaagaaagtccttggtcagtttcaggcagatatcaaatctgtcacttgaggggcagaattctttgaaaacttagcgacaatggggaggcttatggtcactgaaatgtcagcttatcacaggaggctgactcccaggctgaaataattcaatctaatgtaactcatgtctactcaaatgcctcctgttcttggccttttaaatgttttttgctgtaaaactttaaatactccaatattcaggacatttactgataatgttctcctaaaatgtatccaaaagattttagacaagatattggaagcagatatttttgaatttaattagtccaggacaacaaaaggaagatgatttttctccttcagcagttgtgtgcagcccgcattcatatcctgcttgatatcaggaaggaatctatcctgagaaccagcgcccttacctctgcagtctaaaggttatagcaaagtgctgastgctggagtcacacatttactttaaaaataagtgacaaattccctgataactttaacacgtgcagagccagcaaataaaaatatttgtattctaaactttttactctttgacattgtgagttgactcagcgggtcagagaattatgttacatggttgtgcccttggttttgagctccagacagttctataaagtggattctatctctgaacacgagttaacagttattttgcaaagtagccacaactgtgagccagtcagcacaaaaccagtaacagcaacattttctaacaaaaaggtaaat

SEQ ID NO: 546583 - DNA, 542 bp, Homo sapiens
ttcaactaaaaaccattctgaaatattgaagataaaatttgaagattgaaaagtggctgactactggtgactaaagtgtggtcattattacatctaaaatggcgttctgttctacaggaacgcgtgtgtgcatatctttaatgtcagcccttgcctctgggatgacacttattagatttaatggtgtcatgtrctatttcaagattggcatagtggtttttataacacaatgtgctaatattccacttattatttaaagtgttaaaagaaaaactatagacaaattaaatttagcggagtttaattgagcaaagaacaatacaagaatttgacagcctctagaaccaggaaaggtttaataagactccagggctctcatgtgcctgaataacatttatagacacaaaaaggaaagtgacatacagcaagcagaaatgaggtacagagatagcctgattggttaaagctccctgtttgtcctatttgaatttggtttgaaccgttggctgcctgtggttgacttaagtccagttgctgtgact

SEQ ID NO: 546584 - DNA, 404 bp, Homo sapiens
ggggttcaagtgattctcctgcctcagcctcttgagtagctgggattacaggtgcccaccacaatgcctgggtaattttttctttttttmtttttttgtattttttagtagagacagggtttcgccttgttggccaggctggtctcaaactcctgacctcaagtgatctgcccgcctcggcctcacaaagcgctaggattacaggcatgagtcaccgcatccggccaaaactagtctttattaaagtctccccagagtttccattgtgaatgagccttctgtttcctgccggtggtacgctgactgatacacccagtttctggggattacgggtgtggcaagaccacaaagtccatggtgcttattactgaaatacataaatttaccttgaatgcatccttttt

SEQ ID NO: 546585 - DNA, 623 bp, Homo sapiens
gggagctctggtgacagcatcctttgaagagcggggggctcccacgagagctgcaatcagaggcactagagtagaaatcctgtgacagtaaggaatttttccactgtgagtaacaggaaaccctmcacaaattggattgcacaatagagaaattgcattgacgcaagtaatgaagcatccaaaagaagccctggagcctcggcgaggatgggtccagcccttccatgaagtcagcaatggcagcaggaggcttcttcctgcctgcctctcagcattgccatccacagcgtcgcttgggttccgatggcctcaggatgtctccagcaggtcccagcctgttccatccaggagaaccagaaactggaatcaccccataagtggcagcagggggagttcccacaagaaagtgccccaaaccatccctagatgggtctggttaggattccaaagaaaggagcactaagcacagggtgatcagcccagagcattgacgaggggaacttacagaggctgcagcaatccttcccgcagacagcgaggaaaaagggtgttctacccacgcatgtctgcagtgaggggttcaggccatgacgttcatatgagagtttaaaaagtttgggtca

SEQ ID NO: 546586 - DNA, 623 bp, Homo sapiens
gggagctctggtgacagcatcctttgaagagcggggggctcccacgagagctgcaatcagaggcactagagtagaaatcctgtgacagtaaggaatttttccactgtgagtaacaggaaaccctacacaaattggattgcacaatagagaaattgcattgacgcaagtaatgaagcatccaaaagaagccctggagcctcrgcgaggatgggtccagcccttccatgaagtcagcaatggcagcaggaggcttcttcctgcctgcctctcagcattgccatccacagcgtcgcttgggttccgatggcctcaggatgtctccagcaggtcccagcctgttccatccaggagaaccagaaactggaatcaccccataagtggcagcagggggagttcccacaagaaagtgccccaaaccatccctagatgggtctggttaggattccaaagaaaggagcactaagcacagggtgatcagcccagagcattgacgaggggaacttacagaggctgcagcaatccttcccgcagacagcgaggaaaaagggtgttctacccacgcatgtctgcagtgaggggttcaggccatgacgttcatatgagagtttaaaaagtttgggtca

SEQ ID NO: 546587 - DNA, 623 bp, Homo sapiens
gggagctctggtgacagcatcctttgaagagcggggggctcccacgagagctgcaatcagaggcactagagtagaaatcctgtgacagtaaggaatttttccactgtgagtaacaggaaaccctacacaaattggattgcacaatagagaaattgcattgacgcaagtaatgaagcatccaaaagaagccctggagcctcggcgaggatgggtccagcccttccatgawgtcagcaatggcagcaggaggcttcttcctgcctgcctctcagcattgccatccacagcgtcgcttgggttccgatggcctcaggatgtctccagcaggtcccagcctgttccatccaggagaaccagaaactggaatcaccccataagtggcagcagggggagttcccacaagaaagtgccccaaaccatccctagatgggtctggttaggattccaaagaaaggagcactaagcacagggtgatcagcccagagcattgacgaggggaacttacagaggctgcagcaatccttcccgcagacagcgaggaaaaagggtgttctacccacgcatgtctgcagtgaggggttcaggccatgacgttcatatgagagtttaaaaagtttgggtca

SEQ ID NO: 546588 - DNA, 623 bp, Homo sapiens
gggagctctggtgacagcatcctttgaagagcggggggctcccacgagagctgcaatcagaggcactagagtagaaatcctgtgacagtaaggaatttttccactgtgagtaacaggaaaccctacacaaattggattgcacaatagagaaattgcattgacgcaagtaatgaagcatccaaaagaagccctggagcctcggcgaggatgggtccagcccttccatgaagtcagcaatggcagcaggaggcttcttcctgcctgcctctcagcwttgccatccacagcgtcgcttgggttccgatggcctcaggatgtctccagcaggtcccagcctgttccatccaggagaaccagaaactggaatcaccccataagtggcagcagggggagttcccacaagaaagtgccccaaaccatccctagatgggtctggttaggattccaaagaaaggagcactaagcacagggtgatcagcccagagcattgacgaggggaacttacagaggctgcagcaatccttcccgcagacagcgaggaaaaagggtgttctacccacgcatgtctgcagtgaggggttcaggccatgacgttcatatgagagtttaaaaagtttgggtca

SEQ ID NO: 546589 - DNA, 623 bp, Homo sapiens
gggagctctggtgacagcatcctttgaagagcggggggctcccacgagagctgcaatcagaggcactagagtagaaatcctgtgacagtaaggaatttttccactgtgagtaacaggaaaccctacacaaattggattgcacaatagagaaattgcattgacgcaagtaatgaagcatccaaaagaagccctggagcctcggcgaggatgggtccagcccttccatgaagtcagcaatggcagcaggaggcttcttcctgcctgcctctcagcattgccatccacagcrtcgcttgggttccgatggcctcaggatgtctccagcaggtcccagcctgttccatccaggagaaccagaaactggaatcaccccataagtggcagcagggggagttcccacaagaaagtgccccaaaccatccctagatgggtctggttaggattccaaagaaaggagcactaagcacagggtgatcagcccagagcattgacgaggggaacttacagaggctgcagcaatccttcccgcagacagcgaggaaaaagggtgttctacccacgcatgtctgcagtgaggggttcaggccatgacgttcatatgagagtttaaaaagtttgggtca

SEQ ID NO: 546590 - DNA, 623 bp, Homo sapiens
gggagctctggtgacagcatcctttgaagagcggggggctcccacgagagctgcaatcagaggcactagagtagaaatcctgtgacagtaaggaatttttccactgtgagtaacaggaaaccctacacaaattggattgcacaatagagaaattgcattgacgcaagtaatgaagcatccaaaagaagccctggagcctcggcgaggatgggtccagcccttccatgaagtcagcaatggcagcaggaggcttcttcctgcctgcctctcagcattgccatccacagcgtcgcttgggttccgatggcctcaggatgtctccagcaggtcccagcctgttccatccaggagaaccagaractggaatcaccccataagtggcagcagggggagttcccacaagaaagtgccccaaaccatccctagatgggtctggttaggattccaaagaaaggagcactaagcacagggtgatcagcccagagcattgacgaggggaacttacagaggctgcagcaatccttcccgcagacagcgaggaaaaagggtgttctacccacgcatgtctgcagtgaggggttcaggccatgacgttcatatgagagtttaaaaagtttgggtca

SEQ ID NO: 546591 - DNA, 666 bp, Homo sapiens
ggaagtggagatgtaagtagctcctggttatgacctcagggtttgtgttcaataggaaatatgtgataaatgagtgtcaacaaattgacaccagtgaattcattgcttagagacacctaagtggacagcttcttgtttggttatgatggtgatcatgtttatactccaccaaatatcttggagttttgaaaatggcctggtgaatttgctgaccacagcaaacttctgctaattaccctgaagtrtctatctcatgtttatctttccttcaattaaatcatcatacatcacttaacgtcagggatatattctgagaagcatatcgttggctattttgtcgatgtgtgaacatcatagaacgtccttacacaaatgtagatggcatagctgactacacacctaggctgtatggtatggccttttctcctaggctataaacatgtacagcaccgtatgcaattgtaacacaatggtaagtatttgtgtatctaaacatatctaaacacagaaaaggtacagtaaaaatctaatcttataatcttatatgaccactgttgtttatgcaatccattgttgactgaaatgatgttatgcagcccatgactgtatatgataaaattgtcaagttatcattttattccctgaggtaccaaaaaagacttagca

SEQ ID NO: 546592 - DNA, 666 bp, Homo sapiens
ggaagtggagatgtaagtagctcctggttatgacctcagggtttgtgttcaataggaaatatgtgataaatgagtgtcaacaaattgacaccagtgaattcattgcttagagacacctaagtggacagcttcttgtttggttatgatggtgatcatgtttatactccaccaaatatcttggagttttgaaaatggcctggtgaatttgctgaccacagcaaacttctgctaattaccctgaagtatctatctcatgtttatctttccttcaattaaatcatcatacatcacttaaygtcagggatatattctgagaagcatatcgttggctattttgtcgatgtgtgaacatcatagaacgtccttacacaaatgtagatggcatagctgactacacacctaggctgtatggtatggccttttctcctaggctataaacatgtacagcaccgtatgcaattgtaacacaatggtaagtatttgtgtatctaaacatatctaaacacagaaaaggtacagtaaaaatctaatcttataatcttatatgaccactgttgtttatgcaatccattgttgactgaaatgatgttatgcagcccatgactgtatatgataaaattgtcaagttatcattttattccctgaggtaccaaaaaagacttagca

SEQ ID NO: 546593 - DNA, 519 bp, Homo sapiens
gctatgtattaataatatgtaakttttgaagcaattgtatagctttaattattaatgatgtctcaaaatttttaagagattaataccttggttttgtgtgtgtgtgtgtgtgtgtgtgtagcaattctgtaaatattgcttcttctactcaaaatatcaattaggaaataatatatccagaaatctaagcagaaaattcttgaacatttctagaagagttccgttgctgagagttgagggattttcataatttacaaccttttcaccacagtctgtaggacatatgttagcattggaagctgggccctatcctgctgagttcagcacattgcctgaccctgggacatagcatcatgctgtagctctgacttggcagatcagattaaactacttcagggacattaaagtataaatatttcatagtgccctcatgggactgaatttaaactaaaacacttaaaagtctcagttgtttggtcttgctgatgatttctacatttttcttctctttaaattttc

SEQ ID NO: 546594 - DNA, 499 bp, Homo sapiens
agaatttgccattaatttttttaaggaactttgtttcccctggtggttgggataaaattttttcttgtttcctcctacctcgccagcttctccattacagtttaaggtttggatagtgttcaaaataaactgtctccctttcaggcctattcctgtctcacccyactacacattctcagctatgccatcaaaatcaattacaatctgcatcacaatgatatatgagatttatatctctaaaccctacctattcttcaatacctaggctcataaatattcaggtgcctacctggcatctctctttgggcattgcaatcacaattgaaactcagtgtgctctcggctgggtgcggtggctcatgcctgtaatcccagcgctttgggaggtcaaggtgggtgaataacttgaggtcaggaattcaagaccagcctggtcaatatggtgaaacccagtatctactaaaaatacaaaaattagctgggcatggtagcacatgcc

SEQ ID NO: 546595 - DNA, 1985 bp, Homo sapiens
ttgtcttttaatgttttttaaacactacatagcaactttttcccatgacaatatttattgatcatctttccagatcatcatgtctgaatctgtctcagtcttttagtcagataagatttccattgtgcatttttgttatttttgtagactgtacccaaatttatttacttagtagtctctgttgatagtcatttaataagtattgccaaattgtccttcataaagattgtacaaattgatactaccaaataccrtgaacgatagtactgtttttccacacccttattacattgtactatcatctttgccaggtgaaaataatacctgattgttaactagcatacctataattataaataaggttgagttttcttatgttttggtcaattatgatctgtgtcttttaaaatagtcttttctcctattttctgcttacttttgttcaggtcatataatggcttgaacccgggacgcagaggttgtggtgagcaacagtgcgagactccatctcaaaaacaaacaaaaaaaaaactttagaatgaaaaaaaatctttctaagcctcaaaactccaaaaaacaatttatgagaaattaacaaatatgataaaatttcaaattactacacatcataaacaaaaaattagaaaatatatttgtaatatatagagagagttctttttttttttttttgagatggagtttcacccttgttgcccaggctggagtgcaatggtgcaatctcggctcacgcaacctctgcctcctgggttcaggcgattctccttccttagccgcctgagtaactgggattacagcggcctgccaccaagcctggctaattttttgtattttttagtaaagacggtgtttcactatgttggccaggctggtctcgaactcctgacctcatgatccacctgcctcagactcccaaagtgctgagattacaggtgtgagcccgacccattctgaagttttaaaagtacagttccatgtttactatttatagtttcatttaaaaatatttattaattttaagtttatattctcaatccagctagaatttaatttaatgaagagtgactttagattgtttttcttagtgactatctagtagtgccaatatttaatgaatgatcaatcttttctccactaataataatgataataagtttaatacatttggttctaattctgaactctttctttctagagatgcatctgttcctatatcagtatcacaatttaatttactttagatttatgagctagtttgatatgttggattatttctctagtcatagccttacaccccccccctcgccccacacacacacacacacacaatttctcagggtatacttctatatttatgctttcgggtgaaactgataataatttcagttgcagaaaactttgggggtagttttgattgtgattgtcttagctgtattaattaatttagggatgattggcatttactgtgttaaatatctcaattagtcttttatgactaaatttcacattttaaacatttttttcatatttttagacatggttttctcaaatgattttattttgcttattggttataccgtgaatacgattcttccattgttttgtaactggatactatatttgtttagaaaagcagaaaatttaaaattagttaagaggattgttttgctgtttgaatggcaagggatatataatagaacatccacatggctttgctctaattactgtgttttcatcaaaactttttaaaattaaaaacatttaaaattaaaaacttggtttattttatcatcatcattcttgtttttaacagacattgcctaagatactgagccatatcgccccagcattttgcatgagcagctgtagcttcgtagtggaaaaatctaaagaatccacagcacgtgttgtagtttggagggaaataggagtacaaagaagttataccatggagagtactttatgtg

SEQ ID NO: 546596 - DNA, 975 bp, Homo sapiens
tggtgctttcttcagtaacagtatgtgaaatgtggctgactttgagtcccccactgtgtaagtggaattatttttcactgcagcatttctgagtctttttcttgttccttactctgaactgtaaaattaagttcataaaggcatttggcaagggtggaggaagcttccatgttactaatggctagcactgataagttattttcatgtctctttaacaatctgcaaaaaaacatatagaagattgtcagtctccaaggtcacagcgatgactctttatcatgaattttgcaagtttaaaaactaaaatagaaacaatacatagctccacaccccgtaaatgttaatatagtattgcaggaagagagggaagcatctgggaaacaactagaaggataaactgaggctgactattactgtttgccttttctgcatagtacctttttttttttttttttttttttttgagaaggagtctcactctattgccaggctggagtgyaatggcgcaatcttagctcactgcaacctccacctcccgggttcaagtgattctcctgcctcagcctcccaagtagctgggacaacaggcgtgtgccaccacgcccagctaatttttgtatttttagtagagacggggtttcaccatgttggccaggacggtctcgatctcttgaccttgtgatccacccgccttggcctcccaaagtgctgggattacaggcgtgagccaccgcgcccagcctctccatagtacctttctaaatatggaaggctgcacagcaaaattctttttcaatcttcattcatgtttctagaaaatttagaaaatggtgtcagaaaacagctggagaggaacaaaatggttgcttttaagggatgacatgaaattaaaattatattgtaggtataattaaagcttcttagtcttcattaagtgaaaccaagccacatctagcttaactatatcctaaatgc

SEQ ID NO: 546597 - DNA, 975 bp, Homo sapiens
tggtgctttcttcagtaacagtatgtgaaatgtggctgactttgagtcccccactgtgtaagtggaattatttttcactgcagcatttctgagtctttttcttgttccttactctgaactgtaaaattaagttcataaaggcatttggcaagggtggaggaagcttccatgttactaatggctagcactgataagttattttcatgtctctttaacaatctgcaaaaaaacatatagaagattgtcagtctccaaggtcacagcgatgactctttatcatgaattttgcaagtttaaaaactaaaatagaaacaatacatagctccacaccccgtaaatgttaatatagtattgcaggaagagagggaagcatctgggaaacaactagaaggataaactgaggctgactattactgtttgccttttctgcatagtacctttttttttttttttttttttttttgagaaggagtctcactctattgccaggctggagtgtartggcgcaatcttagctcactgcaacctccacctcccgggttcaagtgattctcctgcctcagcctcccaagtagctgggacaacaggcgtgtgccaccacgcccagctaatttttgtatttttagtagagacggggtttcaccatgttggccaggacggtctcgatctcttgaccttgtgatccacccgccttggcctcccaaagtgctgggattacaggcgtgagccaccgcgcccagcctctccatagtacctttctaaatatggaaggctgcacagcaaaattctttttcaatcttcattcatgtttctagaaaatttagaaaatggtgtcagaaaacagctggagaggaacaaaatggttgcttttaagggatgacatgaaattaaaattatattgtaggtataattaaagcttcttagtcttcattaagtgaaaccaagccacatctagcttaactatatcctaaatgc

SEQ ID NO: 546598 - DNA, 954 bp, Homo sapiens
catgtaattaagatacagaaaaacaagagaggtgaaaaaatgctgtacagatcacactggcaagtagcatatgcagttgtgaaaaatcaggaagaatttcatggaagaagagacacattttgacaggcttgaaagctgggtagtatatcaacaggcatgcgcagagaagtttgggcattcaatagtgggggaagtaagtaagtaaaaccttgagtagcaggccttcttaagtaacaatttctgtttcctcagattttgggtgggtaactaattggtttacgcgtttgtataatttgaccagtttggggggtttgggtgtgttcgggttttgtgtttttttgtttttttgtttttcagacaggatcttgctctgttacccacgctagaatacaatggtgtgatcgtagctcactgcagccttgttttctcctttgctagctttacaatgtaaggcaagtagaaaggcttccttatgaagatttgcctgacatcttcacactttcctcactcatgcgatcctctcacctcagcctcccaagtagctaggaccacaggtgtgcaccatcatgcttggctaatttttaattattttgtagagacaggggtctcactacattgctcagactggtcttgaactcctggcctcaagcaatcrtcctgcctcagcctcctaaagtgctggaattacaggcatgagccactgagcctggcataatttgaccagtttgtgaaaagactagagaattgactcccaaactttttgatctaaggtctcctttacactctgaaaaattaaggaccctcaaaagctttctaaattttatatctattaatagttatgatattcaaaattaaaatgaaattttttaaaatattaattcattttaaaataataaacctattacatattaacatacataacattttcaaaaaattaatgagtgtcattgtttt

SEQ ID NO: 546599 - DNA, 954 bp, Homo sapiens
catgtaattaagatacagaaaaacaagagaggtgaaaaaatgctgtacagatcacactggcaagtagcatatgcagttgtgaaaaatcaggaagaatttcatggaagaagagacacattttgacaggcttgaaagctgggtagtatatcaacaggcatgcgcagagaagtttgggcattcaatagtgggggaagtaagtaagtaaaaccttgagtagcaggccttcttaagtaacaatttctgtttcctcagattttgggtgggtaactaattggtttacgcgtttgtataatttgaccagtttggggggtttgggtgtgttcgggttttgtgtttttttgtttttttgtttttcagacaggatcttgctctgttacccacgctagaatacaatggtgtgatcgtagctcactgcagccttgttttctcctttgctagctttacaatgtaaggcaagtagaaaggcttccttatgaagatttgcctgacatcttcacactttcctcactcatgcgatcctctcacctcagcctcccaagtagctaggaccacaggtgtgcaccatcatgcttggctaatttttaattattttgtagagacaggggtctcactacattgctcagactggtcttgaactcctggcctcaagcaatcgtcctgcctcagcctcctaaagtgctggaattacaggcatgagccactgagcctggcataatttgaccagtttgtgaaaagactagagaattgactcccaaactttttgatctaaggtctcctttacactctgaaaaattaaggaccctcaaaagctttctaaattttatatctattaatagttatgatattcaaaattaaaatgaaattttttaaaatattaattcattttaaaataataaacctattacatattaacatacataacattttcaaaaaattaatgagtgtcrttgtttt

SEQ ID NO: 546600 - DNA, 569 bp, Homo sapiens
gcctgtaattccagcactttgggaggccggggcagacggatcacctgaggtcaggagtttgagaccagcctggccaacatggtgaagccccatctctactaaaaaatacaaaattagctgggcatggtggcggtcacctgtagtcctagctagtcggaaggctgaggcaggagaatggcttgaacccgggaggcagaggtggcagtgagccgagatcacgccactgtactctagcctgggtgacagagcaagactccgtctcaaaaaaaaaaaaaactcttttgaggggttttataaattctctctagtggatgtgtgattaccacatgtcctagccttgccgatgctttaatgtcaatttcctggctttaragtgtgagaagcaaagaaaaaaagattcaaatatctaaaggcttaatttctaattatttttataacccagaagtagatgattctgtgtacatcgttgagtgctggtttgattttcctctgtgttcttccttcttcactcctactgggaagtagaagcaaacaacttttggggactcttcctacttcttttctgatct

SEQ ID NO: 546601 - DNA, 686 bp, Homo sapiens
ctatttgattaaaacataatacttcaaccttcttattgagacacacaatattagaatttagctcatcttttaaaattaaaaataaacgtataagagaaaatgaagttctgtgggaaccaaatcaatgagccgtcctgctatatacatgcttactactatacatgtttagatacatatataataatattttgttagggagctcagtatttgccacagtcagtaaactggttgactccactatttaccctgatcatcagtatatactgagcatattattcccctttaataactgattgtgggttttgaaatactgactgaatctctgtcattttttattcttcacataaaaatctytggatggtagtgcagtcagtgaacttcttgtatttactacctactacttgacaaagctaccaatattgcagtttaaggcagacagtggttgtcagtcatttaccagctattgaggttttctactgctggttctggtggacattagggatcccttggttcagtcattaccaccccaaatccaaaacccactgcttccatcagtttcccaagagaaaagacacaggatctgaaccagccaaatgtacagccatgaccacactaagccttctgttctaacactcatctgctcccctatctacctaggctgaacaacacagaaatcagagccctga

SEQ ID NO: 546602 - DNA, 686 bp, Homo sapiens
ctatttgattaaaacataatacttcaaccttcttattgagacacacaatattagaatttagctcatcttttaaaattaaaaataaacgtataagagaaaatgaagttctgtgggaaccaaatcaatgagccgtcctgctatatacatgcttactactatacatgtttagatacatatataataatattttgttagggagctcagtatttgccacagtcagtaaactggttgactccactatttaccctgatcatcagtatatactgagcatattattcccctttaataactgattgtgggttttgaaatactgactgaatctctgtcattttttattcttcacataaaaatctctggatggtagtgcagtcagtgaacttcttgtatttactacctactacttgacaaagctaccaatattgcagtttaaggcagacagyggttgtcagtcatttaccagctattgaggttttctactgctggttctggtggacattagggatcccttggttcagtcattaccaccccaaatccaaaacccactgcttccatcagtttcccaagagaaaagacacaggatctgaaccagccaaatgtacagccatgaccacactaagccttctgttctaacactcatctgctcccctatctacctaggctgaacaacacagaaatcagagccctga

SEQ ID NO: 546603 - DNA, 563 bp, Homo sapiens
aaatataggagatcccaacttataatatagaaattgttaggtgaaggtacatcaacaagttgaaatatttagagcctctaaaattaaggatatgacatttattttcaataatatgaagaattacgtaaattatgttaagtgatgcagtaatatgtgaaatattttgggtatgcttccaaatatgcaggaaatatagatacctaggaaaaaggagggaagaaaatatatcaaaatactaacagcagttaaatctaggtgatggtattatgagtcacatttatctttctttttacmctttttgccttttgcaaattttatgcaataaataatatagtgcatgccgtggtgctccatccagatatcccatcccttaatccgctttcaggactgaaacactgctcctttttccatcacctccagctattgggagactaaagttgcttccttcttttttcttttaagacatagtcttgctctctcacccagaagtgcagtggtgtgatcacagctcacttcagcctcaacctcccaggttcaaacaatcccccaacctcagcctactg

SEQ ID NO: 546604 - DNA, 563 bp, Homo sapiens
aaatataggagatcccaacttataatatagaaattgttaggtgaaggtacatcaacaagttgaaatatttagagcctctaaaattaaggatatgacatttattttcaataatatgaagaattacgtaaattatgttaagtgatgcagtaatatgtgaaatattttgggtatgcttccaaatatgcaggaaatatagatacctaggaaaaaggagggaagaaaatatatcaaaatactaacagcagttaaatctaggtgatggtattatgagtcacatttatctttctttttacactttttgccttttgcaaattttatgcaataaataatatagtgcatgccgtggtgctccatccagatatcccatcccttaatccgctttcaggactgaaacactgctcctttttccatcacctccagctattgggagactaaagttgcttccttcttttttcttttaagacatagtcttgctmtctcacccagaagtgcagtggtgtgatcacagctcacttcagcctcaacctcccaggttcaaacaatcccccaacctcagcctactg

SEQ ID NO: 546605 - DNA, 602 bp, Homo sapiens
gccaaaaatagaaaagtactgttcctagatatttaaacttagctgtattattcaagtttaaataacccttatcattctttgaaggacagaaatggctaataaatagggatatgctaatcacacaatgttgcattaaaatggaaattattttagtttatcttcacaagactaattttaaaattattttaatgaattccaggaggataaaagaatagagtctctctgcagtctatattaactcttcctagtaayttggatttgtttaaagctattcttctacatagcaacagttgcctgaaatctaggtgttttggacaaaaaaaaaaaaaaagattactgaatatagtttgttgaattcatcattaaattcaagatctatctttctttttttaagaataaacatctctttgacatgttatgtcatgaatccatgttccctaaagtgaaatgtttgattgaagaaatcatctgaaaattttaggatacaagactactagctccttgagggcagtaattttgtcttaattgccttttagttcagagtctagcatagttcctggcgtacacccaataaatacttgtagagtgaatgaatcaaaata

SEQ ID NO: 546606 - DNA, 1723 bp, Homo sapiens
gttgaagcaatgaaatgaattagagagatcaatataagggatcaggtttgccctttaatattatggattattattatttgctttagtacaagttggattagtcactgttgaatggattggtgtttgcttgtattttgggaattgctatcagtcggatgaggcttttgggtttatattctttatttcctatggatttaactgtgctgtaagttgagtatagtcaattgacttccttctggatactttcagagggccatacctctgtacaggattttcatttgtaactagattcttgcactggatttcatcagcaatgcatactgacagaatatatttggtgttgtgtaatttgggctgcaacccagtagatgatacttaaaagtactggctggcagataggctgttacttagttgggcagctcttttgtatttcaaagtgtttccggcagtgctctatggtgtagggaggggacagagataaacccctcaccaagtacactttcaggcctcagggtagccccctctgatcactgacgctgtgcctgcatttcctttgttaagtgttctcggccatgggttttgcttgggcagaggtcatggtggacagacagtacatacccttcctggactagccttgcagagggaagcacaagtcattcccatgccaacccatgaacctgatggtctcacccttctcagtgttttaagggtgggggcttctcccctactcaagtatgggccacggatctcagttgggcactcccaggctgtgcactgcaactgtggggcacaggaacctggcctgtggctctagcctatggcctcttggggtcaggcactggctacgctaggggatccaaaatgcccccaggccaccagggtagcactcaggctgggcagcagaggttgtactatgcatatgctcctgtagtagcagccaggcagggaccatgggaggagacggcaggcaagggagtctgcagaacagatggagtccaatcccatgggaaagatggccctgctctcttttggcccagtggtcagctgggattagagctactcagaggaagatggggaaccttggggaatgatgcctatggccatcttccattgcagctgccccacacgcaaaaccacctgggtttcacacagggtggagctctgtcttttcctaatctctagacagatctccctgccaattcaaatgcctgagagggtcgttggatctcttatagctagaatcccagaggtccacagcgagagtggcctgccctgccatcacttcacacaccccttycctagaagcagttcagggccaggaactagttccggcactcagcaaccccatgcagggttccaggcttcctccttcttcagctttggcatctgcatcacctcttctcaactcgtggtgttttctctctaaagatctgtttgaaatatgttggtttccttgatattttggtgtctcttggcggtgttgcttcctggatgcttctagtcagccatcttgtctccctcttgagaagtttctctcaaaatggtaacacagaaagacatagtcagtttcctgctccgtgaatgagaatatccagtgaacattttatcataaaccgtaagagtcaatgcccaaagcacatctctctcttaagagaaaagtcatagacaaatcactggacaaatttgaaattttaaaggtaacaattttacaatataatttttg

SEQ ID NO: 546607 - DNA, 603 bp, Homo sapiens
tgagtgaacctgagggacactatgctaagtaaagccagacgcagaaagaaaaatactgcatgatcttacctatatgtgaaatcttaataaatgaaattgaacacagagaaaacgagaatagaataatggttagtaggtgtggcaaggagaggaaatgaagagatataggtccaagggtacaaatttgcagttatgtagatgactaagtctagagatcccatctacaaaaagagggctatagctaagaatatggtattgtatattttaagtctgcaaagagagtagattttaggtgcccttactattaatacaaaaaagaaaaaacaggtaactatggaagataatggatatgttaaattgcttacctgcagtaatcatttcactgtggatatgsatatcaaaacacgttgtacaccttaattttatacaattaaaaaaaggaaaaagaaagaacatggaataaagagggttgcttcctttttctttttctctattttattttctgtctgaaagaaggataaataatatcataaatggtgttgatgaaattctggctgcatggagaatacctaaggagaaccagcaatgcccaatgttggcacc

SEQ ID NO: 546608 - DNA, 270 bp, Homo sapiens
ggacaaccagcccacagaggtggaccatactgtcctctccatctctctcttttttttttttttgagaggagtctcgatctgttgcccaggctggagtgcagtggctcaatctcggctccctgcaacctccgcctcctgggttcaagcaattttcctgcctcagcctcccgrgtagctgggactacaggcacccaccaccacaccctgctaattttttgtatttttagtagagacggggtttcactgtgttagccaggatggttctcgatc

SEQ ID NO: 546609 - DNA, 563 bp, Homo sapiens
aaggatcacttgagcctagcagttcaaggctgcagtgaactatgatcacaccactgtactccagcctgggtgatagagcaagaccctgtctctaaaaaaataacctggatatataaaataagcaaaagtagagttgtttgagttgatgcagtagcagggagtcttagctgagaaatatcttcttggatatttgtagttttcagaaagcaacaagtaaaataccctgaattacaggacagtatctaagatcacccccttgtgtcattgcatcccctgcccaccaacatgctatggtgcttagtactyaatttcattctataccagagaaagaaaggcaacactatgcattcactgaacacaaaccaggcacactgaccaataatgtatgtacaatccctctagtgatggctcaagcatgtctgtatgggggaacagtgacaatcaagtcagtatagtttagggtgctaggtttcctgaagctagataaactaataattttatttatattgtacagcctatttacagtggctctggggatggcgagagagattatggggtgatta

SEQ ID NO: 546610 - DNA, 563 bp, Homo sapiens
aaggatcacttgagcctagcagttcaaggctgcagtgaactatgatcacaccactgtactccagcctgggtgatagagcaagaccctgtctctaaaaaaataacctggatatataaaataagcaaaagtagagttgtttgagttgatgcagtagcagggagtcttagctgagaaatatcttcttggatatttgtagttttcagaaagcaacaagtaaaataccctgaattacaggacagtatctaagatcacccccttgtgtcattgcatcccctgcccaccaacatgctatggtgcttagtacttaatttcattctataccagagaaagaaaggcaacactatgcattcactgamcacaaaccaggcacactgaccaataatgtatgtacaatccctctagtgatggctcaagcatgtctgtatgggggaacagtgacaatcaagtcagtatagtttagggtgctaggtttcctgaagctagataaactaataattttatttatattgtacagcctatttacagtggctctggggatggcgagagagattatggggtgatta

SEQ ID NO: 546611 - DNA, 563 bp, Homo sapiens
aaggatcacttgagcctagcagttcaaggctgcagtgaactatgatcacaccactgtactccagcctgggtgatagagcaagaccctgtctctaaaaaaataacctggatatataaaataagcaaaagtagagttgtttgagttgatgcagtagcagggagtcttagctgagaaatatcttcttggatatttgtagttttcagaaagcaacaagtaaaataccctgaattacaggacagtatctaagatcacccccttgtgtcattgcatcccctgcccaccaacatgctatggtgcttagtacttaatttcattctataccagagaaagaaaggcaacactatgcattcactgaacacaaaccaggcacactgaccaataatgtatgtacratccctctagtgatggctcaagcatgtctgtatgggggaacagtgacaatcaagtcagtatagtttagggtgctaggtttcctgaagctagataaactaataattttatttatattgtacagcctatttacagtggctctggggatggcgagagagattatggggtgatta

SEQ ID NO: 546612 - DNA, 560 bp, Homo sapiens
tgaatttctaacacatttcaccaatacacaatgaaggtgattcacttagctcccaccaaccgtctgcgccaaacactatgtaacatgctgcatgaatgagacgaagcccctgatttgatgatgtcatgataaacgagggaagacagcacagttagactgtcaaagtacaaccgtgatgctggagtgagaatatgccatgcgggtataaaataggaggccagtaaagtgggttacacaggttggaaggaccttacgttaacatggcggaattgtccataacctgtgagaacagagctgtccatgttgcacattttacctagtccttcactcatagtttacttttgttcaatctacccatccaacaatagttaagtcgtcactacttggtgactcaagagaagtcttgatttgagttcccctagaaacacatcttgagacaaggattccagtaaaagtagttcattagcrctgtgatcccaaggaaactccagcaggaggaggaaagaaaggcacttggtaagtagttattatcaaataaattaccactgtggatgaccaca

SEQ ID NO: 546613 - DNA, 616 bp, Homo sapiens
ttgagacagaaatgtcaccatttctaagatgacagcctttcattagctacactctaaattgatgccttccttcttgcagggagcatcgtgggtccctggctgggagctgagaagctccctcatcttatcaggaacactcatccgaatcatttcttcctgaatagatttccacagatgagcaatctcattcatttaggatgctactattcattttcatttcaaaacttgtcatgtccttgctttgtcccccaaatagtggraacaaacatggctctaaatctacaagtgagttcaagtgtctcgagtgcccatattgtgctggacactagaggtggggtaggatgcaaacatagtagatataaagttcttgcctctaatcaatgtatgctctggagatgcaaaacatctcaaacacaaaataaaataatccaaatgctatatggcatggtaaaggagtaatctaggggtggactactctgagagtccaggaaagatggtttcagggactttgcattgttagtccctatagtggattaaatgatggcccaaaacaagatacatccataccaagcccccagaacctgtgaatgtgacctgatttgaaaaagggtttttg

SEQ ID NO: 546614 - DNA, 497 bp, Homo sapiens
ttaattcatttaatacccatcccccacccccaccacactgcttctcttctgctgccctgctgaattatttcaaaataaatatatcattttgaatcatttttatctatgatcattatagtcctgcagcgattttaattttgtgtagtcaaatttattagactttcattttatggtttctggtttatattcactctgagaatatatatagtcatgacaaagttttgaggtgagtaatgtcttaaaattgagccataaagaagctagggtaacttgcctaaggtggcacagcttataaagggtaggagttaggaacacgccctagagtctaatgtagggctccctctcttgaccatcacaccacacctctgcccagggaggctgtaacggccaagctaagcaagacagacctcaggttggcactcgcaatcattcatggctgctgaayggtgaaatcatgcagaagcagtctggcacagtggctgcttccataaaccttt

SEQ ID NO: 546615 - DNA, 627 bp, Homo sapiens
tatataagcttactttctcttatttggtcttctctatgacaataaagccatacgatcactccacactgcagcaagcacttcagagacggccacaagtcatgaaattagrtctgttttataaatgagcaaagtgagggtcaatgaagttgactaataggtccaatatcacaaagctagaaatggtggaactgccagagtctgtgtctgtgtctaagtctacatatatgtctatctgacctcaaaatctgtatttttgcctttataccattctaacttgtgttaaatattggaagaagtatttattcagctagattaacacggccgcagctaagcctcagcccacagttagtctctcctttctatcatctcacctaataactgaaaaatttccgttgtcccagaggtcataaatactactactactgtcaccactactattattatacaataataatgataataataataattgcagctcccacttcagaaaagcttatgatctagcactgttttaagtgttaagcattttgcctgcatgaacttgtttaatctcataaaagttagacgaattaggtaatattttagtctcattttaaagactgggaaattaaagcttagaaacgtgaa

SEQ ID NO: 546616 - DNA, 627 bp, Homo sapiens
tatataagcttactttctcttatttggtcttctctatgacaataaagccatacgatcactccacactgcagcaagcacttcagagacggccacaagtcatgaaattagatctgttttataaatgagcaaagtgagggtcaatgaagttgactaataggtccaatatcacaaagctagaaatggtggaactgccagagtctgtgtctgtgtctaagtctacatatatgtctatctgacctcaaaatctgtatttttgcctttataccattctaacttgtgttaaatattggaagaagtatttattcagctagattaacacggccgcagctaagcctcagcccacagttagtctctcctttctatcatctcacctaataactgaaaaatttccgttgtcccmgaggtcataaatactactactactgtcaccactactattattatacaataataatgataataataataattgcagctcccacttcagaaaagcttatgatctagcactgttttaagtgttaagcattttgcctgcatgaacttgtttaatctcataaaagttagacgaattaggtaatattttagtctcattttaaagactgggaaattaaagcttagaaacgtgaa

SEQ ID NO: 546617 - DNA, 560 bp, Homo sapiens
cttggccccccatttctgagtgcagatttaatcatcatcacttcttccaaagataatgcacattaagcttgagctctggatttaagagtttcttttttcccttttatttttaagcccccatgcaggcattttgtatataaagaaataagtacaggggaaaaatgtttggtgggggaaaaaagggaggctcggggacataccagggaggtggcaagccctggggacatttcaaccctgaacatctggaccctgagtcacatgagtgatgacagcaaaagttgcacaattataaactgggcagatttgaaaattgatcytgaatcagacaaccactaattttcctggtctcctctggcaatcattttttcaaactgttcagggctttaaaatatgaaaataatgaacctgtggcaactcctctcccttcctctcttcactccatcagtttcccaccccctctttgtagaaatcttcttgttggctatctatattcaaattacacttttcaagctgttttctcaataagttcaagaggagttgatttccccccacaattgctg

SEQ ID NO: 546618 - DNA, 560 bp, Homo sapiens
cttggccccccatttctgagtgcagatttaatcatcatcacttcttccaaagataatgcacattaagcttgagctctggatttaagagtttcttttttcccttttatttttaagcccccatgcaggcattttgtatataaagaaataagtacaggggaaaaatgtttggtgggggaaaaaagggaggctcggggacataccagggaggtggcaagccctggggacatttcaaccctgaacatctggaccctgagtcacatgagtgatgacagcaaaagttgcacaattataaactgggcagatttgaaaattgatcctgaatcagacaaccactaattttcctggtctcctctggcaatcattttttcaaactgttcagggctttaaaatatgaaaataatgaacctgtggcaactccyctcccttcctctcttcactccatcagtttcccaccccctctttgtagaaatcttcttgttggctatctatattcaaattacacttttcaagctgttttctcaataagttcaagaggagttgatttccccccacaattgctg

SEQ ID NO: 546619 - DNA, 560 bp, Homo sapiens
cttggccccccatttctgagtgcagatttaatcatcatcacttcttccaaagataatgcacattaagcttgagctctggatttaagagtttcttttttcccttttatttttaagcccccatgcaggcattttgtatataaagaaataagtacaggggaaaaatgtttggtgggggaaaaaagggaggctcggggacataccagggaggtggcaagccctggggacatttcaaccctgaacatctggaccctgagtcacatgagtgatgacagcaaaagttgcacaattataaactgggcagatttgaaaattgatcctgaatcagacaaccactaattttcctggtctcctctggcaatcattttttcaaactgttcagggctttaaaatatgaaaataatgaacctgtggcaactcctctcccttcctctcttcactccatcagtttcccaccccstctttgtagaaatcttcttgttggctatctatattcaaattacacttttcaagctgttttctcaataagttcaagaggagttgatttccccccacaattgctg

SEQ ID NO: 546620 - DNA, 560 bp, Homo sapiens
actggaggaggaaggctacatgagacaaaagttggccatctcccttctgcatatatactactcatggttctccatagccttttcctggtcactactatgatagggcaggaaatgggaatacctccattctgtcctgaagaagctcactgagggacccccagcctagactctgcttcttcaagagcacaatgagggccaggcttcagccctgtaagacaagtccccctgtatattaatacactacacctctgctgagctccacatctgccagaactgggctctaaatatgcatgtgggaccctcagacccccttggcctggtttaagttcacactgtaggctctgggctgccttgatgagtgggaccactgtgcctctgtgacccatgccatgcctgaagacactrctacatctcaccgagtgtcctcattcaacattcagggtcagccctcagagcccagccctggtggccaaagttcccaacctgttggccttgcctttgctgcctccttctccaggtccatctttttcagtgaacgtgcccaggtttggttttccaca

SEQ ID NO: 546621 - DNA, 560 bp, Homo sapiens
actggaggaggaaggctacatgagacaaaagttggccatctcccttctgcatatatactactcatggttctccatagccttttcctggtcactactatgatagggcaggaaatgggaatacctccattctgtcctgaagaagctcactgagggacccccagcctagactctgcttcttcaagagcacaatgagggccaggcttcagccctgtaagacaagtccccctgtatattaatacactacacctctgctgagctccacatctgccagaactgggctctaaatatgcatgtgggaccctcagacccccttggcctggtttaagttcacactgtaggctctgggctgccttgatgagtgggaccactgtgcctctgtgacccatgccatgcctgaagacactgctacatctcaccgagtgtcctcattcaacattcagggtcagccctcagagcccagccctggtggccaaagttcccaacctgttggccttgcctttgctgcctccttctccaggtccatctttttcagtgaacgtgcccaggtttggttktccaca

SEQ ID NO: 546622 - DNA, 607 bp, Homo sapiens
ccaactatcctggtttgtccaacactgttctagttttagcactgaaagtccaccatcccagaaaactgaacccccttgcccacsccccccgcccgcctccactgtctcaggcaaaccaagatggctggtcacccacccaaaagggctattagaaacactgtactatgaaaaaagactgtgattcagcatttatgaaattcataactgatagacatgacttttacttggggaaaactaggtgatgattttttctctatgtaattttagggtgccatgcataagaactcaactttcttcctctaataaagccgacatgttgacttataaaagataggaaacaggaaactaataacaataatagtgacggttaacatattgggcatgcactatattccaggcactgttctaagtgctttacataaataagtcatttaatcttcacaacagccttattatattcatccccattttacagatgagcaaatggaggcacagagatcatatacataataaatgtacataatggaatttggatttgaactcaggctgcctaggtccaaagtccatgcttttaaatatttcctatatataatgtataataactcat

SEQ ID NO: 546623 - DNA, 1033 bp, Homo sapiens
gacttcaaggcatctagttgtagacctcttcatagacagatagttgggtttccaaggtggataatttcctttccatttctgagatttatcaatatggtagcttctatggactgaatgtttgtgtccccccaaatttatatgttgctaatccccagtgtgatgctattaggaggtgatagggattaaagggatgaatgggattagtgccctgataaaacaggccctagagagcttctttgccccttctatcatatgaggatacagcaagaaggtgccatatataaaccagaaatcaggtcttcaccagacaccgaatgtggtggtactttgattttgggcttaccagcctcaagaactctaacagagtaaatgtgtgttgtctaagctaccaagtctgcagtaattagttataacatcataggaaaccaatatagaattatttgataacttctgacagggcaatgttgggaggcaggtagcattaaagggagacgattattattttgggacagggtctcactctgtcacccaggttggaatgagatggcaccattacagctcactgtaacctcaaattcctgggctcaagcactcttcttgcctcagcctcccaagtagctaagactacgggtgagtgccaccatgcctggctacatttttaatttttggtagagatgggattttgctatgttgcccaggctggtctcagactcctggccttaagtaatccttccaccttggcctcccaaaatgttgggattatgggtgtgagccactgtgcctagcctagagatggtattttaactctccctgaacactgctgctgaatgaattccccctaaaaatacaccattgatcataatcttaaccctgttcaaaatcctctgtagatttttttyttgattactttaaaaaggcctaattagcttcttccaaattctcaccacacctccctttcagccctatcacatgctattgttccttttacaccaaaccagacacagctcttccttatgcctcccatgtacaagct

SEQ ID NO: 546624 - DNA, 911 bp, Homo sapiens
aaatattttttatgtttgtcattgaatcttgggttttttcttttttggtacttagtatgtctataagcatatggtgttttttttttttacatttaagaaaaccaaggggaaattgacaacataaagttaataattttagagtgaacagttcagtagcgtttactatattcacattgttttctgtccaattcacaacattttcatcagtccaaaggaaaccccacactcattaagcattcactccccattcctccctccgccagccctggcaaccacagtctgcattctgcctctgaatttacctattctgcatatttcatgtgaatggaatcataccaaatatgcccttttgtgtctggcttctttcactcagcataacattttcaaggttcatcagcatcgtagcacgtgtcactacttctcttctgcttgtttgtgggtgaggggctgaattatattttactgtatgtctctaccataatttggtcatcctttcatccattgatggacaaggatgggctgtttctaccttctctggctattttgaatagtgctgctgtggacctgcgtgtacrtgcatttgtttgagtacctgtttttttaagaatataatcttagagcattgcttaaggatggacttggggttatctgtatctgggtccttgctactcagagagcgatctggagagcagctgcatgagcatcgccaagcagctggttagaaatgaccattgcagacccaccccagacctattgagttagactctgcacaggtgaatcagatgcatattaaaatttgaggagtagtgatctagtcagtctttggactggctgttttttaatgtatttattttaattaggaaatgtaattttcatatattttagtccaagaaaatctcgagcagcacaca

SEQ ID NO: 546625 - DNA, 649 bp, Homo sapiens
ttgagcccttgcagtctgatgaccttttcctcccctttactggaatggtgcttctttcagagcacagctgatttcctcctttgcataccctgctgggcaccagtggaacagtgaaaggtgaattctgtctatgccttccttgtacaacatttaacaaggagttacctgtgggatgaaaaggggacattcttggttctmtgggagcatatatcaaggcaatctaatttagtctggagacaaggaagacttctcagtgaaatggtatttcaggtgaagcttgagggacttagtgggctttccatgggagaatggcacatttgaacgcctgaagctgagaaatcaccatattctcatgcatagcactggagtgggccacagtgttctttttaaaatttgttgagatgccccttgaaagaatgctgtgtattcccatcacacattcttaaactgatacttaaatgtttttctcagctgggcatggtggcctatacctgtaattccagcacttcaggaggccaaggaggaaggatcacttaagcgctttgtagagtgaggcctccatctctacaaatatatttttttaattagctgggtgtgattgtgcatgcctgtagccccagctactcaggaggctgagttgggaggattg

SEQ ID NO: 546626 - DNA, 649 bp, Homo sapiens
ttgagcccttgcagtctgatgaccttttcctcccctttactggaatggtgcttctttcagagcacagctgatttcctcctttgcataccctgctgggcaccagtggaacagtgaaaggtgaattctgtctatgccttccttgtacaacatttaacaaggagttacctgtgggatgaaaaggggacattcttggttctatgggagcatatatcaaggcaatctaatttagtctggagacaaggaagacttctcagtgaaatggtatttcaggtgaagcttgagggacttagtgggctttccatgggagaatggcacatttgaacgcctgaagctgagaaatcaccatattctcatgcatagcactggagtgggccacagtgttctttttaaaatttgttgagatgccccttgaaagaatgctgtgtattcccatcacacattcttaaactgatayttaaatgtttttctcagctgggcatggtggcctatacctgtaattccagcacttcaggaggccaaggaggaaggatcacttaagcgctttgtagagtgaggcctccatctctacaaatatatttttttaattagctgggtgtgattgtgcatgcctgtagccccagctactcaggaggctgagttgggaggattg

SEQ ID NO: 546627 - DNA, 641 bp, Homo sapiens
taaaatcctctcattggtctctgaataattatttacataaattattagaatgtcaccaaaggatgaaagtcaaactgataggtatatttaaacataagtaagtaaataattgtgcatcgttgtcctgtaggaacttggaataacttgcagtgtcttgcagtattgtgaaaccagcaacttgttcacaattcttctgaatttcttgggaaatttgaagtggagtacctgtaccaacatgaaatgacacgaatttaagtgacgctcaacaacgaaaagcaaaaagaaccaaagaggaagcaactgaaacaacatctggatgtatttaaaaatatacaatgcctccaaaatcaggtgtcattaatgaaaattctgaagaaatgccacyggacatagccaacgcacctacgctgttgttattcatttcctgcttttcacagaaaacaattttgttgcatggaagattggtgagttaaaaaaagacctgccctgggtgtcaagcacagtagttacaccgctggttctgctccctctgcttgggatacatgggcagggtgccctggtggtagggccttggtcaccagcaaagtcagttcccatgggatcctctttctgagctgatgcccactcccctgaagaagggg

SEQ ID NO: 546628 - DNA, 641 bp, Homo sapiens
taaaatcctctcattggtctctgaataattatttacataaattattagaatgtcaccaaaggatgaaagtcaaactgataggtatatttaaacataagtaagtaaataattgtgcatcgttgtcctgtaggaacttggaataacttgcagtgtcttgcagtattgtgaaaccagcaacttgttcacaattcttctgaatttcttgggaaatttgaagtggagtacctgtaccaacatgaaatgacacgaatttaagtgacgctcaacaacgaaaagcaaaaagaaccaaagaggaagcaactgaaacaacatctggatgtatttaaaaatatacaatgcctccaaaatcaggtgtcattaatgaaaattctgaagaaatgccactggacatagccaacgcacctacgctgttgttattcatttcctgcttttcacagaaaacaattttgttgcatggaagatyggtgagttaaaaaaagacctgccctgggtgtcaagcacagtagttacaccgctggttctgctccctctgcttgggatacatgggcagggtgccctggtggtagggccttggtcaccagcaaagtcagttcccatgggatcctctttctgagctgatgcccactcccctgaagaagggg

SEQ ID NO: 546629 - DNA, 1528 bp, Homo sapiens
aaacacaaaagcctgttccatgaccctaaagacaggatttccttgaatgacgcgctaatgaaaaatgcaaaccagtggaagttttgactcattgcaccagggtctgcaacattccaaccaaagatctgccctggaccaagagagaaatcactcctcaaatcaaaagttacccttaaccccttacgttgagaatatttctgcttttgtacaacatggaaacagaaaaagatccatccccagaaatacctgatttttactaatacgaatatgaatttactaatatgaatagctccctttgacttggcatatagtgtctgattacgtgtgttgatcacaaaacttaccttcaaaatgcccaaattcagagatcaggtggccaggttctggaccaaagggccacacttttctcctagctatagctaactgaaccagggaaggtagcatgacccaaaggcttcccagcaacccaagatgtggctggaggaaaaaaagatgagctgggccagtcagatcccaccctctcaggaatttgaactagagaagagaatttgacagagaagagaccatgatgggccatgcacaaattttactgaaggaacacaaactacaactaggtgtagaaaaaagatgcaacaagcaaaggcaagtctgggtacagcatgagtgtgaagagaacaaaacataaatacaaaaaagaagacatccttgagagacaccaggaggtggctggaattaatcccccaccaaccaccacttttgagtaagtttaaatgagcctttgctcacttagggagcctaactgaaatggttctctctgttattttatttaagcctaaaaaccctatgaagtgagtattattaacctctgcaggccacagagctattaagtagcaagatcagggaatcaagctcagcaatgtcttgctctacatcctagggcttattcaccatgctatatgcattccacaataacaacttccagygccttctaccaactatgcacagagggacactttacatctgttttacaacaaatttgccttgaaaagtgggcatatttcacagatgaggaaaccgaggttcagagcagttcagtgtgtctaaagtaacgtagacaataatgacaggccaatgactcacacacattcttcttgccacagacctctgtggtgcacacactgacaacttaggttctagcccctgttaaaactagtgaggaggaaaaaaccacaactggaaaaggcagaggattcctaaatatgatggacaggacatggtgtggaggtcaacagagagacacaacacacatgtctttcttgagtgctacctccagataaggagaagagaatgaaatttcagaacatcagagatgggcttaacctaaaggcaaatcaaatcaagaatgctagctaaacaacggaggctcctaaataggattggaaatggagagagaaaagtgctgatgtttcatttcacctggtccttccatggttgacctgtcagaaaacgctgctgggatctatatagg

SEQ ID NO: 546630 - DNA, 542 bp, Homo sapiens
gcattattgagttccagttttcttctgtacagctttaattcttgatgcttttaatatagaggcagatttatttgacagatatttattgagccctactctgggcctaacataggccctgccctcaaaacgtatacacacctaacagataatttatgcctacgtaggagagcagacttttgcgagctagttttatgcagtaccttttctttggcttgggaagttgatagcttggtggtgttttcttgsatggactaaatccttagaattgtttaggagatattggtcgaaggtggtatgttaaatttttgccaaggatctgaactgtgaagtaacttgtcaagtggggcccaaacctttcaaagtttaggatttacagatctttcctgttctttggtcaaattccagctgagaaccatgcagccattaagctgtaggcaccgtagaagacgttaaatgtttctgacagaaatctttataagcacaggagaatcttaaggacactttttatagtctaaaacagcacagataaacatcttaaaacc

SEQ ID NO: 546631 - DNA, 698 bp, Homo sapiens
cctcaactaatcaactgtttatatcacttatatgactgaaaagaaaaataaaggacttttatttattttagtacaatttactttgttagttgaattcatgtaattaaatgcttaaatgaatgtttgtaattgtgtagacacagccatggatttgcttctttgtttatcctcagaattgatatgaattctgagatggggtctattccatctctttcctaaatatacacttttgtttttagctaaaatagaaaatattttcctggctgggtgtggtggctcatgcctgtaatcccaccactttgggaggctgaggcgggtggatcaagaggtcaggaattcgagaccagcctggtcaacatggtgaaaccccatcgctactaaaaatacaaaaattagccgggcgtggtggcgtgtttctgtaatcccagctactcgggaggctggggaaggagaatcgcttgaacctgggaggcagatgttgcagtgaaccgagatcgcgccactgtactccagcctgggcaacagggtgagactctgtctcaaaaaaaaaaaaaatcttttttcagaagtaaaamattagccatgtcattttatttcccaataagaagttataccttagtatttatattatttagcttctcatcatgctcaattatatttatggaaaacatgatgttcaaagaaaagtgtgaagatca

SEQ ID NO: 546632 - DNA, 530 bp, Homo sapiens
ccatgcaaaattaaaaagttctagagatctgcttttcaacattgtacttataattaccaatactgtactatacgcttctaaatttattaaaagggtagatctcatgttacaagtttttttaaacacaattaaaagaactctaaaagaagtaaaatgagaggaaaattgtctcaattaagagtagagaattggcacagcaataaacaaatggacctattaaaataaaaaaaaaaaaaaaaagagtccagaaacagatcaagtataaggacacagtatagcaccacaaatcaatgtgacaaatgttttgtgggctttttgtttgttttgttttgtttttgasatagaggctcactttgtcacccaggctggagtgcagtgatgtgatctcagctcactaccacctccacctcctgggtgggttcaagcagttctcctggcccagcctcctgagtagctgggactacaggtgcctgccaccacacccggctaattttttgtatttttagtagagatggggtttcaccgtgtta

SEQ ID NO: 546633 - DNA, 543 bp, Homo sapiens
tactttattaattattaattgctaaacctattatacaaacttatwgttagtttcataaggtcatctattctttcagatctttactataaactggaattgttgtatcactaccagatcatgggccctatagctttattactgactgatcaagcttgatgccttatcccattttaattctactgcttagtgagtggttttaggatttccttaggttaagaatttcttcacttcttaggttaaaacagcagccaggtgcagtggctcatgcctgtaatcccagtactttgggaggctgaggtgggaggatcatttgagcccaggagttggagaccagcctgggcaacaggcaacaaagcaagaccccatctttaccaaaagaaaaaaaaaatacacctggcacggtggctcacacctgtaatcccaacactttgggaggctgaggcaaatggatcttgtcaggtcaggcattcgagaccagcctggccaacatggtgaaacaccctctctcctaaaaatacaaatttagccgggtgtggtgatgca

SEQ ID NO: 546634 - DNA, 543 bp, Homo sapiens
tactttattaattattaattgctaaacctattatacaaacttatagttagtttcataaggtcatctattctttcagatctttactataaactggaattgttgtatcactaccagatcatgggccctatagctttattactgactgatcaagcttgatgccttatcccattttaattctactgcttagtgagtggttttaggatttccttaggttaagaatttcttcacttcttaggttaaaacagcagccaggtgcagtggctcatgcctgtaatcccagtactttgggaggctgaggtgggaggatcatttgagcccaggagttggagaccagcctgggcaacaggcaacaaagcaagaccccayctttaccaaaagaaaaaaaaaatacacctggcacggtggctcacacctgtaatcccaacactttgggaggctgaggcaaatggatcttgtcaggtcaggcattcgagaccagcctggccaacatggtgaaacaccctctctcctaaaaatacaaatttagccgggtgtggtgatgca

SEQ ID NO: 546635 - DNA, 543 bp, Homo sapiens
tactttattaattattaattgctaaacctattatacaaacttatagttagtttcataaggtcatctattctttcagatctttactataaactggaattgttgtatcactaccagatcatgggccctatagctttattactgactgatcaagcttgatgccttatcccattttaattctactgcttagtgagtggttttaggatttccttaggttaagaatttcttcacttcttaggttaaaacagcagccaggtgcagtggctcatgcctgtaatcccagtactttgggaggctgaggtgggaggatcatttgagcccaggagttggagaccagcctgggcaacaggcaacaaagcaagaccccatctttaccaaaagaaaaaaaaaatacaccyggcacggtggctcacacctgtaatcccaacactttgggaggctgaggcaaatggatcttgtcaggtcaggcattcgagaccagcctggccaacatggtgaaacaccctctctcctaaaaatacaaatttagccgggtgtggtgatgca

SEQ ID NO: 546636 - DNA, 543 bp, Homo sapiens
tactttattaattattaattgctaaacctattatacaaacttatagttagtttcataaggtcatctattctttcagatctttactataaactggaattgttgtatcactaccagatcatgggccctatagctttattactgactgatcaagcttgatgccttatcccattttaattctactgcttagtgagtggttttaggatttccttaggttaagaatttcttcacttcttaggttaaaacagcagccaggtgcagtggctcatgcctgtaatcccagtactttgggaggctgaggtgggaggatcatttgagcccaggagttggagaccagcctgggcaacaggcaacaaagcaagaccccatctttaccaaaagaaaaaaaaaatacacctrgcacggtggctcacacctgtaatcccaacactttgggaggctgaggcaaatggatcttgtcaggtcaggcattcgagaccagcctggccaacatggtgaaacaccctctctcctaaaaatacaaatttagccgggtgtggtgatgca

SEQ ID NO: 546637 - DNA, 1865 bp, Homo sapiens
ggtgattgttacattaatgcctgatcaaacttaacctttttggattttttcccacatttcacagaagagctaaatgaggtacaaagttgtgctctgaatggataagttaactggaaataagtctaagcccaggtaatgaaaaccagatactttaaattatttccattcatttgatcatcccacttttcatatgatttcgagtttggtgctatcatttgctgttgtcactcccatttaccagaaagtggtgtaagccccttctctctttcctagagaaatgtgggggtgttggtttagtcatctcatagtttacacaaagcatccacatactacagtattcagtccgatggaaagataatgtttttttcttgagaataatttttgagtagcctgctgatgggaggattgagagctaccacagctcatgtagtaatctctctcactgtctctgtctctgtctctgtgtttcttgcttgtgtcataatatcaaagaagttaggaaacaatgttgtttccctttttaatgttttcatatagatactcatgatgccatcatttgtctgtaatcactgcctattattacctattttaactaagtggatttctttgctcttgtgttcttatttttgctattgctaatggccatcattttgtttataaagtcttttgggatgctattaagtctttcctcttcctttagttgaaaccaaaagttttttccaatttgggctgcaattagtctctcattacgactgttagaggctacatcatgaagtcctttttttttaatgttttgtcaggctaggagatgactggactaaaataaaaataaaaaggttagcaagaatctcattaattctgattttaaaaagtgactaagtggcatttgaacatatttagatatgataagaagcctttttgtcattacaaagttgaaaaatggcttggcatatgcatttatctatgttgtgctgtcatcactaaagaatagaaaaaatagaaagttggagaaataagcagctaatatttataacaaagttgtttgacacatctattgaataagaagttagagtaataaataaaaggagaaattgaggagcaaaaacaaataactgaccttttcatcgggttatgaatgcacacacaaacctcttaaaagatatttattatatataataataatagtgtcattcattgtactgactttgtgtccagttcttaacacatttcatttcttaattttgaaggaaattctataatgtgggtttcattctccacaaaacttcccatagactaagggtctcaaacttgggttaatatagctcctaagtggcagagccaaggtccacgttcagataagtcttactccagcacgttcatcctttccaatgtgtatgcctgtgtaatatcgtaatttaggagaagccattttctccacagaacatggttccattagtaataataacataaattaattcattaagagatcatatattgagaagtataaataagcatattacttgccctcatgtggtttacctttgagcgagaaacacagatactttaacaagtaacagactatgataggacmgccaaaaggatgttcagagatgttcagagaagaaatgattaatcctacttagagggaaggaagagtgcttaggaaagaacaaaaacacagaggtgtgacacatcaggttctttaagggaagagcaaaattttcagtattcccagagggtaagggtgggcaaaagagagaagagaggggcagaaggattgttgccctgggggaagcagggagtgggggtttccctgccattctgactacacctcttcctacagagatatccttaaactagtatca

SEQ ID NO: 546638 - DNA, 1555 bp, Homo sapiens
ccttcttttggctgcttgagaagtttctggcctcactattcctggtgttgcatagtcatagccatgtgaatcttgattgcaaacctggatgtaaatatgaaagcaacagaaagaacaaggtccttggcctttaccacacagcctctctcagaccagaggagaaggactgcttgggttgaaaatcaagagattaaaattctagttctagctctgctgcctgtttaatcttagataagtcatttcttcttccaactcctcatcttaaagaattgaactagattgccaggcgcagtggctcatgcccgccatcccagcactttgggaggctgaggcgggcagatcacgaggtcaggagttcaagaccakcctgaccaacacagtgaaaccccatttctactaaaagtacaaaatttagctgggcatggcggcaggtgcctgtaatcccagctactcaggaggctgaggcaggacaatagcttgaacctgggaggcagaggttgcagtgagccaagattgtgccactgcactccagcctgggtgacagagtgatccagactctgtctcaaaaaaaaaaaaaaaaaggaacttaactagatgttttccaggacccagcttagctctaggagtgcccgatttctctgactttgcagggaaagcatcatggttactgtttaatgagttaggcactcatttccttagttgtgtaggtgaacagggtgtgacagactagaagcagtggtgctagatgccaagagccgactgtcagggcaacagggttaggagtggaagacacactactagaaaagctaacagcaatggaaaagttgggagaagctacttcttagcacagcagggcggggtttattttgtatcagggcaaatggctcttctaggctcaacaatccctgaggacatctctaagttgacattcaacatgtactaagcacttcagagtttctgaagcccgttcgcaggcgttacacccttgaattcatcaacaagtgtgagattgatgggcacgccatagttttataaatgaaagtgaggtctagagagatttaaggatgtgccaatgctaagatgcagagggactcaccacaagtcttttggctttgggcccagtgccatttccactacaccatagctgccaccaacaggatggtcacagttatgatggagttaccaacaatggtcagagcaataggagactgtgcttagaattataagcttcagtgatctggaaactttgctcagccagaatccttctttgatttcaaacaaagaggtataaatcaggcattcttgtggttctgtgtttgcaatcagttactggtgaagtcattaagacaggagtcacaaagcacatacacagctgtgcccaatacatcgtgcagccaagtacacacaataggaggcagtttaacaagtagggaagacatatacctgctccttccgagtttcacctggaggaagagtctacaaagaaagggaagaaggttgcatctggtaacaggtgggggcctgtgcggcttgatagcttaacatgtatcaggcg

SEQ ID NO: 546639 - DNA, 1375 bp, Homo sapiens
ggatccaccgaagccccaacctcagcctcatgcaatatacccttgtaacaaacctgcacatgtttcccctgactgtaaagttaaaattaaaaaacaataaatagataaatacatatgtgcagtacatggatgttgattatgcctcaaaaaactaaacaaaacaaagactatcccactccactcaatgttcattcacttcaatcagaagatgcttcaggctctatccaccttcgaaactcaacggggtcccagcacaaaaattgaacctggcacagcgcctgaggcaatacccgcctcatgcaacgaaacaaccaggcatgacacatacttatccataaaatcttcatacaaaagagttcatacagaagtgttacaggagcctagaaatccttccttggaaattcacacttagctgttattttcaaaaacctaggtaatagtcacttagggctttggaatcaaattgaggggttttttttttctgttccttttcattttatggcatgttatgctttgttaatatattcattgcttcatcaaacatttatttagcacctaatgtacacaaagaaatggactaactgcagttaaggagaaaaaaggtttgcttccttttctgataaaatctgcactaacttgttttaaaacaacttaggtttaaaaaacgagaaaataggggtaaatgcatgaatagagtaaaaaggacctcaaagtaaaaaaggaatgagtgaagcagagtcatcaacaagggttttcagggaggaagggtgtgttttttcattcatttatccatgtgttcatgtattcattcattcaacaaaaattctttaagccattatgccctaaatctgtacacagatattctgcatgaaaataaaagggagtctcagcctcccagccatcttcctttaccctcagtccttctgtgaggagtaaaggtggagatggaagtttggataggaaggagggtttgtatttgagaagcagtgctgaagctgcaactctgtgctggccaaggtgctaggtgtcggagtgccaggaaggatgagactgtggtttccaccttggaggcactcacacaatcaacgggaaagaatcggggaaatacatgattgcaaacacatgataaatattttaacaaaatgcaccagatgccacaggatcataagagagaaagtayctttggaggctagaaaggcttcacggagaaggaagaattgcactgagcactgtggataaggttcccagtgagaagagcaggacaggcatgttcccaggaactcttttgtatggaagttgtgaggtaagaccgatagatattaaaggaatatcgtgtcagcacaggggatggagagcaagaccagcggcagaggaa

SEQ ID NO: 546640 - DNA, 510 bp, Homo sapiens
gatcataatttttccctcatagagaaataaatttgaaaatatctaatctacatcgtttgatttttttacgttactgtttttgtttgtttgtttctttgagacggagtttcgcttttgtcacccaggctggagggcaatggtgcaatctcggctcactgcagcctctgtctactgggttcaagcaattctcctgcatcagcctctggagtagctgggattacaggcacacacgaccacacagagcaaatttttgtatttttagtaacaatggggtttcatcatgttggccaggctggtctcgaactccttgacctcaggtaatccacctrcctcagcctcccaaagtactggtattacaggtgtgagccaccacacccggctgacattactttcttataagtagaaaaagacccactacttttttgtaagttaaaataaaaaaaacaataagtacatttcacctttgaagaaaccactaagactcttgatgggagagacaaattgggataa

SEQ ID NO: 546641 - DNA, 436 bp, Homo sapiens
aaaatccacactaattccaacatctgggtcatctcgaggtcagtctctattgattgcctttttctttgaatatgtttctttatatgtttattataatgggattgaattctgaagattgtaaaactagattttgttctgttcctctgaaaattttgataattttttgttgtatttgttgtattktgcttgattttttttctattgtatactttacaatatattttcctccaatggtattaacatatctatttctcaaaatatttatgtttatgttaaaaattatacaaagtagcttggtgcagtggctcccgtctgtaatcccagaacttttagaggtcaaggcaagagggtcactcgagcccaggagttggaaaccagcctagacaacagggcaagaccctgtctccacaaaaaattattagggtggtacaaaaag

SEQ ID NO: 546642 - DNA, 436 bp, Homo sapiens
aaaatccacactaattccaacatctgggtcatctcgaggtcagtctctattgattgcctttttctttgaatatgtttctttatatgtttattataatgggattgaattctgaagattgtaaaactagattttgttctgttcctctgaaaattttgataattttttgttgtatttgttgtattttgcttgattttttttctattgtatactttacaatatattttcctccaatggtwttaacatatctatttctcaaaatatttatgtttatgttaaaaattatacaaagtagcttggtgcagtggctcccgtctgtaatcccagaacttttagaggtcaaggcaagagggtcactcgagcccaggagttggaaaccagcctagacaacagggcaagaccctgtctccacaaaaaattattagggtggtacaaaaag

SEQ ID NO: 546643 - DNA, 630 bp, Homo sapiens
gccaacatggtgaaaccttgtctccactaaaaatacaaaaaaattagctgggcgtggtggtgcacacctgtagtcccagctactcaggaggttgaggcaggagaatcgtttgaacctgggaggcggaggttgcagtgagtcgagatcgcaccactgcattccagcctgggacagtgcaagactcmgtctcaaaaaaaaaaaaaaaaaaaaaactaagaaattggggacaatttcatattagttttctgccaagtgagtttcaaggaacagtagtcttatgaggtgttctagggcaagtgttctaggttagaggtgcttgggaagtgctatccactattggctacccttagtgatttatggcatatattagtgctgagaaaacttgccataaagttttgttgtgttaaatatgtcattttcctaactttttaaagaagaattacttattatagtttttgttcctttcttccttttgggaaattgaaaagattaatgaattctctataattaaaatacaaagatatatacactggagctcaaagttagggtgaaaaattaagagattaaggggtcttttactttatttctaatttcatgactctttaacttaaaaaaggtatgcaaagcaaa

SEQ ID NO: 546644 - DNA, 1356 bp, Homo sapiens
tggggattatgtccttctttagttaaagatgcacactgaaatacttataagggaaatgatacaatgttgggatttaacttttaaattcccttgaaacaaacagaggccttaaataaagattagcaaaataataaatattgaagttgcatagtagaaatatgtgtctttattatattcttacttattttgtgtatgtttgaaatttttataacaaaatgtaaaaccaaatgactatattctctatgactatcttttattccctggattgagctgagtactaggtgaactcttaaccccctgggaaccaggcattcctcttcttgcctatgtctttctcttactgaaatatatgatcccttcactacctaagtcacatttttctggtgctgatttctaataaactctttaatatccttttattatctttttttgccatagattcaactatagatgtgacttctatgattccaattctgtctgttttcttagtgcaatcaaagcaacagttcttatttacaaactaatagcaattaaactctacttttaccttagttttttgacattggttgcatgtattaaaaatttaatgaaatatgtgtagattgattaatattgattatcaatgcattaaatgtcagaatgaataaactgattaattataaaataataaaatgattaaatgttacagtgtatagggaacacaaccatataatacaataaacacaatttaagtaaatttcataaatgtcaaacaccaggttctattttatgatgccataagaagaaattgctgacaagtatctggggtcatacaaatcagacaacagtaatgtatgactatcattaactaaatagaatataatgtattaattgtaagctacatgaattcttaagctctttatatgcaactaattaaagatttttactgtaattttcatacgcaaagttatttaaagactctttgaaattttatttcaagtccagttgatgaatggctatgtaactgaggcgtttactattttgtttaggttaagccattttcatccaaaacactttcacctgtttagtatgtcaataagacacatgcctttgtctactgtagaaagtcaggatggatgtttgttttatgtcttgatataaaatgccattaaatctttagaagatgctctgctaaatcagtagctactttgttatttaaatgactgtgtggatgaatacatctctttaatgtatttgaaaatattaccattcyttttctgaaaatagttcttattatgatgactttcattttcacaaagctatttatttcattagaaaagtaaaggcaaatcaaatgaattaaagaaatatcaagtt

SEQ ID NO: 546645 - DNA, 1124 bp, Homo sapiens
ggaactgaattactaagtcttgcagttagcaattggcagggcccttactcaaacacaaacacatattatgacataaaagagaatgctattaaaactacatttcaccccaaatttataagttgtattaattttttttattaaaaactgctaataaaatgtttgaggaccactggatttcccattatggaaactctaacacaactttcattctatgttgtttcaagggtatgcaaagtattttaaaaacacaatttttagggaaagaattagaagtaatgattcacccacactttatgttctaacattttttttggtaacatgacaggtttttgatatgtagaacataccaccagataccaactcttctggggagtggaatatatatttcctggcatcactatagaaaattaaagattgctggttatgttattaagacataaatatgtcaaagtgmgatttcccaaaataaaatcttgaagcacagatgcttcaagctttcttatagtaaaatatcttgaaacatcaattctttttttttttttttttttttttgagacggagtctcgctctgttgcccaggctggagtgcagtggcaccatcccggctcactgcaagctccacctcccaggttcacgccattctcccaccacgcccggctaatttttgtatttttagtagaaacggggtttcaccatgttagccaggatggtctcgatctcctgacttcgtgatccacctgccttggcctccagaaatgctgggattacaggcattagtcacccagcccggcccaaacatcagttctttagagcatcctaaagtgctgatttaaaataaaatagtgatagtgattgtatgccaatgtaataaagtgctaggttaacagacaaaattactggatatggaaacacactttgttctttatttaaatgtgaggtacacctgtcaattgtgtatagaaaaacatgatctagctagatttagtgttaatggaaagcatttaaaatttaatttgctgaaaatgttttaggaaaaaccctggaagaatgatgaaataagggataaagcatattctcagtaggcatcagaccatcttagatttctcataacagttggggctttg

SEQ ID NO: 546646 - DNA, 1841 bp, Homo sapiens
cagtaagattccagataaagggaactagcacatagaacactctaaaagctaattcccttctcctttggaatcagaggcttagaattcttccagcttctcttgtggagattaacctgacccttaattttgcaaatgttttaaatgggatttgaatgactaccttgcaggattgttgtaagggctgaagtgctgtatacaaaacacaatcggccgggcgcggtggctcacgcctctaatcccagcactttgggaggctgaggygggcggatcatgaggtcaggagatcgagaccatcctggctaacacagtgaaaccccgtttctactaaaaatataaaaaattagccgggcatgttggcacgcgcctgtagtcccagctactcgggaggctgaggcaggagaacggcgtgaacctgggagacggagcttgcagtgagctgagatcccaccactgcactccagcctggacgacagagcgagactctgtccccaaaaaaaaaaaaaaaaacccacacacacacaatcgtatcatctgatacttgatacttctattcttccccttatgaagggttgtgtttcagaatattatctatcattcttcacctatagggaaatttcctttaacagaatttaagttatttacatttcagtttctataatcatgtttgctgttctcttcaaaggatccctattttttgtcaaaggtgctgtgagttgtggcccacccttgctcagtctcaatcatggaactggaaagcatcaaggtttcataagccattctcatttctgtacggtcctagacccaacggctcctagcagttctccagaacattagttgtggagagtctcaaaacaggcctaaaataatagtgtgaaaagtattacttaaatcgcccagataaaatattttgtctttgactaggaatagtcactacttaactaactttccaccactggctctttccccacttcaccccaaatggttacctaagagctggcaaagcaataaaccctagcgtctactaaacagcatcatgaacagagatggggctcaggtgactttattgaagtataacatccatgtaaaatgcatagatgtacatagtgtacatataccttaatacttctttacaggtaaacaacatctgtgtaaccatcatgaagctcagtaaatagagcctgaccggcaccccaggtgaactcagcttccgcctggtcactactcccaccccaggggaagctgctgtcttctatctttataatttgtctacagtaaaattcgcttttttggtgtatcatcctaggttttgacacatgcagagagtcgtgtaatcaccaccacaatcaagactgcgaaacagtcccactgtcccaaagaaattctctgatgcttttccctgtgtaatccagacctcctctcagccccagtctgtgacaaccgccgatctgttcgcagtgcctgtagttttgcctttcccggaatgtcgtatggagtgtaatgtagcgtttggggtgtggcttagcaaaatgtattgggtaggaatgcatggttttcattgctgagcagtattccattgtgtggatgcactcaccgcagcctattcattcactgcttgaaggactttggggttattttcatttgttcccgtgatagttgtgtatttctttgccaccctagacctacaggaacaagaggcagcaagcagaaaaggggttctgatgctgaaagccatgatgggcccggccccacccccacgcccccacttcatcagtgccgtgagcatccacatgcttagctggttgcacaggagcctgtcatgaaacaaattttaaaggcagagt

SEQ ID NO: 546647 - DNA, 1841 bp, Homo sapiens
cagtaagattccagataaagggaactagcacatagaacactctaaaagctaattcccttctcctttggaatcagaggcttagaattcttccagcttctcttgtggagattaacctgacccttaattttgcaaatgttttaaatgggatttgaatgactaccttgcaggattgttgtaagggctgaagtgctgtatacaaaacacaatcggccgggcgcggtggctcacgcctctaatcccagcactttgggaggctgaggcgggcggatcatgaggtcaggagatcgagaccatcctggctaacacagtgaaaccccgtttctactaaaaatataaaaaattagccgggcatgttggcacgcgcctgtagtcccagctactcgggaggctgaggcaggagaacrgcgtgaacctgggagacggagcttgcagtgagctgagatcccaccactgcactccagcctggacgacagagcgagactctgtccccaaaaaaaaaaaaaaaaacccacacacacacaatcgtatcatctgatacttgatacttctattcttccccttatgaagggttgtgtttcagaatattatctatcattcttcacctatagggaaatttcctttaacagaatttaagttatttacatttcagtttctataatcatgtttgctgttctcttcaaaggatccctattttttgtcaaaggtgctgtgagttgtggcccacccttgctcagtctcaatcatggaactggaaagcatcaaggtttcataagccattctcatttctgtacggtcctagacccaacggctcctagcagttctccagaacattagttgtggagagtctcaaaacaggcctaaaataatagtgtgaaaagtattacttaaatcgcccagataaaatattttgtctttgactaggaatagtcactacttaactaactttccaccactggctctttccccacttcaccccaaatggttacctaagagctggcaaagcaataaaccctagcgtctactaaacagcatcatgaacagagatggggctcaggtgactttattgaagtataacatccatgtaaaatgcatagatgtacatagtgtacatataccttaatacttctttacaggtaaacaacatctgtgtaaccatcatgaagctcagtaaatagagcctgaccggcaccccaggtgaactcagcttccgcctggtcactactcccaccccaggggaagctgctgtcttctatctttataatttgtctacagtaaaattcgcttttttggtgtatcatcctaggttttgacacatgcagagagtcgtgtaatcaccaccacaatcaagactgcgaaacagtcccactgtcccaaagaaattctctgatgcttttccctgtgtaatccagacctcctctcagccccagtctgtgacaaccgccgatctgttcgcagtgcctgtagttttgcctttcccggaatgtcgtatggagtgtaatgtagcgtttggggtgtggcttagcaaaatgtattgggtaggaatgcatggttttcattgctgagcagtattccattgtgtggatgcactcaccgcagcctattcattcactgcttgaaggactttggggttattttcatttgttcccgtgatagttgtgtatttctttgccaccctagacctacaggaacaagaggcagcaagcagaaaaggggttctgatgctgaaagccatgatgggcccggccccacccccacgcccccacttcatcagtgccgtgagcatccacatgcttagctggttgcacaggagcctgtcatgaaacaaattttaaaggcagagt

SEQ ID NO: 546648 - DNA, 1841 bp, Homo sapiens
cagtaagattccagataaagggaactagcacatagaacactctaaaagctaattcccttctcctttggaatcagaggcttagaattcttccagcttctcttgtggagattaacctgacccttaattttgcaaatgttttaaatgggatttgaatgactaccttgcaggattgttgtaagggctgaagtgctgtatacaaaacacaatcggccgggcgcggtggctcacgcctctaatcccagcactttgggaggctgaggcgggcggatcatgaggtcaggagatcgagaccatcctggctaacacagtgaaaccccgtttctactaaaaatataaaaaattagccgggcatgttggcacgcgcctgtagtcccagctactcgggaggctgaggcaggagaacggcgtgaacctgggagacggagcttgcagtgagctgagatcccaccactgcactccagcctggacgacagagcgagactctgtccccaraaaaaaaaaaaaaaacccacacacacacaatcgtatcatctgatacttgatacttctattcttccccttatgaagggttgtgtttcagaatattatctatcattcttcacctatagggaaatttcctttaacagaatttaagttatttacatttcagtttctataatcatgtttgctgttctcttcaaaggatccctattttttgtcaaaggtgctgtgagttgtggcccacccttgctcagtctcaatcatggaactggaaagcatcaaggtttcataagccattctcatttctgtacggtcctagacccaacggctcctagcagttctccagaacattagttgtggagagtctcaaaacaggcctaaaataatagtgtgaaaagtattacttaaatcgcccagataaaatattttgtctttgactaggaatagtcactacttaactaactttccaccactggctctttccccacttcaccccaaatggttacctaagagctggcaaagcaataaaccctagcgtctactaaacagcatcatgaacagagatggggctcaggtgactttattgaagtataacatccatgtaaaatgcatagatgtacatagtgtacatataccttaatacttctttacaggtaaacaacatctgtgtaaccatcatgaagctcagtaaatagagcctgaccggcaccccaggtgaactcagcttccgcctggtcactactcccaccccaggggaagctgctgtcttctatctttataatttgtctacagtaaaattcgcttttttggtgtatcatcctaggttttgacacatgcagagagtcgtgtaatcaccaccacaatcaagactgcgaaacagtcccactgtcccaaagaaattctctgatgcttttccctgtgtaatccagacctcctctcagccccagtctgtgacaaccgccgatctgttcgcagtgcctgtagttttgcctttcccggaatgtcgtatggagtgtaatgtagcgtttggggtgtggcttagcaaaatgtattgggtaggaatgcatggttttcattgctgagcagtattccattgtgtggatgcactcaccgcagcctattcattcactgcttgaaggactttggggttattttcatttgttcccgtgatagttgtgtatttctttgccaccctagacctacaggaacaagaggcagcaagcagaaaaggggttctgatgctgaaagccatgatgggcccggccccacccccacgcccccacttcatcagtgccgtgagcatccacatgcttagctggttgcacaggagcctgtcatgaaacaaattttaaaggcagagt

SEQ ID NO: 546649 - DNA, 640 bp, Homo sapiens
tgcagaacaaaaataaaaaataaaaaaaaacaaaaaaccaaccaacaaaaaaaaaaccaggcaaaagccaacaataaaagaaaaaaaaatgtaccattacttcgacaaggagattgcagcgtcataaatctagagagggagattgcaagtgccatcggtcctctgcactggccaacgcaggcagcctaccccagtgaaccgctaagcttctagaaacctacagaaaatgaaggtgtaagacaagcatagaggtgttctactgaggycctccaaagtgcatttatttaccctaaccgagacgctgattttctatgtcccccgctgctagtgatttagtgttatttttaaaagcataatattggtttttaaaaaattttcagatggcattatctcaccttacatgtaagaaatgattacatacagaagtttcctttaaaaaaaaaatagaggtgtgtctccctatgttgcctaggctggcatggaactcctgggctcaaactaccctcccacctcagcctcccaaagtgctgggctgagagtacaggcatgagccaccatgccagacagaagtttcctaataggtaataatactgtttttttttatttggggcattctattttgccaaacacaaattatagt

SEQ ID NO: 546650 - DNA, 680 bp, Homo sapiens
gctaatttttgtatttttagtaaagacagggttttaccatgttgcccaggctggtctgaaactcctgacctcaggtgatatgcccgccttggcctcccaaggtgggattacaggcatgagccactatgcccggctagttaaatcaatgatgatatatccatagtcattgaaatgatacaaaaaatatttcattatattaaaacatattattaactaaaagcacaaatatctaggatctataacttataaacaccaaaaaaawtttttttttagctaggcacagagaaaaaggagactgtatttatacaacagtggttaattctgggtactagaaataggggtgatcctttttttcttttcctcaatgagataattgaacaagaaaatttaaaatttattgtagcttatagttatgcagatatatagtagccaacagtgccttagactgcagggcattattcctgtctgtaatcttacaaacttaacttctgcctcattcagtaacctcaagtaagttgtttagcctttttgcacatgggtctcctcatctgttaaacgatgataataatacctatcatgaattaactcagggaggttctgtaaacccaatgtttgtaattcactataaactacatagaaaatggcactaatactatttatatctaactatgattattact

SEQ ID NO: 546651 - DNA, 1277 bp, Homo sapiens
ctcttcctgttctattgcaataacatcgtaactgatacccctgtctctctagtcttcaattctgttctctggcttatatgatggcgggaacctttctatctaaaaagcagtctaatcatgtcacttctttgcttaaaatctttcaatgggttcccaccacttactttttctccatcatttggccccgtttatccaatatcatctgtcactccccaaatgttaattccaagatgatttcactttgcactcatgtgtttatrtctctgtgatttttatggtctctgtactcttcacttctcctagaacactcccacttttttcctgtggtcatcctctcctctccagtttcaggaatttttttctgatcttaccaagctagactaatgatcctcaatagatgttcataaatttccatgaaaacttctcttgaataatgctgtagttagtattgataaaagcctttccaggctgggagtggtggctcatgcctgtaaccccagcactttgggaggccaaggtgggcagatcacctgaggtcaggagtttgagaccaccctggtcaacatggtgaaaccccatctctactaaaaatacaaaaattggctgggtgtggtagcacatgcctgtaatcccaactactcgggaagctgaggcaggagaattgcttgaacccgtgaggtggtgcagtgagccaagattatgccactacactccaaactgggtgacagagcgagactgtctcagggaaaaaaaaaagcctttccagtcctcagattcagtaactactcatctagaaaacacctgcattaagtggctaacagaatatagaaacccatcctcaaaagcaatatataccagactagtttatttatcacactagattcaggctgctgctcgtctgacaccccttgcagcactgtctcaagcatttccatattcctctttcactactgggtttttcttttccttgctcttagcccagcagttactcatatagacttaatatgttatgtactcatctccactcaattcttacaacatcgctatgaaacaaggtcagcatctccatcttatagttgaataactcaccaactatatgcagatgacatagatgtatgtgtgagtatatatcatatacgtgtgcttatgatatatacacatcctatgagctccagcttatttaatgtgctctcatatgtcttaaaagaacctcaaaatcagattttgaaaagtgaattcataatttactccccaaactttcttcttctgatgtcacc

SEQ ID NO: 546652 - DNA, 1337 bp, Homo sapiens
aggaaaaaaaaaaaacacaaaaccctagacataataaatgcctgttttctacaaaaacaatgtctaactctgggtggactgatctcttctcaacagcccagggcagggctggtccctcattcacctgtgtccacagggccgaagacactgcacacactaggacaggatttgattgaatttaaatcctgccacccaccaaggagacctsgggatatttaatgtttgagggccacactaaacgatcactgcagagaaccacctcttttctttactgtagtttaagtatgataagtgggctttgctattacttattggaaaaaccagtaagaaaagctaatcttcaggcttcaatgtgatttgacatgcaaacgggaagttttgccaggggttaataaaggttgtgaattccaaattcctagccgaatatggctttgctggtaagccccctggaagggaggttgggagggctgaccagatggtcatcggggcactgggatggaggcacgctggggcctgactgcctgctctgctggagactgcagaatggatggcagatccacagtgcatcccccttccaaacccaggaggcatctgtcgccttctctttggtagacagtctggagacagcagaaaccctctgctctatttttttgccactctaaatatagcagaaaacaaaataaaataaataagataatctttgctgcctccaggtgccctctgagggacagacagctgctccagagttgttcatgaggacaaaaagcccaggcagcctggagacccagctgctctgggtgagccttagctcacttcctgtggttcctgggacttaccaggcccacccccatgcgcatttctccaggcaggttctgaggactctttggacaatttctctttcttctcaacccttcaatctcctaatccacccccctacccccaatattttcatagaaactaagggaattttggaggtgaaagaagtcatctagtttccagtgtccaccctccccattctacagatggggaaaccaaggcacagagagggcagtgccttgcccaaggtcattcggtgagtcagtggtggagcaggcctgaggcccaggtcccccagttcccaccccgttctgcagcccacccctcagtcggccttgggcagggacttcctgtgcgaggggggcacgaggtgggggggcaggctgctgggcagctcgtagccgtcgagcttgatcttgatgaggtgcttggccagcgcgaactcctcctcatcaagcatgccgtcgcagtcgcagtcggccagcttccagatcttgcccaggacgctgttgggcagcttg

SEQ ID NO: 546653 - DNA, 1337 bp, Homo sapiens
aggaaaaaaaaaaaacacaaaaccctagacataataaatgcctgttttctacaaaaacaatgtctaactctgggtggactgatctcttctcaacagcccagggcagggctggtccctcattcacctgtgtccacagggccgaagacactgcacacactaggacaggatttgattgaatttaaatcctgccacccaccaaggagacctggggatatttaatgtttgagggccacactaaacgatcactgcagagaaccacctcttttctttactgtagtttaagtatgataagtgggctttgctattacttattggaaaaaccagtaagaaaagctaatyttcaggcttcaatgtgatttgacatgcaaacgggaagttttgccaggggttaataaaggttgtgaattccaaattcctagccgaatatggctttgctggtaagccccctggaagggaggttgggagggctgaccagatggtcatcggggcactgggatggaggcacgctggggcctgactgcctgctctgctggagactgcagaatggatggcagatccacagtgcatcccccttccaaacccaggaggcatctgtcgccttctctttggtagacagtctggagacagcagaaaccctctgctctatttttttgccactctaaatatagcagaaaacaaaataaaataaataagataatctttgctgcctccaggtgccctctgagggacagacagctgctccagagttgttcatgaggacaaaaagcccaggcagcctggagacccagctgctctgggtgagccttagctcacttcctgtggttcctgggacttaccaggcccacccccatgcgcatttctccaggcaggttctgaggactctttggacaatttctctttcttctcaacccttcaatctcctaatccacccccctacccccaatattttcatagaaactaagggaattttggaggtgaaagaagtcatctagtttccagtgtccaccctccccattctacagatggggaaaccaaggcacagagagggcagtgccttgcccaaggtcattcggtgagtcagtggtggagcaggcctgaggcccaggtcccccagttcccaccccgttctgcagcccacccctcagtcggccttgggcagggacttcctgtgcgaggggggcacgaggtgggggggcaggctgctgggcagctcgtagccgtcgagcttgatcttgatgaggtgcttggccagcgcgaactcctcctcatcaagcatgccgtcgcagtcgcagtcggccagcttccagatcttgcccaggacgctgttgggcagcttg

SEQ ID NO: 546654 - DNA, 1175 bp, Homo sapiens
acatccttgtagaaaataatatgttactcccttgggtcttttttctcggccagcaaaactgaaaaacacagacctacaggcttagggggccacagagggctctagaagaaaaaaaaagtaagtaaaaaagagatttggggtcttaaagtttcaccgaagaggcaaggatataacaccaaattttcctaagtttatctgaaaattgtaatccctgtgaaccattaagctgtactgacattaaaaaaaaaaccactattgacttgcaggttggcacaaatagtctagtctggtccatacttgcaaatgaactttgtttcatttcttgttgctttgcactagtatttattttgaagagaagattgaatgagaggggaagcaatatttaaggcaattctgagttatatgtaacttgacactgtgagccgagagtcataaaaatgtctacatcaggccaggtgtggtgactcatgcctgtaattccagcactttgggaggccaaggtgggaggatcatttgaggccaggagtttgagatcagcttgggcaacatagcgagaccccatctctacaaaaaaattttaaaaattagtcaggtgtgatggtgcttgcatatactcccagctgctggggaggctgaggcacaggagaatcttttgagcccatgagtttgaggttacagtgagctatgatcttgtactgcacttcattgtgggtgacagaatgagaccttatctcttaaaaaaagaaaaaggaaaaaaaatctatattgtaatgttaaaattgactttaggggaacctaacctaccaaattaatttagaatgtgaaagatgccatataaacattattcatctattcattgctaagttattggtaggaataaaaatttggaagcaatttgatgacctataataagaataaattattaaattcttatttaataaactattgcatacatttgcatatgattatgaagattatgcaacaacatagaaaatccttaaaatgtcatgtgttaagagattacaccacccaartggaaaagatggaaaggaaatatgtcaaatgttaacagctgtgtttgggtaataggatgattagttgtttttttcttccttttctctcatgattattttaatcaggtcccaattttataaattggaaaatcaatttaaagc

SEQ ID NO: 546655 - DNA, 1230 bp, Homo sapiens
ttggatcagaagtaaatatttctaaactgtaaataaaggaagttaattactatacaaagctaactttgtacctggattacgccctacagtgtaatgcatgatgtggtaacttgtgattacaaatgtagatcattaaattgggagcagaggttacatattaggtggcattgcttttttttctctatctccaagtcatttgctttttaaatgttttgccaataaagatttcactattttgtaagtcagctaatatttttagttccatagttttagcaggtagattgcacccgtattgatgtcttatgcaatcagtaaaaactgtccacaaataaaaagaaaaaaatgtaagggttctgtatacaagtttttaaaaaacttatgcttgtcatgccatttagttttattttgtaaattccaagaattaattgatgtactttttatatcatgtcttttgttggatatgaaaatcagttatttcagtctctcgttagaaataggtacaaaatatcttgtgtcttcagtacatggaaagcaaagggaaaatttttctgttaccttgggtwtctttgtacctttaaaagatatcatgtactccaaggttaattaattagagtatcttggaaataatatcacttaaatatacaacatcaatataaaatcaataaaacattagctcttgattttgaaaatgtctacatattaaaaataaataaattctgcagaagtccaacaggttttcttttctttttttgttttgttttgttttttaggattttctttttgagacagggtctctctttgtcaccgaggctggagtgcagaggcgctgtcttggctcattgcaacctccgcctcccagactcaggtgattcttccgtcacagcctcccaagtagctaggaccacaggtttgcaccaccacacccagctaatttttgtatttttcttttagagatggggttttgccgtactaattataacaaccaggctggtctccaactcccagcctcaagcaatccacccccttggcctcccaaagtgctgggattacaggcgtgagccaccacactggcccccaagcaggtttttgttgtgttttgttttattaaaattagaaatgttgtggcatcctgtggaaagatctcaaattaaatcctgcctagtttggagtgtgtctgtaaagatagaaaatcatcattaacacgtcagaaacctaaatagaagttcacaa

SEQ ID NO: 546656 - DNA, 882 bp, Homo sapiens
ataagggctggcattacatatttctagtagatccatcttcaagtctaaggtaagggaaaaaaaatctgagaaacttgaacaggccttataaaaagaagggatgtgtttatgaaatactgaagacaatgtaacttttaattacattggattttgttgcaacctgtacctgattggtttttgctgctgtggccatttttttattttagagatgggatctcacatgttgctcaggctagagtgttgtggccattcataggagacatcaaagcacctcaaactcctgacctcaagcgatacacccgcctcagcctcctgagtaactggkaatacaggtgtggattaatgagttttttttttttcaggtgccattaaactggacaacatacctacgaaattacacatcaaagcatttcaaaaataatatataattcaaataaattaaagtcatattgaactagtagccatagatgtttaagtagtcatgagggccaatatagtgccatgcttaggtctataatgtatgttttgaataaaggatttatttgaaatatttgctgagggcctttttaatgtgtaaatttcatacaatacaaacttgtgattttagttattgtttaataattgaataatccttctgatttcctgaacactttttaggacagcataataaaaaataaattttcatggtaattatttttgaactataataggtaagacaaagatgacattatcagaagataattatccttctgacataatcagatgatagtatgagtagaaatagaagagctagataaacactttctaaaaagttcagatatcaaatcctggctcaagttcacaatactcatgtgattttttttgttcctctgagtccttctc

SEQ ID NO: 546657 - DNA, 859 bp, Homo sapiens
cttacgacagttcacattgatacctagaagttctcgagaggatgcttttgcattttctctgctaattagccaatgcacattttgggggaaggagtaggcttcttaggacaactcttgataaattatttcttaggtaagcatttcttacatattagaaatgaaaatacatttttggtctcattaaataattcataatttactcacatggatagatttggtaatttaatgttacagatgcccatgtaatacccactcctgacccatttagtttttgctccatttttatgactctggcagtgactgtgcctttagggaggaaactctgtttattgaaaaataatatcatgcagtgaaaaaagcactaaggtctaattaaaaaaaaaagctgagtgttcagagatcatcattaaagaacttatgcatgtaaccaaaaaccacctgtaccccaaaagctattgaaataaaaataaaaaagaaaagaaaaatacaccgtttgttagtccttgttctaatatgtcaccacagtatcatactagtacatgccatatgtaygatactggtaaatatctagtgacattgatacatatcctgatacttatggaagaaaaatatatacagctacatataacatatgatagcaactatatttagagatgcatgatatatacatatatatgacattacactttaagaacacctataggggtaaaattataaaggtagtataacaatgggtttatcttgtttttataatatgaaagattttttttaagtttctaaaaatagaaaaattatagctaataaggaaaagtgagacactaatgttcaaacattacaagttttaaaaattaacaaaagt

SEQ ID NO: 546658 - DNA, 630 bp, Homo sapiens
ggtcattctacaaaatacctcaccagtactcctcagaactgccaaagtcatcaaaaagaagcaaatctgataaatggtcacaaccaagaggagtctaaggacatgacaactaaactaaatttagygttctgtagaagaccctggaagagaaaagcgacattaaggtataaacaaaggagatttgagtacattatagactttggtgaataataatataccaacattgcttcattaattgtaacacatgtgacatactcatgtaagatgttaatagtcaggaacaccaagtggggagtgtatgggaaatctctgtaccatctttgcaatttttctatatacctaaaacacttataaaataaaataatttattaaaatacaaaactctctactgtgcttgtaagctccacaatactaaaaatgttcaagtagaggctggatgattgtagattgagcattttcctaaaataaatgtgaacctggcctaatttcctcatataaaatgctttgtattatattacaaagtcaggactgcctttcatacacctgagcctcaggatagtttatttgactctgtataaaatgctgacaaagtcagtgtcttatctactaggaacttacagtatatagaaa

SEQ ID NO: 546659 - DNA, 630 bp, Homo sapiens
ggtcattctacaaaatacctcaccagtactcctcagaactgccaaagtcatcaaaaagaagcaaatctgataaatggtcacaaccaagaggagtctaaggacatgacaactaaactaaatttagtgttctgtagaagaccctggaagagaaaagcgacattaaggtataaacaaaggagatttgagtacattatagactttggtgaataataatataccaacattgcttcattaattgtaacacatgtgacatactcatgtaagatgttaatagtcaggaacaccaagtggggagtgtatgggaaatctctgtaccatctttgcaatttttctatatacctaaaacacttataaaataaaataatttattaaaatacaaaactctctactgtgcttgtaagctccacaatactaaaaatgttcaagtagaggctggatgattrtagattgagcattttcctaaaataaatgtgaacctggcctaatttcctcatataaaatgctttgtattatattacaaagtcaggactgcctttcatacacctgagcctcaggatagtttatttgactctgtataaaatgctgacaaagtcagtgtcttatctactaggaacttacagtatatagaaa

SEQ ID NO: 546660 - DNA, 575 bp, Homo sapiens
tatatttatatacacatacaactgtatgttaaatcatgacatagatattatagtggattatttatttttactttcttgatacattatttgatataataaagtgaaaaatcacataaaaagaatatgatagagaaaataaacagtgaaaagaaaatttaaatatatagttacatcamagacagttcagagaataccagaataacttatatcaatagggccacctgaaaagtacaactataaaactgtagaaaaggtaagaagtaatgttttcaggaactaaaagtatcaagccataagataatgccagtcttcctggctgctcccagtttgtcctttagctatttactgtaccagccctagctcatgattttgcgggggaggtatgaatatggacatcttgcaaaatactatagataagttaattttgaaagccttggatgtataatgtgcacagtggtggtaaaattacttgctaatgtataattgtgttatcctaaaattttgtttgaaaaatcctaatttcttgaaccatgagacaatctttcttctgatgaaagttaacgtggtacctcttt

SEQ ID NO: 546661 - DNA, 575 bp, Homo sapiens
tatatttatatacacatacaactgtatgttaaatcatgacatagatattatagtggattatttatttttactttcttgatacattatttgatataataaagtgaaaaatcacataaaaagaatatgatagagaaaataaacagtgaaaagaaaatttaaatatatagttacatcaaagacagttcagagaataccagaataacttatatcaatagggccacctgaraagtacaactataaaactgtagaaaaggtaagaagtaatgttttcaggaactaaaagtatcaagccataagataatgccagtcttcctggctgctcccagtttgtcctttagctatttactgtaccagccctagctcatgattttgcgggggaggtatgaatatggacatcttgcaaaatactatagataagttaattttgaaagccttggatgtataatgtgcacagtggtggtaaaattacttgctaatgtataattgtgttatcctaaaattttgtttgaaaaatcctaatttcttgaaccatgagacaatctttcttctgatgaaagttaacgtggtacctcttt

SEQ ID NO: 546662 - DNA, 575 bp, Homo sapiens
tatatttatatacacatacaactgtatgttaaatcatgacatagatattatagtggattatttatttttactttcttgatacattatttgatataataaagtgaaaaatcacataaaaagaatatgatagagaaaataaacagtgaaaagaaaatttaaatatatagttacatcaaagacagttcagagaataccagaataacttatatcaatagggccacctgaaaagtacaactataaaactgtagaaaaggtaagaagtaatgttttcaggaactaaaagtatcaagccataagataatgccagtcttcctggctgctcccagtttgtcctttagctatttactgtaccagccctagctcatgattttgcgggggaggtatgaatatggacatcttgcaaaatactatagataagttaattttgaaagccttggatgtataatgtgcacagtggtggtaaaattayttgctaatgtataattgtgttatcctaaaattttgtttgaaaaatcctaatttcttgaaccatgagacaatctttcttctgatgaaagttaacgtggtacctcttt

SEQ ID NO: 546663 - DNA, 515 bp, Homo sapiens
ccatgactagtatagatcagcgtttctcatactaaatatcatatagacattttcttaaatattctcttgaatacactaagttcacttgaggcataattttacttaaatatgttaacatcaaactaattatacaaccccatatgcttatagctcttatgtaaacacaaaccaaaaaaaaagaaatcaaatgaaaatacaacaggcaaaatatccaaatttcccaacttaatttaatacaacagatgatgttgctttgytgaaatcaaatcctatctcaaacatgaatttgtttatgagtgtttgtgtgtcaacactaatctccacatgcctgaagtttacaatgactatgagtgcactatggtgatgctgttcctctaccactttttccaatttaactatgtagcaccttcatttatgcagcatgccatcatatcgcttggcattaacttagagtgaacaatcgagtgttaaatttttattattcacaaataataaaagcagtagtgttgggcacc

SEQ ID NO: 546664 - DNA, 1448 bp, Homo sapiens
catttcattttttcagcccttcaaatgcctaaatggcttctggcttacaaccagaagaagcaatagcttcttcaaatacttagaaggttttgtaaaatgaatgaattaaaatgttaagctcttttaaacagtctaatactggttataggccaagtccatttttcttatgctgtttttgcttatatgagaagcctaaattcaaatacacattttaaatcaaatgcataagacttacatgtcagtttctccaatgtaacaaattctctgtgacatgacacgagcttttactagcaagcatttattaaatatcattacacttgacacacaagtatcaatactatgtgttggttatattttatcatctctatcttcagttcttcctatcttatatttcatatcttaggtgagttgaagttaccaccttaatggtggccactataggatcattatctcaggcagccagagattgcttattgggcagagatctgaggtcagaatgcagggctgaggcatgaacaaatccaaagggattatttctgagtcattgaaggacaaagtttttattttcttaccactttaacagcctcctttatgggaatttatcatctgtatattagtcaccaactctagctgtcttaagccaaaggaatttgttggagaaacataagggctcagaaaatcaacaggaggctggagtaacaggcattaagcaactaaaaccagctggaactaatggcactggaggaccaggcagtaagaacacagctacagccacacagcagaatggactggtcaaacactgccccatccctgatacaaatggcctgtttcttccatcctttcagcacttgctcaagactcaagttcctgagatggtgaatccaattggttgagcccagatcatgtgcccatcccccacggcaaaagagcatggattcttttccatttccttagaggcagggatgtactctctctgccattaagaagacacatgtgggagaaagctaatccccttaaatgaaatcaggatgctatggaaaggagattgatgtagggctgccaaacacaacagatgaccaccatttcctacccattatcttgtgtttcaaaatccatgactaatccttttgatatcaccattctcgtaaccycacatttttattatatctcataaccccccagcttacctttattcacctttaatccacatcttttgaaaagatattaatttggggctaaatcaccaatggtttgggatttttaaaactatttttcaaatcaatttcataacctgcaaaatatttcacggatgtgaagtgtgaagacagtctatcaccatcccctgcagaagaagtctaaatgagacattaccttcccaggcaccgagttggttcctcagattaggacattgggtttctagtacacatctgggacaaataaaggttttg

SEQ ID NO: 546665 - DNA, 540 bp, Homo sapiens
atctatcgttaaaaatatgtctctatgattacacattattgattattttgaatgtatgtctttctgaaataatatgtctttttatggatgccaatggttgatttgactcatatattagaaatcaccttaatagcagttgctctgctatgtaataatttctttaaaaaatttgtactagtttcattaacgaattatattcaatatttaattatttatatctaataatcctagatatcaggttataattatagttatttaggagtacagtttatcaatctacttcctattgtgaggttcacaatgtaatttggtcataaaggtgttaaatttgaattttattaaagttgtgataggtaactcattataayggcttaaaatatttctagaatgaaattattaaagacattcttaaggcagcagatgtttgattcttaattttccatttgcccatgtgttgaattggtcttagagcagttatctgagataagtgtttacttgttcatatgtgttccacataccagcttgtagagatgttggcgg

SEQ ID NO: 546666 - DNA, 656 bp, Homo sapiens
gttgtggtaatcttaaaaggcrattggtataaaaataccaggtaaaaggcagagtgtgtcccatgaatgagacaccctgtccttctccctcaagacatcctctttgtttctcattcccaatatgaaaataacaaaccattctagggaacaacttggttatttttgggtcatgggcagggccagcaggcctacaggtagcgggagggatcagtggaggaagcgacgtgattcctgtaagacttgaatgcccctgagtcaaagtctgctctgaagaccagcccccttagagtgacagagatggggctacctcacaactctgccacttactatttttaggaccttggggaagtcatatagaattttgaattttagttccttcatttgtaaaaatgggaagggtaatagcactatccttagcattataaaataatggatacttatggcatacccagggcatggcatgtgctaagcattcaataaatgtggactattattgttatttcctttttgagctagttgtgtttgcttgctacggaggaaatacccatttcaaagaattgggaggataaaattaagagactggtaacccagcatctgccgtttaacagatgccctgtaagtgagtgccttcctctttctcccttctggcacttgtt

SEQ ID NO: 546667 - DNA, 656 bp, Homo sapiens
gttgtggtaatcttaaaaggcaattggtataaaaataccaggtaaaaggcagagtgtgtcccatgaatgagacaccctgtccttctccctcaagacatcctctttgtttctcattcccaatatgaaaataacaaaccattctagggaacaasttggttatttttgggtcatgggcagggccagcaggcctacaggtagcgggagggatcagtggaggaagcgacgtgattcctgtaagacttgaatgcccctgagtcaaagtctgctctgaagaccagcccccttagagtgacagagatggggctacctcacaactctgccacttactatttttaggaccttggggaagtcatatagaattttgaattttagttccttcatttgtaaaaatgggaagggtaatagcactatccttagcattataaaataatggatacttatggcatacccagggcatggcatgtgctaagcattcaataaatgtggactattattgttatttcctttttgagctagttgtgtttgcttgctacggaggaaatacccatttcaaagaattgggaggataaaattaagagactggtaacccagcatctgccgtttaacagatgccctgtaagtgagtgccttcctctttctcccttctggcacttgtt

SEQ ID NO: 546668 - DNA, 615 bp, Homo sapiens
agatgactgagggataaaaaggcgatgtgaaagtccctaggagggtaggcacttagtaatactaggctacctcccttcctcctcacttctctagtctcaatgcctgcttaggggaggggtagagatcagggtggtgagttgtctcctctgcaggatgactcagcccctccctactcccctactctgttactgcctttgcctcatcatactctggaaaacctagactaaagtaagttttttagctggacctatttttggaggtggagaatggaacttcctcactggtatgctgagttttgatttccatatgggctgatttcagagtaactgggaaaattcagtaattagcagtagcagcattagtgaatcatgttgtaatcatcctcttctcgcttcttccctcttctgcatgttccaaatgctattaccgacactatctttccctccactggcccttggcctcatgttcccactgcagacgttgtgcttcctgcttagcactatgggtcagcctctgggtactttcctccctcccagcctccagcctcctgcycaagcctctgcctatttgtccagaaccctggtgggcacatttagctagtttctcctcttgca

SEQ ID NO: 546669 - DNA, 647 bp, Homo sapiens
cacagaaaagcaggcttatcctgctcatagagggaagagtaaatgaaaagtctgcttattaaaaagtctgtctcctacgcctttctcaacttgtagcaagaatggtcatacagagatttaaaccacactccctcaatccctgcctcagggaaaatcatggagaattctatttgagagaactgacagttgccaaagaaaagatttataactacccaaagaaaaggccagtttgtcttgctgtagccctagagtaaagcccgtcagtccacactcctaatctcataaaacagatagctcccagctcataaatgctttcatccaaattaagtacaggacaaaaaaaaatcatcatacactttaaacatctctaatttgggaggaaaagcagaaaaaatggtggaagcagagataatgctatgctgggggcagaaaaagacaataaataaataaatctgaagtcaatattcatagagagacaaaagacaataacattacttcctagaacatacaaaatatgttgacatttaagaaagttatttaggcaacaaggtagggtttctgcatattaaaaataaaacaggcatatttaaaasattaagaaaccatatggaagacaatatagtgtacatctcccagaaaacagacca

SEQ ID NO: 546670 - DNA, 576 bp, Homo sapiens
cacaatgtttaagttaaataaagaagagacaaataaatttcttttttgattgaatccattactttatacaagagaaaaaaaaccttttttcttcagttttattcaaacaattcagttaagtactgaattaatacagttaagtactgaattataatctgataactttaattttcaaattatgttttataaaataactcagaaagttttagtatacagaatggctgcctttaacaccccatcttcttgatttaatgctgtgattactttcccatttttactttattttttatatgtgatatctgatataggtgagatatayatatatatgttatctcacatatataacataacataaatatagcacaattataaaattaatacttataaacccaccatacagcattagaacaatactatcaaagatttttttctaaatatagtttttaaatttgaggagcacaaagctcttcaaagatatatatgcataatattattggatttctccatacactccaaagaagatgtgaccatgaaatataaacagtgaaatatgaacagaagtgtagtaagaaccag

SEQ ID NO: 546671 - DNA, 610 bp, Homo sapiens
tcctcatttcccagactgggcagccgggcagagggggctcctcacatcccagacgatgggcggccaggcagagacgctcctcacttcccagacggggtggcggccgggcagaggctgcaatctcggcactttgggaggccaaggcaggcggctgggaggtggaggttgtaggtagccaagatcacgccactgcactccagcctgggcaactttgagcactgagtgaacgagactccgtctgcaatcccsgcacctcgggaggccgaggctggcagatcactcgcggttaggagctggagaccagcccggccaacacagcgaaaccccgtctccaccaaaaaaatatgaaaaccagtcaggcgtggcggcgcacgcctgcaatggcaggcactctgcaggctgaggcaggagaatcaggcagggaggttgcagtgagccgagatggcagcagtacagcccagcttcggctcggcatcagagggagacggtggaaagagagggagagggagaccatggggagagggagacggagagggagagggagaggaacaatcttcttatatggtttgaaggaatgagaattcacactgaaaaataatttttaatttta

SEQ ID NO: 546672 - DNA, 629 bp, Homo sapiens
aaatttgacatctaactctctcagttagttcaggcttctatagcaaattaccatagtctggatggcttaaacaagaaacatttatttctcacagttctggaagctgagaagtccaagataaaggtgccagcagatctggtagtctacttccaggtgagggtcaacttcctggtttgcatatagttgccttctcatatccgcacatggcagagagttctgatcctttatcccctataagggcactaatcccacttatgagggctccaccctcatgacctgrtcacctcccaaaggccccacctccaaacaccatcacattggggattagatttcagcatatgaattttggggtgactcaaacattcagtccatagcaaatgctttgagacattccaagtttttaaaattagcttttgttgcaagcattagtaagatataataattatgtttatttaatttgtaattccattattaaaatgaccacatgtctagctttcactgttatcacaagtagttttagtagaattctacttgtaagtgtttggttctgtgaaatcgttatatgatttgtataaatattagaataattataatttttcttcttttaagaactgtattgtcttaaagga

SEQ ID NO: 546673 - DNA, 629 bp, Homo sapiens
aaatttgacatctaactctctcagttagttcaggcttctatagcaaattaccatagtctggatggcttaaacaagaaacatttatttctcacagttctggaagctgagaagtccaagataaaggtgccagcagatctggtagtctacttccaggtgagggtcaacttcctggtttgcatatagttgccttctcatatccgcacatggcagagagttctgatcctttatcccctataagggcactaatcccacttatgagggctccaccctcatgacctgatcacctcccaaaggccccacctccaaacaccatcacattggggattagatttcagcatatgaattttggggtgactcaaacattcagtccatagcaaatgctttgagacattccaagtttttaaaattagcttttgttgcaagcattagtaagatataataattatgtttatttaatttgtaattccattattaaaatgaccacrtgtctagctttcactgttatcacaagtagttttagtagaattctacttgtaagtgtttggttctgtgaaatcgttatatgatttgtataaatattagaataattataatttttcttcttttaagaactgtattgtcttaaagga

SEQ ID NO: 546674 - DNA, 914 bp, Homo sapiens
gcattgtagaagctggttgaaaagaaatcttttgtttggaagaatttatttttaaaagttaaatttgggtagatggtgtgctgattattaattttagttcatcttaggtcataagaatgagcagctgttcatactaagtgatctttaagtgtaatgatagtgttgttcaggcacggtggctcatgcctgtaatctcagcacattgggaggctgagataggcagatagcttgaggtcaggagtttgagaccaacctggccaacatggtgaaaccctgtccctacaaaaattacaaaaaattagccaggcatgatggcatgcacctgtagtcctagctacttgggaggttgaggcatgagaattatttgagcctgggaggcagaggttacagtgagcccacattgtaccactgcactcaaaccttggcgacagagcgagactctatctcaaaaaaaaaaagtgttatttgagaatcctttgtagagagtaagaatttcagtaacattttgtagtttgagataaaaagaattaaaaaaaaaaaagaattttaaaaagggaatacctgtgaatctttttcacagatattaccctctgttatataagtgtgtgaaccaattagaaattgttttattaaatatttcttcaaaaagtgtgtagagataattaacaggcttgattatattaatgtgttcaaccactcacctttcacgttgctgcaaattctaaatgaatcattttgcccaatatttgttttaaagagatattgaattgcagtactgcaggcttgcaaaatcataatttgtcctataggcacactagacctgggtggaggaatgtattttcaccaccccctgcttataatttgtttgrcaaggtaaattagtgtttggaaagataatgtttttatcatttcca

SEQ ID NO: 546675 - DNA, 476 bp, Homo sapiens
acaatcttcaagcattttttcctgtttttctaccagtttggagagacaagttacatatgagtccttatgaaaggacttccttgtagcattgactaaggaaatacagcaagctcatgttaataggcagaaaagctaaaaatactacagaagccaaatttccactaattaatatatgtcaatacatttactacaaatactagaataaagggatgtacaggagtccccccttatccacacggcatrtatttcaagccctccagtggatgcctgaaaccatgggtagtgcccacccctgcagatactatgtttcttcaatctgataaccaagacagctactaagtgactgatgggtgggctgcgtatacagcaggacacactaggacaagggatgattcgcatccccgagtgggatacagcaggatggtgcaagactttgtcacgctactcagaacagcggatcattgtgacttataaat

SEQ ID NO: 546676 - DNA, 476 bp, Homo sapiens
acaatcttcaagcattttttcctgtttttctaccagtttggagagacaagttacatatgagtccttatgaaaggacttccttgtagcattgactaaggaaatacagcaagctcatgttaataggcagaaaagctaaaaatactacagaagccaaatttccactaattaatatatgtcaatacatttactacaaatactagaataaagggatgtacaggagtccccccttatccacacggcatgtrtttcaagccctccagtggatgcctgaaaccatgggtagtgcccacccctgcagatactatgtttcttcaatctgataaccaagacagctactaagtgactgatgggtgggctgcgtatacagcaggacacactaggacaagggatgattcgcatccccgagtgggatacagcaggatggtgcaagactttgtcacgctactcagaacagcggatcattgtgacttataaat

SEQ ID NO: 546677 - DNA, 476 bp, Homo sapiens
acaatcttcaagcattttttcctgtttttctaccagtttggagagacaagttacatatgagtccttatgaaaggacttccttgtagcattgactaaggaaatacagcaagctcatgttaataggcagaaaagctaaaaatactacagaagccaaatttccactaattaatatatgtcaatacatttactacaaatactagaataaagggatgtacaggagtccccccttatccacacggcatgtatttcaagccctccagtggatgcctgaaaccatgggtagtgcccacccctgyagatactatgtttcttcaatctgataaccaagacagctactaagtgactgatgggtgggctgcgtatacagcaggacacactaggacaagggatgattcgcatccccgagtgggatacagcaggatggtgcaagactttgtcacgctactcagaacagcggatcattgtgacttataaat

SEQ ID NO: 546678 - DNA, 892 bp, Homo sapiens
tgtaaattataaaaaaaacccacaactctgcttttgggggaaactcctgctcctgcctatgctgctccctcgtgccctgccgcacttctctgctaaatctctaagcatatgtctgtccgctagctcctctttttaccctcatctctttctcctttaccaacttagatgatgacatttttatattttgtgcaggactgcccttatttacctgagcctgttcttctttcacttcatatttctcaccttttatgttttattttatccctgcrctcctttcttcattctatatgcattatattcaaaaaaatatttgaggttaagcttaggaaatctcaccacttagcaatattcactgagcacttactatgtggtaggtactaagctggaaatcagagaaacagagtgacaagatcagaggccctgtcctctgggagctcaccaagaggcaaagaaatgactattgatgatgtacctgtgcaatgcaatgatggacccaagattcagtcctgataaaaagagaggaaactacagattgtataatctgaaacctggcagctctattgccaataaacattctttgtaaatctaatttcacataattctttatttccttctcacttgttttattatcttatgtttctgggttttgcactagctgtcactcttttctgcagctaatggaagtagagacaaggtagtgttgagagcatgaaagtggcaaggcgtcttccctgatatctagtggaaccaccaattcttcccattgccactgccttgagggtggctctcaggcagcaggccaagtgctatgctatccaacggaagcacaactaagtcaaaccaggatttgtgcttacctgactttattcacaacaggttaggcttggtgaaa

SEQ ID NO: 546679 - DNA, 1807 bp, Homo sapiens
ctgtgctcacactagatgtccccatactctccttggctctttccaccccactgcacccaccaggggatttgcatactgtcccctagggaggaccttccattgtgagtctgagataaaagctcagctgtaaccttgccttgactgatcagaactcctcagctcaccttctcacaataaggktccctgctcagctcctggggctgctaatgctttgggttcctggtaaggacagaagggagataagggaggagaatggagtgtgagggtgagctctgggggccccactgcctgtccacatgcacatcttgacctgcaagaaaaggtgtataaagtttagaactgcaagagtcagaaagagaagattcctcactcttatagttctaaacttcatatcctagaaggacaaaggacttgtgctctcatgaagagtgtcacacaggaagaggataatagtgtaggtgacttcttgagtctcttttgtgccttgtgaatgttggttctttttatgcctggatgtttaggggtatgaaccaaagtcacacaaaaaaatcacttagcataaagtagataacagaaagaatatcatttcaatggttcccaatatttgtacataaccttgcacttctctcactacttcaggatccagtggagatattgtgatgacccagactccaccctccctgcccgtcaaccctggagagccggcctccatctcctgcaggtctagtcaaagcctcctgcatagtaatggatatacctatttgcattggtacccgcagaagccagggcaatctccacagctcctgatttatagggtttccagtcgtttttctggggtcccagacaggtttagtggcagtgggtcaggcagtgatttcacactgaaaatcagctgggtggaggctgaggatgttggggtttattactgcatgcaagctacacagtttcctaacacagtggtacaaccctgaacagaaacctcccttcttgctgtggttcagctgcccaaatgtgttgtttatctggaaagcagacactgtcgattatcttgggagagtaaagaggaagatgatggagaattcaggagaatacattacagctgagggctcttgaccatcaatatctcggttacatctcaggtaccacaatttagtccccatcagttgcaagagtcttggcctggcagaacttgcaggagaatggagggaggtcaagtgcctctgaacaaccagtcatgttgcaagggaaagctgaatcaaagctcatcgtaatcctctctgccttgcctaagttcattcactaactaaattcattcagcctgacagccacctaaatgaaacagattagtggcaatacaaaactaatatatttttggttttgatttggtttagcagttactagtgtacatgtaccttgacaagatttggtgatactaaaacagtttctctcccatcttctaccttccactttacacttttcttaacatacatctctctctgggacagcaggaagcacagcattttatcctatttttttttcagggagtgcttgcgtgtatttacattctagactttgtaactgctagatatgttttggtaagtttatgcaaaaacaaagacctagtgacaaaaatctttgaacaatcttattcacagtatgttgaaatgaaaagaaaattctatgaaatccaaagctgtgttttaaaaataaatatccaagtttcaaaagacaaaagaaaaaaggactaaaaatgtagccatagtcaaaaatgtatgccatattcaatggaatctggattaatataaaa

SEQ ID NO: 546680 - DNA, 1807 bp, Homo sapiens
ctgtgctcacactagatgtccccatactctccttggctctttccaccccactgcacccaccaggggatttgcatactgtcccctagggaggaccttccattgtgagtctgagataaaagctcagctgtaaccttgccttgactgatcagaactcctcagctcaccttctcacaataaggttccctgctcagctcctggggctgctaatgctttgggttcctggtaaggacagaagggagataagggaggagaatggagtgtgagggtgagctctgggggycccactgcctgtccacatgcacatcttgacctgcaagaaaaggtgtataaagtttagaactgcaagagtcagaaagagaagattcctcactcttatagttctaaacttcatatcctagaaggacaaaggacttgtgctctcatgaagagtgtcacacaggaagaggataatagtgtaggtgacttcttgagtctcttttgtgccttgtgaatgttggttctttttatgcctggatgtttaggggtatgaaccaaagtcacacaaaaaaatcacttagcataaagtagataacagaaagaatatcatttcaatggttcccaatatttgtacataaccttgcacttctctcactacttcaggatccagtggagatattgtgatgacccagactccaccctccctgcccgtcaaccctggagagccggcctccatctcctgcaggtctagtcaaagcctcctgcatagtaatggatatacctatttgcattggtacccgcagaagccagggcaatctccacagctcctgatttatagggtttccagtcgtttttctggggtcccagacaggtttagtggcagtgggtcaggcagtgatttcacactgaaaatcagctgggtggaggctgaggatgttggggtttattactgcatgcaagctacacagtttcctaacacagtggtacaaccctgaacagaaacctcccttcttgctgtggttcagctgcccaaatgtgttgtttatctggaaagcagacactgtcgattatcttgggagagtaaagaggaagatgatggagaattcaggagaatacattacagctgagggctcttgaccatcaatatctcggttacatctcaggtaccacaatttagtccccatcagttgcaagagtcttggcctggcagaacttgcaggagaatggagggaggtcaagtgcctctgaacaaccagtcatgttgcaagggaaagctgaatcaaagctcatcgtaatcctctctgccttgcctaagttcattcactaactaaattcattcagcctgacagccacctaaatgaaacagattagtggcaatacaaaactaatatatttttggttttgatttggtttagcagttactagtgtacatgtaccttgacaagatttggtgatactaaaacagtttctctcccatcttctaccttccactttacacttttcttaacatacatctctctctgggacagcaggaagcacagcattttatcctatttttttttcagggagtgcttgcgtgtatttacattctagactttgtaactgctagatatgttttggtaagtttatgcaaaaacaaagacctagtgacaaaaatctttgaacaatcttattcacagtatgttgaaatgaaaagaaaattctatgaaatccaaagctgtgttttaaaaataaatatccaagtttcaaaagacaaaagaaaaaaggactaaaaatgtagccatagtcaaaaatgtatgccatattcaatggaatctggattaatataaaa

SEQ ID NO: 546681 - DNA, 1807 bp, Homo sapiens
ctgtgctcacactagatgtccccatactctccttggctctttccaccccactgcacccaccaggggatttgcatactgtcccctagggaggaccttccattgtgagtctgagataaaagctcagctgtaaccttgccttgactgatcagaactcctcagctcaccttctcacaataaggttccctgctcagctcctggggctgctaatgctttgggttcctggtaaggacagaagggagataagggaggagaatggagtgtgagggtgagctctgggggccccactgcctgtccacatgcacatcttgacctgcaagaaaaggtgtataaagtttagaactgcaagagtcagaaagagaagattcctcactcttatagttctaaacttcatatcctagaaggacaaaggacttgtgctctcatgaagagtgtcacacaggaagaggataatagtgtaggtgacttcttgagtctcttttgtgccttgtgaatgttggttctttttatgcctggatgtttaggggtatgaaccaaagtcacacaaaaaaatcacttagcataaagtagataacagaaagaatatcatttcaatggttcccaatatttgtacataaccttgcacttctctcactacttcaggatccagtggagatattgtgatgacccagactccaccctccctgcccgtcaaccctggagagccggcctccatctcctgcaggtctagtcaaagcctcctgcatagtaatggatatacctatttgcattggtacccgcagaagccagggcaatctccacagctcctgatttatagggtttccagtcgtttttctggggtcccagacaggtttagtggcagtgggtcaggcagtgatttcacactgaaaatcagctgggtggaggctgaggatgttggggtttattactgcatgcaagctacacagtttcctaacacagtggtacaaccctgaacagaaacctcccttcttgctgtggttcagctgcccaaatgtgttgtttatctggaaagcagacactgtcgattatcttgggagagtaaagaggaagatgatggagaattcaggagaatacattacagctgagggctcttgaccatcaatatctcggttacatctcaggtaccacaatttagtccccatcagttgcaagagtcttggcctggcagaacttgcaggagaatggagggaggtcaagtgcctctgaacaaccagtcatgttgcaagggaaagctgaatcaaagctcatcgtaatcctctctgccttgcctaagttcattcactaactaaattcattcagcctgacagccacctaaatgaaacagattagtggcaatacaaaactaatayatttttggttttgatttggtttagcagttactagtgtacatgtaccttgacaagatttggtgatactaaaacagtttctctcccatcttctaccttccactttacacttttcttaacatacatctctctctgggacagcaggaagcacagcattttatcctatttttttttcagggagtgcttgcgtgtatttacattctagactttgtaactgctagatatgttttggtaagtttatgcaaaaacaaagacctagtgacaaaaatctttgaacaatcttattcacagtatgttgaaatgaaaagaaaattctatgaaatccaaagctgtgttttaaaaataaatatccaagtttcaaaagacaaaagaaaaaaggactaaaaatgtagccatagtcaaaaatgtatgccatattcaatggaatctggattaatataaaa

SEQ ID NO: 546682 - DNA, 1807 bp, Homo sapiens
ctgtgctcacactagatgtccccatactctccttggctctttccaccccactgcacccaccaggggatttgcatactgtcccctagggaggaccttccattgtgagtctgagataaaagctcagctgtaaccttgccttgactgatcagaactcctcagctcaccttctcacaataaggttccctgctcagctcctggggctgctaatgctttgggttcctggtaaggacagaagggagataagggaggagaatggagtgtgagggtgagctctgggggccccactgcctgtccacatgcacatcttgacctgcaagaaaaggtgtataaagtttagaactgcaagagtcagaaagagaagattcctcactcttatagttctaaacttcatatcctagaaggacaaaggacttgtgctctcatgaagagtgtcacacaggaagaggataatagtgtaggtgacttcttgagtctcttttgtgccttgtgaatgttggttctttttatgcctggatgtttaggggtatgaaccaaagtcacacaaaaaaatcacttagcataaagtagataacagaaagaatatcatttcaatggttcccaatatttgtacataaccttgcacttctctcactacttcaggatccagtggagatattgtgatgacccagactccaccctccctgcccgtcaaccctggagagccggcctccatctcctgcaggtctagtcaaagcctcctgcatagtaatggatatacctatttgcattggtacccgcagaagccagggcaatctccacagctcctgatttatagggtttccagtcgtttttctggggtcccagacaggtttagtggcagtgggtcaggcagtgatttcacactgaaaatcagctgggtggaggctgaggatgttggggtttattactgcatgcaagctacacagtttcctaacacagtggtacaaccctgaacagaaacctcccttcttgctgtggttcagctgcccaaatgtgttgtttatctggaaagcagacactgtcgattatcttgggagagtaaagaggaagatgatggagaattcaggagaatacattacagctgagggctcttgaccatcaatatctcggttacatctcaggtaccacaatttagtccccatcagttgcaagagtcttggcctggcagaacttgcaggagaatggagggaggtcaagtgcctctgaacaaccagtcatgttgcaagggaaagctgaatcaaagctcatcgtaatcctctctgccttgcctaagttcattcactaactaaattcattcagcctgacagccacctaaatgaaacagattagtggcaatacaaaactaatatrtttttggttttgatttggtttagcagttactagtgtacatgtaccttgacaagatttggtgatactaaaacagtttctctcccatcttctaccttccactttacacttttcttaacatacatctctctctgggacagcaggaagcacagcattttatcctatttttttttcagggagtgcttgcgtgtatttacattctagactttgtaactgctagatatgttttggtaagtttatgcaaaaacaaagacctagtgacaaaaatctttgaacaatcttattcacagtatgttgaaatgaaaagaaaattctatgaaatccaaagctgtgttttaaaaataaatatccaagtttcaaaagacaaaagaaaaaaggactaaaaatgtagccatagtcaaaaatgtatgccatattcaatggaatctggattaatataaaa

SEQ ID NO: 546683 - DNA, 1807 bp, Homo sapiens
ctgtgctcacactagatgtccccatactctccttggctctttccaccccactgcacccaccaggggatttgcatactgtcccctagggaggaccttccattgtgagtctgagataaaagctcagctgtaaccttgccttgactgatcagaactcctcagctcaccttctcacaataaggttccctgctcagctcctggggctgctaatgctttgggttcctggtaaggacagaagggagataagggaggagaatggagtgtgagggtgagctctgggggccccactgcctgtccacatgcacatcttgacctgcaagaaaaggtgtataaagtttagaactgcaagagtcagaaagagaagattcctcactcttatagttctaaacttcatatcctagaaggacaaaggacttgtgctctcatgaagagtgtcacacaggaagaggataatagtgtaggtgacttcttgagtctcttttgtgccttgtgaatgttggttctttttatgcctggatgtttaggggtatgaaccaaagtcacacaaaaaaatcacttagcataaagtagataacagaaagaatatcatttcaatggttcccaatatttgtacataaccttgcacttctctcactacttcaggatccagtggagatattgtgatgacccagactccaccctccctgcccgtcaaccctggagagccggcctccatctcctgcaggtctagtcaaagcctcctgcatagtaatggatatacctatttgcattggtacccgcagaagccagggcaatctccacagctcctgatttatagggtttccagtcgtttttctggggtcccagacaggtttagtggcagtgggtcaggcagtgatttcacactgaaaatcagctgggtggaggctgaggatgttggggtttattactgcatgcaagctacacagtttcctaacacagtggtacaaccctgaacagaaacctcccttcttgctgtggttcagctgcccaaatgtgttgtttatctggaaagcagacactgtcgattatcttgggagagtaaagaggaagatgatggagaattcaggagaatacattacagctgagggctcttgaccatcaatatctcggttacatctcaggtaccacaatttagtccccatcagttgcaagagtcttggcctggcagaacttgcaggagaatggagggaggtcaagtgcctctgaacaaccagtcatgttgcaagggaaagctgaatcaaagctcatcgtaatcctctctgccttgcctaagttcattcactaactaaattcattcagcctgacagccacctaaatgaaacagattagtggcaatacaaaactaatatatttttggttttgatttggtttagcagttactagtgtacatgtaccttgacaagatttggtgatactaaaacagtttctctcccatcttctaccttccactttacacttttcttaacatayatctctctctgggacagcaggaagcacagcattttatcctatttttttttcagggagtgcttgcgtgtatttacattctagactttgtaactgctagatatgttttggtaagtttatgcaaaaacaaagacctagtgacaaaaatctttgaacaatcttattcacagtatgttgaaatgaaaagaaaattctatgaaatccaaagctgtgttttaaaaataaatatccaagtttcaaaagacaaaagaaaaaaggactaaaaatgtagccatagtcaaaaatgtatgccatattcaatggaatctggattaatataaaa

SEQ ID NO: 546684 - DNA, 1807 bp, Homo sapiens
ctgtgctcacactagatgtccccatactctccttggctctttccaccccactgcacccaccaggggatttgcatactgtcccctagggaggaccttccattgtgagtctgagataaaagctcagctgtaaccttgccttgactgatcagaactcctcagctcaccttctcacaataaggttccctgctcagctcctggggctgctaatgctttgggttcctggtaaggacagaagggagataagggaggagaatggagtgtgagggtgagctctgggggccccactgcctgtccacatgcacatcttgacctgcaagaaaaggtgtataaagtttagaactgcaagagtcagaaagagaagattcctcactcttatagttctaaacttcatatcctagaaggacaaaggacttgtgctctcatgaagagtgtcacacaggaagaggataatagtgtaggtgacttcttgagtctcttttgtgccttgtgaatgttggttctttttatgcctggatgtttaggggtatgaaccaaagtcacacaaaaaaatcacttagcataaagtagataacagaaagaatatcatttcaatggttcccaatatttgtacataaccttgcacttctctcactacttcaggatccagtggagatattgtgatgacccagactccaccctccctgcccgtcaaccctggagagccggcctccatctcctgcaggtctagtcaaagcctcctgcatagtaatggatatacctatttgcattggtacccgcagaagccagggcaatctccacagctcctgatttatagggtttccagtcgtttttctggggtcccagacaggtttagtggcagtgggtcaggcagtgatttcacactgaaaatcagctgggtggaggctgaggatgttggggtttattactgcatgcaagctacacagtttcctaacacagtggtacaaccctgaacagaaacctcccttcttgctgtggttcagctgcccaaatgtgttgtttatctggaaagcagacactgtcgattatcttgggagagtaaagaggaagatgatggagaattcaggagaatacattacagctgagggctcttgaccatcaatatctcggttacatctcaggtaccacaatttagtccccatcagttgcaagagtcttggcctggcagaacttgcaggagaatggagggaggtcaagtgcctctgaacaaccagtcatgttgcaagggaaagctgaatcaaagctcatcgtaatcctctctgccttgcctaagttcattcactaactaaattcattcagcctgacagccacctaaatgaaacagattagtggcaatacaaaactaatatatttttggttttgatttggtttagcagttactagtgtacatgtaccttgacaagatttggtgatactaaaacagtttctctcccatcttctaccttccactttacacttttcttaacatacatctctctctgggacagcaggaagcacagcattttatcctatttttttttcagggagtgcttgcgtgtatttacattctagactttgtaactgctagatatrttttggtaagtttatgcaaaaacaaagacctagtgacaaaaatctttgaacaatcttattcacagtatgttgaaatgaaaagaaaattctatgaaatccaaagctgtgttttaaaaataaatatccaagtttcaaaagacaaaagaaaaaaggactaaaaatgtagccatagtcaaaaatgtatgccatattcaatggaatctggattaatataaaa

SEQ ID NO: 546685 - DNA, 1807 bp, Homo sapiens
ctgtgctcacactagatgtccccatactctccttggctctttccaccccactgcacccaccaggggatttgcatactgtcccctagggaggaccttccattgtgagtctgagataaaagctcagctgtaaccttgccttgactgatcagaactcctcagctcaccttctcacaataaggttccctgctcagctcctggggctgctaatgctttgggttcctggtaaggacagaagggagataagggaggagaatggagtgtgagggtgagctctgggggccccactgcctgtccacatgcacatcttgacctgcaagaaaaggtgtataaagtttagaactgcaagagtcagaaagagaagattcctcactcttatagttctaaacttcatatcctagaaggacaaaggacttgtgctctcatgaagagtgtcacacaggaagaggataatagtgtaggtgacttcttgagtctcttttgtgccttgtgaatgttggttctttttatgcctggatgtttaggggtatgaaccaaagtcacacaaaaaaatcacttagcataaagtagataacagaaagaatatcatttcaatggttcccaatatttgtacataaccttgcacttctctcactacttcaggatccagtggagatattgtgatgacccagactccaccctccctgcccgtcaaccctggagagccggcctccatctcctgcaggtctagtcaaagcctcctgcatagtaatggatatacctatttgcattggtacccgcagaagccagggcaatctccacagctcctgatttatagggtttccagtcgtttttctggggtcccagacaggtttagtggcagtgggtcaggcagtgatttcacactgaaaatcagctgggtggaggctgaggatgttggggtttattactgcatgcaagctacacagtttcctaacacagtggtacaaccctgaacagaaacctcccttcttgctgtggttcagctgcccaaatgtgttgtttatctggaaagcagacactgtcgattatcttgggagagtaaagaggaagatgatggagaattcaggagaatacattacagctgagggctcttgaccatcaatatctcggttacatctcaggtaccacaatttagtccccatcagttgcaagagtcttggcctggcagaacttgcaggagaatggagggaggtcaagtgcctctgaacaaccagtcatgttgcaagggaaagctgaatcaaagctcatcgtaatcctctctgccttgcctaagttcattcactaactaaattcattcagcctgacagccacctaaatgaaacagattagtggcaatacaaaactaatatatttttggttttgatttggtttagcagttactagtgtacatgtaccttgacaagatttggtgatactaaaacagtttctctcccatcttctaccttccactttacacttttcttaacatacatctctctctgggacagcaggaagcacagcattttatcctatttttttttcagggagtgcttgcgtgtatttacattctagactttgtaactgctagatatgttttggtaagtttatgcaaaaacaaagacctagtgacaaaaatctttgaacaatcttattcacagtatgttgaaatgaaaagaaaattctatgaaatccaaagctgtgttttaaaaataaatatccaagtttcaaaagacaaaagaaaaaakgactaaaaatgtagccatagtcaaaaatgtatgccatattcaatggaatctggattaatataaaa

SEQ ID NO: 546686 - DNA, 1188 bp, Homo sapiens
gttaatatccaggctttcaactggcaatccctacggatcaaaagtctacaaagtctagaacacctcttcacatagactcagtccctgctgatcagaatcctttctaaaggaagataacatcatttagagttactacaatttttcatacacagtgtttggcatttgatagaaaactaccagacagaacaaaaaaaaaaaacaggcytaagggggtgtgagggtgcagggtaggagagtagagaacagactaataactgacctagaaattagagttttcagaaatggacttcaaaataactacgataagttaaagaatataaatactaagattgagaattttaaaatataatcaaattgaaattttaaaaatataatcaagttgaaattctataactgaaaaatcactgacattataaactcaatagatggggtttaacagcatgaaaaactgaagtaggctgggcacagtgactcacgcctgtaatcccagcactttgggaggccaaggtaggaggattgcttgagaccaagagttcaagaccagcctgggcaatatagtgacacccctgtctctacaaaaaaaaaaatcaaacaaattagccatcctgtctactcaggaggctgaggtgggaggatcacctgagcccaggagttcaaggctgcaatgagctatgaccatgccattgtaccccagcctgggtgacagagagagatcttgtcttaaaaaaaaaaaaattggagttacccttaccccagttaagttacaacttaagagtgcattaataaaccaggaagaatgagattatattatggagagtattaacagtattgaaaagagcaaaaggatatacaggacatggtaaaaagtctaacatagatgtaattttggtcccagaaagggaagagagagagaatggagcaaaagtagcatctgaaatgataatggccaagaacttttcaaaagtgaccaatgaaaataagccacagattcagaaagtgcattgaattcttagcaggatttaaaaacactaaaacaacagcatgccactgtaaaactgctaaaaaccgaagacaaagaaaatcttgaaagcagcaagaagggggaaaagcacattactgtccaaaaagcaacagtgagactgacagttaacttctcagtagaaatgatggaagcccaagcaacaaaac

SEQ ID NO: 546687 - DNA, 1188 bp, Homo sapiens
gttaatatccaggctttcaactggcaatccctacggatcaaaagtctacaaagtctagaacacctcttcacatagactcagtccctgctgatcagaatcctttctaaaggaagataacatcatttagagttactacaatttttcatacacagtgtttggcatttgatagaaaactaccagacagaacaaaaaaaaaaaacaggcctaagggggtgtgagggtgcagggtaggagagtagagaacagactaataactgacctagaaattagagttttcagaaatggacttcaaaataactaygataagttaaagaatataaatactaagattgagaattttaaaatataatcaaattgaaattttaaaaatataatcaagttgaaattctataactgaaaaatcactgacattataaactcaatagatggggtttaacagcatgaaaaactgaagtaggctgggcacagtgactcacgcctgtaatcccagcactttgggaggccaaggtaggaggattgcttgagaccaagagttcaagaccagcctgggcaatatagtgacacccctgtctctacaaaaaaaaaaatcaaacaaattagccatcctgtctactcaggaggctgaggtgggaggatcacctgagcccaggagttcaaggctgcaatgagctatgaccatgccattgtaccccagcctgggtgacagagagagatcttgtcttaaaaaaaaaaaaattggagttacccttaccccagttaagttacaacttaagagtgcattaataaaccaggaagaatgagattatattatggagagtattaacagtattgaaaagagcaaaaggatatacaggacatggtaaaaagtctaacatagatgtaattttggtcccagaaagggaagagagagagaatggagcaaaagtagcatctgaaatgataatggccaagaacttttcaaaagtgaccaatgaaaataagccacagattcagaaagtgcattgaattcttagcaggatttaaaaacactaaaacaacagcatgccactgtaaaactgctaaaaaccgaagacaaagaaaatcttgaaagcagcaagaagggggaaaagcacattactgtccaaaaagcaacagtgagactgacagttaacttctcagtagaaatgatggaagcccaagcaacaaaac

SEQ ID NO: 546688 - DNA, 1188 bp, Homo sapiens
gttaatatccaggctttcaactggcaatccctacggatcaaaagtctacaaagtctagaacacctcttcacatagactcagtccctgctgatcagaatcctttctaaaggaagataacatcatttagagttactacaatttttcatacacagtgtttggcatttgatagaaaactaccagacagaacaaaaaaaaaaaacaggcctaagggggtgtgagggtgcagggtaggagagtagagaacagactaataactgacctagaaattagagttttcagaaatggacttcaaaataactacgataagttaaagaatataaatactaagattgagaattttaaaatataatcaaattgaaattttaaaaatataatcaagttgaaattctataactgaaaaatcactgacattataaactcaatagatggggtttaacagcatgaaaaactgaagtaggctgggcacagtgactcacgcctgtaatcccagcactttgggaggccaaggtaggaggattgcttgagaccaagagttcaagaccagcctgggcaatatagtgacacccctgtctctacaaaaaaaaaaatcaaacaaattagccatcctgtctactcaggaggctgaggtgggaggatcacctgagcccaggagttcaaggctgcaatgagctatgaccatgccattgtaccccagcctgggtgacagagagagatcttgtcttaaaaaaaaaaaaattggagttacccttaccccagttaagttacaacttaagagtgcattaataaaccaggaagaatgagattatattatggagagtattaacagtattgaaaagagcaaaaggatatacaggacatggtaaaaagtctaacatagatgtaattttggtcccagaaagggaagagagagagaatggagcaaaagtagcatctgaaatgataatggccaagaacttttcaaaagtgaccaatgaaaataagccacagattcagaaagtgcattgaattcttagcaggatttaaaaacactaaaacaacagcatgccactgtaaaactgctaaaaaccraagacaaagaaaatcttgaaagcagcaagaagggggaaaagcacattactgtccaaaaagcaacagtgagactgacagttaacttctcagtagaaatgatggaagcccaagcaacaaaac

SEQ ID NO: 546689 - DNA, 1068 bp, Homo sapiens
agatgagatttgagtaaagtcttaaaagtagtcaagaacattagcaaaagttatcaagaatacatagagtttgaattaccatgtacatgatcaaagcaatactttttaaatgccaggttcattgtgtgtattgtgctaagagcttgcacaaagcatagaagagaaagaaacttgaaatggtgattttgatgtttggagttgctatgaatgatataccatgagaaaaacaggcagattttgaagtacatttcagatttgaagtacattwgaaaaattctcagatttgaagtacatttctttcctctaaatatattcagttgaatttcatacatttaaaagtaccgaatatttgctcagctggccatcttcaaccttttcagaggaacataagaatgcagtaaagtgtatataaaagaatgtaaagagaacgtaagtttgggcagtttctggagaattgctgcattgcccatgttcttcacctgtacaaatgggagtgtggtcttagggaaggaattaagcaaaactgaagtgtatgttcttctagaatttttcctctcctggaaagaaggaaattatagcactcctaggaagtgggaagaggaaacatcctatcaccttttaattgaagctgagggtctacacttttaagcatcacttagagttacttatgaatattggaaacatttaattagcacttattctaattgcattctaaatgtataaagttaaaatgtcataactaatagttcctctcctatacagtttcttctatgtattgctattgaatgaggccttttcctttttgttctcatttccacaactgatgttccattagtcatattgagtaaataacagtttatatacagtgtcagtgtaataaataatactgtcacaaatcataagtaataacttgcatacagaatgtcagtgctcagcagggagttacaaatatattaaaagataatgcatatcagacaaatatcagagtccattttcctcacaagggtctttctgcacacccaaaggagaaagacttaaatttttgtgaacaatgagcttatttgctca

SEQ ID NO: 546690 - DNA, 640 bp, Homo sapiens
ggactcagaytagagttctttgaaattaatgtattctatatttagtggtgtgggaaaacacatgtattttgatgacacatgagcccaactacctcatgtggcttcttgggtcttaggaggatgcgctatttttctgaggaaactcaggcagtaaacagccatctaagatttatatccagacctgagtgattccaaagcctctactcttaagtattacatgtctgcctccccaaagtaatcattgtcatttatcaggcatctagtctgtgtactgtacaacattttaatctaatctttaaaaatcctgtgacagacacttctttactgaatgaaatatattttgtatttttggcatatactattgtttttactacaaaaatgcatatgtcagattgtaaatatgtctcagataagtttctccatgtggatagcattgataattaatttacctgttttatcccctagaagagtaacattgtgctttaaccagagctggtgccaaaaaaaggttgaaggattgactttgaatcgttcacaggcatttaacatctactctactagtaagttggaataaacagtaaaattttagctctgacctcaatccttaatagcttaaagcccaaagatcaaaataagtcat

SEQ ID NO: 546691 - DNA, 640 bp, Homo sapiens
ggactcagactagagttctttgaaattaatgtattctatatttagtggtgtgggaaaacacatgtattttgatgacacatgagcccaactacctcatgtggcttcttgggtcttaggaggatgcgctatttttctgaggaaactcaggcagtaaacagccatctaagatttatatccagacctgagtgattccaaagcctctactcttaagtattacatgtctgcctccccaaagtaatcattgtcatttatcaggcatctagtctgtgtactgtacaacattttaatctaatctttaaaaatcctgtgacagacacttctttactgaatgaaatatattttgtatttttggcatatactattgtttttactacaaaaatgcatatgtcagattgtaaatatgtctcagataagtttctccatgtggatagcattgataattaatttacctgttttatcccctagaagagtaacattgtgctttaaccagagctggtgccaaaaaaagkttgaaggattgactttgaatcgttcacaggcatttaacatctactctactagtaagttggaataaacagtaaaattttagctctgacctcaatccttaatagcttaaagcccaaagatcaaaataagtcat

SEQ ID NO: 546692 - DNA, 683 bp, Homo sapiens
atgtatgaaaagaagtgaataaaaatggagtggaatgaaaattgagcaacaagagtatttgatagatatctctaaaagatttttatactcaatccttacattttttttctttctacatactgttggaatatgaatttcattttggtcaaacacaaattggccacaaatatgtcaattatttgcaataatgtttttcataaccttatgaaaaacctaagcatcagtagcatgcttattttaaaaaaatcttaagaactcatattccacraaaattatattggcaaacagggcatgctcagttaaaccaacactacaatataggatacataatacttacacaattgtatcttcctctcctgatgaattagggggtactatagatcttttttttttcttacccactactactgttttttgggaaaactatttgccaatgactaacatcatctggattagaaaaaagctgggccatctttgaataagaaatgcaggtccctttcatttttttttcatttattttgaagattggacaagttactttgaaaacttacaatgtagcaagccttgtcactatcaagaactggaacctcatctttggctcacaattattccaactgattgggctatttagctgcacatactgaagagttaagggaaaataagtcaattaattgtacagtaca

SEQ ID NO: 546693 - DNA, 2416 bp, Homo sapiens
ttttttttttttttgagatggagtctcgctctgccgtcaggctggagtacagtggtgtgacagatcactgcaacctccgcctcgtgagttcaagtgactctcctgcctcagcctcctgagtagctgggactacaggcgcatgccaccacgtccagctaatttttgtatttttagtagagacgagatttcaccatgttggccaggatggtctcagtatcttgatcttgtgatccgcctgcctcggcctcccaaagtggtgggattataggcatgaaccaccagcgcctgcctatggcacagttttaaaactgcatttgcctagaaagtggactgctgtatatagaccaagtgttgggctatatgactccattgtcttaggctatttggggttggaggaaggaagaggggtgaagtagaaaaggaacaagctaataaatgttttttaaaaagtagaatttaaaacaaaaccacgttcagctgaacaccagaacgcaacaccaggataaaaatccaattttcaaagagctagaagatcaagctaagcacttattgtattttgctgaacgttaaaattatataaatgtactacagttgccccaagatgttaaaaagtcagcttttcaaatctagtcacggcctactcatatgacagacccaattcaaatgagcaaaattgaaaagttacacatacagacaacttctcaaccaccaggctgtttagtttaagttagaagtcagaagttctgagactctccttttacccaccttgagcaaccgcagcaagttttcccttttcttcagggctgagctgcaacatcgtatttataacaggaagaagtctctctctttcactacctggcttcaagaaaatgaactgcagcaagacgttcttcaagtgttccacgttagctgcagacwcctcttgctcttgattcctttccaatcttcttatttcacttttgagaagctggtgttagagaaatgagttaaaaatgggctttaggagcttctgattaaatatggcagactgaactcatgtatttttcttctcttccccccaaatttcccccttccctccatatggcaataaaggaaggaattcagttaactacagcagctgcatgtgaagcatttcaaaggagtttatgacatcaccgtataaaatccatttgacatgaaaaccggaactccaactatgagatagtttcaaagctgcatttgcctagaaagtggattgctgcatatgaaccaagtgttgggctataggactccactgtcctaagctatttgggttggaaggaagaggggtgaagtagaaaggcaacaagctaatacaagaggagaaaaagtagatgagacacatcaagaaattctcacgagaaacagatgaagaggtggaaatgagtcagtccagcagcttaccaagtatcactgacaagaggagaggatgcatcctgtgtaaatactggagttcttgtctcagaagcacagggtatcatggaaattggagttgaaagctggggaactgatggaacgtctccatgaggagcaaataactggagccatgggttggtaccaagatgttccctctgccttctactttcgatagaaactaagccagtatggcatggggctctgaaaatgggctgaggggaacattggtagcctccactaaccccctgcccctacgctgttcctgaagtcccaggcagttaagacgtccacagtgaacggcacttaatcaaaagttcagacacagtgaaaattcaggaatataagacaatgtaaaacactatcagagaaatgaggcaaagaatgatataaaaaaggtaatatcatgttcaagtctttgaggaagatttccaggttgaaaccaagccatagcttttagtatattttcattttaggttaggcaagaaagttagcgaactttgtcctcaaacctaggaccatttaaaaaagtgacaataaagaagacgaagaaatcatgaagagagtataaatttatgaaaatataacatttggccaggcgtggtggctcatgcctgtaatcccaacactttgggaggctgaggcaggcagatcacgaggtcaggagattcagaccatcctggccaacatggtgaaaccatgcctctagtaaaataaaaaaaattagccgggcatggtggtgcgtgcctgcagtctcagctactcgggaggctgaggcaggggaatcgcttgaacctgggaggcggagattgcagtgagctgagattgcaccactgcactccaaacctagtgacagagcgagactatctcaaaaaaaaaaagaaaatataacatttaaataagtcatttaggtttactgggctagttagtgatttgttagctatgataatgtttttattagtgggaaaatgttattttatagaga

SEQ ID NO: 546694 - DNA, 521 bp, Homo sapiens
ctttccacaatatcatattgcatcacagctgatattctattccaaacttccagttcatttttcttttcctttttatcgtggtaaaaaaaaaatgagatccaccctttaaaatttttaagcacacagtatagtattgttaactatatgcacattgttgtaaagcaaatacctagaactttttaatgttgcataactgaaactctacaccaattgaacagcaactctccccagcctctgaaaaccactattcaastttctgcttctatgagtttgactacttgaatacctaatataagtgagatcatgcagtatttttctttctataactggtttatttcacttaacataatgcccttaaggttcatccacattgtatcattgtaatttttagctattataaataatactgcaatgaacataggaatacaaatatctcttcaatatcctaatttcaattcttagtgctaaatacccagaagtgggactgctggatcagatgatagttctgtttttgatttttt

SEQ ID NO: 546695 - DNA, 535 bp, Homo sapiens
atgctgctggtttgctgagcattaactgctatgtaaaccatttttgaagaagagagattggataaggatagtttttgttttttgaaggatgaaactgatttgagaaaaaaattaatgccgggcatggtggcgcaygcctgtaatcctaacactttgggaggctgaagcaggaggattgcttcagccccaaaattcaagaccaaccagcgcaagatggcaaaaccctgtctctacaaaaaatacaaaaattagctgggtatggtggcgcaggcctgtagtcccagctacccaggaggctgaggtggaaggatcacttgagcccagggggtggaggttgcagtgagctgtaatcatgccattgcactccagactgtgtaacaaagcaagaccctgtctcaaaaaggaaaaaaaaaaaattaacgtacgggggggaaaaaacagagaaagatttaattactaaatgcagtgtagtaagctagattggacataaaacagcaaaaggacattattgaaaaaactaatgaaattctaataa

SEQ ID NO: 546696 - DNA, 535 bp, Homo sapiens
atgctgctggtttgctgagcattaactgctatgtaaaccatttttgaagaagagagattggataaggatagtttttgttttttgaaggatgaaactgatttgagaaaaaaattaatgccgggcatggtggcgcatgcctgtaatcctaacactttgggaggctgaagcaggaggattgcttcagccccaaaattcaagaccaaccagcgcaagatggcaaaaccctgtctctacaaaaaatacaaaaattagctgggtatggtggcgcaggcctgtagtcccagctacccaggaggctgaggtggaaggatcacttgagcccagggggtggaggttgcagtgagctgtaatcatgccattgcactccagactgtgtaacaaagcaagaccctgtctcaaaaaggaaaaaaaaaaaattaacgtacrggggggaaaaaacagagaaagatttaattactaaatgcagtgtagtaagctagattggacataaaacagcaaaaggacattattgaaaaaactaatgaaattctaataa

SEQ ID NO: 546697 - DNA, 1215 bp, Homo sapiens
tgttgagagagtaaaagcatcagtatggggtttgtttagctttcaccatttccaaaggtattggcttgctgtcaaactctcatgtccttaggaatgtaaaggaaacattctcagtatgtatgaagaacagctgtccatggacgcagcaactttcaaaaatgattacacccaactttcctgcagtatggattatggaatcaaaaaatattttttcactgtgtaccaaagaattccgttttacaggccagttttgaagcttttaactgcatgagacatatgctgcagttctgttgtttgttctccatgtgatgtactatgaaatgtgttttttaaaaagggggagaaaaagaggagaaagggagagagtgagagagaggaaagtgtgcaaattcttctgatcaaatgtggtcttcaaaactacttttgaaactaatttaggggatgagttaggaaatgccccagctggcttccatgctaccgaagtctgaacagccctttgcaaagctggaaaaattgattttgttttgaaggctcacacagactttagtgttgtggaagttggacagagtttttattgaatctggtcctttgtgttttatgacagtctgaatgggtattaagattccacgaataaatcccctgccatttctgagatttctgatataaacatgagctccgtcaatttgttctctgtacaaatgtctttcagaatgttaacaaacatggtgcattgatgaatgggctggcctatggagtgcagtctgctttacttggtagggcatgttgctatgatttttcttttgtttctcaatgctatggccacccagaaatgggggctgttgaggggtggtgaacttcaagacttgaggacagkggagagttagctcaaggctggttggagaagtggtgttaatggccttcaattgaaagtctggccagacaccacatcaaggggattgtggattggccctcaggaaatgtattaagtcttttcttaagtgcctcaggtgaattacttagaggaacacaggtagcaaagaagagaatatatttttaagatataatctttctatattctgcataagtttgtattttttcagtgtactttaaactcaaatgtcaaattgataataccctaaaattagtttccaactaaatactataatttaaagcaagcaagccaaaaaaattaagtctcagtttttatgataaaaa

SEQ ID NO: 546698 - DNA, 1215 bp, Homo sapiens
tgttgagagagtaaaagcatcagtatggggtttgtttagctttcaccatttccaaaggtattggcttgctgtcaaactctcatgtccttaggaatgtaaaggaaacattctcagtatgtatgaagaacagctgtccatggacgcagcaactttcaaaaatgattacacccaactttcctgcagtatggattatggaatcaaaaaatattttttcactgtgtaccaaagaattccgttttacaggccagttttgaagcttttaactgcatgagacatatgctgcagttctgttgtttgttctccatgtgatgtactatgaaatgtgttttttaaaaagggggagaaaaagaggagaaagggagagagtgagagagaggaaagtgtgcaaattcttctgatcaaatgtggtcttcaaaactacttttgaaactaatttaggggatgagttaggaaatgccccagctggcttccatgctaccgaagtctgaacagccctttgcaaagctggaaaaattgattttgttttgaaggctcacacagactttagtgttgtggaagttggacagagtttttattgaatctggtcctttgtgttttatgacagtctgaatgggtattaagattccacgaataaatcccctgccatttctgagatttctgatataaacatgagctccgtcaatttgttctctgtacaaatgtctttcagaatgttaacaaacatggtgcattgatgaatgggctggcctatggagtgcagtctgctttacttggtagggcatgttgctatgatttttcttttgtttctcaatgctatggccacccagaaatgggggctgttgaggggtggtgaacttcaagacttgaggacaggggagagttagctcaaggctggttggagaagtggtgttaatggccttcaattgaaagtctggccagacaccacatcaaggggattgtggattggccctcaggaaatgtattaagtcttttcttaagtgcctcaggtgaattacttagaggaacacaggtagcaaagaagagaatatatttttaagatataatctttctatattctgcataagtttgtattttttcagtgtactttaaactcaaatgwcaaattgataataccctaaaattagtttccaactaaatactataatttaaagcaagcaagccaaaaaaattaagtctcagtttttatgataaaaa

SEQ ID NO: 546699 - DNA, 766 bp, Homo sapiens
tgctatatctgtctatgccaactgcccagaaagcttcaacgtaaactacttgaacagtgaattaaaaagtgatttattttggttttgttatttaagtagttctattctgttctattgtaattattgactacttttcctgcgctttgagacttagttgacaacttaagtctattctctataataatagatggagctatataactatcataatagttctataayagtgatagaaccatataaaggaactatggaagcgaaaagggaatttttagtacaggatgagtcgtaagtatctgtgtgcccacttaaactgttttgataatgagttcgtaagggcctatgctttatgtctcatataaagatttaccagttattttctaaccagcctgtggtgataaaggaatacttatttacttagttatagtgattccaaggtgtacttgagagttttactgaagggttattatcttcacgtgtaataccaaatttcagattactctttctaaatgatgacattttacatatgcaccttattttatgaaaatctgttataaaatctgaaattgtagagcagttaaattaggaattggctatttgtattacaaaaagtacactttgaaaaggcttcaaaggagggtttgtttttgtttttggttggttggttttaaagctttcctggtactttgaaaatactggtttctgtgaaaaacacttttataaagtaaggtatacttagtgtccaaatattatatagacatttgtaaaa

SEQ ID NO: 546700 - DNA, 506 bp, Homo sapiens
ctgacatttcatctgagcatagacatttaactcccaaatccttttcctcagaatattgagggtacttctccagtgtttttcagcatgccttattgcttgtgatagattttttgttctttctattttgtatactttttgaagaaaaatgtgttgctctctctacttgtatcgctctctccctctctggacaccttgaggacttgcatttctgtatttggagttctgttgtgtcatcagaacctgtatatgtatgcgttatcttgtttggcatcttatgagttatgttagtataaaggcttgcttgctgtcaatactgagaagttttatttayttcatgtattattttcttttctaagttttttattctgtgtttctggaattaaagacaccctgctctttctatatctgtttcttatgccccttaaactttcttttatttgttccatacatttttttctttttctttttcttttttttaaataaatcataatttattatgatttaac

SEQ ID NO: 546701 - DNA, 506 bp, Homo sapiens
ctgacatttcatctgagcatagacatttaactcccaaatccttttcctcagaatattgagggtacttctccagtgtttttcagcatgccttattgcttgtgatagattttttgttctttctattttgtatactttttgaagaaaaatgtgttgctctctctacttgtatcgctctctccctctctggacaccttgaggacttgcatttctgtatttggagttctgttgtgtcatcagaacctgtatatgtatgcgttatcttgtttggcatcttatgagttatgttagtataaaggcttgcttgctgtcaatactgagaagttttatttacttcatgtattattttcttttctaagttttttaytctgtgtttctggaattaaagacaccctgctctttctatatctgtttcttatgccccttaaactttcttttatttgttccatacatttttttctttttctttttcttttttttaaataaatcataatttattatgatttaac

SEQ ID NO: 546702 - DNA, 1543 bp, Homo sapiens
gacacttcagtgcatctctaatttkggaaatgatcaatggtcaacagaggggagactgtgtctagtagtttttacaattgtattcattaggcacaggaaaatgtaaactcagagagtctaagatagaaccaagcctccaggataaacttcagcaagcctaacccctttgtttctctttttctttctagacacttgtaacagcactaatctagaagtgagtacatatgagttctggtcctggcttagctaatttgggcaaaccgtttaacttctttgagacttaggtttccattctaacaaggtgtaggtgataatatccattttgtgcaaggtcattggtttttaccgtataacgtgtgtaggtgttacacacactgtaccatcccatacaaatgtgagttaatgtattttctgtctttattatctcttttacctgccttaatcaccaagacattgtgatctgtcactccatcttctccattaaactcttcaaccatttctattttttttggacaattacttatctcagtcatcatttcttataattccctgtctaaccctaaatgtctgtgagatccttgcccctcttctcaagtggttcaacacttaagaatggggacaattttatttttatttttatttttatttttatttttttgagatggagtctctcgctctgtcgctcaggctggagtgcagtgatgcaatcttggttcactgcaacctctgcctcccagattcaagagattctcctgcctcagcctcccgagtaactgggattacaggcactcgccaccgtgcctggataatttttgtatttttagtagagacaggtttccccatgttgtccaggctggtctcaaactcctgacctcaagtgatccacctgccttggtctcccaaagtgctgtaattacaggcatgagccaccacgcccagctgggacaattcttgttatatgttaatttcttaaaaccaccaaagtctattcaatatatgatatagtgattaagaaataaaggtgtacattgataaaaagtatgaagtttcacatatgcacattcttatagcactcataatggcatctgttaaatcttcatctaacttttaaaataaaatggcttgtaaaagctatgaattactaagctgtgggatgcttttgggatctcaagtagtaatgtggaagtctaggcactcagcactgtatggaatcaaaattcccagtggaatatggagagcagaaagattgggcagggagaacttgtgaaaatttaaacatgattttcaggttcatttggcaaaaaaaattaggtgacaatggatatttttaaaaaaacaccaccaacaagggcattgcctggccataatttattgagttattttaacactttcattctttgtgctttaggtattctgcttcctcatacttaaggtaattttgtaaaactttatggaagaaaaaacaatgacacacactcacacatagaatatttgtttattgctgttataataaattaataaaaaacccaagaaacctaaaacc

SEQ ID NO: 546703 - DNA, 1543 bp, Homo sapiens
gacacttcagtgcatctctaatttgggaaatgatcaatggtcaacagaggggagactgtgtctagtagtttttacaattgtattyattaggcacaggaaaatgtaaactcagagagtctaagatagaaccaagcctccaggataaacttcagcaagcctaacccctttgtttctctttttctttctagacacttgtaacagcactaatctagaagtgagtacatatgagttctggtcctggcttagctaatttgggcaaaccgtttaacttctttgagacttaggtttccattctaacaaggtgtaggtgataatatccattttgtgcaaggtcattggtttttaccgtataacgtgtgtaggtgttacacacactgtaccatcccatacaaatgtgagttaatgtattttctgtctttattatctcttttacctgccttaatcaccaagacattgtgatctgtcactccatcttctccattaaactcttcaaccatttctattttttttggacaattacttatctcagtcatcatttcttataattccctgtctaaccctaaatgtctgtgagatccttgcccctcttctcaagtggttcaacacttaagaatggggacaattttatttttatttttatttttatttttatttttttgagatggagtctctcgctctgtcgctcaggctggagtgcagtgatgcaatcttggttcactgcaacctctgcctcccagattcaagagattctcctgcctcagcctcccgagtaactgggattacaggcactcgccaccgtgcctggataatttttgtatttttagtagagacaggtttccccatgttgtccaggctggtctcaaactcctgacctcaagtgatccacctgccttggtctcccaaagtgctgtaattacaggcatgagccaccacgcccagctgggacaattcttgttatatgttaatttcttaaaaccaccaaagtctattcaatatatgatatagtgattaagaaataaaggtgtacattgataaaaagtatgaagtttcacatatgcacattcttatagcactcataatggcatctgttaaatcttcatctaacttttaaaataaaatggcttgtaaaagctatgaattactaagctgtgggatgcttttgggatctcaagtagtaatgtggaagtctaggcactcagcactgtatggaatcaaaattcccagtggaatatggagagcagaaagattgggcagggagaacttgtgaaaatttaaacatgattttcaggttcatttggcaaaaaaaattaggtgacaatggatatttttaaaaaaacaccaccaacaagggcattgcctggccataatttattgagttattttaacactttcattctttgtgctttaggtattctgcttcctcatacttaaggtaattttgtaaaactttatggaagaaaaaacaatgacacacactcacacatagaatatttgtttattgctgttataataaattaataaaaaacccaagaaacctaaaacc

SEQ ID NO: 546704 - DNA, 1543 bp, Homo sapiens
gacacttcagtgcatctctaatttgggaaatgatcaatggtcaacagaggggagactgtgtctagtagtttttacaattgtattcattaggcacaggaaaatgtaaactcagagagtctragatagaaccaagcctccaggataaacttcagcaagcctaacccctttgtttctctttttctttctagacacttgtaacagcactaatctagaagtgagtacatatgagttctggtcctggcttagctaatttgggcaaaccgtttaacttctttgagacttaggtttccattctaacaaggtgtaggtgataatatccattttgtgcaaggtcattggtttttaccgtataacgtgtgtaggtgttacacacactgtaccatcccatacaaatgtgagttaatgtattttctgtctttattatctcttttacctgccttaatcaccaagacattgtgatctgtcactccatcttctccattaaactcttcaaccatttctattttttttggacaattacttatctcagtcatcatttcttataattccctgtctaaccctaaatgtctgtgagatccttgcccctcttctcaagtggttcaacacttaagaatggggacaattttatttttatttttatttttatttttatttttttgagatggagtctctcgctctgtcgctcaggctggagtgcagtgatgcaatcttggttcactgcaacctctgcctcccagattcaagagattctcctgcctcagcctcccgagtaactgggattacaggcactcgccaccgtgcctggataatttttgtatttttagtagagacaggtttccccatgttgtccaggctggtctcaaactcctgacctcaagtgatccacctgccttggtctcccaaagtgctgtaattacaggcatgagccaccacgcccagctgggacaattcttgttatatgttaatttcttaaaaccaccaaagtctattcaatatatgatatagtgattaagaaataaaggtgtacattgataaaaagtatgaagtttcacatatgcacattcttatagcactcataatggcatctgttaaatcttcatctaacttttaaaataaaatggcttgtaaaagctatgaattactaagctgtgggatgcttttgggatctcaagtagtaatgtggaagtctaggcactcagcactgtatggaatcaaaattcccagtggaatatggagagcagaaagattgggcagggagaacttgtgaaaatttaaacatgattttcaggttcatttggcaaaaaaaattaggtgacaatggatatttttaaaaaaacaccaccaacaagggcattgcctggccataatttattgagttattttaacactttcattctttgtgctttaggtattctgcttcctcatacttaaggtaattttgtaaaactttatggaagaaaaaacaatgacacacactcacacatagaatatttgtttattgctgttataataaattaataaaaaacccaagaaacctaaaacc

SEQ ID NO: 546705 - DNA, 661 bp, Homo sapiens
gactttccagactaacagggttaccacaaaccttcaatttgtcaacaatgcaatatctttgaaggacaataaagcaaagtgctataaaatgggctataactatatacagttctgttattataggtttcagtcctgagtatgggttattctgtaattcagggaagaaaagagacagtagaaagatcaataagtgtaacactaacacattttttaacgtttttttttttttttttttcttgagatggagtttcactcttgtcacccaggctggagtgcggtggcaggatctraactcaccacaacctccgcttcctggggttaagtgattctcctgcctcagcttcccaagtagcttggactacaggtgcttgccaccatgcccagctaatttttgtatttttagtagagacaaggtttcaccatgttggccaggctggtcttgaactcctgacctcaagtgatccacccgcctcagcctcccaaagtgctgggattacaggcatgagccatcacgaccagcctaaaagtttttaaggaacaaagattacttgacataattctcacaaacattattttttggcatattgctttgtcatatttgtagatattttctattcttgaaaaatatatatttttacactcctttcctgcatgctgatat

SEQ ID NO: 546706 - DNA, 574 bp, Homo sapiens
gtactttcaatcagttattttgttggttttatagagatatccaattactgagtttttattttatagcatattgtaaaaaggatatgtaaaagataaagttgttatcctataaagataattttctctcttttagtctattctttttttaaaaaatcagattttattttagattcmggggtacatgtgcaggtttggtacatgtgtagcatattgcatgacgctgaggtttggggtatgattgattctgtcacccaggtagtgagcatagtacccaataggtagggtactgtggtagtttttcaacccctactcaccttcctctcttccctctctattagtctccagtgtctatcattcccatctttagtccctgcgtgctcaatgtttagttcccacttataagtgaaaacatgtggaaactggttatctgtttctgcagtaattcacttaggataatggcccccacatgcatctgcgttgttacaaaagacatgattttgttcttttttatagctgtgtagtgttccatggtgtatatgcaccacatgttttaaatccaatataccattaatgg

SEQ ID NO: 546707 - DNA, 358 bp, Homo sapiens
cattttgctcactaacttgggctccaatgcctccagccagaatagcagcatacagacgtgttcttttaaagtttatasttattcctttttgtaaaagattattataccaacacttttagtgaaaattaaaagtgttctcaatctttaaaccctcttgagtaaatttaaaccctcttaagactcacatctctattagggataagactaaacttcttccttttttatcctttcttttaccctagacttctcagatgtacttttagggttgtctttttattgtaattttgacagtaaggtaaaaattagttcagtctttgtgtgtgtgtgtgtgtgtgtgtgtgtgtgtgtgtgtgtgtgt

SEQ ID NO: 546708 - DNA, 849 bp, Homo sapiens
cccacagcaagctgtgattcaagagagggcaaaagagtccacccacaatggaaatcccagtctttttgtgacctaatatcagagatgacatctcatcacttcggccatattctatgcagttgaagcaagtgcagcccatcattcaaagccccagtaatgaagctcctctgcttgaggggaggaataccaaataatttgtagtcatatctttaaaatcattacaggagcactggctctccgcatcagaaattatgctatgtgtctgataaaaattaatacttgccttggcascattatttgcatactatatttttttaagtggggatttagctacagtgaaccttgaaagggatactgaatgccatgtggtactcacattcatggaactgggccttatatctccatctttggaatgcagctgctacctggaagatctttctgtgctagcagcttaagctggaggagctccagtgcacaaatcataacaagagcctgagtgtagaactaatatctatgaggagagatgggtttccccaaggggaaagagtgaagaacacatgatgaagggaaatgtgggtaaagtccatgacgttgaggagaaaaaatgcagtgttcttttaggacacctccttttcaaagacctaagacttcccactacattaaagttatcatctttatacttcccatgtacatcactgtcctttagaaagactttctgatttaaataactacatgttccctcccaataatctatttatgtgatctttaacagagtggggacacagtagatattcaggggagaagcagtaaatataccacattatgctgcaaggactctggtgtgaacag

SEQ ID NO: 546709 - DNA, 834 bp, Homo sapiens
tcaaaagccaaccgtcatttccttgtgaacccaaagggctggctgattgaatggaaggtggctctgtacctctcagttgattgctacctctgggggacggcacagggaagagccgtttacattctggcttctgaagaagagtgaacctccagctaatcacaagaatgagttgtcctaaaatggacgaggcaccagctgctgctctggtgttaaatctaaatccgcctcccccactgcactgccgctccccactccctgcccctctgcaccctgggtttctgggttctcctgcaagacagtgaatcacagcttacattggtacttcctggataaatcagaaactgggcagtgaagagtgaatgagatgatgcgcctgaaaagcaccaagtgtggtccatggcacctggcagggggttcaagaaatgtcagctggaattagcttgagaactgactgcatctgcctarttggtggctatggaggaactgctcatgcggcttatccttcatccagtatgtagggtgatctttaaaaactacaaatgaggccgggcgtggtggctcatgcctgtaatcccagcactctgggaggctgaggcaggtggatcacctgaggtcaggagttcaaggccaccctgaccaacatggcaaaacccgcatctctactaagtacaaaaaaaattagccgggtgtggtagtgcatgcctgtaatcccagctactcaggaggctgaggcaggagaaatcgcttaacctgggaagtagaggttgcagtgagccaagatcgcaccactgcagtccagcctgggagatagagcaagattctgtgtcaaaaaaa

SEQ ID NO: 546710 - DNA, 563 bp, Homo sapiens
ctgcgatcactgccatactttagtcacatttatttactaggctgtttcttactgctgtgttagagtaaggttgcatacctagaattcagagatcccaaatggtgaaactctaaaagctagccttgtaaaacacatgactggacatacactgagtactggaatgctgccatgggatcattcatgtgcatgtctctcctagatatagctgattctgcatctactctgtctttttwttcctctgttttgttttaatcccccaaaatatcattcttaggcattcactctgtcttgcaggtatagtcacatttctgctcaaagctcttgttccagaagtgaatacctgatataaatttctcacctaagtaatcaagatggtacaatactaaatggtgaagtaccaccttttaccaagaaatagccacaatatcccctttcgagctagtttgctaaacctaatgttgataatccactgggtcattaagcaccaaaatgatcacttactttgcaaaacccctggtcatcattttttcattgcttacaaaatgtttgcataaccagtattt

SEQ ID NO: 546711 - DNA, 579 bp, Homo sapiens
tttagcaagtcagactttatccaaaacaatactactacacatgagatttttgtttagaagtacagtgtagcaaaaaaggaaatttttttgtcataaaagcaacaaatttgcatagcaagaaatcaaataatatataaagataaaagaaaaaggtttcttccataacccttcaaattctcagccccaattctcagagataactatagttaacagcttcttgtatgtccttacagaaatagtgtattcatatacaagcatatatttgatgtcttaatttttaacaaatagaataatactaatttatttttcctttttaagcttaataaygtattaataccttggacatctttctatcttaacacagctaaaactataagtctatttattaagtctcctattgataaatatttaggttctctgttttggctggaatgttgaagtgaaatatatgtattagatagatatagatttcactttgcagaagtgaatgagtataataggataactttttaaaaatataattgctgggtcaagatatatgtgcatttaagatttgacacacattcctaagctgccccc

SEQ ID NO: 546712 - DNA, 507 bp, Homo sapiens
agccagtaacagtttcaaagtgcaaggctggtgctcctctcctccaagcccctctctgcagtgatgacaatgggagtgttgccaggaagcatactgtctctctgccccaccacccctgtgccctgacccccagctgtggccaggctcagcttcctcgagcgacagggctaccccagactaaggacaatctgactctgaacttttgggcaatcttttccatgggctaatttgctataggattgctcgtttktcctggaagaccgagtggctcttaggagtggatttttttgtccacacttagaagaccagcaaatggtctttccctcttctgtactctgaatcagagaggcagtgtgtgccaatgtcaccaccccacagacaagatgaccagctagggaaggggtctgtctgtgttcctcacttgttctgaatgctcagaactcaccttctccagaaagcttcctcttgtaatgaaccacagctgatgtttcttgagcacttactctc

SEQ ID NO: 546713 - DNA, 1088 bp, Homo sapiens
aatatcaggccccaagttcccagaagtagcctctggaccccttggcctaaactcaatgctctctccctcaccctgggctctcctttgtaccaacctcttttcattgcatcattagccactgttttgagacggagttttgctctgtcacccaggctggagtgcagtggcacgatcttggctcactgcaacctccacctcctgtggtggaatcctgaagcgattctcctgcttcagcctccctagtagctgggactacaggtgtgagccaccacgcctggctaatttttgtatttttagtagagacggggtttcgccgtgctggccaggctggtctcgaactcctgacctcaggtgatccacctgcctcagcctcccaaagtgctgggattacaggcatgagccaccacgcccggctagaaatagagcacttcctatgtgtcaagcattgtagataggcccgtatatacttcagcttatttaatgttcacagtccacacttaattgatgagaaaagtagctcagggaggtgacatcattgagctaaggtaacagtgataggtggtagagccaggtgccaactcaggttggtttgataaccaagtttcctaaactcagtcatggagagatgatacagtaggatcacttccagacaagacctctagaaactagctggaggaaaacaagggaccactacacagcatgactggtgatggtatgttgtaatttcaaccctggcccaagatttaaatgattcttcctggagcaattcagagactgctgggaccttagatgttgtctcctacaggttcaaaactgctataaattagtttataaataggacatgatgtgattcctggtccaaactggggcaatctgaggctcagagcgggcactattaatagtgccagaacaagagtcgtaaatggggactgtcttggacagaaaaggacatacagtcaccctatttataaataattgtcaaatgtttcctaataggttggggaatctgaggtcgaagacawacagtctctctccatgtcaagttggaaacaggtcccacagctctcagaggcacctgagtttaggcc

SEQ ID NO: 546714 - DNA, 497 bp, Homo sapiens
tgcataatacggtgtgatttcctgtggtgaagcaggctgggaggggaggtccagggaccccacacaacattgaggtcccatctttgtcttgatgataaccccctaaccctcccaaggcatttgatttgaaatgtaatttgggatcactttcttggcctcctccagtgaawgagatttgaagatgatttctaaactgtggcattctgttactaaaaaccctcctccaaggaagcagaatagatgcaagtctttatcatctgggtccccgtcgtcccaagtttcctggggttggactgtgtccggcgggccgctcgagcagccgaaggcagacacagagcctcccctactgcatccttcaccatttccaccccacagcacaggctgtgccctctccaaatgggggactgtgcttcacatgcagggaggggagaagccactgggtcctgaaagaacatgaataaatataacttgttttctgtttaattatccagtctcct

SEQ ID NO: 546715 - DNA, 850 bp, Homo sapiens
tccttgtgtagttagcaacccacccatgacagggggccctagaccacctgggtcccacacactgccctgacatcttgcccacagggtttcaacagtgagtagacagggtcaaggacttgcttgaacagtaatatacaagaacagtgactagtaacactgccagaaaggtaaactattctagtaggtatatgcatagaggtggagtttagtatcaatttttggacagtcattaaaatgccaagagatgaaatctatttatatatgactatcttacaaatggatgaggttacccagaaaattaagccagggcaattaaggtgaaaaaaaaaaaatcttattttggttgtaagtttattggtagaataaggcaaaaacagaaactaaatagatgttgaacaaattcattaataacgaataattacaaatttgtttgctaaaattaacttttctcctgggaactwaaatcagtaggaatttttcattgatatttttgagaaaaagacattgggtaagagtactattatctttcctatcatctgccacaataaaaactgcctttaaaaagattaagtaattcatgcttactgttaaaaaaaaaaaacacaacacataaaagcacaaattgaagaagacgttgccccagattctaaagtaagataatcaccacattctggtgagcatccttgctcgtatccacatgcgtgcatacacaacatgcacgcacacacacactctctccatttttctctctaaatgggatcatgaatattgtccttcggtggttttgactgaaggcacagaaataataaccaaatgagcaactgtgaaatcaaccctctacaactgctaa

SEQ ID NO: 546716 - DNA, 637 bp, Homo sapiens
  misc_feature 229, 230, 231, 232, 233, 234, 235, 236, 237, 238, 239, 240,241, 242, 243, 244, 245, 246, 247, 248, 249, 250, 251, 252,253, 254, 255, 256, 257, 258, 259, 260, 261, 262, 263, 264,265, 266, 267, 268, 269, 270, 271, 272, 273, 274, 275: n = A,T,C or G
  misc_feature 276, 277, 278, 279, 280, 281, 282, 283, 284, 285, 286, 287,288, 289, 290, 291, 292, 293, 294, 295, 296, 297, 298, 299,300, 301, 302, 303, 304, 305, 306, 307, 308, 309, 310, 311,312, 313, 314, 315, 316, 317, 318, 319, 320, 321, 322: n = A,T,C or G
  misc_feature 323, 324, 325, 326, 327, 328: n = A,T,C or G
gttttctccaaatagaaacagaatataataaacacctcaactctggatgccgagatgcaaatgaaatgctagggtttgtgaggccctgggacctggcccctctgccacctcaccggctcccagctcccgctcaagcaccgcccttcctctgccttgctcattctgtgtcctgtgtggaatgctcgtctcctgactggctccttcccaccactcaggcctcactcatctnnnnnnnnnnnnnnnnnnnnnnnnnnnnnnnnnnnnnnnnnnnnnnnnnnnnnnnnnnnnnnnnnnnnnnnnnnnnnnnnnnnnnnnnnnnnnnnnnnnncagtgcttctctgaaagggcatctcctgtgtcagggtccaaagacctctgtggcttgatacttttactcttcaggcctgttatgctctgaaataattgcgtgacttccatattgtcccrccgtcctttgggagggccagtttcctggagacagcagctccatcttgtccacgtggggtagtcctgatacccaggacagtgcccggcttgggcagaagcacttggccagttctgctgaatgaatggtttggcacaaatgacctttttaaaattttgaaataatttaagattcataggacatggcgaaaac

SEQ ID NO: 546717 - DNA, 652 bp, Homo sapiens
ttgccatgttgcccactctggtctcgaactactaagctccagggatcagccagcctcagccttccaaagtgctgggattataggtgtgagcccctgcgcccggccctgaaaatcttttaaccttagaatgatacagggcagtggttctcaatgagaggtagttttgccccccagaggacgttgggcagtatttgctgctggcatccggatggtagaggccaggggtgctgctgaaatcctacaatgcacaggacaggcttccacaacaaagaattacgcagctccaaatacaggcaattgtggctatatgcrgtagttgtgttatatggggttgccacacatttccctcaaccaatcaatacataaccttgttttatgcatgtttctgttgaaggatgccttatttaatatacattgttgattcattcacatccaactcctggccaccagtgctctaactcatgcctgaatgaagcttctctaacatacgtattttctccataaggcacatcacggccttctcgcacttaggaacgctagacagctcttcagcaccatgcttgggggaccttttaaacgctgatatcaccactaaaaggcccaaagatgcaaagcacgtggcactaaacagaccgagaaaagacactcgttc

SEQ ID NO: 546718 - DNA, 657 bp, Homo sapiens
tgtctgtagctgggggatgtcagaagacataggaggagacagaaaaggtaggtcagaattgataaagcgtagaggttaaaggttagaggtcaagagggcaagttacgtcaacaagggtcaaagatcgaaatcaagtttggggtcaaatgtcagaggccagaggtctgactggagtcaatgggacttagaaaacagagatggaggccagaaaataaagtcagagttgatggaggtcagaggtcgagatgtgacaggttgagatggggtcagaagtcagtgtgggttagtcagtgtatcgggggtcagagattagaggtagagggcaagtcaggttgatggaggtcaaaggccagaggtggaggcccaaagagagcgttgtagtcagtggaggtcacaggtgggaggtcagggggccaggtgggggtcactatggccctacctcctcccgccggtactccggactcaggaaggcctcgtagcggctcctcaggaagcggcccagctccagctgctggcggaccccctcctggggacagaacagcctcagcctaccmctccccacccctcccacccttgccctcaccgcctacccgcttctcaccgtggtcagctggcccaggcctcgtggccacagggtggaggccacctccttgtgtg

SEQ ID NO: 546719 - DNA, 567 bp, Homo sapiens
aatcctttttyttttttttttttttttttttgagactgagtttcgctcttgttgcccaggctggagtgcaatggtgccatctcggctcaccacaacctccacctcttgagttcaagcgattctcctgcctcaccctcccgagtagctgggattacaggcatgcgtcaccatgcccggctaattttgtatttttagtagagctggggtttctctctgttggtcaggctggtctcgaactcccgacctcaggtgatctgcccgccttgacctcccaaagtgctgtgattacaggcttgagccactgctcccggtccattgaacgtgtgtatatatagttgaataaagaagacactggagtttgttctgtatcttctcctttcaaattctacgccatttgaattttttcctcttccttttatatatttttaattgacaaattgtacatatttatcatgtacatattgttttgaaatatgtatataccgtagaatggctaaatcaagatcattaacatatgtattactttacctattttccttttttcgttgtgtctctgccaggtttcgg

SEQ ID NO: 546720 - DNA, 524 bp, Homo sapiens
tcgcccaggctagagtgcagtggcaacatctcgactcactgcaaactccgcctcccgggttcaagcaattctcctgcctcagcctcccgaggagctgggattgcaggcatgtgctaccaggcccagctaatttttgtgtttttagtagagacggggtttcaccatgttggccaggctggtctcgaactcctgaccccgtgatctgcctgcctctgccatccaaagtgctgggataacaggcgtgagctactgagcccaatcaatttttaaaaatcatatatactcaacacctttgcttttaaaaaacccttaagcattttttaaaatacaattttgttttatttcagatggagtcttgctgttgtcggcctgggctggagtgcaatggcgcgatctcagctcactgcaacctctgcctcctgggttccagcaattctcctgcctcmccctcccgagtagctgagattacaggcgcctgccaccacacccggctaatttttgcatttttagtagagacagggttt

SEQ ID NO: 546721 - DNA, 504 bp, Homo sapiens
tgcatgctccccataggggtttgagcagtagggcaccaaacaagcaatccacgtgttgtacgccctgcaaggggaataagggaactttcccgtttcagtaatttgcattaatgataattaaaggttaatgatgttcagcacctttctagaagcctaaggccatttcttcttttttatcgactctagttctttaggaaaaatactcctttattattatttttattgattttattaatcaatgatagttattttgacatttacgtcttctcactttgatatyggtatcatctgtggtactgtttttattttccttctattttattttgcttaagtcatccggtcctgctatatggatgatggacattatgtataaagaacttagatacttttgtgattttatttcctcacacacacttagaatatggtccatcattttaatgtagtcctagattgagatggtccagattttatgtggcttttctgtttctagacgcttttatttct

SEQ ID NO: 546722 - DNA, 659 bp, Homo sapiens
tccgataatattctctctcctacctggtgtacctggcaaactgttgcaaactgtgggattctgcttaaaagcaaccttctctgggaaagrtcctctaacaaccaatccacctgaagatgaagtgtgtcatcttcctctgccatactgaagtaacatatacactcatctattatagcatttattatattctcctttagctatttttgcctccttcagaatttgtattaaataaagtcaaaccgctgggcgcggtggcttacacctgtcatcccagcactttgggatgccgaggtgggcggatcacgaggtcaggagatccagaccatcctggctaacacggtgaaaccccgtctctactaaaagtacaaaaaattatctgggcgtggtggcgggcgcctgtagtcctagttacttgggaggctgaggcaggagaatggcgtgaacccgggaggcagagcttgcagtgagctgagattgcgccactgcactccagcctgggcgacagtgcaatactccttctcaaaataaaaataaaaataaaaataaagtcaaaccagaacatgtcctacttattttttctcttaaattatctggctgactatctaacacataagggatatttgatagatatatttattaatcaagtgtttgaggaaaat

SEQ ID NO: 546723 - DNA, 613 bp, Homo sapiens
tttccaaatgaggtaataaatgttttggtttgattttccaggaaaacaaggcctaaggctagaactgggagatggtcagaagaagtagcagaaagggatgtagaggtaaacatggggaaagaggaaaaggtcatacatgttcattttagagctgtttcaactgtgggcaactggggcttaatcccactagacctcccctgaaaaacctgtagaatacacctcagatttgtccatctgaaggacagggaccatttatmcaccaattccacccttgttggttaaggatggccccagggaaattcatccccaccctcctttcatacatgtggatgcaacaggcggtattatcaaaagatgactgcgacaatatctccccactcacattctcatctgcaaaatgaactggccactccccaacaggaagcagagtctattccctttgaatgtgggctgcccccaggactgttttagtcaatggaatatggcagtgattcctgtgatttctgaacccatgtgtgtgtgtgtgtgggtgtgtgtgtgtgttttgtttttttgtttgttttttgcccaggctggagtgcccaggctgttgtgcaatggcacgatctcggct

SEQ ID NO: 546724 - DNA, 921 bp, Homo sapiens
agccctaactagtcttgacccaagcctgcacctgcccatcaacaggtcttacaggcatggccatgggacatacatatggcaattgcagtgaagtctcaggactttaactgggaatgctaggatgaagacgcactggatttccctctggatttgaactgagagcaggcagctctgagaagtgccgtggctaccttgctaccccagcaggaacctggctgagaatgaaatcagtactgagaggaagcagcattgaaaaacagatcttggtggcatcctttgaagcctgaatccagctagacctggtgctggaacccaggcttcaactttgcactttcatgagccaatattttccctctgcttttcaggctggttaaagttgattggctcaactaacatcctggctccatccataaaacgacagtccattctcacccgcttctctagccctgttgggctgttcagaaatgcatgcactggccaatgcagtggctcacctgtaatcctagcacttctgggagggagagatgggaggattgcttgaggccaggagttcgagactagcctggtcaacatagcaagaccccatctcaaaaaatgttttaaaaattttaggccaggcacggtggctaacgcctataatcccagcactttgcagtgagcagacattgtgccactgcacttcagcctgggtgacaaagtgagactccgactccagaaaaaaaaaaaaaaaaaaaaatagccaggcatgttggtggttgcctgtaatcccagctagcctgggaggctgaggcagcagaatcgcttgaaccagggaggcggaggttgcagtgagccragactgtgccgctgcactatagcctgggcgacagagcatgactccatctcaaaaaaataaataaataaaataaaaagagagagaga

SEQ ID NO: 546725 - DNA, 784 bp, Homo sapiens
cattcatccatgtttcaaaaacataaaatctcttataaagttatgttctatctcatctcattaagtaagactctaatctacaaaccaagagagaagccagacactgcccagggcacatatttattgatcacatttattttctccatgaggtaggagataaagaataagactatggggtgttaatctgatttgcaattgttaaagttaagaaacaattgacttctgaatatactgtaacaatgttttaacrtttttcaatataaagtttaaaatcagataagtaaacaacaataattatgatagtgatgtgctaaagtgtcctggaaatgatcagtttagtttaaaaaagatccatcataaactttatccaaaataatttatgcaaatcattttaagctatgaaataaatattgaaaatgttgtattgataagaatctaaacaagctcattggaagaatagtattttataccacttaaaaagataaaacacagacttaattttaaaattcttccaatgatgtaaatggtatttttcagtttgattacctttgtcatcagtaattcagaaatcagttgtgcatatgcaagctgttcaataggacacaataagtaaacagagaggctcaaagttactactggagtgataaggaagggagtgagaacttgagattgcacaggaaggagcattactttcctggacaatgtgcaatccatttacctttcaagccaatcatgaggcaattatttttgccaggaattgatacaaccaatcactccaaccttc

SEQ ID NO: 546726 - DNA, 1111 bp, Homo sapiens
acttgaagcccaggaagtagagcttgcagtgagccgagatcgcgccactgcactccagcctgggctaagggagtgagacccggcctcaaagcaaacaaacaaacaacaacaataacaacaacagaaaaccacacacactctgtgagactgcatagatttgaggatctagaygagtagatggtagactctttttctttatcatgtgaagatgccagttggccatgttggaaagaaagagatttgggggttgcgttttcctacctctaaggtgagcaagtgagcacagacattcatttccttcaaatttacttgaaatagcagagaaatggctatattgagggagaaagtatgaatccactgtgttcgtgtggagattatgacaggtagacttccaaaggagcaaaatgcttatgccccaattataagaaacaatctaacatactgagtctttattttcattatgaagctgatgcaaagtattaaagattcaatagttcatcgaacaaaagaattcgtttgacttaacgtattgaacttcatgaacgaaaataaggaaacatttttaacttgtatgaggcacttaggattatgtactgcacattagatcacaaagcaagatggaacatacctgtgtgtatgtttatagtaagtggcattatgtttgctatctaccaaggaatattagaaatgtttacattaagaaatgcagaaaaatattaattataatagtgacaagttaaaccaactatgaagtctatttcatgtgatatttacatagccatgctagttgtttaattggttaaaattacatagaatgtatttttcgttattgtatatttttcgtaatgttttatgtatctgtctaaaatattcaattaattatagtcaaacaatgttactataacaaaaattatttgtctgtttcagtttaatgtaataatggatatattcaggattatgtttaccaatttattctgtgttctttacactttccctattttcttattctttctattttaacttctgtgtttttaaaacatttttaaagcaattctacattttgcacttttgtttagaaggttttgtactcactatcttcgttttacatttt

SEQ ID NO: 546727 - DNA, 1111 bp, Homo sapiens
acttgaagcccaggaagtagagcttgcagtgagccgagatcgcgccactgcactccagcctgggctaagggagtgagacccggcctcaaagcaaacaaacaaacaacaacaataacaacaacagaaaaccacacacactctgtgagactgcatagatttgaggatctagatgagtagatggtagactctttttctttatcatgtgaagatgccagttggccatgttggaaagaaagagatttgggggttgcgttttcctacctctaaggtgagcaagtgagcacagacattcatttccttcaaatttacttgaaatagcagagaaatggctatattgagggagaaagtatgaatccactgtgttcgtgtggagattatgacaggtagacttccaaaggagcaaaatgcttatgccccaattataagaaacaatctaacatactgagtctttattttcattatgaagctgatgcaaagtattaaagattcaatagttcatcgaacaaaagaattcgtttgacttaacgtattgaacttcatgaacgaaaataaggaaacatttttaacttgtatgaggcacttaggattatgtactgcacattagatcacaaagcaagatggaacatacctgtgtgtatgtttatagtaagtggcattatgtttgctatctaccaaggaatattagaaatgtttacattaagaaatgyagaaaaatattaattataatagtgacaagttaaaccaactatgaagtctatttcatgtgatatttacatagccatgctagttgtttaattggttaaaattacatagaatgtatttttcgttattgtatatttttcgtaatgttttatgtatctgtctaaaatattcaattaattatagtcaaacaatgttactataacaaaaattatttgtctgtttcagtttaatgtaataatggatatattcaggattatgtttaccaatttattctgtgttctttacactttccctattttcttattctttctattttaacttctgtgtttttaaaacatttttaaagcaattctacattttgcacttttgtttagaaggttttgtactcactatcttcgttttacatttt

SEQ ID NO: 546728 - DNA, 1111 bp, Homo sapiens
acttgaagcccaggaagtagagcttgcagtgagccgagatcgcgccactgcactccagcctgggctaagggagtgagacccggcctcaaagcaaacaaacaaacaacaacaataacaacaacagaaaaccacacacactctgtgagactgcatagatttgaggatctagatgagtagatggtagactctttttctttatcatgtgaagatgccagttggccatgttggaaagaaagagatttgggggttgcgttttcctacctctaaggtgagcaagtgagcacagacattcatttccttcaaatttacttgaaatagcagagaaatggctatattgagggagaaagtatgaatccactgtgttcgtgtggagattatgacaggtagacttccaaaggagcaaaatgcttatgccccaattataagaaacaatctaacatactgagtctttattttcattatgaagctgatgcaaagtattaaagattcaatagttcatcgaacaaaagaattcgtttgacttaacgtattgaacttcatgaacgaaaataaggaaacatttttaacttgtatgaggcacttaggattatgtactgcacattagatcacaaagcaagatggaacatacctgtgtgtatgtttatagtaagtggcattatgtttgctatctaccaaggaatattagaaatgtttacattaagaaatgcagaaaaatattaattataatagtgacaagttaaaccaactatgaagtctatttcatgtgwtatttacatagccatgctagttgtttaattggttaaaattacatagaatgtatttttcgttattgtatatttttcgtaatgttttatgtatctgtctaaaatattcaattaattatagtcaaacaatgttactataacaaaaattatttgtctgtttcagtttaatgtaataatggatatattcaggattatgtttaccaatttattctgtgttctttacactttccctattttcttattctttctattttaacttctgtgtttttaaaacatttttaaagcaattctacattttgcacttttgtttagaaggttttgtactcactatcttcgttttacatttt

SEQ ID NO: 546729 - DNA, 639 bp, Homo sapiens
  misc_feature 233, 248, 278: n = A,T,C or G
aaaggatgacagcctccatttgccaaagactggctgattcataggaatccttttcttggattcattaaaatttagcattcataaacagaagctcagagggaaagaagacattaaagttagggattctgtaggatacccaaagaggtctatagaattcagggagtccacagacctggctgggaacaattgtattgttattttcactaacctttatctgaaattcaggatttccnctcaattaacaatgntaaacacgcaatccagagcaatagacaacntgtgtttctatctccaatagagatcacagatatattcatattcattatagttgcagatatctcaaaatactgtttctgcttctcactgctttgaagttatagtasatagtaggcttgctggtagatctaaactagtgcattaaaagtacatagattataaatttggcttatagtcaggtaactgtgtttgtaaattattgtttttctttgcagtcctctacatggtattttcttcctttaatcccatgacaagctacggtgttttaaaaatatatttaaaacgttattcttagaaggggtctgtaggcatcaccaaagttctagagaggttcatggcataaagaaagttaaaaatctcttc

SEQ ID NO: 546730 - DNA, 533 bp, Homo sapiens
tctcaccattatcactttgactacagtgctttttgtccctttgtgtttatcttctgatttgagtaataactgcaaaatatcttcacttatttttcttcttgggtggaaaatgaaaaattctgaatttgcaactgtgttcaattcaagctaaaaaagaaacactacaaagatgatgtttctagacttctataatcagggttcaattgacccatacaataactgtactgtattattaaaaaagtaaactttgcctttattttttgcaaagtctttaaaaaagaataaagccatgaactattataatctttactracagttaaaatatttataaataaaagtcaaaaactaaatttgggtctctagtgttaagcttaagagttaagtcaagcaaagagtgcaacaatacaaacgaggaaagactatttcaagaagctacagtctaacattgggggcagacaagtaaggtgataatcacagaacagtggtttaacagagtgctctaataattgatttatacaagtgttatgaggaaa

SEQ ID NO: 546731 - DNA, 569 bp, Homo sapiens
ccgataatttgtttggcatgttacttcaacatttatctgatatagtaaaatatctggttatagttttttctctataatatcaccctcaatttattctgagtataacatattgtatttacatttaaatatggatttatcttttttatttaaaaattttattttgaaataattgtatattcatctgcagttttaagaaataatagagacaaattgtatttcctttacccaattttttcctaatggcaatatattgcaaaaactatagtctgacatcacaaccagactattgtcattaatatagttagcatgtagaatgttttcgctagcataaagacttcttctattgcccttttatagatgcatccatctcacttctgttccacgcgtttctttcatcactcagaataattctctggagattcactcacgttgtttsgtgtatcaacagatcattctatgaaattattgaatagcattccattttgtagttataccatagtttctttagcagttcagctgttgaaaaacatctagttgtttccagtttttggctattacaaataaaactg

SEQ ID NO: 546732 - DNA, 655 bp, Homo sapiens
ccatcgcactccaaccttggggactagagcgagacttcgtctcaaaaaaaaaaaaaaaaaaaaaaaaaaaagaactgaataacaccagggcgcggtggtgcatgcctgtaatcccagcacttttggaggctgaggcaggtggatcatgaggtcataagttcaagaccagcctggacaacatggtgaaaccccatctctactaaaaatacaaaaaaaattagctatgcatggtggcgggtgcctttaatcccagctacttgggaggctgaagcaggaatcatttgaacctgggaggcggaggatgcagtgagccgagaccatgctacygcactccagcctgggtgagagaatgcgactacatctcaaaaaaataagataaataactacttctcaaataagctttggtagatgtggtattctctaataggatgttgctgcagatgcagacttggagagaatttagccatgggtgttgactacctgtgaatactaaaagtgcatttataaagagacattaaagagctcattgcctgttcctctttccaccatgttaggacatggcaggaagatggctgggctaaaccatgaagaagcctctcaccaggaacttatttggctggcaccttgctcttggatttctcccttcccaaattca

SEQ ID NO: 546733 - DNA, 655 bp, Homo sapiens
ccatcgcactccaaccttggggactagagcgagacttcgtctcaaaaaaaaaaaaaaaaaaaaaaaaaaaagaactgaataacaccagggcgcggtggtgcatgcctgtaatcccagcacttttggaggctgaggcaggtggatcatgaggtcataagttcaagaccagcctggacaacatggtgaaaccccatctctactaaaaatacaaaaaaaattagctatgcatggtggcgggtgcctttaatcccagctacttgggaggctgaagcaggaatcatttgaacctgggaggcggaggatgcagtgagccgagaccatgctactgcactccagcctgggtgagagaatgcgactacatctcaaaaaaataagataaataactacttctcaaataagctttggtagatgtggtattctctaataggatgttgctgcagatgcagacttggagagaatttagccrtgggtgttgactacctgtgaatactaaaagtgcatttataaagagacattaaagagctcattgcctgttcctctttccaccatgttaggacatggcaggaagatggctgggctaaaccatgaagaagcctctcaccaggaacttatttggctggcaccttgctcttggatttctcccttcccaaattca

SEQ ID NO: 546734 - DNA, 565 bp, Homo sapiens
tggcgaatggctgtaatcccagctactcagcaaggctgaggcaggagaatcacttgaaccagggaggtggcgattgcagtgagccaagatcgtgccattgcacttcagcctgggcaacaagagcaaaactgcatctcataaaagaaaagaaagaaagaaagaaagaaaagaaaacagggaaagagagtcagctgttgaactaagacagaagtaacttttttcattcaagaatacataggtggccaggtgtgatggctcacacctgtattcccagcactttgggaggtcgaggcaggtggatcacctgaagtcaggagtttgagaccagcctggccaacatggtgaaatcctgtctctactaaaaatacaaaaattagctggactccatccacagcttatttaacctcttgttgctccttttccccaatctttagattgttctcaatstccatagatttccacctcttctcccatctctcctgagctctccctgttaaattctctcttccccgttatacccccctggccccactctctggcaccccagatttcccaggtgtcctcc

SEQ ID NO: 546735 - DNA, 1037 bp, Homo sapiens
agcaacagggcccggcatgaggagggaggtgggggggagatgacgccttcggacaagggtggggtccgcaggatcccaccaccgggcagagaacgcggcctccctgggactgtggtgtcagcgctgggctccaggggccgacgagggtgaggctgggaagcgccagagcagggatccacctctcgggtgaggactttaaaaagcgcggggtgggaggagtcaacaaacggttgtgaacgggaaaactacgcgatacaaactgtatacattgccctatagcaaaaagaccgaggacagggcagcctcagggcgactttaaacccaaaaggaagtgacttccggactcctaggggaatgtctccatttgctcttgttgaaggaagaagggcgagaatttccaggtctgtggagaccccacatcccaggtacagaattgccggggacctggaggcacagcctcaatacaacacagagcaaaactcaccgccgcagtgtgacttccagtccacgcgatccgcttcctggtccgggcgaatctacaagcacaggacagaagccaggcctccgtggagccaacgaggtgggcggggcctgggcgaggtaggggyggggcctgggcgaggtaggggcggggcgccaggcggagagacctgccctgtagaaccggcagacgcggggcgggggcggatctgtgcttctctcagccgcgtacctagccgctgtttttcgggttttggtgagggaagagacagaccctctcatattgttttatattgttttatactcagtacctgttttaagaaaaaaaacaacaaggaagtaaaaccgaagacaggcagccctgcgccacgcccaaaaccaggcctgggcctgcctggcctaaacccaatagttaaaaatcaactcataacttagaaaccaatgtttttcatagattccagacattgtatagaagaacattatgaaactccctgccctgttctgtttctctctaccagtgcacgaaacccctgtgtatatatctgggactgtagtcc

SEQ ID NO: 546736 - DNA, 1037 bp, Homo sapiens
agcaacagggcccggcatgaggagggaggtgggggggagatgacgccttcggacaagggtggggtccgcaggatcccaccaccgggcagagaacgcggcctccctgggactgtggtgtcagcgctgggctccaggggccgacgagggtgaggctgggaagcgccagagcagggatccacctctcgggtgaggactttaaaaagcgcggggtgggaggagtcaacaaacggttgtgaacgggaaaactacgcgatacaaactgtatacattgccctatagcaaaaagaccgaggacagggcagcctcagggcgactttaaacccaaaaggaagtgacttccggactcctaggggaatgtctccatttgctcttgttgaaggaagaagggcgagaatttccaggtctgtggagaccccacatcccaggtacagaattgccggggacctggaggcacagcctcaatacaacacagagcaaaactcaccgccgcagtgtgacttccagtccacgcgatccgcttcctggtccgggcgaatctacaagcacaggacagaagccaggcctccgtggagccaacgaggtgggcggggcctgggcgaggtaggggcggggcctgggcgaggtaggggcggggcgccaggcggagagacctgccctgtagaaccggcagacgcggggcgggggcggayctgtgcttctctcagccgcgtacctagccgctgtttttcgggttttggtgagggaagagacagaccctctcatattgttttatattgttttatactcagtacctgttttaagaaaaaaaacaacaaggaagtaaaaccgaagacaggcagccctgcgccacgcccaaaaccaggcctgggcctgcctggcctaaacccaatagttaaaaatcaactcataacttagaaaccaatgtttttcatagattccagacattgtatagaagaacattatgaaactccctgccctgttctgtttctctctaccagtgcacgaaacccctgtgtatatatctgggactgtagtcc

SEQ ID NO: 546737 - DNA, 1037 bp, Homo sapiens
agcaacagggcccggcatgaggagggaggtgggggggagatgacgccttcggacaagggtggggtccgcaggatcccaccaccgggcagagaacgcggcctccctgggactgtggtgtcagcgctgggctccaggggccgacgagggtgaggctgggaagcgccagagcagggatccacctctcgggtgaggactttaaaaagcgcggggtgggaggagtcaacaaacggttgtgaacgggaaaactacgcgatacaaactgtatacattgccctatagcaaaaagaccgaggacagggcagcctcagggcgactttaaacccaaaaggaagtgacttccggactcctaggggaatgtctccatttgctcttgttgaaggaagaagggcgagaatttccaggtctgtggagaccccacatcccaggtacagaattgccggggacctggaggcacagcctcaatacaacacagagcaaaactcaccgccgcagtgtgacttccagtccacgcgatccgcttcctggtccgggcgaatctacaagcacaggacagaagccaggcctccgtggagccaacgaggtgggcggggcctgggcgaggtaggggcggggcctgggcgaggtaggggcggggcgccaggcggagagacctgccctgtagaaccggcagacgcggggcgggggcggatctgtgcttctctcagccgcgyacctagccgctgtttttcgggttttggtgagggaagagacagaccctctcatattgttttatattgttttatactcagtacctgttttaagaaaaaaaacaacaaggaagtaaaaccgaagacaggcagccctgcgccacgcccaaaaccaggcctgggcctgcctggcctaaacccaatagttaaaaatcaactcataacttagaaaccaatgtttttcatagattccagacattgtatagaagaacattatgaaactccctgccctgttctgtttctctctaccagtgcacgaaacccctgtgtatatatctgggactgtagtcc

SEQ ID NO: 546738 - DNA, 713 bp, Homo sapiens
tgtatagaagaacattatgaaactccctgccctgttctgtttctctctaccagtgcacgaaacccctgtgtatatatctgggactgtagtccctgttacgtatcccctagattgctcaatcacgacccttttatgtgaaatctttagtgttgtgagcccttaaaagggacagaaattgtgcacccggggagctcggattttaaggcagcttgccgatgctcccagctgaataaagcccttccttctacaactcggtgtctgagaggttttgtctgtggctcgtcctgctacaccggaggcaagagtggccaggaaggctgaggcatgattcaaaagccctggaattgtctggaacagggatgcaaactagaacgtgaaatgcaaagccctgcctaggcagaaagtacgatctcatgctgatggtacacagaacagaatagaaatctctccctttctattctccatttgcttcggagggagagtccaccctgtgctcagcttcagagacttccctagggccaccgcctgggatgccggagggagtgttcaggccagggaggagtgaggtcaccacctgctrcttaaacacagcagaaatgtggaagtgggggcgggagcctgaggtccagctactcaggaagcagtggcgggaggatcattgagcccggaggtccaagccagcctgagtgacaaagtaacaccccctgccgcag

SEQ ID NO: 546739 - DNA, 1212 bp, Homo sapiens
actaggtgaagccagctgggctcctgagtctgctggggacttggagaacttttatgtttagctagaggattgtaaatgcacaaatcagcactctgtgtctagctcagggattgtaaatgcaccaatcagcaccctgtcaaaatggaccaatcagatctctgtaaaatgggccaatcagctctctgtaaaatggaccaatcagcaggatgtgagtggtgtcagataagggaataaaagcaggctgcctgaaccagcagtggcaacctgctagggtggctttccacagtgtggaacttttattcttttgctgttccctagaaatcttgctgctgctcactctttgagtccaagccacatttatgaactgtaagactcaccacgaaggtctgcagcttcactcctgaaatcagcgagatgtcggaacatcagaaggaagaaactccagacacatcatctttaagaactgtgaccctcactgtgagggtcagtggctttattcttgaagtcagtgagacaaagaacccaccaattccggacacaataatacattatttggctgtaatatttttcgcttattcagccagtcaaattcttttcaaagagtcaatgaagaaagctcctacagttttagcatttaaaaccatatttggaatttaaaaacctcaactttttcttgtcaaaattgaacaggtaacttcaaagctataactagtttttcaacaatgatgaccagacatttagctttaactttgtacataacatgagagggccagtaaaatatcttaaggtagtaagaattaaccagaccactttcagtaaaagaaaagttgagtttttatttatgacacagaagtgtttcttactcttatgcctatgtctgcttctgtttacttaagagaagtgccgtatgttctcatggtatattagagcctttgccaatgagttcaaatcacaataaacaaataaatatagatgctaatcctaattccaacttaaggcttcaatgcttgcattttctaaggcttcaatgcttacattgatggaacatggatatcaactcgtagttcagaaagtacactgcgtcatggaraatgtcactcaaatgtggcagagtatttttgacaagatggcattagctttaacaaaccactaaactacagtaatccatctcttaaagatggagaaacgtttttaaaaatgtgtcactaggaa

SEQ ID NO: 546740 - DNA, 1212 bp, Homo sapiens
actaggtgaagccagctgggctcctgagtctgctggggacttggagaacttttatgtttagctagaggattgtaaatgcacaaatcagcactctgtgtctagctcagggattgtaaatgcaccaatcagcaccctgtcaaaatggaccaatcagatctctgtaaaatgggccaatcagctctctgtaaaatggaccaatcagcaggatgtgagtggtgtcagataagggaataaaagcaggctgcctgaaccagcagtggcaacctgctagggtggctttccacagtgtggaacttttattcttttgctgttccctagaaatcttgctgctgctcactctttgagtccaagccacatttatgaactgtaagactcaccacgaaggtctgcagcttcactcctgaaatcagcgagatgtcggaacatcagaaggaagaaactccagacacatcatctttaagaactgtgaccctcactgtgagggtcagtggctttattcttgaagtcagtgagacaaagaacccaccaattccggacacaataatacattatttggctgtaatatttttcgcttattcagccagtcaaattcttttcaaagagtcaatgaagaaagctcctacagttttagcatttaaaaccatatttggaatttaaaaacctcaactttttcttgtcaaaattgaacaggtaacttcaaagctataactagtttttcaacaatgatgaccagacatttagctttaactttgtacataacatgagagggccagtaaaatatcttaaggtagtaagaattaaccagaccactttcagtaaaagaaaagttgagtttttatttatgacacagaagtgtttcttactcttatgcctatgtctgcttctgtttacttaagagaagtgccgtatgttctcatggtatattagagcctttgccaatgagttcaaatcacaataaacaaataaatatagatgctaatcctaattccaacttaaggcttcaatgcttgcattttctaaggcttcaatgcttacattgatggaacatggatatcaactcgtagttcagaaagtacactgcgtcatggagaatgtcactcaaatgtrgcagagtatttttgacaagatggcattagctttaacaaaccactaaactacagtaatccatctcttaaagatggagaaacgtttttaaaaatgtgtcactaggaa

SEQ ID NO: 546741 - DNA, 3167 bp, Homo sapiens
ggcccacccacccagagcccagggagaccgggccacggcagctagggcccatcctgaagatgagggcaccacggtcaagccagagaagctgggtacccctcctgcacattcccaacgacagcgggagacaagggggcttggtggcctgcactcgggaaccgtaaccagccctgccttgtagtccctgggggaccccaggcatgtcacctctctctaggcctcagaagggggcaggtaggaagcagactacctcccaggactgtgacggtcccctgagacaatgcatggggtacactaggtgacccctgacagatgggaggcaccccatgggataggaggcattgttgcccgtgggtttggttcagatccccactcccctgctggcctggcagtcaccacagcatgggggcctatttccccagccatgacacactcgcccccacttcctggacaggagggtgggaatgggcccagcagccaggaaatcctggcccacggggcctcctgagtccctgctgtcaactccaggcactgcctggccttgtggcctctaggggaaggttactgaactcctccaagccacagcgataacaaggccaaagagctggcacatggaggggccagaaaaaaagagctcggtcacaccacgcaggacgttgggccccaccaaggggatatgtaggatagggacagaggacacggggcgggatccacgggaaagggttagcacagcagggccctgggcgggcacggggcctgccctgtggctgcaggtatattaatagttcctgggccccaggmaggcagtgcccacatgcttccaagcccgtgtggcctgtaggaaggcagcctagcgtccacagggagagaaggcctccgagttcctgctgaaccactcaacagcttaaaatacaaccagcccctctccctgtccagccagctgctagtgggaggggtgaaatcgtaccctgctccccccaacctgggcaccaaaccagggcccaagagggagagtacggccatcggggtcccggctagctgctgggagaggacgccgggctgcggcaggagggggtagcgagagaggggccacgctcacagctgcagcagtggtgcccaggccagcctgaggcccaaggagaggagacgcccaaacctgcaaggaggtaagcccgggctgcaaggcagcacctaggggcccctacagacaagaaatgcccaaggctagggccacctgggcaggatgagtcctcagtgggacggccgtccgtctcccatttcctgccccaaatccccagctcgtcggccatctcctcctagagagaggactgaaaggctctggggggagcaggagacctctccatactattcttgcaattccctgtgtctctataatttttttttttttttgagacagagtctcactctgtcgcccaggttggagtgcagcagtgcgatcttgactcactgcaacctccgccccccaggttcaaacgattctcctgcctcagcctccagagtagctgggattacaggcacacaccaccacatccagctaattttttgtattttaggagagatggggtttcaccatgttgcccaggctggtctcgaactcctgagctcaggcaatccaccacctcggcctcccaaagtgctaggattataggcgtgagccacctggcccggcctataattatttctaagtaagaaagttaaataagatattccaggtggggtaaaagaaataagttacgctaggaaacaagccagacacaaaggtcccatatctatgcaaaatacccagagcagacagacagaaaagcaaattggaggggccaggggctgggcggggggaatggggagtggctgctgctgggtacccggtctcctttcagagtgaggaaaatgttctgggacgagacagaggtggaggctgcacaatgatgcacgtgcactcaatgccactgttcacttttaaatggttagtttcatgttacatgaatttcacctcaataaattattgtttaaaggggtgaggggtaacaaacaggccccacatacccatcaaaataaaaacagtcgggtgggaggagcaggagaggttccccacccctcagagggagggcctaatgtgagacctcatcgagggctccgcgccccacaccccactgccaccccaatctctgctctgtgcctgccacacacacacacgcctgcccaggcctgaggccaacagggggcaggggctcccaggggaagcccagggctgcagagggtacaggcagctgctgaacagagccccaggcaggggatcctgagcacagacggggaggtggcaggctctggccccatctccaggagaagcggtgaggcagggaggacagacaggaccttctgaggaagcccacggagccactcggaggggctgggaggggctgagatgctctgggtggatgaagggatacctgtgggaggggggctactggtgtcagcgaggtcccagcactggccacgggcaaggggtgagaccacatagcctcaggcacgacgggcagggagagggcaggaacgggcagacaggcaggcactctggcctggggcacaggctggtggctctgccggcctgtggctctgtgatgacagttccactagcctgagaggaattctcaccaggaggcccaagattcccggggcccagccaacagcaactcgtcgcagcacgaggtcagggcagagccaagagccaggacacacggtgcggcgtgaagcgcaccctgcaagagggagcaggggcgaggtttgtgcctcccaagcccagaggggagtgccgcaagcaacagagcccgtcttcactgtctttgtggtcatgaagatattactaatgggggcaggaggagtgaaaaggggggctctcgttgtctaagcacttgtcacagctcctgggaacccgcccgcctggtgggtgaacaacccagagaagcagacctgcccatttcctggctgtgtggccctgggcaagttacccaacctctctgaacttccatctactcatggcaaagtgggctgtccccagctgccatctgacagggttaccgtaatcatccccagtttaggataaatcttattaaggataaatataggccgggcgtggtggctcacgcctg

SEQ ID NO: 546742 - DNA, 3167 bp, Homo sapiens
ggcccacccacccagagcccagggagaccgggccacggcagctagggcccatcctgaagatgagggcaccacggtcaagccagagaagctgggtacccctcctgcacattcccaacgacagcgggagacaagggggcttggtggcctgcactcgggaaccgtaaccagccctgccttgtagtccctgggggaccccaggcatgtcacctctctctaggcctcagaagggggcaggtaggaagcagactacctcccaggactgtgacggtcccctgagacaatgcatggggtacactaggtgacccctgacagatgggaggcaccccatgggataggaggcattgttgcccgtgggtttggttcagatccccactcccctgctggcctggcagtcaccacagcatgggggcctatttccccagccatgacacactcgcccccacttcctggacaggagggtgggaatgggcccagcagccaggaaatcctggcccacggggcctcctgagtccctgctgtcaactccaggcactgcctggccttgtggcctctaggggaaggttactgaactcctccaagccacagcgataacaaggccaaagagctggcacatggaggggccagaaaaaaagagctcggtcacaccacgcaggacgttgggccccaccaaggggatatgtaggatagggacagaggacacggggcgggatccacgggaaagggttagcacagcagggccctgggcgggcacggggcctgccctgtggctgcaggtatattaatagttcctgggccccaggcaggcagtgcccacatgcttccaagcccgtgtggcctgtaggaaggcagcctagcgtccacagggagagaaggcctccgagttcctgctgaaccactcaacagcttaaaatacaaccagcccctctccctgtccagccagctgctagtgggaggggtgaaatcstaccctgctccccccaacctgggcaccaaaccagggcccaagagggagagtacggccatcggggtcccggctagctgctgggagaggacgccgggctgcggcaggagggggtagcgagagaggggccacgctcacagctgcagcagtggtgcccaggccagcctgaggcccaaggagaggagacgcccaaacctgcaaggaggtaagcccgggctgcaaggcagcacctaggggcccctacagacaagaaatgcccaaggctagggccacctgggcaggatgagtcctcagtgggacggccgtccgtctcccatttcctgccccaaatccccagctcgtcggccatctcctcctagagagaggactgaaaggctctggggggagcaggagacctctccatactattcttgcaattccctgtgtctctataatttttttttttttttgagacagagtctcactctgtcgcccaggttggagtgcagcagtgcgatcttgactcactgcaacctccgccccccaggttcaaacgattctcctgcctcagcctccagagtagctgggattacaggcacacaccaccacatccagctaattttttgtattttaggagagatggggtttcaccatgttgcccaggctggtctcgaactcctgagctcaggcaatccaccacctcggcctcccaaagtgctaggattataggcgtgagccacctggcccggcctataattatttctaagtaagaaagttaaataagatattccaggtggggtaaaagaaataagttacgctaggaaacaagccagacacaaaggtcccatatctatgcaaaatacccagagcagacagacagaaaagcaaattggaggggccaggggctgggcggggggaatggggagtggctgctgctgggtacccggtctcctttcagagtgaggaaaatgttctgggacgagacagaggtggaggctgcacaatgatgcacgtgcactcaatgccactgttcacttttaaatggttagtttcatgttacatgaatttcacctcaataaattattgtttaaaggggtgaggggtaacaaacaggccccacatacccatcaaaataaaaacagtcgggtgggaggagcaggagaggttccccacccctcagagggagggcctaatgtgagacctcatcgagggctccgcgccccacaccccactgccaccccaatctctgctctgtgcctgccacacacacacacgcctgcccaggcctgaggccaacagggggcaggggctcccaggggaagcccagggctgcagagggtacaggcagctgctgaacagagccccaggcaggggatcctgagcacagacggggaggtggcaggctctggccccatctccaggagaagcggtgaggcagggaggacagacaggaccttctgaggaagcccacggagccactcggaggggctgggaggggctgagatgctctgggtggatgaagggatacctgtgggaggggggctactggtgtcagcgaggtcccagcactggccacgggcaaggggtgagaccacatagcctcaggcacgacgggcagggagagggcaggaacgggcagacaggcaggcactctggcctggggcacaggctggtggctctgccggcctgtggctctgtgatgacagttccactagcctgagaggaattctcaccaggaggcccaagattcccggggcccagccaacagcaactcgtcgcagcacgaggtcagggcagagccaagagccaggacacacggtgcggcgtgaagcgcaccctgcaagagggagcaggggcgaggtttgtgcctcccaagcccagaggggagtgccgcaagcaacagagcccgtcttcactgtctttgtggtcatgaagatattactaatgggggcaggaggagtgaaaaggggggctctcgttgtctaagcacttgtcacagctcctgggaacccgcccgcctggtgggtgaacaacccagagaagcagacctgcccatttcctggctgtgtggccctgggcaagttacccaacctctctgaacttccatctactcatggcaaagtgggctgtccccagctgccatctgacagggttaccgtaatcatccccagtttaggataaatcttattaaggataaatataggccgggcgtggtggctcacgcctg

SEQ ID NO: 546743 - DNA, 3167 bp, Homo sapiens
ggcccacccacccagagcccagggagaccgggccacggcagctagggcccatcctgaagatgagggcaccacggtcaagccagagaagctgggtacccctcctgcacattcccaacgacagcgggagacaagggggcttggtggcctgcactcgggaaccgtaaccagccctgccttgtagtccctgggggaccccaggcatgtcacctctctctaggcctcagaagggggcaggtaggaagcagactacctcccaggactgtgacggtcccctgagacaatgcatggggtacactaggtgacccctgacagatgggaggcaccccatgggataggaggcattgttgcccgtgggtttggttcagatccccactcccctgctggcctggcagtcaccacagcatgggggcctatttccccagccatgacacactcgcccccacttcctggacaggagggtgggaatgggcccagcagccaggaaatcctggcccacggggcctcctgagtccctgctgtcaactccaggcactgcctggccttgtggcctctaggggaaggttactgaactcctccaagccacagcgataacaaggccaaagagctggcacatggaggggccagaaaaaaagagctcggtcacaccacgcaggacgttgggccccaccaaggggatatgtaggatagggacagaggacacggggcgggatccacgggaaagggttagcacagcagggccctgggcgggcacggggcctgccctgtggctgcaggtatattaatagttcctgggccccaggcaggcagtgcccacatgcttccaagcccgtgtggcctgtaggaaggcagcctagcgtccacagggagagaaggcctccgagttcctgctgaaccactcaacagcttaaaatacaaccagcccctctccctgtccagccagctgctagtgggaggggtgaaatcgtacsctgctccccccaacctgggcaccaaaccagggcccaagagggagagtacggccatcggggtcccggctagctgctgggagaggacgccgggctgcggcaggagggggtagcgagagaggggccacgctcacagctgcagcagtggtgcccaggccagcctgaggcccaaggagaggagacgcccaaacctgcaaggaggtaagcccgggctgcaaggcagcacctaggggcccctacagacaagaaatgcccaaggctagggccacctgggcaggatgagtcctcagtgggacggccgtccgtctcccatttcctgccccaaatccccagctcgtcggccatctcctcctagagagaggactgaaaggctctggggggagcaggagacctctccatactattcttgcaattccctgtgtctctataatttttttttttttttgagacagagtctcactctgtcgcccaggttggagtgcagcagtgcgatcttgactcactgcaacctccgccccccaggttcaaacgattctcctgcctcagcctccagagtagctgggattacaggcacacaccaccacatccagctaattttttgtattttaggagagatggggtttcaccatgttgcccaggctggtctcgaactcctgagctcaggcaatccaccacctcggcctcccaaagtgctaggattataggcgtgagccacctggcccggcctataattatttctaagtaagaaagttaaataagatattccaggtggggtaaaagaaataagttacgctaggaaacaagccagacacaaaggtcccatatctatgcaaaatacccagagcagacagacagaaaagcaaattggaggggccaggggctgggcggggggaatggggagtggctgctgctgggtacccggtctcctttcagagtgaggaaaatgttctgggacgagacagaggtggaggctgcacaatgatgcacgtgcactcaatgccactgttcacttttaaatggttagtttcatgttacatgaatttcacctcaataaattattgtttaaaggggtgaggggtaacaaacaggccccacatacccatcaaaataaaaacagtcgggtgggaggagcaggagaggttccccacccctcagagggagggcctaatgtgagacctcatcgagggctccgcgccccacaccccactgccaccccaatctctgctctgtgcctgccacacacacacacgcctgcccaggcctgaggccaacagggggcaggggctcccaggggaagcccagggctgcagagggtacaggcagctgctgaacagagccccaggcaggggatcctgagcacagacggggaggtggcaggctctggccccatctccaggagaagcggtgaggcagggaggacagacaggaccttctgaggaagcccacggagccactcggaggggctgggaggggctgagatgctctgggtggatgaagggatacctgtgggaggggggctactggtgtcagcgaggtcccagcactggccacgggcaaggggtgagaccacatagcctcaggcacgacgggcagggagagggcaggaacgggcagacaggcaggcactctggcctggggcacaggctggtggctctgccggcctgtggctctgtgatgacagttccactagcctgagaggaattctcaccaggaggcccaagattcccggggcccagccaacagcaactcgtcgcagcacgaggtcagggcagagccaagagccaggacacacggtgcggcgtgaagcgcaccctgcaagagggagcaggggcgaggtttgtgcctcccaagcccagaggggagtgccgcaagcaacagagcccgtcttcactgtctttgtggtcatgaagatattactaatgggggcaggaggagtgaaaaggggggctctcgttgtctaagcacttgtcacagctcctgggaacccgcccgcctggtgggtgaacaacccagagaagcagacctgcccatttcctggctgtgtggccctgggcaagttacccaacctctctgaacttccatctactcatggcaaagtgggctgtccccagctgccatctgacagggttaccgtaatcatccccagtttaggataaatcttattaaggataaatataggccgggcgtggtggctcacgcctg

SEQ ID NO: 546744 - DNA, 1622 bp, Homo sapiens
  misc_feature 724, 725, 726, 727, 728, 729, 730, 731, 732, 733, 734, 735,736, 737, 738, 739, 740, 741, 742, 743, 744, 745, 746, 747,748, 749, 750, 751, 752, 753, 754, 755, 756, 757, 758, 759,760, 761, 762, 763, 764, 765, 766, 767, 768, 769, 770: n = A,T,C or G
  misc_feature 771, 772, 773, 774, 775, 776, 777, 778, 779, 780, 781, 782,783, 784, 785, 786, 787, 788, 789, 790, 791, 792, 793, 794,795, 796, 797, 798, 799, 800, 801, 802, 803, 804, 805, 806,807, 808, 809, 810, 811, 812, 813, 814, 815, 816, 817: n = A,T,C or G
  misc_feature 818, 819, 820, 821, 822, 823: n = A,T,C or G
agctttacctttccccaatggccacctgagcggcccaataccatttaatcaaccacccattccgcaccaccacccatttatagatgccacttttatcaactaaacgtggccagccacgtggacaccctgctctggtggtctacgcctgctgcgactgtgtcctcgtcacccgcaccaatcagagccttcactggccccgtcaatgccagcattacgaatatccaggacagacctcaagcaagccccgttctcccccaatacaggatgaaagtgatggacggctgtggggccacagtctgtccacccccgtcatgtgcggctctgtgctgaggaggctccgcaaagctgcccatcatgcccaccctcacagtgagaacagggaggcccctgggacggaacccctgccaagggcgcggctggggtgtttaccaccctcagcgggggtctgggagcagggccaggccagagagaagcccgttagcctgggaccatcttgtttctgggagtagggagggatggagagggactcttgccagtttccatgacaaagcgcagggctcccggcgtgttagaaacggagtctcttcaggagttgatctccccctccttgctgccgcctcccctcacctacaggccacagcctatgtttagactcagtgccccactcttctccctcaccccacacccccgcccccacacactggggatagcaggtgaaccccgnnnnnnnnnnnnnnnnnnnnnnnnnnnnnnnnnnnnnnnnnnnnnnnnnnnnnnnnnnnnnnnnnnnnnnnnnnnnnnnnnnnnnnnnnnnnnnnnnnnnccgtgtttacgtgattgtttttttgtgatgtagctgttcggttttgtttttttggttagttttgttttctctttgcttggttgctttattttcttttcttcgggggctcttctttttcttttatgttttgctgtcttttgtgttcttctttcttgattgtgctatgtctcttgttgtcttttgtttccttcgtggtgtgtctgctgtttggtttctcgatctttgtgtgtgttctttgcttctctgcgtcgtttgtctcctggtggaagcccacagtttttccgtttgtctctgttttcgtcctgctctcttctcttgtgactctcttgtctttgcggtcttcgctgcttctctggtgttttctcctgtctttgtgtctgttgcgtgtttttctgtttggtgctcactgcaacaccgcgttccgggttcaagccgttctcctccatgtccagtcttgtgttcttgcgttagctccaccacatctgccacacccgctgttgaaagggatcttttttgggattggagggaagcctggccttatatttaacgctatctcatatacttactcaagatcattgaaaaaacaaaaaccatttactatggaaaatgacaaacacgcatctatctaagaaggcagagtgtaatgaaccccgtgtgctcacctagggtgccacctggggtgcccacctgggcctcattaccagcttccacctgggagccatcttctctcctccatactcccattctacctccccsagatggttctgaagcgaatgccaaactagctgtcctctatcca

SEQ ID NO: 546745 - DNA, 489 bp, Homo sapiens
tcagccgtctcgggactggacgtgacagacatacgtgggttaaagccgctacacagaagactggaggtgcaggaagtgcatccgccttgagcctggatgtgggagccgtgtccggggtcccttcccgggggtgtgcccagcccagggcacagggtgggaagcctgagcaggccaggttagcagcccagacacccaggatggaatattgcagcctcttgccccacagacctgtgggcaaagggacagcgtggggacagccccgaggcccccaccatgcacttttccaatccattctgggtctggggaccacacacacacatccacacaacagactcscacatgcaacagctcgaagcttttgttttgcctctgaaagttagatctataaattcacactcctaggctaggggcagaggggtaaggtagggctcacaggaatgggagtggtaaggagaggatggtttgggctccttcctctttttagaaata

SEQ ID NO: 546746 - DNA, 632 bp, Homo sapiens
tgctgaacatagttgaattttgcaatctcaaatacatgtacagtgatgccttcgggtaacagctgcccgcatatatggtggtggcggtcccacgggaatttttcagctccattatcttatcacctagtgacgtagctgtcctaatgtcttagcacggtacatcactcatgagcttatgtggatgctggtgtaaacaaacctaccgtgcagcctgtcctataaaagtgtaacacatacaattatgtacaatacatgaaacttgatcatgataaaaaactgtgttaacggtttatgtatttactatgctgtactttttattgttattttagaataacaactygctgactcacccagagcaactacttattaacaaaaagttaactgtaaaagccctcaggcaggtccttcaggaaatattccagaagaagaaatcattatcttgggagatgtcagctccattcatgttattgcccctggagaccttccaggggaacaagatgtagaggtggtggagagtgatattgatggtgctgactctgtgtaggcctaggataatgtatgtgattgtgtcttagttttttttttcttttttttttctttttttgagacagagtctggagtgtagtggcacg

SEQ ID NO: 546747 - DNA, 1580 bp, Homo sapiens
cacaatatttgttgagtcctgggactaaaaccaagtctctcgacccccctaccatcttggcaggtagccagagaccgcccttgcttgttgtaatccctgctgagaaaccgatggtataagarcaataaaattgagcattagaaaggagaaactaataacactggatgtcccttttcagaaatgagctggacccagacccaggactgagtacaggtagctgggaaccccttctagcacccagccaatatggcaacagaaatgcatttagtgcgacaaatcattctaaaaccttcctttttatcatcaaacttcacagtgtggcaaaaaatataacattctggcctttcagatactccctgtttattcactagttttggaagaccattacatcttttccattggctcacttattccaactgaaaccctcattttcccgcaaatgccaatgaaacatgaatatcaactgactacctgttttaggtgatgagtggaacagagtagtatggcagcaatgatttattgtgatgcttgatgcttattgagtatttgggttcctggagtataccaatcattccaccttgccacagggcattcatactcgctgccatcctgctggggtgctcttcctgatcatagccacatggctggctccctgacatatatatatctcccggtctctgtcaattcatcagcaagacctttcctggcattctgtatgaaagaacatgctggagtcagtctcatgccaacgcctttttgcaggaccactagggccatattgctttctggatactctctggttggacctgcttggcgcttgagacatatttcatgagtcagtagatagacttggactttaaaaatatttaataatagatcattattttggagttcatacactcatgacactagccatctagtacaggagacaggcattattcaaataagcacatgactaaatgtgaaaacacaattggagtgtgttatgaagaggtgcaaagtcaactttaccattgaatggtgaaaaggccttgtgatggttaattttatttgtcaacttgatggaccacagagtatccagaatttttttttttttttttttttttttttgagacagagtcttgccctgtcacctgggctggagtgcagtggcgcaatcttggctcactgcaacctctgcctctcaggctcaagcgattctcctgtctcagcctcctgagtagctgggattataggtgcccaccaccaagcccagctaattttttggtatttttaatagagacggggtttcaccatgttggccaggatggtcttgaactcctgacctcgtgtttcacctgccttagcctcccaaaagcactgggattacaggcaggagccaccgagcccagccagtgcccaaagatttaagcatcattctgggtgtgtctgtgagggtgtttccaggtgaaacagacatttgattcagtagactgagtaaagcagatggccctccccaatgggtctcattcatccaccaggtgggtctcattcatccactgaaggcctaaatagaacaaaaagactgagtaaggaagaat

SEQ ID NO: 546748 - DNA, 832 bp, Homo sapiens
tccagggtttccaaacacgcctttttcctcctatcagataatcttgctcttaaaagaatctcttccactctacaaagcctattcatcacctcccctgatagaaaccacatattccttaatgcaaactctaaaagaaattggctagcagatgactagccagttagctttttctttttgcacatttaaaagtaatttcttcatttaaaaatgattaggcttatgttatttaggactataaggtaacactgtatacgagtaaatatttagaaaaaaagcattttgagttcatgagatattaaaaatgtaattggggtgtataaatatgtaattccacataaggtaaattaaacagaaaatattcaacagcctcaattccactgataagcaagaaaacaagaagtccacatgcttattttctataatcaaattttcaaatacagccatgggctaacaatcaaaatctgtaatatcaagctacgaatgtccacacttatatgcaggtaagtagcttaatatcagcagcaccagtgttaatccaaagtgtacctgaggttgaaaagccaacagtggcacaaaggccactayctaaaaacgtcattttagtttagtaataaacttgaagatactggacaacagtcattgggtttcactttaataaaaatatacaaaagaattctgaattcataaagtcctttgttataacagttaaggaaactaagacttttttttttttgagacagagtctccctctgtcacccaggctgaagtacaatggcacgatcttggctcactgcaacctccacctcctgggcgattctcttgcctcagcctc

SEQ ID NO: 546749 - DNA, 1448 bp, Homo sapiens
tggttcctattgagggctgtgaggaaaaattccgccttatgcctctctcccttcttctggtggttttctggtagtctttggcatttgatccctgtcttcatctttacttggtgttctccctgggcttatgtctgtctcagtgttcaaatttccattttttcagagggacacagtcacactgcactaggagctcaccctactccagtattacctaatttaaacttaactaattacatctgcaacaatcttgtcttcaaataaagtcacagcttggatactggaggtaaggacttcaatatgtgatctctggggagggagaacacaaatcaactactagcgtgcctaaacgttttgctaatacactccttcagcagcatcactgagaacttctctcagccattctgagccagatggctctcagagctcatagggcttctgcacttggaatgtggataagaggagggcaggaccgagtctttggagcccatgaattgtgaactccatatctgcataagccagggcagagcactgaaccacagtgctgcagaccagagttcaagtcccccggcaaagccatctgcctcctacagcaaaggttccaagatttgggatgcatcagggtcacctggagggtacgttgaaatgcaggtgacaggtccacagcccctgttcctgacttggcacatctggaatggggcccaggaatttgcatttctagtaagttcccaggtgaggctgatgcagctggtgctggagcacacttcaagaaccatgtcctaaaggatgcatgaatgaaaagatttggtttctgattaaaagaaaatacttacaaaggagataaaatctgtcttcccaggaaacacgtttgaaggaagaggaggcataataggttgaatagtggtttccccaaaacacaaaataggaacctgtaaatctgacttgatttggaaaaatgtttcacagatgtatttaagttaaggatgttgaggtgagatcatcctggattaaccatgtgggccctaaatccaataccttatgtcctccttgtcaaagccagacgaggagaayacactgaccctgagaaggccaagtgaaggcagagattggagagatgcaaccacaggccaagcaatgccaggagtcaccagaagctggaagtggaaagaaggatcaccccttaattgccctagagggactgtggctcagccagcaccttaatttttgactctggcctctcagacaataggaaaattaatttctattgttttaagccactcaggttgtggtactttgccacagcagccctaagaaattaatgcaagggaaaaactattcaaggagacaaaggaggtcaccatataatgataaaagggtcaattcagcaaaaaaaaagaacaattttaaacatatgtgcacctaacatgggagcacccagatacataaagaaa

SEQ ID NO: 546750 - DNA, 562 bp, Homo sapiens
aattgtagatttaaaggaattatgtggggtttttccatgtttcttctggagaattcagctttacattatctcattcattcaaataatatttttagtaagaaaagataggatatggaaatcataccattaaatatgaactcaaaagtctgtcaaaactaggacttcaccagccatattcctttcacaagatgataatagataataggtaaaaaaaattaaataaatatgagaactgagcctcatcagcatcatggcatatcataacttaacttacattmttttctttatttcttagtggtacatgataatgataaatgtttataattaatgccatcataaattcaataaattaaaggtagagcttcttcaaaagtcgtcatgcatatttgcatatcaaaagattcaagaaattctgttgaaaagacaccaatttaggattagaaaattaagagtttaggattcatagtctaaccaacatcattatccttctatcaataagccaccatactgttcagaatattaatttgaaaaacctcgtgtaacatttgcttgctattatttg

SEQ ID NO: 546751 - DNA, 1184 bp, Homo sapiens
gcgcgtctccaggagcagcacacacagcatgccagtcaggacgggtgtgggaaagatggcagagaagaagaggcagccagagagaagccagccgttcaatgaaagtcctaactggtggtttggccctcccttcccagtggcaagaggatgcctgttgtaaaatggatgtgaagcctggcaccattaaccatccagctcaaccagctttaaatcctaggccctacaaatgaacttcaaattttcagcttcccacagaggatctcaccaccttcaaaccacccaggctctgtgccagccatactggagttttcactgtaaattaagtacaygggccttctggtattatacatcagtatttctagcttagctaatgcgaatctacctctaaaatatggagacactctcagagtgctaaccaagctagctgtccgatcctggcaggcttcttggcaaactgaatacctggccaggagaaaggccaggtgactgtgtccccacttggctgcagggatgagagcagtgtgatttctgatttctccttgagatgccccacatagttctgctcctgggcttcaaaaaagatgatatctagtgaatgattcctccagcatttggatgggaaatgggccaagggctcttctccctactgagctcttttctacccactgaaacatcccccagccaaaactgcaccagaaagcccaagattctggagatgccatcctggagaaggtattcaaaggagtaggagacttctcaaaagctaaacaaaacttccaacttatctctgccagagtagggtacatcaaatggccaaatccaccgctttgcagtctcccagtaagaggcagatcctctgaaacaatcataggcacagatccttgcattttttagaagtcacagaattaagatttttctgcatctcgatgattcagacactttagaatttgatattggcatagaaactaggaatcataaaataaatttttaaaaaattgtcatttaataaacatattatgtgtcaaccagagcataaagaaacaggcaaacaaataggagtgtaaatgtttgcatgatacatagggaacaatttagcaatagctgttaactattgaaaacatttgcttttgggtctagccatcttacctctaggaattttttgagatattttcaaggttcacaaa

SEQ ID NO: 546752 - DNA, 933 bp, Homo sapiens
tgcatgaaagactaaattcagataaccactggctgatgcccaccgcccatcctccatctccccacccctcacccccgggctgtgccacagtcaggccagtcctgcttagcctggtgctgccgccatacagtgctactaatgttggctagtgggaccctccacttttcctctgtgatgtgttcagcatgctgcctttcagagagaaaacagccgttagggtcaactggaaccatagcaatgggggaaaattgtagcagattttgctcgttttatggaatcttctgtctttgctstggaaagttctcccagaattgaaacacttaagtcctactcagcagactgtcctgatgcagctgcaagattctcagactttggtcttataagttagactctcttgtcttttggtctgtctccttctttccctctttccctctgcttgtttatgtgcttgcgcaagcattagtgggtgccacacagttgtgtgtgaatttgtgtggtggggaatatggatgagaggtgggaaagcaagctagtttctgtcagatacccggctccctcccagaagtccagaccttgcaatctggacatggtcttgctctgaccatactctttgagctaaaatacattccagatagatgatttctttttttgaaacaggatcgcattctgtgtcccaggctggagtgcagtggcatgatcttagctcattgcaacctccatctcccaggttcaggcgatcctcctgcctcagcctcccaagtagctgggattacaggcatgtgccaccatgcctggctaattttttgtgtttttagtagagatggggctttgccacgttggccaggctggtctcaaactcctgacctcaagtgatccacccacctcagcctcccagagtgctgggattacaggtgtgaggcaccacacccagcc

SEQ ID NO: 546753 - DNA, 933 bp, Homo sapiens
tgcatgaaagactaaattcagataaccactggctgatgcccaccgcccatcctccatctccccacccctcacccccgggctgtgccacagtcaggccagtcctgcttagcctggtgctgccgccatacagtgctactaatgttggctagtgggaccctccacttttcctctgtgatgtgttcagcatgctgcctttcagagagaaaacagccgttagggtcaactggaaccatagcaatgggggaaaattgtagcagattttgctcgttttatggaatcttctgtctttgctctggaaagttctcccagaattgaaacacttaagtcctactcagcagactgtcctgatgcagctgcaagattctcagactttggtcttataagttagactctcttgtcttttggtctgtctccttctttccctctttccctctgcttgtttatgtgcttgcgcaagcattagtgggtgccacacagttgtgtgtgaatttgtgtggtggggaatatggatgagaggtgggaaagcaagctagtttctgtcagatacccggctccctcccagaagtccagaccttgcaatctggacatggkcttgctctgaccatactctttgagctaaaatacattccagatagatgatttctttttttgaaacaggatcgcattctgtgtcccaggctggagtgcagtggcatgatcttagctcattgcaacctccatctcccaggttcaggcgatcctcctgcctcagcctcccaagtagctgggattacaggcatgtgccaccatgcctggctaattttttgtgtttttagtagagatggggctttgccacgttggccaggctggtctcaaactcctgacctcaagtgatccacccacctcagcctcccagagtgctgggattacaggtgtgaggcaccacacccagcc

SEQ ID NO: 546754 - DNA, 545 bp, Homo sapiens
attccagtcctagggcaccatctaggatatacagatatttttgcacatatgccaaatgccactcctgagggacccagaaaaaagtctaaacaaacaaacaaatggtttggcaataacctcataaattatatacaaatccttctataataaaatatacttatttattatgtctttttgttgtataattcaaattaaaatgtattaccttcttttttaaatatgcataaaggcagcaaatatgaagtctatggaccctgcctcaggttattcaaataacatcctcaccattgatcaaatgctcaagaaaaagcagacttgtatagtggccgatgcaactactattaaacaacatgtgagtattccttgttgagttccttcccagaaatcactgacaaaaatattgtccacttcaatactacaccataaaaccaagagaatttttatctgctctatgtctttaaaatgagacaaggttgtttctcwtgtttacccattgtaataacaccatttctttctctataatcaaatggattcaaatgttaagt

SEQ ID NO: 546755 - DNA, 612 bp, Homo sapiens
atgaaattactgaaacattaatagagaactaatttaatgtttcatattttcctaactactatgtataacaaaaagaataatggaaccaatttctagtgcagcttatagaaataaaccatagtagtttacagccaaattgcaaattatagcttgtggcttttctcaatttatagtattaactactcttaaaaatttactattttgtcacataaaatatgatttagaatacttatgaaatatttgacttcttttgtacctaaggcatgatctcaccaataaagagatcttaagtgttccaaggaattgctcctctcaaatactcagtagagaagttgtagtatttgtgtcccaaagcttctcaactaaattagacaacagatttcctgggactttctggagttatagggagttcagaaatgctgtcagaattctcccagcatggtcagaaaaaattctgtatgtcaaaatcacatttttctatagctaagtcactactactgtattagattcaaggggtggaaatggtaggcccttaacacccgctataaytggcattaaacgcttgacctatttttcagccagccttagaggaaattcaattagaaacttcca

SEQ ID NO: 546756 - DNA, 2101 bp, Homo sapiens
cctttttcattctgttttttttgttttgttttgttttgtttttttgagatggagtcttgctctgtcacccaggctggagtgcggtggcaccatctcagctcactgcaagctctgcctcccgggttcacacaattctcctgcctcagcctcccgggtagctgggactacagtcacccgccatcacgcccggctattttttttgtattttttagtagagacggggtttcaccgtgttagccaggatggtctcgatctcttgacctcgtgatccgcctgcctcagcctcccaaactgctgggatacctttttcattcttgaaagtaggagctacgaaaaaaaaaaaaaacactaaaatgtctttaagagaaccgtctacttacgatctaacttacataatcaaaacactctattgagggtgaaaattgagtataataataaaataatcaccagaggttccatacataatgctcctccacccaatacataccttaaaaagaaaaaaggaaacatacaaaattatcttgagaagtattcctgcttaaacaatttccatgtggcattattaagaaagtatgcacacagtaaagacaagaagagaacacgtaagcatgaacatacttgttaggcatataggattataggtaatttaaaaattctaatggtattactcttatgaaattgctctgaaattccagtcaattgtttgaaatggcaatcagaacagaatactttgaaatttttatgatgtcaaaaactaaaaacgtggccctaaatattccaaagaatcagggcagaagaacccatttccttaaatggcatttgagtgttctttacaatggaaactttctctcccaacctgtgatggccaggagtttttcctctgacaatggcaccgatcttaccctattcaaaatatgaacatctgcacggtttcatggttgaaattgttcttatccattctgttgtgagaatcgaatggttcacaccatgtggctcctctctgggactcctcaagtcctttctaggtctgaagactgttctctgaaccaaagacaacttctggggatgtaccaaatctcccattagaaaattatttagatcaagatgttttaaccttttaattctttctcaaacaaaataatttcatttctcctttaatgttattttaaatttcaaaatacacagatagcatgcctaaagtaaaatcaagggaatgatagttttagaacaaaaactgtggtaattttgaaagcacaaaagctaagaccactgattagatctatgtggacaccaagtccaccacaaacggttctgtcctccggggctctgcccacacctttcccttgcttgagattccttctgcttcctacccttccaaatgctgtatttccccccagaagacttgccaagaccactctagcctgcgcatcttccattccagctaaccaaaggcatccttgcattgactaaaccaaattattttgcagagaaggcatctaaaaacttctactgtagaccattcaccttaataattgttttcatgacattattcaataataaaatgagggaaagaagccctctttaactcccttgccctggagaatccaagcaagtgtctttcccacttgctttgcccaaaccctgggagctttcaaagtgaaagtttaatggaaggaaaagaaaatctaaaagaaaaactctccgaaaaattaaactcaggtaaagaatcatgggattamaaatttttattctttgtgtatttgatttctgaaacatttgaaatctctctctcactccttaaatctgccactgggctaagagagtattgtatataatgtgcactcattgatttaacagaattagaacatccaggcactcactcagattttggttccacaactgctcaaagtctagtcatttagttaatgagttaacaccacacttgatcttcaaattttggagatgctgatggtagacaggaacttgttttgggaaaaggaagtatatggcagacattgtcacccattatccaaccaacaccacctttcctttaaagtaccccactcttcctttaaggttgcagagtctcagaaagtaggaa

SEQ ID NO: 546757 - DNA, 618 bp, Homo sapiens
tccagaaagaggtcaacagaagccttgttaagcatatattgtattttttaagaggttgttgaatcgtgacagtacagaccatacttaatcctctgtaacccccaggcagggcaggcttgccccttgcaccagstcctatgcttctgaagcactttgcttgttccacagaaccattagactcatactcagagtatgaagcagaaatcacaattgaaattgtccctgaggctccctaaatctctcacaaaaaacagctaatccgtattctaatttacccggtcctatatgtatgtatgtgtaatgtgtatgtagaaattaataatgcctgaagtaggtggtttgagtttggaggctttgttatatgaaaaatttgtatctttaaacagtagcatccagctcagtgcagagaaatgagaagcgtaaagaaccagtgcctgactgtaggaggtaacaggccccgggcttccactccagtgtactcgggtgtgcatgcttactggggagaagggcaggtgggagcaatggcactgcttaaatttcttttgtgctgttgcacccctgtatgtgcactttgcacttgcagtctcactagctctctcgctttcctttccaggcata

SEQ ID NO: 546758 - DNA, 618 bp, Homo sapiens
tccagaaagaggtcaacagaagccttgttaagcatatattgtattttttaagaggttgttgaatcgtgacagtacagaccatacttaatcctctgtaacccccaggcagggcaggcttgccccttgcaccagctcctatgcttctgaagcactttgcttgttccacagaaccattagactcatactcagagtatgaagcagaaatcacaatygaaattgtccctgaggctccctaaatctctcacaaaaaacagctaatccgtattctaatttacccggtcctatatgtatgtatgtgtaatgtgtatgtagaaattaataatgcctgaagtaggtggtttgagtttggaggctttgttatatgaaaaatttgtatctttaaacagtagcatccagctcagtgcagagaaatgagaagcgtaaagaaccagtgcctgactgtaggaggtaacaggccccgggcttccactccagtgtactcgggtgtgcatgcttactggggagaagggcaggtgggagcaatggcactgcttaaatttcttttgtgctgttgcacccctgtatgtgcactttgcacttgcagtctcactagctctctcgctttcctttccaggcata

SEQ ID NO: 546759 - DNA, 2302 bp, Homo sapiens
tctttgtccctattatatactctctatgtagcagtcactgagctcctttaaaatgtaagtcaataatgttactcttttggtcaaaagtttccatttcctacagaataaagtccacagcctaagagagtttttttgagccccagtgagatctcatcctctattttccctctttgctcattgcctgctacactgccgctcactcactctacttcttgttattgctaaaaatggtttccttgttattgctcaaaaggctagacaggttcccaccctcagagcctttaaactttgtattttgtgttttttcccttgtgactctcttccctcaaatacctgcatggcctgctccaaggcttcatttatgtctctccccaacataaaatagctctctatcactctctatcctctgcttttctccctctgcaccccttgcttctccatattcattcattcattcattcattgtctgtcttcactgagaaacgaatgccatgagggtagagacatggtctctttactgtttgtatacatggtggctggaacagcacttggcatataatattagtgtttattcgataacctgtatagaatgaattaatttataaggtgtttaagtcagagatgagtgaacaattacacagtaggattaaacatatggcatgtagcactattataaatggctttcatgaaatataaacatgtattaatagaagccaggaagctataaatatcactatattacaaataagaaatcagaagaataaatggtctactaccagcaaccagtgtcttcctacctccttacctaatcaccgctctttgtttgacctcctaaacaacttgggccttctcttcatttttctttaggtgtacacccagaggaaaaattaacaataaaatcctacattctaatttctagatatcttaatatctatcctatatgaaaggttttgttgccctattaactttggcaaatgtcttttcttatttgcacataaccacaaagtaaggcctggacagctaattaaaaaatatttgtttagatatttcttacttacttagtgtcataaaatactagaaagtcagcacaatgatatmaaacacagtcatataacataaatacaggagtaagaaggaacaaggagaaaagtgaaaagaatgaccagagaaccatgactgagacttcgttacaaaaatatgccatagagcagggtcagcaaattatagcctgtggattaaatccagcatcctgcctatttttatcaataaagttttattggaacacagttctgctcattcctttgtgcactattgagataggaattcagcaggactagtttccaagacaataagtcacatgaccccgatgacaggacaggagacagcaaaagaaactagccaaaaccagctagaagcaagatggtgaggaaagtgacctctgtttaccttcactgctcattatatgcaaatataatgcgttagcctgctaaaaacactcccaccagcgccatgacagtgtacaattggaatggtaatgccagaaaattaacctgtgtggtctggatgtgggagaaaaccgagttctgggagctttctgcccttttcccagaacattcatatatagtacatcccttattcagcaaataatcaacaaataatcataaatataaccagcgagcagcccagggaactgctctgcctgcagggtagccttccttttgctccttaataaacttgcttttgctttattctgttggcttgctcttgaattctttcccacgtgaagctaagaacccatgcacttggcctcccaggctgagccctaattttggggttggccctgtgacactatctatggctgctttcacactacaacagcagagttcagtaggagtgatagagttagtataggctgcaaagattaaaagacagtatttaccatctgtccctttaccaaaaagtttgccaccatggagtcctatatacttggaatgggtgggccccaaatttgcttctaaccattctagttgctcatgcccatcagctttccagttgaagaacaactaatgttgaagaccagaaagaaatttctgccgaggatccttagcagaagaaccttgaataatgtaacatgtagtgtcctttgtaaaatcctcagactaaatgagatgaaggactaattctgttaggatatttcttaaaatatccctgcatttaggctgatgttatcacactgaggtccagttctctaaatgtaggacatattgtggggagccacagagtgtgatctcttgtataaaca

SEQ ID NO: 546760 - DNA, 2302 bp, Homo sapiens
tctttgtccctattatatactctctatgtagcagtcactgagctcctttaaaatgtaagtcaataatgttactcttttggtcaaaagtttccatttcctacagaataaagtccacagcctaagagagtttttttgagccccagtgagatctcatcctctattttccctctttgctcattgcctgctacactgccgctcactcactctacttcttgttattgctaaaaatggtttccttgttattgctcaaaaggctagacaggttcccaccctcagagcctttaaactttgtattttgtgttttttcccttgtgactctcttccctcaaatacctgcatggcctgctccaaggcttcatttatgtctctccccaacataaaatagctctctatcactctctatcctctgcttttctccctctgcaccccttgcttctccatattcattcattcattcattcattgtctgtcttcactgagaaacgaatgccatgagggtagagacatggtctctttactgtttgtatacatggtggctggaacagcacttggcatataatattagtgtttattcgataacctgtatagaatgaattaatttataaggtgtttaagtcagagatgagtgaacaattacacagtaggattaaacatatggcatgtagcactattataaatggctttcatgaaatataaacatgtattaatagaagccaggaagctataaatatcactatattacaaataagaaatcagaagaataaatggtctactaccagcaaccagtgtcttcctacctccttacctaatcaccgctctttgtttgacctcctaaacaacttgggccttctcttcatttttctttaggtgtacacccagaggaaaaattaacaataaaatcctacattctaatttctagatatcttaatatctatcctatatgaaaggttttgttgccctattaactttggcaaatgtcttttcttatttgcacataaccacaaagtaaggcctggacagctaattaaaaaatatttgtttagatatttcttacttacttagtgtcataaaatactagaaagtcagcacaatgatataaaacacagtcatataacataaatacaggagtaagaaggaacaaggagaaaagtgaaaagaatgaccagagaaccatgactgagacttcgttacaaaaatatgccatagagcagggtcagcaaattatagcctgtggattaaatccagcatcctgcctatttttatcaataaagttttattggaacayagttctgctcattcctttgtgcactattgagataggaattcagcaggactagtttccaagacaataagtcacatgaccccgatgacaggacaggagacagcaaaagaaactagccaaaaccagctagaagcaagatggtgaggaaagtgacctctgtttaccttcactgctcattatatgcaaatataatgcgttagcctgctaaaaacactcccaccagcgccatgacagtgtacaattggaatggtaatgccagaaaattaacctgtgtggtctggatgtgggagaaaaccgagttctgggagctttctgcccttttcccagaacattcatatatagtacatcccttattcagcaaataatcaacaaataatcataaatataaccagcgagcagcccagggaactgctctgcctgcagggtagccttccttttgctccttaataaacttgcttttgctttattctgttggcttgctcttgaattctttcccacgtgaagctaagaacccatgcacttggcctcccaggctgagccctaattttggggttggccctgtgacactatctatggctgctttcacactacaacagcagagttcagtaggagtgatagagttagtataggctgcaaagattaaaagacagtatttaccatctgtccctttaccaaaaagtttgccaccatggagtcctatatacttggaatgggtgggccccaaatttgcttctaaccattctagttgctcatgcccatcagctttccagttgaagaacaactaatgttgaagaccagaaagaaatttctgccgaggatccttagcagaagaaccttgaataatgtaacatgtagtgtcctttgtaaaatcctcagactaaatgagatgaaggactaattctgttaggatatttcttaaaatatccctgcatttaggctgatgttatcacactgaggtccagttctctaaatgtaggacatattgtggggagccacagagtgtgatctcttgtataaaca

SEQ ID NO: 546761 - DNA, 2302 bp, Homo sapiens
tctttgtccctattatatactctctatgtagcagtcactgagctcctttaaaatgtaagtcaataatgttactcttttggtcaaaagtttccatttcctacagaataaagtccacagcctaagagagtttttttgagccccagtgagatctcatcctctattttccctctttgctcattgcctgctacactgccgctcactcactctacttcttgttattgctaaaaatggtttccttgttattgctcaaaaggctagacaggttcccaccctcagagcctttaaactttgtattttgtgttttttcccttgtgactctcttccctcaaatacctgcatggcctgctccaaggcttcatttatgtctctccccaacataaaatagctctctatcactctctatcctctgcttttctccctctgcaccccttgcttctccatattcattcattcattcattcattgtctgtcttcactgagaaacgaatgccatgagggtagagacatggtctctttactgtttgtatacatggtggctggaacagcacttggcatataatattagtgtttattcgataacctgtatagaatgaattaatttataaggtgtttaagtcagagatgagtgaacaattacacagtaggattaaacatatggcatgtagcactattataaatggctttcatgaaatataaacatgtattaatagaagccaggaagctataaatatcactatattacaaataagaaatcagaagaataaatggtctactaccagcaaccagtgtcttcctacctccttacctaatcaccgctctttgtttgacctcctaaacaacttgggccttctcttcatttttctttaggtgtacacccagaggaaaaattaacaataaaatcctacattctaatttctagatatcttaatatctatcctatatgaaaggttttgttgccctattaactttggcaaatgtcttttcttatttgcacataaccacaaagtaaggcctggacagctaattaaaaaatatttgtttagatatttcttacttacttagtgtcataaaatactagaaagtcagcacaatgatataaaacacagtcatataacataaatacaggagtaagaaggaacaaggagaaaagtgaaaagaatgaccagagaaccatgactgagacttcgttacaaaaatatgccatagagcagggtcagcaaattatagcctgtggattaaatccagcatcctgcctatttttatcaataaagttttattggaacacagttctgctcattcctttgtgcactattgagataggaattcagcaggactagtttccaagasaataagtcacatgaccccgatgacaggacaggagacagcaaaagaaactagccaaaaccagctagaagcaagatggtgaggaaagtgacctctgtttaccttcactgctcattatatgcaaatataatgcgttagcctgctaaaaacactcccaccagcgccatgacagtgtacaattggaatggtaatgccagaaaattaacctgtgtggtctggatgtgggagaaaaccgagttctgggagctttctgcccttttcccagaacattcatatatagtacatcccttattcagcaaataatcaacaaataatcataaatataaccagcgagcagcccagggaactgctctgcctgcagggtagccttccttttgctccttaataaacttgcttttgctttattctgttggcttgctcttgaattctttcccacgtgaagctaagaacccatgcacttggcctcccaggctgagccctaattttggggttggccctgtgacactatctatggctgctttcacactacaacagcagagttcagtaggagtgatagagttagtataggctgcaaagattaaaagacagtatttaccatctgtccctttaccaaaaagtttgccaccatggagtcctatatacttggaatgggtgggccccaaatttgcttctaaccattctagttgctcatgcccatcagctttccagttgaagaacaactaatgttgaagaccagaaagaaatttctgccgaggatccttagcagaagaaccttgaataatgtaacatgtagtgtcctttgtaaaatcctcagactaaatgagatgaaggactaattctgttaggatatttcttaaaatatccctgcatttaggctgatgttatcacactgaggtccagttctctaaatgtaggacatattgtggggagccacagagtgtgatctcttgtataaaca

SEQ ID NO: 546762 - DNA, 1330 bp, Homo sapiens
cagtacatcttcttgaaatctaccaggcattttctattactttattccaactcatacactgtatgaagtagagtgtgaattatattcatagataacattcttaagcactttttcccacatcaaaataaaataaggaacctcagtttttagaagtaaattttttaaaaaagtcttggatatgtttccttgttcaatattatgcatttctgttattgatatatacttattactcagcacaatcacttttattatgtaggaagcacattccatttaagactgcacatctcaaaagaaatgttacaaacaggttacaaagaagccggaggaggtgacaaactaagattataattacacatgctaacacacacaaataatttaaatatattacattttcatctgattattcatttactcatttaattcaaatgttattaaattgggggtgcgggggaggtaattttttaaaaaggttatgaagtgtacactaggtactagaccctaaaaacaaaacctggtaccatcctccaggaggacgtagttcagtgaaggaaaaaaatcactgataattaaaagccatttgaatgagatttttagtagagttaaacaaaacaaaaacactcaatgtttttcatgagtactatgctcatcatacagttaagtagacactgaaaataaacaactaatattttgcagggaggaaaattagaaaaaagaattgtaaccaaattgataatattttgaaattgctacaggatcttgaaaaaaaatactttttttttttttttaaagaagcaacagaaagaggaggggctttccttagtatcagcagaaaagaaaagcaggcataaaaggyataaaagaggatgatatgtgtacaaaactgaatttttctatatgcgtagcaaatctaacataaggaaatatttagcattgtgttgtcaggaactacagtttaaaaatatttaagtgacacaatccagtgctttaaaaatattttgttctattttacttatcaagctataaaatatagttttggaaaattataaaactataggtattaaagcttttaaaatgcttttaaaagaaaacacttaaaaaataatttcgttgattctggtttttcctctatttctgtgtgtgttattttcacaaggcacataagatttgctactcatcaagggctcgggatatggataaactgtctgaggcaaaatgagttatgttaggaaggacggaggaaatgttgaaatcttaccttgaataggataagtagtaagggatcagttgactactttagccctgtaactgacagggtgaaatgaaaagggta

SEQ ID NO: 546763 - DNA, 1330 bp, Homo sapiens
cagtacatcttcttgaaatctaccaggcattttctattactttattccaactcatacactgtatgaagtagagtgtgaattatattcatagataacattcttaagcactttttcccacatcaaaataaaataaggaacctcagtttttagaagtaaattttttaaaaaagtcttggatatgtttccttgttcaatattatgcatttctgttattgatatatacttattactcagcacaatcacttttattatgtaggaagcacattccatttaagactgcacatctcaaaagaaatgttacaaacaggttacaaagaagccggaggaggtgacaaactaagattataattacacatgctaacacacacaaataatttaaatatattacattttcatctgattattcatttactcatttaattcaaatgttattaaattgggggtgcgggggaggtaattttttaaaaaggttatgaagtgtacactaggtactagaccctaaaaacaaaacctggtaccatcctccaggaggacgtagttcagtgaaggaaaaaaatcactgataattaaaagccatttgaatgagatttttagtagagttaaacaaaacaaaaacactcaatgtttttcatgagtactatgctcatcatacagttaagtagacactgaaaataaacaactaatattttgcagggaggaaaattagaaaaaagaattgtaaccaaattgataatattttgaaattgctacaggatcttgaaaaaaaatactttttttttttttttaaagaagcaacagaaagaggaggggctttccttagtatcagcagaaaagaaaagcaggcataaaaggcataaaagaggatgatatgtgtacaaaactgaatttttctatatgcgtagcaaatctaacayaaggaaatatttagcattgtgttgtcaggaactacagtttaaaaatatttaagtgacacaatccagtgctttaaaaatattttgttctattttacttatcaagctataaaatatagttttggaaaattataaaactataggtattaaagcttttaaaatgcttttaaaagaaaacacttaaaaaataatttcgttgattctggtttttcctctatttctgtgtgtgttattttcacaaggcacataagatttgctactcatcaagggctcgggatatggataaactgtctgaggcaaaatgagttatgttaggaaggacggaggaaatgttgaaatcttaccttgaataggataagtagtaagggatcagttgactactttagccctgtaactgacagggtgaaatgaaaagggta

SEQ ID NO: 546764 - DNA, 1330 bp, Homo sapiens
cagtacatcttcttgaaatctaccaggcattttctattactttattccaactcatacactgtatgaagtagagtgtgaattatattcatagataacattcttaagcactttttcccacatcaaaataaaataaggaacctcagtttttagaagtaaattttttaaaaaagtcttggatatgtttccttgttcaatattatgcatttctgttattgatatatacttattactcagcacaatcacttttattatgtaggaagcacattccatttaagactgcacatctcaaaagaaatgttacaaacaggttacaaagaagccggaggaggtgacaaactaagattataattacacatgctaacacacacaaataatttaaatatattacattttcatctgattattcatttactcatttaattcaaatgttattaaattgggggtgcgggggaggtaattttttaaaaaggttatgaagtgtacactaggtactagaccctaaaaacaaaacctggtaccatcctccaggaggacgtagttcagtgaaggaaaaaaatcactgataattaaaagccatttgaatgagatttttagtagagttaaacaaaacaaaaacactcaatgtttttcatgagtactatgctcatcatacagttaagtagacactgaaaataaacaactaatattttgcagggaggaaaattagaaaaaagaattgtaaccaaattgataatattttgaaattgctacaggatcttgaaaaaaaatactttttttttttttttaaagaagcaacagaaagaggaggggctttccttagtatcagcagaaaagaaaagcaggcataaaaggcataaaagaggatgatatgtgtacaaaactgaatttttctatatgcgtagcaaatctaacataaggaaatatttagcattgtgttgtcaggaactacagtttaaaaatatttaagtgacacaatccagtgctttaaamatattttgttctattttacttatcaagctataaaatatagttttggaaaattataaaactataggtattaaagcttttaaaatgcttttaaaagaaaacacttaaaaaataatttcgttgattctggtttttcctctatttctgtgtgtgttattttcacaaggcacataagatttgctactcatcaagggctcgggatatggataaactgtctgaggcaaaatgagttatgttaggaaggacggaggaaatgttgaaatcttaccttgaataggataagtagtaagggatcagttgactactttagccctgtaactgacagggtgaaatgaaaagggta

SEQ ID NO: 546765 - DNA, 658 bp, Homo sapiens
tcggccctagaaaccactgatctattttctaccactaaagatttgcctattctggacatttcatataaatgtaatcatgcaatatgtgttttatgactagcttctttcacttggtgtaatgttttcatttgttttagcatacacaagtaattcttttctttgtattgatgaataatatatctatcatgtggatagacagcatttttttattcatcagttgatgrgcatatgaattatatccatttttggttattatgaataatgctgccatgaatatgcaccagtttttgtgtgaacatgcatttttaattatctggggtgttcaactagaactggaatttttgctgctcttacatttaagtctataatacagtttgagttagtttttgtctatggtatgaaataagtttgaatatgagtggaggaaaaatcatctttccaagaaataatgctctgggaggactagattttcacatgcaattgaatgatatctgaacctatctcataccatatgcaaaaattaattcaaattgtatcaaagacctaacataagagctaatccaaaattaggtaatttttcttttaaacaactgtgcatccaacacaaacattttctttattttaaaaatgctaaatcctggatattaaattttaagag

SEQ ID NO: 546766 - DNA, 658 bp, Homo sapiens
tcggccctagaaaccactgatctattttctaccactaaagatttgcctattctggacatttcatataaatgtaatcatgcaatatgtgttttatgactagcttctttcacttggtgtaatgttttcatttgttttagcatacacaagtaattcttttctttgtattgatgaataatatatctatcatgtggatagacagcatttttttattcatcagttgatgagcatatgaattatatccatttttggttattatgaataatgctgccatgaatatgcaccagtttttgtgtgaacatgcatttttaattatctggggtgttcaactagaactggaatttttgctgctcttacatttaagtctataatacagtttgagttagtttttgtctatggtatgaaataagtttgaatatgagtggaggaaaaatcatctttccaagaaataatgctctgggagractagattttcacatgcaattgaatgatatctgaacctatctcataccatatgcaaaaattaattcaaattgtatcaaagacctaacataagagctaatccaaaattaggtaatttttcttttaaacaactgtgcatccaacacaaacattttctttattttaaaaatgctaaatcctggatattaaattttaagag

SEQ ID NO: 546767 - DNA, 690 bp, Homo sapiens
ctgttttttcctatctcacctattctttattttattttatttatttttttgagactgagtcttgctctatcgcccaggctggagtacagtggtgcgatcttggctccctgcaaactccacctcccaggttcaagcaattctcctacctcagcctcctgagtagctgggattacaggtgcatgccaccacacccagctaatttttgtatttttaatagagayggagtttcgccatgttgtccaagctggtctcgaactcctgatctcaggtgatctgcctgcctcggcctcccagagtgctgggattacaggtgtgagccacaggtcccagccctatttcacctattcttcatagtaatcccatattctcctaaagcgattttctctgggacctccctttactacttctgcttaagcctttgtgttttgctcccagggccttccaccactccatgtttggcagcatctgcttcctggggtacaaaagctgtcctgggtggaggaggaatgagaagacagaaaactcttctgacctcagaccccactgtctgggcattgatcccaaactcaatccccattctatgttgtgctcacactcaaattgggtgtgtgtgcatgttcacatgtgcatgccatgtttcctcatttctcatcttgtttttgagttgtgagtgcccttcccaagttgacc

SEQ ID NO: 546768 - DNA, 690 bp, Homo sapiens
ctgttttttcctatctcacctattctttattttattttatttatttttttgagactgagtcttgctctatcgcccaggctggagtacagtggtgcgatcttggctccctgcaaactccacctcccaggttcaagcaattctcctacctcagcctcctgagtagctgggattacaggtgcatgccaccacacccagctaatttttgtatttttaatagagatggagtttcgccatgttgtccaagctggtctcgaactcctgatctcaggtgatctgcctgcctcggcctcccagagtgctgggattacaggtgtgagccacaggtcccagccctatttcacctattcttcatagtaatcccatattctcctaaagcgattttctctgggacctccctttactacttctgcttaagcctttgtgttttgctcccagggccttccaccactccatgtttggcagcatctgcttcctggggtacaaaagctgtcctgggtggaggaggaatgagaagacagaaaactcttctgacctcagaccccactgtctgggcattgatcccaaactcaatccccattctaygttgtgctcacactcaaattgggtgtgtgtgcatgttcacatgtgcatgccatgtttcctcatttctcatcttgtttttgagttgtgagtgcccttcccaagttgacc

SEQ ID NO: 546769 - DNA, 663 bp, Homo sapiens
tgactaaactacctcacttaaggggamtcatacagtatgtctttttgtgactggcttatttcatttagcataatgttcacctatgttgtagcatatgtcaaaaattccttcctttctcaggttgaataatattccattgtatggatgtatcacattttgcttatccattcatctattgatggacattttggttgctttcacagtttggctactgtgaataacgttgtcatgaactcaggtgtataaatatctgagaccctgacttcaattattttgggtataaatccagaagtggaattgctggatcatatgctggttctatttttacttttttgtggaactgtcctacttatttttccacagtggctgtatcattttgcattcccatcaacagtggacaggtgttccagtttctccacgtccttgcaaacagttattttctgtttatttgtttgttcgttgatcatagctatcctaatgggtatgaggtgaaatctcattatagttctgattagtgatgttcagcatcttttcatttatttgctggccatttgtagatctttggagaaatgtctattcaagtcctttgcccatttttgaattgggttttatagttgttgagttttaggagttctgtattacacttgatctcatagtcactga

SEQ ID NO: 546770 - DNA, 663 bp, Homo sapiens
tgactaaactacctcacttaaggggaatcatacagtatgtctttttgtgactggcttatttcatttagcataatgttcacctatkttgtagcatatgtcaaaaattccttcctttctcaggttgaataatattccattgtatggatgtatcacattttgcttatccattcatctattgatggacattttggttgctttcacagtttggctactgtgaataacgttgtcatgaactcaggtgtataaatatctgagaccctgacttcaattattttgggtataaatccagaagtggaattgctggatcatatgctggttctatttttacttttttgtggaactgtcctacttatttttccacagtggctgtatcattttgcattcccatcaacagtggacaggtgttccagtttctccacgtccttgcaaacagttattttctgtttatttgtttgttcgttgatcatagctatcctaatgggtatgaggtgaaatctcattatagttctgattagtgatgttcagcatcttttcatttatttgctggccatttgtagatctttggagaaatgtctattcaagtcctttgcccatttttgaattgggttttatagttgttgagttttaggagttctgtattacacttgatctcatagtcactga

SEQ ID NO: 546771 - DNA, 1709 bp, Homo sapiens
acaccattagttgaagatggtacctatagtggtattctctattgagaaagaaacaatctttctgttctaaacttctttggccttgtttgaaacattgcattctatattgtacctgtggaacgtaaagaagattttagtaaaaagaaactttaataattaaagaaatggaaaacagaatctagaagggactataacagaattaggtagtcttaagacaatattgccatgaaacctgtgccttcagttatgtaaatttggtcctatcgtatccaaatattgcaactgtcttctaagatgccactagccctagaattccttgatgctataggaatttcactgttctgtgaatgtttctaagtgtaaatttaaaacaacaaaactcaaatgatctcttaaatttaaaaatgatcaatgccagagtatatagagaaaaagagtgaggacaacagtaaacataaaaatagcatcagagtcagacagaggagcaggaaggggaggggagctttgagtaaatatatctgagaaacctacatctttgcttgtcagaagctatgtggtttcaaggaaggaagatgttatcctgccattcatcctaccaaccctctcttcagcctcaggccagcaaaatggacaatcctcaggtgaccatcacagctgcccagcacatgtcttaattgcttccttataagccaagccctagttgacggctggctgtatgaactggaaatatctcctatccctaggactctagctgtatctgaggttgctatggttcttacaacactacttagcttaatgagccctgggattccctaggctgctgctgtttgagttctgttaaatttagttcttgctaggaagttgaccttgggacctgcaggctctgaagcaattagacctgttgcataacagaacccacttattttacttactttggattgatttatttgtaatttgtcattgatttgtttgtatatgccatccattttcaatgcctcagtctgtatctgaagaagattctcactggtttttatctcaatcatgctccttgaagtagcagaagctgaaggataaataccaacctaaggtatttatctctgagataattccagggatagcttggtatttatcctttaaggtaatatagagtgtcttgatacaacacctgatttcttgaaacctcaagcagcttacctactggcatttattcatagatcgtatccagaaaacacagctgttgtcattagtaatttaattttttatagactgtcagtctaatttttaaatatcataaaacataattctcaaacaaatacataatgaacacatcaaaaactgtatttaattaacgagggatagcaggataacaaagtccgttccaaaaagaatatgaaaagtgtgattttacataatcacagcaaaaaaatgaacactaaaataaaattgttaaatttgatgtaatccagttaatgtctcatgacacagatttacctatataacaaacctgcacgtgtacctctgaacttaaaagttaaaaatatcaacataacaaaaatattcatattttttcatacagctctaaaaaggggcaatacgaccttaatctttgggattatcttttctaccacactaaaaagatacaatgyagcagttttctataacatctagctatatgtaattatacaatgtctgagattccataattcata

SEQ ID NO: 546772 - DNA, 1011 bp, Homo sapiens
cggaatgctcacagtcaaatcctgctgggagggccatcctctgctcgggttctctactgtccagggcaggaatgactcatgtkgccattcagaggcgaggccccaccaggaagcatccactgactgcccaaggctgtgcatccccatagcgctgagctcatgtccctgacctgtggcctctgggcccacactctgctcaaagttccctcagggggatgaagggagaggcgggccctagggcaagggtgcccaggaggagagaaggaaaaggcaagcatgtcttcatcagtggggttttctcctgagagcagaattcatttccacaccttccaagttccctcttgtggctggcacttctctgacctggagccccagatggcggggcactcagaagagggagggtcattcctgggagcagataaggcctcctccttctccagctcctgaatcagaaactgaggcctcccctggaccttccctgcttatgactggggcctcccacgtgcaaagcacaccttcatcttgcactgaagtctcaggacctggagagcacctccacacggggggctggatcctcctggaactgtaagccttgcccagaaagccctgaaggggagcagggaggcggcagcagcacagccttcttcagcttccaggggaagggatgagggaggcgggtggacgagcttccaaccggcatggcatgggatgctgaaaaacgcgatgggctctggcctattggagccatctctccttgtcctgtacctgccccttgggggtttagggcagaggaaatgttggcttgttgtgtgagtcagataaacaggtggggagaatgggcccgtatgccctggtttgcacaggaaaggtgtgctcaccagcaagtgtttcttctagaaattaagtaatcctgggacaggcttttcctccccagttccacaagactccaagatgtcagagtatcataaacacggagaataaggacacaggattaacccaacccaacctctg

SEQ ID NO: 546773 - DNA, 1011 bp, Homo sapiens
cggaatgctcacagtcaaatcctgctgggagggccatcctctgctcgggttctctactgtccagggcaggaatgactcatgtggccattcagaggcgaggccccaccaggaagcatccactgactgcccaaggctgtgcatccccatagcgctgagctcatgtccctgacctgtggcctctgggcccacactctgctcaaagttccctcagggggatgaagggagaggcrggccctagggcaagggtgcccaggaggagagaaggaaaaggcaagcatgtcttcatcagtggggttttctcctgagagcagaattcatttccacaccttccaagttccctcttgtggctggcacttctctgacctggagccccagatggcggggcactcagaagagggagggtcattcctgggagcagataaggcctcctccttctccagctcctgaatcagaaactgaggcctcccctggaccttccctgcttatgactggggcctcccacgtgcaaagcacaccttcatcttgcactgaagtctcaggacctggagagcacctccacacggggggctggatcctcctggaactgtaagccttgcccagaaagccctgaaggggagcagggaggcggcagcagcacagccttcttcagcttccaggggaagggatgagggaggcgggtggacgagcttccaaccggcatggcatgggatgctgaaaaacgcgatgggctctggcctattggagccatctctccttgtcctgtacctgccccttgggggtttagggcagaggaaatgttggcttgttgtgtgagtcagataaacaggtggggagaatgggcccgtatgccctggtttgcacaggaaaggtgtgctcaccagcaagtgtttcttctagaaattaagtaatcctgggacaggcttttcctccccagttccacaagactccaagatgtcagagtatcataaacacggagaataaggacacaggattaacccaacccaacctctg

SEQ ID NO: 546774 - DNA, 1011 bp, Homo sapiens
cggaatgctcacagtcaaatcctgctgggagggccatcctctgctcgggttctctactgtccagggcaggaatgactcatgtggccattcagaggcgaggccccaccaggaagcatccactgactgcccaaggctgtgcatccccatagcgctgagctcatgtccctgacctgtggcctctgggcccacactctgctcaaagttccctcagggggatgaagggagaggcgggccctagggcaagggtgcccaggaggagagaaggaaaaggcaagcatgtcttcatcagtggggttttctcctgagagcagaattcatttccacaccttccaagttccctcttgtggctggcacttctctgacctggagccccagatggcrgggcactcagaagagggagggtcattcctgggagcagataaggcctcctccttctccagctcctgaatcagaaactgaggcctcccctggaccttccctgcttatgactggggcctcccacgtgcaaagcacaccttcatcttgcactgaagtctcaggacctggagagcacctccacacggggggctggatcctcctggaactgtaagccttgcccagaaagccctgaaggggagcagggaggcggcagcagcacagccttcttcagcttccaggggaagggatgagggaggcgggtggacgagcttccaaccggcatggcatgggatgctgaaaaacgcgatgggctctggcctattggagccatctctccttgtcctgtacctgccccttgggggtttagggcagaggaaatgttggcttgttgtgtgagtcagataaacaggtggggagaatgggcccgtatgccctggtttgcacaggaaaggtgtgctcaccagcaagtgtttcttctagaaattaagtaatcctgggacaggcttttcctccccagttccacaagactccaagatgtcagagtatcataaacacggagaataaggacacaggattaacccaacccaacctctg

SEQ ID NO: 546775 - DNA, 646 bp, Homo sapiens
tgggctaagagtaagaacagccaggatgcctgtgcaaagggcttgttgggctggatgtctgtcgtcccatttttttcctttgttttattctttttaaaagtggatttttttttttaatagagtctcactttgtcacctaggctggagtgcagtggtgtgatcttggctcactgcagcctcaacctcttaggctcaagccatcctcccacctcaacccttacaagtagctgggactacaggcacatgccaccacgcctgggctaattttttttttttgtattttttatagaggcaggatttcgccatgttgcccaggctggtcttgaactcctgagttcaggtgatccacccgcctcagcctcccaaagtgctaggatgacaggcatgagccacgcacccggcctgtcatcccatttaagtgctctcatactcacgtttcatggtgtgtgtctggattccaatggtgatgacggatgtccccraaagtaaactggatcagacacatatgaagggccaagcacattgcagacatcatcatcgctgctctcacaatgccctgaaagattttcccagatgtggatacttggtaattcactaaggtaatggtttgtacttgtgatattcattcttctccaatttttttaaa

SEQ ID NO: 546776 - DNA, 629 bp, Homo sapiens
cctcccccagacactctttgcgaatttgcagtggccttccagggcacctaacaggtagtgtgggagccagagttagatctgaaggtccccgggttacagatgaggaaggatcagagagggaaattgactttccctctttacacagctcagatagccttccccttccacgaagctgtcytccctgagattgcagtgtgcctgccccggagaacaatttagcttgttcccagggtgcatcagttttagtcttgcctcacgttgaactcgactgcttgtcatacgcaagcactgcttgcctgctaaaatcatccgggaggcagtggaggctgctacccccaggaccaatgaagcagggcttgtattgtaggatcttactgctgttgggatcagcccgtgtccgcctcagggctgctcttaacgttctgttgtctccccagaccagagtcatccttctgaactggtgcgcgtggttcctgcgaatgaagaggcccggggaggacaaggtgcgcccggcctgccagcacaagcagcggcgctgcagcctggccagtgtggagatgagtgccgtggcgccgccgcccgccagcaacgggaacctgctgtacatcggcttccgcggcctggacggc

SEQ ID NO: 546777 - DNA, 629 bp, Homo sapiens
cctcccccagacactctttgcgaatttgcagtggccttccagggcacctaacaggtagtgtgggagccagagttagatctgaaggtccccgggttacagatgaggaaggatcagagagggaaattgactttccctctttacacagctcagatagccttccccttccacgaagctgtcttccctgagattgcagtgtgcctgccccggagaacaatttagcttgttcccagggtgcatcagttttagtcttgcctcacgttgaactcgactgcttgtcatacgcaagcactgcttgcctgctaaaatcatcygggaggcagtggaggctgctacccccaggaccaatgaagcagggcttgtattgtaggatcttactgctgttgggatcagcccgtgtccgcctcagggctgctcttaacgttctgttgtctccccagaccagagtcatccttctgaactggtgcgcgtggttcctgcgaatgaagaggcccggggaggacaaggtgcgcccggcctgccagcacaagcagcggcgctgcagcctggccagtgtggagatgagtgccgtggcgccgccgcccgccagcaacgggaacctgctgtacatcggcttccgcggcctggacggc

SEQ ID NO: 546778 - DNA, 629 bp, Homo sapiens
cctcccccagacactctttgcgaatttgcagtggccttccagggcacctaacaggtagtgtgggagccagagttagatctgaaggtccccgggttacagatgaggaaggatcagagagggaaattgactttccctctttacacagctcagatagccttccccttccacgaagctgtcttccctgagattgcagtgtgcctgccccggagaacaatttagcttgttcccagggtgcatcagttttagtcttgcctcacgttgaactcgactgcttgtcatacgcaagcactgcttgcctgctaaaatcatccgggaggcagtggaggctgctacccccaggaccaatgaagcagggcttgtattgtaggatcttactgctgttgggatcagcccgtgtccgcctcagggctgctcttaacgttctgttgtctccccagaccagagtcatccttctgaactggtgcgcgtggttcctgcgaatgaagaggcccggggaggacaaggtgcgcccggcctgccagcacaagcagcggcgctgcagcctggccagtgtggagatgagygccgtggcgccgccgcccgccagcaacgggaacctgctgtacatcggcttccgcggcctggacggc

SEQ ID NO: 546779 - DNA, 609 bp, Homo sapiens
ctttttctttctttytttttttttttttttttttttttttgagatggagtttcgcttttgttgcccaggctggagtgcaatggcgcaatctcagctcaccgcaacatctgcctgcctcccaggttcaagtgattctcctgcctcagcctcccaagtagctgggattaaaggcatgcgccaccacacccacctagttttgtatttttagtacagacggggtttctccatgttggtcaggctggtcttgaactcccgacctcaggtgatccgcatgccttggcttcccaaagggttgggattacaggcatgagccaccatgtccagctgatttctttttcttttttctttttttagagatggggtcttgctctgtcacccaagctacagtgcagtggtgcaattatagctcactgtaaccttgaacttctgggctcaagtgatcctcccaccttagcctcccgagtaagctgggactgaaggttaattttttgatgttggttttactttctctgcccaatctgaaaatctctgccttttatttgggaacacattcaattaaacccaattagattttacttgctaaaaagagtccaaggcacagacacaatg

SEQ ID NO: 546780 - DNA, 621 bp, Homo sapiens
ctatggactttgggttataatgtgccagtgaaggtttatcagttgtaacaaatgtaccactccggtgggggaggcttataatgggggaggctttgcaagtgtgcagcagagggtatatgggaaatatctgtacctatyctctaaattttgctgtaaacctaaaacttctctaaaaaataaaagttatttaaaatgtttaaccacaacggaaagatttaccctcccaatggtgacaaaaaatcataatttagaccttcttcaactagagcagagaaaagaaaactcaagtcacactcagcagactatccatctacactttcgttttctgcctctaggcagggactgaatctactttgcctttccattcccaggatctagcacaatgtttgccacatagaaggtccaaataagcttttattccattcagttgctagtgcatgcacatgtgcagaagtccttacagactatcctgcctcccagctgagggagatccttagattggaaagactctggagacctttcttgggcaatctacaatagaattcagtttctgagcaagatctttaaatggcctaggaaaatccagctttgcttcttctcagtcttctaaaactatcacat

SEQ ID NO: 546781 - DNA, 621 bp, Homo sapiens
ctatggactttgggttataatgtgccagtgaaggtttatcagttgtaacaaatgtaccactccggtgggggaggcttataatgggggaggctttgcaagtgtgcagcagagggtatatgggaaatatctgtacctatcctctaaattttgctgtaaacctaaaacttctctaaaaaataaaagttatttaaaatgtttaaccacaacggaaagatttaccctcccaatggtgayaaaaaatcataatttagaccttcttcaactagagcagagaaaagaaaactcaagtcacactcagcagactatccatctacactttcgttttctgcctctaggcagggactgaatctactttgcctttccattcccaggatctagcacaatgtttgccacatagaaggtccaaataagcttttattccattcagttgctagtgcatgcacatgtgcagaagtccttacagactatcctgcctcccagctgagggagatccttagattggaaagactctggagacctttcttgggcaatctacaatagaattcagtttctgagcaagatctttaaatggcctaggaaaatccagctttgcttcttctcagtcttctaaaactatcacat

SEQ ID NO: 546782 - DNA, 855 bp, Homo sapiens
tgaaactttttcgtttcagattttacactctgattttaccttttacactcttaaaaatcaggaacccaaaggaatgtttacgctgtcagttatatccatcaatactcaccagatttgaaattaatactgtggcatctagaaatatttacttataaatcattatacaataaaatagtatttatttataaatctatacaataaaaatagtatatattatgtacaatatacataatacaaacattgtattaaaatgactatatttttaaaagaaaactagttgtcttacattttggaaaaagctatttcatgttgtgcttaacaaaagacagttggattcttataactttggtatccaatttgttgtgatgtgttgtttttggtggaagtacatgaagaaaatctggcctcgtccagatatatagttggttaaaagagaaccttgtaaactgtgtgaaagtgccttasggacaccctagtggtcctaggaacaccctaagaacagcctgaggcaggccagctgaaatggaggaattaccctagttatacaaaataaaagaatgttttctacacctgtagttctgagtcaccgttaaaaattcttgttagcaggacaaattgtgtttctaacagcaaaactgaaggacttgtatttgctcactttgtggtgttagttgggggcaaattttgcataattccttccctttgcataaagtgtctgcttgaaagagtgaaatgactgactgcaacatgtgctttcaagtttcactaactttcacagaaatggaaagcagtgtgttgcatctgtgtaaagagatattgaagaggagaaaagtgcacagaaacaaaataacccat

SEQ ID NO: 546783 - DNA, 593 bp, Homo sapiens
attatatyttacatttatattttacaatatatacagtaatgaaaattgagtaagtgaagcctttaatacagtacttgaataaaactgcatgcgtgtccatattttaaatatgatcctgatgttattaataatcacttgcaaacagttttgtaatttcctagaaaggataacttcacttgaagtatctaatgtctacattggttctgaagtgaaatgtaaatatctgacttcccaataatccagaagattttaaaaggaaaattgaaattgaaagacttccattacacctcatttatcacagctgcaaattctacatctatttctgatatcaaaataatcataatatcctcataactaagaaaacacacatccaataattacacaatgaactttaacatgataaatatgtttatagttttatatcatgaacatgatgcaaaatcctaccaccgaaaacatgttctacgaacattatacaataaatgacatgtatttttaaagtcaaacactcttatttataattcaggcaaatagaagtctcaaataaccagtgttttgacagtatcaaagatgttataatagttcatttttta

SEQ ID NO: 546784 - DNA, 1906 bp, Homo sapiens
ccactagtccacttcccccaaacaagggagtgcaatgatgtagaactggagtcatagatgggagtaagattgctttgctcagagatgacaggagttgagatgggcagagacacaaggtggtgtttcttcgacaaactcccaggtgtgcgggttcctgactgtgagtgaaggactgtgatttgaataagggctggggtgtgtatctgaagaaaatggtgaggcatttatcacttagatttgggggaggagattaaaatacaataactagatagtcattaaaaattattccagacacccaaaaattgatatgggggagttctattaggaaaacaggcttcatttactggaaaatggggaggttaattaagaagtaagagtgtttataagtaggatgttcagaggaagtgctgatgttgtccttgtcattaaatgttttctgatataaaaatactcccttggtacttacgaagaaggctgattttcattattagacattcacttattcattgtaaaataaaagcgtgtgtgtatgtgtgtgtgcatgcatatgtatttccaatcaaaagtcaggagcgcggactatattatatagaacccagagattcaaaggcctgattatgaatggatagttacacggatagattaatgatggatggatggaagaagtgtggttcatctgtcatgactggtgcctctagctctaagatgtctgactttgaatccagaggaagaagtgggatcactggggttaggggagtatcctttaaaagttttgcaaaaaacatttgcagtcacttttggtttatctctgccggttggatttagttttcctgaagccccttcggcgtggccatctatgacttatgctccgggcaatggaatgtggctttttcttccctttcacccaggagctctcaagctgcctctttgcttccttctctacctatctgcatggattttaagcttatctggatactcattgtgaatactcatgagggctaatttcactgcattgctccacaaaagagttcctggattccatattctggaataatttagcagacttcaggatgaatcaaaagaagccagtcacagaaaaatgtccatcaaccttttagtttaatcatcccttatgccttaagggtatgttgtaacacagctggcctagacagcctctctcctgctcccctggctctacgggttttcctctggcccagcccacctgtccaggctcacctcttgccccattcccactttgcagcctacattgaagccaaatcaaactattcacagctgccctggcgctctggactatgtcaagtacccttgactttgctcatgtagctggagggttctttcctcttcctccacatctccccatgttcccttctctttccccatcaatctttaaagactcacaaatccaaaatattctactctaaaaaagctttcattgacrgttttcctccacctccacccattaccaagtactttctcctatacatacttctattacagcaatgataatactgcaaatacattcacaagaaggaaaaaaaaatctcaagccaattagcaagtgactagagtctgagggaagtccacagtggagatgagtaagaggccttgtaatgcagaagagccaaacagggattaagggataatgctgtaaaaaagcaaaataaataaccagggcaggctctgttgaatcttacagagatggccttctaggttaaacattttttgaagtacagacatgcaatgcttaacaaggaggatatgttctgagaaatgcattgttagatgatttaatcattgtgtaaacaccatagagggtacttgcatgtactgaatgtactgaatactgtaggcagttgtaatgcaatgataagcattcatatatcta

SEQ ID NO: 546785 - DNA, 983 bp, Homo sapiens
ctagtgggataaattaaacaaggcacgcaaacacctctacagccacaaatgtgataaggctctaagtgaatatcgcacatgacagtggccctgctgaaggccaggcagaggttccttcttgaggaaggacgtctctgaatctccagaagccaatagaatctgtagcagcagaagaaagggtcaggtttctagaactgcccactacgactttagaagctgacgcatctctgttatgccgcggctgcgatgttttaagtccccaaagcccagagcacatcgtggagcatggaartggttcactgagaagctgaatctagtcctggggctgctggtgtggagggtgtgttccgctcttggggcagcagcaacaggtgccgtgagaggctcagagcttttgaagcagaaatggcaatactctacatcttcagcaaatatttgggagtcttttgttaaaagaagagcagaataaatatctatgcctcttgtaaaacccaaaggaaagctctcagataggcttctttagggctatgactatctctgcagcttcactatactgagttaagtctgtagagcatctgtaaccctaggcatgtgtgtccacaacctccacacgtacacaaggacactcctacagaggacaggccgtgcggacagttaggggaggacagtggaggccgcttcagttcacttcggtgctttggattcaagtgtttttctgtttcattttctgggtagctgattattaagctaaacactcctttgatggttgaaaatacattagtcccttttcttgcacgaatctaattcaccaaagcctattaaagtgcttttggaccaatgaggaaatttaatgctcaagtattttattctgaattccaattttccttgtgttatgattttacctataggtggttgggttgattgtatggtaaagatgaaaaaaagcatatttggaaagaacatgacaattctcaaggtgttta

SEQ ID NO: 546786 - DNA, 1269 bp, Homo sapiens
tgggccaggcgcagtggcttacacctgtaatcccagcactttgggaggccgaggcaagagtatcacctgaggtcaggctttcaagatcggcctggccaacatggtgaaaccctgtctctactaaaaatgcaaaaaatagctgggtatggtggtgcgtgcctatagtcccagctactcgggaggctgaggcaggagaatcgcttgaacccaggagatggaagttgcagtgggccaagatcatgccactgcactccagcctgggccaaagaatgagactccgtctcaaaaaaacaaaacaaaacaaaacaaaaaaacatataaaggtcccctctgctgggtaagaaaccatttgctcctggggcagggcctgtgtctgcctatcccagcccccaccccagcctcaggagtggctgtgctctcaacagggcgcaggaaaccttcctcaggtgaggggtcccagaattagagaccacgggagctggaggggccatataggggcatctctacaaaagaagtccgtggactaacattcaaccacccagtttttattttgtcaagtaagaatatcagagaaataataaaccatttttttttcttttttgagacaagatctcgctccgtcacccaggctggagtgcagtggtgcaatctcagcttactgcaacctccgcctcttaaggcttaagcaatcctcccacctcagcctcccaagtagccgggactacaggtgcacgacaccatgcctggctaatttatttatttatttttttgttgcccaggctagcctcgaacttctggcctcaagtgatcctcctacctcagcctcccaaagtgctgggactgcagacatgagcctaggctaacaaatcactttctcctggcaccatcatttcatcaaaaaagagacaagcsacatcttaaacaccaaaaaaataaaaagagaggagagcaggttttagaatagagcataatcctttaagctaaatacatattggctttaagaaaactcattatattgccctgaatttccaggacttttcaggacttttgctggaaacctgtgaaaagatcatgacacagctgaacttgaatatgggctgtggattagagaatagtattggatcaatgctgagtttcccgtgtctaccatgcaggagttacgtaagtcttgcactgtaaaagagcatccttgttcttaggaaatacaccctgaagtatttagaggtaaaagggcatgatgtctgcaacttattcttaattgggaaattt

SEQ ID NO: 546787 - DNA, 1269 bp, Homo sapiens
tgggccaggcgcagtggcttacacctgtaatcccagcactttgggaggccgaggcaagagtatcacctgaggtcaggctttcaagatcggcctggccaacatggtgaaaccctgtctctactaaaaatgcaaaaaatagctgggtatggtggtgcgtgcctatagtcccagctactcgggaggctgaggcaggagaatcgcttgaacccaggagatggaagttgcagtgggccaagatcatgccactgcactccagcctgggccaaagaatgagactccgtctcaaaaaaacaaaacaaaacaaaacaaaaaaacatataaaggtcccctctgctgggtaagaaaccatttgctcctggggcagggcctgtgtctgcctatcccagcccccaccccagcctcaggagtggctgtgctctcaacagggcgcaggaaaccttcctcaggtgaggggtcccagaattagagaccacgggagctggaggggccatataggggcatctctacaaaagaagtccgtggactaacattcaaccacccagtttttattttgtcaagtaagaatatcagagaaataataaaccatttttttttcttttttgagacaagatctcgctccgtcacccaggctggagtgcagtggtgcaatctcagcttactgcaacctccgcctcttaaggcttaagcaatcctcccacctcagcctcccaagtagccgggactacaggtgcacgacaccatgcctggctaatttatttatttatttttttgttgcccaggctagcctcgaacttctggcctcaagtgatcctcctacctcagcctcccaaagtgctgggactgcagacatgagcctaggctaacaaatcactttctcctggcaccatcatttcatcaaaaaagagacaagcgacatcttaaacaccaaaaaaataaaaagagaggagagcaggttttagaatagagcataatcctttaagctaaatacatattggctttaagaaaactcattatattgccctgaatttccaggacttttcaggacttttgctggaaacctgtgaaaagatcatgacacagctgaacttgaataygggctgtggattagagaatagtattggatcaatgctgagtttcccgtgtctaccatgcaggagttacgtaagtcttgcactgtaaaagagcatccttgttcttaggaaatacaccctgaagtatttagaggtaaaagggcatgatgtctgcaacttattcttaattgggaaattt

SEQ ID NO: 546788 - DNA, 509 bp, Homo sapiens
agagccaagatcaagatatcaacaggatagatttcccgtgaggcytgtgagagagaatctgttccaggtctctttcccagcttatggtagccttgagtgattctttgcttgaggttggccatactttttcctgtatcttcacattgctttccctctctatgtgtttgactttgtgcccaaatttccttttttgtaaggatgtgtcctattgaattagggctcatcctaatcactctatataacataattatttctgtaaagaccttatgtccaagtcaagtcacattaggaggtatagcaggtgggactctaccatctttttgttggacacagtttaaccaggtaatgctgatgctcctgctctgggaaccaccctttgagaatcactggtctaatctaactccctgattacactggtgagaaatgtagggttcctctaagctaaatgacatgcaaatgtcagagtgattctgtggcagggtcagatgagaacccttatttcttggtcc

SEQ ID NO: 546789 - DNA, 1310 bp, Homo sapiens
gggagaaaaatagattctaaagaaagcatgttagcataagcaactccccaaattttcagctcttccttcacatgctcttccttgacacagcattcagctagtcatccaacagggatttgtgagcagctattgtactgggaactgcagtaggcaattrtttgtaaaacaaaagctacacaaagtttttttttttttttttttttttgaaacagagtgtcgctctgtcacccaggctggagggtggtggcgtgatctcggctcactgcaactgagagacaggactagctggatttcctaggccaactaagaatccctaagcctagctgggaaggtgaccgcatccacctttaaacacggggcttgcaacttagctcacgcccaaccaatcagagcgctcactaaaattctaattaggcaaaaacaggaggtaaagaaatagccaatcatctattgcctgagagcacagtgggagggacaaggatcgggatataaacccaggcattcgagccagcaatggctaccccctttggaccccctccctttgtatgggagctctgttttcactctatttcactctattaaatcttgcaactgcactcttctggtccatgtttgttacggctcgagctgagctttcgctcgccatccaccacagctgtttgccgccctcgcagacccgctgctgactcccatccctccagatccagcagggtgtccgctgtgctcctgatccagcgaggggcccattgccactcctgatctgggctaaaggcttgccattgttcctgcacggctaagtgcctgggttcatcctaatcgagctaaacactggtcactggactccacggttctcttccgtgacccacggcttctaatagagctataacactcaccgcatggcccaagattccattccttggaatccgtgaggccaagaaccccaggtcagagaacacgaggcttgccaccatcttggaagcggcccaccaccatcttggaagtggctcgccaccatcttgggtgctctgtgagcaaggaccccccagtaacacaacctctgcctcccaggttcaagtgattctcctgcctcagcctcctgagtagctgggattacaggtgcataccactacaacggctgatatttgtatttttagtagagacagggtttcaccatgttggctgggctggtctcgagctcctgacctcaggtgatccacctgcctcggtctcccaaagtgctgggattacaggcatgaaccaccatgcctggcatacaaagatttttttaaataaaatgttgtcattctcct

SEQ ID NO: 546790 - DNA, 526 bp, Homo sapiens
tgccgcctgccctggcagctgtgccaggatctgtggcacctcctcagcaggactgccctggcctgcctgcagcagctgagacagacgagacagcatgaagtgggacacatggtggaatgatggtttgagaagagcatcccagacccatggagattgttgacccccagaagccctctcactcctacttcctggctctgctagggctccacttcagagaagctgaacagcctgtgggctgggccttggggaaaagggtctgcaagctgggtcctagagaggctagggtgggccgtggagggggcacgtgggcagcagggtggaagcttcaccttggttytagtgaacaaggccaggagcctcgcatctgtgcagctgctgtggaccggcccccagactccgtcagccccacagagcctcctcactatgcccctcttgctctcaggacatggggcctgtgccacgtggccagccttggtgacattccaggtgagcaccgaggcgtcctcagggcaggtgatgtctccat

SEQ ID NO: 546791 - DNA, 1398 bp, Homo sapiens
cactggacgtcaatttaaaaaaataagagagaaaaaaagaaaaatttcattagcaaagcacttccaaaactagtctttccaacatttgaaaagcattcaagtacctgaaccaacacacttacattatctaagttcagaagttctcaatgcttaggggcccaactggacccctggccctgcccaaaaacccatgtaacctcagagtgtgtgtcagaagaggctggaagataactgaataaggatgctatagaaggcattctcccactgggcaacagtttgaataaaagaaatttctctcaattttaagattctacgatatgttaaaaaaaaaaatcaaaatagcctcccacacccccacacaattaagtttctttatggcaatgatgaagaagtgctatctccaattcagtcccattgccataattagtatctcaaaacctctttggctcctttatttttgaagaccttacttgaatataatttaattctttcagagacactttttatacaatgcattagtgtttttagatatttaaaccctataaaatcagcaagacttgagatattacacaygttacaaacatggaaacataagatgagtagctaagttacaaaataaaaacttctaaggacccagcctgagctagaacacagaccttctggctttcaggactatcagagtcttttctcaactcctgatctctgcttcctgtctgctctcttgcacagtccagcatggaaaggaatttataagaatatgttctatttattacaaagttttaaattccacgttcttaatcttaaaatcagctgatttttaaagtgtgtgttttctctttctcaaaaatctcttccaagcttcctagaataatcatttaagtctgcagctattttagccatactggtaatatatttagagtctaaagggaatctataaattttttccatgaattcttcagcgggcaaccaaaataaaaaatttaagtgtgccatagttccaaaatactactgtagtctccaatcctattggtttcaaagggcaaaataaaataattttcagcatttcagtctttgaggttactattctttcaaatttctgaaataaaaatctttaagttaaaatctgtttattctaatattaaagatttttcaaattatcaaattctgtcatacaatcctaatatatattatgatttttaaaagaaaaaaatcttactgtactgttggcaaaagctgttccaaccataaagtagaatactctaggatgtagctctaaaatatctgaaggtgaccaaaggatccacgctgtagacaaaatgaacagcaagcatggagaaaataagggaaccatagcttcatagactgaattgagtttcaaggtgttatttttatagcttc

SEQ ID NO: 546792 - DNA, 1398 bp, Homo sapiens
cactggacgtcaatttaaaaaaataagagagaaaaaaagaaaaatttcattagcaaagcacttccaaaactagtctttccaacatttgaaaagcattcaagtacctgaaccaacacacttacattatctaagttcagaagttctcaatgcttaggggcccaactggacccctggccctgcccaaaaacccatgtaacctcagagtgtgtgtcagaagaggctggaagataactgaataaggatgctatagaaggcattctcccactgggcaacagtttgaataaaagaaatttctctcaattttaagattctacgatatgttaaaaaaaaaaatcaaaatagcctcccacacccccacacaattaagtttctttatggcaatgatgaagaagtgctatctccaattcagtcccattgccataattagtatctcaaaacctctttggctcctttatttttgaagaccttacttgaatataatttaattctttcagagacactttttatacaatgcattagtgtttttagatatttaaaccctataaaatcagcaagacttgagatattacacacgttacaaacatggaaacataagatgagtagctaagttacaaaataaaaacttctaaggacccagcctgagctagaacacagaccttctggctttcaggactatcagagtcttttctcaactcctgatctctgcttcctgtctgctctcttgcacagtccagcatggaaaggaatttataagaatatgttctatttattacaaagttttaaattccacgttcttaatcttaaaatcagctgatttttaaagtgtgtgttttctctttctcaaaaatctcttccaagcttcctagaataatcatttaagtctgcagctattttagccatactggtaatatatttagagtctaaagggaatctataaattttttccatgaattcttcagcgggcaaccaaaataaaaaatttaagtgtgccatagttccaaaatactactgtagtctccaatcctattggtttcaaagggcaaaataaaataattttcagcatttcagtctttgaggttactattctttcaaatttctgaaataaaaatctttaagttaaaatctgtttattctaatattaaagatttttcaaattatcaaattctgtcatacaatcctaatatatattatgatttttaaaagaaaaaaatcttactgtactgttggcaaargctgttccaaccataaagtagaatactctaggatgtagctctaaaatatctgaaggtgaccaaaggatccacgctgtagacaaaatgaacagcaagcatggagaaaataagggaaccatagcttcatagactgaattgagtttcaaggtgttatttttatagcttc

SEQ ID NO: 546793 - DNA, 641 bp, Homo sapiens
gtctcaaaaaataaaaataaaaaaaataaatatcatgggataaacccatccataaatctgttgacttctgacaaaggtgctaaggcctttggattcagagggaaaggaaagtcttttcaacaagcagcgcgggaatcatgagggccacgtgcagacggggcagggacccatccccctcctcacaccacacaccatgaatgcaggagatcacacaccttggcccagagccaaggccataaagcatgcagaggaggatgcaggagaaaatctcgtgaccctgcgctcctcaagaattcttatgaaattacttaccaggtcacacagaaatascaccattgctactgaaagcgtttcctgtttatatactgctttgtagtttacagactgacgtcccacaccattcacggtgtaatctactcctcaccctgcgaccgtgtccagggtgagatgagaacagtgaggctgagaagcacaaaattctcccagctgggggttcaagatcccagggagccccacgtaccatggtgtgaatctagaatcccgtcgacataggaggaggccccacctctgaaccatgccagggctttctacctttgtcaggaaatttacgttagggtttgcacaacgcccaacacattcct

SEQ ID NO: 546794 - DNA, 678 bp, Homo sapiens
ttttattttttgtagagacgggatcttactatgttgcccaggctggtctcgaattcctgggcacaagtgatcctcctgcctcggcctcccaaagtgctgggaccgcaggcctgggccaccacgccgggccttccctggcctctttcacacctgggttgtggctcgtcaccttgtgggtgacctcccaggacggtgttttagggttaccagtcttgttgccatgtctgtgcccctgtgcagcgctgtgggaacagggctatgtctggtcaccccagcatccctagggcacagcccagtgaccacacctggaagctctggtgtctccatgtgcggataaataaaacacagccayccagcaccaccgctgtggcgtggcggttcccgccaggttacttcagggcggatgtctgtggcctgaaccctaaaggccaggcggtgagtccaggccacggtgcccagcgaggagcaggtgtccctgagaacccaaacagcccggaggggatgtgagaaccaccacagggagcaggcccatcacacaggcggcgcaaagaggcagaaaattagctcaaaagcagcttagggacagaagcacgctcatctctagagttgtcctgctgcccacgagtgccccacatgtgagtcctaataaactcacctactcaccaagctggactccgc

SEQ ID NO: 546795 - DNA, 678 bp, Homo sapiens
ttttattttttgtagagacgggatcttactatgttgcccaggctggtctcgaattcctgggcacaagtgatcctcctgcctcggcctcccaaagtgctgggaccgcaggcctgggccaccacgccgggccttccctggcctctttcacacctgggttgtggctcgtcaccttgtgggtgacctcccaggacggtgttttagggttaccagtcttgttgccatgtctgtgcccctgtgcagcgctgtgggaacagggctatgtctggtcaccccagcatccctagggcacagcccagtgaccacacctggaagctctggtgtctccatgtgcggataaataaaacacagccacccagcaccacygctgtggcgtggcggttcccgccaggttacttcagggcggatgtctgtggcctgaaccctaaaggccaggcggtgagtccaggccacggtgcccagcgaggagcaggtgtccctgagaacccaaacagcccggaggggatgtgagaaccaccacagggagcaggcccatcacacaggcggcgcaaagaggcagaaaattagctcaaaagcagcttagggacagaagcacgctcatctctagagttgtcctgctgcccacgagtgccccacatgtgagtcctaataaactcacctactcaccaagctggactccgc

SEQ ID NO: 546796 - DNA, 644 bp, Homo sapiens
ttttagtattttctatgtatagaacaccatctactgattctgatcttctcaacaagtgataaagtaccactttctttattgatgaggaaactacagctcagaaaggtgcagcaacttgctccgtgtcaaatagctggcaagtggccttatctcagtcagctgtggtcacagtaataccgtgtaactaaccactacaaaatcacagccgcataaagcaaaagcacttactaactcatgggtctccagatcccctgtggtagctccactttacaggtatctcatctttatcccggsaccacaggctaacccaggcttgacattttcgtggccataatagaaacacaagggacaagcccattgtacatatgcttttgaagcccttggtcttatcacacccaccactattccagtggccaagcaaatcatatagccaaacccaaagtcagggtgtgggaaatataatcccctttagtgagcagagtcacataacggcatagacacaggaaagcatgaagaacctgagcccttaatgaagcctaccacagtggtggagcttaggtttaaacccatgtgcctcagcaggtagagcctgtggattctctacttgctttccacccatcttttagtacccaaaatctaatttt

SEQ ID NO: 546797 - DNA, 557 bp, Homo sapiens
taastgctagtttcctccctgttctccagcccctagatatgggaaatatttctttgcagtaagttgatctgtgcttactgcattagttaacaattgttatgttacaaagcattccaaactccttaaataatcaacattttaaacatttctcgtgaagatagagccatgttgctctgctaatcttggctaggtttggctcatctcacagaggcctgatcatgtcatgaataattatccagctaagggagactaggcttagagtggtttttaatacctcctatcccttcagcagcccaatcccttcagtggggtatctaagagcaaacagtctcaactgtggaagatgacaaggaaaaatgagcatatacttttcaaggttggatattgctaatatctcagtggttaaagtaagtcacatgactgaacccaaaatcagagcatggagggactgtataatttcaggaaaaaaagcatggataattaggaccattggtacaatcgacttattacctctacaaagtttcttgcagacccttgtaattagtcaaggtttagtc

SEQ ID NO: 546798 - DNA, 557 bp, Homo sapiens
taagtgctagtttcctccctgttctccagcccctagatatgggaaatatttctttgcagtaagttgatctrtgcttactgcattagttaacaattgttatgttacaaagcattccaaactccttaaataatcaacattttaaacatttctcgtgaagatagagccatgttgctctgctaatcttggctaggtttggctcatctcacagaggcctgatcatgtcatgaataattatccagctaagggagactaggcttagagtggtttttaatacctcctatcccttcagcagcccaatcccttcagtggggtatctaagagcaaacagtctcaactgtggaagatgacaaggaaaaatgagcatatacttttcaaggttggatattgctaatatctcagtggttaaagtaagtcacatgactgaacccaaaatcagagcatggagggactgtataatttcaggaaaaaaagcatggataattaggaccattggtacaatcgacttattacctctacaaagtttcttgcagacccttgtaattagtcaaggtttagtc

SEQ ID NO: 546799 - DNA, 557 bp, Homo sapiens
taagtgctagtttcctccctgttctccagcccctagatatgggaaatatttctttgcagtaagttgatctgtgcttactgcattagttaacaattgttatgttacaaagcattccaaactccttaaataatcaacattttaaacatttctcgtgaagatagagccatgttgctctgctaatcttggctaggtttggctcatctcacagrggcctgatcatgtcatgaataattatccagctaagggagactaggcttagagtggtttttaatacctcctatcccttcagcagcccaatcccttcagtggggtatctaagagcaaacagtctcaactgtggaagatgacaaggaaaaatgagcatatacttttcaaggttggatattgctaatatctcagtggttaaagtaagtcacatgactgaacccaaaatcagagcatggagggactgtataatttcaggaaaaaaagcatggataattaggaccattggtacaatcgacttattacctctacaaagtttcttgcagacccttgtaattagtcaaggtttagtc

SEQ ID NO: 546800 - DNA, 1088 bp, Homo sapiens
aatgcagtggtgcaatctcagctcactgcagcctcaacctcctgggctcaggcgatcctcgcacctcagccaactgagtagctgggactacaggcgtgcaccaccacacccagctaatttatgtatttatttttgttttctgtagagatgaggtctcactgtgttgcctatgctggtcgtgaactcctggactcaagcgatcctcctgccttggcctcccaaagtgctgggactacaggtgtgaaccactgtgcccggcccggccttaattttgtttttataagggtgctaattactcgatagccaggtttacacygcagcttgctgagcaatcccgacactggcgtagctgctgggagagacagcagccttcccatgtgaagtggaacgcgacacatctcttaggggctgctgtacggctcaggacccacacagagaagtgcagggcacagagcaggctcaggtggcacctcacaccaagcctctcccaggcatggaagccaggagggttcttggtgctccacaaccagcccgggatgtgatgagaatctagtaacatgggttcaggacggcatctccctccaaaacagcaccgcagctgggggagcacgaaatccccacaagaccctctcggagttgggctcaggacaccccatctgagacgccacaaagggcgcactgcaggcaggggctgccccctgcagcctgtcctcaggctcccacaaagccccgggtccttcccgacattcacaagagcgggtaggaagggatccgtcactgactgctgcagcaccgcgggctcttcccagcacagtccatgagcacctcatttccagggtgggggctctccctgtttctcagccaggaagtgggcggagagacagggagcttccctctgtgcaacacagtttccaagagtccgtgtgtgtttacaaactttctgctattacatatattacttagtatgggacaaacacaaacaaacaaacaaaaaaaaccttacaaaaatggcccctgcctaaaatgccaggatggggtgaggaaagactgtggctttgctgactgaggcctctgacccacggtcccga

SEQ ID NO: 546801 - DNA, 618 bp, Homo sapiens
ttggaggtttacagctttatttgtcacccttgccttatgaagaaccactagaattctaacagcttgaaccttccactaaaaacccagacctacctgatgtgagggttattaccatgtggatagccaaatggtaacaaggactggatatgaaaagcactattatatttacagtggaggctcattatacctgagtttcgtgtctgctgtgcttggcttcctgtgaggtagcacagataggcaatgggcatctggttgtggacttagtatgatgccatcagaaccagaggaaagtgtagcagaaatctcagacagcggcaccctctataaagaggacattaaagaccacagaagttagaagtcttccttgctcaagagtgcatgcttagtggcagtgggtagcccgggatccagaccactagactcacagccagtttacatgcttttgaagcctgtagtcaaagatgtgactctatcttcgtccttttgtagcattcgagtcatgttttgatactgatttgatattctcaccagtatggctagataaaataagaccacccttgtggtacttttgcctaataatgatggcagcttrtaataattgagcacctactagaggcc

SEQ ID NO: 546802 - DNA, 531 bp, Homo sapiens
taaaggagacaattccatggagagacagcccatgttcacccacccagctgtctatcactccttgtaatatcacctgagactatatatgctcaacctcctgttaacatggctactgctcccagtaggcagcatttttatccctcctaagagtcccagataggaaacaccaatgagtttaatttgaatgcaacatcaaattaatagtaatagcttccagaaatgctgttagaagggaatctagaacagagccttggcacagggataaccaatgtcttatyagcccacagtgtttgctataggtgtgagagaggtagaggaaacaggcatgccaggcatttttcattcctggaaagcattttccaattcaaagtcacaatatataaatgagccacagtgtctagctgccctgcaatagaactttcagtgcggtaccatgacttatcattggaatatgaagagctagtggtacctatgtaacagggatagaaggggtgcgttagttagtaggtactaagtaatcctacagaatag

SEQ ID NO: 546803 - DNA, 531 bp, Homo sapiens
taaaggagacaattccatggagagacagcccatgttcacccacccagctgtctatcactccttgtaatatcacctgagactatatatgctcaacctcctgttaacatggctactgctcccagtaggcagcatttttatccctcctaagagtcccagataggaaacaccaatgagtttaatttgaatgcaacatcaaattaatagtaatagcttccagaaatgctgttagaagggaatctagaacagagccttggcacagggataaccaatgtcttatcagcccacagtgtttgctataggtgtgagagaggtagaggaaacaggcatgccaggcatttttcattcctggaaagcattttccaattcaaagtcacaatatataaatsagccacagtgtctagctgccctgcaatagaactttcagtgcggtaccatgacttatcattggaatatgaagagctagtggtacctatgtaacagggatagaaggggtgcgttagttagtaggtactaagtaatcctacagaatag

SEQ ID NO: 546804 - DNA, 543 bp, Homo sapiens
tcaccacactgctttctacaatggttgaatttagaaccttttctctcctcagagcctgagctgggtacagatcacctgctccccgtcctattgtcctgcgccygtctctaggccattagttaactgaagtctgactaggctggctgaaagcatatcactttgcttgtcctttgcttcagctctccaaaatcttgaaaggtatgaatagctgccagagcaacataaaacttagatgctctcaaattagtccttgcttgcttccattaggtcttttctgacaattctctcaaaaggaccaaaggttagctcaattagtggccctgccctgcagatatgagcagatagtagctctaacttagctgtctggtagactgaggaagacaatacaaatatgtaagtgctgtggactctttgtcatttctgttacctgagtccatccactcaccatctcctctgccagaagattcttctgtcatgtggcccagtctctcccctcctttaagtctttgcaccagagtcatctgatcaatgagacctttctta

SEQ ID NO: 546805 - DNA, 543 bp, Homo sapiens
tcaccacactgctttctacaatggttgaatttagaaccttttctctcctcagagcctgagctgggtacagatcacctgctccccgtcctattgtcctgcgcctgtctctaggccattagttaactgaagtctgactaggctggctgaaagcatatcactttgcttgtcctttgcttcagctctccaaaatcttgaaaggtatgaatagctgccaragcaacataaaacttagatgctctcaaattagtccttgcttgcttccattaggtcttttctgacaattctctcaaaaggaccaaaggttagctcaattagtggccctgccctgcagatatgagcagatagtagctctaacttagctgtctggtagactgaggaagacaatacaaatatgtaagtgctgtggactctttgtcatttctgttacctgagtccatccactcaccatctcctctgccagaagattcttctgtcatgtggcccagtctctcccctcctttaagtctttgcaccagagtcatctgatcaatgagacctttctta

SEQ ID NO: 546806 - DNA, 1660 bp, Homo sapiens
gttcagatactcactcagacagtaattaggtttcaaaaacatactataacacaatcaatcatggctcttgaacataatggcattagggcagagccctctttcagctccagttattagcaactgattggtgaacactgggcttaagctgagaggctaccccagggccctgcaataaaatgaaagaaaacctttgaataagaagacagcatatctttgatcctttgtcctttgcttggatattctgagatattaagctcagaatgtaagaatctgtaacagaacttcaagattggtggcatttcaaaatacagttggtatttcactttcaataaaaatttacttgaaaatccagctatctatattcctttgaatctcatctttgatggatattatcactttcttttgaattcataaaaacttactttctcattactttataaataaagataacttagggattttatgagtatactgggactccatggcaccaaagagaaaggcaggagaataaaaagcaaaagagcttttagatgaggaacaaatttccattttctgcttttatttagcaaagaatagcttctcttgtcatggaacaaggtaaaggcmtaagtcctagattcataaaatctagggtggagaagagataggaaaaggaaaaagcagtaatcacttggaacatttttagatataaagaaaagttgcaaggataatagagaatttccatataccctttgcccagtttcccctaatgttaacatctcacattaccatgacacatttgccaaaactgcaaaactaacattggtacatgactattaactaaactccagatgtcatttggattttacctgtttttctactaatattatttttgtgctctgtattttttgtttttttgttccaggatccagtccaatataccactttgcatttggtcatctgcctccttaagtcttttcaggtctatgcagcctcttagtcgttctttgtttcccatgaccttgacagttttgaagaatactggagaggtaggctgtagaatgtccctcagtatgtctaatgttttctcatgactaaagtggggctatggatttttggaaagaataccacgtaggtaaagtacccttctcactgcaatatgtcagcagctataaggatatcagcatgatttattactggtgatattcaccttaatcatttggttaaggtgatgactgccagttttctccactgtaaagttacttttccctttccatattctattctctggaagcaagtcactatgtacaactcccatttgagagggagagagagaataaagctctgtctcttagagagtgggtatccacttattttacttggatttcctctataagaaatatttgaccttctccccttttatttatttattcaattgtttcccttccctatttttaataaatactttctcctagcttcttctctctatatattggattttatatcaaagtatatagcaaacacaatagctcatgctgtattggaaagactcaccagacctccttcaaagacacgtgcctgtcctccatgaagccactgtgcaatttgttgaatttgtagttttacccttcacattttttttcctgacttttttaatggaaagcttatttttctgtggttg

SEQ ID NO: 546807 - DNA, 636 bp, Homo sapiens
tgaggcagaatatttttagttatttttatgaattgttattttatattctttgcctgttttttcaatctgtttgcaagagctttttattgataaatatatcaaccttttgtatgtctattttacaaattttaaatgttttctttttaccattaatgatttagggtgcactgctttgtaggatacttaattttttaaggatgtcaaagttatcaatctattctcacgtagtttgtgaagtttaagatggcctttcccacttgtaaaagtattcacctrcatttgcttttagtactttttacatcttttgtttctatttaaaattttaatccattggcagttattttagtaagaaataaagtggggatcttaccttattttattattatttaatggctagccttttttttttatagctatttgtcctataatggattccctccccattgatttgaatagcatcctgtgccttctcacccccgcacctgccttggaacttacctttctcatagctgtcccactgttagaatgcgttagaatgcagacatgactgcaggctctttgactgctcccccttcatccacatctgccactcacaacctgagccctagaaggaaaaaaatttctataacccttgtc

SEQ ID NO: 546808 - DNA, 1447 bp, Homo sapiens
atttttcaaatgtgtacattcagttattaaattggtttataccctacaaaatattttgcatattattttcacttaaaaagttattttgatgcctatacttgttagaaaatatgcatgaacgtacatttttttctagtcctgagctatctcagtgcaccataatttatgtaataaatactctgcagatgggcatttagactacaaccaatgaatttccattataaacaatgttgcagcagcaacatatttttggaaatctctcttgatcatgggaatattcttatatgataaatttccaaactaaaattgctgtgtcaaatagtcatgctgattttgcttctaaaacattatactcatttatatccttaacattataatgtgtaagataactatcattataatttcaccatccacaacttacaaagtaatatttaggttttagtttctgatttttgtttatccctagtaaatctggacctatgtttccacatttatttttgatttttacaaattttctctgaaatgccaacattttttgtctaatttttaaatattttttatcacttcccattgctttatattacatgaataaagtttattttaaaacttttctaaagtatagtttatcccagatgataatattagcataatgatttataaacatgtattataccagtggaagtttatttaaaagtaaagtaagtcagtaataattaagcattatgctcaagaaaacaacagttgttgtaataatctcctgtccaacaatgaacattttttaatggcatttcaaatcttggggatttctcatgtaattcaaaacactccatcakaattttttataagtcaatttgttttaatttttcttatgtccaagtaaactgctttccacaggtaagaatgtgctgtgtcttgaagggttttcttgtgatttgggtgctttgttctccaatttgtcaagtatgttgtaggaattatagtactttttgcctgatataaccttgtaagttttcctagttcacataatttggaacatctttacttccacaactgctactgcttcttgtccccttccctttccctttcgctttcccctttccatttccctgccccttctttccctcttcctcatcttctttctcccattatttcagtggtgacaactgtgccagattattcaggtgtcgtttttgtaaaatgttagcatgcatattgctccttgtcacacctggttacttcgtccatgttggaaacttttcgagaaactgggatgagttgatcatgtattcttcaaggtaataaaatgctagttcaattttggtcattttactgcttacctaaatattataaataccttaaaagaaaggtatggaattgtgtctcatccaacaaaaccttccttttctcttttagtccttttaaaagtttataaaataagaaaattgag

SEQ ID NO: 546809 - DNA, 683 bp, Homo sapiens
tgctggctacaacactgcccctaaacccctccatagaaattctggagctagagttgaccttgaagttaaaggaatctgactcaaatcccatgggcgagttatttaatctctgtaagtcttggtttcctcttccgcaaaatgggtctgatgaacctgataagagttgttggaggattctgargtgaaacattgcttgtgaaggttttcacacattgcctggcgaacgtccactcaaatgttagaagcagttactattctgtcttgtagatttgggaatgaggtattttgaagtcttagaatcagtggagtaattatctccaccacttcttaggcagacactgccccacccttatggagctgtatttagagcttgcagtgaagttgcaggaaatggagaagttgagtttttttcttgctaagtaaatcgcccctgagttcattacaaaggtcagctggcccagcaggacctatttgcattctgtatttgcaaaccctactgtttgtttattagggaaggagagggtggggtccttggctaggacatttgtaagtcagatacattgaggcctgggggagggaaagttgctttattagggtcatcttttcccatctacatcctttgagtttcctcctttttctggggcaaccaccaaaagtggccatcctgtgcctctagtctgccc

SEQ ID NO: 546810 - DNA, 595 bp, Homo sapiens
cagttaataaagtgggtgtggggaagaaaacagtgcaggagaaggagaactggaagaggaaccagagtggcttgagttatctagtaaagtcttcattacatgatgtgaccagctctcagaggggcatctaatacagagcagtttagtttaacctcagaaggtcatcagggtgctagaatcatgtcccattttcatggtaattgggcaagactgggaaaatgttttgggaatacacattttatcttccacttccagcagtggcttctaaccactgaggactctccacgttaccaatctctactgacctacctcaagctttgtaaaatcttatttaccgaacaaattacatttttaagtaataattaagcccccccttttctgtagagatatataataactgttaacctggggtcatttttatcgggctttatataattccaacagaaagcaaaggactgtgagtgcttaagttagcctgagcagtaaagaggcttttagacytactgagaatagtttttggattcacattaccactgcttgacctgagactcgatttgggagctagaaactaaaaccagttatgcccttccattga

SEQ ID NO: 546811 - DNA, 536 bp, Homo sapiens
gatggtaaggcatgctaacaactttgatatattcagctggtgcaaaagtaattttatttttaccaccttactttcaaaaaccccaattacttttgcatcaacttataataggagaaaaatactgaataatactaaactttattggcaaaatttaatttaaaatttaaaaacagaaatataatctacagcattagaaaaacagaggaaaaataagaagktgattatctaactgagggcaggcacatggaaagaaaaggcaaaggataaaaacaaaaatgcacaaaaaatggtagaaataagtccccatgtatccgtaatcacaataaatataaatggattaaaatcacccattaaaagtagagattatcaaaatggatatgaaaataaaatctaggtaaatgtagcttacaagagatagccctaacacaaaaacagaataaaaaacaaggggataaaaaatatgtaacatataaatacacctcctcacacaccaaaaatagctggaatagcaatattaacaggcaagcatcataaga

SEQ ID NO: 546812 - DNA, 536 bp, Homo sapiens
gatggtaaggcatgctaacaactttgatatattcagctggtgcaaaagtaattttatttttaccaccttactttcaaaaaccccaattacttttgcatcaacttataataggagaaaaatactgaataatactaaactttattggcaaaatttaatttaaaatttaaaaacagaaatataatctacagcattagaaaaacagaggaaaaataagaagttgattatctaactgagggcaggcacatggaaagaaaaggcaaaggataaaaacaaaaatgcacaaaaaatggtagaaataagtcccyatgtatccgtaatcacaataaatataaatggattaaaatcacccattaaaagtagagattatcaaaatggatatgaaaataaaatctaggtaaatgtagcttacaagagatagccctaacacaaaaacagaataaaaaacaaggggataaaaaatatgtaacatataaatacacctcctcacacaccaaaaatagctggaatagcaatattaacaggcaagcatcataaga

SEQ ID NO: 546813 - DNA, 601 bp, Homo sapiens
tgctattgtggtttactgactagtcataatttaaggattcaagagatgatcaatttcagttagagattagtgacgtcatctgaagtctattcatggaacccatagataggatctgtaaatcctaggatagaagctcttctttggtgtcacaatctttcttggcgaaatatatttaccaagatctttaaaatacacttattttaggcagtaagttcaaaaaatatgaggcctagacgctgtgttgtgagagcgttgcattacatactaaataatgtctatagtataacaagmcttacattatttttttacatgtctacagtttttaaagtcttaattatagtgaacagcttttctgtacttctctatgaagagtgaaatgaacattaacaaaagaattggcagtgctaaattgttagtagactccccggggttttcctccttgctgtaaaggcttcagtgatttcttcatagtttaggcatagtaaaatagtaccacttaagcttctgagcatcagtcactaaatgttttcaaataaatttctttcaatttatatgatacttatggctaaaaaatgatcttttttgcatgcagtgagattca

SEQ ID NO: 546814 - DNA, 1006 bp, Homo sapiens
ttatgtattccataacacatgcacatcatttttaatattgttaaatattcgaaacatagttaaggtcatttaaaaacctttttatagtgaaaaattacaaacatatgtaaaaatagggacaacaggggataattttcaccaagttttatatatatatatatatatatataaaatgaattgcacgcagttaatatgtacaatgtgtgcactcagaaaagcaaatcacttgaaaattaagaatacatagtttcctaacaggtgagttaaagaaaaatgcaaatattaagtaagaaccacttgcaatcattgtcagcaaatattggcttgaaatactatatctcaaatacaggctacaaactggagattcaaaaataaataaaagatcacctatctacaagtagtttatagtcaaattggaaattatgctcaaaaggcaattgtaatactgtgttagaaatgttgtattgtgactaaatactggatatgtgacaaaaaacagcatttaattaatttttgaaatttcagagaaatttgactaaaggaaatatctaagaagagtaataatgtgctagtgaaatgggaagtatatgtatacttttgtgtgtgtgtgtgtgtgtgtgtgtgtgtgtctgtatgtgtgtctgtgtgtttgtttatatgraggatcccaataattaggttaaaaaaaatgacccaaaatgtgcatgtctggcatcttttttccacacttactccaagatacaatgggtacaaagtcatcatgttggtgagggatatatgcaaacaatcaacaaggtctcttctcaccgaggcttacttggctactgctgttgctggatctctaacctgcctacaaggacaagtaatgaggctcaatgattgtaccagtagtcagctgggggaaacagccagccactgggcaccaggctgtttaccttaagtcccttccatcatgatgtgaacagagagttgtactcactggaatagacacttattctggatatgc

SEQ ID NO: 546815 - DNA, 669 bp, Homo sapiens
ggtaggaatgtaccttwgttcagccactgcagaaagtggtttggagatttctcaaagaactaaaaatagaactaccattcaacccagcaatcccactactgggtatatacccagaggaaaataaatcattctatcaaaaaaacacatgcacttgtatgttcataacagcactgctcacaacagcaaagacatagaatcaacctaggtgctcatcgacagtgggttggataaagaaaatgtggaacacatacaccatggaacagtatgcagccttaagaaagaaagaaatcacatcctttgcagcaacatggatgatgcagctggaggccattatcctaagccaattaatgcaggaacagaaaaccaaataccacagtccccactcataagtgggccctaaacattgggtacatgtggacgtaaaggaaaaacagacactggggactataatagggggaagagtgaaggagggaaacaagggctgagaaatgacctattggatactatgttcactacctgggtgatgagatcgttcataccccaaacctcagcatcatgcaatatacccaggtaacaaatctgcacacgtacctcccaaatctaaaataaaatatgagatttaaaaaataaaaaatggactaattatgatttaatatttggtagatacat

SEQ ID NO: 546816 - DNA, 669 bp, Homo sapiens
ggtaggaatgtaccttagttcagccactgcagaaagtggtttggagatttctcaaagaactaaaaatagaactaccattcaacccagcaatcccactactgggtatatacccagaggaaaataaatcattctatcaaaaaaacacatgcacttktatgttcataacagcactgctcacaacagcaaagacatagaatcaacctaggtgctcatcgacagtgggttggataaagaaaatgtggaacacatacaccatggaacagtatgcagccttaagaaagaaagaaatcacatcctttgcagcaacatggatgatgcagctggaggccattatcctaagccaattaatgcaggaacagaaaaccaaataccacagtccccactcataagtgggccctaaacattgggtacatgtggacgtaaaggaaaaacagacactggggactataatagggggaagagtgaaggagggaaacaagggctgagaaatgacctattggatactatgttcactacctgggtgatgagatcgttcataccccaaacctcagcatcatgcaatatacccaggtaacaaatctgcacacgtacctcccaaatctaaaataaaatatgagatttaaaaaataaaaaatggactaattatgatttaatatttggtagatacat

SEQ ID NO: 546817 - DNA, 1320 bp, Homo sapiens
acttcatcttagattattttaatccctaaaacaatttaaccttaaataacaaaatgagcatttagattatatgggactgtcactaagaagggaagccaatgaaagcaggcctaagttgaaaagttagtagaaaaaagcaagttatttattgtcgtatggaggttgaagctgatagttgttcaaagaatgatattattgaaatgagatcacaatgatttatwtcagagaatactggattataagatgtttgaaataagtacatcaggaaaacataattctagatgcatgcataaacatgaatagctaatattaattggaaataaaactccccatatatacgaaagtaaaaaaaaaattgaagcaaaactgtcaaagctagtcattcatatggacttccatgatggcaaaaacttattttgaagagaaagactaatataagcctcaatagttgtgaagaaaatgagtaggatgtccacagaacaatagaagagtcacatctctgttttcttcttgatgagcattataagatctataatagtccagggcatctcatttgcttttctctaacattacctaaagttttgctttaaaatttggacataatgagattccaagctggataaattatgtgacatgagtgtactatgcaatcttaatccactgctaattcaatcatagttataactggcataaagatgaaatatttatttcaaaattttcctcaataatattacatttgtcacttactgattcctaactttacattagtaaatgtgatttagccagaaattcaaaacattgtaatagactaggtattaatatcttatgagacgtgattttatttaaattagataacatcagctagtaactagtgaaatatatatttgaaaccagatgggtaaactgtctttgtttattctaccagactatgttttttaccaactaagttgtctttctgattgtccaaatattcctgcaaatagagtaacatttgtcttaaaggagaacaaaggacagagctttcttttgatcctattgtgggtatgaaaaagaacaatagcaaaagtaaggaaataaaattctgaaataaggagcaaatttcctcagaaatgacatgaagaaacagtgaatgagttaaaacaggagatttttaacaaaatgtgacaaataaggatcaaaataggaaaacataagaaaaaaaatacttcagaagcagcaagatacatagttgacaactggaaatacaaataataatgtgacaatagttaatgatataaaaagtcaaattgattaaaagaattcgagaactatagaattttt

SEQ ID NO: 546818 - DNA, 1320 bp, Homo sapiens
acttcatcttagattattttaatccctaaaacaatttaaccttaaataacaaaatgagcatttagattatatgggactgtcactaagaagggaagccaatgaaagcaggcctaagttgaaaagttagtagaaaaaagcaagttatttattgtcgtatggaggttgaagctgatagttgttcaaagaatgatattattgaaatgagatcacaatgatttatttcagagaatactggattataagatgtttgaaataagtacatcaggaaaacataattctagatgcatgcataaacatgaatagctaatattaattggaaataaaactccccatatatacgaaagtaaaaaaaaaattgaagcaaaactgtcaaagctagtcattcatatggacttccatgatggcaaaaacttattttgaagagaaagactaatataagcctcaatagttgtgaagaaaatgagtaggatgtccacagaacaatagaagagtcacatctctgttttcttcttgatgagcattataagatctrtaatagtccagggcatctcatttgcttttctctaacattacctaaagttttgctttaaaatttggacataatgagattccaagctggataaattatgtgacatgagtgtactatgcaatcttaatccactgctaattcaatcatagttataactggcataaagatgaaatatttatttcaaaattttcctcaataatattacatttgtcacttactgattcctaactttacattagtaaatgtgatttagccagaaattcaaaacattgtaatagactaggtattaatatcttatgagacgtgattttatttaaattagataacatcagctagtaactagtgaaatatatatttgaaaccagatgggtaaactgtctttgtttattctaccagactatgttttttaccaactaagttgtctttctgattgtccaaatattcctgcaaatagagtaacatttgtcttaaaggagaacaaaggacagagctttcttttgatcctattgtgggtatgaaaaagaacaatagcaaaagtaaggaaataaaattctgaaataaggagcaaatttcctcagaaatgacatgaagaaacagtgaatgagttaaaacaggagatttttaacaaaatgtgacaaataaggatcaaaataggaaaacataagaaaaaaaatacttcagaagcagcaagatacatagttgacaactggaaatacaaataataatgtgacaatagttaatgatataaaaagtcaaattgattaaaagaattcgagaactatagaattttt

SEQ ID NO: 546819 - DNA, 3119 bp, Homo sapiens
gggattgcctcatcctactctaattcctcttccctcaatttgcagctcttacagtcgctgtgggatccccatcttagggctgcttctcaatttgaaggggccttgggaccaggaagaccttactgcctcagctctcaaaagttagttaacaagcacttggggagcttgttaaaatgcaaactcccaggtccctcccgttgacattctgattcagtaggaaggggtggccccagaaatctgcctgtgtcattcacctcaggggattccagtgcaacaggtcctgggggaagaactggttcatctagtccacagcagttgttctctgggcccctgtttattagaatcacttggaaatgtgatcatggtcgtgtggttatattactaaaacgagttcttatcatttagagataaatattaaaatatttgcaaatgaaataccatgtccaggaattgcttcgaaaattaatctggtatggggagggggaggaaaatggagatgtagctgaaacaagattggccatgtgctgataattatggaaacccaggtgacaggtacaccagggatcaatatacagctttctacttttgcgtatgtttgagattctccatagaatgattttttttttctttttaatcacagggaagttctttaaagtattcctttgcctagcctcactcctgacccagaggtgaggcacagacactttttccctcactgttctctaggtgattctaacccacaaccaaggttcaataccactgccctacaggaaaagaaaaacaaagacctatccccagggggttcccctttgagccccttgaatgccaaagccccaatatccctgtgaacagctggaggccacagcccagctgagctgtgacagacactgctctttgcctgccagcatccgttcttctcatctgcctcactaacaagaatctggattttgtccagggacagcagtgcgcccaacgctttccagattaccacccacctagtggtcacgtgacctgcctctggccaataggctgcaagcggaggtcgaccacaattgctgagttttgctttcccgatgcaggtgcgttgcttgtccctgcctggactgaggctggaggtgaaggactatcacagtatcctgggatcctgagctgccttcagaataacacagcaraaaaaaacaaggagcctgggctccccaaagccacaatggccctagacttctaggggttcctgctattcttagtgtgaggcaatcccagctcatacactggtctcccagggctaagaatgcccatgaggcgttaggcccaaaaccagcacataaaatagtgtgtatttccctggagggtctcctctgcccaggagggtcctgcagtaacagcaagctgctggccaaccaagccactaacaccaacagctatgccggtctcagtctctcgggaggcacaagttaagctcgagatggtcaacacgctttctttcttgcttgctttttttttttttttttttgagacggagttttgctcttgtcgcccaggctggagtgcaatggcacgatctcggctcaccgcaacctcttcctcccgggttcaagcgattctcccgcctcagcctcccaagtagctaggattacaggcacacgccacaggcccggctaattttgggtttttattagagacggggcttctccatgttggacaggttggtctcaaactcccgacctcaggtgatccgcccgcctcagcctcccaaagtgctgggattacacgtgtgagccaccgcgcccccaccggtcaacacactttctgaagggagagcccaaaggggtggctgtgaggttcaaaagacgagagcttcctgatttttgccctaacccaggaacagaatgagagggaggaagtggtgcagtctggcacctccccaaggccctgtggaagagcctgctgtcctcagcgccctggtcatcccggccgcatttgagagcgctccctatgctggccagggcgttcattctggcttcttctctatcttaccagtctgtgtgtctgtgccttttattgtccccatcaggaatcagaaacaataaccagtaacccagctttctgctgagaggagccatgagtccatttgaatctaacaagacggggcttaggaggaacacatatcagtggcacaggtgcagctcgggagaaatatggcctcacggcagcatctgtgaaaaaaatttagcctgtttgaccatgaatcccgcatgtgatgtggcagccaaaagaagctatgtgagcctaggctggacaggaaagaaactaggataggggaggcaagagcccttctccactctgcccgggtcaggccaccctgggagcactatgtgctgtacctggcctggcagagctgagcactggtgatcacagcccaggaggcagggtcccagatgtgagcaaggcacctgccccagggatgccagagtcttctggcaaagccagaaatctgagaaatctgaaatcggagggccatggggagccagtaagcacagcaggttgtcaagtgttggggttgggggccttatccagccactcctgggaaggttttcatctggacggagccatgtgtactgggtgatgcctgctctgggcatgtcaagagtggtgggtgttttgttcaggcaccacaccttaagaaggagcacaggcaaagtgcagaccattcagcggggagacctggatgatagtggggaaaccatgagagataaacaaggagaaaccatgtgggtggagtaagagtagacaagtgggtgggtattgaggtggcacagtgcccctggggagaagggaataactcgctcagtgtgaatgcaggggcagacccaagaacaaggagtggcattaacaggagaaaagatttctcctcaataaggagatgtccaaacacaggaggcctgctatgagaggtactaacctctccatcactggacatattcaaacagaggcgataaagtcacttggtaaggatgctatcagcaagattcactcacaggtgcagactggagtatgaggccctttccaactgagactcaagcaaaatgatcaggccaaagttttccctctgagggactgtg

SEQ ID NO: 546820 - DNA, 1273 bp, Homo sapiens
tgcattgtctgcctatatcaaaatatttcatctaacccctaaatatatacacctactaaatacatacccataaaaataaatatatacccataaaaataaaaaaaccctgtaaaaataaaaaataaaataaaaattttaaaaatgatttacactggcatactggcaaaaattaagaagtacaactgctttggaaaacaatttagtatcattctataaagttgatattaatatattctatgatgtagcaattcactcctatacatgtatcctaaacaaacttaggcacatatacctctgggcaactgttcaagaatatacatagcaacagtttgtagtagcagaaaattgtaaacaaaaatatatttgtcattaaaagcataataagtaaataaattttggtatatttatatgctggaagactatatagcagtgaaaatgagtaaattattggtacatgaaaaagtacagawaaatcctagaacataaggctgaatagaaaaaagccagttgtaaacaaatttagaaagtatgattaagttatcataacatgaaagcctttcaaaagtaaacatcattgtatagaataaagaaacatgaatacatcagaaagctaaaggaaaggaagagaactacgaggacagaattttggatgggggtagaaataaaagattagaatttgggtgaacatataggagactgccaagtaaaaggcaatattctgttcttaaagctatgagatgggtacacatgcactgtcttttgtacatatattttatgaatattattttatagactgaattttatttaagtaattaaaaatccagaattattaaaataagaatttattataaagaattgttggggatgtggggccttttaaaagagcataaaaaaatagaaaaaagaaaatgatgaatgtggtggtttgctgcaaaccaccatgacacatgtatacttgtgtaacaaacctgcacgtcctgcacttgtaccccagaatttaaagtatttttttaaaaagggcaaagaaacaacaattgccttgttgagtaccgaaccctagctaatcaagtaattatgactagcaaacactaccatttcaatcgctaggagtttttatttcatagataggtgtctttggacaaacctgacttaattagcagtcattactgtttcaactaattgtattggttgaaaacaataatgacttaatgagcttaaaaaaacatataatttgtccaaccagaatgtgccaggacatttaaggaataaatga

SEQ ID NO: 546821 - DNA, 635 bp, Homo sapiens
ttgccctttttaatgttgcttattttagtatggtaataaataattattaatatcctttttttcaaaaaaggaagtatttaaagtcatctctctaaatagcaccatgagaagtattatgtatgtgaattatgaatgtaaatatgtttatgaatactaattgacaatttatataaatattttaaataccaatattatgtaataaatagtttaaaattctagtagcataaatatttagtttttttttttcttgagtctaaaggactggaagtttttattcaaattccgtttgttggaagaatatcttaaagtttagaaagttaaacagcmtgctttcttttaacagttaacttagatttatatagaaatttggaaagaatatgatataaacctttcaactagcactctcttaagcaacggaaaaatcattacctttccctgttctttcaatttctgtcataagaagcatagagaacagaactatatattgtggtaattaatttccttaagataatgttagaaacatcatgttctttaaaatataaatgaatttcaaggtgagcatgctagaggataatattaatggcatgtgatttattgtgacaagagatctgatctgaaataccattattaggagt

SEQ ID NO: 546822 - DNA, 557 bp, Homo sapiens
atcacctccctccctcaacagggggattataggtcgctcccttgacatatggggattacaatttgagatgagatttgggtggggacacatagtcaaatcatatcaattatcttattatgcttcacaataacctacaatgtaaacattattattattgtcgtgcctgttttatggatgtygagccaaaatgcagattggagcatatagtgagtaaatggtggcaccaagactcaaaccactcaagcctggtgtcatcatccaggcacctaactaggcactgcattgttgcacactaacatgctgataaaaacaaaagtgattatcaggatgttaaatactacttgaataaaacctaatggttttctccttgtgacctacctgatacattctcctattgaccgttacaatgttttagtaactcaatgtttcggtaactcagagaattatttgatgtcactaatatagtaacaactttccctaaatcaaagtcagaatataaaaaggggaacaattacttttagagagtaaataaggatcactcaaatatatttcctcta

SEQ ID NO: 546823 - DNA, 557 bp, Homo sapiens
atcacctccctccctcaacagggggattataggtcgctcccttgacatatggggattacaatttgagatgagatttgggtggggacacatagtcaaatcatatcaattatcttattatgcttcacaataacctacaatgtaaacattattattattgtcgtgcctgttttatggatgtcgagccaaaatgcagattggagcatatagtgagtaaatggtrgcaccaagactcaaaccactcaagcctggtgtcatcatccaggcacctaactaggcactgcattgttgcacactaacatgctgataaaaacaaaagtgattatcaggatgttaaatactacttgaataaaacctaatggttttctccttgtgacctacctgatacattctcctattgaccgttacaatgttttagtaactcaatgtttcggtaactcagagaattatttgatgtcactaatatagtaacaactttccctaaatcaaagtcagaatataaaaaggggaacaattacttttagagagtaaataaggatcactcaaatatatttcctcta

SEQ ID NO: 546824 - DNA, 768 bp, Homo sapiens
cttcacaatgtatatgtatatcaaaacatgttgtgcacccttaagccatacaatttttatttgttaattatatctcaataaagctagggagaaatttttaaaaataaatgtttttataaaggaaggaaaggaagtcacaaacacaacgcattagtactctttgggaaaagtatcagaaacactaaagaaataagcactgacacagatgatttgctagataactggtcaatttaggaaaaacaagaacagatcatatctccttctgaaaactttccagggcataataaccagctctgcctatatttgggagaatttttctacattaggtcaaatgtcaacctgaatctgaatcctagaacccaaaatggattcaaacaaaatgaaatcagaagaaccactcttttactcaacagacatatattacgcacctgcaccmaacatgtattagaaatttgagtgaccctcagccttaccctgcagaggctcccagatacataaaccactaaacacagcaatatgagaagggccatgttagagccattatcagttactttaggagcccagaagttgagcactggccctgcctataaagttcaatcatgaagataaagaatggaaataaaagaacaccgtacacactgtctgtgtgtatatttgcactcctgtatatttatagtttcttgtattataatgtcataagttatttgtcactggacacataatacccaccacataggtaaatttttactaatgtaatttttttaggtc

SEQ ID NO: 546825 - DNA, 1294 bp, Homo sapiens
taagccttgaactttatgcagacctctagcacaaatcaatccaaacaacacataattatcttagtaagatccgcagttagttgtagtcattcaaaactttgctaagtcttaagtttgcgaaagtcttgagtaggcaagagaccattattttgaaacagaaaaatagttaaatatgtagagtatttgagaaatgtgtgagaactgcctattcaactctgttgggccaggatgtagatctttccaaatcacatgacytctccctgttggcacaatcaatcatatctgaaaatgatgacatatggaaataattaaataacaaagaagagagataaacattgtcaagtgacttgggctgtagccaggaactgacaatgttaaaaaatattttgcagaagattgtacatttaaaagccgtaaactgtgactgatcataggaatttatttttaaataggtttcattagttcaagttagaatgacaataaatgtgaagacatgtttgtctgggatgtggttttttttttgttttgttttttgcttttattcagcaaagcgtactttttttcccaaaacataaaatcattcagcaaaaaaacaaccaaagaacaataacaaaaaaacagtgcacatgccacaaagcaaaccaaacatagctcagttttcctactgataacatattttgtcttttaattttggcatgtggaagtcacagaaattcacagacttaatatgcacacccaaatattctaagtgcttatttagggagtatctttatttggaataaagaatttcgagttataaaactgatggcttatagaatgcagcttactaaattggtcttcgttcttacaaactggagtaatcttgtcctttgagagttgaaaatacatattcatctacatttctgcagcgagtggcccacagttaattttcatcactggtggggttggcagaatgttcactctcttctgctgctgtgctgtgtcttcgttgacttggaattgcaggaagcactcggtttgtccgcagaggttctccagatagaactgggaagaaagaatagaacaagagactttcaagatttgcttctctaacaggaaggcggcaggagaattgtattgtgttttaggagtcgaggcatttctaagaagtgtgtcttggtgagagctagactgcagagagaagctgtgtatgtatatcttgtatatatatctgttcaggcttgctgcatgaagtctgggatttcaaatatgcacacatagaagactgtaccaagtgtgatcaaacatgattggg

SEQ ID NO: 546826 - DNA, 1294 bp, Homo sapiens
taagccttgaactttatgcagacctctagcacaaatcaatccaaacaacacataattatcttagtaagatccgcagttagttgtagtcattcaaaactttgctaagtcttaagtttgcgaaagtcttgagtaggcaagagaccattattttgaaacagaaaaatagttaaatatgtagagtatttgagaaatgtgtgagaactgcctattcaactctgttgggccaggatgtagatctttccaaatcacatgacttctccctgttggcacaatcaatcatatctgaaaatgatgacatatggaaataattaaataacaaagaagagagataaacattgtcaagtgacttgggctgtagccaggaactgacaatgttaaaaaatattttgcagaagattgtacatttaaaagccgtaaactgtgactgatcataggaatttatttttaaataggtttcattagttcaagttagaatgacaataaatgtgaagacatgtttgtctgggatgtggttttttttttkttttgttttttgcttttattcagcaaagcgtactttttttcccaaaacataaaatcattcagcaaaaaaacaaccaaagaacaataacaaaaaaacagtgcacatgccacaaagcaaaccaaacatagctcagttttcctactgataacatattttgtcttttaattttggcatgtggaagtcacagaaattcacagacttaatatgcacacccaaatattctaagtgcttatttagggagtatctttatttggaataaagaatttcgagttataaaactgatggcttatagaatgcagcttactaaattggtcttcgttcttacaaactggagtaatcttgtcctttgagagttgaaaatacatattcatctacatttctgcagcgagtggcccacagttaattttcatcactggtggggttggcagaatgttcactctcttctgctgctgtgctgtgtcttcgttgacttggaattgcaggaagcactcggtttgtccgcagaggttctccagatagaactgggaagaaagaatagaacaagagactttcaagatttgcttctctaacaggaaggcggcaggagaattgtattgtgttttaggagtcgaggcatttctaagaagtgtgtcttggtgagagctagactgcagagagaagctgtgtatgtatatcttgtatatatatctgttcaggcttgctgcatgaagtctgggatttcaaatatgcacacatagaagactgtaccaagtgtgatcaaacatgattggg

SEQ ID NO: 546827 - DNA, 1294 bp, Homo sapiens
taagccttgaactttatgcagacctctagcacaaatcaatccaaacaacacataattatcttagtaagatccgcagttagttgtagtcattcaaaactttgctaagtcttaagtttgcgaaagtcttgagtaggcaagagaccattattttgaaacagaaaaatagttaaatatgtagagtatttgagaaatgtgtgagaactgcctattcaactctgttgggccaggatgtagatctttccaaatcacatgacttctccctgttggcacaatcaatcatatctgaaaatgatgacatatggaaataattaaataacaaagaagagagataaacattgtcaagtgacttgggctgtagccaggaactgacaatgttaaaaaatattttgcagaagattgtacatttaaaagccgtaaactgtgactgatcataggaatttatttttaaataggtttcattagttcaagttagaatgacaataaatgtgaagacatgtttgtctgggatgtggttttttttttgktttgttttttgcttttattcagcaaagcgtactttttttcccaaaacataaaatcattcagcaaaaaaacaaccaaagaacaataacaaaaaaacagtgcacatgccacaaagcaaaccaaacatagctcagttttcctactgataacatattttgtcttttaattttggcatgtggaagtcacagaaattcacagacttaatatgcacacccaaatattctaagtgcttatttagggagtatctttatttggaataaagaatttcgagttataaaactgatggcttatagaatgcagcttactaaattggtcttcgttcttacaaactggagtaatcttgtcctttgagagttgaaaatacatattcatctacatttctgcagcgagtggcccacagttaattttcatcactggtggggttggcagaatgttcactctcttctgctgctgtgctgtgtcttcgttgacttggaattgcaggaagcactcggtttgtccgcagaggttctccagatagaactgggaagaaagaatagaacaagagactttcaagatttgcttctctaacaggaaggcggcaggagaattgtattgtgttttaggagtcgaggcatttctaagaagtgtgtcttggtgagagctagactgcagagagaagctgtgtatgtatatcttgtatatatatctgttcaggcttgctgcatgaagtctgggatttcaaatatgcacacatagaagactgtaccaagtgtgatcaaacatgattggg

SEQ ID NO: 546828 - DNA, 565 bp, Homo sapiens
aaagggagaccgggcagaggttaaacaaaatcaaggagacctttgcataggagccgggaactatcaccaagcaccctgttgagggagggagaggcaattcagtaaagagaccttacgtaatccacagccaatgcacttaactttttgtaagtcctataggtatagatgtgagtatgtgaggcatctgaagaacagcaagtccatgaaagtgctggacctctggggaagggactgggattaggaacagtcatcaaggaaaactttctgattgctgcagaagttttgcatttttcccctccagagaatgtgttcgtgtactaacttgygcaatgaaattttcatttaaattttttttttaaaaagaaaagaaacagtccctgttcaatgcatttcaataatatgtttgggggcaatttcaccctgaatctgggccatgcttcccaggggctgtgagctcagcagtgcacatctgcgtttccagtcagcagtgggctttgcagcacagatcttgtttcaatattacaagcccaactccgcaactctgtggattgttaaatttatatgc

SEQ ID NO: 546829 - DNA, 565 bp, Homo sapiens
aaagggagaccgggcagaggttaaacaaaatcaaggagacctttgcataggagccgggaactatcaccaagcaccctgttgagggagggagaggcaattcagtaaagagaccttacgtaatccacagccaatgcacttaactttttgtaagtcctataggtatagatgtgagtatgtgaggcatctgaagaacagcaagtccatgaaagtgctggacctctggggaagggactgggattaggaacagtcatcaaggaaaactttctgattgctgcagaagttttgcatttttcccctccagagaatgtgttcgtgtactaacttgcgcaatgaaattttcatttaaatttttttttwaaaaagaaaagaaacagtccctgttcaatgcatttcaataatatgtttgggggcaatttcaccctgaatctgggccatgcttcccaggggctgtgagctcagcagtgcacatctgcgtttccagtcagcagtgggctttgcagcacagatcttgtttcaatattacaagcccaactccgcaactctgtggattgttaaatttatatgc

SEQ ID NO: 546830 - DNA, 643 bp, Homo sapiens
ctgagaaattatcagcacagtcaaacatttctcctgcttcgaaaacacaaaacccaaagctaagccatccccatgggcttttgacattaaccatctgtcaaaccctagcaggaactgcttaagtgaaagcattcattataaattaaaaagttaaaaagttgygctaattaagcctgaaagggaaaccagggtacattaagcagtgagagaagaatagctcttcgtgaatgggactcatgattgtatctgtctattcttgtgttttttgtaaatatactaattataatcactatttatgtttcgtagttttgataaagagcatacggcatcattaaatcccccaaaaagtatgctgcgatattttgactcatgccggtgatgagcttgccaaggacaagcttggctgtttgggatacaaggcgggtgtgactcagttcctctctccacaggatggtagtttgccctcatcggcctcctaagtgatgcaagatgattgtgaaaatgaagaaataggccgggcacggtggctcacgcctgtaatcccagcactttgggaggccgaggtgggtggatcacgaggttaggggattgagaccatcctggcaaatacggtgaaaccctgtctctactaaaaatacaaaaa

SEQ ID NO: 546831 - DNA, 643 bp, Homo sapiens
ctgagaaattatcagcacagtcaaacatttctcctgcttcgaaaacacaaaacccaaagctaagccatccccatgggcttttgacattaaccatctgtcaaaccctagcaggaactgcttaagtgaaagcattcattataaattaaaaagttaaaaagttgcgctaattaagsctgaaagggaaaccagggtacattaagcagtgagagaagaatagctcttcgtgaatgggactcatgattgtatctgtctattcttgtgttttttgtaaatatactaattataatcactatttatgtttcgtagttttgataaagagcatacggcatcattaaatcccccaaaaagtatgctgcgatattttgactcatgccggtgatgagcttgccaaggacaagcttggctgtttgggatacaaggcgggtgtgactcagttcctctctccacaggatggtagtttgccctcatcggcctcctaagtgatgcaagatgattgtgaaaatgaagaaataggccgggcacggtggctcacgcctgtaatcccagcactttgggaggccgaggtgggtggatcacgaggttaggggattgagaccatcctggcaaatacggtgaaaccctgtctctactaaaaatacaaaaa

SEQ ID NO: 546832 - DNA, 643 bp, Homo sapiens
ctgagaaattatcagcacagtcaaacatttctcctgcttcgaaaacacaaaacccaaagctaagccatccccatgggcttttgacattaaccatctgtcaaaccctagcaggaactgcttaagtgaaagcattcattataaattaaaaagttaaaaagttgcgctaattaagcctgaaagggaaaccagggtacmttaagcagtgagagaagaatagctcttcgtgaatgggactcatgattgtatctgtctattcttgtgttttttgtaaatatactaattataatcactatttatgtttcgtagttttgataaagagcatacggcatcattaaatcccccaaaaagtatgctgcgatattttgactcatgccggtgatgagcttgccaaggacaagcttggctgtttgggatacaaggcgggtgtgactcagttcctctctccacaggatggtagtttgccctcatcggcctcctaagtgatgcaagatgattgtgaaaatgaagaaataggccgggcacggtggctcacgcctgtaatcccagcactttgggaggccgaggtgggtggatcacgaggttaggggattgagaccatcctggcaaatacggtgaaaccctgtctctactaaaaatacaaaaa

SEQ ID NO: 546833 - DNA, 643 bp, Homo sapiens
ctgagaaattatcagcacagtcaaacatttctcctgcttcgaaaacacaaaacccaaagctaagccatccccatgggcttttgacattaaccatctgtcaaaccctagcaggaactgcttaagtgaaagcattcattataaattaaaaagttaaaaagttgcgctaattaagcctgaaagggaaaccagggtacattaagcagtgagagaagaatagctcttcgtgaatgggactcatgattgtatstgtctattcttgtgttttttgtaaatatactaattataatcactatttatgtttcgtagttttgataaagagcatacggcatcattaaatcccccaaaaagtatgctgcgatattttgactcatgccggtgatgagcttgccaaggacaagcttggctgtttgggatacaaggcgggtgtgactcagttcctctctccacaggatggtagtttgccctcatcggcctcctaagtgatgcaagatgattgtgaaaatgaagaaataggccgggcacggtggctcacgcctgtaatcccagcactttgggaggccgaggtgggtggatcacgaggttaggggattgagaccatcctggcaaatacggtgaaaccctgtctctactaaaaatacaaaaa

SEQ ID NO: 546834 - DNA, 1550 bp, Homo sapiens
tccccattttacagataaggaacctgaggcacaaaacagttaaccagaagtcactcagtacacagtcaaatggggaggtgaattcaggccactaccttctacctgacaacgatatgaatagattggacatggcttcctgtaaaattattgtacctaatatcttagcactaattgagattaggggtcagaagcataaagtgaatgcttttacagtrcattttcatgccaagtggtttgtcatctagagcagggttctcatccttcactctattgacactttgggccagatgctcttgattgtgggggactgttgtatacactgtagcacagcatccctggcccctatccattagatgctagtagcaccttctccagttgtaacaaccaaaaatgtctctggacatagccaaatgtcccctggggacaaaactgcccccagttgagaactactggtttagggagtctgaagtgtcttagtgaagagtccattaacaatcatcagcatgatgcaatggtgtgaccaatttgctctggtatgttaccttgtgtattctctcacagtaccatgtcattatctgttaatagcaggtgtgcttagcttctcatatcagcaataaatatatggtaccagcttgtaccagctattggttttccatgcaatgtgtggtgaatctttaactttatggcttacttatcaatggaacaataagcttctgatttcccttgaatccagtggccacacacggagcaagaaactctaaaggtcctcaatctctttaaatatttaagccagcccacatttctttccctgacttggtgttttgtcacatttggaattttttttcgttctatgtaaacataggacagattataaacttagcacactctccatatttaaatatgttcatcaggattttaaagacaagaattaaaacaatgatcatgatataataatatatcataaaacactgaagagctaaaaaataaaaggataaattatcacgtaggtggggctttctggtcattgacacgagtctagcaagaatgtcgctttattctttttattttagtgtacctttttcttcccttacattgcccatatagtctctggaagccaaaacaccttttcctccagtcccttcagatctatcccgtgttaaaacccagcataaaagccacctctttcataattgcttctagaggccttaatgagaagcttcctttccttctactagcatcttgtaccaatcattactttctactttatattccactgggttatagacctggattctcaagcctactagactgtaaattatttaagggtaaagatcatgccttgttcatctctgtgtccccaaatgcttaatgtagcaccttgcacatagaaatagttcagtcctgaaataaggtatccttttgttaaattaatccttctcagattaatttcagatttctagaatcacaaaatcaatatttggcagcaaggcataatcagttacaaacactattttgttgttggactctgagaatcagggttatggggggat

SEQ ID NO: 546835 - DNA, 1550 bp, Homo sapiens
tccccattttacagataaggaacctgaggcacaaaacagttaaccagaagtcactcagtacacagtcaaatggggaggtgaattcaggccactaccttctacctgacaacgatatgaatagattggacatggcttcctgtaaaattattgtacctaatatcttagcactaattgagattaggggtcagaagcataaagtgaatgcttttacagtgcattttcatgccaagtggtttgtcatctagagcagggttctcatccttcactctattgacactttgggccagatgctcttgattgtgggggactgttstatacactgtagcacagcatccctggcccctatccattagatgctagtagcaccttctccagttgtaacaaccaaaaatgtctctggacatagccaaatgtcccctggggacaaaactgcccccagttgagaactactggtttagggagtctgaagtgtcttagtgaagagtccattaacaatcatcagcatgatgcaatggtgtgaccaatttgctctggtatgttaccttgtgtattctctcacagtaccatgtcattatctgttaatagcaggtgtgcttagcttctcatatcagcaataaatatatggtaccagcttgtaccagctattggttttccatgcaatgtgtggtgaatctttaactttatggcttacttatcaatggaacaataagcttctgatttcccttgaatccagtggccacacacggagcaagaaactctaaaggtcctcaatctctttaaatatttaagccagcccacatttctttccctgacttggtgttttgtcacatttggaattttttttcgttctatgtaaacataggacagattataaacttagcacactctccatatttaaatatgttcatcaggattttaaagacaagaattaaaacaatgatcatgatataataatatatcataaaacactgaagagctaaaaaataaaaggataaattatcacgtaggtggggctttctggtcattgacacgagtctagcaagaatgtcgctttattctttttattttagtgtacctttttcttcccttacattgcccatatagtctctggaagccaaaacaccttttcctccagtcccttcagatctatcccgtgttaaaacccagcataaaagccacctctttcataattgcttctagaggccttaatgagaagcttcctttccttctactagcatcttgtaccaatcattactttctactttatattccactgggttatagacctggattctcaagcctactagactgtaaattatttaagggtaaagatcatgccttgttcatctctgtgtccccaaatgcttaatgtagcaccttgcacatagaaatagttcagtcctgaaataaggtatccttttgttaaattaatccttctcagattaatttcagatttctagaatcacaaaatcaatatttggcagcaaggcataatcagttacaaacactattttgttgttggactctgagaatcagggttatggggggat

SEQ ID NO: 546836 - DNA, 1550 bp, Homo sapiens
tccccattttacagataaggaacctgaggcacaaaacagttaaccagaagtcactcagtacacagtcaaatggggaggtgaattcaggccactaccttctacctgacaacgatatgaatagattggacatggcttcctgtaaaattattgtacctaatatcttagcactaattgagattaggggtcagaagcataaagtgaatgcttttacagtgcattttcatgccaagtggtttgtcatctagagcagggttctcatccttcactctattgacactttgggccagatgctcttgattgtgggggactgttgtatacactgtagcacagcatccctggcccctatccattagatgctagtagcaccttctccagttgtaacaaccaaaaatgtctctggacatagccaaatgtcccctggggacaaaactgcccccagttgagaactactggtttagggagtctgaagtgtcttagtgaagagtccattaacaatcatcagcatgatgcaatggtgtgaccaatttgctctggtatgttaccttgtgtattctctcacagtaccatgtcattatctgttaatagcaggtgtgcttagcttctcatatcagcaataaatatatggtaccagcttgtaccagctattggttttccatgcaatgtgtggtgaatctttaactttatggcttacttatcaatggaacaataagcttctgatttcccttgaatccagtggccacacacggagcaagaaactctaaaggtcctcaatctctttaaatatttaagccagcccacatttctttccctgacttggtgttttgtcacatttggaattttttttcgttctatgtaaacataggacagattataaacttagcacactctccatatttaaatatgttcatcaggattttaaagacaagaattaaaacaatgatcatgatataataatatatcataaaacactgaagagctaaaaaataaaaggataaattatcacgtaggtggggctttctggtcattgacacgagtctagcaagaatgtcgctttattctttttattttagtgtacctttttcttcccttacattgcccatatagtctctggaagccaaaacaccttttcctccagtcccttcagatctatcccgtgttaaaacccagcataaaagccacctctttcataattgcttctagaggccttaatgagaagcttcctttccttctactagcatcttgtaccaatcattactttctactttatattccactgggttatakacctggattctcaagcctactagactgtaaattatttaagggtaaagatcatgccttgttcatctctgtgtccccaaatgcttaatgtagcaccttgcacatagaaatagttcagtcctgaaataaggtatccttttgttaaattaatccttctcagattaatttcagatttctagaatcacaaaatcaatatttggcagcaaggcataatcagttacaaacactattttgttgttggactctgagaatcagggttatggggggat

SEQ ID NO: 546837 - DNA, 1382 bp, Homo sapiens
taaatactgtgacagaatagggtgagcttctgctttgatatgttaacttttttccatttaaatttcagttctgttaaatcatgcagggaacaaagataaagttgggatttaatttaggggtaggttggagaggaagaagcaaagacaggaaaacaccagtagaaaacgctacagaaacttaaacagtaagagagctaaattaaagtgattaaaattattaacttccaatgcaacctgatgatgtaaaatctgttgtttcaagattgaaactataaatctaaaactcctgaagcaatggttagttaaaataaaaaaaaatgaatagtttctaccacacaataaaattattattattattattattttaagacggggtctcgctctctcaccaggctggagtgcagtggtgcaatctctgctcactgcaacctctgcctcccggtttcaagcgattgtcttgccccagtctcccgagtagctgtgactataggmgcgtgccaccacaccccgctaattttttgtatttttagtacagacggagtttcaccgtgttaggcaggatggtctcgatctcctgacctcgtgatccgcctgcctcggcctcccaaagtgctgggattacaggtgtgagccatcgtgcccagcctaaaattactttctaaataggtaactgagctatagaagaaaaaccaaggtttaattctaaataagggacaattaaatgaaaattacaatgcaagtctagttacaaaattctttcttactatatttcaattgagtaatataattgatttttaaataacatggttttaaaaatttgtttcttagaagaaaaagagaagaagaaaaacaaggaggaacaaaaataaataatgaagaagcagccattgctcagctatttttctattggctttaaatgaaaagagaactgctttgacgtgaccattacaaggtaccaacaacatccggcagcaattatcttgtattacagtcctaacatacctggatagactagccaatctttatgccattttagtgtttcgtttttaataaaaatgtccataaatgtgtatgcatttgcatgtcttatatagataggaaacagaatatttgattactttatcaagagcttgttcagaaggtttgtacaatgaagataatagatgttctatacaaaagaaaatacaatgaagagcagaaatattacaaaatgtgcaatagtaaaatggataaagtaattagataataaaatcctagtttgaaatatagtctaagttctaaagttgtttttttcattttttaatacatattagtcttttatggaagacaatcttcttaatcatctaaaattatcacaggattttgatagttcttatatatca

SEQ ID NO: 546838 - DNA, 1382 bp, Homo sapiens
taaatactgtgacagaatagggtgagcttctgctttgatatgttaacttttttccatttaaatttcagttctgttaaatcatgcagggaacaaagataaagttgggatttaatttaggggtaggttggagaggaagaagcaaagacaggaaaacaccagtagaaaacgctacagaaacttaaacagtaagagagctaaattaaagtgattaaaattattaacttccaatgcaacctgatgatgtaaaatctgttgtttcaagattgaaactataaatctaaaactcctgaagcaatggttagttaaaataaaaaaaaatgaatagtttctaccacacaataaaattattattattattattattttaagacggggtctcgctctctcaccaggctggagtgcagtggtgcaatctctgctcactgcaacctctgcctcccggtttcaagcgattgtcttgccccagtctcccgagtagctgtgactataggagcgtgccaccacaccccgctaattttttgtatttttagtacagacggagtttcaccgtgttaggcaggatggtctcgatctcctgacctcgtgatccgcctgcctcggcctcccaaagtgctgggattacaggtgtgagccatcgtgcccagcctaaaattactttctaaataggtaactgagctatagaagaaaaaccaaggtttaattctaaataagggacaattaaatgaaaattacaatgcaagtctagttacaaaattctttcttactatatttcaattgagtaatataattgatttttaaataacatggttttaaaaatttgtttcttagaagaaaaagagaagaagaaaaacaaggaggaacaaaaataaataatgaagaagcagccattgctcagctatttttctattggcttyaaatgaaaagagaactgctttgacgtgaccattacaaggtaccaacaacatccggcagcaattatcttgtattacagtcctaacatacctggatagactagccaatctttatgccattttagtgtttcgtttttaataaaaatgtccataaatgtgtatgcatttgcatgtcttatatagataggaaacagaatatttgattactttatcaagagcttgttcagaaggtttgtacaatgaagataatagatgttctatacaaaagaaaatacaatgaagagcagaaatattacaaaatgtgcaatagtaaaatggataaagtaattagataataaaatcctagtttgaaatatagtctaagttctaaagttgtttttttcattttttaatacatattagtcttttatggaagacaatcttcttaatcatctaaaattatcacaggattttgatagttcttatatatca

SEQ ID NO: 546839 - DNA, 1382 bp, Homo sapiens
taaatactgtgacagaatagggtgagcttctgctttgatatgttaacttttttccatttaaatttcagttctgttaaatcatgcagggaacaaagataaagttgggatttaatttaggggtaggttggagaggaagaagcaaagacaggaaaacaccagtagaaaacgctacagaaacttaaacagtaagagagctaaattaaagtgattaaaattattaacttccaatgcaacctgatgatgtaaaatctgttgtttcaagattgaaactataaatctaaaactcctgaagcaatggttagttaaaataaaaaaaaatgaatagtttctaccacacaataaaattattattattattattattttaagacggggtctcgctctctcaccaggctggagtgcagtggtgcaatctctgctcactgcaacctctgcctcccggtttcaagcgattgtcttgccccagtctcccgagtagctgtgactataggagcgtgccaccacaccccgctaattttttgtatttttagtacagacggagtttcaccgtgttaggcaggatggtctcgatctcctgacctcgtgatccgcctgcctcggcctcccaaagtgctgggattacaggtgtgagccatcgtgcccagcctaaaattactttctaaataggtaactgagctatagaagaaaaaccaaggtttaattctaaataagggacaattaaatgaaaattacaatgcaagtctagttacaaaattctttcttactatatttcaattgagtaatataattgatttttaaataacatggttttaaaaatttgtttcttagaagaaaaagagaagaagaaaaacaaggaggaacaaaaataaataatgaagaagcagccattgctcagctatttttctattggctttaaatgaaaagagaactgctttgacrtgaccattacaaggtaccaacaacatccggcagcaattatcttgtattacagtcctaacatacctggatagactagccaatctttatgccattttagtgtttcgtttttaataaaaatgtccataaatgtgtatgcatttgcatgtcttatatagataggaaacagaatatttgattactttatcaagagcttgttcagaaggtttgtacaatgaagataatagatgttctatacaaaagaaaatacaatgaagagcagaaatattacaaaatgtgcaatagtaaaatggataaagtaattagataataaaatcctagtttgaaatatagtctaagttctaaagttgtttttttcattttttaatacatattagtcttttatggaagacaatcttcttaatcatctaaaattatcacaggattttgatagttcttatatatca

SEQ ID NO: 546840 - DNA, 482 bp, Homo sapiens
gttggaggggagaggagggtggtcaagctggagaaagggaggagagttgagaccaacactggctgtgcagtcagacctgatcctcctcctgtgattctggccagttacccacttccttaaggctstgttgtcttatctgtgaaatggatcgatagcagctgcctggcaggcttgttgggaggagggtattgaataccagattcagagccctgtaccctgggtgtggcacacagtaggtgcagcacacaagaggtgctccgtgagtgttgcttctcattcattcacccctctctgcagggaaaggggaggactggagtgggctcaagtgtccaaatgccaggcttgccatctccccaccccattgagctgtcttccctcatgtgttccttagaagcatcttcctagtcttagggtgtgaagttgcatgtctaggctcctacgccattattcccctcctttctctctctttttttttttttttt

SEQ ID NO: 546841 - DNA, 482 bp, Homo sapiens
gttggaggggagaggagggtggtcaagctggagaaagggaggagagttgagaccaacactggctgtgcagtcagacctgatcctcctcctgtgattctggccagttacccacttccttaaggctgtgttgtcttatctgtgaaatggatcgatagcagctgcctggcaggcttgttgggaggagggtattgaataccagattcagagccctgtaccctgggtgtggcacacagtaggtgcagcacacaagaggtgctccgtgagtgttgcttctcattcattcacccctctctgcagggaaaggggaggactggagtgggctcaagtgtccaaatgccaggcttgccatctccccamcccattgagctgtcttccctcatgtgttccttagaagcatcttcctagtcttagggtgtgaagttgcatgtctaggctcctacgccattattcccctcctttctctctctttttttttttttttt

SEQ ID NO: 546842 - DNA, 994 bp, Homo sapiens
tgatttctcgggtatctacacttagaactgcataaagctggtaatgctatgtgaatcctccaattttctctttaaagattttgctgcacccatcaatgtatagtaacaaacctgcatgttctgcacatgtatcccagaacttaaaagtatatacataaaccacaacaaactccttagcttgttaactgtcatctcattcacacttatgacttttattttcttccttctccattcataccaatgatgtatctgtcaacctccttttttgctgttacaaaaaaaaaaaattgctgaactacagaatcctctagtctgagaaccacggggctgtactttgtcagttatcatttrtatcaactcctttcccaatcttgggactttttttttttgtttgctttgtacagatagtctttgaaattcaaatacctcaatctgtgtttaaatttaataatctttaaaaaatgttcataaggtaacatatattatattccacatacctggtaatttgggagaaggagacatttcttttacaagatcatatctttttgcttttctgtgtctgtatgatgacttggtttgaagcatgttcagtcctataaagactccatacacaaccccataggctcaaattaggtgatgagtgtgaaggggaggtgggtgtgaagaggaggggggtgtcttagctcaggctgccataacaaacttctgtatcctgggtggcttaaacaccaaacatttggccgggtgtggtggctcctgcctgtaatcccagcactttgggatgccaaggcgggccagatcacctgaggtcaggagcttaagaccagtctgaccaacatggcaaaatcccgtctctactaaaaaaaatacaaaattagctcggcgtggtggtgggtgcctgtaatcccagctactctacttgggaggctgaggcagcagaattgcttgaacccaggaggcagaggttgcagtgggccgagaccatgccactgca

SEQ ID NO: 546843 - DNA, 994 bp, Homo sapiens
tgatttctcgggtatctacacttagaactgcataaagctggtaatgctatgtgaatcctccaattttctctttaaagattttgctgcacccatcaatgtatagtaacaaacctgcatgttctgcacatgtatcccagaacttaaaagtatatacataaaccacaacaaactccttagcttgttaactgtcatctcattcacacttatgacttttattttcttccttctccattcataccaatgatgtatctgtcaacctccttttttgctgttacaaaaaaaaaaaattgctgaactacagaatcctctagtctgagaaccacggggctgtactttgtcagttatcatttatatcaactcctttcccaatcttgggactttttttttttgtttgctttgtacagatagtctttgaaattcaaatacctcaatctgtgtttaaatttaataatctttaaaaaatgttcataaggtaacatatattatattccacatacctggtaatttgggagaaggagacatttcttttacaagatcatatctttttgcttttctgtgtctgtatgatgacttggtttgaagcatgttcagtcctataaagactccatacacaaccccataggctcaaattaggtgrtgagtgtgaaggggaggtgggtgtgaagaggaggggggtgtcttagctcaggctgccataacaaacttctgtatcctgggtggcttaaacaccaaacatttggccgggtgtggtggctcctgcctgtaatcccagcactttgggatgccaaggcgggccagatcacctgaggtcaggagcttaagaccagtctgaccaacatggcaaaatcccgtctctactaaaaaaaatacaaaattagctcggcgtggtggtgggtgcctgtaatcccagctactctacttgggaggctgaggcagcagaattgcttgaacccaggaggcagaggttgcagtgggccgagaccatgccactgca

SEQ ID NO: 546844 - DNA, 635 bp, Homo sapiens
aaaagtgagaaaaggaaataaaacattagcaaccagaatcctaattggggatatcaccacagatcccacagaaatacaaactactatcagacaatattataaacaactcaatgcaaataaataagaaaattcagaagaaatggataaattcctgtacaaataaaccctcccaagactaaaccaggaagaagtcaaattcctgaatagaccaataacaagttctgaaattgaggcagtaattaatagcctmcaaaaaaaaaaaaagcccaggaccagacggattcacagctgaattctaccagaggtacaaaaaggagctggtaccattccttctgaaactattccaaacaatagaaaaagaaggactcttccctatctcattttatgaggccagcatcaccctgatacgaaaacctggcagagacacaacaaaaaaagaaaattttaggccagtatccctgatgaacattgatgagaaaatcctcaataaaatactggcaaaccgaatccagcagcacatcaaaaagcttatccaccacgatcaagacggcttcatcctgggatgcaaggctggttcaacatatgcaaatcaatagatgtaatccatcacataaacagaaccattgacaaaaaac

SEQ ID NO: 546845 - DNA, 557 bp, Homo sapiens
tgttagaccaaacaactcattatttytctttagtgctatattttcataggctgatttttctatagaaattgcaaaaatcttttcctttaacagttttcaaaataagttcattcctttgcaccttccagaggtgaccaatagatattttcttgctttttcttcttttcttatttttaaaaatatcaatacgaactcatggatttaaatatcacttatgtcccttaattaattgcaattagtatccctaattggtatcccaatgggcatgagtgttctgtgccattaaattagagcttgtttctatgtttctatagcaaacaaggttaagaaatgttttttgtgtgtgtttgttttgttgttactagctttttatgtttaaaataaactatcatgagtttattctgatatttctaataatttacttcaggattacaaggaatttgcttaatatctcatatgttccatctgtttatcttttctccaatgctgttcttaataataacaccatgatatggcttagctttgtgtcccacctaaatctcttaaattgtaatccc

SEQ ID NO: 546846 - DNA, 627 bp, Homo sapiens
taagcattcatcaatcctgctggattatcattattaataatgacaattaacagtagttaataattaactattgaagattattggctcccccaagtggacccagagagctatgcattttatctttttttttttwaatatatgtcttcatttctgtgagatctaatattttaattctgacaactgtctctataagctatctatccctgaccccatctggcacatactttatcttgtagtttgctacttgtaatatctataagcttcaaaatcatatcaccaaactaactggaagtatgtatagaataaaaagtttagcaaagtttcctcttggtgtttgtgagagctattttggctatttagagatctttatttacttaatttttacttgtaagttctttgtgtcttggacagcttggttgtctaattgtttgattttgagataattgaagaaaggggttcttactgtaatttgatgataattctgtaaattggtctagttgggtccacagggaaataatcaacccccgaaaatttgggaaagctagtgtagtttaatcattcagtcttcaaataagcatttactatgcacattataccagcactgtgtgagaatatctcacacaggag

SEQ ID NO: 546847 - DNA, 670 bp, Homo sapiens
ccagttggtgaagatgtgagcagaggtgtggagtggagagcctaacatcacttagtgttcacaaagtcctctgctattcattattttatctgtgtgtctcatcatcctgcagactatcagtcctattttacagaggggtaatttaaatcatgggtacatagccaagaagtggcagacctggggcaggatcccaggtctcctaacccccaagtgagggcatttcacactccatagcacagcagggctgaactgggctgaagcagattagaggtggtttgkcagggtgtagggggtggtcagagctcaggagtcccttttctgagtgtcagggatgctaagacaagggagaacagccctgtagcccacctgggcatcactgttattacaggctcagcagcacctaagggagaggagaacaagacgggaagggaaaggcagggctgtagttaacacacatcctccatcccaccagcccttcaggcctggtcttgcaggcactggagctggttccatgggttgccagaggaagcctgaaagagggaggctgggagagggggcggggaacctgatcctgtgtatatgtcaatacccaacaaaaacttgtgtaggggggtggggtgcatttgggttactggagttacacagacatgtgtgtacatggattgtgtga

SEQ ID NO: 546848 - DNA, 1491 bp, Homo sapiens
catcactatgacctgcaacattctggttgttttcctttcacctacatcctaagcactaaaaaactgtatttttgttttttgttttgttttgttttgttttgttttgtttcgttttgttttgtttttgagaccgagtctcactctgttgcccaggctggagtgcagtggcatgatctcagctctgcaacctccgcctctcgggttcaagtgattctcatgcctcagcctcccaagaagctgggactacaggcatgtgccatcacacctggctaattttttctctatttttagtagagatggggtttcgttatgctggccagcctggtctcaaactcctgacctcaagtgatccatctgcctcagcctcccagagtgccaggattacaggcrtaagccaccatgcccggcctaaaaaactctattcgaattctccaaatctggtaatacagagcttcctagtaactaatcacaagaaaattactgtaggcctagaaagaaaataataatttagaatctctgcttttaatcttttttttaaaagtcaatctcaagaggaatactgcctttttgcactttctatatatacaaactaagtaaatccagaaattccatagacttttacccacatgcaacttgaaacacattaaattcttacagcattctcaatctattttcccatgtgcaatttataagaataataaagacatcattaactctgttaagaccaattttgagtaagcgaattttccatattcatgtgatattccagagctggcaccagataagcatggaaagaaaagtgcttgtaagagttacttgcacaaagccattaactagctaataaagtagtcctagggcccatacatgatgctgtgtaaaatattcaccataccatcattctctggcatctctgaattctttcatttctgctcttgaatttcagaaacaatagcatttcaatggctaaaactaaaataatgatgggggatgctatggtctgaatatttgtagcccccaaaattcatatgttgaaatcccaaccccacaaggtgatggcattaagagtttgtttgccctttttgccatgtgaagatgcagaaggtgctgtctatgaaccactaggcaggccctcaccagacaccaaatctgttgatgccttgatcttgaatttcccaacctgcagaactgtgagaaataaatttctgttgtttataagctgcctagcctgtagtgttttgttacagcagcccaaatggactaagacgggggagtagacttatatacacttatatttaaaactgtcttatttaaaattccaatcatattgcattccttaccctcacagtgatacataaatgttaagtttcttaaattcaacaaattggggattaaaagagtatgagaataaaacgttctaactaccagatgttaacttaatcaagattatgatatagaaagtactatgttcctgcaaggtaaatatgtttctca

SEQ ID NO: 546849 - DNA, 855 bp, Homo sapiens
gcaaattggaaaacaaaagtcctaattgtcacatcatttgttaggatgtgaaaatttaggggaaaaaaggaaagaaaaaaaaggacccaaagtaatgtaaagcttggtagattattttatcccttaatttaggcaggctaaaaatacattgtggtagttatgaactctygttaaggcttgacacaatatctggagtatgtgtctaaatgtaaatatcaccttttaaaaaaatttagcttcttaaagttagtaattaaggatatgtcacagatttttcaacaaatgttatttgatgatagtgacatacaaggctaagaagagatgctataacttagaataggtaggtgctagtaaaagtgtagtatgactccatagctaggctgttaagtatattgtcaaagaattctgaaacttctgtgtgagccaatatcccaagcacaggtggatcaaataccaggacatctgttttctaaatctggcgttaatcctgtctttttaagatcactggaggaaattcttaaatcattgtaaatttatgactgtagtttttccctattattcatatacaacactcccagggtatctcagctatgttgacaaaaatgcatagcatgcatagcaaatgagaccagaaacctggagatttcttttcccaggattaaatctaggaaaccaaggaacttaaattggggaagtttaggaatagttcattaaatataggggtcccccactacatggtctcagctctgtgtttgggcaagaagaaatggcactgaaaatatatgctataggaatccactatgaccacctactcgggaagaattcacaggaaagtttctttgtggaagtttagtg

SEQ ID NO: 546850 - DNA, 673 bp, Homo sapiens
atgaaatgaaagcacctgtaaataatatgaatttaataatttttttaaactgtttttttctcttgagaagttgattatctgggggagattggtgctggggaaaggacacaaaaccatcttaaaattctttttttttcttaataagccaaccaagtacaccttatttcccaaagtctgaagccataagcaggtttttaaaatacaggaagaaataatctaagattatttaagcaaatggttttaaaactttaatgtggaaattattctcctggagaggcttgttaaaatgcagattttggggtgggtgtgctggctcactcctgtaatcccagcastttgggaggccgaggtggggggatcacttgagctcagtagctcgagaccagcctggctaacatggtgaaacctcgtctctgctaaaaatataaaaattagccaggtgtggtggttcacgtctgtaatcccagctacttggaaggctgaagcaggagaattgcttgaacccaggggatagaggttgcagtgagccaagatcatgccactgcactccagcctgtgcgacagagcaagactggggtgggcttgagagtcggcatttccatcaagatcccaggtgatgcccaccctgctggttcccagaccacattttgagtagcaaggatctaaactattc

SEQ ID NO: 546851 - DNA, 555 bp, Homo sapiens
cacgtcttgcaatgagacaggagactgcacatctatcaggcatcggagcccattttcatcattcattattattggagaagaaagagatttttgctcatgcacagacagaggataatactgattgctgtggtaagatatccagggactgggagctgactatcacttgtttcttgggaaacagtcttctctaaatttaagggccaggaagacaaagataatagctacaaagaaattttctaagcactgtttcttcccagagacccatagacataatcggaaagaggactatattatggtaaaagagagcatgggctttgcagtcaggccaggtttaaaccctaccttcccgttgacaagctgtatgacccttggcaagttatttctactgtctgagctttgatttccatactccataggttttattgtgagactyaaacaaaatagcctatgttatcaataatggcttaaacctgcacactcaatcaattatatgtcttttaatcaaagtcatcataattcagtaggaaatgagaaaccttggttagggcaaatatt

SEQ ID NO: 546852 - DNA, 1327 bp, Homo sapiens
tgcataaatttgaacagtataattaacatatttaatctgatcaatatgtatagaaccctgyactttacgaataaagaatacatttttgtttttcaaagacatgaattagttacaaaaaatgaccatgtactagaactcacaaaggaaatatcaacctcttctgaagaacttagaacatgttctctaacaatgcaattaaacaagaaacttttttttactttgagcaaaaacattgaaacacacacacaaataacacagcttttctcaccattctcgggtgctaagccttcaaatcactttcattcacaagaacagtcattttaattcacataactgcatattctcacccagtttaaaaattttctcttttcaattccagtttgcttcacccaggaaactgcagaggggcagggggtagctgacttttctctccttgtgagccttgctggcctctgtctccacctccctcccacattgcttctgggcctgcaaagttgaaggctgaatgtgggcgatcactggaggagaaataagagacaagaaacatgctcttgcctgcctgcatagacataacctggagatggtaccctggagcatgacctgctaactacatctccctcagggcattttgtgacttcctcagagatggtcccagggggatccttaaattgcaactgacttgacagggaaactgaggctcacacaggtaatggattcttctcagccagacattgtagttcctccttcttgagcatccatcagcccacccctattgggtctcatggctcttcaggcaatcttgggtggaatttaaaaaggctcaagggccaagtgcagtgactcatgcctgtaatcccagcactctgggaggctgaggtgggaggaccacttgaagccaggagttccagactagcctgggcaacaaaatgagacactatctctacaaaaaataaaataaaataaattagtcaggcatgatggcacatatctgtagtcccagctactcaggaggcagaggtgagaagaccgcttgagcccaggatttcaaggctgcagtaagttaatatgatcattgcactagcctaggtgacagagcaagaccctgtgtcataaataaataaataaataaataaataaataaataaataaatgggctccccacactgatctgtgtgagccaaagctgttttctgagaagcatgccctcatctttcctccaccaagaatggaaaaactcccagtgcagctcctctctcttgaattggccaccttagatagatctagccacaactttcaatctagtctttatgttcccccgattccagca

SEQ ID NO: 546853 - DNA, 1327 bp, Homo sapiens
tgcataaatttgaacagtataattaacatatttaatctgatcaatatgtatagaaccctgtactttacgaataaagaatacatttttgtttttcaaagacatgaattagttacaaaaaatgaccatgtactagaactcacaaaggaaatatcaacctcttctgaagaacttagaacatgttctctaacaatgcaattaaacaagaaacttttttttactttgagcaaaaacattgaaacacacacacaaataasacagcttttctcaccattctcgggtgctaagccttcaaatcactttcattcacaagaacagtcattttaattcacataactgcatattctcacccagtttaaaaattttctcttttcaattccagtttgcttcacccaggaaactgcagaggggcagggggtagctgacttttctctccttgtgagccttgctggcctctgtctccacctccctcccacattgcttctgggcctgcaaagttgaaggctgaatgtgggcgatcactggaggagaaataagagacaagaaacatgctcttgcctgcctgcatagacataacctggagatggtaccctggagcatgacctgctaactacatctccctcagggcattttgtgacttcctcagagatggtcccagggggatccttaaattgcaactgacttgacagggaaactgaggctcacacaggtaatggattcttctcagccagacattgtagttcctccttcttgagcatccatcagcccacccctattgggtctcatggctcttcaggcaatcttgggtggaatttaaaaaggctcaagggccaagtgcagtgactcatgcctgtaatcccagcactctgggaggctgaggtgggaggaccacttgaagccaggagttccagactagcctgggcaacaaaatgagacactatctctacaaaaaataaaataaaataaattagtcaggcatgatggcacatatctgtagtcccagctactcaggaggcagaggtgagaagaccgcttgagcccaggatttcaaggctgcagtaagttaatatgatcattgcactagcctaggtgacagagcaagaccctgtgtcataaataaataaataaataaataaataaataaataaataaatgggctccccacactgatctgtgtgagccaaagctgttttctgagaagcatgccctcatctttcctccaccaagaatggaaaaactcccagtgcagctcctctctcttgaattggccaccttagatagatctagccacaactttcaatctagtctttatgttcccccgattccagca

SEQ ID NO: 546854 - DNA, 1327 bp, Homo sapiens
tgcataaatttgaacagtataattaacatatttaatctgatcaatatgtatagaaccctgtactttacgaataaagaatacatttttgtttttcaaagacatgaattagttacaaaaaatgaccatgtactagaactcacaaaggaaatatcaacctcttctgaagaacttagaacatgttctctaacaatgcaattaaacaagaaacttttttttactttgagcaaaaacattgaaacacacacacaaataacacagcttttctcaccattctcgggtgctaagccttcaaatcactttcattcacaagaacagtcattttaattcacataactgcatattctcacccagtttaaaaattttctcttttcaattccagtttgcttcacccaggaaactgcagaggggcaggrggtagctgacttttctctccttgtgagccttgctggcctctgtctccacctccctcccacattgcttctgggcctgcaaagttgaaggctgaatgtgggcgatcactggaggagaaataagagacaagaaacatgctcttgcctgcctgcatagacataacctggagatggtaccctggagcatgacctgctaactacatctccctcagggcattttgtgacttcctcagagatggtcccagggggatccttaaattgcaactgacttgacagggaaactgaggctcacacaggtaatggattcttctcagccagacattgtagttcctccttcttgagcatccatcagcccacccctattgggtctcatggctcttcaggcaatcttgggtggaatttaaaaaggctcaagggccaagtgcagtgactcatgcctgtaatcccagcactctgggaggctgaggtgggaggaccacttgaagccaggagttccagactagcctgggcaacaaaatgagacactatctctacaaaaaataaaataaaataaattagtcaggcatgatggcacatatctgtagtcccagctactcaggaggcagaggtgagaagaccgcttgagcccaggatttcaaggctgcagtaagttaatatgatcattgcactagcctaggtgacagagcaagaccctgtgtcataaataaataaataaataaataaataaataaataaataaatgggctccccacactgatctgtgtgagccaaagctgttttctgagaagcatgccctcatctttcctccaccaagaatggaaaaactcccagtgcagctcctctctcttgaattggccaccttagatagatctagccacaactttcaatctagtctttatgttcccccgattccagca

SEQ ID NO: 546855 - DNA, 1327 bp, Homo sapiens
tgcataaatttgaacagtataattaacatatttaatctgatcaatatgtatagaaccctgtactttacgaataaagaatacatttttgtttttcaaagacatgaattagttacaaaaaatgaccatgtactagaactcacaaaggaaatatcaacctcttctgaagaacttagaacatgttctctaacaatgcaattaaacaagaaacttttttttactttgagcaaaaacattgaaacacacacacaaataacacagcttttctcaccattctcgggtgctaagccttcaaatcactttcattcacaagaacagtcattttaattcacataactgcatattctcacccagtttaaaaattttctcttttcaattccagtttgcttcacccaggaaactgcagaggggcagggggtagctgacttttctctccttgtgagccttgctgkcctctgtctccacctccctcccacattgcttctgggcctgcaaagttgaaggctgaatgtgggcgatcactggaggagaaataagagacaagaaacatgctcttgcctgcctgcatagacataacctggagatggtaccctggagcatgacctgctaactacatctccctcagggcattttgtgacttcctcagagatggtcccagggggatccttaaattgcaactgacttgacagggaaactgaggctcacacaggtaatggattcttctcagccagacattgtagttcctccttcttgagcatccatcagcccacccctattgggtctcatggctcttcaggcaatcttgggtggaatttaaaaaggctcaagggccaagtgcagtgactcatgcctgtaatcccagcactctgggaggctgaggtgggaggaccacttgaagccaggagttccagactagcctgggcaacaaaatgagacactatctctacaaaaaataaaataaaataaattagtcaggcatgatggcacatatctgtagtcccagctactcaggaggcagaggtgagaagaccgcttgagcccaggatttcaaggctgcagtaagttaatatgatcattgcactagcctaggtgacagagcaagaccctgtgtcataaataaataaataaataaataaataaataaataaataaatgggctccccacactgatctgtgtgagccaaagctgttttctgagaagcatgccctcatctttcctccaccaagaatggaaaaactcccagtgcagctcctctctcttgaattggccaccttagatagatctagccacaactttcaatctagtctttatgttcccccgattccagca

SEQ ID NO: 546856 - DNA, 1327 bp, Homo sapiens
tgcataaatttgaacagtataattaacatatttaatctgatcaatatgtatagaaccctgtactttacgaataaagaatacatttttgtttttcaaagacatgaattagttacaaaaaatgaccatgtactagaactcacaaaggaaatatcaacctcttctgaagaacttagaacatgttctctaacaatgcaattaaacaagaaacttttttttactttgagcaaaaacattgaaacacacacacaaataacacagcttttctcaccattctcgggtgctaagccttcaaatcactttcattcacaagaacagtcattttaattcacataactgcatattctcacccagtttaaaaattttctcttttcaattccagtttgcttcacccaggaaactgcagaggggcagggggtagctgacttttctctccttgtgagccttgctggcctctgtctccacctccctcccacattgcttctgggcctgcaaagttgaaggctgaatgtgggcgatcactggaggagaaataagagacaagaaacatgctcttgcctgcctgcatagacataacctggagatggtaccctggagcatgacctgctaactacatctccctcagggcattttgtgacttcctcagagatggtcccagggggatccttaaattgcaactgacttgacagggaaactgaggctcacacaggtaatggattcttctcagccagacattgtagttcctccttcttgagcatccatcagcccacccctattgggtctcatggctcttcaggcaatcttgggtggaatttaaaaaggctcaagggccaagtgcagtgactcatgcctgtaatcccagcactctgggaggctgaggtgggaggaccacttgaagccaggagttccagacyagcctgggcaacaaaatgagacactatctctacaaaaaataaaataaaataaattagtcaggcatgatggcacatatctgtagtcccagctactcaggaggcagaggtgagaagaccgcttgagcccaggatttcaaggctgcagtaagttaatatgatcattgcactagcctaggtgacagagcaagaccctgtgtcataaataaataaataaataaataaataaataaataaataaatgggctccccacactgatctgtgtgagccaaagctgttttctgagaagcatgccctcatctttcctccaccaagaatggaaaaactcccagtgcagctcctctctcttgaattggccaccttagatagatctagccacaactttcaatctagtctttatgttcccccgattccagca

SEQ ID NO: 546857 - DNA, 1327 bp, Homo sapiens
tgcataaatttgaacagtataattaacatatttaatctgatcaatatgtatagaaccctgtactttacgaataaagaatacatttttgtttttcaaagacatgaattagttacaaaaaatgaccatgtactagaactcacaaaggaaatatcaacctcttctgaagaacttagaacatgttctctaacaatgcaattaaacaagaaacttttttttactttgagcaaaaacattgaaacacacacacaaataacacagcttttctcaccattctcgggtgctaagccttcaaatcactttcattcacaagaacagtcattttaattcacataactgcatattctcacccagtttaaaaattttctcttttcaattccagtttgcttcacccaggaaactgcagaggggcagggggtagctgacttttctctccttgtgagccttgctggcctctgtctccacctccctcccacattgcttctgggcctgcaaagttgaaggctgaatgtgggcgatcactggaggagaaataagagacaagaaacatgctcttgcctgcctgcatagacataacctggagatggtaccctggagcatgacctgctaactacatctccctcagggcattttgtgacttcctcagagatggtcccagggggatccttaaattgcaactgacttgacagggaaactgaggctcacacaggtaatggattcttctcagccagacattgtagttcctccttcttgagcatccatcagcccacccctattgggtctcatggctcttcaggcaatcttgggtggaatttaaaaaggctcaagggccaagtgcagtgactcatgcctgtaatcccagcactctgggaggctgaggtgggaggaccacttgaagccaggagttccagactagcctgggcaacaaaatgagacactatctctacaaaaaataaaataaaataaattagtcargcatgatggcacatatctgtagtcccagctactcaggaggcagaggtgagaagaccgcttgagcccaggatttcaaggctgcagtaagttaatatgatcattgcactagcctaggtgacagagcaagaccctgtgtcataaataaataaataaataaataaataaataaataaataaatgggctccccacactgatctgtgtgagccaaagctgttttctgagaagcatgccctcatctttcctccaccaagaatggaaaaactcccagtgcagctcctctctcttgaattggccaccttagatagatctagccacaactttcaatctagtctttatgttcccccgattccagca

SEQ ID NO: 546858 - DNA, 747 bp, Homo sapiens
tacacttttaaaaatgggcaaaacacttgaacaggaacttcacaagggaagatatccaaatagtcgataaatatatgaaaagatgctgaaattccttagttatggggaaatgcaaattaaaaccgcagtgtaagtacctaatgctactgaattgtaaacttaaaaatgatttaagctgggcacagtgtgaggggatcatacttctgtagtcccagctactctggargctaagataggaggattcctggtacccagaagttcaaggctagcctgggcaacatagcaagatcctgtctcttaaaaaaaattaaaacaatctaaatagtaaatgttttattatgtatattttaccacaatttaagaacacacagtgtgatactacgtccactattctggctaaattgaaaaaagacaagctgggcatggcagctcatgcctgtaaactcagcactttgggaaggcgagtcaaaagggtcgcttgagcccaggagttcaagaccagcctggacaacatagggcgaccctgtctctacaaaagatttaaaaattagccaggtgtaatggtacatgcctgtggtcccagctactcaggaggctgaggtaagaggatcagttgcacccagtagttggaggctgcagtgagccatgatcctactattgcactccactctaccctgagtgacagagcaagactctgtctcaaaaaaccaaattaattaattaataaaaaaagaaaaagacaatatc

SEQ ID NO: 546859 - DNA, 747 bp, Homo sapiens
tacacttttaaaaatgggcaaaacacttgaacaggaacttcacaagggaagatatccaaatagtcgataaatatatgaaaagatgctgaaattccttagttatggggaaatgcaaattaaaaccgcagtgtaagtacctaatgctactgaattgtaaacttaaaaatgatttaagctgggcacagtgtgaggggatcatacttctgtagtcccagctactctggaggctaagataggaggattcctggtacccagaagttcaaggctagcctgggcaacatagcaagatcctgtctcttaaaaaaaattaaaacaatctaaatagtaaatgttttattatgtatattttaccacaatttaagaacacacagtgtgatactacgtccactattctggctaaattgaaaaaagacaagctgggcatggcagctcatgcctgtaaactcagcactttgggaaggcgagtcaaaagggtcgcttgagcccaggagttcaagaccagcctggacaacatagggcgaccctgtctctrcaaaagatttaaaaattagccaggtgtaatggtacatgcctgtggtcccagctactcaggaggctgaggtaagaggatcagttgcacccagtagttggaggctgcagtgagccatgatcctactattgcactccactctaccctgagtgacagagcaagactctgtctcaaaaaaccaaattaattaattaataaaaaaagaaaaagacaatatc

SEQ ID NO: 546860 - DNA, 615 bp, Homo sapiens
aatttaaccaaagttatctattgggatagagaataaaagtggaagccatgagaacagttagaatttattaaaatgcacacatgtaaaatggtcctgagctttagtggctacatagacattacaggaaactggattccagacacattagaaacatcaatttttgaaatgttgtggataatactaaaatgtaaakaaagaagaaatattactgtcaggattccagacattaaaaaagacataaaggctctgtaatcagaagtacagctacctggaggaaagatttatcagagaagtgagataatccattcctgaccataggccatcatttctgtctgaatacctctgctcttcagagacatttctttccttcaagaacaacatctgatccaccaccgtcctaggaaagataaaggtcatacttgcccaacctccttgatttctttagagacaaacatgattaagcctattgaccaatcattaagctaaagatttgtactgcttctaaatgagcttccctcatctcatcaagtactattcttttctagtaactaggaagccttaattttagccaagatactttctgccaagtaaccgtgatcctaagaataatttgtc

SEQ ID NO: 546861 - DNA, 1761 bp, Homo sapiens
ggtagtcctagtagctattacatcacctggaagtagccacactaataggataataggattcggaacaatgcctggtagtgttggctggacatggcagctcacgcctgtaatctcagcacttggggaggacaagctgggtgaatcatttgagcccaggagtttgagacgagcctcggcaacatagtgaaaccctgtgtctacagaaaaataaaagaattagctgggcatggtggtgtgtgcctgtacccctagctacgtgggaagctgaggtgggagtatgaactgagcccgggaggtcgaggctgcaatgaactatgactgtgccactgtactccagcgtgggcaacaaagcaagaccccgtctcaaaataaaaaaaaaaaaattgttgaacctgaggtcaagatatgattggcccctattctggccatctatttgtttttttcccaactttaggctcttttggattacagatctgagttctcagtgggggagatttcctatagaagaaaaagggacccagagaatttgactctaattcatcctactcactttgtgaacttcatgccagtgggctggtgaaaaagaaaggcgttactacactgatggaggtaaatgactctaatcactctaagacactagggctggtgccacacagcagaggtgaggaggagagaagtcaatggggtatctcttagtactcgcaagaccagttgyaattagagaatccatggccctacaaaggcaaggcaactaaaaggtgagatgagggcctgggccacccagcaccaagcaaattcgactagctgaagagcaggctgagagttatgcatacctaaaatgggcaggagaacataaataccaattatagccttgagacttggtccagtaagaaaaatagcttgttctactaactctcttgaataaagtccttgttagaaactatagctgactatcttcttagaagggactctttcatgaattagacttaacagcaggtacaagttacactgaggggttcaaggaatagactcaattttgtcctcttactctctattttaaaaatcctttcggtctggaagtggtggctcacacctgtaacctcagcactttgggagaccaaggcaggaggactgcttgagaccaggagttcaagactaggctgggcaacatagcaagaccctgtgtctaaaaaaaaaaaaatagctagttgtggtggcacccatttgtgatcccagctactagggaggctggtgcagaaggatcacttcagtctaggagttccaggctgcaatgagctatgattacactactacagtccagcctgggtgacagagtgagaccctctccctcaaaaaaaaaaaaaaaaagaaagaaaagaaagaaagaaaaatccttctggctctaccttttacttgagctgctgctgtggtcaacacttccaggcagccctgagtagctttatggtggcgcagctggcatcactttgcctcaacccatgcctcctatttcttgcttcctgtcctggggattctctggcaccacagccagcaggtttagctgcttaccaatgcttgagctaattagaaatgaaggctaataaccatgggacccatatttatcagccaagtacaggagctgataaataatttcctctttcacccattagagtgggcacttctgagatgcatttcataagactccatagacgttgcaaacaagattgagctccagccacttagagtgactgccaacttgataag

SEQ ID NO: 546862 - DNA, 481 bp, Homo sapiens
agtgcagtggtgtgatcttggctcactgcaacctctgcctcccgggttcaagtgattctcctgcctcagcctccctagaagctgggattacaggcacacatcaccatgccctgctagtttttgtgtttttagtagagacagagttttaccatgttggccaggctggtcttgtactcctgacgtcaggtgatccacctgccttggcctcctgaagtgttgggattatagacgtaagcsactgcgcctggccagtcctctcctttagaatggagaatattttcctaggtatagattcttctaaaactgacagcgcctctcaattttcacatacatacatatcacctgcaaatgttgtaaaaaatgtacactttaattaggaaggcctggatagggcctgagattctgcatttctttctttcttttttttttttagacggagtttcactcttgtcacccaggctggagtgcaatggtgtgatct

SEQ ID NO: 546863 - DNA, 481 bp, Homo sapiens
agtgcagtggtgtgatcttggctcactgcaacctctgcctcccgggttcaagtgattctcctgcctcagcctccctagaagctgggattacaggcacacatcaccatgccctgctagtttttgtgtttttagtagagacagagttttaccatgttggccaggctggtcttgtactcctgacgtcaggtgatccacctgccttggcctcctgaagtgttgggattatagacgtaagccactgcgcctggccagtcctctccttkagaatggagaatattttcctaggtatagattcttctaaaactgacagcgcctctcaattttcacatacatacatatcacctgcaaatgttgtaaaaaatgtacactttaattaggaaggcctggatagggcctgagattctgcatttctttctttcttttttttttttagacggagtttcactcttgtcacccaggctggagtgcaatggtgtgatct

SEQ ID NO: 546864 - DNA, 542 bp, Homo sapiens
ccacacccagctaattttttgtatttttagtagagacagggttgggtttcgccatgttggccaggctggtctcaaactcttgacctcaagtgatctgcctgcctcagcctcccaaaatgctgggattgtatacaggtgtgagccaccatgcccagccttaccctgttataatcttcttagcactgaccactactagatgccataccatatgtccactggttggtttgttcattttatgcttacagtctagcagcctgggctgcaaagacctggagagcaaagagttggccttctgttgtacactgctgtatcatcagcttctaaaatcatgtgtgacacagagcagggggtcaatatatatccactgaatggctataaagtgtctagaaatatttacattagactaattgtaactgatyaccttcatgagtggagtaaggatggaaatggtagaagttttaatgtatactcctgtgcaatttgattgatataatcaaatttattgctgcttatgcagcaacaacatcttgggagcaaattca

SEQ ID NO: 546865 - DNA, 921 bp, Homo sapiens
tttttaaaatgaaatataaaaatagcaaataaaattccataaaagattatttatgtgcagcttgtatttagaatataaactctaatggtcaaatacgtaaacagtaaggaaagagatatatagtcaatgtaggtgttcagtaaaacaaactgtaatgccacccatggatacagcttatgaattaaggaataattctggcataaaataaatctaacgttttggagaagcagcacatcagagcataagggaatctcactcatttgactcaaggaaacatgacaattatttccctccgattttatacaataaactcacagattataaatttgtggaaatttcctattggtaggcattctgaaaaatcaacaaaatacctgaagaagagcactcatttgccacttcctcttggatcattataagaacattctttcagcatcttgacagtaaacagcaaacagggtaacacaacccaagagagttcatgcctagaagaaaaccccaacattttatttaaatgatgacattgcaaagaaaactcagctgaaatgacacacatgctttttacaggacttggcagacagaacactaaacaactaggttctgactctgacttagccacagatcttccgtggagctacatgggaaaataagaagccctaatgtcagctctctgactttatctctaaataaagaagtaattttgaaggtgtggcttgtaggtacattgttctatatttttaaaacaaattctaggctctacatttttttttatttttttgagactgagtcttgctctgtcacccaggctggaatgcagtggcacaatctcagctcactgcaacctccgcctcccaggttcaagcaattctcctgcctcaccctcctgagtagctgggattacaggtgtrtgccaccacacct

SEQ ID NO: 546866 - DNA, 630 bp, Homo sapiens
caaaactaataaaatagacaatattgggcaataatgataatgtaaaaaatgagaaagcacaaataatatcggggataaaaatgtgaagagtgtcagagatgcaagaatcataacactttataacaccttatgcctgtgaatttgaaaacaactttaaaatgctgttgtataaaaatataaacaaaatatatttattatatattattatatataatatgttatattttatatattatattattaaaaatataaacaaaatatatttaatttgatgacatcaaattaaatatattaaattaaatatattaaaatttatattatattatatattacmtatattaaaataaatatattaaattaaatagtgtgatatattagggtatggaaggattggacagtaatgggtgtggtttgagccgtatttaaagtgttcaatttattttggtgcaaaatacattagaagcaaaaaatgtaatgaattttatttttcttttcaatttttcaaaggtctaatggttccattttcatgtcttgcttttctgtcatattctttgatatttttgttccatggaatttatatcttttgaaattccttaagttactagtactgcctaaaattatttttcaaaa

SEQ ID NO: 546867 - DNA, 1081 bp, Homo sapiens
cattttaatttggcagaggaaggaatagaaagagcagcttggaaattatcaagtgaattctgtcagccacaaggggagggaatttcaagagcaatgaaatgaccaagccaaccaaatgccagaaagagcaaggcagaaccagagtgtgcacctgcactgggcgggtttgggtgctgtgttattttgtttgtttttttaattaattttgtttctaatcaacacatagtaattgtaagaataagttctggtgttctattaccttgcagcgtgacgctagctaataataatgtagtatatatattccaagacgcctacaagagggatcttgaatgggtgccttttgagaattaattttagtaagagtagtggcagaaggtagataaaatatgttaatttttagattatagtcaagataaaaaatttcagaattatttgaaattggcatttgttttgagagaagtattttaaaaatcaacgtaaaatatcttctcggaagagagtccaagttttccagatataaagaaagcaagctggcaaagtaattctgccctaaatttttgtttgaattgaggggctttaaaattgggtaatttcaaaggtgcctaatccagtgaacaccgctcaatcttatcactgcattatagttctctcaaaaggaagagcccaccccagaaaacacattttgcattgattttaacgttaatgcttgaaagagttcatgcccacagacaaacattcttctgtatcagagggccacgtggtccaaggctgcgtccctgagaaagagaagaattcacttcgtcgaagaggaagactcgctagacagcctttccaggttgctccccatccaactattcagtcctctatgttgtttgaaaaaaaaaaaaacagcaaaagccttgtgccgccagggcaggggagctgctccgagttctrcctctgtggggtccttcaggagcccgtgctgggagcttcccgtccacacccactggatattaggcactacccaatctgttggtgtaggcttatgccagcctcctgaagtggagagagagagattgcccacacaattttgggcgga

SEQ ID NO: 546868 - DNA, 1063 bp, Homo sapiens
gtcataatgaattattattattatttatatttgaaaaatattgagattattctatgcaacttcattctttttacatagcagaatgttttggggctttttccagaaaagaacatatagtagttttgtattctttttaatgaggcaactcactttattacattaatgtgccatatagaatctaagaggacatcaggaaaactaggtggcatttctgacccaccagagcataaggcacttttgtgtaaattagaaaatgtactccttgtaggtggctatgtcctctggtgcatgtctggattagcaaaccctgagctatatttcagctcccactgacctccctgctggaaatttgtaggagagaataatctatacaataattaacaaagccctgtggcaatgccaaagggatgtttgaaattttctgtagagctcagaagagtatataaactttgagctatagattttagtttcttttctacagaagtcatggttgaattcctggatgtctggggagaatagatgagcgatcaatgaaagagattatataaagaaaagatattaggaggtgataactccaaacccatccgtgagaataagacaagtggtggtggtgggaggaggagagagagaaagagagagagagagagaaagagactctatatataataatgatagatagatgagagaataaagcatattaaaatcatataatgatgatagaataaactgtatggtcttttcagattctacatatgcatatatgcgtatgtatgaatatatcaagatatcattcacaatctaaatctcttctcttaattmtccgttctgaatttgggaattgaattaattcagaaaaaaatgtttggataagattttatatctaaactgtcactgtaacaaggagaaactcaagaaccaagcagattatcataatatagcacccttactcttcaagatggcaatatgaactcagaaaacaaatagatttgaatgttaagggacacttgtaaatacattttaaatttaatttaaaatctgaaacgttgctgggtgaggtggctca

SEQ ID NO: 546869 - DNA, 869 bp, Homo sapiens
tgatttttttccaatcaataaaaagtgtaaaaattggccgggcatggtggctcatgcctgtaatcccagcactttgggaggccgaggtgggcagatcacctgaggtcacgagttcgagaccagcctgaccaacatggagaaaccctgtctatattaaaaatacaaaattagctgggtgtggtggggcctacctgtaatcccagctactcgggaggctgaggcaggagaatygcttgaatgcaggaggcagaggttgcggtgagcccagattgcaccattgcactccagccggggcaacaagagcaaaactccgtctcaaaaaaaaaaaaaaaaaaaagtgtaaaaaccattcttagttcatgagctatacaaaaatagatagtgagttagatttggcccatggggcttattttgctgactcctgctctaagcatcttgcagacatttcttcatatgccctaggagatttctgatatcccctcataataccctggccttacaccaagactacaatctgttctttgcagatgcttaataaattcattcttccctgtcattcagttgatctgtgtgagccagtggaaatacttgggccaataaatctagtgtgtttgagggtaaaatatgctatttttgtaagatatattatttaatggccacacaacctaaattcaattaaatggttacaacctgtaacgcatttaaaatatgactaggcagaatttgcttcctactaaagacatttattcgattgaggagcatccaacagttgatgttgatccccccatcctgccccactgttctactttgcaatttgtttgaaagaaattgtcaatatatttctgacttctgagcaaatccatgaatcg

SEQ ID NO: 546870 - DNA, 546 bp, Homo sapiens
gtagagtacagttcatccatgtgaaaatctgatacccataaggctgccaaaatcccaggatgccacaagggcaggctgaggaggctgaacccatgtaagggtaaaggttgctcactgccgggctgacttcctctccttttctgatattaacatgcattcctgagagagaccctctttgacttaagcaccaatcattctgtttgagaggtggggtgggcagaaaggggaggaataagatcctggagggaattctgcacagatgaagcaaattctctcctctctccctgcagtggagggtggaatggtaccgagttgtggcactatcttggggatcccagggggagagcatgtggctgcccctattcttggccactgayttcaagaagtttaccttttccactggccaaggtcctttagatcttgggcatttctggaaagtgttctcagcctgaagggatgaacatgatcaacctgaaaagcattcattacctcagagctcagagtatgcccttgagggaagggcatcattagtggcaagaatttaaa

SEQ ID NO: 546871 - DNA, 566 bp, Homo sapiens
acacacatggatggcctggaaaccgatcttgcccagatcccaggggactgagtgccacagtttcccacttgttaagtcaaagccgtgtttcctycatagcccactgaggaccccaccctgcatttctgctggaaggagcctcatgtaggctgtcctcgtgccccaggcccaggcagccaagggcagcttggatgtgccaagttacagggaagggacatactttccgccaccacctcctcttcggtttcctctgcaccatcatcaaattctcctacttccacctggacaggattagctcccacagatacctggaattgagggagaagaatgggtgaaatggccccactcccatcccagacccataagggtagctgaagggttccaggtcacagaaagcacaaacgcagggttgggaatccagatttaatctataggcctgctgtgttttgcagtatgcctgggattctgttgagctgccttagaggtcaccaggggtgttagggaaagagagtgtgaaaggaaaatataccttggaccccaaaatcactaagctaaggggaaaagtc

SEQ ID NO: 546872 - DNA, 566 bp, Homo sapiens
acacacatggatggcctggaaaccgatcttgcccagatcccaggggactgagtgccacagtttcccacttgttaagtcaaagccgtgtttccttcatagcccactgaggaccccaccctgcatttctgctggaaggagcctcatgtaggctgtcctcgtgccccaggcccaggcagccaagggcagcttrgatgtgccaagttacagggaagggacatactttccgccaccacctcctcttcggtttcctctgcaccatcatcaaattctcctacttccacctggacaggattagctcccacagatacctggaattgagggagaagaatgggtgaaatggccccactcccatcccagacccataagggtagctgaagggttccaggtcacagaaagcacaaacgcagggttgggaatccagatttaatctataggcctgctgtgttttgcagtatgcctgggattctgttgagctgccttagaggtcaccaggggtgttagggaaagagagtgtgaaaggaaaatataccttggaccccaaaatcactaagctaaggggaaaagtc

SEQ ID NO: 546873 - DNA, 602 bp, Homo sapiens
gtatgttgatttagtatgacacttcctattcatggagtaatattgtttatttagttctagtttcttggctatctcattgtcctcacttatatatatgcaaaaaggtggaccctatcttgattttgaccttgtcrgtaaagcacgggctagcaaaatgccgtttttcagtccattctggctgctgtaacaaaataccatagactgggtggttcataaacaatagagatttatttctcacattctagagactggagagtccaaggtcaaggtgccagcagatttggtgtcaggtgagaactagcttcctcagacgaccttctcactctaacctcatgtggcagaagagggcgagaggttgctcctgggcctcttttacaagcgctctagtaacattcatagggttctgcccccatgacctagtcacctcccaaaggcctcgcatcctaatacaatcaccttgtgggtaagaatttcaacataggaatccagaccatagcagccctagagaaactctgtaaacaaatattacttattgatgatttttagttgctgcctatgccatggtaaatagttcatttatgaaatctcagggcaactctttg

SEQ ID NO: 546874 - DNA, 523 bp, Homo sapiens
aggctgaggtgggagaattgctagaacccaggaggcagaggttgaggttgcagtgagctgagatcacaccactgcaatccagcctgggcaacagagcaagactccatctcaaaacaaaaaccaaaagaacaaacaaaacacaaaaaaccaaaagaacaaacaaaacacaaaaaaccaaaaacagtaagttggtgtaagagggataccgtaagttcttcttgggacctaagcaagtacttacaatcactaaagggaggctctactaaagaataaaaccaatcatttctttttgccttttgtgatagttaattttatgtgtcagtttagccattgatgccatttaacgrgttaaacatttgtctctctccagaagagatttgtattgaattggagattgctctgctttgatgtgagtggacatcatctaatcagttaagggcctatatagaactgccagagctaagacatccatattcttctaacctcggactaggacaccactgtgttcctggtcactgaaatt

SEQ ID NO: 546875 - DNA, 558 bp, Homo sapiens
aagtaaaaaaaagagcctacaggactgctgaagatgaagtctcaactggtacaaccacagtggagaacaattttgcactatctaataaaatcaaaaacactctgatgaaaatctagcagttctcttctaggtacatatacaaaagaaactcacccaagacaaaacaaactcacacaagacaaaaacaaataactgccaccctatctgtaaagtataacattgataacaatctacatgtccatcaaataaggaatggatattaagttgtggtttattcrcattagggaaacttctatacctaagacaaccatatgagagcacttttaagattgaaaacaactactattaatagtgtcaggttaactgaagtgaatcaggactgtccctggcaaaccaagacatatgtcaccctatttatgcctgccagaaagcgagcacataactcaaaaacattattaaaaagaaaaatcagttgccaaatatgtactgtgtgataacgttacatatatttaaaagtgtttttagtatacacaaataccagataccgtacatagatac

SEQ ID NO: 546876 - DNA, 535 bp, Homo sapiens
tttyttttttcttttttttttttattgatcattcttgggtgtttctcgcaaagggggatttggcagggtcataggacaatagtggagggaaggtcagcagataaacaagtgaacaaaggtctctggttttcctaggcagaggaccctgcggccttccgcagtgtttgtgtccctgggtacttgagattagggagtggtgatgactcttaacgagcatgctgccttcaagcatctgtttaacaaagcacatcttgcaccgcccttaatccatttaaccctgagtggacacagcacatgtttcagagagcacagggttgggggtaaggtcataggtcaacaggatcccaaggcagaagaatttttcttagtacagaacaaaatgaagtctcccatgtctacctctttctacacagacacagcaaccatccgatttctcaatcttttccccacctttcccccttttctattccacaaaactgccattgtcatcatggcccgttctcaatgagctgttgggtacacctcccagacgggg

SEQ ID NO: 546877 - DNA, 535 bp, Homo sapiens
tttcttttttmttttttttttttattgatcattcttgggtgtttctcgcaaagggggatttggcagggtcataggacaatagtggagggaaggtcagcagataaacaagtgaacaaaggtctctggttttcctaggcagaggaccctgcggccttccgcagtgtttgtgtccctgggtacttgagattagggagtggtgatgactcttaacgagcatgctgccttcaagcatctgtttaacaaagcacatcttgcaccgcccttaatccatttaaccctgagtggacacagcacatgtttcagagagcacagggttgggggtaaggtcataggtcaacaggatcccaaggcagaagaatttttcttagtacagaacaaaatgaagtctcccatgtctacctctttctacacagacacagcaaccatccgatttctcaatcttttccccacctttcccccttttctattccacaaaactgccattgtcatcatggcccgttctcaatgagctgttgggtacacctcccagacgggg

SEQ ID NO: 546878 - DNA, 618 bp, Homo sapiens
ataagactgttacccttttcccagtgggcagcatggctgactatccttttttttgcctttacgtgaggcagtagtgccctggaattgatagcggtggtgtgtatgtgtgtgttttcttgagtgtgsgggagtatataggaatctcacagtaggatggaatgactttggggtacgtgaatgtgggaattatcgtcagccctgggttctcatgccttctttcttttccatgaggtctttacagggacccagtctgccttcaagaaaagacagaagtagaaagggtggtggctgactgtctgacaaattgttatcaggtatgcaggaagtatatccttctccaaaatatcatacttgcatcaccaggtagacacatttccttctacacagaattatcttcagagcttcttaaagcaaataaagcctccttcaaggactgagtccctagtcgaattcccggaaggagtggagcctgtcatattggtgagggtttgccttgaatgtcatcccagtatttcaatattgattaattagtcttccctcatggtcccaactgcatagtttttattttgttgagtgttctgacacatggtaagggacatgaaagtatcctttgagata

SEQ ID NO: 546879 - DNA, 618 bp, Homo sapiens
ataagactgttacccttttcccagtgggcagcatggctgactatccttttttttgcctttacgtgaggcagtagtgccctggaattgatagcggtggtgtgtatgtgtgtgttttcttgagtgtgcgggagtatatrggaatctcacagtaggatggaatgactttggggtacgtgaatgtgggaattatcgtcagccctgggttctcatgccttctttcttttccatgaggtctttacagggacccagtctgccttcaagaaaagacagaagtagaaagggtggtggctgactgtctgacaaattgttatcaggtatgcaggaagtatatccttctccaaaatatcatacttgcatcaccaggtagacacatttccttctacacagaattatcttcagagcttcttaaagcaaataaagcctccttcaaggactgagtccctagtcgaattcccggaaggagtggagcctgtcatattggtgagggtttgccttgaatgtcatcccagtatttcaatattgattaattagtcttccctcatggtcccaactgcatagtttttattttgttgagtgttctgacacatggtaagggacatgaaagtatcctttgagata

SEQ ID NO: 546880 - DNA, 618 bp, Homo sapiens
ataagactgttacccttttcccagtgggcagcatggctgactatccttttttttgcctttacgtgaggcagtagtgccctggaattgatagcggtggtgtgtatgtgtgtgttttcttgagtgtgcgggagtatataggaatctcacagtaggatggaatgactttggggtacgtgaatgtgggaattatcgtcagccctgggttctcatgccttctttcttttccatgaggtctttacagggacccagtctgccttcaagaaaagacagaagtagaaagggtggtggctgactgtctgacaaattgttatcaggtatgcaggaagtatatccttctccaaaatatcatacttgcatcaccaggtagacacatttccttctacacagaattatcttcagagcttcttaaagcaaataaagcctscttcaaggactgagtccctagtcgaattcccggaaggagtggagcctgtcatattggtgagggtttgccttgaatgtcatcccagtatttcaatattgattaattagtcttccctcatggtcccaactgcatagtttttattttgttgagtgttctgacacatggtaagggacatgaaagtatcctttgagata

SEQ ID NO: 546881 - DNA, 1354 bp, Homo sapiens
tgcatcgctcactatggcaacaagaagagctgctgtgcattccacctgttacgagggagccccttctagggtcctcaagatttttgtgaaaacaactggttttgttgcatgctacatttatcactgtgactgagattcatcttgtctacaacagtttcttatattagccacagctaatataagacacatttgacatcttagcaagtaactggcatttagatgcaaggtttaagcccattggaatggtaccttggaatcgttacccaaagaaaataggataaacatggcagctacagtcaaagaactcactggggttggcattagtgggtgagggttgaatcaactacacccttcctgcagagaaagcaggtctattccgagaaatgatggcaagatgttggggaaaaacaaatttcagtgttacggacaagcagattacactaaaaagacacgagtgaacaggaacaaaaagaaattgtatcaatacggacacccaytggggattacagaatagactggatggacttggaggattacccactctcttaatgaaggaaccatggtttggattgattatactaaattgatgggaggccattgtatgacatgaccaacccaaatgaaatctgtgggaccaggtgctatgtaatctgtttttaaagaaatgggatcttgctatgttggcccaggctggagtgcagtggctattcaaaggtgggatctgtgcacggtatagccttaaaatcaaagcaccctcccgccccggcccctgcagtaactgggactgtgtgccccatgatgcctggccaagtcaactatctttgaaatgggtcatcaggacaaggtggctcacacctgtaggatcgcttgagctcaggagttgagaccgtcctgagcaacagagaccccatctctaccaaaaattaaaagctgaaccaagtgttgtgtcacgccccatgtaatcccaactacttgggaggctgactcaggaagaccacttgaggccggacacagtggctcacgcctgtaataccagcactttgggaagccagggaggcaaatcacttgaagtcaggagttgagaacagcccagcaaacatggtgtaaccccatctctgctaaaaatacaaaaattagcatgacatggtggtgggcgcctgtaatcccagctacatgggaggctgaggtggcagaactgctggaacctgggagatggaggttgcagtgagtggagattgtcctactgcactccagcctgggtcacagagccagattccatctctaaatgaatgaatgaataaataaataaataaataaataaataaataaataaataaatagagggtctcttggg

SEQ ID NO: 546882 - DNA, 1354 bp, Homo sapiens
tgcatcgctcactatggcaacaagaagagctgctgtgcattccacctgttacgagggagccccttctagggtcctcaagatttttgtgaaaacaactggttttgttgcatgctacatttatcactgtgactgagattcatcttgtctacaacagtttcttatattagccacagctaatataagacacatttgacatcttagcaagtaactggcatttagatgcaaggtttaagcccattggaatggtaccttggaatcgttacccaaagaaaataggataaacatggcagctacagtcaaagaactcactggggttggcattagtgggtgagggttgaatcaactacacccttcctgcagagaaagcaggtctattccgagaaatgatggcaagatgttggggaaaaacaaatttcagtgttacggacaagcagattacactaaaaagacacgagtgaacaggaacaaaaagaaattgtatcaatacggacacccactggggattacagaatagactggatggacttggaggattacccactctcttaatgaaggaaccatggtttggattgattatactaaattgatgggaggccattgtatgacatgaccaacccaaatgaaatctgtgggaccaggtgctatgtaatctgtttttaaagaaatgggatcttgctatgttggcccaggctggagtgcagtggctattcaaaggtgggatctgtgcacggtatagccttaaaatcaaagcaccctcccgccccggcccctgcagtaactgggactgtgtgccccatgatgcctggccaagtcaactatctttgaaatgggtcatcaggacaaggtggctcacacctgtaggatcgcttgagctcaggagttgagaccgtcctgagcaacagagaccccatctctaccaaaaattaaaagctgaaccaagtgttgtgtcacgccccatgtaatcccaactacttgggaggctgactcaggaagaccacttgaggccggacacagtggctcacgcctgtaataccagcactttgggaagccagggaggcaratcacttgaagtcaggagttgagaacagcccagcaaacatggtgtaaccccatctctgctaaaaatacaaaaattagcatgacatggtggtgggcgcctgtaatcccagctacatgggaggctgaggtggcagaactgctggaacctgggagatggaggttgcagtgagtggagattgtcctactgcactccagcctgggtcacagagccagattccatctctaaatgaatgaatgaataaataaataaataaataaataaataaataaataaataaatagagggtctcttggg

SEQ ID NO: 546883 - DNA, 657 bp, Homo sapiens
gatttgttttttgtttctttgaaaccaggtctcccaggctacagtacagtggcaccatcatagctcactgcagtcttgacttcctgaactcaagcaatccccctacctcagcctcctgagtagctggggctacaggcacacgccaccctgcccagctaatttttgtatttcttgtagagacagggtctccctatgttgcccaggcgggtcscaaacgcctgggctcgagctatctctcgctttggcctcccaaagtgctgggattacaggtgtgagccactgtgcccagcccatcaagatttttttactgttaggggtgtgagactctccaaaccagaagccaacaatgtgagccatccttgcttgaatgccccagggagaggcccttggctaagcacctgacgtgtacgagacatgtttataattgggcaaagcacaaaaaactataaaaaggtgccccttccttaaggcacaacatctacttgttggacacgtgtcatagtgtatggattttgttagatgaagtcactttggaaactcgctcataaccaatgtgaaatctggggtgcctatagtgcacacagagtcccttcagccataggctccttccacatcacacatgggatggccctgagaggaggtcactgccaccgcact

SEQ ID NO: 546884 - DNA, 637 bp, Homo sapiens
tgggaaataactaaaattcctactacaggttcgccccctgccggagggcatcttgcaaacccaattcttccgtaaagcaaacgtctgcgccccccggccggcgcaggcgcactcacgatcgcgggcaggtccgccgagcgcagctcccccttgcggagctccagggcgtgtgcggcctcttctgggcatgcgcagaaccgctctatgtccagctgagggagtgcgctgtagccctcgcgcgcatactcgtacaggaggttccggtttcgtttctctgtagtgaaacttctccttggactatcgttggagatgcagcctccccggggccggaacccccgacgagtcagcaaaggccacaagcgccgcgccatggacgcagccatcttggaccgggracaaggcggcacttcgtcccgcccactccgcgtttagaccaattgcaaggcagcgaacctgaccgtgacgagccaatcagatcctgaggaaagttgaccgcgatagagtccttcgtcgcccaatcgtcgtctgtgtcccgcctcttcagtgacgcgaggcagaaccagccaatccctgcacggatagcgcccggaagaggctagaagctggattcagcgtgtccgcgacctcacctttaggt

SEQ ID NO: 546885 - DNA, 596 bp, Homo sapiens
ggaacgacaacatgttttacgacttgagattatctgtttagtgaccttgcagctgcacagctagagaaayagtcttcacaatgcctgggaaagggagagataaggctcactagctacagaaaaataggcagtcaatttttaaaggacttcagatctttctcttcctcagggggaactggtttttcttacatacaactgagtttttgcttatacatttttaaaatttcttttaattcctgttccactataagtactcaaatccagctggctgaatgaaaatatttctttgcagaagtattaatttcaacttgtttgtgtaatatttatcacaggctcagttcttcctttttctctctctcacatttcatggatctaggagattactaggaagttagagctcaggcctgaggaggaacgtatggcaacttacacctctacaaaatttgtataccaggagagggtttattacgcgtttacttgagactttgggaagactcgggtaggctggctaggggttttcactgaggttagggagtgggctagtgtgggagttcaagcatacaagcaggggctaatgtggattgaatgtctcacca

SEQ ID NO: 546886 - DNA, 273 bp, Homo sapiens
tgggaaagccttcatcaagaagtgtcggctcatttatcatcaacgaactcatacaggagagaaaccccatggatgcagtgtatgtgggaaggccttctctacaaagttcagtctcactacacatcagaaaactcatacaggagaaaaaccttatatatgtagtgaatgtggaaaaggcttcattgagaagaggcgtcttaytgcacatcatcgaactcatactggtgagaaaccctttatatgcaataaatgtgggaaaggcttcaccttgaa

SEQ ID NO: 546887 - DNA, 1868 bp, Homo sapiens
tgtgaaatcaaccagtgatctccagctacagtgcagaagaaacagaaaggaatggttaatgtaacaatctggatccacatttcagttctgggcaattatcccgcaaatcctgtcaggtgataggagtaactagagtacccataacctggaggtttctatgtttgggaaaataagaacaatggagctaacgaaatccaagccccatgcacccaaatcttagcaggcataactatagccacctgttatctgggtgtgtcagcagccttaggatttttgtgctgtcattaccctcttgtttcattttaatacatgtcttccaataacccagtttgtcttttcttgcattcaggccattaaactccaaatggccatgcaactggagcctcagatgatggccacgttttactggagacccttacataggcctctgagggagatctgactgctgacttgccaaaacagtgccccctgtcagcagacagcagttaagattagtcatcrttcttatcattatctttattctaatggcagttagatgtacttctttagcttaacatcagcataatgtaggaacaaaatctttaaaaatttaagcaaacgaaaacctacaccaaaaaaaaaaactaacatccacgaatgcatacatattgatctttgtgttggcagagtctgaagcagaacattgggtgaagttgatgcagttattttgaccacattggcatactgataaaattatttatatttgaataaaatatgtctacatcctataaatactgctttgtactgtaaataataaatgtaagatctctatccttaagaggattctaattctcaactcaatatatatagaaacccattcctctggttcctccaaactgaagcctccttaaggctcaaatataaagtgagagggattcaacaacagagcatgtgaaacaaaaaggatgaggtaggatggtcaactctaaggcccagattgccatggtgaccccaatataataatatcaactattaagctcactagctaaaaataaacataaaaagctgaaaataccatggcttaaatttgatgggactgagtctctagaactgtagacagttatactaaaagaattgagccagaatgacatgtatctaaggattattaaagagaatgtttaaaagcacataagtatttgttccaaatctcattagagtagcaatattcttttctgtaatgtcagcttccccaagctagggatgccatagactaagacaagtgcctaatatgttgcaggcaattattttctacatttaatgaacttgcaataagtttgtaaaatatattggcttctgtttcacgtataaatctcactgaaaggcactatccagtagctatttttctgagtcatttttgggattttctgttgcttgagtcccaactaacgttatttgaatcttagtgatttctttttctttttctttttctttttgagatggatttttgctcttgttgcccaggctggagtacagtggtgcgatcttggctcaccacaacctccacctcccaggttcaaatgatgctcctgcctcagcctcccgagtagctgggactacaggcaggtgccaccacgctgggctaattgtgtatttttagtagagtcagggtttctccatattggtcaggctggtctcgaactcctgacctcaggtgatctgcctgccttggcctcccaaagtgctaggattacagacatgagccaccatgcctggccgaatcttagtgatttctaaagccacagatgtaataacagaaagagaacaaaaatgaagccaagttaccccaacagttcatgtataatatattttgttttacggatgaaccaaaa

SEQ ID NO: 546888 - DNA, 515 bp, Homo sapiens
agatttagctttgcaagataaaaacacttcagcaattatgttgcataacaatgtcaatataactaaaaaataaaccagaatatttgaaaatattttattataaattattatgtgtttttgacaagtaaaaatgaacaatagtagctagaagagaaatttagttatgagtttagtttttcgagatggagtttcactcgtcacccagctggagtgcaatggcgcgatcttggctcactgcaatctccacctcctgggttcaagcaattctcctgtctcggcttcctgagtagctggattacaggcgcccaccaccatgcctggctaatttttttgtattttcagtagagayggggtttcaccactttggccaggctggtctcaaactgctgacctaaggttatccacccacgtcgccctcccaaactgctgggattacaggtgtgagccaccacaccctgtcggtagtttttaaattatcttcaaagccaaaagtatttctttcacagaaaaataat

SEQ ID NO: 546889 - DNA, 647 bp, Homo sapiens
ttctgtagagtaagaaaactctcttccctcaccgaggtcacttataacaatagaggatcccctgagatgaaggaaagaatcaggttttctttttattctagaaggtgataactaccaagaaatctccacttcacttaagtccttttattcttctgataagctcaagagtttgccatcattgtgcccagccactgctgtcttcagcaaagcacagtggaggagatttcagtttccagaggggacagacacagcccctgtcagtgagaaccccctgacccaacaacactccaaacaaattactgggttgtctaaaaagtagaaggaaccaaccactgctggaatactctgctttcttcacgccacaaagcagaaatttctgcttaaagggagattcatttgaaagaaacctcaagcatatttttttcatgtcttgggaggttgytgtttcataaaatgcatgcatgtcatacgactccgcagaaattcattcaacacactgggtccatcagtacttactgctgtgtatgaatatcatgaagaatgtatatcattcctgtatcatgagctactctaggccctgggctacctaactggacaaaacagacaccattcctgccctcatagaacctgcattctagtggggagat

SEQ ID NO: 546890 - DNA, 603 bp, Homo sapiens
tactgtggcactgactatggcagcagtgggaagaaaggggagggaataacttaaatgcccgccaattggggaatggctaaaaatacatacaaaataccaggccatatctattttatggcctgttatacttcttcttatattttttaatttttttgctagagatagggtcttactatgttgtccaggcttgttcttgaactcctggtctcaaagaatcctccctctcagcttttcaaagtgctgggattatagacgtgagccaccatgaccagtggctatgttacayggacaggaacagggctaagagaaatctgagtcaaaccctgtctctactaaaactacaaaaaattatccgggcatgatggtgcatgcctgtaatcccagctactcgggaggctgaggcaggagaatcgcttgaacctgggagacgaaggttgcagtgagctgagattgtgccactgcactccagcctgggtgacagagcaagacttgatctcaaaataaaaaaccaaacaacaacaataacgcaaaaataaggttatcttgaagccacatggttgaaagaaaaaagcaaactgcagaattatagggtagtgctgttta

SEQ ID NO: 546891 - DNA, 603 bp, Homo sapiens
tactgtggcactgactatggcagcagtgggaagaaaggggagggaataacttaaatgcccgccaattggggaatggctaaaaatacatacaaaataccaggccatatctattttatggcctgttatacttcttcttatattttttaatttttttgctagagatagggtcttactatgttgtccaggcttgttcttgaactcctggtctcaaagaatcctccctctcagcttttcaaagtgctgggattatagacgtgagccaccatgaccagtggctatgttacacggacaggaacagggctaagagaaatctgagtcaaaccctgtctctactaaaactacaaaaaattatccgggcatgatggtgcatgcctgtaatcccagctactcgggaggctgaggcaggagaatcgcttgaacctgggagacgaaggttgcagtgagctgagattgtgccactgcactccagcctgggtgacagagcaagacttgatctcaaaataaaaaaccaaacaacaacaayaacgcaaaaataaggttatcttgaagccacatggttgaaagaaaaaagcaaactgcagaattatagggtagtgctgttta

SEQ ID NO: 546892 - DNA, 586 bp, Homo sapiens
tgaatttctggaactgaaaaagacaatatctgacatgaaaaacccctctttagaaaacagaataagtgagctggaatacaggtcaacaggaaacattcaaactccatcatatgaaaaatagaggggaaagagaggagaaaagcagataaggacatgaaaaagttgtgggatatgctcaaaaggtctaacataggtgtaattaaagtcccagatgggaggagagaatggtcacctatcttccaaaaactgaacaaagactgccccttctgcatggaatctatcagatcactggaagccaacaggccaactgctagaactacaaaaataacagtaaaaaagagaataatcttaattcattctactactataaaaattatggaggctcttttgtggtaaagagaaaaccatggttttttatgtaggaagatyagcaattaaagtatttacagacattctgaacacacatataatttaaaatttgtttttgctgatagtgtctttgcagaaaaataccagaattcaaacctctagtcatttagaaaaagaagtaattataggacagggcagaggcaggcataaaggcaag

SEQ ID NO: 546893 - DNA, 2953 bp, Homo sapiens
gtcagtgagtgacatctggtacagaatgatacaaacaaaccagctcagaagaccaaaatcatcatcagtcaatgacaatgacttttacgaggtggactctcacagtgctctggttactcctgtttttcacttggggagaggagcctcagagctgcaaagtcctttctccaaagacacacagtgagagctggggtttccaccctgggtctgatgcctccacaacttgtaaacatttcagaaaattctctctggaagccagagtggagtgtgtgcagaggagaggagataaggaggaggatggggcagcagtccaggagagaggatggagaggagtggagcagatgaagtgcttaatagaagagaggttgcccagcaatgggagggatgggggaggaaggtggctgacgctggagtatggtttctgggtagggaggctgcatggtctgaagactttccttccatgtcataagcgtggtcttttcatgtgggatacgttgtccagtaaagttcctcattgtccaggtgattctgtgttctccaagcgccgggctgactcctcctgcatggtgggggttgggagggcagatacttgaggacaatgtcctattgagactactatggggtgtaataatggatgggtccatcgagaaccaaggatttcagaaactcttgtagcaatatggctcacattattcataaaaatatttttgttttcttttatggtagaattcaggtgcagaggattcagactgtgatatttcctgtttgaggcttttgattgacattggtttgtgcaagatccttttcttatttcatttgtttatcccctttctttcactgtttccattcttttctgacaggagttttcacatacttaatatgcactttttgatttgtatatgcttttgtaagatacacattgcattctatctgcacatattttttatgtgactattttaaaatggtaaattaatgggcttaattttattagagaagttttaagtttatagaaatattgatcagaaagtatagagagttctcacatacgcctcacccctgcatgtggggcctcacccctgcatgtggggtcatctctcctattcctgacatcttgcatttctgtagcacctgtgctacaatcgatgaaccaatatggacacattattaaccaagttctagagtcgtctttccttttgttgacatcttgcattcctgtggtatgcatgttccaactgatgaaccaatattgatgaattattgttaattaaattccatagtttatattaggttatactcttcgcattgtgtatatggattttgacaaatgacatggattcattattactgtatcattcagagtagtttcatgtacatatattttaatgtgaccacatggaattatgctagagagttcatcctgttttttgtttttttcactcaatattattttaaaggttgacttatattactatgtgtgcatctaactcctgccaaaagctctatatcctttttcctctatatccgttgtttgcctctatataattttacctgccttctctccaattaggaacaagcaggcttatccaacacctccactaaaataactgctgcagggaacattctcttacatgaccccctataaacaggtttcagaagtcaagatagatacacagtagcaaggttgctggtacacagagcatgaatcccattaaaaattttaatttctaccattctacctgcccactaatagtgcaaaagtatttcttttattattattatttgagacagagtctccctctgtcaccagcgggctggagtgctgtggtgtgacctctacttactgcagcctccacctcctgggttcaagaatttctcgtgcctcagcctcggagtagctgggattactggcacgcaccaccacacctggctaatttttgtatttttagtagaaacacggttttgccatgttggcgaggctggtctcaaactcctggcctcaagtgatccttctgcctcggcctcccaaagtgctgggattataggcgtgagccaccatgcccagcctagagtgtgtaagtatttctttctcctcatagaccaatcaaccctggacattttataattttgggaattgcaggggtatacagtgaaattccactactgttttttattttccccttccctccattctttccttcctttcttcttttcttcctttttgtttttctttttctttctttttttttagcattctttcatttgcctgagtaactcctatgcatcatcttctcacatcttttgctcatttttgcgttaaggtacctccttcttcttgatataaccggtttcttgtttgttctatgttattcccttgtcagtttttaagaaattccccacactacttggatgtgttcctgtcggttttagacaatgcaaatatcttttccccatttcccatctgcctgttaacttcatcctggaaaccctttgttgaatggaaatccttaatgctgatttttttcatgttttaaaaatcatcttaatgtttgtgcttttgaaattttgtttaggaagtctttcctcaagcctagctcacaaagttattctcctatactttcttctactaaatttatactttgacatttggtatttattttttgaatccagctggattcctcctttgtatgtgctgttaggcagaaaatcagatttactttgcttcataaaatgagcagttttttcacyacaatgagtaaacaatctaccttttcctcttgacttgtgccagtacatttatcatgtactatattaggttttgaataatgcagggatattttttgagatttccaatcaacttattcagatctatgtctgttccatctttcataattttaaaaatgactatgacgctattgtgtgtctcagcatgtgggagagaacagctcttctcttg

SEQ ID NO: 546894 - DNA, 509 bp, Homo sapiens
accctggataagcctgcgtcgggctggaaggactgaacgcccagggcattgaagggggctttgtggtaggggccactggctggcccacgtccctggaaccagaggtgaccctgatggggccattgttattgggtcctcaggtgtgggcagctggtgcgggggtggcccacagccycccctcgacgctggtgtggaagggccagagcagctggggcacgggcgagagcttccgcaccgtcctggttaacgcggatggcgaggtgggtgtgtgtggcttggggggtgctcggctggagtcctgggcagggtctgggcaccctcggggccgccacagcagctctgggcccgatcccgggacatgccgccgtgtcctgtcccgcacaggaagtggccatgaggactgtgaagaagtcctcggtgatgcgtgagaatgagaatggggaggaagaggaggaggaagccgagtttggcgaggaggatcttttccaccaacaggtaggacccctgtg

SEQ ID NO: 546895 - DNA, 892 bp, Homo sapiens
cccttcaggcaggtctcctggtcacaggtatcctgccaacttcacccaggcacagccttaggcagaccatgtcagaaggactctgggagatgctgcatgtcagacacccacagctgggtgccctcaggcagagccataccctgagatacatgtggccccacaccccagtcacattcacacgctgagatgcccatagtcagttctgatcctgcataccccgaatagatataagtgatccatttcacccaggtaagcctggcttacatagtgagaccccatctctacagaaaataataataaatcagccagatgtggtggcttactcctgtagtcccagctaatcgggaggctgaggccagaggattgcttgaggtttaggtggaggctgcagcgagctgtgattgcgcctctgcactccagcctgggtgagatagagtgagagcctgtctcaaaaaaaaaaaaaaaaaaaatatcagccaagcagagtcatttgatcttcagaaatatttggtcagagagacctgggcatgtcccctcccattccaggtcccacgctgagtcccccagttagatgtcctggatcacatgtgcmtgcccagagacgcccaagttggcctgagcagttttcccactcagggcctcccaagactgcgactcaaacacctacctggctgatgcccaccttgtccccacagccttccagtgccctgcccacagccactacgagctctgcggtgactcctgtcctgggagctgcccgagcctgtcggcacccgagggctgtgagtcggcctgccgtgaaggctgtgtctgcgatgctggcttcgtgctcagtggtgacacgtgtgtacctgtgggccagtgtggctgcctccacgatgaccgctactac

SEQ ID NO: 546896 - DNA, 892 bp, Homo sapiens
cccttcaggcaggtctcctggtcacaggtatcctgccaacttcacccaggcacagccttaggcagaccatgtcagaaggactctgggagatgctgcatgtcagacacccacagctgggtgccctcaggcagagccataccctgagatacatgtggccccacaccccagtcacattcacacgctgagatgcccatagtcagttctgatcctgcataccccgaatagatataagtgatccatttcacccaggtaagcctggcttacatagtgagaccccatctctacagaaaataataataaatcagccagatgtggtggcttactcctgtagtcccagctaatcgggaggctgaggccagaggattgcttgaggtttaggtggaggctgcagcgagctgtgattgcgcctctgcactccagcctgggtgagatagagtgagagcctgtctcaaaaaaaaaaaaaaaaaaaatatcagccaagcagagtcatttgatcttcagaaatatttggtcagagagacctgggcatgtcccctcccattccaggtcccacgctgagtcccccagttagatgtcctggatcacatgtgcatrcccagagacgcccaagttggcctgagcagttttcccactcagggcctcccaagactgcgactcaaacacctacctggctgatgcccaccttgtccccacagccttccagtgccctgcccacagccactacgagctctgcggtgactcctgtcctgggagctgcccgagcctgtcggcacccgagggctgtgagtcggcctgccgtgaaggctgtgtctgcgatgctggcttcgtgctcagtggtgacacgtgtgtacctgtgggccagtgtggctgcctccacgatgaccgctactac

SEQ ID NO: 546897 - DNA, 1256 bp, Homo sapiens
tggtttactgggcatctggcatctttacaggaggarcaccctgcaaatgggagctgcccaactcataatatccagatcctcactcatcctgagacttccaggagtcccagcaaggcaatgaaattctccaggcctcagtttccccaggtcgttgatctgctttgtcccttcagttgtaattttctagggtatgtgttttttgtctgcccagcatccctttcttcaatgaaggtccacctcatccctgctgtcctggtggggtggtcgatcatggtgctagccaccaggtctgccaatcacagtgtttactccctctccccatcagtgatgattggtccatactgaacacaagcctgccaatcacagcttccacccttccatctccagccagtgattggtccacactggaccctggcctgccaatcacagttcccacccctccatccccatcagtgattggtccacactggaccctggcctgccaatcacagttcccacccctccatcccccatcagtgattggtccgcactggaccctgacctggcaatcacagtgcctacccctccatccccatcagtgattggtccacactagaccctgacctagcaatcacagggcccacccctccatccccatcagtgatggacccaagaggttgcatatgacccaagcaggacaccaagttcttttggatccttgagtttcaactttataaaactgtcactttttaagaccaaagtctatagaacaagatcagtttcttatggttcaactcacagaagcagggacggagacgccttcttcccagtggggctcctaaactgccacgtgtagacgtggggccattggcctccatcttggtggccaacagaaggaaaggatgaggtcagtgccgtggaggaagagaccaaaaggggatagagttggaggcaggagtctccaccagggaaggacctcagcagacaccagagtgagtcaggcgcagccccgcccagcaccagctcctccacgggacctgtttcgtcgtggagccaagttctgtgccccctggtgccaggatatgtagtttgtgaacaaaccgaagcggagagcaggaacttctacagggatggtccctaaaggaaacgctcttcccctcctttgctgctgtctggagaagaacacaatacaatcaacacaacatcaggcttatccaccgtatgcactcggcgcccacctcaccaaggccacagaggctcgtgggtaaggggccaga

SEQ ID NO: 546898 - DNA, 482 bp, Homo sapiens
aaaaaaaaaaaaaaaaaaaaaaaaggccgcacgcgttgactcacgcctgtagtaccagcactttgggaggccgaggcgggcggatcacgaggtcaggagattgagaccatcctggctaacacggtgaaaccccgtctctactgaaaaatacaaaaaattggccgggcgtggtggcgggtgcctgtagtcccagctactcgggaggctgaggcaggagaatggcatgaacccrggaggcggagcttgcagtgagcccagttcgcgccactgcactccagcctggggaacagagcgagactccgtctcaaaaaaaaaaaaaaaaaaatgtacgtgagccccagggcccctgagcaggagagaggtgagagcagacacggcaggagccccagggcccctgagcaggaggaaggtgagagcagacaccgcagcagcccctccccggacctccttccaaggtcatggtgccctgcgcagggtgtcct

SEQ ID NO: 546899 - DNA, 482 bp, Homo sapiens
aaaaaaaaaaaaaaaaaaaaaaaaggccgcacgcgttgactcacgcctgtagtaccagcactttgggaggccgaggcgggcggatcacgaggtcaggagattgagaccatcctggctaacacggtgaaaccccgtctctactgaaaaatacaaaaaattggccgggcgtggtggcgggtgcctgtagtcccagctactcgggaggctgaggcaggagaatggcatgaacccgggaggcggagcttgcagtgagcccagttcgcgccactgcactccagcctggggaacagagcgagactccgtctcaaaaaaaaaaaaaaaaaaatgtacgtgagccccagrgcccctgagcaggagagaggtgagagcagacacggcaggagccccagggcccctgagcaggaggaaggtgagagcagacaccgcagcagcccctccccggacctccttccaaggtcatggtgccctgcgcagggtgtcct

SEQ ID NO: 546900 - DNA, 1263 bp, Homo sapiens
aactccagaccttgtaatctgcccatcttggcctcccaaagtgctgggattacaggcgtgagccaccgagcccaggcaaatttattttttgagataatgatagaacataaagttcaccattttagagcgtacgagtgggttttagtacatccaaagttgtacggtctccacctctaattccagaacattccatcaccccaaaaagcagcccctccccatcagcagtcactcctggtcccctccccagccccagaaccccagcatgtgcgcatccgtcccagtgcctgtggactggcctgttggacgggtcctatgaacagatcctacactgtggacaaagtcttttggatctggcttctctcactgaggagggtgtttattgtccccctgaattcagtgccaccgaggtcccctttatatgctgtggccttgggacggtcccaagccattgcaatgtccaagaaacagtgtggccttattgagaatgctgctttagatcacaaaggtgcatccaagggcgggaagggcatgtggtcgggctgtgcaggtctctccacagccggggctcgagggtggaagggtgggtcccacagaggggaccccgcacagagaccagggctggacagatgctgccctctgtgagcgaatctggcctggccctgggctccaaattctgcatgtagcttctcccgggcgcgggccgagccgaggtggatgaggagagtcctgggcttggcggggccccgcagaccccaggccatcagtcggggattgaatacaggaggggagcgaccacagctgcccactggacgtggcagaggggctgggggacagcacagagatgaccgtggctgctgtgggcagaggtcatggggctacgggagtagggtgggggtgacggagagatgactgtggctgctgtgggcggaggtcatggggtgcgggagccrggcgggggtgactgtggccttgcctctcccgtccctgtagtggctgtcgctgggcgcggactccaacgggagcggcgtctctgtgctgctggagctggcacgcctcttctcccggctctacacctacaagcgcacgcacgccgcgtgagtgccggggtgggcagggggatgggggtgcgggggccacactgccggacagcgctgcccaccaggcacctctgcagatgtttctctggagcctcctggccccaaagtgggcctgagcccaggaattggggcgccttatttatcgagggctaagctgagccctcgc

SEQ ID NO: 546901 - DNA, 1263 bp, Homo sapiens
aactccagaccttgtaatctgcccatcttggcctcccaaagtgctgggattacaggcgtgagccaccgagcccaggcaaatttattttttgagataatgatagaacataaagttcaccattttagagcgtacgagtgggttttagtacatccaaagttgtacggtctccacctctaattccagaacattccatcaccccaaaaagcagcccctccccatcagcagtcactcctggtcccctccccagccccagaaccccagcatgtgcgcatccgtcccagtgcctgtggactggcctgttggacgggtcctatgaacagatcctacactgtggacaaagtcttttggatctggcttctctcactgaggagggtgtttattgtccccctgaattcagtgccaccgaggtcccctttatatgctgtggccttgggacggtcccaagccattgcaatgtccaagaaacagtgtggccttattgagaatgctgctttagatcacaaaggtgcatccaagggcgggaagggcatgtggtcgggctgtgcaggtctctccacagccggggctcgagggtggaagggtgggtcccacagaggggaccccgcacagagaccagggctggacagatgctgccctctgtgagcgaatctggcctggccctgggctccaaattctgcatgtagcttctcccgggcgcgggccgagccgaggtggatgaggagagtcctgggcttggcggggccccgcagaccccaggccatcagtcggggattgaatacaggaggggagcgaccacagctgcccactggacgtggcagaggggctgggggacagcacagagatgaccgtggctgctgtgggcagaggtcatggggctacgggagtagggtgggggtgacggagagatgactgtggctgctgtgggcggaggtcatggggtgcgggagccgggcgggggtgactgtggccttgcctctcccgtccctgtagtggctgtcgctgggcgcggactccaacgggagcggcgtctctgtgctgctggagctggcacgcctcttctcccggctctacacctacaagcgcacgcacgccgcgtgagtgccggggtgggcagggggatgggggtgcgggggccacactgccggacagcgctgcccaccaggcrcctctgcagatgtttctctggagcctcctggccccaaagtgggcctgagcccaggaattggggcgccttatttatcgagggctaagctgagccctcgc

SEQ ID NO: 546902 - DNA, 541 bp, Homo sapiens
attctacttctggaatctctcttaagtaaattattcacatgagaggaaaatattcatatataaagatactgatcactatttgtcataatcagaaattagaaacagtctcaatgtccaacaatcaagaattacaaagaatttttaataatataggaaaatatttagattaaagtattaagtaaaaaagcatgacacaaacgatgtaaaaatgaatccaccgtggtaccctagattggatgctggaacagaaaaaggtcattggtgtctccattttgacaaatgtaccacagaaatgtaagatgttaatattagggtaaactaagaaaggcatagataggaactctctgtactacctttgaaactttcctgtaaatmtaaaattattcaaaattaaaagtttacataaaaaaataaatgtgagaaggaggaggaagaagactgaaaggaaacaagcaaaaatgtcaaaaatagattatccctggattccagaatcacgggtgatggtaattttcttctttctagttcataaattctccataca

SEQ ID NO: 546903 - DNA, 511 bp, Homo sapiens
catctcaaaatggaaattcggggattgacattatagaaaattttatcaacaacccatcatgaaaattttaggctttcaagacatcaattcccaaaacaccagaaatacagagacccagcacacactgcttactagtcaacttgatcatagtcctgttgtgctactttcacatcagctcaagacttccagcaatccaggtcacgtatttgctttagtttytgatggtttctgctgaaattagcacgtatgtttaaatacatacaggcataatcccaacggaagtagactttagcacttttacgtgcttgctaagtagcaggatcaatactaagtgtatctctttgcattgtgccattaaaataagaaatctattagaaatgtactatcactattttatgaatgagggaattgatgtacatcagagtcaagtagtaaaataagtgttaagtgggaggccgaggctggtggatcacgaggtcaggagatcgagaccatcctggctaacacggtg

SEQ ID NO: 546904 - DNA, 631 bp, Homo sapiens
tggcctgaaacaccccgtgccagggtataaatcttggcaagatttcagctactatgggccctcgtgcagggcacagaagtcctatttcaagaggttattaaagtatattctttcatctaagaaggtacatttttcaaaaattgtcaggatatgcagtattctaatattgtatcaaatggacacctgagtaacatgacctgacatgttaattcatgtcaaagttttattatgtctagaattatggtgagattcttgattaacaattcaaggtaatattggttggcaaatctttctattattggtgtaggaataagggctgattctgtctataatcaaaataactatgtttcattacactgcaatttaaagtaggtttatataattcaaaattctcagcatttyatatgaaatgtacataaaaatattaattatgtgagcctcctttcctcctcacaaggatgacactatttaagttatttcaacaaaatgctaattattatgaatacattttaaattttacggaacttgaaaaatactttaatagttatctcaacaatggtacggggtaaaaggtgaagtttataaagaagcagttttctcatagtaaacctgatcacaaattggtaaaaac

SEQ ID NO: 546905 - DNA, 622 bp, Homo sapiens
gagaacatttccaaaaggaatatgttctgtgactcctagcataagctttagaaaagcaaacccctaaatcacgccagttccagttctggtgagcttacttttggggagcagctaccattgctggattcctggggacccagccttaatctttatataaatgctcatataacattagcaaggggatatagtagaactttaaagtcatagattattgaagtcagacagacctggcttttatttttaatttttaaaacataaatttatttttaatttttaaaacataaatttatttttaaagtaaaataaaaaaaawttttaaatttattttaaattttaaattttatttttaatttttaaattttattattttttattgttttgagacagggtcttgctctgtcgcccaggctggagtgcagtggtgcggtctcggctcactgcaacctccacctcccaggttcaagtgattctcatgccttagcctcccgtgtagcccggctaatttttgtatttttagtagagatagggtttctccatgttagccaggctggtctcgaactcctgagctcaaaagatctgcccaccttggcctcccatagtgctgggattacagattacaggc

SEQ ID NO: 546906 - DNA, 622 bp, Homo sapiens
gagaacatttccaaaaggaatatgttctgtgactcctagcataagctttagaaaagcaaacccctaaatcacgccagttccagttctggtgagcttacttttggggagcagctaccattgctggattcctggggacccagccttaatctttatataaatgctcatataacattagcaaggggatatagtagaactttaaagtcatagattattgaagtcagacagacctggcttttatttttaatttttaaaacataaatttatttttaatttttaaaacataaatttatttttaaagtaaaataaaaaaaaattttaaatttattttaaattttaaattttatttttaatttttaaattttattattttttattgttttgagacagggtcttgctctgtcgcccaggctggagtgcagtggtgyggtctcggctcactgcaacctccacctcccaggttcaagtgattctcatgccttagcctcccgtgtagcccggctaatttttgtatttttagtagagatagggtttctccatgttagccaggctggtctcgaactcctgagctcaaaagatctgcccaccttggcctcccatagtgctgggattacagattacaggc

SEQ ID NO: 546907 - DNA, 622 bp, Homo sapiens
gagaacatttccaaaaggaatatgttctgtgactcctagcataagctttagaaaagcaaacccctaaatcacgccagttccagttctggtgagcttacttttggggagcagctaccattgctggattcctggggacccagccttaatctttatataaatgctcatataacattagcaaggggatatagtagaactttaaagtcatagattattgaagtcagacagacctggcttttatttttaatttttaaaacataaatttatttttaatttttaaaacataaatttatttttaaagtaaaataaaaaaaaattttaaatttattttaaattttaaattttatttttaatttttaaattttattattttttattgttttgagacagggtcttgctctgtcgcccaggctggagtgcagtggtgcggtctcggctcactgcaacctccacctcccaggttcaagtgattctcatgccttagcctyccgtgtagcccggctaatttttgtatttttagtagagatagggtttctccatgttagccaggctggtctcgaactcctgagctcaaaagatctgcccaccttggcctcccatagtgctgggattacagattacaggc

SEQ ID NO: 546908 - DNA, 1531 bp, Homo sapiens
ttgggtacatattcttcctagttttgaattctggttttgaattttttttagatacgatgaaaattatactgaatatattactttgaaatgtgctttttctaactgaatatattatcagcatttcccatatctttaaatattcttcaaaaattatcaatggttgcataaaatctctcctagtataggtgtaatttaatcgatttccaattattgaatgagaatttaagaaattttcttgtttacccgcagtacatcgcgtatagtaagtactsaaaagtcatttgaattggggttttattattagtataataaaataaaaataggcaaatcctgtcctgaatttacatgatcattcagatagcaaatacattatttaaacagaaaaaaattgttttcagcttgtgtaatataaatttgtaaatttgtgtcaattaaaagtcagttacacctgaaaaaactactgctttccccaccccatgagggccattccttctcccaaagactgaaattcatgattagggcagtgatttgaaaaacaaagcaaaactaaactaaactaaaaacaatatcttaaatctaaagggagattgtatattcaggaacattagtatcatctaatctgaaaatgtgtgtaaaatcttacttcaccttttcttcatttccttttcttcagcagtgtctcttcacattaaaatatattgaaattttttcagtaggtaaaagccagttacaaatatgatttatatgcttgcccatagtaaagtgacttttcagtagccctaggtaatatctcgccagcccaagcatgatgatttgagggaggagggagagaaaagggaaagggactgagtgggactaaggcttgcccagtgcccaggagggcaggaaagggtggagtaacaatggaggatcaacaactggacaaaaggcacgtctcacaaggcttgatagcaggctccagtgcaatccaggtagagggggaggccaaaaatacgaagaaacaccatcaaaagaattgcgagggaaaagagagttactccaaaattttacatatggccaatctgtcatctgtgtgcaagcgtaacacatgcaaaggctaggaaacactccctacaggtgttctcaaaaacaacttgggccgggcgcggtggctcacgtctgtaatcccaacactttgggaggccaaggtgggtggatcatgaggtcaggagatcgagaccagcctggctaacacggtaaaaccccatctctactaaaaaaaagacccaactatatgctgtctataggagatagtttagatccaaagttacaaatagactggaattaaaggacaggaaaaatatgtcatgtaaacagtaaaccataagaaagctggagtggctgtactaatatcagacaaagtagactttaaaacaaaaaatggtaccagagataaagtgggacattttataatgatcaaagggtaattccttaggaagatacaatgataaacaggtatgtgcctaacagagccctgaaatacataaagcaa

SEQ ID NO: 546909 - DNA, 559 bp, Homo sapiens
caaatttcttacctcatttcatgtgagatcaatagtgatgcccatttgtacatttttgtttgttgaactcatatgagaccttaaaggacagtcaatattcactcaaattttaaatagggaacagaaaagaatgacatcatttgttttggaatctttgaagacactatatgttcttgcccctattgtgacttgttatcttctgggaactttttaagtcatacacaacagtcacaattttattttcccacacccctatcaattgccaaggaaaagataaggaaaaaaattatcagttacatagtacagggatgatcttcatttctttgagagatttgattggctattttccagaacaattgggagctgtgctaagctgtatataaatgtttacctgactgctgcattwaaaaacaaacaaacaaaagacaaaaaaactgcagagctctctaagagttttgattcctagaccccaaatccaaattctttttccaatactttgagatgaatcttagggctacatatatttaataacttgcccagatgattctaatgtgcattt

SEQ ID NO: 546910 - DNA, 1203 bp, Homo sapiens
aaaggcagtggtttcatcagtcactatctagcattataagaatgacgataaataacaatgaacggagaggattgttaaaagtggttccctctgtggagcaggactraaaggatgctgtttctgttattcttagtctgttttaatagaagccttttaataatgcttgtctttttaatgaaatgtctatattactctgataaaaataaaaatttgttttagtaaatctacaaaacttcagatcacagtggctaactattaaataaatggaacagacagtgcagatgatcagccttgtagaactcagcagccatacagccctgttgtcagaaaatattaatatgttttgcagatgaagaatgatgagaagttttctgtgtgggatccttgggtgttgatggaggagaccagccatcaggcaggtggtgacaggccttcaacatcttggtgagttgttggaactttacgctgtggtcaggaaaaagcaatcttgggttgcaaacagaggagaaagaaaattaaatttatttttttggagcgatacctagtaccaaatgggagaagaggaaaagttttggaaggcagaatagtgagtagcagttgcatagttttgagattggatgagggtcacagagaccttggataaaggttaaatttggaaaatatttgtgagataaaacttcatgaaagattggatgtgaagaatgagggcatattctagggtaattccaagctttctaacaagagagactgagagattggtgacccataaaattgagactagaaaaaagtggaggagatacagttgtcatccctttattcatggcttcactttccacagtttcaggtactcacagtcaacctcagtctgaaaatgagtgagtacagtacaataggattttttttttgagatggaagtgggtgagtacagtacaataggatttttttttcttgctctgtcacccaggctgaagtgcagtggcacaatctcagctcactgcaacctccacctcccggattcaagtagttctcccgcctcagcctcccgagtagctgggattacagatgcacaccaccacgcctggctaatttttgtatttttttagtagagactggttttcgccatgttggccaggctggtctcgaactcctgaccttgtgatctacctgccttggcttcccaaagtgctgggattacaggagtga

SEQ ID NO: 546911 - DNA, 1137 bp, Homo sapiens
actcaatttttgcctctcatttgaacacccacatttaaaaaaacttgggaagaaaataatggaaaagttgacctctcagttttccggaaaaggtgaccatacaaatgtgtcttttctggctgtaggctttatgaaacttctgagaagaagcgtggtattttagataaaaacaagggtttggttgttagactgtcctgtggttgaaattcagctctatccttgctggtgtgtgatcttggacaaaagacttaaacttcctgagactcagtttgtatgcaaaatgagaataattataaatttgtaggggattagaaataatgcagattcttgacatttattatggacttgttatacatgaaggattattagtttcactctttatttcattaactactttgacttaagctggtctctttgatgaactttcattgactctctggtacttgacatttgtataatattactttcaaaaatgcattagtaggctgggcgcagtggctcatgcctataatctcagcactttgggaggccgaggtgggcagatcacctggggtcaggaactcagatcaagaccagcctggccaacatggtgaaacctcatttctactaaaaatacaaaaattagccaggcctggtggtgcatgcctgtaatcccagctacttgggaggctgaggcagaagaatcacttgaacccgtggaggttgcggtggaccgagattgcaccattgcactccagcccctgggtgacagagcgagacactgtctcaaaaaaaaaaaaaagaaaaaaaaagcattagtaatatgttaactcatattattttcagcaagctttttaaaatatgattttgttacttttttttacagataaggacactgcattgatgagtccttaagtaactggtgaccaagatggccttaatgtctccctcagcttgactaaggtttacataggtttctttttgactctaggccactggcttcttttttctyagataatttacttaaaaaaaaaaactctgcaattgtaaattatttctctacaatctagagatgtctttctcaaggatttgggactaatttccttgaagtcatagaagaaaataagatgcctatcttcctatctttgggagggtaga

SEQ ID NO: 546912 - DNA, 1118 bp, Homo sapiens
gtttccagtacgatgtcatgaaaataaaaggaccccatgcaaggatcccaaaagcctgattgtaagtccaatttgatattttgttcaatcacttggcctctgtcagcttcagaattttgaatgttaaattggaggcaatggccatcttttgaacttgacacaatttatcaagaggatgaagtatgtaaaagtatcaaaaatgagtcactggcaggctctgataatgagttaggagcatctccttcatcataaagagttcatttttggggacaaagtattaactctttgcaaattactggaatgattaggtaaaatttactaaaaatttctcttgtaggaatcatttctcagccaaacaatgtagcctaaagaaagtggggctaattttgcagatcaagttttttttttttttaagtgcgtacacattttgaaaatcaatattttcccccaggtactcagggttaaattgctcttgtaggaatcatttctcaaccaaaacaatgtagcctaaagaaagtggggctaatttttgcagatcaagyttttctttttaagtgcgtatacgttttgaaaatcagtattttcccccagttattcagggttaaattgttcttgtaggaatcatttctcaaccaaaacaatgtagcctaaagaaagtggggttaatttttgcagatcaagtttttttttttttttttttaagtgcgtatacattttgaaaatcaatattttcccccagttattcagggttatctgataattcttagcccagtggaaatggaaatggtacctgcactccacatttcctaagttctgaatttgtttgatatatgttgttccacagtcattgtttccaggtcctacccctgcatccaacaataaacctggtattcaaacaaagcagatgtcgagaatgaggatgaggaagtgaggtgagaagggcacacatgtgaagaggacatagggcataccctctagtactttcaactttaagttgattctaggacattaggatgacaactgagtctggtaccttgctccagttctagtttctacctgaaggactctagagatggggaagtttctgtcaaagagtttcttctctggacattttttcc

SEQ ID NO: 546913 - DNA, 1118 bp, Homo sapiens
gtttccagtacgatgtcatgaaaataaaaggaccccatgcaaggatcccaaaagcctgattgtaagtccaatttgatattttgttcaatcacttggcctctgtcagcttcagaattttgaatgttaaattggaggcaatggccatcttttgaacttgacacaatttatcaagaggatgaagtatgtaaaagtatcaaaaatgagtcactggcaggctctgataatgagttaggagcatctccttcatcataaagagttcatttttggggacaaagtattaactctttgcaaattactggaatgattaggtaaaatttactaaaaatttctcttgtaggaatcatttctcagccaaacaatgtagcctaaagaaagtggggctaattttgcagatcaagttttttttttttttaagtgcgtacacattttgaaaatcaatattttcccccaggtactcagggttaaattgctcttgtaggaatcatttctcaaccaaaacaatgtagcctaaagaaagtggggctaatttttgcagatcaagcttttctttttaagtgcgtatacgttttgaaaatcagtattttcccccagttattcagggttaaattgytcttgtaggaatcatttctcaaccaaaacaatgtagcctaaagaaagtggggttaatttttgcagatcaagtttttttttttttttttttaagtgcgtatacattttgaaaatcaatattttcccccagttattcagggttatctgataattcttagcccagtggaaatggaaatggtacctgcactccacatttcctaagttctgaatttgtttgatatatgttgttccacagtcattgtttccaggtcctacccctgcatccaacaataaacctggtattcaaacaaagcagatgtcgagaatgaggatgaggaagtgaggtgagaagggcacacatgtgaagaggacatagggcataccctctagtactttcaactttaagttgattctaggacattaggatgacaactgagtctggtaccttgctccagttctagtttctacctgaaggactctagagatggggaagtttctgtcaaagagtttcttctctggacattttttcc

SEQ ID NO: 546914 - DNA, 1291 bp, Homo sapiens
agtgcctaccaagctcagtggacatttgagtaaatacatggagaaaagtatgaatgaatgaatgaaaaaatgaatgcagagccaagcctattgggcccaatcacattgtatggtcagtactcattactgaccctctccactaatgctcagcacatttattttctgtgaaaccaggataacaggaacaatgaaatagctttgaaggagatttcccatcagtgtctcgatcacccatctctcagctaacagatcttattttcctgagctcatgctgggcccaagaaaagacaacatacgcctatagatacttggggacccaggcctctctctggaatacagaaaggtgtactgtttaaaggaagtgtgaatgcgtgtaacttaggcctactattccattctcacccagagtaaaataagtgttccacagtatcaacagagtaaaagttcatgttactgaccaggaaagcctggtgaacacagaaatgcaaycaactgtagcttgggtgaggtgtaggactgacatctaaccagagtcaccagggtatagctatggccattctttcttatgctatgcaccccaaaagggattataaagcacagataattaaatcagcagaggctgggtgtgataacttatgctgtaatcccttcccaataactttgggaggccaaggtgggagaattgcttgagtccaggcattcaagaccagcagggcaagacctcgtctcttctaaaaataaaaataaaaaacaagttatctgggcatggtagcatgtgcctgtaattccagctactcaggaggctgaggtgggaggactgcttgagcctggaagtttgagaccacgatgagctattgatcacactgctgcactcgaggctagtctacacagtgagactctgtctcaaaagaaaacaaaaaaaaaagaaaagaaagaaagaagaatcagagcacttctgttgataataatcaacagagcacttctcttttctccttaagcatatgccaccccttcttacttacttttattcttccatttttgttccccaccatcccccaccttagccccacttactggttctgtctctttaatttgtctggctagttacagaggcagctgagagcacaatgggtacagtagtcattttatttccctccaagtattgtctgtgcccggaatgaagaattacacagaaggacatgttgtggaccaattcccctgctttccaatctcctacgaatgatcaagctcctgggaacactaagacacagtgtttcatacagttccttca

SEQ ID NO: 546915 - DNA, 1291 bp, Homo sapiens
agtgcctaccaagctcagtggacatttgagtaaatacatggagaaaagtatgaatgaatgaatgaaaaaatgaatgcagagccaagcctattgggcccaatcacattgtatggtcagtactcattactgaccctctccactaatgctcagcacatttattttctgtgaaaccaggataacaggaacaatgaaatagctttgaaggagatttcccatcagtgtctcgatcacccatctctcagctaacagatcttattttcctgagctcatgctgggcccaagaaaagacaacatacgcctatagatacttggggacccaggcctctctctggaatacagaaaggtgtactgtttaaaggaagtgtgaatgcgtgtaacttaggcctactattccattctcacccagagtaaaataagtgttccacagtatcaacagagtaaaagttcatgttactgaccaggaaagcctggtgaacacagaaatgcaaccaactgtagcttgggtgaggtgtaggactgacatctaaccagagtcaccagggtatagctatggccattctttcttatgctatgcaccccaaaagggattataaagcacagataattaaatcagcagaggctgggtgtgataacttatgctgtaatcccttcccaataactttgggaggccaaggtgggagaattgcttgagtccaggcattcaagaccagcagggcaagacctcgtctcttctaaaaataaaaataaaaaacaagttatctgggcatggtagcatgtgcctgtaattccagctactcaggaggctgaggtgggaggactgcttgagcctggaagtttgagaccacgatgagctattgatcacactgctgcactcgaggctagtctacacagtgagactctgtctcaaaagaaaacaaaaaaaaamgaaaagaaagaaagaagaatcagagcacttctgttgataataatcaacagagcacttctcttttctccttaagcatatgccaccccttcttacttacttttattcttccatttttgttccccaccatcccccaccttagccccacttactggttctgtctctttaatttgtctggctagttacagaggcagctgagagcacaatgggtacagtagtcattttatttccctccaagtattgtctgtgcccggaatgaagaattacacagaaggacatgttgtggaccaattcccctgctttccaatctcctacgaatgatcaagctcctgggaacactaagacacagtgtttcatacagttccttca

SEQ ID NO: 546916 - DNA, 1547 bp, Homo sapiens
ttgcctccttttccacctctgctgcctcctggggtaaccacagccacctgataagctcttggagttccagtagccctatgtcagcaccacacagtggggccttaactaggggccacctggtcctgccaggtgtgtgcctcctgtgtcagctcctccgccaggcctagcacagggcctggagctacaaaaacctcagtgaagggctgtggggagcggggaggagcgggggtcccacctgccattttgcagatgaggaccttgggacacagaaactgagccccacagctgtcaggtgctgagccaggagtggagcctgtctggggcttgtcttccagtgctcttctcaccatgtggctttggcttcaggccccagcagccctcctgagtcctgctgccacgtggcctaggagacagatcttagcatctatagccttgggtccacctggccggctgaggctgagctgtagacagctgtggggtttccccgactatggcctcccatragccctgggttctcgggcctattggtgccaaagacagaaacccagctccccagacaccctcatccttccagtggccagcccagcaatcaggaagcagcccactgccccggctggcagcttgagctcgcccacaaggtggctgtagggctgctctggtcagctgagtcgggcatggtgggcagacagcctctcccgccgtctccctccaggccatcatgcagctttctcggcttctctgtgccttgcctctctgctctttcagtttgcacatagctcaccctggctaatagcctctgtctcatgatctcacttcctaactccagggagagagaatccactgcccctcttcctgtgtccagtggtcaggcccaagatacccagagctgcccatctcctgctagcgggatgggcctgagcagggatgggggccgggcaggggcagcactggctttggggctagaagccaacttgggtttgaatctcattccctggtctcctgactctgtgagcctctgaccaggagaaatgcccatggcttggggctttgatgtctgggtggcactgaagggtttgcacatggcattcagtctcttgctgtgggtgggtcagtgccagtcttagtgacagaggaagcatccctgccctctctggaaactggcgttttcaatgacatgaacttgggcacactaccacaccaggcatgccatttcctgggttggatgggaggaagggggcctttcttggaggcatgtgtgccatgagtgggcatgacaaaggcccctggctatcccttgccccctaaaccggcctgactcctatgggggcccagagtgtccccaggcccaccttgtgcgtgcccctctctttgtgtcccatgtcatgtggtgatgtgtgcacatgtgacccatacgggttggtccatttccaactggaacagtccctcctgcttccaggacaaaaacagccccaggcctttttcccctgaaagtttgagctccttgtctcagagagggagcgagctcatggacggggccagagtggctg

SEQ ID NO: 546917 - DNA, 1547 bp, Homo sapiens
ttgcctccttttccacctctgctgcctcctggggtaaccacagccacctgataagctcttggagttccagtagccctatgtcagcaccacacagtggggccttaactaggggccacctggtcctgccaggtgtgtgcctcctgtgtcagctcctccgccaggcctagcacagggcctggagctacaaaaacctcagtgaagggctgtggggagcggggaggagcgggggtcccacctgccattttgcagatgaggaccttgggacacagaaactgagccccacagctgtcaggtgctgagccaggagtggagcctgtctggggcttgtcttccagtgctcttctcaccatgtggctttggcttcaggccccagcagccctcctgagtcctgctgccacgtggcctaggagacagatcttagcatctatagccttgggtccacctggccggctgaggctgagctgtagacagctgtggggtttccccgactatggcctcccataagccctgggttctcgggcctattggtgccaaagacagaaacccagctccccagacaccctcatccttccagtggccagcccagcaatcaggaagcagcccactgccccggctggcagcttgagctcgcccacaaggtggctgtagggctgctctggtcagctgagtcgggcatggtgggcagacagcctctcccgccgtctccctccaggccatcatgcagctttctcggcttctctgtgccttgcctctctgctctttcagtttgcacatagctcaccctggctaatagcctctgtctcatgatctcacttcctaactccagggagagagaatccactgcccctcttcctgtgtccagtggtcaggcccaagatacccagagctgcccatctcctgctagcgggatgggcctgagcagggatgggggccgggcaggggcagcactggctttggggctagaagccaacttgggtttgaatctcattccctggtctcctgactctgtgagcctctgaccaggagaaatgcccatggcttggggctttgatgtctgggtggcactgaagggtttgcacatggcattcagtctcttgctgtgggtgggtcagtgccagtcttagtgacagaggaagcatccctgccctctctggaaactggcgttttcaatgacatgaacttgggcacactaccacaccaggcatgccatttcctgggttggatgggaggaagggggcctttcttggaggyatgtgtgccatgagtgggcatgacaaaggcccctggctatcccttgccccctaaaccggcctgactcctatgggggcccagagtgtccccaggcccaccttgtgcgtgcccctctctttgtgtcccatgtcatgtggtgatgtgtgcacatgtgacccatacgggttggtccatttccaactggaacagtccctcctgcttccaggacaaaaacagccccaggcctttttcccctgaaagtttgagctccttgtctcagagagggagcgagctcatggacggggccagagtggctg

SEQ ID NO: 546918 - DNA, 595 bp, Homo sapiens
tagaagggccatgtttgggcagtgkgtgcccaggtgagagccccatggttgttagtggcagccgggagctggatgggcctggccccatagcctagtgaaaagtgggaccctcttcttccagagcatggaagtctcagaggctggaaaaaggtgcctgagtggcctgccaaaaagcataaggctagaagggctggaaggaaccccaacagtcttcaaggtgcctgagagggctgggttcattccagctttctttgctttcatcctgatagcaagaaaacctgctcacacatggcaggcgggcctgaggctgccattccctcatcaggggctataggcacctttaatgtggctctttcttgaagcagctgctcaggccggttctcgaagagaagttccctcattatccacaggtccttgttccagccccgtgtctgcagagggactagggagggagaaaatctctcagcctgtgccccacaacctgctctgagatatctcttttgttacttcctcacggacagcatcaaacttccaaatgaacagaccagcatggagcctccagaaaagtgcacagaattctgtctagtacccagat

SEQ ID NO: 546919 - DNA, 595 bp, Homo sapiens
tagaagggccatgtttgggcagtgggtgcccaggtgagagccccatggttgttagtggcagccgggagctggatgggcctggccccatagcctagtgaaaagtgggaccctcttcttccagagcatggaagtctcagaggctggaaaaaggtgcctgagtggcctgccaaaaagcataaggctagaagggctggaaggaaccccaacagtcttcaaggtgcctgagagggctgggytcattccagctttctttgctttcatcctgatagcaagaaaacctgctcacacatggcaggcgggcctgaggctgccattccctcatcaggggctataggcacctttaatgtggctctttcttgaagcagctgctcaggccggttctcgaagagaagttccctcattatccacaggtccttgttccagccccgtgtctgcagagggactagggagggagaaaatctctcagcctgtgccccacaacctgctctgagatatctcttttgttacttcctcacggacagcatcaaacttccaaatgaacagaccagcatggagcctccagaaaagtgcacagaattctgtctagtacccagat

SEQ ID NO: 546920 - DNA, 595 bp, Homo sapiens
tagaagggccatgtttgggcagtgggtgcccaggtgagagccccatggttgttagtggcagccgggagctggatgggcctggccccatagcctagtgaaaagtgggaccctcttcttccagagcatggaagtctcagaggctggaaaaaggtgcctgagtggcctgccaaaaagcataaggctagaagggctggaaggaaccccaacagtcttcaaggtgcctgagagggctgggttcattccagctttctttgctttcatcctgatagcaagaaaacctgctcacacatggcaggcgggcctgaggctrccattccctcatcaggggctataggcacctttaatgtggctctttcttgaagcagctgctcaggccggttctcgaagagaagttccctcattatccacaggtccttgttccagccccgtgtctgcagagggactagggagggagaaaatctctcagcctgtgccccacaacctgctctgagatatctcttttgttacttcctcacggacagcatcaaacttccaaatgaacagaccagcatggagcctccagaaaagtgcacagaattctgtctagtacccagat

SEQ ID NO: 546921 - DNA, 799 bp, Homo sapiens
ccagctgccatacacgtttcatgatatgaggtcatgggttcgttttataagaaaagtaaaaaatacacaataaggaaaacaattacgtctctacacaaaaaatacaatggcccaagtgtcctgtacttttaaagattttcccatgataagcacattaataaattctgcctgtattgaaatttctggtttcttcttggtagtttaatttactgagagctgagttgatttccttgatatttttactaacattattgaacccaacacaaagtgatgtttatgttttgtttgtaaggccaacttttcatttaacataatggactctgcactctgcttacaacttccaactcacttcacktgtttcttcattcactcattcattctttcaccaaacatttattgagtacccactgagtgctaggcactgtattggatgctggggatttataaaaaatggttactaagcctcagatatttgcagtccagtgagggagaaaaacttactatacaatgtgatcagttttacaaaaagggaatacaacaaagagtgcaattaaatctctctgggaaaattagggaagctctagacagcagtgacacatgagcagtttccagggagatgaggatgctggcatagcaagattgtgtgtacgcactgaaggtgcaaagggacatggcatgttctgatgactcagagcagtccttagacggtgcaccatttgggtccatgaagaagagtaggtggaaaattattctgagacattagattaggagcacatggtgaagtgcctttggacataat

SEQ ID NO: 546922 - DNA, 799 bp, Homo sapiens
ccagctgccatacacgtttcatgatatgaggtcatgggttcgttttataagaaaagtaaaaaatacacaataaggaaaacaattacgtctctacacaaaaaatacaatggcccaagtgtcctgtacttttaaagattttcccatgataagcacattaataaattctgcctgtattgaaatttctggtttcttcttggtagtttaatttactgagagctgagttgatttccttgatatttttactaacattattgaacccaacacaaagtgatgtttatgttttgtttgtaaggccaacttttcatttaacataatggactctgcactctgcttacaacttccaactcacttcacttgtttcttcattcactcattcattctttcaccaaacatttattgagtacccactgagtgctaggcactgtattggatgctggggatttataaaaaatggttactaagcctcagatatttgcagtccagtgagggagaaaaacttactatacaatgtgatcagttttacaaaaagggaatacaacaaagagtgcaattaaatctctctgggaaaattagggaagctctagacagcagtgacacatgagcagtttccagggagatgaggatgctggcatagcaagattgtgtgtacgcactgaaggtgcaaagggacatggcatgttctgatgactcagagcagtccttagacggtgcaccatttgggtccatgaagaagagtaggtggaaaattattctgagacattagattaggrgcacatggtgaagtgcctttggacataat

SEQ ID NO: 546923 - DNA, 600 bp, Homo sapiens
atgatcccatggtttgtgtcctgtctcttctgattcttcccttggggtgggctgtcagcatgagcagtggcctgtcaacacttgggaagggccacgtgtatagtgtgtttactgaagttgtgggcatgctcacttgaggcgtttttcccttatcagtcaaactttcctagaggaagatcgtgtaccagttaaactccaccattttgcctcttagtgtacatggttgagcccactggcccagctcctgagattttatcaggaagctgctgatcaccagcttcaggtgttttctcctaggagactgcctttccctggcactggatgcaaccaattatcattttagagagacagtttaaccactgcctgaccatcacctaatggttgcstgacattgctgaaggggtgccctcttctgccttgctcgtgtctgcctaactacctactccaacaaatccatctaaccctatgctctctactggggtcctttacatgcaccttagagcttgcatagcactgtagttgggagcagcctccggagccagaatgcctggctctgccacttgctaataattgcatgaccttgggcaaattatggaagtc

SEQ ID NO: 546924 - DNA, 1032 bp, Homo sapiens
acagacgccaagagatagtgaaaagtttcgggcccctgaccctaatttctcagcagacataatggatacaatacagtacatcagggttttgttatttttctccttcctcccaaaggatcagacctttcgctattcctatgttgattcattcatctgctctgtctttctcagcccccacctcaccaaatccccacccatttttctaaaacagaaaaggtgacttccacttaaggcacactggctagttattaatagtgaaaacaaggtgtgctgtkccagttagaaacatattaacttctgtaaaagagctttgaaaacactaatttacttctcgttcaagaccatcccgaggcaggaaggggagaaactttgcggtgggactaaaattatacccagcagattcaaacaggtagggaatcctcataagtttctgatctaggactagactctaaaacagggaatgtactgtcattgctggaatacatgaaatggactacagtttggtggcatacattatttgatgttttgggcctggggacaagctggggagatagtgatgtgaattccagtatcccttttccttggcatggctgcagaggaaactgaggaaggatggacaggtcagcttggtgcctcttatctgtccgaggccaggtggtgcctcttatctgtcccaggccaggaagagtggcagagaggtcaggaggaaagaaatcctaaaaggagggcatgaagtcaggagctggagccacagcctacggccatctaaagcaagattacattcaactaggtggcactccagaactgacgatgccaagcaatacccacgggataattctccaaaatactctcttgcatataacacaataccaatcagccaaccaacaaagagagaagtaagaaaaggcactgaccagagcatacctgccaggtgccaaataatgtactggtactccatacatagtctcagagacagaaggataaacatatcagtgttctcgtggtgccaataaatcccattttgactgtcat

SEQ ID NO: 546925 - DNA, 1032 bp, Homo sapiens
acagacgccaagagatagtgaaaagtttcgggcccctgaccctaatttctcagcagacataatggatacaatacagtacatcagggttttgttatttttctccttcctcccaaaggatcagacctttcgctattcctatgttgattcattcatctgctctgtctttctcagcccccacctcaccaaatccccacccatttttctaaaacagaaaaggtgacttccacttaaggcacactggctagttattaatagtgaaaacaaggtgtgctgtgccagttagaaacatattaacttctgtaaaagagctttgaaaacactaatttacttctcgttcaagaccatcccgaggcaggaaggggagaaactttgcggtgggactaaaattatacccagcagattcaaacaggtagggaatcctcataagtttctgatctaggactagactctaaaacagggaatgtactgtcattgctggaatacatgaaatggactacagtttggtggcatacattatttgatgttttgggcctggggacaagctggggagatagtgatgtgaattccagtatcccttttccttggcatggctgcagaggaaactgaggaaggatggacaggtcagcttggtgcctcttatctgtccgaggccaggtggtgcctcttatctgtcccaggccaggaagagtggcagagaggycaggaggaaagaaatcctaaaaggagggcatgaagtcaggagctggagccacagcctacggccatctaaagcaagattacattcaactaggtggcactccagaactgacgatgccaagcaatacccacgggataattctccaaaatactctcttgcatataacacaataccaatcagccaaccaacaaagagagaagtaagaaaaggcactgaccagagcatacctgccaggtgccaaataatgtactggtactccatacatagtctcagagacagaaggataaacatatcagtgttctcgtggtgccaataaatcccattttgactgtcat

SEQ ID NO: 546926 - DNA, 876 bp, Homo sapiens
tgaaaaacaaaaatgtactgtagttcactgtctcaagaatgtttttctgtgttaacrtcataaaactgttatattatgtgatgttttcaacatctaaatgaacatatttggtgtgcctgtaaggtataaggcattgctgcgcaggagggccctctgtatgcctgaggccgctgagcagttgaagtgtggctcagtgtgactgaggaactgagtgctaaatgttactgaattatcactgatttaaatctgaatggctgcacgtgccccatggtggacagcacgagtggccagcatgaaaggggagcccccgggagcccaccccctcttaggacgtggcacagtggacgcctcgtgttttcgactggccgcctttttgtggtgctgtctggctgtccctctgtcctgtacatcacagcagctcagtttataacctcctgggctgggaaagccagtgggaaatggaatctcaggtagccctctcctgccttccatcgtgactaacgaggtgggcatctcttcgttcgttgcgtcttcttgtttcttttcctgtgaaatgccccattgagttcttcggcctattttctttttctttttttttttttttgagacggagtcttgctctgtcaccccggctggagtgcagtggcgtgatgttggctcactgcaagctccgcctcccgggttcacgccattctcctgcctccgcctcagaagtagctgggactacaggcgcccaccaccacgcccagctaattttttgtatttttagtagagacggggtttcaccgtgttagccaggctggtctccaactcctgactttgtgatccacccgccttggtctcccaaagtgctgggattacaggcgtgagccactg

SEQ ID NO: 546927 - DNA, 876 bp, Homo sapiens
tgaaaaacaaaaatgtactgtagttcactgtctcaagaatgtttttctgtgttaacgtcataaaactgttatattatgtgatgttttcaacatctaaatgaacatatttggtgtgcctgtaaggtataaggcattgctgcgcaggagggccctctgyatgcctgaggccgctgagcagttgaagtgtggctcagtgtgactgaggaactgagtgctaaatgttactgaattatcactgatttaaatctgaatggctgcacgtgccccatggtggacagcacgagtggccagcatgaaaggggagcccccgggagcccaccccctcttaggacgtggcacagtggacgcctcgtgttttcgactggccgcctttttgtggtgctgtctggctgtccctctgtcctgtacatcacagcagctcagtttataacctcctgggctgggaaagccagtgggaaatggaatctcaggtagccctctcctgccttccatcgtgactaacgaggtgggcatctcttcgttcgttgcgtcttcttgtttcttttcctgtgaaatgccccattgagttcttcggcctattttctttttctttttttttttttttgagacggagtcttgctctgtcaccccggctggagtgcagtggcgtgatgttggctcactgcaagctccgcctcccgggttcacgccattctcctgcctccgcctcagaagtagctgggactacaggcgcccaccaccacgcccagctaattttttgtatttttagtagagacggggtttcaccgtgttagccaggctggtctccaactcctgactttgtgatccacccgccttggtctcccaaagtgctgggattacaggcgtgagccactg

SEQ ID NO: 546928 - DNA, 591 bp, Homo sapiens
tcttgcctgtcgagcagcaatttgaggccagtgttcatgatcgaccagggcctggcccctgccccggccagacagggatggagttaaatccaatcctgatcgttaggccttattgatccctggagtgaaaaatcacctgctttagggcccaggctgggagggctgtctggagagtcggattctggcattggtgcattctggagccccagccctgggagaccctccagctgtggcaggaggggtccatgagggggtggtggcagctgcaggggccccactcaaggccagagctggagggataccagggttgatgacrgctctgttcccactgcacggtggtccctgccctgcttcccactcttctctctgtgtggtgtggcttgacctcccatggtgtttctccgcatgtccagagatgatgcctttgctgcagatgggtatatgggcagggtctgccaagcggggaggacattgccctggctgctgtctcaggcatcactgagaacagatgtggaagccagttccccaggtgtggaggttttcttattctcctagcccctcccctgcctttctcaagaggtattgcagggt

SEQ ID NO: 546929 - DNA, 633 bp, Homo sapiens
taggaaccagcctcagcctcgcagacacctctgctaccttttgccaggagggtggtgctggggccagccccacaacgggccataggaactcttggcagtttcgccccaattaaaccacacaaagctgccatccagccttttcaggagtaacgtttgcccttcctgrgctggctgtagtttgtcaaagcaaggacagcctgtggctacaccctcacaccccctggcttccagacttgtaggcctttcctacttctcccacagttttacctgacccgcccccagaacattgacttcagagccttccaagctgatgaagttatccaatgtggccccgctgcctcacatttgcagagatcagtttactttcaacacgccttcatttctgttatctctattatctcattttcttctcccagccgccttgcaggaaaggacagggtattattaccccatctgatggtacaaagaagcagagccagggctcaaggtcacatgcctgagtggcagagccaaacccgggaccaaagtctaagctggcacctttgctcagaccttggacagacctgggggaaggcagcaggctacatggctttcaaacttgattgtgtttaccactcacccaggagtgcgttt

SEQ ID NO: 546930 - DNA, 516 bp, Homo sapiens
tgtctctgtataatattaacatgcaaaacatatgcagagattgttttaaaaagtctctgcagtgctcactacagtatctcagatataataagtacaaaagttgttccttatcaaagtgtgttatccagtgtgccttttgtcaatcaaagaacgttgatatgttaatttgtgtccatatgttaactattaaggaaaagggacagaaataaacagtatgtaaatcaactatcgaccactataaactaccctctattttccgttgtctttctttcttttyttttttttttttttcttgagatggagtcttgctctgtcacccaggctggagtgcagtggcacgatcttggctcactgcagcctctgcctcccgagttccagccattctcctgcctcagcctcctgggtagctaggattacaggcacacaccaccacaccaggttaatttttgtatttttagtggagatggggtttcactatgttggccaggctggtctcgaactcctgacttcaggtga

SEQ ID NO: 546931 - DNA, 576 bp, Homo sapiens
tagcttccggttcactgtcattttctctaacactacttctgccttagttctcakaaatttcaaagttgcataagtaatcctttctatactatggactctcagttctttgacatctctctccagctaccttgccctcacccaatctcagccaattcttgtcattaccaataactgcactccctctctagtcacagtttaaaatttccactcttgaaccaccatcttctatctttcaggcttacactatcagtatggtgactgtaataatttcacagcgaaacaaaagaaaacttgaagacaccactataattaataacacccaaaaagataaactttattgcatttctaagattaaaaaaatgcgatgataaaaggacaataaaaagcatttagaatactacaaccaaaattttagaaattcagtggaatggtaaaagacacttccaaataaacaagaccgaaaaatatgcttttcatgctccatttccttgaaagctattaaaggatgtcatccagaaaagcaaagcaataaactaagaaggaggaagacataagatcctggaaatagggatataa

SEQ ID NO: 546932 - DNA, 527 bp, Homo sapiens
gcaaaatttttttttaatttggggaaaatatttaaaatacttaaatatttttaatttggggaatctctaggtcaaacttcagtagaaattgtcaaatggaaccarctagttgtataatttttcattcttgtcattaatgtatgagggttccagttgtcccacatccttgctaacatttagtattatcagtcttttacatttttgccattctggtgagtctgtaatgctatcttactacagttttaatttacatttctctcttgacaaaggatattgtgtatccttacatgtatacattggacattcttcttttatgaatgttcattcaatctttgctcatttaaacaaatgtagttgtttattataaaattgtaggagttcatatgcctatctatcatcatctacccattatctatctatatagtttggatataaatatttagtcagattcaagatgtaattgttgatttgtctatttatcccttaagttctttcagttttgcttcagttttgttaagctctgtaat

SEQ ID NO: 546933 - DNA, 1255 bp, Homo sapiens
tgcataccaaatatccatgttcttctatttgtttttcagtccttttgcctctagattatgtcacaaaattagttatctcaatcaaatatgagaagtgatgtgtcatttcctgtctgaggacattaagaatgtatttaatattggctcatcctcattctttttttcgtgtgtgtgtggaaacaagtactgcatgagggtgaagctttaagatgtgagttagcatgcattcttgcatctactttcagcagcttgtataagaaaaccccaacctgcatcttagtgtgatgcgagtgagacataaaactttgttttgtttaatccctgagattgttgctgcagtatagtttatacttactaatatacccaaaagaaaataattccaaaatgtcgaaaaaaatgcattcttgtatgtaacctcttgattcttccattatgaattccacccacaagaattcattcatttgctcattttgcagggcatgaactgagctgaggcttatcaagytccttctatgagtcagtacgcacaattaatggtgtgatcaaggagccttatttatttagaactctagaaataattttgagaaataaaatatctgtttaagaaatcatttgtgaatattacgataaggaaatgcacatgtcttattaccatactaaaactctattaaatcaatgtatgtataggataaagatttgagataaataagagttaaaaagccttcaagccgttaggaaccaagtgaaaatttttaaaaagtgtcacatactcaatagatgtccacaaatctctctctatctgtatgccactggcagtataattaggtcattatagataccaattttaaagtcaaacgaaactaattttgaattttgaccctattacttattgctggaagaccctgagtaaagttcttaatttacctagctaaccctgcttactttaatttaatgggttcacaatagcttaatttaatttctagggttagtgtgaggattcatgaggtgatgtccggaaagtgattaggacagtgcctgcatatttaaaatgcagaataaatgatattagtaatgttgtcatattattattatgtctttttgaaatagccttatatatctctttttatgtgaatcatgaaggttggaagacaaaacaatttacttttaatgttgaatttctacatagtatgtttttagtatagaaaagtatttatgatgtaggatttttcttcttggtcactttgcaatccaggga

SEQ ID NO: 546934 - DNA, 635 bp, Homo sapiens
tctaggccagttgccttttattctgtggcttaggtgtcagcattttctcatccatgtaaagttcaattctcaggattctgtgtttaccccatgaytgaaatgctgaattaagcacttggttatgttctgcaatgaaaaatccttctctttccttcttttctctttccctccatccattcctgctgtattagttattttccacactgctgataaagacatacccaagactgggcaatttacaaaagaaagagttttattgaacttatggttccacatggctggggaggcctcacagtcatggtggaaagcaaggaggagcaagtcacatcttacatggatggcagcaaagagagcttgtggagagaaactcctgtttttaaaaccatcaaatctcatgagaccattcactatcacaagaacagtgtaggaaagacctgccctcatgattcaatcatctcccaccaggtcccttccacaatacgtgggaattatgggagctgtaagatgagatttgggtgggaacacagagcccaaccatatcacctaccactctctctccttttccttctctctccttccctccttccgttttttccttcctttcctccttccttcctttcttctttattttcaat

SEQ ID NO: 546935 - DNA, 635 bp, Homo sapiens
tctaggccagttgccttttattctgtggcttaggtgtcagcattttctcatccatgtaaagttcaattctcaggattctgtgtttaccccatgactgaaatgctgaattaagcacttggttatgttctgcaatgaaaaatccttctctttccttcttttctctttccctccatccattcctgctgtattagttattttccacactgctgataaagacatacccaagactgggcaatttacaaaagaaagagttttattgaacttatggttccacatggctggggaggcctcacagtcatggtggaaagcaaggaggagcaagtcacatcttacatggatggcagcaaagagagcttgtggagagaaactcctgtttttaaaaccatcaaatctcatgagaccattcactatcacaagaacagtgtaggaaagacctgccctcatgattcaatcatctcccaccaggtcccttccacaatacgtgggaattatgggagctgtaagatgagatttgggtgggaacacagagcccaaccatatcacctaccactctctctccttttccttctctctccttccctccttccsttttttccttcctttcctccttccttcctttcttctttattttcaat

SEQ ID NO: 546936 - DNA, 622 bp, Homo sapiens
ggggttttgtttcctcagttgaaggtcggggcacatgggccccatcacgcttgctcttcctgtctgggcagtggtggttgacagcagccagctctgcatcactcaggagggagccggggctaaccctcactgcacagggcttccacccctctgttcggccgccttccccrgggatcaggacagcaaagtacattacatatttctccatcgttcttcttagatagcatcagtacactgtttattcggttagcaaagagcagagcaagaattgaatgactgaaggtgtgtctctgaaattgaataatatttaagccaagcagaagttctcctttccgtggccagacctcactaacggggaaggaaattgggcagtgaaaagacagcactcccatgccctaaggaaactctgagagaggccacttcgttgcctgctcggcaggcccattctctgcctgcagagtgagcccggcttcccccagggcctctttgtgacgggaccgacaagggtttccaggcagtggcttgggctgtggagacctcagcctgtgtattaagggtactgggctgaatgagggcactgtctgcgtgagttcccttgggcagggatctgggtaaggcggca

SEQ ID NO: 546937 - DNA, 622 bp, Homo sapiens
ggggttttgtttcctcagttgaaggtcggggcacatgggccccatcacgcttgctcttcctgtctgggcagtggtggttgacagcagccagctctgcatcactcaggagggagccggggctaaccctcactgcacagggcttccacccctctgttcggccgccttccccagrgatcaggacagcaaagtacattacatatttctccatcgttcttcttagatagcatcagtacactgtttattcggttagcaaagagcagagcaagaattgaatgactgaaggtgtgtctctgaaattgaataatatttaagccaagcagaagttctcctttccgtggccagacctcactaacggggaaggaaattgggcagtgaaaagacagcactcccatgccctaaggaaactctgagagaggccacttcgttgcctgctcggcaggcccattctctgcctgcagagtgagcccggcttcccccagggcctctttgtgacgggaccgacaagggtttccaggcagtggcttgggctgtggagacctcagcctgtgtattaagggtactgggctgaatgagggcactgtctgcgtgagttcccttgggcagggatctgggtaaggcggca

SEQ ID NO: 546938 - DNA, 622 bp, Homo sapiens
ggggttttgtttcctcagttgaaggtcggggcacatgggccccatcacgcttgctcttcctgtctgggcagtggtggttgacagcagccagctctgcatcactcaggagggagccggggctaaccctcactgcacagggcttccacccctctgttcggccgccttccccagggatcaggacagcaaagtacattacatatttctccatcgttcttcttagatagcatcagtacactgtttattcgsttagcaaagagcagagcaagaattgaatgactgaaggtgtgtctctgaaattgaataatatttaagccaagcagaagttctcctttccgtggccagacctcactaacggggaaggaaattgggcagtgaaaagacagcactcccatgccctaaggaaactctgagagaggccacttcgttgcctgctcggcaggcccattctctgcctgcagagtgagcccggcttcccccagggcctctttgtgacgggaccgacaagggtttccaggcagtggcttgggctgtggagacctcagcctgtgtattaagggtactgggctgaatgagggcactgtctgcgtgagttcccttgggcagggatctgggtaaggcggca

SEQ ID NO: 546939 - DNA, 622 bp, Homo sapiens
ggggttttgtttcctcagttgaaggtcggggcacatgggccccatcacgcttgctcttcctgtctgggcagtggtggttgacagcagccagctctgcatcactcaggagggagccggggctaaccctcactgcacagggcttccacccctctgttcggccgccttccccagggatcaggacagcaaagtacattacatatttctccatcgttcttcttagatagcatcagtacactgtttattcggttagcaaagagcagagcaagaattgaatgactgaaggtgtgtctctgaaattgaataatrtttaagccaagcagaagttctcctttccgtggccagacctcactaacggggaaggaaattgggcagtgaaaagacagcactcccatgccctaaggaaactctgagagaggccacttcgttgcctgctcggcaggcccattctctgcctgcagagtgagcccggcttcccccagggcctctttgtgacgggaccgacaagggtttccaggcagtggcttgggctgtggagacctcagcctgtgtattaagggtactgggctgaatgagggcactgtctgcgtgagttcccttgggcagggatctgggtaaggcggca

SEQ ID NO: 546940 - DNA, 642 bp, Homo sapiens
cgactttgaatactcttcagaggattatgtacatttaagaaaaagtagcatctgtcatgaaaaccatctgaattggattcacaataatgaattcacagacacagcaaacttaaatgctgtgaagtctttgccatatcaatgaacacctgcctaagcaagggtttcatctaacttaacactgtgctccaaaaggatcaataaaaggaagttgtatgcataccaaatagtggaggagggggagaaaaataagaaattgaatgaggctgggcacagcggctcacgcctgcaatcccagcactttggaatgccaaagtagctggatcacttgaggtcaggagtttgagaccagcctgggcaacatggtgaaacctcrtctctactaaaaatacaaaaattagctgggcatggtggtgcatgcctgtaatcccagctacttgggagactgaggcatgagaattgcttgaacccgggaggcagatgttgcagtgagccgagatcacgccactgcactctcacctgggtgacagagtgatattctgtctcaagaaaaaaaaaaaaagaagtttgaatgagctgacagctgcaacatgtatagctatttttatttttttaagtgaaggagagggaggatttcagttcctt

SEQ ID NO: 546941 - DNA, 911 bp, Homo sapiens
cttgcctctggcttttgtttctctcttgtttctggcttcagtgaccttgagtaccctggaatcttccatattgagaaagaaatgatagaggggaggggacatggaaaaaagaattaaatatatctatttttaaaaagaaagaaaattttagaatggacatgtctagaaggaggaggaaacagaggagggggacaggtataaaaactggacttctctgaatatactctgctttgaaggtttgactttggaatcatctayatattttatctaatacaagaatatcgaaacttaaatggcaatcccaaaaatctaaaaggaatagaaatcaaattagcctctgtaataaatgggttgtataaccacacaaaggactatttgaaatgactttcaaagagtaatttgagaatacttccttattggaatataacctaaaaacagaagaattgcaaactgttttcaatgttttcagtaatcatattgagactttaatacatatattgtgggataaaggaaatgaatgttggtgtcactgatagagataagaaataaaagttcaggtaaaaattctgtaaatcctaaatttgaattggaattttatattttatttttaaaatacctttttctacccccatccactgaaaagccctagaaatattggccaacctagtagaaatgatttccctctcacccgggatattatctctaaatataatttaccaaagtcttattgaagaaattgctgtttctgagcttgaagcaactatacaaatgtacctggaagattttaccatactggaaaaaagcagcttgacaaagactactgaagtcatgtcaaaaaaaacaaagaagtcaacttgaaggggctttctcttggcaaagatgggaaaatgtgaaccttgataaaaaataat

SEQ ID NO: 546942 - DNA, 570 bp, Homo sapiens
tataaatatgctgctttaaaaagtctaaaatgttgcctaaaaggattttagtgtttttttcaaactttttttttcctgccaggtaaggcatttgcctactttacttgtgtgaaataacccaagttgctattttcagtgtgcaagccctaagtgtctgtatcaattctcagcaggtatcttgacacaccaacgggatgttgagatagatgtatcatctgtacagcaacttactacacatactataaattatttaataaaataaatccttgaccatgaacatctttcatgccaaacagtaatgccaaatctaacttttactttgtgaagcatttctaacaattcaatgtayccaagaaaaatccacttgagagtgctgacagaatgggatttgccaattaaaagttgttgccatagaaacaggctttaatatgttctatgaaaaatatgaacaggttatgttatctcttcagtcatctacacttgaacataaaatgtgaaaaacacaattagagaagggtgtaacagtttcccaagagagcatcaaatgcattctcttgttcataaaaaaag

SEQ ID NO: 546943 - DNA, 564 bp, Homo sapiens
gtggttgttaagcaaagttcctaaataaggaacttcaaaatacaagtttaaagcaacactctgtaattatttgtattatagtataagggtgttaagtttgtcttcaccctttgaaagagttctgaacagagttagtgttttcgtaaaaaatatcagggcgtacaaaaaatgccatttggcctccacaataagttgctcccacccagaaagtcattctcccttctacagcttcctgtataaaaggctgggataccaacatctgcctgaagcaaaaacacatgtattttaaccaaataaataaaaaggaacaaaagtctgagtacatcatgctgctcatagtcttactggctgactcccattggctctctcactgttgttataatttcrtttatgccctaggcagatgggcctctctgctcataggtgatttagaatctgctgatagtggctggaatgaagcatggaggatctggcaacttctaagcacactggcttagaccactgtattcttgggctttgatgtttactccatatatgattcccatcaatggtgatacctgggcc

SEQ ID NO: 546944 - DNA, 643 bp, Homo sapiens
gatggtagttctggaaatggcccacgtatggggttgacagtagtgggaaatggatattgcaataaatttataagagcatgatgctttgcagctgaaatttcttctaaagaatgttttctgatatatcctcttgttcacgacactatcctttttagaacagaaaattcccaggaagaaaataagtataacaaacattatgatgtatacctgaagcaaaagtattttgataacttattattattctctattttagactagctttgtactttccctttaatagtcttgtcacaaaatgtgaaattttatttattgtggataacagctgacatttttgggaaatgagagaaatacaggtgactttggcttgattagaaacattatacgatattatctacttggttctttgatcaaygtagttactcaaaaagagatagttcattatttgggggttatatatattttaatttcagggcgatttgctttttagcctccaaattgtcaaaaagatgtgctctcttcaacaagtctatcttctttaaccaatgatgtctcttggataaaatactcatgcaaccatttttttgtagtgaaacttagacagtatgagcaccttagggatatccaaaatgagaaaaaaatattg

SEQ ID NO: 546945 - DNA, 1708 bp, Homo sapiens
ccttcaacctgagttttacttatttctacttttcctttttaattcacagacaccaataaactcagaaaatacagtgtaaaacaaagtgaagaacaaataaacaactcaccagagatttattcgtttcctgttgctcttggaaacacccagaggacactggaaacatagctgggatagaaggcaaatgacgtgggttaaggagagaactggtgtggtgtggtcccagattcttctgcccaacactctagacacattacttgggaaagccctcctccctcctgaaaaagaaaaacttccccatgggagaagggtccttcatgccccattaggggcaacaaagactcaagttaagataagatacatctacaagtacattaattggtagacattagatgcacaatttatttttgaataaaaacatgtattacctactaatttagtaacaatattatctaaagatataatctaataatttaatacaaagaaacataagttcactaaaataaatgttatagaaatatactaggctgtattaactattttcctattaatatgtagattccacaaataacttcatatgagtgttcccatgacagtacatcttgcttttctatacctgaacatmatggaaagtgcatcttgcaatccagcaattttggcctacaattacgttttttaaaatgtacataatatgtatttcctacagtacaccattccactcatgtttcccaataacacctttccttctatccaagccctcatattatgctctgacaataaattgggcttttccatctgacttgtccagtgaatggacaatggaaaatgtgatgcaaatatacattggttcttcccatttggacacagtcaaattgtgaagaggtctggagctaccctgttagagacacagggcctagccaagagtcaccacaaaccaccagattgtgaaggaaactatcttaaaccaaccaggctcagtcaaggcaccaggtgactaaggcctttttgtgatccaggcaacacaaatatatcaactacccagctgaatccaccacaccaaaatgcagatccacagaacttcaaacaaataaaatggtggttttttataagccactaaggtttaattagttccttaaacagcaagtattaactgttacacctaagtgaacagaattcacttctgtgtttttaacaaaattacgtagggggagaaaatcttaaattacaaatcaaatacaatcaagagaacttcgcaatctaatgctaaatttggtgatggactaggtttaatatatctcagacgctggaagaaacgagctaaggttgaaggaatgggactgtgtttggagagtattttaatcttctcaagtatgacaggtcactcctgtaccccagaccacactttcaggccccttcaaataaggaatatttcctaagtccttgcctgttcttctcagctgaattcacctcaaccttctgaaggttcgtccaaaccttctgctatcacctagtctttgcaaatcttgtgcattctagggagtagaattaatatttcctgagcgaggaaaactgggttcttcacctgtgaccttttttcctcctctgaagcaccagtgagaggttagaccagatggctgttctttcaagtgcacttcttattcatagggaaccctccctttcaaactttgtaacacacagttaagactga

SEQ ID NO: 546946 - DNA, 1708 bp, Homo sapiens
ccttcaacctgagttttacttatttctacttttcctttttaattcacagacaccaataaactcagaaaatacagtgtaaaacaaagtgaagaacaaataaacaactcaccagagatttattcgtttcctgttgctcttggaaacacccagaggacactggaaacatagctgggatagaaggcaaatgacgtgggttaaggagagaactggtgtggtgtggtcccagattcttctgcccaacactctagacacattacttgggaaagccctcctccctcctgaaaaagaaaaacttccccatgggagaagggtccttcatgccccattaggggcaacaaagactcaagttaagataagatacatctacaagtacattaattggtagacattagatgcacaatttatttttgaataaaaacatgtattacctactaatttagtaacaatattatctaaagatataatctaataatttaatacaaagaaacataagttcactaaaataaatgttatagaaatatactaggctgtattaactattttcctattaatatgtagattccacaaataacttcatatgagtgttcccatgacagtacatcttgcttttctatacctgaacatcatggaaagtgcatcttgcaatccagcaattttggcctacaattacgttttttaaaatgtacataatatgtatttcctacagtacaccattcyactcatgtttcccaataacacctttccttctatccaagccctcatattatgctctgacaataaattgggcttttccatctgacttgtccagtgaatggacaatggaaaatgtgatgcaaatatacattggttcttcccatttggacacagtcaaattgtgaagaggtctggagctaccctgttagagacacagggcctagccaagagtcaccacaaaccaccagattgtgaaggaaactatcttaaaccaaccaggctcagtcaaggcaccaggtgactaaggcctttttgtgatccaggcaacacaaatatatcaactacccagctgaatccaccacaccaaaatgcagatccacagaacttcaaacaaataaaatggtggttttttataagccactaaggtttaattagttccttaaacagcaagtattaactgttacacctaagtgaacagaattcacttctgtgtttttaacaaaattacgtagggggagaaaatcttaaattacaaatcaaatacaatcaagagaacttcgcaatctaatgctaaatttggtgatggactaggtttaatatatctcagacgctggaagaaacgagctaaggttgaaggaatgggactgtgtttggagagtattttaatcttctcaagtatgacaggtcactcctgtaccccagaccacactttcaggccccttcaaataaggaatatttcctaagtccttgcctgttcttctcagctgaattcacctcaaccttctgaaggttcgtccaaaccttctgctatcacctagtctttgcaaatcttgtgcattctagggagtagaattaatatttcctgagcgaggaaaactgggttcttcacctgtgaccttttttcctcctctgaagcaccagtgagaggttagaccagatggctgttctttcaagtgcacttcttattcatagggaaccctccctttcaaactttgtaacacacagttaagactga

SEQ ID NO: 546947 - DNA, 1708 bp, Homo sapiens
ccttcaacctgagttttacttatttctacttttcctttttaattcacagacaccaataaactcagaaaatacagtgtaaaacaaagtgaagaacaaataaacaactcaccagagatttattcgtttcctgttgctcttggaaacacccagaggacactggaaacatagctgggatagaaggcaaatgacgtgggttaaggagagaactggtgtggtgtggtcccagattcttctgcccaacactctagacacattacttgggaaagccctcctccctcctgaaaaagaaaaacttccccatgggagaagggtccttcatgccccattaggggcaacaaagactcaagttaagataagatacatctacaagtacattaattggtagacattagatgcacaatttatttttgaataaaaacatgtattacctactaatttagtaacaatattatctaaagatataatctaataatttaatacaaagaaacataagttcactaaaataaatgttatagaaatatactaggctgtattaactattttcctattaatatgtagattccacaaataacttcatatgagtgttcccatgacagtacatcttgcttttctatacctgaacatcatggaaagtgcatcttgcaatccagcaattttggcctacaattacgttttttaaaatgtacataatatgtatttcctacagtacaccattccactcatgtttcccaataacacctttccttctatccaagccctcatattatgctctgacaataaattgggcttttccatctgacttgtccagtgaatggacaatggaaaatgtgatgcaaatatacattggttcttcccatttggacacagtcaaattgtgaagaggtctggagctaccctgttagagacacagggcctagccaagagtcaccacaaaccaccagattgtgaaggaaactatcttaaaccaaccaggctcagtcaaggcaccaggtgactaaggcctttttgtgatccaggcaacacaaatatatcaactacccagctgaatccaccacaccaaaatgcagatccacagaacttcaaacaaataaaatggtggttttttataagccactaaggtttaattagttccttaaacagcaagtattaactgttacacctaagtgaacagaattcacttctgtgtttttaacaaaattacgtagggggagaaaatcttaaattacaaatcaaatacaatcaakagaacttcgcaatctaatgctaaatttggtgatggactaggtttaatatatctcagacgctggaagaaacgagctaaggttgaaggaatgggactgtgtttggagagtattttaatcttctcaagtatgacaggtcactcctgtaccccagaccacactttcaggccccttcaaataaggaatatttcctaagtccttgcctgttcttctcagctgaattcacctcaaccttctgaaggttcgtccaaaccttctgctatcacctagtctttgcaaatcttgtgcattctagggagtagaattaatatttcctgagcgaggaaaactgggttcttcacctgtgaccttttttcctcctctgaagcaccagtgagaggttagaccagatggctgttctttcaagtgcacttcttattcatagggaaccctccctttcaaactttgtaacacacagttaagactga

SEQ ID NO: 546948 - DNA, 1708 bp, Homo sapiens
ccttcaacctgagttttacttatttctacttttcctttttaattcacagacaccaataaactcagaaaatacagtgtaaaacaaagtgaagaacaaataaacaactcaccagagatttattcgtttcctgttgctcttggaaacacccagaggacactggaaacatagctgggatagaaggcaaatgacgtgggttaaggagagaactggtgtggtgtggtcccagattcttctgcccaacactctagacacattacttgggaaagccctcctccctcctgaaaaagaaaaacttccccatgggagaagggtccttcatgccccattaggggcaacaaagactcaagttaagataagatacatctacaagtacattaattggtagacattagatgcacaatttatttttgaataaaaacatgtattacctactaatttagtaacaatattatctaaagatataatctaataatttaatacaaagaaacataagttcactaaaataaatgttatagaaatatactaggctgtattaactattttcctattaatatgtagattccacaaataacttcatatgagtgttcccatgacagtacatcttgcttttctatacctgaacatcatggaaagtgcatcttgcaatccagcaattttggcctacaattacgttttttaaaatgtacataatatgtatttcctacagtacaccattccactcatgtttcccaataacacctttccttctatccaagccctcatattatgctctgacaataaattgggcttttccatctgacttgtccagtgaatggacaatggaaaatgtgatgcaaatatacattggttcttcccatttggacacagtcaaattgtgaagaggtctggagctaccctgttagagacacagggcctagccaagagtcaccacaaaccaccagattgtgaaggaaactatcttaaaccaaccaggctcagtcaaggcaccaggtgactaaggcctttttgtgatccaggcaacacaaatatatcaactacccagctgaatccaccacaccaaaatgcagatccacagaacttcaaacaaataaaatggtggttttttataagccactaaggtttaattagttccttaaacagcaagtattaactgttacacctaagtgaacagaattcacttctgtgtttttaacaaaattacgtagggggagaaaatcttaaattacaaatcaaatacaatcaagagaacttcgcaatctaatgctaaatttggtgatggactaggtttaatatatctcagacgctggaagaaacgagctaaggttgaaggaatgggactgtgtttggagagtattttaatcttctcaagtatgacaggtcactcctgtaccccagaccacactttcaggccccttcaaataaggaatatttcctaagtccttgcctgttcttctcagctgaattcacytcaaccttctgaaggttcgtccaaaccttctgctatcacctagtctttgcaaatcttgtgcattctagggagtagaattaatatttcctgagcgaggaaaactgggttcttcacctgtgaccttttttcctcctctgaagcaccagtgagaggttagaccagatggctgttctttcaagtgcacttcttattcatagggaaccctccctttcaaactttgtaacacacagttaagactga

SEQ ID NO: 546949 - DNA, 1667 bp, Homo sapiens
tgtggctacagacggagaaatgggattctttacccattctttatgggagaagggcagggtttctacgaggaaggcatgtgaatggagaagaaatgattgataatctctgataaaacagtgggcatgcaaggtggaattcaggcagtatttcagattcagaaatgtaggtcacaatttcttatctgcagttcggaagcctgaaaagcactgaaaacacagttattcttaagtttatggcatattcattgttgacaaaactggaacttatatgggtgaggcatttattacattttgaatattcatatgtttcattgcaaatgttatgtttactacatggccctacctcatggagctttcagccagaacagttagagttcctggatctctagttcaagtcacccccaaaaccctccaaacatgtaaacgtcttcattcttagaagtattactgaatgtatgtgtcaccactcttaaaatatttccaataggagaaaactgtaatagaatacttaagatagtgagtaatgattactgaaagaaaaaaagagcccagtttgtaggtaaagccaacaagggagggagatgtatagtgccagagcacgttagacatagtccgatatttgtgtaaaacgagactagattggcatacaggaaaaaatgcttagaagcctgtgtaggaggaatctggctaaaacataaaggtaaagattaaggagacttttgattccatcttagctaacattttaaataagaacatgtaagtgttttcagaagtggctccatataattggacttagctttcattagcagttttgctttgcagcatatttggaacataatttgtttaaaattgaaatggttttctttacttttatggtggttgatttatttatttatttatttatttttggggacagggtctctgtctgtctcccaggctggagtgcagtggtgtgatctcggctcactgcaacctccacctccttggttcaagcaattcargctacctgagtagctggaattacaggcatgcaccaccacacctggctaatttttgtatttttggtagagacggggtttcaccatgttggctaggctggtctgaactcctggcatcatgtgatctactggcctgggcctcaaagtgctaagattacaggtgtgagccactctgctcaggctatggtggtttttatacagcaacactcagtttattacagtttatcccagtgcttattgcatttttttctgttaggaacctgtagtcaattcctcccttatttgcaaaggggtttacttaaaagatttgtaatttttgtaaattttgttgaaagtacactatttgtatactttggtaatgatatttatacatctacttgacaaatctatcttttaagaaattattttcagcttttaagtaactgtcacataacatgtatgtccagtatccattggcttcagctcccactgatactattttctttttgactcagcagctttaaaaccaaaatagtaagatctgtcttgaagccacagtctagcaggagaagcaaactatataaatttagacagctctgattagcacagttcccaaactgttatattatgcattaacccatacaggaagaatttaaaattgcagtatggtgagacaagttttagaagtga

SEQ ID NO: 546950 - DNA, 1071 bp, Homo sapiens
ctctgttctcagaaatgcttcctttttttttttcttttttgagacagggtctcattctgttgcccaagctggagtatagtggcatgatgtcagctcactgcagcctcaaactcctgggctcaagcaatcctcccacctcagcctcccaagtaactgggaccacaggtgcatgccaccatggctggctaattttttttttacattttatagagatggggtctcacaatgttgcccaggctggtcttgaactcytgggctcaagccatccttccgcctcagactcccaaagtgctgagattacaggcatgagccccagtgcctggcctgagatgctacttcttgtccatggaaatgtaggaagtgcaaacattttgttcctcaattctctcctctctctcatagctgagtttctcctcttctagatattcccttcggcacacaaaacatgctgtagttggccccatatttaaaatcccttccttagccctccaactcccactctttgctctgctctgttttatagcaaaactctgaaaaagaatagcttatcctcgctgctcattgttcctctttctcccatgctttcgtttttttttcggagatggagtcttgctctgtcacccaggctggagtgcaatggcatgatctcagctcactgcaacctccgcctcccaggttcaactgattctcctgcctcagcctcccaagtagctgggattacaggcatgcgccaccatgcccggctaattttgtatttttagtagagacagagtttctctatgttggtcagcctggtctcaaactcctgacctcaggtggtctgcctgcctccacctcccaaagtgctgggattacaggtgtgagccaccacgcctggcctgaatttttttttttagcgggagatgttaaggagaagaaaagggagaatctcatagggataatattttgctattttaaaataaacaagttctggggatctaatgtacagcgtaggtggtggtgaatgtgttaatttgtgataatcattacacgacttatacatagatcatcacaatgtacaccttgaatata

SEQ ID NO: 546951 - DNA, 1071 bp, Homo sapiens
ctctgttctcagaaatgcttcctttttttttttcttttttgagacagggtctcattctgttgcccaagctggagtatagtggcatgatgtcagctcactgcagcctcaaactcctgggctcaagcaatcctcccacctcagcctcccaagtaactgggaccacaggtgcatgccaccatggctggctaattttttttttacattttatagagatggggtctcacaatgttgcccaggctggtcttgaactcctgggctcaagccatccttccgcctcagactcccaaagtgctgagattacaggcatgagccccagtgcctggcctgagatgctacttcttgtccatggaaatgtaggaagtgcaaacattttgttcctcaattctctcctctctctcatagctgagtttctcctcttctagatattcccttcggcacacaaaacatgctgtagttggccccatatttaaaatcccttccttagccctccaactcccactctttgctctgctctgttttatagcaaaactctgaaaaagaatagcttatcctcgctgctcattgttcctctttctcccatgctttcgtttttttttcggagatggagtcttgctctgtcacccaggctggagtgcaatggcatgatctcagctcactgcaacctccgcctcccaggttcaactgattctcctgcctcagcctcccaagtagctgggattacaggcatgcgccaccatgcccggctaattttgtatttttagtagagacagagtttctctatgttggtcagcctggtctcaaactcctgacctcaggtggtctgcctgcctccacctcccaaagtgctgggattacaggtgtgagccaccacgccyggcctgaatttttttttttagcgggagatgttaaggagaagaaaagggagaatctcatagggataatattttgctattttaaaataaacaagttctggggatctaatgtacagcgtaggtggtggtgaatgtgttaatttgtgataatcattacacgacttatacatagatcatcacaatgtacaccttgaatata

SEQ ID NO: 546952 - DNA, 674 bp, Homo sapiens
tattgtactagtccaggaacctaactggttcctttatttccagtcttaatgtccttcaattagtacagctgttaatatattaatccagtcgtgtcatcctcatgctcagattttcaacagctactttttgacataggccaaaagaccaaatcttgaactaggtgctcaagtctctccataatctgttacctgcctacctctgcatgctcctccctctctctctctcttctatgaatcttgcttcctaaatttgaatctgaacatttttcatgtctttaaatgcatcaccttgagtgatagaaaccagaaaagtagttacctcctggggtggaattgcctacaataggagcacragaacaattgggggaaagataaaaatgttctctatcttgatttgggtggaggatatataagtatgtacatgtgttaacatttcaagcagtaccctgaagattggcacatcttattatatgtaaattattcctcagtacggcatttttaaaaacataatacaggaacacacacaaagtacatgtatcagtgctctttcttctgtttggaatgctccgcctaccccaaagctttgcctaagtaactcctactcattcttcaggtttcaaattttatttacccaaatacttgacctgatcccaagtctaaggtatgccactctg

SEQ ID NO: 546953 - DNA, 1280 bp, Homo sapiens
aaagagcacaaatcattgactcttgatttggtactctcttgagtacagaagacagttgagatatttcttgtgaaaatatttacatcctcccccaaagacaaataggttgttttacgccaagtgaccaaaatacagggcctagaattattatgtttttttagagacagggtgttgctctgttacccagactagagtacagtrgtgtgaccatagctctttgcaaccccaaactcctgggtttaagtgatcctcccacctcagccttctgaatagctgggcctacaagcatgtcctcaatgcttggctaattttttcttattttttctttttagagacaaggtcttgctatgttgcccaggctgctctggatctcctaggctcgagaccctcctgcctcagccttccaaagtgttgggattataggtgtgagccactgcaccccaccactaattcctgctctccttatatcaatttatgacattcagggttgaagatgggcccctacccagaaacatatgcccttgagaagaggattcacagagaccctttaagagccaaaccaacaaagccgtgaaggcaatggtggaataattaacaatgaggttgatatttctgaggtgcacttgttcagcctgccctgcccccttctccatggggtaactgggccctaggcttctcctgagaaccatccctttctgataggtcctattatgaaagtcttccacaagtcttacttggatacactcgtaaagtaggctgtgactgtcagtgctcatgcttttggtgtgtccactctcatctacctctgcccaccctcactgccctggcaccttgatgtgtcagttggctgccagtgcatgggcagaagttctcaaaccttagcgtgcactggaatagcctggagagtttgtcaacaacacagatgcttggcacccctctcacatcaagtagtcatccctagcactactgacattttggaccagataattcttggttgtgggggctgtcctgggcattgtaggatgtttagcagtatccctgtcctctaccccctacatgccaggagcaccctcccaaatcgtggcaatcaaaaatgtctccaggctgggtacagtgtttcatgcctgtaatcccagcactttgggaggccgaggcgggcggatcactcgaggacaggagtttgagaccagtctgatcaacacagtgaaacctcatccctaccaaaaaatacaaaaattagccaggtgtgatggcatgtgcctgtagtcccagctactcag

SEQ ID NO: 546954 - DNA, 553 bp, Homo sapiens
tgtatccaactgctcttgaagtatttgggcatttccatttcttcactacacaattaaccaaataaatacctatatgtcctttagagaagaactgagcaaatcatgcacacttattatgatattgcagcattcttcagcctcctaatcatatacctgtgatttcttttgatagtgtaaattaagtattgccctattttcctgcccacttaatgtgctcctaggatgctatgttctttaaaccattttcacagctgtcttaatcagtctccttccttttatgttaacagtattttgcatccattttgcttccgatttagcactgccacctgcactctattttgtggcgcactatcacctgtcctgctaaaagagaacatacttctgcaatgatctcttcaacaatcaatcccatggcaatatggagagtcaccactgacctttctggtaatgtgagtgatgcaytcatctgaacatttcttatgtccttgttaaataatgtatgctccgaatatttttataaggcataaatatctggtgagacttccagccaaat

SEQ ID NO: 546955 - DNA, 537 bp, Homo sapiens
tgtgatttggttatgactgtcacagcaagaaaatgtaattatttaaatatcgaataactatggagtccctaaagtattgattggctttaaaatgatattcttatattttttgagtttttcattaaatagaaaatattgyttagagtgaagattcaaatgttttcaaaagtatgcaaaattctaaaacaatgagaaaacagcaaataattttgattattgttttctctttaatgtgtgactatttctaatgtgaatcaactatattgatcaatgctcctgtaaatacatgttacttaggtaacttataaaattataattcaagtttctaaatttctgccacagaccaaatagttgcctttaaaatattataactttttaaatatataaatttatacaaatactgctgctgctaagagttaaacagcctcagtgtggctaagattgaatattttatttaaagactatttagtagatatcttgacatttcagtttaagagggctccccgtaacccctagtgggagcccctctctaatgga

SEQ ID NO: 546956 - DNA, 663 bp, Homo sapiens
ccctgtgaaagccctacagaatctctgtgtggaatgtttgagggaattctatgtgagaggtttctgggcaatgagtgtggagcaacctgaggcctgtgtgaggaatctatacaaggtctctgtggagagtgggaggtctccaggcaaggtctctgtgtgaggaggactctgagagaggtctctgtgaggcagtggggggtgccgtgtgccatttctggggctggaggccggaggttgcagtgagctgcatgagtctctgcatgaggtccctgttttatgactctgtgtgaagtctctgaggtctttgtggggtctctgtgtgagatctccctgtgagaaccatggaaggtctctgacatttgcgggaggtctctgtgggactgagtgaagtctctcagcrtggcctctgtggggttctctgggtgaggactctgggaatctctgtgctaggtctctgtggggcaccatgaggactctgagagctccgtggggtctctgtggaggctacagtgtgtctctctccgtggcagtgagaggtcccagtgtgctcactctgtacgagatatctctgtgaggttcctgtgggaggtctccgtgggtctctccattgctggcctcgctgcatgtcatgggagactgagctgcagaagggctaaggggttg

SEQ ID NO: 546957 - DNA, 663 bp, Homo sapiens
ccctgtgaaagccctacagaatctctgtgtggaatgtttgagggaattctatgtgagaggtttctgggcaatgagtgtggagcaacctgaggcctgtgtgaggaatctatacaaggtctctgtggagagtgggaggtctccaggcaaggtctctgtgtgaggaggactctgagagaggtctctgtgaggcagtggggggtgccgtgtgccatttctggggctggaggccggaggttgcagtgagctgcatgagtctctgcatgaggtccctgttttatgactctgtgtgaagtctctgaggtctttgtggggtctctgtgtgagatctccctgtgagaaccatggaaggtctctgacatttgcgggaggtctctgtgggactgagtgaagtctctcagcgtggcctctgtggggttctctgggtgaggactctgggaatctctgtgctaggtctctgtrgggcaccatgaggactctgagagctccgtggggtctctgtggaggctacagtgtgtctctctccgtggcagtgagaggtcccagtgtgctcactctgtacgagatatctctgtgaggttcctgtgggaggtctccgtgggtctctccattgctggcctcgctgcatgtcatgggagactgagctgcagaagggctaaggggttg

SEQ ID NO: 546958 - DNA, 546 bp, Homo sapiens
caaaccttacccttgccaaattgtttcacaataattacagcttttcaaatggtttttcaacaacactcaaagatccattttcttaygagtacacattcatattacaatacttgaaaaacaatgttagttgggatgggtctatatgcaaacaagcctgtggtataaatttagaattttcttttatccacagaaagcagactgccatcttcattaaattcttatatgcacagttttctgcgtctactggattgggaccattatcttataataaacacatctgtcctgtttactgctacaaaactaaagagtgacttctagccacagcactccatgcgacacttagcttaagttgttggtatcctgcctacactcccttaacactcaccctctccaaacctatggactgcctctgattgcatgtggccacatctcaagcttgagtgctttccttggctggtagaagggacccctcagccctcaccccaggaagatagaagatctgggaaatttctgacccagaaatggcctccaacccatgacacataa

SEQ ID NO: 546959 - DNA, 546 bp, Homo sapiens
caaaccttacccttgccaaattgtttcacaataattacagcttttcaaatggtttttcaacaacactcaaagatccattttcttacgagtacacattcatattacaatacttgaaaaacaatgttagttgggatgggtctatatgcaaacaagcctgtggtataaatttagaattttcttttatscacagaaagcagactgccatcttcattaaattcttatatgcacagttttctgcgtctactggattgggaccattatcttataataaacacatctgtcctgtttactgctacaaaactaaagagtgacttctagccacagcactccatgcgacacttagcttaagttgttggtatcctgcctacactcccttaacactcaccctctccaaacctatggactgcctctgattgcatgtggccacatctcaagcttgagtgctttccttggctggtagaagggacccctcagccctcaccccaggaagatagaagatctgggaaatttctgacccagaaatggcctccaacccatgacacataa

SEQ ID NO: 546960 - DNA, 541 bp, Homo sapiens
tttcagagatttcccagtcttctaaaactctatacatggatacttttacaggtattggaaccgaagcaaaaacccatgccctagatcagagctatccaatgaaaacacaaggaaagacatgtgtaattttaattttctagtagtcacattttttaaaagcaaagagaaacgggtgaaattaagcttaatactatattttacttatcccaatataaccaaactcgtgatttcaatatgtaattaatacaaaaaatactaataaaccactttaccttattttttctgtcttcaaaatcyagtgttatatgtgacacctatagcacttctcaactgaggctatctacatttcaaattctcagtagccacctatgcctggtgctaccatattggacagtgcagctctaaagaaagaagtaatggaaggttgttttcctgaacttcctcttttccctttacaatcccatttgccctttgagcatcgtctcattatacaataattcacaacttttcaccccatctcaaggcaacagttatctcattg

SEQ ID NO: 546961 - DNA, 1535 bp, Homo sapiens
tggcctcctaggtctggaaggtccttgattgataatctcattcaactacctgcctgtggccagggttctcaggtgcataagaactgggagaatctcccaaataaaggcatcttccagtgctggagggcatggctggtaaaatagtcttataaagatcacttggtcctaaaatatcagcatctcagtggtgacacaaaaaagctggggtttaaggaagatactttagaaatagcaactagccattgctgagagtgaacctggaggctgttcataatgacactgagagcagaaatgccaagaaggtgctcatttgacacagggcagaggtggaaattaatctgaaagttgatgtccaaggtaggggtcgctctttaaaaaaaaaataagtaattaagttaaattaaaatttactttttttttttttttttttgagacagaatctcactctgtcacccaggctggagtgcggtggtgcgatctcggctcactgcaagctccatctcccggtttcatgccattctcccgcctcagcctccggagtagctgggactacaggtactcgccaccatgcccggctaattttttgtgtttttagtagagacggggtttcaccattcacaggatggtctcgatctcctgacctcgtgatccacccacctcagcctcccaaagtgctgggattacaggcatgagccaccacgcctggcctaaaatttactttttaagaaacagggtctccactgtattgcccaggctggagtgcagtggcacagtgatagttcactgcagcctccaactcctgggctcaagtgatcctcctgcctgcttcagcctcctgagcagctagtatcacaggtgcatgtcatcacacctgggctaatttttgttttatttcattttatttgtactttttgtagagatgaagtctcactatgttacccaggttggcctcaaactcctggcctcaagctatcttcctgtctgtggtaaatcttgttatggactttagatagatataggagtgagctcccaaaaatactgccttgcttaatcttctcaggacacatttccttagtatttcaaggcatggtgggcttcttgtgctgggccatgacctattctttgctcctattgggatgctcaaaattacttagctattaactagggagatgttctattttaacctctcttttcccccatgttctgaattgttcaaatctccgatgcagggctcagcagaggatctaattactgccctgcttgccacttgctgattagcttcaagagccagggaatgactttaaaacagttaaatatcaagaggcagcttctttaaaaattctacaggagtctcagtcttactaagggaagctggatggtatagtctgagagagtttgctggataaggccrtcttctaactacacatcattgccagatactcaaggctcaggagaaagccctgctttgaattaaataaggcgatctttatgaatgtcctagtcacagtcctttcctcatcagaatcttgagaaca

SEQ ID NO: 546962 - DNA, 827 bp, Homo sapiens
gcacttcgaataccaattgtatatatttaagtgggtcaagagattgggattctaattccaactccaccactaactttctgggattctagcactggttttgttacaaatggcttttttttttttcctgagacagggtcgcactctgtcacccagactggagtgcagtggtatgatctcagcttgctgcaacctctgcctcccaggctcaagcaattcccctgcctcagcctcctgagtaactgggattacaggcatgctccactactgcccgttaatttttgtatttttagtagagacagggtttcgccacgttggccaggctggtctcgaactcctgacctcaaatgatccacccgccttggcctcccaaagtgctaggatttcaagcgtgagccaccccgcccgcccagttaccaatggctttgtgacctggggcacatcacagaccctttctaagtcttagttgcyccacagatactaagaggggacacagtgctcttttggttgcctccagctctgatgttttgtagttctaacgaggagtccttatttggaaatggaactttggaatggtttggatctcattctggccatagagagggcatcattgcaactgtggcttcagggccaatgtgcgcttaggggggctgagtcagaacagccccctcttcctcgatagtgccatcctgtgagtataacccctgtatgggtgttggacacagtgttggggaagactgtgcaacaggggtaagtaggaaaggccctgtggtagggggttagctgggtatccatggaaatgcctgaactactcatgccttttgcacaag

SEQ ID NO: 546963 - DNA, 827 bp, Homo sapiens
gcacttcgaataccaattgtatatatttaagtgggtcaagagattgggattctaattccaactccaccactaactttctgggattctagcactggttttgttacaaatggcttttttttttttcctgagacagggtcgcactctgtcacccagactggagtgcagtggtatgatctcagcttgctgcaacctctgcctcccaggctcaagcaattcccctgcctcagcctcctgagtaactgggattacaggcatgctccactactgcccgttaatttttgtatttttagtagagacagggtttcgccacgttggccaggctggtctcgaactcctgacctcaaatgatccacccgccttggcctcccaaagtgctaggatttcaagcgtgagccaccccgcccgcccagttaccaatggctttgtgacctggggcacatcacagaccctttctaagtcttagttgccccacagatactaagaggggacacagtgctcttttggttgcctccagctctgatgttttgtrgttctaacgaggagtccttatttggaaatggaactttggaatggtttggatctcattctggccatagagagggcatcattgcaactgtggcttcagggccaatgtgcgcttaggggggctgagtcagaacagccccctcttcctcgatagtgccatcctgtgagtataacccctgtatgggtgttggacacagtgttggggaagactgtgcaacaggggtaagtaggaaaggccctgtggtagggggttagctgggtatccatggaaatgcctgaactactcatgccttttgcacaag

SEQ ID NO: 546964 - DNA, 827 bp, Homo sapiens
gcacttcgaataccaattgtatatatttaagtgggtcaagagattgggattctaattccaactccaccactaactttctgggattctagcactggttttgttacaaatggcttttttttttttcctgagacagggtcgcactctgtcacccagactggagtgcagtggtatgatctcagcttgctgcaacctctgcctcccaggctcaagcaattcccctgcctcagcctcctgagtaactgggattacaggcatgctccactactgcccgttaatttttgtatttttagtagagacagggtttcgccacgttggccaggctggtctcgaactcctgacctcaaatgatccacccgccttggcctcccaaagtgctaggatttcaagcgtgagccaccccgcccgcccagttaccaatggctttgtgacctggggcacatcacagaccctttctaagtcttagttgccccacagatactaagaggggacacagtgctcttttggttgcctccagctctgatgttttgtagttctaaygaggagtccttatttggaaatggaactttggaatggtttggatctcattctggccatagagagggcatcattgcaactgtggcttcagggccaatgtgcgcttaggggggctgagtcagaacagccccctcttcctcgatagtgccatcctgtgagtataacccctgtatgggtgttggacacagtgttggggaagactgtgcaacaggggtaagtaggaaaggccctgtggtagggggttagctgggtatccatggaaatgcctgaactactcatgccttttgcacaag

SEQ ID NO: 546965 - DNA, 554 bp, Homo sapiens
gacatcgaaaagaggttcagatactgggcagccaaaaaggaaaaaaaaaaaagacaaataccccatgcacctcagtcactctggcggccttcgttttctctaataacgagacaatttcaaagcaaaagttggatatgccgaaagcagtaaatggcatattagctctcttaggggaaccaaccagacaggaatctgtaggggtgagaaggcaatgttaattgcagaggatggctcctccctctgaaactacggccatcagacggataaggccaggcaatagtcctgctaccccgactgcccacaggcatctgccaaatctctctcttttatcttcagaaaaagaaaacttggcctggaggggccatcacggattaaagtagaaagataaatggagactttgactgtgtgtatgagttacctaagccgtaatttttcaaygggataggtatatgacagatgtttgaaatatacattatttacatagctggcctagtcttttgtgcggctacttgcagagctctgttttcagacctgactatagacatcaaaaacat

SEQ ID NO: 546966 - DNA, 1471 bp, Homo sapiens
cccaaaatatcaagaaacagatggcacactcaaggctgttgactggagtgagttgagtgaagggactgtctcggaaggtgtatgtaggttgtccagagctcctccgtgtgcccctcaaaatcccttcacctcttctctctgctcttcctgaggggtcacgggtgagagggctcatctacatgggttacatctgtgacctgctaggccctcaggcacccaggtgagggatcatcaatggccggccctgggtaagagatgaggggaagtgaggaatgtgaggtgaggatgtttattcccttgcgattgcctgaggctggctatgtcacttcacagaaattaatatctcctcccaaggccactgctgtgctgcctccaatgtcaaacgagctcactccttttgggctcttctcatccctttgagcctagagggatgactgctctcccaccactagccttgggtttctgggagatttcttagggtttccctacttcctgccctcatctttctaattaagccctttatcagttaacccttcctgaatcatcttgatctgaatgtgtgccctcttttctgctgggtctctaattgaagcaatagggataaggaggagatgaatattccactgtgctcagcaattgtgggaagctgtgatggctcccaggctgaaagggacaaggagaaaaagcagttactggaaccagcgtgagtagccactgccagtcatggcacagaggagcaggcagacaactggagtggagcatctcagggccaccaagggcaaaagcagagcaagagctggcactgtcatcaactgctgagggacctgtggtcagaggagtcacctcacttgcccagagtcatgtgcccacagctgtgggggtcgagcgctcctctcttcccacgttcctgccttcaccagctgaggaggaaatccctctaacaccgtccaccctgtggggaaatgccggggagggagtctctccctctcttatggtgctttaccccaccagactggggaaagacagggtcactggacctcgagacaattgtggggcccgggtgctaaagacccacaaagacctcaatctgtcttgtatcctcatggacctgtttgtgcccaaggtgaacccaccttctcctcacatgtggcaagccacataacacaggtttccctttctgccccacaagaagctaaagacccaccattctccaggctccctgccagccactgaatagacaaattagctcagtcccactctgtctcacaggaaggagctaaaggttcccatttatgcctcagatccaagacacattgtccaatccatccttatctgagagtctgtgttgggggtttggtcttcaactgactgtcagacccctgtagccactccctccatcagttagcatcttatggaaaggaggggtgagtcccagcccaccctattcccacttctccaacctccagyagga

SEQ ID NO: 546967 - DNA, 551 bp, Homo sapiens
gggccagtaaatggattctcttctcggaggtactgagacttatattgcatcccctggagggaaactgaggctcccaggttggataataaatcayaacctattaaaggaaggggacactcagggatatataggaaagaatgagtaatacccttaaatccaatttcacaagtcaaaggaaaggcaaatcattttaccttctcctggccatctattcccatcaccatacagttggcattgcagaggtcccacaggttgggtcaggacagagtaggtggtcccagtatccaatagttattcaggtttcctgcctgctacattgagagtgacctgaggctttgcggtggtgatgccaacagaacgcttcaagactgcagctgggagagcacttgggctacatccagcagagagggtggccttttcatacaagagactagcatcaagaggagtgggttggggagattcatgctgtcatgacttcacaggatggaatgaacagtcccttttccagtgcccctctttcttataataagaacattggttgtccctcagtc

SEQ ID NO: 546968 - DNA, 959 bp, Homo sapiens
acattctccccaaagtaaggttaagggaggttagaaattggtaacaaaatatcagttccatttatagcaagatgatcatcataggctttttaaatttcaaatagaaacataatcaagatgagaactgagaaaaaaactggcaacgcctcacccataactcatcttctctagaggatgcattttaacccttacctctagagtttcataggggaatatccaaagggtaccacattctagttgctgcttcctcttacttccagagcatagttgcctgcttagccccatttcattctgagtttcacacatgatttacaaactcatcactttccccacagcactcattataggtgagggccatgtatttacccgagtttgtgctatcaccatagaaattcaggatagaagggtcttagtccatttagagcaatggttctcaaacttttctttagtagtagaatccttctccagagccaagtgtacggcttgaagcagaggctatccttatgtcccagggttctttcatcagctgaggaaattagcacttaaagtcagcacctttgactgtcttctctaaatcatcttggtcttgctttcactctgctttcccttcaggcatttctcaagtgtcatgctgaaactttaaacaaatgtttaaaacacattgaacagggcccagcttttggaaactgaacactaaggttagcttctgctcacatccccctgagattctagcatgggactttgggacagactttaaaaccaatgatttagactaattcasttattttagagatgaagaatattggaagattaaatgcctcagcccagatctcaggaacaggctgcgacaaacctaggaaacccggaacgcctgctagaatactacagctggcatcagctgcatggatcaccaattactgcccaatgatcaccaacggatcaccaatcactgcccaatc

SEQ ID NO: 546969 - DNA, 643 bp, Homo sapiens
gatatacttatgtgacaaccagctgagtctcagcctatcacagtagctgagcttcagtcaatcacagatggccaactgatcattccatgtccaaatgagtcaaatgctgagctgcaaacaatcaggctgtttctgtacctcacttccattttctgtccataaatgctgcctgcccatattgtggaatgaagctctctgacccccttctggttttgaggggtgcttgatactgtgaatctattcttagctcacactgaagcatgctaaatttgactaattttgctttttaacagcacatcaaaaaacttttttctctaatctgactcrggtatagagcatttctttaaaaaacaaaaagttgttttagaaataactctaaatgagaggtatgaggcacaaaatatttcctattttcctgcttcctaaatattctctacccagtctcccctttcccttctcaccccataacagaaaacaaactaaaagtctaaattttaaaacatgagtacaggacctgattaaaactgcttcaaagacttctactggggagaataaaagtttattggtgcctccaatgcaagctactcaataactgcttagttgtgaacaatgacctactgcttcaactcagtagatgatgatt

SEQ ID NO: 546970 - DNA, 622 bp, Homo sapiens
gttaagatagtctcttgaggctgaagattccacaccaggtggttgagccagcctaatgaagcagcacatgctcatgtgggatacaaagggtggacttggaagaacctgcttgcatttggttatttatgaaagtataaagaaagatttgaaatcaaagtgaaaatgaaattaaatcaaagccttcccattcacayagcagagtttttctaaagttttaaaatttgttttcaaaaattaaggctgaaggaaaaaaccttttatgtatgcttttagtgacgagataacaaaactatttccaactccactaccaagtggtaaaatgaaaataataaactttaagtggattaaaatacaagcataatttcttaaaacttagcgtgtttcttgtattgaaagacttaaaaatgtgagttcaggttagtgctattacaacacaacttcagtaaatggactgaccataaagcatgaccttaggcagtaataaacctgagagcattttaatatatttccttatcaccaagtgaagcactttaagttattacagctaggctgcatgacctcatgcaattgaatcatgctagagccaaatagactaatgtctttgatagcaattagataaagg

SEQ ID NO: 546971 - DNA, 622 bp, Homo sapiens
gttaagatagtctcttgaggctgaagattccacaccaggtggttgagccagcctaatgaagcagcacatgctcatgtgggatacaaagggtggacttggaagaacctgcttgcatttggttatttatgaaagtataaagaaagatttgaaatcaaagtgaaaatgaaattaaatcaaagccttcccattcacatagcagagtttttctaaagttttaaaatttgttttcaaaaattaaggctgaaggaaaaaaccttttatgtatgcttttagtgacgagataacaaaactatttccaactccactaccaagtggtaaaatgaaaataataaactttaagtggattaaaatacaagcataatttcttaaaacttagcgtgtttcttgtattgaaagacttaaaaatgtgagttcaggttagtgctattacaacamaacttcagtaaatggactgaccataaagcatgaccttaggcagtaataaacctgagagcattttaatatatttccttatcaccaagtgaagcactttaagttattacagctaggctgcatgacctcatgcaattgaatcatgctagagccaaatagactaatgtctttgatagcaattagataaagg

SEQ ID NO: 546972 - DNA, 605 bp, Homo sapiens
atgactttgaattagctcttccaggctcacaaagtgatagctaactaaaccttgcaaccagagtttctttagtgaagtagggcacagacttcactgcagtgaaaagctgggctctggaaacacctgaatctccagtttcagataacaatgaacaagtcctgggacaaggagacgctgccttcattaataggaatgagtgaggctgcctttccctccacaatcaactgattcaaatcatccatatttatgtgttacatggcttataaatataacatgcaaagtatctactgtcttggtatttccttagctaaacaactatattgggttctgaggctcaggcactaagctcatctctcagatactgaccatatgaggttatagtgaagatttgatcttaaatgtgtatacgttgtgcttgggacatagaaatgcaacacatggtagctatcattggtgaaaggtgatggtgccacttttgctttctcaaagaaatctgaaagtaactcaaactgtaaaatgtgtattatgattaggaataggtctgattttsacataaggctcacatgaaatttaactatatacacatggaagtagtgtaaacacac

SEQ ID NO: 546973 - DNA, 662 bp, Homo sapiens
aatcccagcactttgggaggctgaggcaggtggatcatttaagcccaggagtttcagaccagcctgggcaatacagtgaaaccccatcttcrctaaaaatgcaaaagataataaataaataaataaataaaatgactgaaaacttctcaaacctggggaaagaaataaatattcagatcctggaagcccaaaagattttgaataagataaatgcaaagaaaaatccatactgagatacagtatgtgggtatgtatatatactcttactctaggacccacacctggagtgcaggctgatgtgatcatatctcactgtagcctcaaactcccaggctcaagtaatcctcccacctcagcctcccaagtagctaggactatatacagacatgctccatcacacctggataaactatttttaaattttttttatagcgaccaagtcttactatattgcccatgctagttctaaacttcagcgttcaagcaatccttctgcctcaggctttcaatttgttagtattataggcatgagccatcatgctcagcccaagacacattataatcaaattgttaaaagtcaaaggcaaagtataaaagttgttgtaaagataaatatatagacaaatgcagagtactgtactactgtaatagcattggggaaa

SEQ ID NO: 546974 - DNA, 662 bp, Homo sapiens
aatcccagcactttgggaggctgaggcaggtggatcatttaagcccaggagtttcagaccagcctgggcaatacagtgaaaccccatcttcgctaaaaatgcaaaagataataaataaataaataaataaaatgactgaaaacttctcaaacctggggaaagaaataaatattcagatcctggaagcccaaaagattttgaataagataaatgcaaagaaaaatccatactgagatacagtatgtgggtatgtatatatactcttactctaggacccacmcctggagtgcaggctgatgtgatcatatctcactgtagcctcaaactcccaggctcaagtaatcctcccacctcagcctcccaagtagctaggactatatacagacatgctccatcacacctggataaactatttttaaattttttttatagcgaccaagtcttactatattgcccatgctagttctaaacttcagcgttcaagcaatccttctgcctcaggctttcaatttgttagtattataggcatgagccatcatgctcagcccaagacacattataatcaaattgttaaaagtcaaaggcaaagtataaaagttgttgtaaagataaatatatagacaaatgcagagtactgtactactgtaatagcattggggaaa

SEQ ID NO: 546975 - DNA, 662 bp, Homo sapiens
aatcccagcactttgggaggctgaggcaggtggatcatttaagcccaggagtttcagaccagcctgggcaatacagtgaaaccccatcttcgctaaaaatgcaaaagataataaataaataaataaataaaatgactgaaaacttctcaaacctggggaaagaaataaatattcagatcctggaagcccaaaagattttgaataagataaatgcaaagaaaaatccatactgagatacagtatgtgggtatgtatatatactcttactctaggacccacacctggagtgcaggctgatgtgatcatatctcactgtagcctcaaactcccaggctcaagtaatcctcccacctcagcctcccaagtagcwaggactatatacagacatgctccatcacacctggataaactatttttaaattttttttatagcgaccaagtcttactatattgcccatgctagttctaaacttcagcgttcaagcaatccttctgcctcaggctttcaatttgttagtattataggcatgagccatcatgctcagcccaagacacattataatcaaattgttaaaagtcaaaggcaaagtataaaagttgttgtaaagataaatatatagacaaatgcagagtactgtactactgtaatagcattggggaaa

SEQ ID NO: 546976 - DNA, 551 bp, Homo sapiens
tcggtcaggttatgaaagctctttgagcctcagtatccttatctgtaaaatggttagaattattataaggattaagttacacaatgaaraaaagtacctcgaacatggaaggtcttcaataaatggcagtgattattgtaatcttcagaggctccttcctcctgtctcttcagggtactggagcccggggatcagctcccagcctgtccttcccatctgtttgggggtcactgggcctgctcaggaatctgtggacaggaacacaggtggcccctgctccagggctgcagctgtgctccttgcacttctaactgctccctgccaagccccatgggagcagaggggcctgggcagccttcctgtctgccagcatagcccatcactctgtggtccccagggccacagcctactggtagccaccgcaacatagagaatgtggtaggcagaatactaccaaaagtacccccaagataacagactctaatccctagaatctgtaaatgtcactgtagtgggttgaatggtgtccacccaaaagatatgtccaagtt

SEQ ID NO: 546977 - DNA, 631 bp, Homo sapiens
tctcagaggatacttgggtaaacggagggcaaattctttgaagcttcatatcttctttgttctataacttccataccatataacactgtaattttggggtgttcaataaatagtcactgaacagtcatggtacacaaagaatagctccaaatgattgctaaaacccccaaaagctgaactagaattcagagtgatcctaaacattagtaatgtattttttccaaataagactgacctctgaaatgacatacaaaataaaatgaataataataaaatgaaaaacactatcatttacataaaatataaattaacatacttagayataatagcagataaattaaatgtacaaatatgtttttaaaagctaaatagaagaaagtatatatggaagtctgaaagagagcctcatcctcaacatacatacacacaaacacacacaaaaacacaaacaaatttttttttataaaagtttaagatgtctagccgggcgcagtggctcacgcctgtaatcccagcactttgggaagccgaggcgggcagatcacctgaggtcaggagtttgagaccagcctgatcaacatggggaaacaccgtctctactaaaaatacaaaattagccgggcgtggtggc

SEQ ID NO: 546978 - DNA, 631 bp, Homo sapiens
tctcagaggatacttgggtaaacggagggcaaattctttgaagcttcatatcttctttgttctataacttccataccatataacactgtaattttggggtgttcaataaatagtcactgaacagtcatggtacacaaagaatagctccaaatgattgctaaaacccccaaaagctgaactagaattcagagtgatcctaaacattagtaatgtattttttccaaataagactgacctctgaaatgacatacaaaataaaatgaataataataaaatgaaaaacactatcatttacataaaatataaattaacatacttagatataatagcagataaattaaatgtacaaatatgtttttaaaagctaaatagaaraaagtatatatggaagtctgaaagagagcctcatcctcaacatacatacacacaaacacacacaaaaacacaaacaaatttttttttataaaagtttaagatgtctagccgggcgcagtggctcacgcctgtaatcccagcactttgggaagccgaggcgggcagatcacctgaggtcaggagtttgagaccagcctgatcaacatggggaaacaccgtctctactaaaaatacaaaattagccgggcgtggtggc

SEQ ID NO: 546979 - DNA, 631 bp, Homo sapiens
tctcagaggatacttgggtaaacggagggcaaattctttgaagcttcatatcttctttgttctataacttccataccatataacactgtaattttggggtgttcaataaatagtcactgaacagtcatggtacacaaagaatagctccaaatgattgctaaaacccccaaaagctgaactagaattcagagtgatcctaaacattagtaatgtattttttccaaataagactgacctctgaaatgacatacaaaataaaatgaataataataaaatgaaaaacactatcatttacataaaatataaattaacatacttagatataatagcagataaattaaatgtacaaatatgtttttaaaagctaaatagaagaaagtatatatggaagtctgaaagagagcctcatcctcaacatacatacacacaaacacacacaaaaacacaaacaaatttttttttataaaagtttwagatgtctagccgggcgcagtggctcacgcctgtaatcccagcactttgggaagccgaggcgggcagatcacctgaggtcaggagtttgagaccagcctgatcaacatggggaaacaccgtctctactaaaaatacaaaattagccgggcgtggtggc

SEQ ID NO: 546980 - DNA, 631 bp, Homo sapiens
tctcagaggatacttgggtaaacggagggcaaattctttgaagcttcatatcttctttgttctataacttccataccatataacactgtaattttggggtgttcaataaatagtcactgaacagtcatggtacacaaagaatagctccaaatgattgctaaaacccccaaaagctgaactagaattcagagtgatcctaaacattagtaatgtattttttccaaataagactgacctctgaaatgacatacaaaataaaatgaataataataaaatgaaaaacactatcatttacataaaatataaattaacatacttagatataatagcagataaattaaatgtacaaatatgtttttaaaagctaaatagaagaaagtatatatggaagtctgaaagagagcctcatcctcaacatacatacacacaaacacacacaaaaacacaaacaaatttttttttataaaagtttaagatgtctagccrggcgcagtggctcacgcctgtaatcccagcactttgggaagccgaggcgggcagatcacctgaggtcaggagtttgagaccagcctgatcaacatggggaaacaccgtctctactaaaaatacaaaattagccgggcgtggtggc

SEQ ID NO: 546981 - DNA, 631 bp, Homo sapiens
tctcagaggatacttgggtaaacggagggcaaattctttgaagcttcatatcttctttgttctataacttccataccatataacactgtaattttggggtgttcaataaatagtcactgaacagtcatggtacacaaagaatagctccaaatgattgctaaaacccccaaaagctgaactagaattcagagtgatcctaaacattagtaatgtattttttccaaataagactgacctctgaaatgacatacaaaataaaatgaataataataaaatgaaaaacactatcatttacataaaatataaattaacatacttagatataatagcagataaattaaatgtacaaatatgtttttaaaagctaaatagaagaaagtatatatggaagtctgaaagagagcctcatcctcaacatacatacacacaaacacacacaaaaacacaaacaaatttttttttataaaagtttaagatgtctagccgggcgcagtggctcacgcctgtaatcccagcactttgggaagccgaggcgggcagatcacctgaggtcaggagtttgagaccagcctgatcaacatggggaaacaycgtctctactaaaaatacaaaattagccgggcgtggtggc

SEQ ID NO: 546982 - DNA, 934 bp, Homo sapiens
tttgttaactgttgctgatatgtttacagaaaaatatgtgctttatttccgcattggacctttataaaatctcttgcaattactatagtcagtgatggatagtattctacctgaaaaactattttgtatcatatattttcttccagtgttcttcgaggggatttctaataaagaatgtgactctgaaaaaaaaaatcccttctaatctaatgcaatatttcccttacttgaatcctacagaatgttggtgctatttcccctaagctgcttatcagattctgmtttgttttataactcattttatgcttgtttttttaatctcctttcccaactgccatcactcttgcatcccccaaccacccatgcacacccatatatttcagggatcaggacatgctcattgtttatcctgcttcttaatacagtgccttgtatgtgagagatgctcagtatttaattattggattaaattatttataaatctgggataccagtctacgaactaagcagtcgtcacctttttataaaaattgcattgcttgtaagattggcaaaattatcatttgataattatacgtggtatgcacacattgttctggtaatgtttggttaccagactgctttctgtgctataactaccctcagacatctaattcatttaaattattgatgacagccatgtcttagtaacccataagcatgtggaaagaactgaataattaaactttcattttcaatccaaatgagaattttcaaatgggcaaacaaagcatctggccttttcttttctttttcccccacattcagtggcattactttcatttctcccatcaggtgatacttaaggagcagctttctctgccattggtatttagtgtctctgtggctttgatgcatgtttgaagatgctctcagcccaggtttatgatcaatg

SEQ ID NO: 546983 - DNA, 634 bp, Homo sapiens
tctgactatgaatttgcctattctaagtacctccactaagtggaattatacaaaattttgcttctgtattctatgcctggcttatttcactaaagaagatccatccatgtaacagagtttggcagttcagtcaacactttctcataactttccagcattgtgctgcagcatgggagacagagtgtggaaagtgttgtagaaagttactagagatggggatagaagaaacagcatactagaaaagtcagagttaaagatgtcaaaatgccaataaagaggtattttttttccaggctgagtcttgctctgtcaggcaggagtggagtggtgcaatcatggctcattgcagctgctacccctcagacttaagcaatctttccatcttatcctcccaagtagctgggactacaggcacgcaccaccacacccagctagttttctttgtttgtttgtttgttkgtttgttttttgcattttttctaaagacgaggtttcaccatgttgcccaggcaggtcttcaactcctgggctcaagtgatctgtctgccttggcctcccaaaatgctgaaattataggcatgagccactgtgctgggcccccaataaagagatgattaaagtcaatgctgggaat

SEQ ID NO: 546984 - DNA, 1686 bp, Homo sapiens
tccccagagtcccctccctgcttccctagaacctctcctccacaaccagctcctcccactcccaccactttgcccccagtctaaatgagccatgcttggcttagctaagggcttcagtggaattatcactcataccttttctgatggtttggtgtccataccttgctggtttgaaatattttaatgtttgtggaaatgatgaaggaaagaaaaaatgcgagagataatataatgaaaaagtgatagaaattggtgatgcagtaaatagcacgaaaaaaagaagtatcaaaagactattccagaattctaagtttgcaaaatgtgagaaatcatgtggtactactttcattcttcacatagatagactcaaacacctttagttctcagaataatacacttcagacatctttgacctcttatattatttcctaaaataagcttaaatgtgtttctcatatcctctaatcatccagaaaactcctattcatcccacaaaatcctatttaggcatattctctttatgtattttttccttaaaaatatgtatatacatataaatgtaaatatataggcatatatctttttcctaaactagtggttgtcaaattttaatgtgcttcggaggacaagatttctaacttattcctatgttttttktttttttttttttttttttttttgagacagagtcttgctctgtcacccaggttggagtgcagtggcaccatcacggctcactgcaagctccgcctgctgggttcacaccattctcctgcctcagcctcctgagtagctgggactacaggcgcccgccaccatgccaggctgatttctttttgtatttttagtggagacgcggtttcaccgtgttagccaggatggtctggatctcctgacctcgtgatccgcccatctcggccccccaaagtgctgggattacaggcgtgagcccctgcgcctggccacttattcccagaatttctaaattattcctaggtgatgctgatactgctactctaggaaatatactctgataatcactgtcctaaactccagctagagttaatcattcatttttctgtaacacctcagtggccatacatgtttcgtttgtaacacttatgtaattctaatatatgttttgtccccagttatactttttctatttcttctattgttacaattgctaatacagcacctggaatatgaaaaacattcaataagtgttggctgattgaattaattcatgtttcattaattttatatcatcttcctaaatctcaatgaagtatcatgcacccatttagacagtgtaaaataatccataatagcaatatattaaaatcaaactaatacttaatatcttttgtgtgccagaagttgggcaaagggctttatatgtattattaaataattatcttgatgattagacaatatattacaaaaaactaagattctctagaggtttaagtggctttcaaaaagtaacacaaagctagtacatatcagaactctggtttgatcccagcaatgtccaaatagaaatgggtaactctgaagaaagggtctgagaatgacagagtgcatatgggttgtggtgtcatggccttttccctcctttcttaaaaatagataccagttatataagttttatcatttatgttaactttgagcttcctcgtggca

SEQ ID NO: 546985 - DNA, 1686 bp, Homo sapiens
tccccagagtcccctccctgcttccctagaacctctcctccacaaccagctcctcccactcccaccactttgcccccagtctaaatgagccatgcttggcttagctaagggcttcagtggaattatcactcataccttttctgatggtttggtgtccataccttgctggtttgaaatattttaatgtttgtggaaatgatgaaggaaagaaaaaatgcgagagataatataatgaaaaagtgatagaaattggtgatgcagtaaatagcacgaaaaaaagaagtatcaaaagactattccagaattctaagtttgcaaaatgtgagaaatcatgtggtactactttcattcttcacatagatagactcaaacacctttagttctcagaataatacacttcagacatctttgacctcttatattatttcctaaaataagcttaaatgtgtttctcatatcctctaatcatccagaaaactcctattcatcccacaaaatcctatttaggcatattctctttatgtattttttccttaaaaatatgtatatacatataaatgtaaatatataggcatatatctttttcctaaactagtggttgtcaaattttaatgtgcttcggaggacaagatttctaacttattcctatgttttttttttttttktttttttttttttttgagacagagtcttgctctgtcacccaggttggagtgcagtggcaccatcacggctcactgcaagctccgcctgctgggttcacaccattctcctgcctcagcctcctgagtagctgggactacaggcgcccgccaccatgccaggctgatttctttttgtatttttagtggagacgcggtttcaccgtgttagccaggatggtctggatctcctgacctcgtgatccgcccatctcggccccccaaagtgctgggattacaggcgtgagcccctgcgcctggccacttattcccagaatttctaaattattcctaggtgatgctgatactgctactctaggaaatatactctgataatcactgtcctaaactccagctagagttaatcattcatttttctgtaacacctcagtggccatacatgtttcgtttgtaacacttatgtaattctaatatatgttttgtccccagttatactttttctatttcttctattgttacaattgctaatacagcacctggaatatgaaaaacattcaataagtgttggctgattgaattaattcatgtttcattaattttatatcatcttcctaaatctcaatgaagtatcatgcacccatttagacagtgtaaaataatccataatagcaatatattaaaatcaaactaatacttaatatcttttgtgtgccagaagttgggcaaagggctttatatgtattattaaataattatcttgatgattagacaatatattacaaaaaactaagattctctagaggtttaagtggctttcaaaaagtaacacaaagctagtacatatcagaactctggtttgatcccagcaatgtccaaatagaaatgggtaactctgaagaaagggtctgagaatgacagagtgcatatgggttgtggtgtcatggccttttccctcctttcttaaaaatagataccagttatataagttttatcatttatgttaactttgagcttcctcgtggca

SEQ ID NO: 546986 - DNA, 1686 bp, Homo sapiens
tccccagagtcccctccctgcttccctagaacctctcctccacaaccagctcctcccactcccaccactttgcccccagtctaaatgagccatgcttggcttagctaagggcttcagtggaattatcactcataccttttctgatggtttggtgtccataccttgctggtttgaaatattttaatgtttgtggaaatgatgaaggaaagaaaaaatgcgagagataatataatgaaaaagtgatagaaattggtgatgcagtaaatagcacgaaaaaaagaagtatcaaaagactattccagaattctaagtttgcaaaatgtgagaaatcatgtggtactactttcattcttcacatagatagactcaaacacctttagttctcagaataatacacttcagacatctttgacctcttatattatttcctaaaataagcttaaatgtgtttctcatatcctctaatcatccagaaaactcctattcatcccacaaaatcctatttaggcatattctctttatgtattttttccttaaaaatatgtatatacatataaatgtaaatatataggcatatatctttttcctaaactagtggttgtcaaattttaatgtgcttcggaggacaagatttctaacttattcctatgttttttttttttttttttttttttttttttgagacagagtcttgctctgtcacccaggttggagtgcagtggcaccatcacggctcactgcaagctccgcctgctgggttcacaccattctcctgcctcagcctcctgagtagctgggactacaggcgcccgccaccatgccaggctgatttctttttgtatttttagtggagacgcggtttcaccgtgttagccaggatggtctggatctcctgacctcgtgatccgcccatctcggccccccaaagtgctgggattacaggcgtgagcccctgcgcctggccacttattcccagaatttctaaattattcctaggtgatgctgatactgctactctaggaaatatactctgataatcactgtcctaaactccagctagagttaatcattcatttttctgtaacacctcagtggccatacatgtttcgtttgtaacacttatgtaattctaatatatgttttgtccccagttatactttttctatttcttctattgttacaattgctaatacagcacctggaatatgaaaaacattcaataagtgttggctgattgaattaattcatgtttcattaattttatatcatcttcctaaatctcaatgaagtatcatgcacccatttagacagtgtaaaataatccataatagcaatatattaaaatcaaactaatacttaatatcttttgtgtgccagaagttgggcaaagggctttatatgtattattaaataattatcttgatgattagacaatatattacaaaaaactaagattctctagaggtttaagtggctttcaaaaagtaacacaaagctagtacatatcagaactctggtttgatcccagcaatgtccaaatagaaatgggtaactctgaagaaagggtctgagaatgacagagtgcatatgggttgtggtgkcatggccttttccctcctttcttaaaaatagataccagttatataagttttatcatttatgttaactttgagcttcctcgtggca

SEQ ID NO: 546987 - DNA, 967 bp, Homo sapiens
aaacagaaataggccaggtgcggtggctcacacctgtaatcccagcactttgggaggctgaggtgggtggatcatcaggttaggagttcgagatcagcctgaccaacatggtgaaaccctgtctctactaaaaatacaaaaaaaaaattagccaggcatggtggcgggcgcctgtaatcccaactactcaggaggctgaggcaggagaattgctcaaatctgggaggcagaggttgcagtgagccaagattgcaccactgtattccagcctgggtgacagagcaagactccatctcaaaaagaacaaacaaacaaaaaagaattccygataaatacctaatcttctaaatattggaccatgttgcaggtttgcatgaactcagaaatgagtgaaatcttactgcagattagattcagacattttttcttacctgaattcttctctgtagttattcctaatatactcagctagagtcctgctgtgccgcagacagctcttgaggatgtaaaattgctggtacaacagaactgcttggcagggacttagcagctgaaatgaagctgaaagacccctcaccacttgtttcacaatactggccacaaaagtaatctagacaaggaaaatacagttacatgtaggctgtgtgccacccacaaaagcaactatttcagctggagcttcaactacaaatctagactgaggccctcactaccctaacaccactgttgcaatgttccttattgaaatggtatccaatgtcaaataaaaagtataggaggaagctgggcatggtggctcacgcctgtaatcccagcactttgggagaccaaggcaggtggatcacgaggtcaggagttcgagatcagcctgaccaacatggtggaaccccgtctctactaaaaatacaaaaatcagtcaggcgtggtggtgcatgcctgtaatcccagctactcaggaggctgaggc

SEQ ID NO: 546988 - DNA, 967 bp, Homo sapiens
aaacagaaataggccaggtgcggtggctcacacctgtaatcccagcactttgggaggctgaggtgggtggatcatcaggttaggagttcgagatcagcctgaccaacatggtgaaaccctgtctctactaaaaatacaaaaaaaaaattagccaggcatggtggcgggcgcctgtaatcccaactactcaggaggctgaggcaggagaattgctcaaatctgggaggcagaggttgcagtgagccaagattgcaccactgtattccagcctgggtgacagagcaagactccatctcaaaaagaacaaacaaacaaaaaagaattcctgataaatacctaatcttctaaatattggaccatgttgcaggtttgcatgaactcagaaatgagtgaaatcttactgcagattagattcagacattttttcttacctgaattcttctctgtagttattcctaatatactcagctagagtcctgctgtgccgcagacagctcttgaggatgtaaaattgctggtacaacagaactgcttggcagggacttagcagctgaaatgaagctgaaagacccctcaccacttgtttcacaatactggccacaaaagtaatctagacaaggaaaatacagttacatgtaggctgtgtgccacccacaaaagcaactatttcagctggagcttcaactacaaatctagactgaggccctcactaccctaacaccactgttgcaatgttccttattgaaatggtatccaatgtcaaataaaaagtataggaggaagctgggcrtggtggctcacgcctgtaatcccagcactttgggagaccaaggcaggtggatcacgaggtcaggagttcgagatcagcctgaccaacatggtggaaccccgtctctactaaaaatacaaaaatcagtcaggcgtggtggtgcatgcctgtaatcccagctactcaggaggctgaggc

SEQ ID NO: 546989 - DNA, 608 bp, Homo sapiens
gattatttaggccagcaattctcaaaccttggtagctagctaacagaatcatctaggtagctaccaaaaacagacaactgaacactgtccctaaagctgaggattccatagcctggagtagagcctaggagtctgtactctccacgagcccttgggagattcttatacatgaccaagattgaaataaacatggacttttgccattattccaggtcagctttatttccacaccccagaagatctaggctaagtcctcacattgcccagtcagcatgtgttaagagtgtagactaatctcaaagcagtaacaccacattaagcagcagcagkggagctgggcatgcctgtaatcccagctacctaggaggtcgaggctttagtgagccataatcacaccactgtacttggcccaggcagcagagcaagaccctgtctaaaaaaaaaaaaagaagaagaagaagaagaaaagaagcagcagcaatgagtgtcccagattctaactttctgataagtaaattcaagcccctacagtctatttaactttacaccgaaggactactgggggaaaatgagatctcatattcaattgacttctctaaaagtgtgtg

SEQ ID NO: 546990 - DNA, 1221 bp, Homo sapiens
cgcctgtaatcccagctactcgggaggctgaggcaggagaatcgcttgaacctgagaggcggaggttgcagtgagccgagatagcgtcactgcactccagcctgggtgacaagagcaaaactccatctcaaaacaaacaaacaacaacaacaaatatatatatatatgtatgtgtgtgtgtgtgtatacatatacacacatatatacatatatacttatatatataygtatatatgtacacatacgtatacatatgtatacatacgtatatatataaccacttattcttttctagaatctcaaaataagcagctaaattaattccttgggagaagtcaagaaaaaggtcactcaagtctgcgtaacaagtgaacaagatctatttcccattgatgatcccacagagtggactctaagcaaaaaggaataaaacccccatcagcccagggagggaaaaagagccaggcttctggtgcttctcaaaaggatctgccttaaagtacaattctgataaacacctcagtgaggaacaggtgattgcaatgcattggtagaagtctcatttatcatttagtccaatataattattctgacctattctatttcataccaaaataactttggaggaatccaatggagtttggcagaaacacttttggggggatgaaaagaaacgtagcttttgcagtgtcattctttaatatgagccacaaaagactgtgtaggggtgggggtgtctactcaaatcacagaggtgaaaagacttaagacatgagatccaagaataagaaaagatttatagatcctaaaatgtatagagtatgaaaatggacaccctttaaaagtattgtatgacatggtcaagttttaaggaaagaaagaaagaaagggcttaatgaatccacctcttctaaagaaattggtcccccaaatttccatttcattgccatgacaactagtactccatcattgccatggtaaccagctgaatagcattagtctaaagacaagctctctgattgggtgaccaacgaaagccattaggtgccccaccacaatgctgaaagactgttttgcaatcactttgacctatttctagcttttcaatgtgttttaattctccaaagtgtttccctaaaaccaaatgttttttggaatgagacaatttcaagaagtgcataataactgtattcctgcatctccctgctaagttcaagacct

SEQ ID NO: 546991 - DNA, 2004 bp, Homo sapiens
atgtgtaagtacttcactgcctgcatcaataatatttgaatatgcgacatgaggtacacagtgagccctacaaccatttttgatgctgattacgacaaatcacagagcatttgtaggatatcacctatttaacacatgatctgacaccatttttcatcctggaataaagggaagaatgtgcttatatatcagagaaacttaaatagtagatttaagtgaaaattcagttgcttattggctgtgtgatgcttgaaaagtatctaagttccaatttgcacatctgtaaaatgggtatggaacgtaccacataatactgtgaagaagatcagataaaacaataaataccaaacacacagtgcacgtcatgtggtaatcattcagtgcactttagatattattacatttgctactagattcctccttgtaaaacacaatacatatatatccattagagctcttatgaagatattattatggtcaatattaaatccagctaataccctgtgatctggtggtacagattttataagccatgaagtaagttatctaacaaacagcctttttaaaccaggttaaaaaatagctttataaaaataagtttttaataaatgaagatatatgtttttaatgttttaatttaacagtatattaagagatcaaacatattttgtctgacttgtaaatcctgtgaagttttgttgtagcacatttaaaaactattattaagaacaattattgtttaaaaagcaattttttttgtatattttcttctatatccagtggtattgtatgtaagtttccaaatagaaaaattcaatgtacaggcacatatacatatattattatttctttgattcatgacttttcagcgctgttgagataaatttctatgacttaccattaattcagttattaactaaattaaaaatttaaagactacccctgcttttttcttttaaattcaaagggtaaaatcttaatacgtttaatactgaggaaaagtacatttatatataaataggtcagggcgtaaarttgaatttagatttggaaacaggaaagaactcttgtaaaacacattaattaggggtataattatatatccttccgcagccaagaaggaagtctgttctaaactttttctcatttgggtcccttgatgatcctgaaatggcagagcaggtggctgccttcaagtttgagatgtcctataacttggccaaagttacagtggcagagttcatagcagaggtgggactcacaccctggttttttatttcgatactaatgtcaaatttgttttgaacttcagtttaataggtaataactatggcacagggtcttctgtaagacagaaatgtgttagatgccaaaatggacctgagtaatgttctcttcttggccatttgttcaattgggtctttttgttcaccattgccactgcaaaatagacattaatccagaaaatacctattgacatacctatacacattcactgtgtgccaggcactggattaaatatagggagaaaaaaatcacaaaggctaatctcagtctacaagtatctcataatccatttcaaaagacagactttttccaccataaataaaggtagcatggtaatgtcatttagataatttgtttcttaggaataaattactataaggtatttataataaaagccccctgctaagtgagaggatttggacaattataagtttcagtgatatagattgccatttgtttaattaactgttgtcagcaacatttaatatttacatttttattcagcataatgtgtatatatatcaacacaaactcattttagttttatcacttccaatctgacagatatcaaattgtctgatttatagtttagaaagtttatttggcattatcgtggatagtgtaatggagatagatgatacttgaagaattcacagaatattttcttagtaatgttgggtgaatgaagttgaggtttttaagtaaggtggacacaat

SEQ ID NO: 546992 - DNA, 637 bp, Homo sapiens
gtaaaagcataattagtaaaggawagaaagacgtgataattttagagaaattgggagacatggaaggaaggatttgaatcatgagtgatcctaattcatagagctcttttgattttaggctagaattaacatgatccattttacaagataattatggttgtcaggtgatgaatgaatgagaagatgtgagaatgccagcaggaaccatttggaagctactgcattagcccatgtaaacaggatggtgtaataaattcaaactataccttgcagattagtggtttgttttattcctggaaggactacttcactgtaaagggacaaaacacaatgccacaatagatgtcctctgctctggcttctgctttgtcactattgaagaacatggactactcaaaaggagattccaggttagaggcactgttatctgaaagcacatcgcttattgctcattactaattttggtaataatgttaagcagcacaactgtatggcctgagagaaaacattgtagacagagaaaacatttttttctctaagctaatctttaaattgtgttattattgttattaaccatagaaaagcaaccctacatatgcaccagaatcattgacaattccctgttataatacaggat

SEQ ID NO: 546993 - DNA, 637 bp, Homo sapiens
gtaaaagcataattagtaaaggaaagaaagacgtgataattttagagaaattgggagacatggaaggaaggatttgaatcatgagtgatcctaattcatagagctcttttgattttaggctagaattaacwtgatccattttacaagataattatggttgtcaggtgatgaatgaatgagaagatgtgagaatgccagcaggaaccatttggaagctactgcattagcccatgtaaacaggatggtgtaataaattcaaactataccttgcagattagtggtttgttttattcctggaaggactacttcactgtaaagggacaaaacacaatgccacaatagatgtcctctgctctggcttctgctttgtcactattgaagaacatggactactcaaaaggagattccaggttagaggcactgttatctgaaagcacatcgcttattgctcattactaattttggtaataatgttaagcagcacaactgtatggcctgagagaaaacattgtagacagagaaaacatttttttctctaagctaatctttaaattgtgttattattgttattaaccatagaaaagcaaccctacatatgcaccagaatcattgacaattccctgttataatacaggat

SEQ ID NO: 546994 - DNA, 622 bp, Homo sapiens
tggccaggctggtctcaaactcctgacctcaagtgatccacccacctcagcctcccaaagtgctgggattacaggtgtgagccaccatgcccsgtctaatttttgtattttttagtagagacagggtttcactatgttgaccaagctcatctcaactcttggccttaagtgatccacccacctcagcctcccaaagtgctgggattactggcttgagccacagtgcccagcctaaattcctttctaatctcatctcctgcctcccttccatatccctgccctccagccacaggtccaatctcttcctgtctgtgccctgcctctccctgcctcaggccctttgctcaggctgccccttttcctaaccttccttcccctcatcttcagcaattacagcaggcagctttgtctaatgcagcaggcaactttcaactgagcaattccttttttttttttttttttttttttttgagctggagttttgcttttgttgcccaggctggagtgcaatggcgcgatctcggctcaccgcaacctccgcctttggggttcaagcgattctcctgcctcagcctcccgagtagctgggattacaggcatgagccaccaagcccagctaatt

SEQ ID NO: 546995 - DNA, 539 bp, Homo sapiens
gaggcagagaaagtttctttttatctcaaagcaaatgtttccttctagaaaataatacaatataaactcagattaattttcttctggcttagggcattttctgttcagactagggattttcttcccattttaagattataataaaaatatctttaatataatgtacattaataaaatcatatttttctaattctatcattgtcattatactggattattattacttstaatataattttggccctaataagtaattgaatgaaagtagcactgtgctaaatattatatgaaataccatacaggaatgagtcaaatctcagtgacatcagaattcagacttactgttacagatattcgccttaaaaacatggttgtagatagcagtaaagaaaatttagaatttagatgtttaaatcacatatagtcattctgatggtatacagatgtggtataaagaatataaagagaagaatctgtttccccttgttttatagagttaatttcatagcagtggagtgacaacaagatcctggatttca

SEQ ID NO: 546996 - DNA, 539 bp, Homo sapiens
gaggcagagaaagtttctttttatctcaaagcaaatgtttccttctagaaaataatacaatataaactcagattaattttcttctggcttagggcattttctgttcagactagggattttcttcccattttaagattataataaaaatatctttaatataatgtacattaataaaatcatatttttctaattctatcattgtcattatactggattattattacttctaatataattttggccctaataagtaattgaatgaaagtagcactgtgctaaatattatatgaaataccatacaggaatgagtcaaatctcagtgacatcagaattcagrcttactgttacagatattcgccttaaaaacatggttgtagatagcagtaaagaaaatttagaatttagatgtttaaatcacatatagtcattctgatggtatacagatgtggtataaagaatataaagagaagaatctgtttccccttgttttatagagttaatttcatagcagtggagtgacaacaagatcctggatttca

SEQ ID NO: 546997 - DNA, 533 bp, Homo sapiens
acatggtggtctcaggagctaacatcggcccttctacaagccagggggacaccaaacacttgcctgtcaatcgagctccactcagctgggttcagacaagctcaggggctaccccaggctcagcagtgccgactatagccttgtgcagttactgctgcacacacgtgaggacacacaggaagggtacgcatttgacacaagcttcccatggaaataccttctcaaacctggagcrgggtgagaatgttgcagccctgggcccctcctgggtcagaagctggctcagcccagcgttcacagaggccagcctcccagagcctgagaagaggcctgcaccaggcgtgggcacagaaggatgcagattgtgcaacaggagccaagggctggagaggcattctggcgagagatttggaaagcttctggaacagggtgaaacattcatcaggtgacccaggggataggctctccaggaaggaggcccagctccagcagtagccagagttctgggcatgttaggacggtgaggtcctagc

SEQ ID NO: 546998 - DNA, 529 bp, Homo sapiens
caaaatcaattaagcattatttgcacatttttctgaataattaagaagtgcttcaggtttatgatattcaaaattaactatcttcatcccccccactcaactccctgtagaacaaagatattcatatttcattcatagtttctcctatcacattaaatgctatccaggtccattcagaatttcaatttcaaaccttcaagtcgttctttgctttgctacctgccctcaagacccaccacccctgttatacaactaatccatgctcagattctgtaaattcacttcaaactaccatcatgtctgtcttgaaaaractataacaaacacctgtcaaatctctaataattattgttttgctccaaacaatcttatacgctaggctcaaatttttcttaccataatataatatattctcatatctgatataatataatcatatttctattcttataactcccctttctaccttataatgcattttatatatatctaagtctttttttaaaaaaaaagaaagtcatgatatttt

SEQ ID NO: 546999 - DNA, 529 bp, Homo sapiens
caaaatcaattaagcattatttgcacatttttctgaataattaagaagtgcttcaggtttatgatattcaaaattaactatcttcatcccccccactcaactccctgtagaacaaagatattcatatttcattcatagtttctcctatcacattaaatgctatccaggtccattcagaatttcaatttcaaaccttcaagtcgttctttgctttgctacctgccctcaagacccaccacccctgttatacaactaatccatgctcagattctgtaaattcacttcaaactaccatcatgtctgtcttgaaaaaactataacaaacacctgtcaaatctctaataattattgttttgctccaaacaatcttatacgctaggctcaaatttttcttaccataatataatatattctcatatctgatataatataatcatatttctattcttataactcccctttctaccttataatgcattttatatatatctaagtctttttttwaaaaaaaagaaagtcatgatatttt

SEQ ID NO: 547000 - DNA, 525 bp, Homo sapiens
atgttttgcagttaaggaaaacatattaagataagtgagattgcctaaaaatgaagaaaatgggagggagagagtgtattcgaagtgtctgaggttggcaatatactgtgtgccccacatactgagaccattacgtgattaggcagaaaggcactgcctaagcagtgaggtgactgggtaagtgacatattgcagtacagcctgcaggccatttaatgcatgggaaaatcttgcctttctaactgtagagattttctcttttcttttggctcaccctagaatatcatatttccattactatttctgaaataatggaaataaacttttaaaagtgtacatgtataatttttttcttatcttgtttcatttcattaccatagtcatgatgcaacctataaatactaaccagtccatgtgttacaaagattttcctcactattttgtaagtaaagacagtttatttaggtaataagttagagatayacagtttctgtgggcagtacacactaggaaagaaacatttgt

SEQ ID NO: 547001 - DNA, 589 bp, Homo sapiens
ggagaattcggtgctggtagacatgccttgcaaaaagtgttaaaagcagctgttataaaagaaggaaaatatatagtttaaactctctataaaatatagagtttaaaaactctctataaaatatakagtttaaaaactctctataaaatatagagtttaaaaactctctataaaatatagagtttaaaaactctctataaaatacagagtttaaaactcagatctacgtaaagaaataagagcatcaaagaaggaagaagtaaaggtaaaacaaaaatgaaagtttagaaaaagaattgaagataaaagtcagaacaaagaataaggtcaataaatagaaaacaataacaaatttgtctggaagtggtggctcatgtctgtaatcccagaactttgggaggctgaggcaggtggatcacttgaggtcaggagtttgagatcagatcagcctggccaacatgatgaaactctgtctctactaaaaaatacaaaaaattagctaggagtggtggcacatgtctgtaattccagctacgcaggaggctgaggcaagagaagcccttgaacccgggaggtggaggttgcaggg

SEQ ID NO: 547002 - DNA, 1108 bp, Homo sapiens
gaggtcagcagatcgagaccatcctggctaacatgatgaaacccggtctctactaaaaatacaaaaaattagccgggcgtggtggcgggcgcctgtagtcccagctactcgggaggctkaggcaggagaatggcgtgaacccgggaggcggagcttgcggtgagccgagatcgcgccactgcactccagcctgggcgacagagcgagtctccatcttagaaaaagaaaaaaaaaggtgattactcaaatttactaataataccgatgacaaagaaactgatgtatgtggtctgttagtaagattcttggtgatgatttttgatgaagaatactgtgaactgatgaattgataaaacatctgatacaccttctgaactgttgctgtatgttcatttttgctgaacaactattcctattgttaatgtttcatttgttatacagcaatgacattgcaaaatttttttcaacaaaattattgttagggggttaaatacaggcagacttttgtatctattttcagtaattttatgcaaacaggaatgcattatgattacccaggatgtttctctcatttgaatttaaaatttgcttgcctaccattcattgttacatagctaattttcaaatattccccttatcaactttcctcaaaacagtatcacttctgaatgtaatagaagaaattattttatttgaatttcttttcatcaatggacagctgctatgattaattatttttgtaagattgcatggtctttcatgttttgtgatattggtactgttctgaaagtaattaaaactctattctattatttagttttttttaaataaaacatttctgtgacaattatggtttttaaacttccctttaaatcttaggtctgtgcctgttttatgagctattgctttacaagattttccattaatcattatgattccattatttattagagagaaatgtgctggtagaataggcatactggtaatcattagtgagtaaattgataaacacaatttgtaaatattcagcttgagcccccccaccttatgctttatattaagcattttttttttttatatttattgatgaataatttataaaaattat

SEQ ID NO: 547003 - DNA, 1108 bp, Homo sapiens
gaggtcagcagatcgagaccatcctggctaacatgatgaaacccggtctctactaaaaatacaaaaaattagccgggcgtggtggcgggcgcctgtagtcccagctactcgggaggcttaggcaggagaatggcgtgaacccgggaggcggagcttgcggtgagccgagatcgcgccactgcactccagcctgggcgacagagcgagtctccatcttagaaaaagaaaaaaaaaggtgattactcaaatttactaataataccgatgacaaagaaactgatgtatgtggtctgttagtaagattcttggtgatgatttttgatgaagaatactgtgaactgatgaattgataaaacatctgatacaccttctgaactgttgctgtatgttcatttttgctgaacaactattcctattgttaatgtttcatttgttatacagcaatgacattgcaaaatttttttcaacaaaattattgttagggggttaaatacaggcagacttttgtatctattttcagtaattttatgcaaacaggaatgcattatgattaccyaggatgtttctctcatttgaatttaaaatttgcttgcctaccattcattgttacatagctaattttcaaatattccccttatcaactttcctcaaaacagtatcacttctgaatgtaatagaagaaattattttatttgaatttcttttcatcaatggacagctgctatgattaattatttttgtaagattgcatggtctttcatgttttgtgatattggtactgttctgaaagtaattaaaactctattctattatttagttttttttaaataaaacatttctgtgacaattatggtttttaaacttccctttaaatcttaggtctgtgcctgttttatgagctattgctttacaagattttccattaatcattatgattccattatttattagagagaaatgtgctggtagaataggcatactggtaatcattagtgagtaaattgataaacacaatttgtaaatattcagcttgagcccccccaccttatgctttatattaagcattttttttttttatatttattgatgaataatttataaaaattat

SEQ ID NO: 547004 - DNA, 1108 bp, Homo sapiens
gaggtcagcagatcgagaccatcctggctaacatgatgaaacccggtctctactaaaaatacaaaaaattagccgggcgtggtggcgggcgcctgtagtcccagctactcgggaggcttaggcaggagaatggcgtgaacccgggaggcggagcttgcggtgagccgagatcgcgccactgcactccagcctgggcgacagagcgagtctccatcttagaaaaagaaaaaaaaaggtgattactcaaatttactaataataccgatgacaaagaaactgatgtatgtggtctgttagtaagattcttggtgatgatttttgatgaagaatactgtgaactgatgaattgataaaacatctgatacaccttctgaactgttgctgtatgttcatttttgctgaacaactattcctattgttaatgtttcatttgttatacagcaatgacattgcaaaatttttttcaacaaaattattgttagggggttaaatacaggcagacttttgtatctattttcagtaattttatgcaaacaggaatgcattatgattacccaggatgtttctctcatttgaatttaaaatttgcttgcctaccattcattgttacatagctaattttcaaatattccccttatcaactttcctcaaaacagtatcacttctgaatgtaatagaagaaattattttatttgaatttcttttcatcaatggacagctgctatgattaattatttttgtaagattgcatggtctttcatgttttgtgatattggtactgttctgaaagtaattaaaactctattctattatttagttttttttaaataaaacatttctgtgacaattatggtttttaaacttccctttaaatcttaggtctgtgcctgttttatgagctattgctttacaagattttccattaatcattatgattccattatttattagagagaaatgtgctggtagaataggcatactggtaatcattagtgagtaaattgataarcacaatttgtaaatattcagcttgagcccccccaccttatgctttatattaagcattttttttttttatatttattgatgaataatttataaaaattat

SEQ ID NO: 547005 - DNA, 1108 bp, Homo sapiens
gaggtcagcagatcgagaccatcctggctaacatgatgaaacccggtctctactaaaaatacaaaaaattagccgggcgtggtggcgggcgcctgtagtcccagctactcgggaggcttaggcaggagaatggcgtgaacccgggaggcggagcttgcggtgagccgagatcgcgccactgcactccagcctgggcgacagagcgagtctccatcttagaaaaagaaaaaaaaaggtgattactcaaatttactaataataccgatgacaaagaaactgatgtatgtggtctgttagtaagattcttggtgatgatttttgatgaagaatactgtgaactgatgaattgataaaacatctgatacaccttctgaactgttgctgtatgttcatttttgctgaacaactattcctattgttaatgtttcatttgttatacagcaatgacattgcaaaatttttttcaacaaaattattgttagggggttaaatacaggcagacttttgtatctattttcagtaattttatgcaaacaggaatgcattatgattacccaggatgtttctctcatttgaatttaaaatttgcttgcctaccattcattgttacatagctaattttcaaatattccccttatcaactttcctcaaaacagtatcacttctgaatgtaatagaagaaattattttatttgaatttcttttcatcaatggacagctgctatgattaattatttttgtaagattgcatggtctttcatgttttgtgatattggtactgttctgaaagtaattaaaactctattctattatttagttttttttaaataaaacatttctgtgacaattatggtttttaaacttccctttaaatcttaggtctgtgcctgttttatgagctattgctttacaagattttccattaatcattatgattccattatttattagagagaaatgtgctggtagaataggcatactggtaatcattagtgagtaaattgataaacacaatttgtaaatattcagcttgagcccccccaccttatgctttatattaagcattttttttttttatatttattgakgaataatttataaaaattat

SEQ ID NO: 547006 - DNA, 550 bp, Homo sapiens
taaaatatcctcaacagcaattttaccaaacaggtcttcctctgaaggccacctctgaaataactaaagaataaatgtcaatggcatgatattaagatattactcaagaaaataatctaggggccagacgcagtggctcatgcctgtaaccccagcactttcagaggccgaggcaggcagaacgcttgagtccaggagttcaagaccagcctgggcaacatggcaaawccccatctctgcaaaaaataaaatgcaaaaattagtcaggtgtggtggcatgtgcctgtagccccagttactcaggaggctgaggtgggaggatcacttgagcccaagaggtggaggctgcagtgacccaagatcgcaccactgcactccagcctgggcgacagagcgagaccttctctcgctaaaaaaagaaagaaaaatgaaaatgtagagaatggtatgactcatgtttcttcaggattttcacattaggtaccaaggcactacataacttcactctagaatttgctaagagtgcagatgtcctgtttgctgactgaat

SEQ ID NO: 547007 - DNA, 1327 bp, Homo sapiens
gtggttgtgtgtatcgggggtattggaaagatagcaaacatgctaagcaactaaaccaaacagaaataataaacccaaggggtaagaaacattgcaaggtctccatttaaaaaatcaaaagaaaaggaagctaatgatgccaatgcaataggttccctttattactttcttcccctttccctaatcaggtgagaatctcttttggaaacttgtccggacctggtttttatactaagtctacctatgttaattgtttagggggaaatatcatttacaaaaacaatgccactcattatttagagggaaggaacaatggcttgtagcaactgcacagtgaaatagtccacagtccttatccccgrcactgcatggaaagcagattcttctaagagctcattacatctttcttgatgggataaatcacatgctctccacagactagctggcctctttattcacagcaacactgacttaataaggaagaccaaagaggtggcaagatgatttaagtattcacaccgattgaaatactcttcctcaggataaaatattaaccacatgttaactctcaaatgaaaatacagcctctagcaagaaactttccacacaaagtatgagcaaaatgttccctaaaacagttggaaaaggtagtcagccacaaaatactggacacaaaggtgagtatttcaaataactttgaaaaaagccacaactcccttaccctctccatctcacttccaaatgaaaacatgaaatattttaagaaattcagaagcctatgggaccctcggcctcttcaggccctcaagcaactgaggtatcatcatcatctgtacactctgcccactaagctaatagtggaatgagattatgaccactatttcaacaaggaagactccacctctcgtttgtgattttgaaccaaaggagagagtttgacatgatggtgctctaacatatcagaatacaactttcctgcttagaaacaagattttaattgattggtaacattattctaaaataatttactctgctcatttaacttggaagaatataaaccacttaactatgtagatgagttatttaagaatgttaacttattttaaccactagagatcactaaatcagagggctatgaatgcacaactaatttatttctacaattttatacagaaaacctgaaccactacagactcataagaatttataacatcttaaagcatgagaccataggtaagctctcctgggcttaacagaaataaataaattgaatgctttgtacctaagcagcaagtatgctttccttccttctgaatattgaaaagat

SEQ ID NO: 547008 - DNA, 1327 bp, Homo sapiens
gtggttgtgtgtatcgggggtattggaaagatagcaaacatgctaagcaactaaaccaaacagaaataataaacccaaggggtaagaaacattgcaaggtctccatttaaaaaatcaaaagaaaaggaagctaatgatgccaatgcaataggttccctttattactttcttcccctttccctaatcaggtgagaatctcttttggaaacttgtccggacctggtttttatactaagtctacctatgttaattgtttagggggaaatatcatttacaaaaacaatgccactcattatttagagggaaggaacaatggcttgtagcaactgcacagtgaaatagtccacagtccttatccccgacactgcatggaaagcagattcttctaagagctcattacatctttcttgatgggataaatcacatgctctccacagactagctggcctctttattcacagcaacactgacttaataaggaagaccaaagaggtggcaagatgatttaagtattcacaccgattgaaatactcttcctcaggataaaatattaaccacatgttaactctcaaatgaaaatacagcctctagcaagaaactttccacacaaagtatgagcaaaatgttccctaaaacagttggaaaaggtagtcagccacaaaatactggacacaaaggtgagtatttcaaataactttgaaaaaagccacaactcccttaccctctccatctcacttccaaatgaaaacatgaaatattttaagaaattcagaagcctatgggaccctcggcctcttcaggccctcaagcaactgaggtatcatcatcatctgtacactctgcccactaagctaatagtggaatgagattatgaccactatttcaacaaggaagactccacctctcgtttgtgattttgaaccaaaggagagagtttgacatgatggtgctctaacrtatcagaatacaactttcctgcttagaaacaagattttaattgattggtaacattattctaaaataatttactctgctcatttaacttggaagaatataaaccacttaactatgtagatgagttatttaagaatgttaacttattttaaccactagagatcactaaatcagagggctatgaatgcacaactaatttatttctacaattttatacagaaaacctgaaccactacagactcataagaatttataacatcttaaagcatgagaccataggtaagctctcctgggcttaacagaaataaataaattgaatgctttgtacctaagcagcaagtatgctttccttccttctgaatattgaaaagat

SEQ ID NO: 547009 - DNA, 645 bp, Homo sapiens
acatgagtagataaaggcaccctgagggtccctgcgggcatttgggtctgaatactgaccccaggacaccttccttcatgggtgcctgaggagccagccctccaaaacccccgaggctgtctgcagccccagggatcctggcggtgcttgctttttaagtccaggaggtttctggacttaattgtccactgacttagaacacatggacagatggaaatgccttccaggaactcccctcagacttcactgaggtgggcagccatggtcccgaaagtccctgtccatttctgaaaaagccccctcccttaagaaatccccctccgacccctgctgggtccaagagccgagacgagaagatgcacccaagacatcctcactccacctgaggcccaagctttcccacgaggctgaggccagagaggaggcacctgcctgccctggccccagctcccagcagcagctgtgtgcaaaaccaaagccaaagatgtgggctaaatccaggctcctgtcctgacacgtggctgacttccagtttctcactgccttcctgagccccagttttctcacctgtaaatggggggcagtagtaactaccctacaagatgatgtaggtatcaaagctggaaaaaccgtgcaaactgyaga

SEQ ID NO: 547010 - DNA, 643 bp, Homo sapiens
tgacatccgtaaaaggcaagagaatggacattgacatccttaatggacattgacaaacctaaatgtggatggagtgcttctggtaataaacaccggactttcgccaccctttcttccttcctatataaagcctttaaaatatttatacttgtgtgccatcttaataggaagaaatacacgttctatattacagaccaggacatttctgaattctgtatattttccatttttttccttccagcaaagtctgttctcatccatagcagacccatgttttagcctttttttcttggtggctgatgaccttgggcaggtcatttaggcttgctgggcctcagtttcttcatcagttaaaaaaatgggagaccaagaaggatgatgtaaatgttagtgaatattccagaactctgtggagattctgtaaaaattgtctacacaaggccaagcacgttggctcacgcctgtaataccagcactttgggaggccaaggtgggtggatcatctgaggtcaggagttcgagaccagcctggccaacatggtgaaaccccgtctctactaaaaatacaaaaattagctgggcatggtggtgggtwcctgtaatccccagctactcgggaggctgaggcagaattgcttgaacc

SEQ ID NO: 547011 - DNA, 953 bp, Homo sapiens
cctgaggggaagataacgtaattaaaagggtctattctcccataagggagtttagcacctcagccatttaactgactgaaacagatgaaagtagacattttcttggacacacaatgttttttgttctgtaaattgaaataacaagggcacatcattttccattaaagtttttttagaaaatgtaaattagcaatcaaagacaaaatacaaaagtagcacacaaaaggcatcaaaaacttttcaagagacttaacaaatatacgaaaacaaaaacaagtagctgcaagagtcacttcttccagcagataactatattttcacagcaatctcttttcataggaagctacgaacttttgacaggctcatttgcaccagtctatgtccaagtaagtcwcttgtcacatccgagtgcatggattttgttctgggcccatgaaccccgggcaaggttcgctttctttttcattgaagttcttccccactggattttttcctttccttgcgaagtaattttatactgctgctggtgttggcaacaatatattaaaagtcaaatttatgtcaacatccgtatattgactatcagatgttgctattaacactgacatcaaaatcattaagaaatttccatcatgtaaattaattatcagaattgtattggcatgaatacataacgatattattcatgcaaaataataaaaatatgcctcctgaaaacaaattataataatggaataaaatgacattattgcagcttcttgacaatccattaggcttggttttaggcatgtaagatttccagattatcattaagaaggggaactaaatgaggacatgttatcaatgtcgtcgatgctacggtgcagactctctgagaatggggggggtatgggaagggtcgctgcgaggcccaagctgccctttttgggccaggcctttattctacatgatct

SEQ ID NO: 547012 - DNA, 631 bp, Homo sapiens
aagccaaaagagagagaaaaaaataggttgatgtgcaagaggctccagaacatccttctgcatgtgagaaatacagagggaaagaatgacttttgagaagttcctgtgaagaaattgccagtagtggaagcacaaatgaacaatgagaaatcaataggtctactcctagtagaatattttcattggcatcacttaaaagtaaaatacaatggagacctactcagagaagaaagcagttagccccaaaatcctaaatttttatgaatttgtgatacttacattcattatttttaacaatgaacctcatcttaagttcatwatgtgcctttaattatatgctagtgataatatgaagtcatcatgctaactaggtataaaatatatttctttcacccttaaatcatcctgttttgtgtttgattaaaactgagtggaatatagtaatacaggaaaatatgtatatgatttatgaagaaaacataagaatactctgagagcaggcactcacaatttttattgacagggttcatgatcaaaattgtttaaagagtactcatttgtgtcatactactttttatagctccagtctcaaacatgtgtccaggacttcctaggtcctttgcactctgaa

SEQ ID NO: 547013 - DNA, 1178 bp, Homo sapiens
tgatgtgctgcactgggccatagactgctgtgaccaggtacacacttgctttataactgatggagcaactcctcagcaggagagttgccagtcttgtgcaggaacatatccagctccatggcaggtgggtatggaatccagagcagagagatctttgggtgggagagtttggggcatcctcaaaccaccctattgcagggcatctgccttggcaccagccttgatcatcagatctatgaaaaccacacccttctgactgctcctgagtttctagaaattgctaagttgagaaatgggctgatgttaataatcaataggcattggatgggcgttgcttcccgtccgtaagtctttggataaagggcctgaatctgagatgcagacttttcaggctctgggtagttgtcaacagaggcaaaggaagctcttctgtgtttctttctgctctagttggtactgagtgttgcagccactaaccaggactgaacatggtattccctaactcgaatcttacaggaaaaggcgtttgaaatctctgtgtgcctgaaaaccrgtgacttgtttttctgtcatgagcttggtttctaaataaagcaacagatgttttgcttttgcctctttcctttctgtccatggctcctaacgtgggtgatattaaccaagtgtgacaggtttcaggtttttatttatagcagtggagaactgttttcatctatctgcagagttctgggcttctgaagctgagtctttcttcagcttcaacttaaaatcctgaagggtagaagttaagaagcttgaaggttctgaagataggagccgtgttcagaggggaaaagagaacatgaggaatctgatgaaacttcctcatctctttcactgaggcaagatatctaatggcttagctggaaatgtgaggcttgtatctataaaaatctttacacccttatagtagaaggcctcctatttgaaaccatcaaaattcctaataagattgaaaaactttattaaattgaggaatcaaaacaatgcctaccttaagcatttattttagcatatatatatgtatatatatatattcatttgccaatcatttgatagagagccacagccttttactttgagatgagtcttccgcttatagttctatattacctttttaaaataaactacatccataa

SEQ ID NO: 547014 - DNA, 570 bp, Homo sapiens
aaatgagggcatactgagatgtgattatatttcatttgctttacaatgctgtcaaatttgccttccagaacaccgtaattgtatatgtttatatttcttataagtattattggtgataatagcagtaataacttacgtgtaatctcattttgattttcacaatattctcattttgcatttgagaaaacagatttagaatagaataaatgatctgccaaaaatcatgagctagaaagtgatgaaaactgtatcatctgtttatacattcagcccttaatctctcatattaattgggaggcattacagtgtattcgttaagaatataggcaatggatacagaacacctgggttccagtgcagactcttacttgttttcgttgtttaatctcgggcaaattatttaatctttttatgcctttattttcttacctatagaaagaggataatatgtcttcagtgcctacacctsgcatatggtaaatttttgataaagtctatctgttatttttaatgatactgttaacactatcgtagtggaatctttccccagcaaaaccctttctcctcccc

SEQ ID NO: 547015 - DNA, 315 bp, Homo sapiens
ctcctgagtagctgggactatacagcatgtgccaccacatctggctaatttttgtatatttttttagagacagggtttcaacatgttgcccaggctggtctcaaactcctggcctcaagggatctgcccgactcagcctcccaaagtactgggattacgggcataaaccaccacacctggctgttaattttctcatgtgtgagagatagcactactgtggttaaggaaaatctctactgcagcragcacagtggctcacgcctataatcccagcactttgggagaccaagataggtcccattgcttgagctcaag

SEQ ID NO: 547016 - DNA, 528 bp, Homo sapiens
gactggtcttggccatttccaacaagtttacaccagtttcacctgaccacaaacggttcagactggctctgtctggctactatcagttttgacagactgaaattactttattctctttctgatttgttatggctagctttgaccagcttttaccagtttcaactggccatgactggtttggatgagctataactggcattaaccactttgagaaccccttgagactttttcatttcagctattgtactccagaatttttttgttttctatttctttattgatatatctattttgttcatacaatgtgttctagccagttactgcccaaagaagtctacagwcaatgctattcctatcaaaatactgtcatttttcacagaaataaaagaaactactctaaaatttatacagaatcaaaaaggagtccaaataaccaaagcaattctaaacagaaagaacaaagctggaggcatcacattacccaacttcaaactactataaagctacagtaaccaaaacagcatggca

SEQ ID NO: 547017 - DNA, 547 bp, Homo sapiens
cattcaatatccatctatctacctgtgcatttatctatccaataagcttgagattttttttctttttgagatggagtcttgctctgtttcccaggttggagtgcagtgttgtgatctcagctcactacaatctccacctcccgggttcaaacgattctcctgcctcagcctcccaagtagctgggattacaggcacctgccaccatgcccggctaattttgtgtttttagtagagatggggtttcaccatgttggccaggctgttctcgaaygcttgacctaaagtgatccatctgcccaccttggtctccctttaaagtgctgggattacaagcgtgagccaccgcacccagctgagatttcttcatagcagtttaccagtgaccagtgttcaatgaatgcttattgagtgagttgtagtcacaatgcttatttcattttctaccactgaacatcttttcatactggtcattttgctgggtgatccacataggttatttctgatcaacagcccccaagacacacagaagtgcctaacttgggactt

SEQ ID NO: 547018 - DNA, 478 bp, Homo sapiens
tctccttcccttattcctccctccctcctttctcccttccttcctttcttccattcatccttcctgccttttatttttattttttgtaatatcacatgtgctgtagtttggaattttattctagtgcatttcttgctcatcagaacctcagctaatctacctaggaaaaatagtatcaaaggaaatgagaaagttgtatctgagtccctccagaactaagataattctttttgaccatttaagcctttataaatgcgttttgaccatttaagcctttataaatgcttgttttaggaaagtgaatctgttagatgcatcaacaaataatgaccaggacaaaacgatttaataattaaagtctcaaatcaccatggttatacattttcaccagaaatagtaatcttacaatttttcatttttctgatgaagatttctgttmcaatatctgtttcctaatagattttttaaattaattagc

SEQ ID NO: 547019 - DNA, 1746 bp, Homo sapiens
tcattttaaaacattgcttattttaacatgtaaacgtatgttgggtgggaaaagtacaaatgggagattgaaactgttttaatcatgtaaatgatcagccctacaatttttgtttttttaataatctggaatgcttattttatatgctgggatgctagttgttttttctattaatacacttaacttgcattctagcttcgccattcagagacaggcatcgtgtggtgggttgtgtgacagtgtctgtcaatagtgaagacaaatagtgccagagacacttaacccatccaatctcacccagggtataggtcggtctcgttttcagacttcttcataagtccttctttctttctytcttcctttcttactttttgtttgtttgtttctaaatagtggattgatactgattgaaactaaaactttttgtaaagttttaaactttgcattaatattataagaaaaagaagaaaagtagaaaatgaaggttggcatgtaaggtgtcgacaaagcaggtttgcagccactttgtgtgttctagatatttcaatctcttggcaacatgagtgttggccttacagcttttttctctgaatatctttcttctttaatctgaaaatatgtccttgtatctggtgacttttatcagatgagaacttcagagttggtcattgttaccagtaagaaaaatataatgcttaagaagaaataacgaaggttgaacattatgtgttttagatcagaaatagtttctggccaggcacagtggttcacgcctgtaatcccagcactatgggaggctgaggcaggcggatcagctgaggtcaggagttcgagaccagcctgaccaacatggtgaaaccctgtctctactaaaaatacagaattagccgggcgtggtggtgcatgcctgtaatcccagctacttgggtggctgaggcagaagaatcgcttgactctgggaggtagaggttgcagtgagccaaaatcgtgccattgtactccagcgggggcaacaggagcgaaactccatctcaaaagaaaaaaaaaaaggccgggcacggtggctcacacctgtaatcccagcactttgagaggccaaagtgggcagaacacaaggtcaggaatttgagaccagcctggccaatacggtgaaaccccgtctctactaaaaatacaaaaattagccaggtgtggtggcgggcacctgtagtcccagctactcgggaggctgaggcaggagaatcgcttttacctgggaggcagaggttgcagtgagccaagattgtgccactgcattccagcctgggcaacagagtgagactccgtctcaaaaaaaaaaaaaaaaaaaaaaaggaaattgtttccaaatatcttttttttaatgattatttttgaatagtcaataatttattccttctttgttccactatttgttcacttagcactcttgcaaaattttatggctttttttaaactagcttttttagaaaactcaattttgcacagatgttgaaaaattataaaatatgtacatattcaaatgttagggatcaaattttaatcttggaagcttggaaattaaatatcatttctgtcatatattttaaagcagtgaaaggtatttctttcttttgaggacttcagcaaatatttctaatttcaaagctttctattaaaagtttttagttccatataaagtatatcttttttatgatattttaagcactaatatattatggtagttaa

SEQ ID NO: 547020 - DNA, 518 bp, Homo sapiens
cactccagcctgggcaacagagctaaactccaaaaaacaaacaaacaaacaaacaaaaaagcaatgttgcacttcctcagcatgccagcctctgaggctgcaaacctagatcctgagagccacaatgggatctgtaccctctgtactcctagtggggscctggcacctcccaggcaccaagttatattttttaattgaatagaattctattttggggacatactaaccttctatgagagtatcattgtatatgcatagaatactattctataggaactataccgttcctaatattttctgtttctatgattctttaaatggagatcctctaacctgtggctctattattgataattattagctagcatttatagaaccctgtttggtgtaagatgctttacatatattattttccaaatcttactccttgggacatgaacagtacatgttacacagaaaaatggttctgtggtctaagaagtatggaaaatcctgagttacacaaagctcactggagt

SEQ ID NO: 547021 - DNA, 1094 bp, Homo sapiens
tcttgcagacagacccgagatccccaccctgggccagccctgacatagacagggcccacatctccctgtggctgctcagcccgcctccgcgaacaggcccaatggggcgttggtaataaagagactggctctgcaggccatgactctgctgctcagctgtgggactttgggcaagttgccaaacctggccatgtcctcatttgtcatctatgaaatgggataatagcggcgttgacctcatggtgtgttgtgaggaccaaacatgtcaattcatgcaaaggtctgggacagggtctgtacctagaaagagtcaggtgtcattttccaatcccaacgggggccctcggatggggagggtttgcctggtggccacacacagacctcctagccacactctggccaaatctcctttttagctccattccattcctttttcttttcttttcttctttttttttcccccgagatggagtttcactcttcttgcccaggctggagtgcaatggtgcgatcttggctcaccacaacctctgcycctgggttcaagcgagtcttctgcctcagcctcctgtgtagctgggattacaggcatgcgccaccatgcctggctaattttgtatttttagtagagatggggtttcttcatgttggtcaggatggtcttgaactcctaaccttaggtggtctacccacctaggccttccaaagtgctgggattacaggcgtgagccaccatgcccggccagctccatttctttcttctgtctgctctgtctgtacactccaggctttgccatgtctgtctcactgtcagttccagggtctcggcccttcatgaggtggttcctgtcaggaggcgcagtacactgcaggagctgtcgccatgggagcaggatgctccatggagaaagagctgtcacagagagcctcctggctgcccagggccctctgggaagctgtgctgggcccgctctttcaggttccaggtcaggaagctgaggctcagagaggaaaaggattcaccccgagccacctacctggctaatggcagggctgggactcaatccaagtgtgtcacaagttctaggttggcc

SEQ ID NO: 547022 - DNA, 1094 bp, Homo sapiens
tcttgcagacagacccgagatccccaccctgggccagccctgacatagacagggcccacatctccctgtggctgctcagcccgcctccgcgaacaggcccaatggggcgttggtaataaagagactggctctgcaggccatgactctgctgctcagctgtgggactttgggcaagttgccaaacctggccatgtcctcatttgtcatctatgaaatgggataatagcggcgttgacctcatggtgtgttgtgaggaccaaacatgtcaattcatgcaaaggtctgggacagggtctgtacctagaaagagtcaggtgtcattttccaatcccaacgggggccctcggatggggagggtttgcctggtggccacacacagacctcctagccacactctggccaaatctcctttttagctccattccattcctttttcttttcttttcttctttttttttcccccgagatggagtttcactcttcttgcccaggctggagtgcaatggtgcgatcttggctcaccacaacctctgcccctgggttcaagcgagtcttctgcctcagcctcctgtgtagctgggattacaggcatgcgccaccatgcctggctaattttgtatttttagtagagatggggtttcttcatgttggtcaggatggtcttgaactcctaaccttaggtggtctacccacctaggccttccaaagtgctgggattacaggcgtgagccaccatgcccggccagctccatttctttcttctgtctgctctgtctgtacactccaggctttgccatgtctgtctcactgtcagttccagggtctcggcccttcatgaggtggttcctgtcaggaggcgcagtacactgcaggagctgtcgccatgggagcaggatgctccatggagaaagagctgtcacagagagcctcctggctgcccagggccctctgggaagctgtgctgggcccgctctttcaggttccaggtcaggaagctgaggctcagagaggaaaaggattcacccygagccacctacctggctaatggcagggctgggactcaatccaagtgtgtcacaagttctaggttggcc

SEQ ID NO: 547023 - DNA, 573 bp, Homo sapiens
gatccccagaatttattcaccgtatgtaactgcaagtgtgtaccctttgacaacatcccctagacccaatcccccagcccctggaaaacatcctactgtctgcttccatgagttcaacatttttagattccacatataagtttctctggccawggccagagaaaatgctctgatattttatgcttctatcagcatttcccgtttcgtccatcctctcatttgcttttccttttgtttagcttggtgagtttaggagggatatcatccccctcgccttttcatctatcccttctgcttctttcttcagacaacattcatcgttcctccctatccctgtgggtcagattattcccttgtaaggtttttccttatgttttcttgagcttctccttccttcttcatgaaccagtccccaagcaaaaggaactaagttttgaccctttcctaatcccaagagattgcaccatgtactctaatgctctctgaacacattgctcttcatcctttgttttggaaaattagcttaggttttattaagtgcttaagagctcacgatgtgcatatctgcatgtc

SEQ ID NO: 547024 - DNA, 666 bp, Homo sapiens
aaaaggaacacattttttccatgactcggaaaatgcaccagcatccattcctctatcaggatgggcatgtcaactcccatgacttgaagaacagcgataaccaagcaaagcagttatctttttgaaaactcttgtttcgggtcatttctctcatcagtttcagttttaatcagtgccaacccaagctatctgcaaacaagaactaaacaggtatatctttcctgacattgccctgcatcatgggaaagagaagtgcctgttcttcattaaccttgtgttgctgaattggatcacagagcaatctcaatgttcatagaatctaatgggccagaataagtggcttacactttttttttycccctttggagctctgttacaccaaagaataaaagtttagaggcagaaaaaaggttttctccagaagaaaaaaataattttagaaaattgggacattttcatgctgaagaaaaattacaaatttttcatatatattttaatgaatgttttagcagaatgcctgagtacattgtaagtcagtaaggaaacactttaagaaagaaaattagtaactgttaagtgcactaaatgttgcccactgatctgaaagagttgttgctaactctaacatattattccccagtaagaagattttaattaaatattctc

SEQ ID NO: 547025 - DNA, 666 bp, Homo sapiens
aaaaggaacacattttttccatgactcggaaaatgcaccagcatccattcctctatcaggatgggcatgtcaactcccatgacttgaagaacagcgataaccaagcaaagcagttatctttttgaaaactcttgtttcgggtcatttctctcatcagtttcagttttaatcagtgccaacccaagctatctgcaaacaagaactaaacaggtatatctttcctgacattgccctgcatcatgggaaagagaagtgcctgttcttcattaaccttgtgttgctgaattggatcacagagcaatctcaatgttcatagaatctaatgggccagaataagtggcttacacttttttttttcccctttggagctctgttacaccaaagaataaaagtttagaggcagaaaaaaggttttctccagaagaaaaaaataattttagaaaattgggacattttcatgctgaagaaaaattacaaatttttcatatrtattttaatgaatgttttagcagaatgcctgagtacattgtaagtcagtaaggaaacactttaagaaagaaaattagtaactgttaagtgcactaaatgttgcccactgatctgaaagagttgttgctaactctaacatattattccccagtaagaagattttaattaaatattctc

SEQ ID NO: 547026 - DNA, 606 bp, Homo sapiens
cagattaataggcaaattaagaaaaaaaaacctctcaatatggaatgcaagattttgtgtgtaagtggaatttttaacctggaatagatttgcctgtttgattttttttttattttaatttttgggaataaagccttggtggcaaaatcgaggccccataaaagacgattttaatatcatttaatggtaacataatttttttgttgttgttttatttcaaagtgaaatccataaaacttattttcaatgttggctgttcccttttgtcttggaatttaattgaggtttctgaattcagctggccccaaccttgctttctgtttggccctgggcagctcatgatttttctcatttcctattctcagtcttggtttaatcacttataaaatgacagcacttagactggcctacctcataaggttgtgaygttaagtaataaaagtgtcaattgctctgaatgccaaatgtagctcttctataccctttgctttcttaaaaatgtctctttttcataaacaaggaagaatacagaaaggccgcataaggtcagattcagcagtccatgcggtgcagcgttctgtccctggcaacaggaccctgggacgg

SEQ ID NO: 547027 - DNA, 852 bp, Homo sapiens
aggcccacttggctcttcccacgttggggtgcagcatagtgaaaagcggagtgcactttacaggcaggactagctggaggctcaccaaggtggatgtgttggtaagtttatgtgtcagcttggctaggccataatacctactgagtccaacatcaatcaggatgttgctgtgaaggtatattttggatgagatgaacatttaatgcagtaaacttcaagtaaaacagatgtccctccataatgtgaggggatctcatccagtcagtgggaaggaaaaagactgaggtgccctgagaaagagagaattctgctttttcagattgccttacacttagccgtaacatccacccttcctgggagctccaggccgctggcctgccctccagatttcagacttacagcctgtacaatttcacaagccagttccttaaaataaatgtatctctttatatactcacatcccattggtcctgtttccctggagaaccttgactaataatacagggctgaataccacactcctactccaggtaggaagccaggtggtcagggtgacaagggggccggggaggagggtatttattgatgagggggagtggagtcaggctaacatcggggtagtaggaatcataaatggttcttgtgtccccaccaagctaggaaatagcaagctggttctaaaaggttcagggtcacacatctgtccrttcattccttctttcgtgtaacaaaatcttgattctaaggctctctctaggtgctgcggggcagcagtgagcaaagcaggccctgccttcctagagcttaaggtctagcagggaagtggtgatacactggtaagtcaggatttga

SEQ ID NO: 547028 - DNA, 852 bp, Homo sapiens
aggcccacttggctcttcccacgttggggtgcagcatagtgaaaagcggagtgcactttacaggcaggactagctggaggctcaccaaggtggatgtgttggtaagtttatgtgtcagcttggctaggccataatacctactgagtccaacatcaatcaggatgttgctgtgaaggtatattttggatgagatgaacatttaatgcagtaaacttcaagtaaaacagatgtccctccataatgtgaggggatctcatccagtcagtgggaaggaaaaagactgaggtgccctgagaaagagagaattctgctttttcagattgccttacacttagccgtaacatccacccttcctgggagctccaggccgctggcctgccctccagatttcagacttacagcctgtacaatttcacaagccagttccttaaaataaatgtatctctttatatactcacatcccattggtcctgtttccctggagaaccttgactaataatacagggctgaataccacactcctactccaggtaggaagccaggtggtcagggtgacaagggggccggggaggagggtatttattgatgagggggagtggagtcaggctaacatcggggtagtaggaatcataaatggttcttgtgtccccaccaagctaggaaatagcaagctggttctaaaaggttcagggtcacacatctgtccattcattccttctttcrtgtaacaaaatcttgattctaaggctctctctaggtgctgcggggcagcagtgagcaaagcaggccctgccttcctagagcttaaggtctagcagggaagtggtgatacactggtaagtcaggatttga

SEQ ID NO: 547029 - DNA, 2212 bp, Homo sapiens
taggctttctggtctctgcaattacatgacatggctctggagcactgatgtaaataaccactgtcatccttgtcgaatttcactgatttctactccatttttatatctttcagtttgctagataagcagtgtagtaaagtggttaagagcatagactctgaagccagactacctgggttggaatcttggctttgccacttaccaactgtgtgagctttggccaagctatttaacctccctctgccttggtttcctcatccacaaaatgtgtaataatggtactacctcatttgaagactaagtgaatcaatgtacaaagcattgtaacactgcctgaaacacagcaagtattatataaatgttaggtattcaaacttgtacaacaacgtctagctataacggtaatatacaacggccgtagcatccatattattttgcttctgttgcattctgacctagtgacccaagttccaaattcctttttgtgatggtgcttttggcttctttgtcaaataggatgaaaacttcctcaaatgcagaaatatattctttggtcagtttattggccactgtatagctaaggaagaaagaagggaggaagggcataccagcacaggggctataacatctatggaagctgtgggtggcactgtttcatgttttatgcatttaagtcttcagtaagtttagaatactttttagtataaaatactaagtagcaatccaacttttttccaagtgactggccaattgttccaagaccatttattatataatccattctttctgcattgatttgaaatatcttcagacccaatactacatttttacattcacttgctaattctgataccaaataattcagtttatttttccttttctcctctgccaggaccatactgtcttaattactacatttttttttaagtgttaacaggtagggcaaatcccttccctttttctttttctaaattttctaggctgttctcataaactttagggttattttcactagtttcaattcttaaaaatctctttgggattgtgactaaaatttcatctcattaatatattactttacaaaaattttatatttttatattactgagtataaccttctaggaatatgttatacctcatattcacatgtcttacgttgctcatagatttcttcatatggctagaaaataataatagctaatatttttaggtactataacttactacatgccaggcagtgtttaggtgctttacatatattatttaattatcatatgaggtagcactatcattacttccattttatggatgaggaaactgagtacagagaggttaaataacttagccaacatcacatatatggtaagtgctaaataaatatttgatgactgaaagtatatacaaaagaaaatcataatactgaatttttaaaaaacatcagtaatccggtgtaggatcttctgccttccttgttttagttagtcttacaatatctctataaagtagttggcattttcattagaaataacgaatggatagccacttgcacaaaacttggcacatggtaggggctgaataaatggcagctattaataccacagctattataacaattaaaaactggtgtaacattaaggagacactaaagataaccccatgatttagatgtaagttacaatgacacgatatatgaaaaacagtgagtactagataatggatacttaatgcatgcaggcattaaaacctagatgatgggttgacaggtgcagcaaaccaccatggcacatgtatacctatgtaacaaacgtgcacattctgcacatgtatcccagaacttaacatatttttttaaatgaggaagaataaataaataaataaaacaaagttttctccctatctctgggattaagtctgagttcttaagctttctgatccacaattttatcatcatcaagtaaatgawgatgccaattacttatgttcattaattctattcagaattacagcttcttttagccctcaattatttattgagcacttactgtatgaaagtcactatgtcaggcaaaagacagatgagggcctttttggaatttatgtactagtgggagaatatacaacacataactaaataggtgagataaagagtgtgagaactcctataaaaggaataaacagggtcacatgatagagaagggaagagaatagagtg

SEQ ID NO: 547030 - DNA, 867 bp, Homo sapiens
atggcatatgtatacctatgttacaaaccctcacattgtgcacatgtaccctagaactttaagggttataggggggatatatatatatatatccagatagcttgactattatcaatcttagactaaattttcttcatccacaaataagtctgtaagcaaattaatgcaaacacagtaagaatctcattcatcattctaaacttgattatgctgacaagagtttcaggagaaattccattctccaactaactttccttgaaagattttcaattcttaatttaaaagccaagaatccaattagctagttcagaggttaaaaaaaaacaagaacaacaaaaaaacctaacctcacaactcccaaaataaaagcaatttctaagttttttttttttttttttttttttaagagacagggtctcattctgttacccaggctggagtgcagaggtgccgtcatagctcactgtgacctcaaagtcctgggctcaagcaatcctcctgcttcacccttctaggactacaggcacacatcaccatgcctgcctaattttttctattttttgtagraacagagtctcactatgttacccaggctggtcttgaactcctggcctcaagcaatcctcctgccttcagctccaaaagtgtaatcacaagtgtcagccactatgcccatccctaagttgttttagtatggttatgaattctctcctctacattctgaaaccaacatgagttatccctttttctggatctctgaataaataactctaacagatgctatttcagctacttcctaattccaatttcccaacagatcatataatacctagaacagctacagttaaagatctcaaacataatgct

SEQ ID NO: 547031 - DNA, 561 bp, Homo sapiens
agattgaactaaaaattaaaaactgaagtctatactgagctgaagaaattgtattcagtaattttcacaattcttgtgggttttcactgtaacttaaggataaaagaattggctactttggctgcgtgtggtggctcacacctgtaattccagcactttgagaggccarcgtgggaggattgcttgagcccaggagtttgagaccagcctgggcaacatggtgagactccatctctactaaaaatacaaaaattagctgggtgtgatggtacgcttgtagtcccagctaagctactgggggtggcagtggtggggttctgacgtcgggggtcgcttaagcttgggaggtggaggttgtagtgagccagatcatgccactgcactccagcctgggtgacagtgaggccctatctcaaaaaaagaaaaaaaaagaattggctactttatttcctcagatagagtaatttcgaaatgtatttttgataataaaactgacttttaaagaaaagtgttttttacatcaggtaaacttgccaattttggtagccattgctataaatg

SEQ ID NO: 547032 - DNA, 622 bp, Homo sapiens
gagctaagtttttgttttcattcatcacacacacatcttatctataagaggagatggaggcttccttgaaattagtgttctttttgtagttctattacaaattcagaaagagtaggcctccggaaaattctgtgcttgttttcatctctaaacaggaagtccaaaggcaaataaaaatgaagacaatcccagtttgcaaacagtcaaaatttttagcaactctctcaccaagtactctgggattttagcccagtcctactaatttagaggaaggcatttgctcgggctgaccatgcctggtgcaattgatgggcccttagtgcgttggcaggcatacttgcagcttgcaggacttcttgagaagggcacttcacctctctgagccttaatgccctcatctgtaaaatggaaacattgatcctgcaattatagggtaattttaagggttaaaggacaaaaatgcatgggagccctgctttgggcctggcatgtagtaaccgctcaacaaatcatagctgcaggccgggtgcggtggctcacgcctgtaatcccagcactttgggaggccaaggctggcggatcaygaggtcaggaaatcgagaccatcctggctaacacggga

SEQ ID NO: 547033 - DNA, 517 bp, Homo sapiens
tggagttctgacctgtacagaatgaaggattttcctgatatcagtctgcattatttacaaaaaatattgcaccagagtaatctstgtgaaaaaaattaccctatttcatgtaattttaaggacatatttatcacattttaacagctctgaacacaggccatattttgcaattgaaggcatgtcacagttgaactgacagcatttttccttttaagaaaataatggtgtatcttattgtcaatggcatcttcagcttgatgatatataggaagtcatcattctgcaagacatcacttgggcaatatttctgctgggatagtgtaactggccctgatagtttctctgcaattatataaggttacttcttccacttactctctacaaagacttaaatcctatcataatttcacctatattaacttggaaattggcttaaataaattttctatgactagtctctctacttgccaacaatggctgccactcatccatagtttccacaaatggtgaagtaaaa

SEQ ID NO: 547034 - DNA, 517 bp, Homo sapiens
tggagttctgacctgtacagaatgaaggattttcctgatatcagtctgcattatttacaaaaaatattgcaccagagtaatctgtgtgaaaaaaattaccctatttcatgtaattttaaggacatatttatcacattttaacagctctgaacacaggscatattttgcaattgaaggcatgtcacagttgaactgacagcatttttccttttaagaaaataatggtgtatcttattgtcaatggcatcttcagcttgatgatatataggaagtcatcattctgcaagacatcacttgggcaatatttctgctgggatagtgtaactggccctgatagtttctctgcaattatataaggttacttcttccacttactctctacaaagacttaaatcctatcataatttcacctatattaacttggaaattggcttaaataaattttctatgactagtctctctacttgccaacaatggctgccactcatccatagtttccacaaatggtgaagtaaaa

SEQ ID NO: 547035 - DNA, 517 bp, Homo sapiens
tggagttctgacctgtacagaatgaaggattttcctgatatcagtctgcattatttacaaaaaatattgcaccagagtaatctgtgtgaaaaaaattaccctatttcatgtaattttaaggacatatttatcacattttaacagctctgaacacaggccatattttgcaattgaaggcatgtcacagttgaactgacagcatttttccttttaagaaaataatggtgtatcttattgtcaatgrcatcttcagcttgatgatatataggaagtcatcattctgcaagacatcacttgggcaatatttctgctgggatagtgtaactggccctgatagtttctctgcaattatataaggttacttcttccacttactctctacaaagacttaaatcctatcataatttcacctatattaacttggaaattggcttaaataaattttctatgactagtctctctacttgccaacaatggctgccactcatccatagtttccacaaatggtgaagtaaaa

SEQ ID NO: 547036 - DNA, 517 bp, Homo sapiens
tggagttctgacctgtacagaatgaaggattttcctgatatcagtctgcattatttacaaaaaatattgcaccagagtaatctgtgtgaaaaaaattaccctatttcatgtaattttaaggacatatttatcacattttaacagctctgaacacaggccatattttgcaattgaaggcatgtcacagttgaactgacagcatttttccttttaagaaaataatggtgtatcttattgtcaatggcatcttcagcttgatgatatataggaagtcatcattctgcaagacatcacttgggcaatatttctgctgggatagtgtaactggccctgatagtttctctgcaattatataaggttacttcttccacttactctctacaaagacttaaatcctatcataatttcacctatattaacttggaaattggcttaaataaattktctatgactagtctctctacttgccaacaatggctgccactcatccatagtttccacaaatggtgaagtaaaa

SEQ ID NO: 547037 - DNA, 511 bp, Homo sapiens
atagtctaggtgcacatacaaaatgaaaaataatatagttcaaatatatttaatattgagtgtatttaaaatattttaatatatgtttacaaaattcattttaatatgtatttgctagacaatttttattttggaaatcataatcattctttttgactaataaaamatattgacattaaatggcttagtagtttctagaaactaaactcacacagcaaattaaaatgcaaaatgtgcttgtctggtaagattattcacagggaaataaggacatactaagtggatcacagttttgaaagagcttacctactgagggtaagatttacatattaatgatacagaaagtttgcacaagctcagaggctaagctgtgttcagggatgagcaggcttctatttaaaagggttataacctattataaccctttgtgttgtcattacaaagttgatctatgctagcagcatatagatgtaagctagttccaattttatctcaggaaaggaacagagca

SEQ ID NO: 547038 - DNA, 693 bp, Homo sapiens
tgacaagagagtagtgggacaaaggatgatacattcaggtgactgaaagtcatgcagccattcgcacgagtatcttcaatctatcttyattgcactggaacgaggtcaatgatattctgttaggtatgtgaaaaatttatggaaaacatgtggtactgtcttccttacataaaccaaccataaaagctgagtgtgagtgacagcatagcttagtaatcagaactaccatttgaatgttgtgtctgctacacactggcagtgtgaccttaggcaaatcatgttacctctctgtgactcatctttctaatctatacagtaagatgaatacctgtaccgtctcataagatcatatgaatagtatactatatgtaaagtccttaaaaaacctgacatatcctaagcattacataagtgttatttgctatcattttattattacttatgtttatacaagcaaaagggaaaatatacaattcattacctaaatatctagcatcagttatttgaaatgagtagaattagaggaggaagcaaaacttatgaatttagtatagatactttgcttttgcttgaactcttgcaacaaatgtgtgttacttttgcaattcagatgactgaaacttaagagaaacagcaaggaagttttttttagtaaagtttatcaggtaaatttagaagtgtccccatgcactt

SEQ ID NO: 547039 - DNA, 515 bp, Homo sapiens
agaamgaaccaaacaacacaactgagaattcaggaacccagataggtttcatggcagagtagaaatgagccctaggccaaggacttcatgacaaaaacaccaaaagcaatggcaacaaaagccaaaatcgacaaatgggatctaattaaactaaagagcttctgcacagcaaaagaaactaccatcagaatgaacaggcaacctacagaatgggagaaattttttacaatctacccatctgacaaagggctaatatccagaatctacaaagaacttaaatttacaagaaaaaatcaaacaaccccatccaaaagtgggcaaaggatatgaacagacacttctcaaaagaagacatttatgcagccaacagacacatggaaaaatgctcaccatcactggccatcagagaaatgcatatcaaaaccacaatgagataacatctcacaccagttagaatggtgatcattaaaaagtcagaaaacaacaggtgctggagaggatgtggagaaatagga

SEQ ID NO: 547040 - DNA, 515 bp, Homo sapiens
agaacgaaccaaacaacacaactgagaattcaggaacccagwtaggtttcatggcagagtagaaatgagccctaggccaaggacttcatgacaaaaacaccaaaagcaatggcaacaaaagccaaaatcgacaaatgggatctaattaaactaaagagcttctgcacagcaaaagaaactaccatcagaatgaacaggcaacctacagaatgggagaaattttttacaatctacccatctgacaaagggctaatatccagaatctacaaagaacttaaatttacaagaaaaaatcaaacaaccccatccaaaagtgggcaaaggatatgaacagacacttctcaaaagaagacatttatgcagccaacagacacatggaaaaatgctcaccatcactggccatcagagaaatgcatatcaaaaccacaatgagataacatctcacaccagttagaatggtgatcattaaaaagtcagaaaacaacaggtgctggagaggatgtggagaaatagga

SEQ ID NO: 547041 - DNA, 515 bp, Homo sapiens
agaacgaaccaaacaacacaactgagaattcaggaacccagataggtttcatggcagagtagaaatgagccctaggccaaggacttcatgacaaaaacaccaaaagcaatggcaacaaaagccaaaatcgacaaatgggatctaattaaactaaagagcttctgcacagcaaaagaaactaccatcagaatgaacaggcaacctacagaatgggagaaattttttacaatctacccatctgacaaagggctaatatccagaatctacaaagaacttaaatttacaagaaaaaatcaaacaacccyatccaaaagtgggcaaaggatatgaacagacacttctcaaaagaagacatttatgcagccaacagacacatggaaaaatgctcaccatcactggccatcagagaaatgcatatcaaaaccacaatgagataacatctcacaccagttagaatggtgatcattaaaaagtcagaaaacaacaggtgctggagaggatgtggagaaatagga

SEQ ID NO: 547042 - DNA, 1498 bp, Homo sapiens
gcatagcaaactacaccaattcaactcaaatcctggcagttgttaacacttttggaaagggaactgagctactgatatactactgtgtgcctactatactaataggcactttaatacattatctaatgtaatcccaacaatcctgcaagttacgtcttatcattcccaatttacagatatggacacagaatgcacacaggttaagtatccagtgctctgtcatacaactgaatgtgggggagtccaggctacatctagatgtgtacttccttcgataacatgctcctacctcccagggtattttccttttggcttccaaaacattttgtaagcaaccactggtaacctcaaataagtggtatgatttccattataaagaagaaaagactgagaaagagtaacagagaaatgtctttctctagctcagaaagctacaatttcacatagtcctaaaatgcctgtcttcatctttctgttatctccttttgaatacacttcaatccactcataacccttttcctaaaagagaattcaaaagactgaggtggaatctctgcctcagtcttcctctttgaattgccatcagaaaaacgatcaggggaaatatgttcagccaagagaagggggcagtatcccagcaccatcattttccttttaaacactaaactccaggctatatactggaaacctatcttagggcccattatatgaatcccacagaaagagacccacaaaatttggagacaaaaaagcaatagggagacaaagtgaaggatgcttctctcaaacatcaggacaatttacttaactaatgagttatgagatagcaggtagcttgagtttcccaatatccaacggaattgtttcccaaatgaaaacaaccaatgccaccaaaaattagacttgagccaatggcagaaatcctttttacaatattttaatcgtaagtaatcagaatgcatgawgggttggtttaaaaatatgtcgaggatttttcccctagatagtgttgctgttatccaaaggaaagatgctattgcttctgctccactgacactgtttatcacttcgcccagacccttcaatagaaattgctgtttctcactgccgaccatctgttgtcatctacatgaaaaatctacataaatccctactagttgctgtatttcagaagtgccccccaccaaagaaaatcacagattaattgttgctgctttaaaactctaagaaagggaaatgaatctaaatataccttcctccccccaacacacatacacatacacacacacacacacacacacacgcacacacagcaactttcatctataatttagaaaatggatgcagttcagcaacagttaaagactaatttcttatgctttttgtgcatttacataattgattcactagataatgcactctgcttccttatttaataaacatgttaatgatttcagacaattactcaaagctgcctacaagtgtctgcctaagaaaa

SEQ ID NO: 547043 - DNA, 1019 bp, Homo sapiens
ttttaatgtgattctctcactggaggactgaatttggatctggttctttcttcttttaaagtccaacttcattcccatatatcctttaagactttccttggccatctctgtccttatagaatttcccattcaaatgcctcagtaaaygcaccactgttctgcatgttacaagttaccatgggtggttagcattcttttcctatgtaaagcttaccctccatcctctcagcaataacattgtttagaggagagatgggctgaggagaaaattgtgttcctaacttgctgtgttatcttgcacaagtcagttaatacctccagacttcacatgtagtatctgtgagtagagaaagttggattaaagggtctctaatgtttctattagtgccactatttgtgaaactgtggcctatccagtgccaaatagcaaacatcctgtaagtgttggataatgagattctgacctcacaaggggtttataattatcagagggtcaggtaatggagtgttttccatggaggcattagagacccttccctgagccgcattatgtccccagagggtatgacttggaagcaggaaagcttatgtatttttaatcaaaggcaacaggatcagtacccaaacagccaaatgacaatctgattgcatttccactcttcagctatgctgagtatgttctgacagcacagtatatcacccagggaaagtgcaggctcattaatagcactggttattaagggatttggatcagggtagctgtgctggcagtattgatgggacacagcagagaatgagtaggtagagtcttgtgctcaacttttatctctactcaaaatgctctcggtccttgttacccataatattctcccagagagaccatcagcattgttatcagcccattagaatcttgggcctcactccagacctatataataaaaatccgtcttataaaaaaatccccaagtggttcataggtacattaaatttggagtcaaactgctcagcttgacaggaga

SEQ ID NO: 547044 - DNA, 1020 bp, Homo sapiens
tgcagtcaagattccatctgcccgaggcagctttattgagccttgggggactgactcctgacagatcctaggcttctgttgtcccttgcctcctatctgtaagtaataaactctcttcatgtaccttgctgccaagcttaagtgggcaatactcgacaagctgccccaaattcgactttgcattcagggtcaaggaggaaagtttggaatagataatcttgaattcttgtagttagttcactggctaaatagtaaaaatatcaaataattgttgagtatgatttaaggtgacataatcattgtgagtaggcatccagatattgttgatgtgctgagggaatgtgccagaaaaatgtatggaaataagtctataagtgaaatcatgctaagggmaagtcatattgagggagagttagttaggatgatactaatataggtctaagcctggatgacatgagagaatatttcttgggtggatttattcaatttgagaaagggaaggtggaaaaaaacagtttcaactatgggttcttgggggagatgcaaactcaaacatgtgggacgtagagcaaaggggaaataaaaaaatcacagattcagtgaacagttccagttcatgatgatagcgaaggagagtgagtgactttacctcattttaaatgttacaaataggtaagctttattggaaaattacactagaggcataactcactactgaacaagaaaaaagtcatggaaaaaattgccttttaatgactggggcatttcttttctttctttccctttctgttctttctcccgtttcttcttattttccttccatttttgtgcctccatgaagagagatcttcgtttttgcctcggtgtttcctgcgactaggtgggcaagtctgtgtgattaggacattcaacgatggtcagcactctccaatttcagctttctctgtgtcttgcagacaatggttagtagcccagcaccatacttgcaagtttgttttatgcgcattcattaggaaaatc

SEQ ID NO: 547045 - DNA, 684 bp, Homo sapiens
gcagtggcgggcgcctgtagtcccagctactcsggaggctgaggcaggagaatggcgtgaacccgggaggcggagcttgcagtgagcggatatcgcgccacagcactcccgcctgggcgacagaacgagactccgtctcaaaaaaaaaaaaaaaaagagtaggggaacggttttggggactgagaacatgagaaagccatagtggaaaattttcaatcatttagggtttctcacacatgactatatcaatcataagtgttcttcaactttagaataaatgcaagtgtgttaccctcccacacattatttttttaattaaattaaatgttttatgtaaattaaagatagtaagaaagttatatgaaagaattttgtattttctatattgcatattatccatattagatcctgaagaagtattttgagagaaactcaggatttaaaatggaaacatttatgatttattattgaggaaccacatgctcatcaaaattttacagaatatagaaccaaatataatcctccattctctctccatccctaccgctatttccaccatcatatcatttcttaggagtggctatcattagcatattttgtgtatctattaagcacagtatatagaaacataaatgtgataataatattatctaacatttattgagtaggcttagacaatgagtt

SEQ ID NO: 547046 - DNA, 684 bp, Homo sapiens
gcagtggcgggcgcctgtagtcccagctactccggaggctgaggcaggagaatggcgtgaacccgggaggcggagcttgcagtgagcggakatcgcgccacagcactcccgcctgggcgacagaacgagactccgtctcaaaaaaaaaaaaaaaaagagtaggggaacggttttggggactgagaacatgagaaagccatagtggaaaattttcaatcatttagggtttctcacacatgactatatcaatcataagtgttcttcaactttagaataaatgcaagtgtgttaccctcccacacattatttttttaattaaattaaatgttttatgtaaattaaagatagtaagaaagttatatgaaagaattttgtattttctatattgcatattatccatattagatcctgaagaagtattttgagagaaactcaggatttaaaatggaaacatttatgatttattattgaggaaccacatgctcatcaaaattttacagaatatagaaccaaatataatcctccattctctctccatccctaccgctatttccaccatcatatcatttcttaggagtggctatcattagcatattttgtgtatctattaagcacagtatatagaaacataaatgtgataataatattatctaacatttattgagtaggcttagacaatgagtt

SEQ ID NO: 547047 - DNA, 684 bp, Homo sapiens
gcagtggcgggcgcctgtagtcccagctactccggaggctgaggcaggagaatggcgtgaacccgggaggcggagcttgcagtgagcggatatcgcgccacagcactcccgcctgggcgacagaacgagactccgtctcaaaaaaaaaaaaaaaaagagtaggggaacggttttggggactgagaacatgagaaagccatagtggaaaattttcaatcatttagggtttctcacacatgactatatcaatcataagtgttcttcaactttagaataaatgcaagtgtgttaccctcccacacattatttttttaattaaattaaatgttttatgtaaattaaagatagtaagaaagttatatgaaagaattttgtattttctatattgcatattatccatattagatcctgaagaagtattttgagagaaactcaggatttaaaatggaaacatttatgatttattattgaggaaccacatgctcatcaaaattttacagaatatagaaccaaatataatcctccattctctctccatccctacygctatttccaccatcatatcatttcttaggagtggctatcattagcatattttgtgtatctattaagcacagtatatagaaacataaatgtgataataatattatctaacatttattgagtaggcttagacaatgagtt

SEQ ID NO: 547048 - DNA, 2083 bp, Homo sapiens
ataccatattgcttttagtacaattttaatcatagagcaaatctaaacaaggacagcacttgcatggcaaagccacacaaattatatctccaatctataatcacactaaacataaattgacctttacagcaacctctggcataatgtacttgtgtagacttttatattttattaaaaaatatttttaatataaaggtcattaataagcaatttaggtaaaattggatttagagattgaggcgaaaaatctaactattacatttgtttcttggatggcaatttaatatcttattcacaactaaatcattatctgacacagaattactagattgcctagtggaattaccagttaaagagatgtaaagaatacatgtgttacattattcttaacaatgtcttgaaatgtacattagagacgattgctttgccagacacataataatgcttttaaatcaagaatctattgaaggttttattatacctgcactattataaaaggactagcctttttaaaaaaattagataggcctatttgttatatatcaagtttattttttcctaacaaaccacaagtaaactggcaaattctctgggtaaaaaaatccctaaatcttcaccagagacagaggataagagaatggcagtaatgcaatataatagcaagaagtattaacatctgcctttcttttttacttactaaggttttacagggtttttaatattcataaaagccaattttataattacctcaaatgatatataaaatgtcatcaaatataaaatcactgcaaattactggtggtttgaaattaaagccccacacaaatgttgcctaaataaatgtatctacatttagtcaaaattttaaaacatggaaaccgaagtttactaaccagaaaaattaaattctgaacggcttgaaggatatcttaaccaagtaggttaataaactttgtccttttatcaaacaagagatttttcaggacaatgtctttacawtattaattcttcaatcgttttaatattataattctacataaaaataagctcagcttattttttcccataatgtcagatactgattatgaattatttatatggaaattatggagtttttgtgtatttacatttctcaaaatctgaaaaaatgtattgaaatatgggaatgaaatttgaataaacattaaagtttttaaaaattctagggcattaattgcatatggtctccattatcaaattaatgtaatttgtctattagttaatcaataaaagatacagaagtaatcatagaaggattattatctaggtgaaggattgttgcccaaccatctttcagggtaactgagcatgcctggggcccaggttacctgatacttgctctcaggctgcctcactttttcgctcacactctgtttgtaactttatgatgtcccattgagaatgcacctaaaacccaccctgttcaactcacagagctgatttgcatccaaattactgatattttagcctctagaagttaatctcaaatgtttgtgctcagcagccattggttcccacaaaaatgccatgtaagagaattttttaaagcttcaacattatgtactttaggaacatgaactttattttaaaagcctgtacatttgtaactagttcttaggataccgccttagaaataactacccaatagccagtggtggcggctcacatatgtaatcccagcactttaggaggccgaggtgggcagatcacctgaggtcaggagttggaggccagcctggccaacatggtgaaaccccatctctcctaaaaatagaaaaattagccaggagtggtggcacgtgcctataatcccagctactcaggaggttgaggcaggagaatcgcttgaacccaggaggtggaggttgcagtgagctgcgatcacaccattgcactccagccaggggacaacagtgaaactccatctcaaaaataataataataataataataataataataataataattttatattctgggtgatcttacttgttctaggagtatttttgtagattccttttggttttctccataaacaatc

SEQ ID NO: 547049 - DNA, 1410 bp, Homo sapiens
cgcccagcaatttcttttccttcccccccgcccctattatttatttatttttaagacagagtcttggtctgtatgtaccccttttttcrctctgttgtcttaaacattttcttaggctgggcaagatggctcacgcctgtaatcccagcactctgggaggccgagtggggaagctcgcttgagttcaggagtttgagaccagcctgggcaacatgtgaaactctgtctctacaataaatataaaaattagccaggcatggtggcacacagctgtggttccagctacttggaggctgaggtgggaggattgcccgagcctgggaggtcaaggctgcagcgagccatgattgcggcactgcactgcagcccgggtgacagagcaagacctcaaaacctattttctcatttaggccattcatatcccttagtctgcttgaaataacccagcagccaatatatcttcattatcggaatcacccacaggaagtcagccttcatgacgttgtacttctggtagtctagtcagccactgtctgcagtccctgatcatcttctaaggtttgtttgtaaacatgtggtctgcaaccaagaatttaggatgtccaaatatggcaagtttttgccctctctgctatctagtaacatgagtaataatctttgctctccaacactttttatttgtcccaaccattgtcctaatattgtaactgtaatgcagcaaattagttgcctgagttaaaagaaaaaaaaaaatcaacccttggcccttaagacgtcttttaatacaatgatgtgttagtcaaccaaatgatgacctcaaatggctctggccaaggccatgtgtgttgttttccagctttaaaaacctacttgcgcgcctcttgccaaccttcctccagtgtcaaagtgtcatctgcaaggactgttgtctgattgttcctgagggtcgtaggcttttggtgggatcttaattccattctctttgatgtctttagctgtgaaaattaagaagccaatcaagacgaagttcagaatgccagtgtttaactgggttgctctgaagcccaatcagatcaatggcacagtcttcaatgaaattgatgatgagcgaattctggaggtatttttctcattggttagaaactagaggtgcactctgtgcagcaaagccggcatgggtgttctgttaacctggaagtgtcagagataaagtactagtgttttaagtcccctgatgtaaagaagaaacatgtatgtaatattggagaataacatttgacactgttttgtaaggtggctctaaaactgttcaaagagttatgtgtaattggaataaatgcttttgagcatctttagtgtatgccacagaatatagatctgacataataattcctttcgttaattgagaga

SEQ ID NO: 547050 - DNA, 569 bp, Homo sapiens
tagtgagacctagcctgccacaggactacgggcacgtgccaccatgcccagctaattttaaaattttttgtagagatgaggtaccactatgttgcccaggctcatcttgaactcctgggctcaagcgatcctctcacctcagcctcccaaagtgctgagattacaggtgtgagccaccatgcccagtgaaatttctaaaagacttttttaaacagtctcttatgggacttgtacacacaaagctacaatattagacaatgtgtccttcactctattacagctgtatactccatgccctatagcatagtacagtgtatataatggacacaaattgtattgaaagatgtgttccaaaatttgtaaatatcactttcacatatgcaagcacagccaagagttcaaataaaaataatgaagtttgtgtgttgcacacaaatacagacacattaaatttgggtaragaactgaatcttacccaatgcattctccgggaggtcaagaaaagaaagcctaataggtgttgaagcagccaaggaagtcatcttcaagacagaggagtttaagctggg

SEQ ID NO: 547051 - DNA, 930 bp, Homo sapiens
aaaaaaaaaaaagaaaaagttctggaatctattgcccaacaatggagaaatacttaatactcctaaactgtatccttaaaaatggttaagatagtaaagacaataaattttatgttatgtgtttatcacaataaaaaaattataaataaaactttttatatgtctacacaagatatatatgtaagcaaatatatacaaacacataagtatatatacatacacatacacatatagtgtaaaataaaaaaccactccttattcatcttatctactggcaagaaatattatactcttgaaaacacacacagttctaagagacagggttgttttccttaagttttgtaaaacaaacacataccctgatacttacaatatttatacaaaactgtattagcacctaaaatgtcctgccaaataataatagcttggcttgccggacgcgatggctcacacctgtaatcccagcactctgggaggcctaggtgggtggatcatgaggtcaggagaccatcctgggtaacacggtgaaaccccatctctactaaaaatacaaaaaaaaaaattagccgggcatggtggcgggcgcctgtagtcccaactactcgggaggctgaggcaggagaatggcgtgaacctgggaggcggagcttgcagggagccaagatccygccactgtacaccagcctgggtgacagagtgagactccatctcaaaaaaaataaaataatataaaataatagtttggcttttcataatgaactaagatccacattttttacctcataacattgaggagaaatatctcatttgagttaatgtttattagtgtgttactaaatataatacataacctatttaactctctaataaagatgtagggtttttaataatcccaaagtgtgtgggacaaacaatggaggatgatagttg

SEQ ID NO: 547052 - DNA, 947 bp, Homo sapiens
ttttatcatcaggaacctctaatattttgggcacaaatgtctttcttagattcaatagttcattggaagaatttcccttatcttgtttaattcctgccatttgattgaaatgttcttccttcaatacatcctctattttttatatcatggtgctaatatttacatactataaaggtactgtatacacatgttctttaagaagatattagaaattaccaaatgtaaaggcttagttttaaaagttttggtagcaaacactatattacaagccagaaatttctggctataaacaagtcaacatttcttcgctgagactgctagtcattttccttccatagatatttaccagaaatgaaaataaatacattttatgttagtaataggttgtttcttaaaactatgtwtaaaatcagttgcactcttttactatgtaaaggaaataaccaaacctcaaatgctatctatgtttattattaaattaatatttgcgttacccttttatatacttactaggccattgttctgatctctgggcaaactcgtttttactgatggacgtgagatgagatgttgggagccgccagggtaataccttggcgtgtaaaggtatggggcaaagaatggctatggaaaaacatgtaacaaaaaaggggtaaacaattacagaaatgaaagtgtaatgagatttttcaaatgaaaccaataagatacaactccaaaactttaatgcaaatgacaaaacaaaagaaaaaaaagcctcactcatattccataagatgctaaactcaaacttaagagatattacttacatttttatattggtcatttcatataagcttttttcagaaaaatgagcaactaaagttttgcactttacagtttgacacgagtttctctctatatttaatatgtttacaagcttaccatctgtcaggttctaagcagtt

SEQ ID NO: 547053 - DNA, 536 bp, Homo sapiens
taaaatgtgaatttggcaatattgagaagtaagcttaggaaaaacttaggaaattgtcacagcatggcctttagcaagaaaacttttcatgatgttgcattctggtgctttattgatatggcaaatcattttattcgatagttgtaaagatcttctacgaaagactgtcacccatatttgtgggcttaagcaatgttttgtttgggttatatggaaatcattcttctggatagtggtttctctcaggcctcaaatcctcttttcttattattgttatagtaaattctataaaggatgaatgaattagaaagatcttctcattagactaatttgatataatgatcatctttcyacatgatgattttctatgaataaatggtaaagactcattaatgtgattttagaggctcatttgttctgcagaagatcatttttcttttagaagagaaagatctgagtgtaattaagttagatttgtattcttcaggattctaggaaatctggaaatgtatattttgaacttcaatatttatagt

SEQ ID NO: 547054 - DNA, 536 bp, Homo sapiens
taaaatgtgaatttggcaatattgagaagtaagcttaggaaaaacttaggaaattgtcacagcatggcctttagcaagaaaacttttcatgatgttgcattctggtgctttattgatatggcaaatcattttattcgatagttgtaaagatcttctacgaaagactgtcacccatatttgtgggcttaagcaatgttttgtttgggttatatggaaatcattcttctggatagtggtttctctcaggcctcaaatcctcttttcttattattgttatagtaaattctataaaggatgaatgaattagaaagatcttctcattagactaatttgatataatgatcatctttctacatgatgattttctatgaataaatggtaaagactcattaatgtgattttagaggctcatttgttctgcagaagatcwtttttcttttagaagagaaagatctgagtgtaattaagttagatttgtattcttcaggattctaggaaatctggaaatgtatattttgaacttcaatatttatagt

SEQ ID NO: 547055 - DNA, 542 bp, Homo sapiens
gttgagttttagggctgtaactggaaaccctattgtctctcataacatttccatttctgagtgtgatgcttaaaaacctctgttcttcaaacctccacctttagataaatagcatattttctaaaggaaaggctccctgcacttcccacaggattgtgaatgmataataagggtctcccccatctcaagagggaagaatgatgaggaccttcagacatgcatgcatgaagttggcacatatttctaaggacagcagtctggtttcttgaatatttcctcaagaagataagttgctatgtgaataatgaaattttgttagaagcaaatatttctattgtctttacaagttgagaaggtcaaggacagttgagcccatggcaaatacctccaggaccctagaccacctaagcggaacataggaagaggctgcaaaaacaagtcatgcctgcattagcaaccacccacctccaacctacatgagaagttgaagagtagagagaagctgtattttaaatgtattttaataaagcaaatattaaaac

SEQ ID NO: 547056 - DNA, 542 bp, Homo sapiens
gttgagttttagggctgtaactggaaaccctattgtctctcataacatttccatttctgagtgtgatgcttaaaaacctctgttcttcaaacctccacctttagataaatagcatattttctaaaggaaaggctccctgcacttcccacaggattgtgaatgcataataagggtctcccccatctcaagagggaagaatratgaggaccttcagacatgcatgcatgaagttggcacatatttctaaggacagcagtctggtttcttgaatatttcctcaagaagataagttgctatgtgaataatgaaattttgttagaagcaaatatttctattgtctttacaagttgagaaggtcaaggacagttgagcccatggcaaatacctccaggaccctagaccacctaagcggaacataggaagaggctgcaaaaacaagtcatgcctgcattagcaaccacccacctccaacctacatgagaagttgaagagtagagagaagctgtattttaaatgtattttaataaagcaaatattaaaac

SEQ ID NO: 547057 - DNA, 542 bp, Homo sapiens
gttgagttttagggctgtaactggaaaccctattgtctctcataacatttccatttctgagtgtgatgcttaaaaacctctgttcttcaaacctccacctttagataaatagcatattttctaaaggaaaggctccctgcacttcccacaggattgtgaatgcataataagggtctcccccatctcaagagggaagaatgatgaggaccttcagacaygcatgcatgaagttggcacatatttctaaggacagcagtctggtttcttgaatatttcctcaagaagataagttgctatgtgaataatgaaattttgttagaagcaaatatttctattgtctttacaagttgagaaggtcaaggacagttgagcccatggcaaatacctccaggaccctagaccacctaagcggaacataggaagaggctgcaaaaacaagtcatgcctgcattagcaaccacccacctccaacctacatgagaagttgaagagtagagagaagctgtattttaaatgtattttaataaagcaaatattaaaac

SEQ ID NO: 547058 - DNA, 632 bp, Homo sapiens
gcaaagagggagaacagtaagtgccaggatggctctttcctcctgccctcctattccctgctgctggccacgatgggctgaactcaaccagaacccagaaggtgcgggagctcagttgacgtggttcctacaggccagtcccaggatcagggcaaggtggagaagaaaggagagcgagtgggtctggagggacaaacgaaatcttcagcatgctaatattgatgtgcaaaaccaagcagcacaacagaaacctgctgtctttcactgagctctaaccatggacccagcgtgaggaaatgatgtcaggccaaggctggggctctgagtaaatggtttgtacagacaggagcctrccactgaggccctgagggaagcaaatacccgagaacaggcagagacagagggagagaaactgcaaatccctttcctaattcctgattccaattctctgagaggttttgcagcctgtttccatgagagtaccctgatttcagaaaaaaaaaaaaatttccgttttacacaaggcagaaatagaaacttcctcaagtttctagtatacccaaagtttcaagtttcaagtatacccaacattctttggttataagaaatagaaacttcctcaagtttcatag

SEQ ID NO: 547059 - DNA, 1408 bp, Homo sapiens
atctgttcctcacaaccccctgttccataggtattgcattgtactgagcagcaatattctaatatttggtagcaataagaataaacaaaaaacgtcccccaccccacaaatcactcacaggataagcagagtttagacaaacagccccttattaccatggggcaactcttatttttgttacagctcctgtgttcctactctttccaaatcattgctacaaaaactcaataaacaatgaaataaatgcattcatagtgtactataacaccttaagcattctcaatactctttcctacttaatataatcactaatgaaaaagaggttatatatgaaacaagcaaagcttttgttgtatttttgaaattttagaccttttatacattcattttggaaactatgaaacctactgactgacaggcaaaaagaagaaagtaaaaataattcataagcccacttcagagataaataaccattggtaatattttgttattatttacatatattgttggttttcatgtatagtattttttaaaatagatgatacagtttataatgtttacaattttactttaaagcctagcaatatattacaaacctaaagaataaatcatggagttaaaatttttgcatgaaattccatatgaatggagtttctgttcttaaataaccaattccttattattggagatttaggttgtctcttattttctgttacaaacaaggctctgaagaacattttttgtgtggatggtcaaatatttatttctttaatttagggaaatggaatccctaggttaaaaagactgctatttttaaggtttctgactcatattttcaaattgtgctttagctccaggactcctccgattaacatcaacaaggaggtactatgcagtgaaattggctccactatctgatataaaaagaccaaataactctggaggtacatttagcaataattgaaatctggggcaaaacacataaaatgtcgtcacgaattgataagaatgcaccaacgcaggctgtggggtgggagaaaggagacggaggagaagagagaaactggaccgtgagcaatgtgctcttcacttccggtccctggctcctttaccatgcatcagctcctgaggggtctatgtggagacagaggaatatctccacttcagctgaagaggcagtgatgacaggagaaaaattacagattttaataattattaaaattctgccctttaaattttggtgccttggggcaaagttatgaccagctcatctaagttgtagttctgaggaacttcctgtctttaccttggtggtcttggagaagtgatacaacccagccccmatggcagatgactctagaagagacccttccaaagcaggataagtttcacccttatgggaaatcag

SEQ ID NO: 547060 - DNA, 548 bp, Homo sapiens
catagttttgccggtggtttccacttgagaaactggtatacagtacacagaaactctttgtataatttcttttaactacatgtgaatctataatgatctcacattaaataattaaatacattggaaaggttgagactgagaggtactcaagaacatattaagattaaaataatctagtaaccaaaataatgctatttaataacaaaacattaaattctaaaagtaagttgaacaaaaactattgaggataatttagtaattgcccatcttgaagttttacatatatattcgcmtaagttaggtacaaaataatgtgatagcacttaattaaatacaatttcatgtccctttaaattattaagttttataaaaaattgtgattacgaaggggtgtggtcaaatgatattagttcaggaagtaggaacaagatactaagggatttttaaaacgagtgtcataagactactgttcagaggtttggggtaatttaatatggacgtatgtagggaaaatatatgcatgtgatctgatttcaaatagctgcaat

SEQ ID NO: 547061 - DNA, 548 bp, Homo sapiens
catagttttgccggtggtttccacttgagaaactggtatacagtacacagaaactctttgtataatttcttttaactacatgtgaatctataatgatctcacattaaataattaaatacattggaaaggttgagactgagaggtactcaagaacatattaagattaaaataatctagtaaccaaaataatgctatttaataacaaaacattaaattctaaaagtaagttgaacaaaaactattgaggataatttagtaattgcccatcttgaagttttacatatatattcgcctaagttaggtacmaaataatgtgatagcacttaattaaatacaatttcatgtccctttaaattattaagttttataaaaaattgtgattacgaaggggtgtggtcaaatgatattagttcaggaagtaggaacaagatactaagggatttttaaaacgagtgtcataagactactgttcagaggtttggggtaatttaatatggacgtatgtagggaaaatatatgcatgtgatctgatttcaaatagctgcaat

SEQ ID NO: 547062 - DNA, 538 bp, Homo sapiens
gtgtaaataagaaaaggagaaattggctgggcgcagtgattcacgcctgtaatcccagcactttgggaggctgagctggacggattgcctgagctcaagggttcgtgaccagcctgagcaacacagtaaaaccccatccctacgaaaactacaaaaaattagctgggcttggtggtgtgcacctgtagtcccagctactccagaggctgaagcaggagaattgcttgaatctgggaggtggaggttrcagtgagacaagatcacgccattgcactccagcctgggtgacagagcaagactctgtctccaaaaaaaaaaaaaagaaaagaaaagaaacttattaaagccaatcacttactgacaaatgcattgtacttgactaattattcctcttaattttggtatttaattatgccttaagcatccgttacagacactatttataccataataaaccttaataaacctttcattaccatatgtatcactttgctcagctgggttgcaatattatctcagtgaattatgcaagaagctt

SEQ ID NO: 547063 - DNA, 621 bp, Homo sapiens
tacgtgtccscttgctagacttaacattccatatgttctatatattgtacagcaaaagatatgacaagtgcaatagaattggcgtcaagcatgctggatttggatgcgggcttatgccacttgctaactgtgtcatctccaacattttatttaatcctgtaagtctgagtttgaatacaaaatgaaaagtagtaacatataataggtagagaaccagaatacactgtgggaatcagggattgagggagcatctagaagtaatgaaatcaaaggcatgggccatatttacattatcttgcatcttagtacctggagcaagaaacaagttcaatgtatgtttgatgaatgaagtggtcctcactcatttgagaaatccatgcaaaattcgaagtcactcaacttctatctctcagttcatgatggtccccacagccactctgtcttctttcatattcctaaatatgctgtatttccttctgtcacaaggcctttgcctgtgctttcttcttcccctagtatgttcttctaccccacccagtttgttatcttctattcatccttcagagagccacttaagcttcactttctcagcaaagacttttctaaccaagactagggaat

SEQ ID NO: 547064 - DNA, 659 bp, Homo sapiens
acttcaaactctgatgtttatcatctctagtgtagggatgatcatctccaacctcataggtctgctgagacaatcaaacaggcatctcaatgtcaaaaatagggcattcgctgtgcaacatgcctctccacaaattttccttttcttgggaactatttatctacctggttgcacaaattggaaccttaagtgttattctttaatacttgtatttccctcactttttatacttcgtatcaggtttgttttctggttggctaatcttacctgtaatataagtaatgcaatatataatatatktaataagaagtaataataataaaattaataataccggtaatatttctgtaatttgttcccttctcatcccaatgccctcacctgtctcagatatgtttaaccagttaataacacctaaagcacaaagaccagtggctaccatttttaagttctaacgttttggccgttatcattgttattattgttctaatggacttgcatcgtgcagaggatgccatggtagcatctcaactggtttcgccacatccattttttgcctccctccaaataattctgcacggagcaaccagaacgatctttgtagaagctgcaaagcagattatgtggtctgatgtaagacatccttcaaagacttccca

SEQ ID NO: 547065 - DNA, 659 bp, Homo sapiens
acttcaaactctgatgtttatcatctctagtgtagggatgatcatctccaacctcataggtctgctgagacaatcaaacaggcatctcaatgtcaaaaatagggcattcgctgtgcaacatgcctctccacaaattttccttttcttgggaactatttatctacctggttgcacaaattggaaccttaagtgttattctttaatacttgtatttccctcactttttatacttcgtatcaggtttgttttctggttggctaatcttacctgtaatataagtaatgcaatatataatatatgtaataagaagtaataataataaaattaataataccggtaatatttctgtaatttgttcccttctcatcccaatgccctcacctgtctcagatatgtttaaccagttaataacacctaaagcacaragaccagtggctaccatttttaagttctaacgttttggccgttatcattgttattattgttctaatggacttgcatcgtgcagaggatgccatggtagcatctcaactggtttcgccacatccattttttgcctccctccaaataattctgcacggagcaaccagaacgatctttgtagaagctgcaaagcagattatgtggtctgatgtaagacatccttcaaagacttccca

SEQ ID NO: 547066 - DNA, 536 bp, Homo sapiens
catcaaagagccccttttcctgctcttctaatgatgctgttacctaagagttttaggaggcacccattggaattccacaaagagccagtctacaccatacaggagtacgtacacgtcatattcaaattaatgaacaagcttatttagtagcctaatttatttaaaaaatttaaggcacactcattttatgttgtggcttayagatgataagaatcactaaggcatattaaaagttcaagcacatactataattttcttccccatcaaatccataattaccagtaattttacaagcaggccccatttttcagtaattataaggtccttacttttaaacttttaaaagatgtggctaatttattcccctgccgtatcaaatgaagaattttatctgaaaaaacaatcctgctttttaaatcccatttcctacctctttatacttcttgacataaagataagagcagtgatattgagtggcaacacgctgagatgagtcaggaaattctgatcaccttcctgcctggaagtgtgatagt

SEQ ID NO: 547067 - DNA, 527 bp, Homo sapiens
ttgtaatattatttcagtcmtgacattttgctaaagaaaggctatgttctctagagctaaaaatgaataatttttgaaaataaatattagatttagaaacaattagaagtatgctatatactcttatgagagatcagttgttaagccatgttaaattgagcattgactacacattttctctaagatgagtattatgattagatgataactgaaatttcatgatttgatgcctcacattaaaaaagttaacaacacatactcaaggtgcgtttgaaaaatgaaacacattttattaatgctcatatatataaatactatatatttatgaaaaatctaacacattccacaaaagtactaaacaacccagaattatgagttatatttctgttaaaatgacaaatattccttgagaaaatcaaatgctgataattcagtttgttttattaatattttagagaaaaaatataattttatacattattgtaaaatataatgaaatatttatatataaatataataatatataa

SEQ ID NO: 547068 - DNA, 527 bp, Homo sapiens
ttgtaatattatttcagtcctgacattttgctaaagaaaggctatgttctctagagctaaaaatgaataatttttgaaaataaatattagatttagaaacaattwgaagtatgctatatactcttatgagagatcagttgttaagccatgttaaattgagcattgactacacattttctctaagatgagtattatgattagatgataactgaaatttcatgatttgatgcctcacattaaaaaagttaacaacacatactcaaggtgcgtttgaaaaatgaaacacattttattaatgctcatatatataaatactatatatttatgaaaaatctaacacattccacaaaagtactaaacaacccagaattatgagttatatttctgttaaaatgacaaatattccttgagaaaatcaaatgctgataattcagtttgttttattaatattttagagaaaaaatataattttatacattattgtaaaatataatgaaatatttatatataaatataataatatataa

SEQ ID NO: 547069 - DNA, 492 bp, Homo sapiens
cttctctttcttcttcttcttcttcctcttccttctcctcctccttttctttttcttcatcttctttttgttgttcttgtttttagagacagggtctcactctgttgcccaggctggagtgcagtggtgcaatcacggctgattgcagcctagaactcttgggcgaaagcaattctcctgcctcagcctcacgagtagctgggactacaggtgtgcatcacwatgcccagctaacttttttttctattttttgtagagatgggttctcattatgttgcccaggcttgtcttgaactctgggccacaattgattctcccacctcagtctcccaacatgctaggattacaggtgtgagccactgcacccggccttgggttccttttgacaccccttgaatgctggttttccccaggaccttcccactcaagctgttgttcaagagccagcagcatggataccacctggaggcttgtcagaaatcctaatgatgg

SEQ ID NO: 547070 - DNA, 1080 bp, Homo sapiens
gattctatgctgtgtgatccccaagcagcagtgtggcccaaggattcggaatacaggtgctggagcccgattatctgggcctagacccctacgctgctgcttccaactatgcgacccagggtttgaacatatcctcatctgaaaacgtggatcagcatttgacctacagcacagcggtgttgtgaggattaaacaaagcaaatctttgtaacggagccaggcacataatcagcgcccattacacaataactacgatgggatgggggagagagataataagaatacaataatgttattgataatgtttatcattattgtattgttacacaataacgtttaactctgggccctaggatttttattttctcatttttttctttatttttccaattctctataataaccatgaaatccttttacaaccattaaactgatcttttctttggatatgacatgatgttacatccttgcttaaaaaggttcaataacctcccactgcctrcaagataggaaccaaagccctgggcccagcttcgggagccccgcatctgctgacctcagccagatagactggcgactcctcccactgcctcacttgcactctaggctccggcttctccagacttctttgctcccagatgctgtgtcctgcatcgtcttctctttttcttgtgtccttacttcgcagagattctcagctcttctgacttcactactgctcaatgagacccctgttcacactaggaactcctggactcaagcaatctccatggttcagaacccagcttttctgtggggagatgtttctccccaggggactctggggcaacatgcattgctcaccaagaccgagagctccctaagtctccaggctgggccgcagtcccgtgggcatctccagacatctgtagaatcctctgaggtttgaagagagatagagggatggagaggcaaagaaggaacggaggctgttgcatgcaggactctaaaaacaagacacagcaagagggaattttgcaagacttttttaaggacagcatgataaaagcaacatttttaggagcagatatgggcaataat

SEQ ID NO: 547071 - DNA, 1080 bp, Homo sapiens
gattctatgctgtgtgatccccaagcagcagtgtggcccaaggattcggaatacaggtgctggagcccgattatctgggcctagacccctacgctgctgcttccaactatgcgacccagggtttgaacatatcctcatctgaaaacgtggatcagcatttgacctacagcacagcggtgttgtgaggattaaacaaagcaaatctttgtaacggagccaggcacataatcagcgcccattacacaataactacgatgggatgggggagagagataataagaatacaataatgttattgataatgtttatcattattgtattgttacacaataacgtttaactctgggccctaggatttttattttctcatttttttctttatttttccaattctctataataaccatgaaatccttttacaaccattaaactgatcttttctttggatatgacatgatgttacatccttgcttaaaaaggttcaataacctcccactgcctgcaagataggaaccaaagccctgggcccrgcttcgggagccccgcatctgctgacctcagccagatagactggcgactcctcccactgcctcacttgcactctaggctccggcttctccagacttctttgctcccagatgctgtgtcctgcatcgtcttctctttttcttgtgtccttacttcgcagagattctcagctcttctgacttcactactgctcaatgagacccctgttcacactaggaactcctggactcaagcaatctccatggttcagaacccagcttttctgtggggagatgtttctccccaggggactctggggcaacatgcattgctcaccaagaccgagagctccctaagtctccaggctgggccgcagtcccgtgggcatctccagacatctgtagaatcctctgaggtttgaagagagatagagggatggagaggcaaagaaggaacggaggctgttgcatgcaggactctaaaaacaagacacagcaagagggaattttgcaagacttttttaaggacagcatgataaaagcaacatttttaggagcagatatgggcaataat

SEQ ID NO: 547072 - DNA, 1080 bp, Homo sapiens
gattctatgctgtgtgatccccaagcagcagtgtggcccaaggattcggaatacaggtgctggagcccgattatctgggcctagacccctacgctgctgcttccaactatgcgacccagggtttgaacatatcctcatctgaaaacgtggatcagcatttgacctacagcacagcggtgttgtgaggattaaacaaagcaaatctttgtaacggagccaggcacataatcagcgcccattacacaataactacgatgggatgggggagagagataataagaatacaataatgttattgataatgtttatcattattgtattgttacacaataacgtttaactctgggccctaggatttttattttctcatttttttctttatttttccaattctctataataaccatgaaatccttttacaaccattaaactgatcttttctttggatatgacatgatgttacatccttgcttaaaaaggttcaataacctcccactgcctgcaagataggaaccaaagccctgggcccagcttcgggagccccrcatctgctgacctcagccagatagactggcgactcctcccactgcctcacttgcactctaggctccggcttctccagacttctttgctcccagatgctgtgtcctgcatcgtcttctctttttcttgtgtccttacttcgcagagattctcagctcttctgacttcactactgctcaatgagacccctgttcacactaggaactcctggactcaagcaatctccatggttcagaacccagcttttctgtggggagatgtttctccccaggggactctggggcaacatgcattgctcaccaagaccgagagctccctaagtctccaggctgggccgcagtcccgtgggcatctccagacatctgtagaatcctctgaggtttgaagagagatagagggatggagaggcaaagaaggaacggaggctgttgcatgcaggactctaaaaacaagacacagcaagagggaattttgcaagacttttttaaggacagcatgataaaagcaacatttttaggagcagatatgggcaataat

SEQ ID NO: 547073 - DNA, 607 bp, Homo sapiens
tcagctaatgaatcctccttttaaagaaacacacacacacacgcacacacaccactgcaccactgtaattacaatatgattgatagattcactcactcattcccttatttctcataaacttgttgagggctatgtacctagcacctactagtcaacatcacatgattgatagagtttggccttgaacaccagcataagaaaatagatgtgaggaggctggttaatgacaatgaygacaacaacagtgataatgacgatgatgccagtgctgagcccttactgtatgccaagcactgtgcaccaaatacacttattaatttaacttttgacacattcttatgagttattattaagccgagactgactgaggtttaacatatttgcccacagtcatgcagctaggaagaggtggaaactagcgtcaaaggtcatgctctcagccacaaggattaactgacctggctttataatgaagacatgctaccagaaacattcatttgttctttaaatattattttacacaagcggatattttctgaatattttcttcacttgatcttaaccaaaaggccgagaagcgatttttctgaatattttctttataaaa

SEQ ID NO: 547074 - DNA, 657 bp, Homo sapiens
aaatataagaacactatgtgctaacaggatttgggtacttgctggtttcacactgcaattttaaaaagggggagggggtcaattgcttttggaaaagggggtctcccccaatattatccagttgcacagtaagttactattactcttatggtcactaggaacaaacacaggcatactttgcagaaatcagcaaaattaaccaggccctaagcaacttcttatttgttgggttcagcaatggatcatcaagagaggcaggaagaaaagtgaaactagagggtaccaccaagatgtttcctggctagagttatttcagaacactatcatttccaccagagagctttaaaacatttgcgtttctcctatgaatcaggctgtatggcaacaaaacagataaacagaaaaagtacattattagcataaaacagtattagcataaatagaaagggaatcaggatattcggaggggtgggagaaaacagcttgtataatatgtggcctactcatttcagtcgacttcactgtagctgataaactgtgaaatttccataatawtatagagtacagaaagcaaacaacaattttatttgatagggaaattgcatcctgatactggatataaaattctacagcatgttcaatgatattttcaaagca

SEQ ID NO: 547075 - DNA, 2131 bp, Homo sapiens
ccagcttggcacagaaggcacaaagccacctgcaacgaggtcacatagatttgggcaaggaatgacttgtgtggacacaaagtccaggctgcccaccaagtgcacaagacctcaggacattttcccatgctatggactaagaaagagcccaggaatgacagaaatttattttcccaccatccataacgatgaaatcttgcagcagattaagtttgttttagagaaataaaataaacatggcccacactttgcattttggaggaaattttacagctgacattctgatgtcactagttgtaagcaggatgggtgggaggccaggcctctaagatccagtccagatattggtaaaaaagatttggcagattccaagcaagggagggccagctaaaagttattagacaggatttgtattgataagcaatgcagtccaacctgaccccttcaggacatctaggccccaataattcaccctgttttgcccctcttgttgacttgatgagaggtatattagtttcttgtggtggctataacaaaatatcacaaagttgatggctgaaaacaacagaaatttattttctcacagttttggaggccagaagtccaagatcaaggtattagcaggcgtgcactcccgccagagactcttgtagggggctctgttctttgcctcttccagattctggtggctgccagcattccttggcttagggctgcatccctgtctctgttttcacaacaccttctcctcttctgtgtgtctgtctcaaaatttcctctgcctctcttataaggacactgtgattgtatttagagtccattcagacaatccaggataagctgcttctcttgggatccttaacttaatcacaacttttgcaaaataaggtaacattcacaggttccagtgagttggcatggatatcttggtgaggggctggtattttcagtagaccacaggagggtcaaggccatgggtagcttagccaggtagggctcattccaccaccagacaaacccaccaccacagcccctagtatgaggcctgccacacagtgggctcttaatgtttgtgaaatgaagactttgttggataagggccaatatgatgagaactagagctatcagctgggcttacccttgagaggacttcacccagtagaacccaaatttttagattctctttgactagatgaacttacacacaaacacaaagcagagagtgggggtgggatatgcatattcaggtatccacataaaacttccagctttttcaattgccaagtgaggagagtaaaagaaaatgtcatttattttaatagtcatttcataaaagaaagagcattttagcaccaaaaggaagatcattcctttagaataaaggacagtgtttaaaattaaataaatccagcctcattaaaaattcactttgcagttcttttttttctcagcttgccacaaatgaaattccatcacagacctacaccagtttgcaaatgggcatttgaaagcagctgcagggaaaaaattttggaagggaaaaagccacttcattctaggaataaggaagagagtatctgtcgttgggagagtctccccctcccctaaatgccccaaaggccatcagaactccarggctttatcctatgaccctttctctgcccataacacagccactgcagccttctgccaggacccactgagagtgaacacaagggagcctcttgagagatgcccgctgtggcatgagacttgctgataataaacaacatgaacccctccctcttgtctctgccttcccgacttctctccctctgaccaactcaatctctgcccacttctgcctcttgcaagacctttcctcctttggcactgatacaaagtccgagaggcctttgccacttcagtgcctgtcactccccatccgccagcttcaccagatggcctgtggtgtgtgtggtcctgtgcatatgcccacattcttcaagaccctctcacccaaccagaaagctaccccagggctgtgcaagcagcatcacttcctaagacctaaagtgtctctgtgcctcatctgtagggccaggtaaggtgatctccacgtttactcccctattgctggggaagccagcca

SEQ ID NO: 547076 - DNA, 2131 bp, Homo sapiens
ccagcttggcacagaaggcacaaagccacctgcaacgaggtcacatagatttgggcaaggaatgacttgtgtggacacaaagtccaggctgcccaccaagtgcacaagacctcaggacattttcccatgctatggactaagaaagagcccaggaatgacagaaatttattttcccaccatccataacgatgaaatcttgcagcagattaagtttgttttagagaaataaaataaacatggcccacactttgcattttggaggaaattttacagctgacattctgatgtcactagttgtaagcaggatgggtgggaggccaggcctctaagatccagtccagatattggtaaaaaagatttggcagattccaagcaagggagggccagctaaaagttattagacaggatttgtattgataagcaatgcagtccaacctgaccccttcaggacatctaggccccaataattcaccctgttttgcccctcttgttgacttgatgagaggtatattagtttcttgtggtggctataacaaaatatcacaaagttgatggctgaaaacaacagaaatttattttctcacagttttggaggccagaagtccaagatcaaggtattagcaggcgtgcactcccgccagagactcttgtagggggctctgttctttgcctcttccagattctggtggctgccagcattccttggcttagggctgcatccctgtctctgttttcacaacaccttctcctcttctgtgtgtctgtctcaaaatttcctctgcctctcttataaggacactgtgattgtatttagagtccattcagacaatccaggataagctgcttctcttgggatccttaacttaatcacaacttttgcaaaataaggtaacattcacaggttccagtgagttggcatggatatcttggtgaggggctggtattttcagtagaccacaggagggtcaaggccatgggtagcttagccaggtagggctcattccaccaccagacaaacccaccaccacagcccctagtatgaggcctgccacacagtgggctcttaatgtttgtgaaatgaagactttgttggataagggccaatatgatgagaactagagctatcagctgggcttacccttgagaggacttcacccagtagaacccaaatttttagattctctttgactagatgaacttacacacaaacacaaagcagagagtgggggtgggatatgcatattcaggtatccacataaaacttccagctttttcaattgccaagtgaggagagtaaaagaaaatgtcatttattttaatagtcatttcataaaagaaagagcattttagcaccaaaaggaagatcattcctttagaataaaggacagtgtttaaaattaaataaatccagcctcattaaaaattcactttgcagttcttttttttctcagcttgccacaaatgaaattccatcacagacctacaccagtttgcaaatgggcatttgaaagcagctgcagggaaaaaattttggaagggaaaaagccacttcattctaggaataaggaagagagtatctgtcgttgggagagtctccccctcccctaaatgccccaaaggccatcagaactccaaggctttatcctatgaccctttctctgcccataacacagccactgcagccttctgccaggacccactgagagtgaacacaagggagcctcttgagagatgcccgctgtggcatgagacttgctgataataaacaacatgaacccctccctcttgtctctgccttcccgacttctctccctctgaccaactcaatctctgcccacttctgcctcttgcaagacctttcctcctttggcactgatacaaagtccgagaggcctttgccacttcagtgcctgtcactccccatccgccagcttcaccagatggcctgtggtgtgtgtggtcctgtgcatatgcccacattcttcaagaccctctcrcccaaccagaaagctaccccagggctgtgcaagcagcatcacttcctaagacctaaagtgtctctgtgcctcatctgtagggccaggtaaggtgatctccacgtttactcccctattgctggggaagccagcca

SEQ ID NO: 547077 - DNA, 683 bp, Homo sapiens
tttccaaaataaaaagctctataagatcaaaagtgctttagtaaagtgtcacagtagaggtgagggagatgagctgcctggggatgatctaaaagagctttttcagagaatgcagcattttctatgggcataggagagtgggatcacaccccacacatcatagtttttgccctgggggatggagacaaggtgactgggttgaatatgcaatagctctcacctctccctggccaggaaacaatgtgcacctgcagctggctggtcctgaaatgcttctcaagattggtagaggtgggtaaagaggtagcaagcaatccatgacccagtgaacagtgtcccaagagcaggcactggcttatacttgccacagaacctccctacccactctgagctttgattaaagtctctccacattccaaatataagaaaatagttccagaatcagcaccaaaaataagggccttggtcataatactctctcatttccacaygccaaatagtcattatctgagtcactgggctctgggtaatgacaacctctaatccctatggacaaggccacatatcatctctaaatcattcagaaccctgagaacagtgagtcctcgacagaggctcacccactggaatcatgaggctggtcatcactgccaacttttaatgaccaacattgtagactaaat

SEQ ID NO: 547078 - DNA, 683 bp, Homo sapiens
tttccaaaataaaaagctctataagatcaaaagtgctttagtaaagtgtcacagtagaggtgagggagatgagctgcctggggatgatctaaaagagctttttcagagaatgcagcattttctatgggcataggagagtgggatcacaccccacacatcatagtttttgccctgggggatggagacaaggtgactgggttgaatatgcaatagctctcacctctccctggccaggaaacaatgtgcacctgcagctggctggtcctgaaatgcttctcaagattggtagaggtgggtaaagaggtagcaagcaatccatgacccagtgaacagtgtcccaagagcaggcactggcttatacttgccacagaacctccctacccactctgagctttgattaaagtctctccacattccaaatataagaaaatagttccagaatcagcaccaaaaataagggccttggtcataatactctctcatttccacatgccaaatagtcattatctgagtcactgggctctgggtaatgacaacctctaatccctatggrcaaggccacatatcatctctaaatcattcagaaccctgagaacagtgagtcctcgacagaggctcacccactggaatcatgaggctggtcatcactgccaacttttaatgaccaacattgtagactaaat

SEQ ID NO: 547079 - DNA, 508 bp, Homo sapiens
caatgtgaaagatcaaaaatgtggatttaaaaggtcatacttagagaatagaaatsatagcttcctaagggactttggaaatgcagtagcctctcattaaaaacatctaggggccgggtgcggtggctcatgcctataatcccaacactttgggaggccgaggcaggtagatcacttgaggttgggagtttgagaccagcctgaccaacatggagaaaccccatctctactaaaaatacaaaaattagccaggcgtagtggcacatgcctgtaatctcagctactcaggaggctgaggcaggagaatcgcttgaacctgggaggtggaggttacggtgaaccgagatcgtgccattgccctccagcctgggcaaaaagagcaaaaatccatctcaaaaaaaaaaaatcttgggatatcaaagattcaggtgcactgtggatccaactttgcccctgaggataccatctttatatggtgattgcctccaactaacacagggccattaat

SEQ ID NO: 547080 - DNA, 508 bp, Homo sapiens
caatgtgaaagatcaaaaatgtggatttaaaaggtcatacttagagaatagaaatgatagcttcctaagggactttggaaatgcagtagcctctcattaaaaacatctaggggccgggtgcggtggctcatgcctataatcccaacactttgggaggccgaggcaggtagatcacttgaggttgggagtttgagaccagcctgaccaacatggagaaaccccatctctactaaaaatacaaaaattagccaggcgtagtggcacatgcctgtaatctcagctactcaggaggctgaggcaggagaatcgcttgaacctgggaggtggaggttacggtgaacygagatcgtgccattgccctccagcctgggcaaaaagagcaaaaatccatctcaaaaaaaaaaaatcttgggatatcaaagattcaggtgcactgtggatccaactttgcccctgaggataccatctttatatggtgattgcctccaactaacacagggccattaat

SEQ ID NO: 547081 - DNA, 601 bp, Homo sapiens
ggaaattaaacttagcaaaaagagcataaattgacctgaacagaaaagttttaaaaaactagtctctactaaattattttataatatgactaaaacctcctgcatctgtttttttatgaaacctgttttctcttcattcaactctggactataatggacaagatcctagaccaggaaccaggaatcctagattctagtcttaattccctccctatcaatcctttggctggcagaaggtgacaatcattttgggcctcagttggtttttctgcatattagataaccagacagaggtagaggaagtagaagagtaagtagtgaggaaaaggagaaatggtaatcataaygctattagttattctcagcataacactgtccgtgttatatgatccaatatattcataatcactctatgataagcagtgacttataggtcacaagcctttctctagtctcttctttagttaacaagtaaaccagggtgttagacatgaactcgttgcttcacatttttctttaaaatatttttaagaaagccagagaagcaaaagtagtgtaggcacctcttgtttaaacagtgtcattacagagaagtgatata

SEQ ID NO: 547082 - DNA, 601 bp, Homo sapiens
ggaaattaaacttagcaaaaagagcataaattgacctgaacagaaaagttttaaaaaactagtctctactaaattattttataatatgactaaaacctcctgcatctgtttttttatgaaacctgttttctcttcattcaactctggactataatggacaagatcctagaccaggaaccaggaatcctagattctagtcttaattccctccctatcaatcctttggctggcagaaggtgacaatcattttgggcctcagttggtttttctgcatattagataaccagacagaggtagaggaagtagaagagtaagtagtgaggaaaaggagaaatggtaatcataacgctattagttattctcagcataacactgtccgtgttatatgatccaatatattcataatcactctatgataagcagtgacttataggtcacaagcctttctctagtctcttctttagttaacaagtaaaccagggtgttagacatgaactcgttgcttcacatttttctttaaaatatttttaagaaagccagasaagcaaaagtagtgtaggcacctcttgtttaaacagtgtcattacagagaagtgatata

SEQ ID NO: 547083 - DNA, 614 bp, Homo sapiens
gtaacccaatcacagcaatgcccagtaacaatgctgctccaggctaccacggccaagtgtcagagatcagggtatagtgaccggagtggccaactcaagtaagtgtacaggaaccttgcagtcaacacttgaagagataaggcaagcaaggaattctgtaaaaatgagggaagtaygtgatttatcattatttttcattttacattaggaagttatcaataattattttatggataagaacctgaccatggccacaaaaagtaaccataaaggaccccaaaaaagtataaagagtactccatctggtggaaatcatatcttcttcacattctgtccagtcttggggaagaagagtgaggaacgaggaggagtgtgagacacaatgtgtgttcaaattggtgatgatgaagacatttaggagtcagtcctttatctgaagaaagataagaagccactgagggagggttaagcaggaaagaggggaaatgattttgtagtttagaaaggtcattctggatgcagtatcctttgtccaacacttcccatgtattatctctcaagttagtaaatgtgatgtcccctcaacaaggaaagctcgtgaacagaatgccata

SEQ ID NO: 547084 - DNA, 2143 bp, Homo sapiens
catttcctctgtccctaattttgtgatcatcagagaaaacggtatgatacattcttgcttctaatctattcacttcctattccttggatattcccttagtttagaaattttggtcttattttttatctttcctatcagaatatctaagtaaattagcctttagatcccctcaaatgtttcctgtctgttccagttccttcacaaagtaatgaattttgcttacaaggtcagaaaatttgagcttattttttattctgaccttaactctctcttcccattcacattgttctatctactcaccattagttcaggaacattgaattctattattttcatcttgcagctgttatttttcttttaattttttattagtctctcttttccttctattccagttctctattttatgatgcgcctacatttacccctttgtataagggaccacagggccatagggctcttgttttatattatttttgaagaaaataatttgtagtgccttttgaaaagacacaatgagcaaagagcgtattttgttaaatacattctgaaaataagattaaaatttaattataaaaattaagtgtaatgaggagacagggtaataaaagcaagtaaaaaagtgaaaagtacaattcagttagagtaaaatacttgaataacaggaaaaaaatgaagaaatgtacaacatagtatataagagaagaaaaaagtaacattcatacatgaaaaagcagggtagacacaaataacagtacaaggggtgaggaaaagtctaaaaatcgaggaaagaacaggaagtcaatagagacatggaaagtttgagaactaggattctgcttttaaagcacatagtgaaggctttgattgttatctctgtgagatcatcaagacattgcctcaaaagtctttgggtttaaaatgcctttggtagatgaagtggaactggctgctcaatgtctggagaaggggttgactgcactctatgtttttggcccccatagccactgcacaaactccattcataactggctccagtgttccttgcctctaagaacaacgtgtaagctttagttagggaaaaaaggccattataagtttttctcttcatgaatatggataagctttggtaataatgtgtgtttatacacacacgcatacacacatacacactcattacacagtggaacccaataggaagtttcacatggcattgtttacaccatacataactcayacagaagaaactagaagaaagcaggcagacactgatttccttatgtttttgttgtaattttttttcaaacttttaatttattcattggaactggatagtagaaatgcttctttgtgctctattgatcttgttttgcagtgagctttaagggtcacctaggtttacttgttcaatctaaaatcatactttatgttaattttactcttcattgttcgttgtatgatttgtttttagccatcatttttagagaattttattctttcaaagacttctagaatgtactttaaaagacttctagaatggcttcgtgtaactgaattaaatatagtttaattaaatttaaaaaataaattactcttaccactaataactttaagctttaggctgcatttgaattggaaaagaatttgaataaatggcttaagagctctagtgaggtatgagcttaatttgcattatatgtaacttacctcttttcaataaatgcttagatggaagacagaatgaaaaagataagaggctctaaaaatcacatttaaaatttatttaattaaaagggtgttttgcatgattggcaattgaacaaaaacatgactactggctgaagaaaaaatgttcaatgatattatataattaaataataaatatttaaaactattattttcctagaggtcatataatttcattgtaattcaatataaccactaggaatactgttgctaagcctaaaaaatacattctaagggtctaatttatggggttaaagttgaatgacaggtactgaaatcagaagtataatcttaccacttcatctatttcatccgctatttttgcttttttgaattttcaatagtaggatgattttttatcttgtttcttggcaagcaaatttttacaaggcaaata

SEQ ID NO: 547085 - DNA, 1027 bp, Homo sapiens
tgaaaagaagtgtgcacacctgtcacttcaaatcaaaaggtagaaatcatcgagcttagtgaagaaagcatgttggaagctaagacaggccaaagctaagcttcttgcatcagctactcaagttgtgaatgcaaagaaaaagttcttgaaggawgttataggtgctactccagagaacacatgaatgatttttaaaaaacaaaacaggctttttactgacacagagaaagtctgagtggtccacatagaagatcaaaccagccccaacattcccttgagacaaagcctaatcctgagaaaggccctaactctcttcaattctatggaggagaagagaggtgaggaagttgcagaagaaatgtttgaagctggcagaggttggtatatgagcttctaggaaaacagccatatctgtgacattaaagtgcaaagtgtgctgtaaaaatgggaacaacaaagcctgcatgataggacttctgttacagcatggttaagaccttcttgttggtaggccaggaggtaatggtcaccatttgtgtccatattctcctagactgagcatggagaaatctgtaatagtagccagagaggtgtaggttgtgtgttcaagggaaaaaagagtgattttgagggaacacatagcctgcctcagctacgtcagatttctctcctatatgggtttgttgatgcctgctgaggtgtgacttctggcaaaaggttttcccacattccttacattcataaggtttttctcctgtgtgtgttctctgatgtatactgaggcctgacttctgggagaaagttttcctacattcattacatctaaagggtttttcccctgtgtgagttctgtgatgtacaaagagttttgacttctgggagaaggttttcctacattctttacattcaaatggcttctcacctgtgtgagttctctgatgtatggtgagaactgtcttatcgtaaaaagttttcctacattcatcacattcatagggtttctctcctgagtgagtcccctgatgcg

SEQ ID NO: 547086 - DNA, 1027 bp, Homo sapiens
tgaaaagaagtgtgcacacctgtcacttcaaatcaaaaggtagaaatcatcgagcttagtgaagaaagcatgttggaagctaagacaggccaaagctaagcttcttgcatcagctactcaagttgtgaatgcaaagaaaaagttcttgaaggatgttataggtgctactccagagaacacatgaatgatttttaaaaaacaaaacasgctttttactgacacagagaaagtctgagtggtccacatagaagatcaaaccagccccaacattcccttgagacaaagcctaatcctgagaaaggccctaactctcttcaattctatggaggagaagagaggtgaggaagttgcagaagaaatgtttgaagctggcagaggttggtatatgagcttctaggaaaacagccatatctgtgacattaaagtgcaaagtgtgctgtaaaaatgggaacaacaaagcctgcatgataggacttctgttacagcatggttaagaccttcttgttggtaggccaggaggtaatggtcaccatttgtgtccatattctcctagactgagcatggagaaatctgtaatagtagccagagaggtgtaggttgtgtgttcaagggaaaaaagagtgattttgagggaacacatagcctgcctcagctacgtcagatttctctcctatatgggtttgttgatgcctgctgaggtgtgacttctggcaaaaggttttcccacattccttacattcataaggtttttctcctgtgtgtgttctctgatgtatactgaggcctgacttctgggagaaagttttcctacattcattacatctaaagggtttttcccctgtgtgagttctgtgatgtacaaagagttttgacttctgggagaaggttttcctacattctttacattcaaatggcttctcacctgtgtgagttctctgatgtatggtgagaactgtcttatcgtaaaaagttttcctacattcatcacattcatagggtttctctcctgagtgagtcccctgatgcg

SEQ ID NO: 547087 - DNA, 927 bp, Homo sapiens
caaaagcaccccttgagggcttcgccgtcccaccagtcccccagccgatttttcagaaagttcagcagcgtttcctccaggcagcttcccggaaagggttgctgtcacccccgggggcagtttcctgttggacagtctccacctgtcacctgggcaaacttcattctccagtggggacagccccatgctctcccrcaaagtctgattctcatccttggtggtgagaggggaagcgggtggggtgtcccacatttgttttctcctcgggcacttcgcttagcctttagtgcctgccccatatatctgccacctctgtaaagtgctccctttaccctcagtagccaataccctgatactcccctgttattagttaataattcttaactttcccatttaaaatcctgtgtggttttcgtctcttgtttgtctgatagttttctttcatttttcaacatctatttttgactttctttttgtatttgtcctgcttatcgaggaccttgtttgtagaaatgcatcaagaaataaattctttcatgccaccaaattcaggagactcgagtgagtatgctaagtggtttcagatagctgaccctgaaagtgtgcagagctgagcaatgtgtatggttcccccaaagcaactgtccctatgtcttcaagttcccagggtttaaaacaccatgttgcttatgccactgggcagcaagaagtgggcaagtcacctcccctctctaggcctcaggatctccttttgtgtccggagttggttccttccagtgagttcttggtctggctgacttgaagaatgaagtcgcggacctttatggcgagtgttatagctcttaaaagtggtgcaaacccaaagactgagcagtagcaagatttattgtgaagaaggaaagaactaagcttccacagcatagaagg

SEQ ID NO: 547088 - DNA, 1583 bp, Homo sapiens
gcatcattgaaggaacggaattgatcaggcagatagattgtagtgcatggctaagagtctcctaaggagggagatggcagaaatccagacatcaaatagatgatgaaatggccatttccattaaggtaacatcacatcacagatattaattaggaggcactataataaagttaagtggatgtgggggaaaatgctgagttaaaagtcaccccatatgtccttagcctgaggtaattacagatctgaaggtgagtcatggatctgcaattttccattcattttacaatagctgcaggaacgtttagagattacgtaaaaggagattagaatccttttttagactggggacaaattatctttaaaaaaagaaaatattcttatgttttccttttaacattcctgttttattcccaaggaaaatgacatcctttatttacattaacattaatggaggatgacaatgtactggctactttcttcttcttctttttttcttttttttgagacggagtctcactctgtcactcaggctggagtgcagtggcacaatcccggctcactgtaacctctgcctcccacgttcaaaagattctcccacctcagcctcctgagtagctgggactacgggcacacaccaccatgcctggctaattttttgtatttttagtagagatggggtttcaccgtgttagccaggatggtctcaatctcctgaccttgtgatgccccctgcctcggcctcccaaagtgctgggattacaggggtgagccacctcgcccagcccagttcttactactttctagagaaattaagcaaatgaaacaagttagctttaagtttaaatgcattttaccaagttttttatttcaagaatgtaaattcatcttaaaaactgatgggatattttgttctcagtgttcaatccaaatctaccttaacagctaaaaaaaaaatttttttttttttttttttgagacagtctcgctctgttgcccaggctggagcacagtggtgkgatctcggctcactgcaagctccgcctcctgggttcacgccattctcctgcctcagcctcccaagtagctgggactacaggcacctgccaccaggcccagctaatttttttttgtatgtttagtagagatggggtttcaccacgttagccaggatggtctcaatctcctgacctcatgatccgcccgcctcagcctcccaaagtgctgggattacaggcgtgagccactgcacccagccggaataacaatcttttaaagtattatttgatgtacgtaaatgatgaagacagccatattccaaacctgcagagcttccctacaatagtatgagaccaatagccaaagtgctggttgctcaacaatagatttatgccagttttttttgttctgtaattccttgcaatcttatctcccctagtaccttgcccaattatatacttcccacgtgcatccatgataactaacaaatgcagacagatggccaaaatgtgagttgaggaagtgttgagtacaaaaggagtttatctttccatttcagtataatttggatcataatctcagaattc

SEQ ID NO: 547089 - DNA, 668 bp, Homo sapiens
gtaagactccgtctcaaaaaaaaaaaaaagaaaagagtaaacttaacagagaaacagaattttgggttgccatataacatagaattaaactgagttttcataaacaatgaagcaaattcacccatattgttctcagtctaaatgatatagtaaaagtttaattataaaaaaaaattaatattctggacaaagaaaaatcagtcttatgactaataaataaaatgaaatatgcattaaagtatttacaatatttcatttatgttatataatgataggtacatatataaatacatgtatatgcacgcacatataccrttgtgtctccatgtgtgaaaaggcacccctctgtatacacaggtttcccatcccatgcatactatattttctatctgcatttacttgaaaaaaaatccatttataagtgtacctgcacagttcaaacggcgtgctcaagggtcaactacacacagacacacacacacacacacacacacacacagatgagtgcttaatatttttgtttgtttctttactgatggggtacaaagtttaataacttggggtgtcatttgggtttcacaatcttggcagtatcgacatttttggacccagtaagtctctgctgtgggaagggagtttttctgtgcctagcaggatgtttagcaaca

SEQ ID NO: 547090 - DNA, 1104 bp, Homo sapiens
aaatatactaacttagataggaaaaaaatttaagaggttacacaagcacttagcacacatgctatctgatcttcacaaacaacctgagagtagttatttaattcagagaagttagtggacttgcccaaagtcacattgccagtcctcacagtcatctgaagagccagacttgaatccaggtattttgattccaaacctagtgctttcttctctactcctcgtctatacttctgttttcattataccaccttgccaaggaaacaaacactcaccagacacactgtagagtaaaatagacctgacatcctttagagttcttcttggatcctggaatgtggttcttattgtctctacttacaaacctcacatttacagaagcaggctgtatttttttaacaccttccttattagcaataattggtcccttctgctgtatgtttgtttgatttttaatacacacagttcaakattaactcaaatctgttcaacaccaatctttctaaaaaccaactttccaaatatccacttgtaacacagaaaactgcagatcgtctttcctgcttccaaaatacagtcactttcataaatgttgtccattcattctagcactgagtgttcataaagcacctactcattgctaggcactatgtgaggcaatgggcacacaggtgtggtgtcttaagtaagacaggtgtggtgctttccatcctggaagtgtgagggagtctggcaataaaaaaatcaacaaataaaagaaaatagccacaggttagagtaagtgccattgcaaagcctcaacaggtaaaatgatgaagtagtcactcacattttcttcaggggctggagaagcccagggaatgactccagacagggtggtccaaggtccacttctcactcttcagataaaaacacaaacaagcatatcttgacacagaaaatctaatgtgaaaatccggtaagtggaaatatgagttgacagaatgggtgatttagaaacggattatctactttaacatgagaattcgatacaggatttttcttgagcactttcctaatacaaatacattttatatttatatccctattaaatatatactatattta

SEQ ID NO: 547091 - DNA, 540 bp, Homo sapiens
cacacacacacacacacacacacacacccacacacccacacaatgcctcctcaccaaacaattaaatcagaatctctgggggagggatctctacatgggaattttaaagtctccctcaaggtcaggatttagatccacagctctggatatttttaaacataaatagactatactttattttccaataagtcaaaaacactacaaagagtggaatatcagtgtaaaattatccataagtttcatgagcatcaaaatcagtaatacagataagaagtatactgtcagtatttctcagagtttagttagaaaaacactggtattagaatcacctgcagtccactaataaagtgkgttgctggggtccatctcaaacctaatgaccagaatctcatgggctgaggcctgagtaagcacaagttatcaagctcccttaaggtgacccttatgcatactaaagtttgaaagccaactgtatagggatgatctagcaggtttgagccactggggagggtctttctgaagatgagaaaactgaatgaa

SEQ ID NO: 547092 - DNA, 1236 bp, Homo sapiens
tgcgtgttctcactcataggtgggaattgaacaatgagaacacttggacacagggtggggaacatcacacaccgggacctgtcatggggtcgggggaggggggagggatagcattaggagaaatacctaatgtaaatgatgagttaatgggtgcagcacaccaacatggcacatgtaaatatatgtaacaaacctgcacattgtgcacatgtaccctagaacttaaagtatatataaaaaaaaaaaagctggccaccccagccagcagcggcaacccactcgggtccccttccacgctgtggaagctttcttcgttcgctcttcacagtaaatcttgctgctgctcactctttgggtccgtgccacctttaagagctgtaacactcacctcaaagtccgcagcttcattcttgaaatcagcgagaccaagaacccactggaaggaaccaactccagacacattacaatgaggcaaaaggtcaggatcagtcattctgctggtcttgcctgtaatagggttaactcctctgaataagatttatggtggatttatggtggctgcctatcttagtttcttcatatagtttgcaaggtctggtgagcaggtatggcactaatggaggtggtacagcaaagtctggtagtcagcagatatgaaaaaaaaatgcattagtgggtgttgaggcccaagtctcatccctactctgtcgcattcccacccccgcccctccacaaccaatcacctgagagattttatcttcctttttcttaaggagaaggggctagagttctcatcttctggagctatttcctgctcatcggggttgtcatccctgcctaactttggaggctgtaaaaatctctcactgactggtctaatgatgtacagggactcagatcctcctgggatagtattggttgttccaccattagcttgactgggggatttcaagcctgagaggcacaaagtttaatagtcctcacccctgtggaataacataaataattatttaaaaaaataaaatagcatcagtgataattagtaaacatccttaagcccagtttaacatgcccrtaagaacaaatcagatgccatctggaatccaagtgaataggctagaaaaccagtctcctgccatctgaaatatcagagtgtgttgatctagagtatgttgcaactaagtaactttctgtcttatttttttctattctaatttcaatttgtgaaaatgcatt

SEQ ID NO: 547093 - DNA, 1405 bp, Homo sapiens
tccccagtcccatttctgcttcttaagcacataggaagatgaggtttttcagcctgcctttcagttaggccracggagcataaggggaaattaatgcatagtgtttccaggcctgtccctaaaatttcttgccatatccttggctctcatggtcctgtgaaagagaaggagctgcgatgctggaaccacactaggaacagcccagggcatgagtcactgcctggagatgcaccgcccagacaagctgtccaacccgcctccacccgtgtgtgattggaaagcaaaactgctgaaatgttggaatttatttgtttcatgggatgacctagcctattctgaccaataagaccggaaaattaagctaggtggcttcatgttcaaggccagcctcccaaatcataggctagaactgcttcagtgaagacagtaatgccatcgctgctggcatagatgctgcaacttgcaccactatcaccgctggccctggacagtggacactggacagagcctgtgcttgctgcttctggagagtaggagctgacactacgcttgctcgaatacattctgtgcagctggatcattaagatatggattctaccttcaaagggccaactgtctagtccgaggagtgaaaatccacaaaaggccgttgtaataaaagagaaagtgctgagtctgctggcagaggacagttactagactctgattcctggaagaagagaggattttaggtcaggataagttgcctatgtggttttaggctcttgggatattgtctaagtgtatgtcaaattaagttactatcttttgaaattcaagaacctaaggaaaaatacctgaggaaaaaagaacctgaggataaaagtgatacggaattaatttttaccaaccaaaagagtcctacaatccccaaatacatagtctcagtgtatatataggtatgtatatgtacatttatactccagtcttcactctcaggtcaatagttacctctttctcttccagtatagccttatttggcagagtgaagtaaaaggtaactttatttgttgttgttttaattataggacattatggttttttttagatcttttattaatgaacgcaaagtcctatccttttcctgtcagtactttcattaatggcacaataacaacaccaccatcaattgttttactagtattcttaattgtcatttgggtttcatgtctggaatagttttccaaaaaaaaaaaaaaaaaacaactcattgtattcaaatgcttttccaggaaggtttatttaatagttaatacacagaactgttaacattgacctcctcacaatcattcttggtttttcttcttctatttttttttttttttgagacagtctcagtctgtcaccaggctgaagtgtagtcaca

SEQ ID NO: 547094 - DNA, 702 bp, Homo sapiens
agttcaaattctagacacctggatttgctggcttcttttgatattgccaagtcaatgtctgataaaaaataacttcaagaatccttattttcccctaacaccatagcaccatgattacaagtccctttggggtaatagattttatgaaactttagaaataattggaggaagttatagtctaragaaaaaaattccctaaaaactgtaaattgaggtattatatatgatgatccttataatccacattcaaaagacattctacttttttactgcttgtgagattaaaaacatttccctaggtttatttgacttttatatacctatttttgtaaattttctgaaaatttttttccattggtcaatttgtatgtgtttactaaattgtaagaacataaattttgagacataatctttgtcatacatcttgcaaatgttttaagtttgtgtctagcactgttgcatttagctcctttgttttgttttgttttcatgccctgctatcctgcttagacatgctctactgtgccaagattagatgtcttttcaataatattttcttccagaaatggttgcattttttacatttaaagctttcatttatttggcacttactattacgtatgatgtgcaatatgagtctaatgttacttttctctctaaatggatagccatttgtccccaaagcatccattaaaacatcca

SEQ ID NO: 547095 - DNA, 702 bp, Homo sapiens
agttcaaattctagacacctggatttgctggcttcttttgatattgccaagtcaatgtctgataaaaaataacttcaagaatccttattttcccctaacaccatagcaccatgattacaagtccctttggggtaatagattttatgaaactttagaaataattggaggaagttatagtctagaraaaaaaattccctaaaaactgtaaattgaggtattatatatgatgatccttataatccacattcaaaagacattctacttttttactgcttgtgagattaaaaacatttccctaggtttatttgacttttatatacctatttttgtaaattttctgaaaatttttttccattggtcaatttgtatgtgtttactaaattgtaagaacataaattttgagacataatctttgtcatacatcttgcaaatgttttaagtttgtgtctagcactgttgcatttagctcctttgttttgttttgttttcatgccctgctatcctgcttagacatgctctactgtgccaagattagatgtcttttcaataatattttcttccagaaatggttgcattttttacatttaaagctttcatttatttggcacttactattacgtatgatgtgcaatatgagtctaatgttacttttctctctaaatggatagccatttgtccccaaagcatccattaaaacatcca

SEQ ID NO: 547096 - DNA, 511 bp, Homo sapiens
acaaatgtagtagamacataataaacaaaatactttattaagatacagactaacaagttgtttatatgttattttgaattcagcaatatgccaccttcaacagacatattttaaaaacaagttgcaaaattattgattagaaaatgtagacaagatgttattaaacatataacaattgatgaagcaatattaatttcagcaaaaataaagtacggtttacaagacataaagacaagcaaaatagtagaaggaacaaactacaaacagagataaataattgtaaacatttatactactaacaatagaatctaaaaacatattgagcaaaagctgtcataattacaaagcaaacatgacaaacactactctacatagtagtgcactctattgtacttttatcagtaactaaaaaatgtaatagtacaacaaaaagagtatagatatttgaaaatttaaaataagaatgattttatatacatgcacatttaaaatgtattactttttaataaac

SEQ ID NO: 547097 - DNA, 511 bp, Homo sapiens
acaaatgtagtagaaacataataaacaaaatactttaytaagatacagactaacaagttgtttatatgttattttgaattcagcaatatgccaccttcaacagacatattttaaaaacaagttgcaaaattattgattagaaaatgtagacaagatgttattaaacatataacaattgatgaagcaatattaatttcagcaaaaataaagtacggtttacaagacataaagacaagcaaaatagtagaaggaacaaactacaaacagagataaataattgtaaacatttatactactaacaatagaatctaaaaacatattgagcaaaagctgtcataattacaaagcaaacatgacaaacactactctacatagtagtgcactctattgtacttttatcagtaactaaaaaatgtaatagtacaacaaaaagagtatagatatttgaaaatttaaaataagaatgattttatatacatgcacatttaaaatgtattactttttaataaac

SEQ ID NO: 547098 - DNA, 511 bp, Homo sapiens
acaaatgtagtagaaacataataaacaaaatactttattaagatacagactaacaagttgtttatatgttattttgaattcagcaatatgccaccttcaacagacatattttaaaaacaagttgcaaaattattgattagaaaatgtagacaagatgttattaaacatataacaattgatgaagcaatattaatttcagcaaaaataaagtacggtttacaagacataaagacaagcaaaatagtagaaggaacaaactacaaacagagataaataattgtaaacatttatactactaacaatagaatctaaaaacatattgagcaaaagctgtcataattacaaagcaaacatgacaaacactactctacatagtagtgcactctattgtacttttatcagtaactaaaaaatgtaatagtacaacaaaaagagtatagatatttgaaaatttaaaataagaatgattttatatacaygcacatttaaaatgtattactttttaataaac

SEQ ID NO: 547099 - DNA, 976 bp, Homo sapiens
aaagaaatttgtatgttatttttctttcatttggacatgtaaataaatratgatggtgaatgagagcataggcttctctcaaagagtggtaggatcatgttcttgatgccaaaaacccagaggatatgtcttaggtctgtttttgtgagccctgtaaccttgaataagtcacttagctattttgaaattcattttcttcacctgtaatggcatttgctctctttttaaatagaaattacattcaataaatgagcattttaatgtgatagatttaaaaaactgtctggtaagtagatgcatcagctccttctggaagcatgacaggtgcatggtgttacactgtgtgtgggcgctgatcctggcaggaatagtcagtgacctgctgtcagagcccacggagataacctgaaggagcgctccaaatgtccttctgcaagcattacccacctggggaaatttctcatccaatgactaccgaagggtaactctgccataactctgcttttcactgtggccacctcaccacttgcacatgtttatcccatctcaagatgttatctgtggtgtttttcaacatcatcatctcagagattaaggcatcgcatataacgggagtgtttattactatgcatacatctggcatgttaggacttgtcaaggaaaattgacagcctaatagcttttttcctatatttatcatccttgatattaaaactccagttaaaaatggcacttgatgaataaagaatgctgcacccatgagcattatttgtagagtcaaaaaaaatttgcttttacataaacattaatgtacttaatttacaatgtttttaaaaaattgcaactccttagacatggtgtgtaggtatagattcttgggtggctgtgttataaattatgtaccacttttatgttctgttatttgtcataatttttcttatgttttgagactcacaaaatagttttttttttagtt

SEQ ID NO: 547100 - DNA, 876 bp, Homo sapiens
gctattaaataatattactgctcaattacttctctatttattaaaagaaattttatttttgcatttattgtacaacataaaaattcaaatggtatccatggtaaaaagtaagaaaactctagtggtttgaataattgaccattagtggactagcacacacactgaataccgtaaaaactctggtaatagtcaagaaacaaaacaaaaactggatttaaaaatcaatattataataaagtccattaataaaaaaamatattaaagaaatgaaattctgtatataatatgaagcaacattttaagatatctactttcctagccataaaatagaatgtttaattaagaagttgcctttgaagagacttctgaaaccaggtcataatagactctgcaacttccttcttgctttatcagatcacttactctaggggaggccagttgtcatgtcgtgaggacactcaagcagccttatggaaagatcgacatgaagaactaaggtccctcgtcaacagccagcattaatgtgcaatagcctgtgaggcagccaacttggaaatagatccttctgtcccattacacttcaaaagactgtagccacagccaacatctagattgtaactttatgagaccccaaagccacctataaaattatgggggttggcattctactagagcattccatttttagatagcaatttaaaataaatatacctattttaaaaaatcccctcatgccttcatttaaccattataatagcctgcattaattaacataaacattttcatgatccatctattaaaaactatctatgagatgcatgctgacacaaatgattaatggcaaaactttagttacagattccacaaggccataag

SEQ ID NO: 547101 - DNA, 1193 bp, Homo sapiens
tcagctgaaaaatgagataaatgccactccataggattgtcgggagactaaatgaaaaaaaaaaataatgcaacaaagcaacaggcccagagcctggtgcccagtaagcctcggtagaaggtggcttctttgcacaggcccatctcataggcagccttgtttacccacaggtctaggtcatcaacagctgggttcccaaacacctataatgtacagactgtctaggggccaatactcctccaggccttccagggctgcttcgagtcaattttattattcataaggctaggtataaactctttgtaattatttctcctttcaagtataaaatcaagacacatttaccaatcaaggctaaacaaaactacaaaaccaataaaactcaaatgaacagcattcatttaaagtagtggatgatgttctgcagacaccaaataggctgtctcatgggaggaaggagcggctgccaggacccaggttcttcggagctcagcgcctgtcctgggtgccaagcagtgctttagctcccttctgcttgccactcaggccctgtgacaaccgtcagcacgtttcccccatcctcctggggtcaagcagcactgaccccttggcactgatacaatcctaagtcgtgggtccctcttccctccctctcttccgaatgctccaggatttctttaaattgattttaaaagatgttcattaaaatgaaaacataggcrgggcacgtggctcacgcctgtaatcccagcacttttggaggccaaggtgggcagatcacttgaggtcaggagtttgagaccagcctggccaacatggtgagaccccatctctactaaaaatacaaaaattagccgggcgtggtggcgcatgcctgtaatcccagctactcaggaggctgaggcaggacaatcacttgaacctgtgaggcagaggtcgtagtgagtcaagatcgtgccactgcactccagcctgggagacaggagtgaaaccctgtctcaaaaattagtaataaatgaaatgaaaacaaaatggtttaaattcttccagagacctctaagaaccatcctccccaccatatatctgtagtcccacgtttgggaagtactaaatcagtataactgggtagggattcttttatctgattagtatttgcttccactgtcagagcagggctgagaaagtgaaggaga

SEQ ID NO: 547102 - DNA, 1193 bp, Homo sapiens
tcagctgaaaaatgagataaatgccactccataggattgtcgggagactaaatgaaaaaaaaaaataatgcaacaaagcaacaggcccagagcctggtgcccagtaagcctcggtagaaggtggcttctttgcacaggcccatctcataggcagccttgtttacccacaggtctaggtcatcaacagctgggttcccaaacacctataatgtacagactgtctaggggccaatactcctccaggccttccagggctgcttcgagtcaattttattattcataaggctaggtataaactctttgtaattatttctcctttcaagtataaaatcaagacacatttaccaatcaaggctaaacaaaactacaaaaccaataaaactcaaatgaacagcattcatttaaagtagtggatgatgttctgcagacaccaaataggctgtctcatgggaggaaggagcggctgccaggacccaggttcttcggagctcagcgcctgtcctgggtgccaagcagtgctttagctcccttctgcttgccactcaggccctgtgacaaccgtcagcacgtttcccccatcctcctggggtcaagcagcactgaccccttggcactgatacaatcctaagtcgtgggtccctcttccctccctctcttccgaatgctccaggatttctttaaattgattttaaaagatgttcattaaaatgaaaacataggcggggcacgtggctcacgcctgtaatcccagcacttttggaggccaaggtgggcagatcacttgaggtcaggagtttgagaccagcctggccaacatggtgagaccccatctctactaaaaatacaaaaattagccgggcgtggtggcgcatgcctgtaatcccagctactcaggaggctgaggcaggacaatcacttgaacctgtgaggcagaggtcgtagtgagtcaagatcgtgccactgcactccagcctgggagacaggagtgaaaccctgtctcaaaaatyagtaataaatgaaatgaaaacaaaatggtttaaattcttccagagacctctaagaaccatcctccccaccatatatctgtagtcccacgtttgggaagtactaaatcagtataactgggtagggattcttttatctgattagtatttgcttccactgtcagagcagggctgagaaagtgaaggaga

SEQ ID NO: 547103 - DNA, 1193 bp, Homo sapiens
tcagctgaaaaatgagataaatgccactccataggattgtcgggagactaaatgaaaaaaaaaaataatgcaacaaagcaacaggcccagagcctggtgcccagtaagcctcggtagaaggtggcttctttgcacaggcccatctcataggcagccttgtttacccacaggtctaggtcatcaacagctgggttcccaaacacctataatgtacagactgtctaggggccaatactcctccaggccttccagggctgcttcgagtcaattttattattcataaggctaggtataaactctttgtaattatttctcctttcaagtataaaatcaagacacatttaccaatcaaggctaaacaaaactacaaaaccaataaaactcaaatgaacagcattcatttaaagtagtggatgatgttctgcagacaccaaataggctgtctcatgggaggaaggagcggctgccaggacccaggttcttcggagctcagcgcctgtcctgggtgccaagcagtgctttagctcccttctgcttgccactcaggccctgtgacaaccgtcagcacgtttcccccatcctcctggggtcaagcagcactgaccccttggcactgatacaatcctaagtcgtgggtccctcttccctccctctcttccgaatgctccaggatttctttaaattgattttaaaagatgttcattaaaatgaaaacataggcggggcacgtggctcacgcctgtaatcccagcacttttggaggccaaggtgggcagatcacttgaggtcaggagtttgagaccagcctggccaacatggtgagaccccatctctactaaaaatacaaaaattagccgggcgtggtggcgcatgcctgtaatcccagctactcaggaggctgaggcaggacaatcacttgaacctgtgaggcagaggtcgtagtgagtcaagatcgtgccactgcactccagcctgggagacaggagtgaaaccctgtctcaaaaattagtaataaatgaaatgaaaacaaaatggtttaaattcttccagagacctctaagarccatcctccccaccatatatctgtagtcccacgtttgggaagtactaaatcagtataactgggtagggattcttttatctgattagtatttgcttccactgtcagagcagggctgagaaagtgaaggaga

SEQ ID NO: 547104 - DNA, 733 bp, Homo sapiens
gtccaggctggtctcgaactcctgaattcaagtgatccacccgtttcggcctcccaaagtgctgggattacaggcatgaagcaccacgtccagccctaattaatttatttttattaagttatttatttattttggagacaagttcttgctctgtcacccaggttagaatgtagtggcaagatcatagctcactgcagccttgaactcctgagctcaagccatccttcctcccacctcagccctcagcctcccaagtagctgggactacaggcatgcaccaccatgcctggctaatttttttttttttactgtagagasaaggtcttgctttgttgctcaggctcatcacaaactgctggcctcaagcaacactcccacctcaacctcccaaagtgctgatctttaggagggaaggcaagatagaaggaaaaaagcaaagaaactaaacaatctgctgagctaaaagctgacactactggaaagaaaggttaacttttttatttactgcataagaatctgcattgcctgaattagttacagtaaacacttgtaattttttaaaatgaagtgaaggtcacaggaaactcagtacctccagggctgtgaacgtcatctaaggtgcacctggctgataataaggactcctggtacatagaatgggagacagcagcttccactccaaatgtcacatgacttcacacagctcagcaatagaacagggctttccacagtc

SEQ ID NO: 547105 - DNA, 1105 bp, Homo sapiens
agaagtcgccttcaggctttcccgacgttcagcttgtgctccaaccaaacccttgggcttcttcttgaggttacctttctgaaccactaaccagtgtccttggcctgttgagaaaattagaacagtgaaaaggggaaaactccaaagctacaacgagtgcagttatagactttgtttataatactaaaaccaaaaatagctcctgattatctaacatgcaccagatacaatactgcagctgggggtaggggagatatctacctatctatgtcatttaattggcctccaaacccagtgaaaaacatgtcactgtcatgattttatacatgaaaaggctgcgacaaaaggaggtggaatgacttgccgaattccttccttcacatttttatctccaaattctattattccttcaaaaactaagatcaagtatttcctgttctgtgaagtcttcccttttgcccctcagtagagctgatccctctttctcatgcatgccagttactctcctattggtcatctcttgagtaaagcccaatgtgtgacctcaactcaataggttccatcttcccagacctctatcagtatacagaaaakatggtgttagaaacttggaataagaaaatgtaggacagatggcattaaaaaaaaaaaacctaataatacatgtctactgtagaaagaattttaaaatgtgtataagcaaaaagaatatgaggtttactagtaagctcaccaaacaaaaatcataacgtattttggaatctgttctttctcgcaccagcagtttacttgctgtgtggtattcattgcaatctgtaattattttatttgttcacttattcattgtctgtctccctctctagagtggaagctccgtaagagcagggactttatctgactcattcatctcagtattcccaaggcctgcacagagctcaccgcattgtgactgttgctgaacaaatgactgaatgaaccctgtcttatagcccctgcccacacagtcatccattcctatcttttctgagcatctactttatgctgggaactgggagtatgagaatgaataaaaaggaagccctaactcaaaggagtcataataata

SEQ ID NO: 547106 - DNA, 695 bp, Homo sapiens
atgaatatccttatagattttctatacaaaatgctgtatacatgtacattgtaggggagagaagatccttagctttcackgggttcttgaaattcaaaaagtgaataggatctactaatctgatgtcatttatataaaataacaatgaggaaatgtttatatatttgtgaaggaatatacatgtttgataaaaataactggaactgtgcactgcaacatgttgtttacagtagttagcactcacgggattggaagaattgggtgggaatcaatgaggactttcttgtcagtcatgttgttcaggtctttcaaatagtgagaatatattggatattattgtgttaaacattttaaactatttatctaatcgattctttttattttacaattgacaaaatgagtttcagaaatgtgacctaattgtccgaatcatacatgttattggcagaggtgagatgagaagcaagccttctgcatcctacccccacgcttattctagttcccctgtgacactcacagctggtttaaaaggatctctaccaccttttgggttgatccctctgccaggcccattttaaactattaagttgcattatgtttgcacatgcatatacagttacacagaccaaatcgttttacaagtatcctaacaaaccatcatcacttcttacatacggtcagaaagagtaaaagaa

SEQ ID NO: 547107 - DNA, 695 bp, Homo sapiens
atgaatatccttatagattttctatacaaaatgctgtatacatgtacattgtaggggagagaagatccttagctttcactgggttcttgaaattcaaaaagtgaataggatctactaatctgatgtcatttatataaaataacaatgaggaaatgtttatatatttgtgaaggaatatacatgtttgataaaaataactggaactgtgcactgcaacatgttgtttacagtagttagcactcacgggattggaagaattgggtgggaatcaatgaggactttcttgtcagtcatgttgttcaggtctttcaaatagtgagaatatattggatattattgtgttaaacattttaaactatttatctaatcgattctttttattttacaattgacaaaatgagtttcagaaatgtgacctaattgtccgaatcatacatgttattggcagaggtgagatgagaagcaagccttctgcatcctacccccacgcttattctagttcccctgtgacackcacagctggtttaaaaggatctctaccaccttttgggttgatccctctgccaggcccattttaaactattaagttgcattatgtttgcacatgcatatacagttacacagaccaaatcgttttacaagtatcctaacaaaccatcatcacttcttacatacggtcagaaagagtaaaagaa

SEQ ID NO: 547108 - DNA, 1571 bp, Homo sapiens
atttttttgtataggttttaatattttactcataaatatgcttraagaatattataattatatgacttagattgtaaaacaatatgtacagcagtatcctattttttagaataaaattataaatatgtgctcacatatgtgtttgtgcatgcatagaaaacagattggaaaggaatatattctaacaccattatctctagctggtagaattatggaaaatttttatttccttctttttgcttctaaattttatataatgagcatatttggctttgtataatcatttttaaaaagttgttttagaagaatagtactgatatatcattcccttttagcagttttctctaggataaaaaataagaggaagtctgagcttaactaattaaaaaaacagatttctttaaaaaatattagcaaatcattagtgttcttactggagaaagggcagtgttcaaagaagaattaaacaaatcattccagttgcaggaaaaattcaatttactgcatgcagactgtttcttgactgaaaagttaattcctttcattcagaatcagtatgcatattcactggctatatttcatctcacatctgcaaacttaatttttcctttcttggtcatcagaagattaggaaataaattttagtccaggcaatagatcctacttggcaagctcaaaataactcaattattaaaaagcagcacacaaagaccagtagtgacttccaaaggattgttaacaatacttaaaaaaaaaaaaaaaaaaaaaaaaagagaaaaaagggtccaactgtctaaaagaagactagagatacatgaataagaaaatacgatgttttggaattatgtgcaaaatagtaatgctgcatattacccatcctttaagttttagcaataattagaaaaaatagtttcccaacaataaaagttataaaataatgtcatcatatcacctagaagagattatagatttttataaacaaaatatgtgttattatgaatatttgtatgtactctccaagaactaaaagatgaagttcccctttcaggatcccctgtgcctgagaaggaaactttccagtgaaagcctactagctagttaaaaatttcttaaaaaagaaaatcttcttagttgtatacttgggagcatcctttctcttgggcggatccctgttagacatatacaacttttaatgtttgcacctttaactgtagggatggtctctgagtatgcccacattcgtatctaagatattcaacgcctgtccttcagacacttaacaaggactctgagttccaaatctcccttgagtgctgcagtgcatgctgacgctctttaaaagccatagcactccctcactgtgaaataaaactgctctgtctcttgctggttggctctcctcttagcaatgctgggcttgctcatgaaggtttcagagaccgtggacttgacggactccatggagttgctgtactggaagcagtcagacacatcgaagtcctcgacagtcacaatgtcctggatggtttgcagggtggcctccattgtcttctttacctgccacgacaagg

SEQ ID NO: 547109 - DNA, 1571 bp, Homo sapiens
atttttttgtataggttttaatattttactcataaatatgcttaaagaatattataattatatgacttagattgtaaaacaatatgtacagcagtrtcctattttttagaataaaattataaatatgtgctcacatatgtgtttgtgcatgcatagaaaacagattggaaaggaatatattctaacaccattatctctagctggtagaattatggaaaatttttatttccttctttttgcttctaaattttatataatgagcatatttggctttgtataatcatttttaaaaagttgttttagaagaatagtactgatatatcattcccttttagcagttttctctaggataaaaaataagaggaagtctgagcttaactaattaaaaaaacagatttctttaaaaaatattagcaaatcattagtgttcttactggagaaagggcagtgttcaaagaagaattaaacaaatcattccagttgcaggaaaaattcaatttactgcatgcagactgtttcttgactgaaaagttaattcctttcattcagaatcagtatgcatattcactggctatatttcatctcacatctgcaaacttaatttttcctttcttggtcatcagaagattaggaaataaattttagtccaggcaatagatcctacttggcaagctcaaaataactcaattattaaaaagcagcacacaaagaccagtagtgacttccaaaggattgttaacaatacttaaaaaaaaaaaaaaaaaaaaaaaaagagaaaaaagggtccaactgtctaaaagaagactagagatacatgaataagaaaatacgatgttttggaattatgtgcaaaatagtaatgctgcatattacccatcctttaagttttagcaataattagaaaaaatagtttcccaacaataaaagttataaaataatgtcatcatatcacctagaagagattatagatttttataaacaaaatatgtgttattatgaatatttgtatgtactctccaagaactaaaagatgaagttcccctttcaggatcccctgtgcctgagaaggaaactttccagtgaaagcctactagctagttaaaaatttcttaaaaaagaaaatcttcttagttgtatacttgggagcatcctttctcttgggcggatccctgttagacatatacaacttttaatgtttgcacctttaactgtagggatggtctctgagtatgcccacattcgtatctaagatattcaacgcctgtccttcagacacttaacaaggactctgagttccaaatctcccttgagtgctgcagtgcatgctgacgctctttaaaagccatagcactccctcactgtgaaataaaactgctctgtctcttgctggttggctctcctcttagcaatgctgggcttgctcatgaaggtttcagagaccgtggacttgacggactccatggagttgctgtactggaagcagtcagacacatcgaagtcctcgacagtcacaatgtcctggatggtttgcagggtggcctccattgtcttctttacctgccacgacaagg

SEQ ID NO: 547110 - DNA, 1571 bp, Homo sapiens
atttttttgtataggttttaatattttactcataaatatgcttaaagaatattataattatatgacttagattgtaaaacaatatgtacagcagtatcctattttttagaataaaattataaatatgtgctcacatatgtgtttgtgcatgcatagaaaacagattrgaaaggaatatattctaacaccattatctctagctggtagaattatggaaaatttttatttccttctttttgcttctaaattttatataatgagcatatttggctttgtataatcatttttaaaaagttgttttagaagaatagtactgatatatcattcccttttagcagttttctctaggataaaaaataagaggaagtctgagcttaactaattaaaaaaacagatttctttaaaaaatattagcaaatcattagtgttcttactggagaaagggcagtgttcaaagaagaattaaacaaatcattccagttgcaggaaaaattcaatttactgcatgcagactgtttcttgactgaaaagttaattcctttcattcagaatcagtatgcatattcactggctatatttcatctcacatctgcaaacttaatttttcctttcttggtcatcagaagattaggaaataaattttagtccaggcaatagatcctacttggcaagctcaaaataactcaattattaaaaagcagcacacaaagaccagtagtgacttccaaaggattgttaacaatacttaaaaaaaaaaaaaaaaaaaaaaaaagagaaaaaagggtccaactgtctaaaagaagactagagatacatgaataagaaaatacgatgttttggaattatgtgcaaaatagtaatgctgcatattacccatcctttaagttttagcaataattagaaaaaatagtttcccaacaataaaagttataaaataatgtcatcatatcacctagaagagattatagatttttataaacaaaatatgtgttattatgaatatttgtatgtactctccaagaactaaaagatgaagttcccctttcaggatcccctgtgcctgagaaggaaactttccagtgaaagcctactagctagttaaaaatttcttaaaaaagaaaatcttcttagttgtatacttgggagcatcctttctcttgggcggatccctgttagacatatacaacttttaatgtttgcacctttaactgtagggatggtctctgagtatgcccacattcgtatctaagatattcaacgcctgtccttcagacacttaacaaggactctgagttccaaatctcccttgagtgctgcagtgcatgctgacgctctttaaaagccatagcactccctcactgtgaaataaaactgctctgtctcttgctggttggctctcctcttagcaatgctgggcttgctcatgaaggtttcagagaccgtggacttgacggactccatggagttgctgtactggaagcagtcagacacatcgaagtcctcgacagtcacaatgtcctggatggtttgcagggtggcctccattgtcttctttacctgccacgacaagg

SEQ ID NO: 547111 - DNA, 687 bp, Homo sapiens
tttttctgtacaatagttcaaagaacacagagaaatgcgtttcatcttcaaaggaagttagggcattattataagcagggtgtgtagatcctgaattggactttagtcctgtaccattcggaggtgatcatgatggcctggatggatgtttatgatgacaggcamcagcatcaccaagcatgcattgatctatttgaatactttccaccagatccatgacttggccatgtactgattccgattttatcagcacgtcagctaacaccgttatctgctttaatcacaacttttaccagaagcattggcatcagttggacgcttctagctgctaggcagaacatactcaaaccaaatagcttacacaataaggacagccatcatttcacataagatgatgtctggaggccaggtggtccacgattggctcagagccttgatgaagtcatcacagatccaggtccaccgatgaatttgtctttctgccttgctatcctcagcaggttgatgatgctttcactttgggtttcaaaatagctgtagcaattccagacaatatgtgaagatatgacttgatccagcaaaggagaacaggagaaaagggggtgcttcttctcatgcatctgtttttattggaataatatagaaataaaaacttcctgacgtaattttaagacaaaaatatgctat

SEQ ID NO: 547112 - DNA, 842 bp, Homo sapiens
ttgtttcctgaattgattattatattgtggttaagtaggaaatattttagagtgaaggatcatgattgtctaccactttttctcaaatggttcatcattgtcatcgtaatggtagagggggaaggggaaaaggaaaagtaaatacagagagagataaagcaaattccataaaatgtttataattggtgaaactgggcaatgggcatgcaggtgttcagtctagcaattttgtaactatttggtacatttgaaattgtttttaatgttaagaagaaatagaaaagatgaaaaatgtcattataatgaggaaaatgactttcttagagtcactcactgaacaatgaggaaagacagacaccaagctaatgttcagtcactgcattattctatcaattttctcctcctttctctttcataaagtcgaggtactaacattactttcctgaaaactcttaaagagatggctctcctacttaattaaaatttmtctttattataatacatcctactcagcaaaactttcttttttaatcagaatacttaattcatttattgctccttagggagaaccaacagtcctgattggaaacaacagaaaacataaattaatacaggttgagcatcccaagtccaaaatccgatatgctccacaatctgatgatactcaaaggaaatgctcacgggagcatataggatttcagatttcggatgctcagctgataagtatactgcaaatattttaaaatccaaaatatggaacacttctagtcccaagcatttcagatatggggcactcaacgtgtaaatacaaatgtatcatcagttaataaaagccagaaaca

SEQ ID NO: 547113 - DNA, 615 bp, Homo sapiens
tcattgtccgtctcctttggaaaaaatttccatgaggtcagtggattgagtctcttttattctttgaggtattttcagcatcttgaactatgcttgctacatagttggcgatcaataaatatttgttgattggactgaatgaactgatctacaaaatttatttgagcaaaatgatgaaacaataaaggaactaatactgctatcaaattatgtatatacatttgttagtaattgaaactactcagaagtttgctttccctcacttgaaattcattcaccgattttaacttaataagagacttactctttgtcacacagattttctatatattgcttagtcccctaaatctctttaatgtaggtattcttactttattttacagaaattttacaaagtacaagtgacttgaccaasgtcacagaactagtttggagttgagatatgaacacaaaagtttgtgttcactgtagcatcattatgctatagtttcatatactcttaattctaataactcctaatagttttaagaattccaaaatatcaaaggtgactgtttaagaaaaaaaaatctgatctgaggaaccaagttgcccttcagagcttcaagttaattc

SEQ ID NO: 547114 - DNA, 1659 bp, Homo sapiens
cagtaccaaatacaggaaatttccatttctcaaatcaagtaacaactaaaataagtaaatatcctctaggttccttgacagtattaccatcagagaaatkaggccagacctaaactaagggattaaagtctcacagtaaaaaggtacaagagttaacagtcacagtgctgctagttacataatttatgtaccaccattttcctttcttaccagcatttccatcttcctttggatgcctttaaaagcctgcctcccagctgggagcagtaacacacacctgtagtctcaacactatgggaggccgaggcaggcagactgctgcgctcagaagttcaagactagcctgggcaacatagtgacacctgtctctaccaaaaaatgcaaaccttagccaggtccacgtggtggtgcgcatctgtatccccagctacttggggcgctgaggtgtaaagatctcttgagcccagaaggcagaggttacagtgagcaaagatggagccagctgctgcactcctgcctgagcaagagagacagatactgcctaaaaaaaaaaaaaaaaaagcctgcctccctcttaatttcctgctttaatccactcccagtcaggaaatcagaatcaccaagcttcttatccctaggatagagccttagagcatcacatattgtgtcaattaaagatcttttatacaagctattctcctgccttacaattacagtttaattttttattcattgctattttccatctgattaaggtatcagatatctaaccaaaaacaaattaagatataggcatggtcctcttttacttcaacagaagacaatttttagaaaaagtgttttaagccaaacaatttcttgcccttggtataaagcagcagcatgcagaaaacactaattacggtttcaatctcaatggaatctaggctggtccttagcatcagtctgagtgataaatcccttattccagaatacacttaggaagaactactaaggatatatttttacctatttcaaataagaaaatgagaaaaggcattgattttaaaaaaagaatacatgttacagtttgtacttactttttagcaagatcatattctttagcttcataatacagctttgcaaaatagaatcctctcgttgacttctaaaaaaaattaaaagttgttttacatttcatacagaaatattttccaacattttttcaaaagtagtaaaaatctgccctaagtttatgttcaaatatgccattttcattcacttaaaaattttttttaaagcctgacaaatgcataattccatgttttataatttcctatcacaaaacaaaaaatagagctgggtgcagcggctcatgcctgtaatcccagcactttgggaggccgaagtgggcggatcacctgaggtcaggagtttgagaccagcctggcgttataacatggtgaaactccgtctctacaaaaatagaaaaattagccaggcatgatggcgggtgcctgtaatcccagctactcgggaggctaaggcacgagaatcagttgaacccaggaggtggaggttgcagtgagccagaggttgcagtcagctgagattgtgccattgcactccagcctgggcgacagagactccatctcccaaacatcatcatcatcatcatca

SEQ ID NO: 547115 - DNA, 1273 bp, Homo sapiens
aaaaaaattatttgaaattatgtggtgatacagcaatacagactagattagaattctgaaaaagaaactcatttaaaattttaaaactaggcggggcatggtagcccaagcctgtaatcccagcattttggaaggcagaggcgggcagatcacttgaggtcaggagtttaagaccaacctggtcagtatgatgaaagcccatctctactaaaaatacaaaaattagccaggcatggtggcacatgcctgtaatcgcagctacgtgggaggctgmggtaggagaattgcttgaacccaggaggcagaggttgcagtgagtggagatcgcaccactgcactccagcccgggcaacagagcgagactttgtcttgggaaaaaaataaataaataaaacgtaaaacccattaatctatgaagtacctctaaggcacacagttactgctgaatactaggaaagagtgattaggaaaacagatctgttattcaaaaagatcattcagaacatattaaaaagagaaagtaaataagtcccaaatcatagatttctatgaaagaacaggcattctggaatattgacaagcagacagtaagatttaaattcatttaaaatggttttggggagttttgcttcccctctgctacaagaactgccctcctgctacaaagagctagaaaaccagacaaaaatctatgaaataatagttttcacacaaaggacaatatgcatcacaggactgtgttccctgagagaagaataacaaataaactaagctctacaattgctccagcttactgcctactgatgctttcaaagtcaccattccaagaggggaaaccaacagaacccagtagtcacaccaagttgaagagactaagatgagagttaggaggccaaggcagctagaatttatgggagagtatactagaaaggtgggagctgcacagagaaaacgctctgaagagctgcagagggtcccctcaagaacgcagctaagtaatgatttgcgcatgagtaaattcaatcactacaagtccagggaaagaaccacccaaacagagtaggatgaacagttctcagggctcacatggagattggaacagttcacattcctatgagccacagtggagagatcctgtaatacaagggaatttggatagagtcctcaaaagggtcaagtcttagtactagggcttaagtagcaccagagcacaaaatcatattaatccatcataagaagactcaaaacaattaatctgatacataaataacta

SEQ ID NO: 547116 - DNA, 1273 bp, Homo sapiens
aaaaaaattatttgaaattatgtggtgatacagcaatacagactagattagaattctgaaaaagaaactcatttaaaattttaaaactaggcggggcatggtagcccaagcctgtaatcccagcattttggaaggcagaggcgggcagatcacttgaggtcaggagtttaagaccaacctggtcagtatgatgaaagcccatctctactaaaaatacaaaaattagccaggcatggtggcacatgcctgtaatcgcagctacgtgggaggctgcggtaggagaattgcttgaacccaggaggcagaggttgcagtgagtggagatcgcaccactgcactccagcccgggcaacagagcgagactttgtcttgggaaaaaaataaataaataaaacgtaaaacccattaatctatgaagtacctctaaggcacacagttactgctgaatactaggaaagagtgattaggaaaacagatctgttattcaaaaagatcattcagaacatattaaaaagagaaagtaaataagtcccaaatcatagatttctatgaaagaacaggcattctggaatattgacaagcagacagtaagatttaaattcatttaaaatggtwttggggagttttgcttcccctctgctacaagaactgccctcctgctacaaagagctagaaaaccagacaaaaatctatgaaataatagttttcacacaaaggacaatatgcatcacaggactgtgttccctgagagaagaataacaaataaactaagctctacaattgctccagcttactgcctactgatgctttcaaagtcaccattccaagaggggaaaccaacagaacccagtagtcacaccaagttgaagagactaagatgagagttaggaggccaaggcagctagaatttatgggagagtatactagaaaggtgggagctgcacagagaaaacgctctgaagagctgcagagggtcccctcaagaacgcagctaagtaatgatttgcgcatgagtaaattcaatcactacaagtccagggaaagaaccacccaaacagagtaggatgaacagttctcagggctcacatggagattggaacagttcacattcctatgagccacagtggagagatcctgtaatacaagggaatttggatagagtcctcaaaagggtcaagtcttagtactagggcttaagtagcaccagagcacaaaatcatattaatccatcataagaagactcaaaacaattaatctgatacataaataacta

SEQ ID NO: 547117 - DNA, 1273 bp, Homo sapiens
aaaaaaattatttgaaattatgtggtgatacagcaatacagactagattagaattctgaaaaagaaactcatttaaaattttaaaactaggcggggcatggtagcccaagcctgtaatcccagcattttggaaggcagaggcgggcagatcacttgaggtcaggagtttaagaccaacctggtcagtatgatgaaagcccatctctactaaaaatacaaaaattagccaggcatggtggcacatgcctgtaatcgcagctacgtgggaggctgcggtaggagaattgcttgaacccaggaggcagaggttgcagtgagtggagatcgcaccactgcactccagcccgggcaacagagcgagactttgtcttgggaaaaaaataaataaataaaacgtaaaacccattaatctatgaagtacctctaaggcacacagttactgctgaatactaggaaagagtgattaggaaaacagatctgttattcaaaaagatcattcagaacatattaaaaagagaaagtaaataagtcccaaatcatagatttctatgaaagaacaggcattctggaatattgacaagcagacagtaagatttaaattcatttaaaatggttttggggagttttgcttcccctctgctacaagaactgccctcctgctacaaagagctagaaaaccagacaaaaatctatgaaataatagttttcacacaaaggacaatatgcatcacaggactgtgttccctgagagaagaataacaaataaactaagctctacaattgctccagcttactgcctactgatgctttcaaagtcaccattccaagaggggaaaccaacagaacccagtagtcacaccaagttgaagagactaagatgagagttaggaggccaaggcagctagaatttatgggagagtatactagaaaggtgggagctgcacagagaaaacgctctgaagagctgcagagggtcccctcaagaacgcagctaagtaatgatttgcgcatgagtaaattcaatcactacaagtccagggaaagaaccacccaaacagagtaggatgaacagttctcagggctcacayggagattggaacagttcacattcctatgagccacagtggagagatcctgtaatacaagggaatttggatagagtcctcaaaagggtcaagtcttagtactagggcttaagtagcaccagagcacaaaatcatattaatccatcataagaagactcaaaacaattaatctgatacataaataacta

SEQ ID NO: 547118 - DNA, 557 bp, Homo sapiens
acactctgcctggtggatgcaggaccccacagtagggatgctctgcctggtgggtgcgggactccatgatagggacgctctgcctggtgggtgcaggaccccacggtagggatgctctgcctggtgggtgcgggacacyacggtaaggacgtgcaggaccccatggtagggacacaccataatttcctctttcaagaatgagcattcattttgtttccatgttttttgtcgtatggaaaacatgctgcaaaccccactttcttgtgtatcttcagtgtcatcgccgttaccatattgccatcaaggagctggtggcagagcacacaggttgggggaagaatgtttgtcaggtccgctgggtctgtagcagtgtttaagtcggctttttcctcattgactttctctggatggtctgcccgtgactgtaccgttctggagtctcctacattttcgtataggagttctggagtctcctatattttcgtattctaattctccctctggatctgtccatgtttgctttacagtcatgtaccacataatgccattttgggcaa

SEQ ID NO: 547119 - DNA, 673 bp, Homo sapiens
gtgagtcaattaaacctcttttctttatcaattacccggtcttgggtatgtctttattagccgcatgagaacagactaacacaatcccataaaggagatattatacttccttttcagataagaaaactgaggctcagaaacttaaaaattggctaagagcacataactagtgagggatggaatcaggactcacacctcggttcttggtctccccatctctccatagacaacctgcaagacatccctgctcttgtctgtgaccttatgtcaacctgcatatgactttagtgtagagtgtttaatgtacagccccaaacgttttatgttctggactttttaatattatcagcctaaattcacaagtttgttccaacaaaaggttttatctggttgtaagtctctttctcaatgattatttattcttccatcttaatgagcagatggacatttgaaatatactataactgcacagttccccaagaggttcttgaaaatcttccttacctaaggaatacaaaagaatcagtcaatcatttattctaaaagtatttttggagcacctggtggacwcaggagtgaacaaaatagacaaaaattactgccctcctagggcttatcacctagtaagggagatggacatcaaactaactaatcagataaataaacaaagaca

SEQ ID NO: 547120 - DNA, 224 bp, Homo sapiens
caactccaagcacccctcccggaccctcgtgtgctcrtccctagcgaaggattacggcaggcaacacatacaaagcagcactgagtgtggctctcggggtgttgcccggcacatgggagctattcttattgtcctcatatatttaaggatgaacatacacactcacacactcacacacatacactcacatacacacactcacatacacacagactcacacacac

SEQ ID NO: 547121 - DNA, 534 bp, Homo sapiens
taatcccaacactttgggaggctgacacgggtggatcacctgaggtcaggagttcaagaccagcctgaccaacaagatgaaaccccaactccactaaaattacaaaaattagccaggtgtggtggcrtgcacatatagtcccagctactctggaggctgaggcaggagaatcacttgaacccaggaggcagaggttgcgttaagccgagatcatgccactgcactccagcctgggtgacagagcgagactctgtctcaaaaaaaaaaggacagaccttaaactcagatactactgggttcaaaatccctgctgtttcttattagctatgactccagacaaggtcatgcatctattcatccaggggggaaataacttagaaatcttcttgttattaataatttcttgtgccagtttcctcacatgtaaaagagaacagtgctatatataattcatatccatagttgtagaatttctataaataaaaaagagcaacaggagaaagcaggctatgtatattaacagaaaattccaca

SEQ ID NO: 547122 - DNA, 649 bp, Homo sapiens
aacatatgggcacatggaggggaacgtcacacaccagggcctatcaggggttggcaggcaaggggagggatagcattaggagaaatacctaatgtggatgacgggttgatgggtgcagctagccaccatggcacatatatacctatgtaacaaacctgcacgttctgcacattgtatctcagaacctaaagtataataatttaaaaaaaggaaaaaaaagcataattatttttatattaacactagcatttcatatcttaaagcaactgatgtttaggaattactacacgtggtggctcatgcctgtaatcccagcacttygggaggccgaggctggtggatcacatgaggtcgggagttcgagaccagcctgaccaacatggagaaaccccagctgtactaaaaatacaaaattagcaaggtgtggtgacacatgcctgtgatccctgctactccagaggctaaggcaagagaatcgcatgaacccaggaggcagaggttgcactgagccaagatcgtgctattgcagtccagctttggcaacaagagcgaaatctatctcaaaaaaaaaaaaacaattactacgagtggtacctttttttgcattagtgtcttttatgtggcatcatgaaaatttctgatgaattaa

SEQ ID NO: 547123 - DNA, 649 bp, Homo sapiens
aacatatgggcacatggaggggaacgtcacacaccagggcctatcaggggttggcaggcaaggggagggatagcattaggagaaatacctaatgtggatgacgggttgatgggtgcagctagccaccatggcacatatatacctatgtaacaaacctgcacgttctgcacattgtatctcagaacctaaagtataataatttaaaaaaaggaaaaaaaagcataattatttttatattaacactagcatttcatatcttaaagcaactgatgtttaggaattactacacgtggtggctcatgcctgtaatcccagcactttgggaggccgaggctggtggatcacatgaggtcgggagttcgagaccagcctgaccaacatggagaaaccccagctgtactaaaaatacaaaattagcaaggtgtggtgacacatgcctgtratccctgctactccagaggctaaggcaagagaatcgcatgaacccaggaggcagaggttgcactgagccaagatcgtgctattgcagtccagctttggcaacaagagcgaaatctatctcaaaaaaaaaaaaacaattactacgagtggtacctttttttgcattagtgtcttttatgtggcatcatgaaaatttctgatgaattaa

SEQ ID NO: 547124 - DNA, 591 bp, Homo sapiens
gattgaatgaacatgtataaagcacaaagagtgaccacactgagcaagcacttcatatgttggtctgttattattattactsaagagttgcacttttcaaagtggatgtgacttcacttttttttttaaatttatgttctgggatacatgtgcagaatgtgcagttttgttgagcagactcattcgtgatgtctatagtgttaagaacagacttcccaaagtctgctggtgtagtaaatattttttctttagaaaatacatctctcactgacagagtctttaggctctaatctctagtctttagtctcagactagattgtaaacatggtgtggggaatagagcattgatgcaggaggccaaaggcctgaactttagtcccagctcagcgattaaccagctgtgaccttgggacagtcaattaacctcatcaggctcagcttcatttctcctcaggagaaggcaaaactgtccacctccaactcttcttccaaaatcccataccataattgatgtacttgagaagaagttcgctttaacacaaacatcaggcaaagcccaactatttaatcatcccatataattaaaagctg

SEQ ID NO: 547125 - DNA, 982 bp, Homo sapiens
ccaaaagtgtgcttccatttatgcatgtcactgctacctcaccttggtccatggtccaaggtgactcaaatatgtattttatctggtacacctagcgtttttttaaaaacgaattaattaccaaaaattttaaattggaagattataccgaaatatctggatttgtaaacagtttccccaaaactaaaaatctggccacactgacctgtattctgcagtctaccacaggctccaccatcccatcctgtctctttctctcaccaactgcttggcccacccctcctctcacaccaaaatgcaaatattccctaaacaggtaactattgaatctaactagtcacatcgcagcatggagatcttattctgagagctggttaagggaaattaattgaggtaaattacggagagaaagcattgctccgccagacagcgtcaggccatggccagagcacagcagaaaagatttctacagttctataaaaccacaagacgagaagttggtgtttaaacagctgttatgaaactagggtgtgtgacagaaacatcacctgtttcccaagagctcatcctctcacttaattcagcaaacaccaagcttttcttagcatcctgggcccccttccctgcaactcttctttggcagtgccttgggtgatagtcagaggcaaagtctggaggtgattagatggctgccgacttaggctataagcgagtccaaaggaatggatctggcttttgatcaggacaaagctacgtccagaggagaagctgagtgaagaggaggcaccagtgataaacttgggtttgagcagmcaggatggaagcacgatctcattcaccaagatggtgagcagctgtgttctctgaaacacagaccacgtgagcaaaaattgtcttcccccaatttggaggctcctcccgccaaagcagtttaatgggcaggcagagaggaggcagagtgagggaaggttttatatggaaa

SEQ ID NO: 547126 - DNA, 623 bp, Homo sapiens
caaatatttgggaatcaacacaaaaagtgctcagmctaatttcctgtttgattaaggaattaatgaaaccatctgaatgtgatggttggcacaggtccacagagacatctatgtacttatttttgttgttttgttttgtttgtgtttttgtttttgtttttttttaagacagagtcttgctctgtcacctagattggagtgccatagcacaaacttggctcactgcaacctccgcctcccgggttcaaggattctcacgcctcagtctcccaagtagctgagactacaggcatgcaccaccaatgcctggctaatttttgtatttttggtagagatggggtttcgccatattggccaggctggtctcgaactcctggcctcaactgatctacccacctcggcctcccaaagtgttgggattacaggcgtgggccaccgtgcccgaccctatgtacttattaatgatagtaataatccaacacctacctagatttaccacaggccaggtgcaagtgatttacatacatcaactcacctaagccttgcaaaaaccctatgaagagattccatggtcttcatcttccagatgaagaaactgaagaaactgtactgtatatttaaat

SEQ ID NO: 547127 - DNA, 623 bp, Homo sapiens
caaatatttgggaatcaacacaaaaagtgctcagcctaatttcctgtttgattaaggaattaatgaaaccatctgaatgtgatggttggcacaggtccacagagacatctatgtacttatttttgttgttttgttttgtttgtgtttttgtttttgtttttttttaagacagagtcttgctmtgtcacctagattggagtgccatagcacaaacttggctcactgcaacctccgcctcccgggttcaaggattctcacgcctcagtctcccaagtagctgagactacaggcatgcaccaccaatgcctggctaatttttgtatttttggtagagatggggtttcgccatattggccaggctggtctcgaactcctggcctcaactgatctacccacctcggcctcccaaagtgttgggattacaggcgtgggccaccgtgcccgaccctatgtacttattaatgatagtaataatccaacacctacctagatttaccacaggccaggtgcaagtgatttacatacatcaactcacctaagccttgcaaaaaccctatgaagagattccatggtcttcatcttccagatgaagaaactgaagaaactgtactgtatatttaaat

SEQ ID NO: 547128 - DNA, 518 bp, Homo sapiens
agggccaggcatgatggggtggggtgagatggggagcgaagactattacgggattttaaccttcgtcttctctttccgggcctctggaacagctgttccacaaaatggatctgtgcagacaatcatttttgctgcattacttaatatacagttgctctcggcaagagatataattgacttgcttaactaatcaatctttctataagcatagctgcttttcctctcccactgggggaggaaagcagggggagagggagaaaaagagaaattgtgaggagcaacctttggcatgaattacmgtgctctaacacccagctgagctttccgagctggggggcaaacattactgtaaagcattcccatcaaggtttcttcttggaccagatgtggtctgtggtggcctggggttagcagtcacccagcatgaaataggggcacaagggccaacagaggtcaaagtgggctgtggcccaaacaatgcaaaaatcactttgggttgtctttggagtgacttgtat

SEQ ID NO: 547129 - DNA, 876 bp, Homo sapiens
tgagttttgtgaaggctagggatagaatattatagactgaatgtttgtgttcctccaacatttatattttgaagccctaacccccagtgaaatggtacttggagacagggcctttgggaggtgattgggattagatgagatcatgaaggtgtggtctttataatgggattattgcccttataagaaacatcagagatcttgctttctctctccccactctacacaaagaagaggtcattaagtatacagaaggatrgtgacaacctatgagccaaggaaagagatttcagaataaatttaccttgctggccccaggatcttagacttctcagcctccagaacaactggtagaaataaatttaggttgtttaagccacctagtctatgacatttgttatgcagtctgagcaaaccaacacatgcagtgaccatgagagacacaggtgcccctgagactggtttccttctttaagacgggtacaaaacaaacttctctgactgttgtatgatgaagctaagaaaaggtgtaatgtaaggaactaggttctctaaaaatggttcttcacttcatcattttctaactacaaatattacacaagttaggcacattacttctcttacttgattcctcaccagaaaaccagaggttttaacaatatttacctcatagggatattgtgaaaattaattgagataatagtcattgttatagctttgtgctattgagtgaatgctcaataaatggtatctaaaaaggagtcatatacatttaaataatattaattttatctatttccctgtatctttacgtgttcctcttttatgacttattcttcagcctctgactcaccttgtctttcatgcagcctgcagggc

SEQ ID NO: 547130 - DNA, 1420 bp, Homo sapiens
ctatgcaaggaaaagagaggggctgagaaggtcggcgagaccttcacagcacatacagcaaaatctctgccaatccaatgggagtccatggaaaaaggactctgcaccctggaatcttactgtgattagaaatagccagamccttgtcccaacaccatgctccctcattgaatgggagtgctacaacttcatttggagttgaggtggactttgatgaagctagtgctggtggctaccaggtggccacattcttcagcaatgggtagtgagtcttttcttgaagggggatctgagcagcacctgggtctgccagagtgaaccacttcctgggagctcgtgtcccactggagacctcctgcatcagaatctgtagtttaacagatatccagacacattgtcttgcactttaggatttgagaggcacataatttgatctaaggaataaaaggaggaaaattacatgttatggccaataagggagagtcagagttcctagatgtcatttcagcgacttgatcaaagaaatccttaccaattttaggacgcatgagaaccattgaaagagcttgctaaaaatgtaattcccagacctcaaagccaaagatactgaaacccaaagttagcacatctggagtggactcaccactggtgcatttcaacaaatgcccaggtggttctgaggtcattaatatatgttttatccctggtaaaatgctgatcttttgagtggaattctatactttccattgccacataccagtagctgtgaggctttgaacaaattaattatacattttgtgcttcagtatcctcaagtataaaaatagtcccaaatggttgcggtcagtattaaaagagaaaacattcatgtttacattgttaaagaggaaaataaagagctaaaaacaaagctgaactgatgtatttttcaatccagtgcttgagggtcacttgaaaatgagttttatcaagtctctgcagccaaaagcagaggactaaatatagaagcaaaaaagggagtgatttccaaattgagaatgattctacgagtgaagttcataaagcttccctgggactttctattactctgagccacaaaagtgcaggcattctttaccaaggggtgcaagaaggactctttcatcatattgtggggctcagcaacttgtggagtcactttcagatgtgcatttttggtatggtgattttttatcatggcactctttattcaaactcctattgaatacttactttgtgttaggcctggagctgggtaccaggagttccatagaaacagctgagcccctgcactcatgagctcacagtgtgtgttgtggtttgaatatggtttgtttggccctatcaaattcgattatgttgaaatcagccccttgccgcccagtgttggaggtaggatccg

SEQ ID NO: 547131 - DNA, 553 bp, Homo sapiens
tggtctcgaactcccatcctcaggtgatccgcccacctcggcctcccaaagtgctgggattacaggcctaagccaccatgcctggcgcagcccaacattttttaaaaaagtgaaaacatgcatgtggtaaagacgggggaaaaataaaactgtaaaatgggcatgaaccccaaaatttgccaacctccctaaaggtaaccaatgttatccatttctcaagtgtcctttcagagatattcagcacttaggtattcaagcatatacattcctcctttatcacacaaacagtagcacattatattaacttttctaaaaccttgcgttaaacatatatatatacctatgccacttagaactcatatagtactaacatggaatttcagtactataaagtacagccatttgaaataatgaacagccacactttytagtggctgcacactattctatggcacagatacaccataatttaatacacgctctactgatgaatatctatgatgcttcccaatgatgctgcaataagtttgtgttgagcagaaaaggtgcatta

SEQ ID NO: 547132 - DNA, 629 bp, Homo sapiens
gttgtccaggctggtctcaaactcttgggcttgaatgagtttccctccttggccttccaaagtgctgatattaaaggcatgagccaccatggccagtcaatggcactgcttttaatacgctagtatttactgtgaatctctaagagaggtcttattaaaagaataatagctagattttattgactgcttattcttgttagatctaggatccctgatgaagtctgtggagtgtcttatttaaaccctgtaacaatccagtgaagtgaatgccatcactgtccccattttagagacttgagaggcacttgcgcagtatcatagctagtttgccttgggcagtgttttgtgcttgagtaggatgagtctagacccacacaatctttttttttttaaagcaggtcccagtgattaagttccatggactgtacattcttaacccatgtataatactcagctttgcccaagccttctgttagttgggacttcctgtggaatagatkagtactcagggacagtagttggagaattgccagttttaacttggaatgtgagcagacttggactgctagataaagaaggcggatggagtttctcagtgaaccctatttggttctgaggcccatggagcc

SEQ ID NO: 547133 - DNA, 649 bp, Homo sapiens
acctcacctagtgatcctgagtcaattctccttaataaactccccttcatgtatacacctatcccattagtcctgtccctctagagaacccggactcatacaatgcttcagcggaacactgaccaggaggctgggtgctttcttctctcctggccagggcagtacccgaggaaggcttggatacaggggccaggtaagagctttgggggtagaaagaggatcatggcaggagagaaacaggaggccgacgcctgggctgccctggccgtgcaagccagaccacatggggtgcggaacagcgcccaccgcggccgcttccctactgcctgctctccgccattggtgttaattcacggatgcctttccacacaaaggccctgttgtcttctgcatatyacacatcttattcctggaacccgtcctcaagggtgtaactcccccggccatgcagaggctggcggggctgccctgtgtcagggcctccacgccatcatcagcctctggcccctccatcaggaccacccctgtgcccagccatgctttccattcaccgcgaggcctcactctgccatgagcggtaaacatctcctctctctaggcttgattctgacgcctgaatccacgaagccctgttccatgggggctatca

SEQ ID NO: 547134 - DNA, 912 bp, Homo sapiens
cgttctcagccagtgcaatcaattttaggaaagagctcacattaagtgcaaggatctggaaaagactccctttaacctttcgtcttccaagtcttcctatattccagggatatacctacccctgcccccaattcctttgtccccatgactgtgccctgccttgtcctcagctgcccctgtactaggtgggttctttaaatggtgaaggttaaagctatcctctatgtccctcagacttgtagtttaaattcctttcgtgtcctccaattaaatcctgggggtttccaatcttgctcgtgtgtcgccttgctgttgtctacaaacttctctaggtgcaggtccagatgaattgaaatactttttcttygttttagagctcgagcgtttgatggcattgagcaatgaaataaagaaccccagtaagtaagcctccagcccttcccctctgcttgcagctgctggctggagggccgtgttcattaatgcatgagctcttggaagaacagctttggggaaaggatggcctgatttcctgatcccagcttacaggattgaaacctattgatttaaaacaaatattagcttatattatagcttgttgaaacttgcattgcgtacacagtgattagaattttgggtttagtatagctgttgctaatccaagtgagatccaagatttcatttcctatcaagtgaaatcttctgttattgaattgcattaaatatagaaagaatccaggcatctttacttatcgaacacatttgcaaagctaactgagaactcatgtggcatgaggctttagaggcaacaacaggccagctcaagttttattttatatttttagcttccataatctaatactccagggtttcacattctcaaaaatttaataactaggattgatatttccc

SEQ ID NO: 547135 - DNA, 274 bp, Homo sapiens
tggaagagagggtggtaatgcttctcaaggagaagaatggagcctccctgaatctaaacagatttcaaaaggcacaggaagaggaaagacgctgagaagaggractacataaggggaggcatggccaccagagactgtgtggcacttggaaacagagaagtgccctgctgccatcccagagtgaacgttgcatttgcttttgttataacaggaccactcttgaggccagatatatgcttaatgcaagcgtattttatagagaataaatactatt

SEQ ID NO: 547136 - DNA, 622 bp, Homo sapiens
tttcctaattatgccctaccatttttctactttaatatttccatgtcattaatgtatgcctaaaaatgacagggaggttcttgcaaatctcattagtttttatatcattgatattcaatttcacaagataactttcgtgtttcagactgcattcttaattttatttcctcagcttactttaaatatctaatcactcatttgggcgaataaatactcacagttggaattcagctgctcttcaacttttggtatattttcacagtctgtggaaattagagtagagtaagggtcatgtgggtttcttagaagattaattgaaatatttagggaagaagactttttacattaayatttgggcaaagataataaaacagtatagttctgtgaattataagctgtattttaacgtgaattattcagcgcctatgcaggccagacactgttgcttgaatcaagttgaaaattaatcatattaatcaattgttaactttatgtagtcacaaatatggagagagaaaccttatttttcacaacatcgctcgcataaacattcaaaaaaaattagtcagtaatttattatgtgtcaggcaaagtgaaaacactgggaaatgctacaaagata

SEQ ID NO: 547137 - DNA, 571 bp, Homo sapiens
ataatcaatagaaatgttttatcagatagctaaatgaaatgaccaacatatgcctttacagtaaatttatatcacaaaaataatccaatgattaagctgctatataaacagtagatgtttattactattttctgtaatagtaatataaaatgaayaagatacaaaagagtaaaatgaggaaaaaatattttaatgaagtatttaaataagctattaaataaaatatgatcttactagttactaaaatccaatgtacatataaaaacatttagatattttaaaaccttgtaatttttaaaatttgacaccattttttaactcttatgtgtttgtgtgtgtgtgtttctaggacatgtacattcacattaggactcatacatgtttgaaattataatttatataaaatttttttcactttttgccatttaacattacatataaatgcacttaaacagcataaaacatccatcaaataactgttcttaaagctacctaattattctcatgagaattatgtaaactttactccattttttattataattattattgcattagacttctttatact

SEQ ID NO: 547138 - DNA, 522 bp, Homo sapiens
gatgacctagataaaagaactgattgtagaaaaaatgggaataataacaggttatgctaaaatatcaacaatggggcaactttgcagctgcagcrgtgaatagaaccataggcatgtcattggtatatggcgactgcattggtcctttctccctttactcaggacatgaatatgaaacaatattcataaaagaaaatatttactctcaaatttaagccgttcatttttatttaaaatatctaatttgattactgtggtaagattattgtagtaaaaattgcacagtagaattccagttatgattgaggagtcacataaacaacaattgatgaaaaatagaaggtttgtatttttgtgtaaacattattcttaactaaggagaaatcaagagtcgaaaacacccactattaacattaactcatctgatcttgagtttagcaagtgtgtaagaaaattaaaacaagtgttagttccattttagatatgtgggaaaccaaagcacagagactgctttgtttgtca

SEQ ID NO: 547139 - DNA, 522 bp, Homo sapiens
gatgacctagataaaagaactgattgtagaaaaaatgggaataataacaggttatgctaaaatatcaacaatggggcaactttgcagctgcagcagtgaatagaaccataggcatgtcattggtawatggcgactgcattggtcctttctccctttactcaggacatgaatatgaaacaatattcataaaagaaaatatttactctcaaatttaagccgttcatttttatttaaaatatctaatttgattactgtggtaagattattgtagtaaaaattgcacagtagaattccagttatgattgaggagtcacataaacaacaattgatgaaaaatagaaggtttgtatttttgtgtaaacattattcttaactaaggagaaatcaagagtcgaaaacacccactattaacattaactcatctgatcttgagtttagcaagtgtgtaagaaaattaaaacaagtgttagttccattttagatatgtgggaaaccaaagcacagagactgctttgtttgtca

SEQ ID NO: 547140 - DNA, 524 bp, Homo sapiens
ggagatgagtgaagggtggattggagtgagaaacagagtaagcagcacacacaatccatctcaagtaaaatgacctcctttcataagcacacacggtttttaagtgacatttgctgcttctgctgaaaatcttactagtcaataatgcaattttgtaawtattatttagggatcaaatttctaggaaatactaaatcactcaaaatgtagtgttgttccaaagagtctgctccaccagtttcattgttttttctttgctgtttaatgtcatgctctctcaggcaccaggataatacttgtgagcaagtgcggactctacgagtgcaccctccccactgcttgatgggcttgcaactcaccagctatagggtcccagctccctttcccactctccagtcctccacccaccaaacccatgccccctgccctagctaaggatgttaagttgaggcaacacctcctcttcccatgggcctggtgacaccacccacagtggacccgtgatccctaaggctattgcaact

SEQ ID NO: 547141 - DNA, 1175 bp, Homo sapiens
tgaggggaaaattcatattgttcgtttgttaagtgcaaaaacacaggaaacaaaattatatgtatgtggttcaattacatagaaagaatagggaggaaaactggaccacaaagtacagcagaactgttaactggatggcagaacttttgtaaacattattttcaaaacatcctataatgaacatgcagtgtttttataagaataaaacctgtgagcttgtttgttcttacttttttttaaaggaaatggttgagtaaatccattaaaaatgcagggccttttcttggctttcagttataccatgactgccaaacaaaaaataaatcaaaagatgagactattgggtttttttgtagctttttgtttttactattattctttggctttggtagaacctagacagcctcctcctctttacctgctcaaaataactttttgcaaatctgacttaaattttttttttatactggtgtatatatatatacagttaggaaccggctttgaatattcaaagtctaaatgacaagagtgataagcctaccagcttttcaagaccctcttcccttcctactcagcttatattccacaattcatcactgtaatcatttccttgtgtatacttctattcccttccactactctcctgaaaaactctcttggtaaaaccatattagtaaattcaactccgcttatgtcatgcctgcacccatagagctaaataaggctggagaaaaagagaactggtctgatgggtctcactttgtagtcaaggccatgacccgcaggtgggtccttaatgctgtctggaaatcaaactacttttccctggtccattcttctccttcccggcctaccatttcacaccttccctctcttttctccacccctggaacactcycattacccctggaacactccctcatttaatatcgcagcagatggcccaacttcctatttcaccaagaaaaggaacgacatcagaagaccttggactcggctcccatctacccactcagcaccatgtttccatctactccattctgctaccttgctcaagggcccccaccgtcagctggcacacttaatctcccaacaatttccccactccactggctcattcctgaaaatgttatttctcatatataaacaaacttgtggggaccccaccttcctca

SEQ ID NO: 547142 - DNA, 1112 bp, Homo sapiens
tgctggggagggagagaggatgaggtgactctttaataagcatgggatttctgtttggggaacaaaaatgttgtgaacttacattgtggtgatgagtgtgcaacttggtgaatatactataacaattacattgtatgcattaaataagtgaattttatagtaaatactatatcaataaagatattaaaaaaagaaagaaaggaactagcacgtattagtgtaaagataacctggtggatataccatgtgatatggtttggctgtgtccccacccaaatctcaacttgaattgtatctcccagaattcccacatgttgtgggagggacccagggggaggtaattgaatcatgggtgctggtttttcccatgctattctcgtgatagtgaataagtctcaygagatctgatgagtttatcaggggtttccgcttttgcttcttcctcattttttttctcttgctgctgccatgtaagaagtgcctttcgcttcccacctcctgccatgattctgaggcctccctagtcatgcggaactgtaagtccaattaaacctctttttcttcccagtcttgggtatatctttatcaatggcatgaaaatggactaatacatgtctcagacaatgaaggaataattctgtttcctttatatactccttatagatcttcttagcactccaaatggatctgacagtctaggtgagtatttcctaggtatctatggatcatattcagagctggttgcaaaatctgatgaatatgtttctttccagaaaacataagtgcacgcgttaatacattcacatataagcatacacacaattttatggggttctctgaaattcactcaagaaagtgctcttagaaaaagtgttccctggtgaaactgtttgggaaatctcacaggaaaaaattgtgatgtgaagaaatatattaaggaccctgaggcatcttggtgtcaaacaacctagtaactttgtttaacccagtatttcttggctgtgttagattagaaaaatccacttataaacatctggtggaccacaaattctcttgtggaacatagtttaagaaagaagaaattgggaagagtttgttcataggctatcctt

SEQ ID NO: 547143 - DNA, 1324 bp, Homo sapiens
tgaccataatggaagtcgtgatttctatcagggaatcactcatcagagggagtgytgtttcacaaactcttatttcacttctgcgtgtacgtgctggttgtgatgtacaatgtgcctcttattgtgggtctcagtttaaaaaaagttgcaaagccctggcttagaagaagaaagaattcagaggccacatgtgacgacagtttaagcttctgtagatgagaaagggacggggcactcttggaagcaaggatagtccaggcggtggggcacgcggatgcgaggctgacggatctcacacaaacgcacagggcacgctgagttagtcccctcggagctcctctgatgtagccacggtccctccagaacctgctgcggctaagccccatccgtctctgcggtggtccctcgctacgtcccactttctcttgttcctcctcctttccccaagtgacttctccggaaatgactcttagaacaagcccagaaatgagctccagtaaagacccaaaggaacaagaaggcaggcgtgcacacgacccgggaccctcacctcaaaggaacaggaaggcaggcgtgcacacgacttgtgacccttcacgcggccccccgccgtgtcagcttcagtcgcacacctgtgtcacagcatgttcacagcaaaaacaaggcattttaccttttcataatatggtcagaagtggagactctttcctttctcctttcaagacgctgagccacccaaattccttttatatccgtgattaataaaggcattggccaggcgcagtggctcacgcctgtaatcccagcactttgggaggcccaggcgggtggatcacctcaggtcaagagttcgagaccaggctggccaacatggcgaaaccctgtatctactaaaataaaaataaaaaaataaaaaaattagccgggcgtggtggcaggcacctgtagtcccagctacttgggagactgaagctggagaattgcttgaacctgggagggggaggttgcagtgaaccgagattgcaccactgcactccggcctgggcaacggagcaagaccatctcaaaacaaataaataaataaataaataatggcatctccctgtctacttttacatttgtatttttgtacacccccaccccgccccccaccacacacacaaatcagcatgggttgttgtagggatttactttaggaaggaagatatgggtaaattggaaccaagaacacttgtttccagaagacgacttctggaccagagcagtggccaaggaatgaaaacataattgcatcatgtcctccaagcttcctcggaggctggaa

SEQ ID NO: 547144 - DNA, 1324 bp, Homo sapiens
tgaccataatggaagtcgtgatttctatcagggaatcactcatcagagggagtgctgtttcacaaactcttatttcacttctgcgtgtacgtgctggttgtgatgtacaatgtgcctcttattgtgggtctcagtttaaaaaaagttgcaaagccctggcttagaagaagaaagaattcagaggccacatgtgacgacagtttaagcttctgtagatgagaaagggacggggcactcttggaagcaaggatagtccaggcggtggggcacgcggatgsgaggctgacggatctcacacaaacgcacagggcacgctgagttagtcccctcggagctcctctgatgtagccacggtccctccagaacctgctgcggctaagccccatccgtctctgcggtggtccctcgctacgtcccactttctcttgttcctcctcctttccccaagtgacttctccggaaatgactcttagaacaagcccagaaatgagctccagtaaagacccaaaggaacaagaaggcaggcgtgcacacgacccgggaccctcacctcaaaggaacaggaaggcaggcgtgcacacgacttgtgacccttcacgcggccccccgccgtgtcagcttcagtcgcacacctgtgtcacagcatgttcacagcaaaaacaaggcattttaccttttcataatatggtcagaagtggagactctttcctttctcctttcaagacgctgagccacccaaattccttttatatccgtgattaataaaggcattggccaggcgcagtggctcacgcctgtaatcccagcactttgggaggcccaggcgggtggatcacctcaggtcaagagttcgagaccaggctggccaacatggcgaaaccctgtatctactaaaataaaaataaaaaaataaaaaaattagccgggcgtggtggcaggcacctgtagtcccagctacttgggagactgaagctggagaattgcttgaacctgggagggggaggttgcagtgaaccgagattgcaccactgcactccggcctgggcaacggagcaagaccatctcaaaacaaataaataaataaataaataatggcatctccctgtctacttttacatttgtatttttgtacacccccaccccgccccccaccacacacacaaatcagcatgggttgttgtagggatttactttaggaaggaagatatgggtaaattggaaccaagaacacttgtttccagaagacgacttctggaccagagcagtggccaaggaatgaaaacataattgcatcatgtcctccaagcttcctcggaggctggaa

SEQ ID NO: 547145 - DNA, 1324 bp, Homo sapiens
tgaccataatggaagtcgtgatttctatcagggaatcactcatcagagggagtgctgtttcacaaactcttatttcacttctgcgtgtacgtgctggttgtgatgtacaatgtgcctcttattgtgggtctcagtttaaaaaaagttgcaaagccctggcttagaagaagaaagaattcagaggccacatgtgacgacagtttaagcttctgtagatgagaaagggacggggcactcttggaagcaaggatagtccaggcggtggggcacgcggatgcgaggctgacggatctcacacaaacgcacagggcacgctgagttagtcccctcggagctcctctgatgtagccacggtccctccagaacctgctgcggctaagccccatccgtctctgcggtggtccctcgctacgtcccactttctcttgttcctcctcctttccccaagtgacttctccggaaatgactcttagaacaagcccagaaatgagctccagtaaagacccaaaggaacaagaaggcaggcgtgcacacgacccgggaccctcacctcaaaggaacaggaaggcaggcgtgcacacgacttgtgacccttcacgcggccccccgccgtgtcagcttcagtcgcacacctgtgtcacagcatgttcacagcaaaaacaaggcattttaccttttcataatatggtcagaagtggagactctttcctttctcctttcaagacgctgagccacccaaattccttttatatccgtgattaataaaggcattggccaggcgcagtggctcacgcctgtaatcccagcactttgggaggcccaggcgggtggatcacctcaggtcaagagttcgagaccaggctggccaacatggcgaaaccctgtatctactaaaataaaaataaaaaaataaaaaaattagccgggcgtggtggcaggcacctgtagtcccagctacttgggagactgaagctggagaattgcttgaacctgggagggggaggttgcagtgaaccgagattgcaccactgcactccggcctgggcaayggagcaagaccatctcaaaacaaataaataaataaataaataatggcatctccctgtctacttttacatttgtatttttgtacacccccaccccgccccccaccacacacacaaatcagcatgggttgttgtagggatttactttaggaaggaagatatgggtaaattggaaccaagaacacttgtttccagaagacgacttctggaccagagcagtggccaaggaatgaaaacataattgcatcatgtcctccaagcttcctcggaggctggaa

SEQ ID NO: 547146 - DNA, 1324 bp, Homo sapiens
tgaccataatggaagtcgtgatttctatcagggaatcactcatcagagggagtgctgtttcacaaactcttatttcacttctgcgtgtacgtgctggttgtgatgtacaatgtgcctcttattgtgggtctcagtttaaaaaaagttgcaaagccctggcttagaagaagaaagaattcagaggccacatgtgacgacagtttaagcttctgtagatgagaaagggacggggcactcttggaagcaaggatagtccaggcggtggggcacgcggatgcgaggctgacggatctcacacaaacgcacagggcacgctgagttagtcccctcggagctcctctgatgtagccacggtccctccagaacctgctgcggctaagccccatccgtctctgcggtggtccctcgctacgtcccactttctcttgttcctcctcctttccccaagtgacttctccggaaatgactcttagaacaagcccagaaatgagctccagtaaagacccaaaggaacaagaaggcaggcgtgcacacgacccgggaccctcacctcaaaggaacaggaaggcaggcgtgcacacgacttgtgacccttcacgcggccccccgccgtgtcagcttcagtcgcacacctgtgtcacagcatgttcacagcaaaaacaaggcattttaccttttcataatatggtcagaagtggagactctttcctttctcctttcaagacgctgagccacccaaattccttttatatccgtgattaataaaggcattggccaggcgcagtggctcacgcctgtaatcccagcactttgggaggcccaggcgggtggatcacctcaggtcaagagttcgagaccaggctggccaacatggcgaaaccctgtatctactaaaataaaaataaaaaaataaaaaaattagccgggcgtggtggcaggcacctgtagtcccagctacttgggagactgaagctggagaattgcttgaacctgggagggggaggttgcagtgaaccgagattgcaccactgcactccggcctgggcaacggagcaagaccatctcaaaacaaayaaataaataaataaataatggcatctccctgtctacttttacatttgtatttttgtacacccccaccccgccccccaccacacacacaaatcagcatgggttgttgtagggatttactttaggaaggaagatatgggtaaattggaaccaagaacacttgtttccagaagacgacttctggaccagagcagtggccaaggaatgaaaacataattgcatcatgtcctccaagcttcctcggaggctggaa

SEQ ID NO: 547147 - DNA, 1381 bp, Homo sapiens
tgcatatttctaggtaaccagttctatcatyatttactaaattacgtacagtctatactcctgagattcaagttctggatgttttttcaatggtaattttttagagagatgttatttcatttattaaatacaaaaaataaggcaaagaaggaaaagatagaaaggtggcaaacaggtgttgaaattacaaggatggattgttcctaggataaaacgctaatatactaacattactaaagctatgaagttttagtagatatatggaaatcacatagaactgttaccctcaggccctctgaattttttcagtcagctcaagatttacacaaggcaattcttcatttttgataaacttctgaaggctcccgcagtagccgcttaaggttcattaaaatgtaattaattaatgatttgctgctgaatagctgctgactgcggttttcttttcacttgtcggacagcatgagtcacacagttgccaagccgacaaggaaactatttgcagactatagcacctattgatgagtgtttcaatctgcagtcatttgcataggaaagatgctggtaggggtgtagaccatgttttcagtatgaatgtgagtgacacctacaatttaaaagtgcctcagacggtcataatagtaacattgggctcacgatgattgtttttaaaatagccttaaattttaactcgacataacagactgataaattcctgcattcagaaaggcaattttatttagatttttacaaaaatgtaaaaacatatatctaggaattaaagatttagttcgtgtgtgtgtgtgtgtgtgtgtgtgtgtgtgtgtgtgtgtgtgtgtgtgatttcttttgtggagttaccttgttaaggaaatctccatttttcctatttactttgaggggacttcaagacttccttctctgaaaccccaagctaaaggtaaaaatgactagcatcctcagtgtttggaattcctggccccccaggccatgagcacagcctgtatatttaactctaaggaattcacataaaatactgacatgtttttattgtggatatagggcaactattccgaacttataaaattaactgctttcaaatatttacagggagaggaaatacggtttaacctcttctccatttgcgatcttcactggtgtttttgctctactaggattttatggaatttacttattcacaatgttatgctttaaaataaaaattaaaaccccaacatattgtttatataagcagattttatgattccgtctctgtctaccacatttcagagacatggaatctgacaactaggaatttagtttacattgcatctgaaaagtggtgcacaggcattttgtactttaaatcagaaataggaca

SEQ ID NO: 547148 - DNA, 552 bp, Homo sapiens
aagtagcctcagggttatttgtgcagggattccaggtgcatggaatgtggggataaaaacaacttccttgaaagwttgttcagaggattaaatgagataatgtaagaaaagccacaagcacactatgttactttctaggaactatgccagaaggagttcctctttggtgttctaggagaaagaactaaagagaaataatgagaagttacaggcgggtagatttcagaagcataatacaaaatgctctctgatcctttcactactaatttatgattaaaagatttagattcctttcctaatcctgacaataacttactgtgttatttttcctaaaaataattttcctaggccaggttgggtggctcatgcctgtaatccaagcacttagggaagccaagacaggaggattgctggagcccagaagttggagaccagtctgagcaacatagctaccaaaaaaaaaccttttaaaattcgccaggtgtggtcgtgtgcacctatggtcccagctactggggaggctgagatgggaggattgcttgagcctgggaa

SEQ ID NO: 547149 - DNA, 552 bp, Homo sapiens
aagtagcctcagggttatttgtgcagggattccaggtgcatggaatgtggggataaaaacaacttccttgaaagtktgttcagaggattaaatgagataatgtaagaaaagccacaagcacactatgttactttctaggaactatgccagaaggagttcctctttggtgttctaggagaaagaactaaagagaaataatgagaagttacaggcgggtagatttcagaagcataatacaaaatgctctctgatcctttcactactaatttatgattaaaagatttagattcctttcctaatcctgacaataacttactgtgttatttttcctaaaaataattttcctaggccaggttgggtggctcatgcctgtaatccaagcacttagggaagccaagacaggaggattgctggagcccagaagttggagaccagtctgagcaacatagctaccaaaaaaaaaccttttaaaattcgccaggtgtggtcgtgtgcacctatggtcccagctactggggaggctgagatgggaggattgcttgagcctgggaa

SEQ ID NO: 547150 - DNA, 1131 bp, Homo sapiens
tgcctgatttttttttttctagttatcctgacagcctagtggtaggagcagtatttttattcccgttttacakatgggaaaatgaaggcccagagaggttacctcaccagaatcccgtagcagaggcagaaagaggctggcaggtgcacagggtcgtctggctgtggggttcagaacctttctgcatcgcagggcccctccatgcatggctcttccaggacagaggagagcaaagaggtggtggcaggggggtggcagaaggctatgactgtggctgggttctgccgtcaccctcagtagctatgggactaggcagggtctgaggagctgagggccagacatggcccatctgccttggtgtgggggacagactctcaggtatccttggaagccccaccccccggtgctcatgccttcgtgcagtcctcacctttggtgtggatggcattcgtgaccagctcctagccagcagactgtgcaaaagcattgggccatcactcccaggattacactgtgctctgtaagattccatctgctagcagattggctctagatcccttccttgctggattgacgaagtaagtggccatgttggagaaaccgatgtggcaaggatctgcaagcagcccccaggagctgagggcagtcccagctaacagccagcaggaagccatggcccgcattcccaccaccacccaagtgagcttggaagcagagtcttcctcagtcagccctccagatgaggacacagccctgccaatacttcgcagccttctgagaccctggactcctgacccttaggaactgaagagagccaatgggggctgtcctctgccaagtgtgtaggaattggttagatagcaataggataggaaatgaatatacttgtcttgggagtggggacatttccttccaaaagtgggcctggcttttagaatgggcctagggcaaggatggaaaggtagcaaggaaggagggcaaaggaggttggggagcgaggacctttcaataccagacttctcccccaatcccaggctgggctccagggttctgtacaaggactacttgccagtcccacaaatcccaaagatagcatgaccctcagtaatccctatcacgcaggcaggggtc

SEQ ID NO: 547151 - DNA, 610 bp, Homo sapiens
gcagcctgacaggtcaaaccagcctatttttttcactgtaattaaaatcaaggcagaaggcttttaagacttttgaaaggttatggaaatatcctgtaaagaaagcaaatctkgatattgtaacgttatagtaacaaggtaatatttcactgcttctatgtcttatcatgatttttctgacatcccggtgtattataagtaggagctttcaaaatcatactgtggttagaatatgattaataaatgagtagaaatagtaggtgctttcatgcacatcactgattgtatgtttatatttacttttatatgtacttcatggtgatattcttaaacctatgatttgcttcaaattattcttcaactgacttataaattgaataatgatctttgcacaattaattttaaactgcataagggatatgtggacttttccccatagtttttacaattatttctctgtagaagtacttaaaactcttggtcgctttttatctcttgacagtctctgattgttttctgcgattttgtggttgtcttctgagcattgtgtattttattagtgtctcttctcttttcacttgatacatacaagtgccctccaggggataaa

SEQ ID NO: 547152 - DNA, 574 bp, Homo sapiens
tatttttagaaaacagataagctcaacaaaataagactgaagtatttctatgtaattcttaagggaggctattaggaacmcatttttgctcaagtaaatgataaaataatacataaatgaaaaatgtgagagaagaacaaggcaagaaattctttctttcccttcaacttttatttgaagttcaggggtacatgcacaggatgtgcaggttttttacttaggtaaatgtgtgccatcgtggtttgctgcacagatcagcccatcaccttggtattaagcctggtatccattagctattcttcctgatgctctccctcctcccacgcaccccaacagaccccagctccatccatgtccctgcaaaggacatgatctcattcctttttatggctgcatagtattccatggtgtatatttatgacattttctttatctagtctatcattgatggccatcaggttgattacatgtctttactattgtgaatagtgctgtaatacacatacagattcacatatctttataatagaatgatgaatattcttttgagtatatatgcagtaatgggattgct

SEQ ID NO: 547153 - DNA, 678 bp, Homo sapiens
actttcgtatatatggggagttttatttccaattaatattagctattcatgtttatgcatgcatctagaattatgttttcctgatgtacttatttcaaacatcttataatccagtattctctgawataaatcattgtgatctcatttcaataatatcattctttgaacaactatcagcttcaacctccatacgacaataaataacttgcttttttctactaacttttcaacttaggcctgctttcattggcttcccttcttagtgacagtcccatataatctaaatgctcattttgttatttaaggttaaattgttttagggattaaaataatctaagatgaagtcatttttaccaaatacactatatttctattagttgtagtttcaataaaacagagaaaaagttagttaattttatattttataattcttctcagttcacactcactactataggaacaccatcaaagttctttgcaaaagacattttgatcccaactttctctaaatgtgtaaaccttgtagaagtctataggttcaaataaatgttgactgtatctctgtaaatattcttcacaggttttcaaacttgaagaatcaactcccaaactaactcaaagtattccataaaaattcagtaatttccacatcacagtttaatctgatttattaacttt

SEQ ID NO: 547154 - DNA, 1492 bp, Homo sapiens
ttccatcggatggtgatgaaaatcacgtgctgtttaatagcctatgaatttaaatccacacgcaaggaggatagcctgctcccataaaccgtcattattatatatttgaaagcagtgaaatccctttacaaaagggaaagaaagagacagagactcaagcttaagcctcaaaaatcatcaataaaatatcagtatcatcccatggtacaaaaatcccaatctccatctaaaactgcctgaccctaaaatatatcagaagcttgttctaatcacagaagatgcgttctgaataggaccgttcctctcgcaatggctaagtctgcaagtcactgtttttactggagctgaaaaattaattccttttcagaaatattctcatcttctgttaaaagaaaaaaaaggcttttttgatgtcgagtgacaggattataaagtgaccctctgggtcagaaggagacttttctttttctcatcaaggaaatcaatttctaagtccaagtctcttaaaataatatattcttgtggcacgcacacagattttttgatctgctatgaaaagaataagaggtaaagaggatcaggggtggtgatggaatattataatctgccacactcacacatcagcctttcactaagtaattccagataaattgaggatttacatatttaagattaaatgggagaaagagtagctgatgcataaacataggaatacaaagatataactgaagcaagttaactcttaaaacttgaagttacttggtgcttattttatcgctccacttcaaagtttaatgtttattagtgactaaccaagataatctctttccgatcaattgaactcacaacccgcccttagggaatttttttccctgtcctcagaaaatcccaattacaccgacaagcaacagttaaatgcatacaaagacgcataaatgcagcagatggaaaacaggaggaagcagctggaagcgtgtttccctcagaactgtttttaacagcctgtgcacaaataatgcctctctaatacagagataaaaataaaacataaatattgagaaggtgactggtcacagcaacaagatggcatgagatgctgttatcttccctggttccattacccttasatcactccagatactctcccatttgggggcttccaagaagtccagaaaatgagattcaagtttagcaccctgactttactaagagctcggttacaacctgaactttcccctgacgccgctcccaagaatcagatgcctgcgtggcttttgttaggcccctgttagagcccctaaagagtgccagtatttctctctaacttcgcaacagcttaaactacaacttagcacagcagggcctttccttagtcaagactttgattccacggcaccgagaattccttaccctggaaggaaatgcatcttgtatacgcgaagagacttctgacctgccgttaggtagggaaattagtttgggccctttttcc

SEQ ID NO: 547155 - DNA, 675 bp, Homo sapiens
aacaagttccatctactgcattcaaaatcacttttttttttcaaacgttggctgttacctaaagtacaaatacatctattacttaaagtaaggacaccatattggataatgctttatgataacaggctaataagtctcctttaatagaccagaatgtccattgtttggtaaacttagtaaatgagagaagcttattgataccgatattctcaagagcaccttcagagaagacgactaagaacatggcttgtggatgatagctggcagttgtggagttaaagactgttatctctggacctgagacaatttggcacacagaaataaagcgtattaaagaacccagatggcactgaaagcaaatttaggaactgctaattcataacaattgttataaacctagaatatttttaggttaaaaacaagttactatagttatccaatatctctaatgtaacaagtcaaactagattgatttaagcaataaatatttagatttatgaaatgtattgtagaagaacataaagaaaatagaacaaaactataaaaggcagtaccaggtatggaataaatctacattcaaatgagtaaactggttttccatgtttcatgagagagcatatttctcaggtctgcggattgayattgattaaattgatacaaagtatacaaatttgc

SEQ ID NO: 547156 - DNA, 1019 bp, Homo sapiens
caacaaacaaaaatcttatgcgtccctcaagacctgtaagaaatcaaagggtctcagaatatttcatctgtcttatcatcgaagtaagatatcaatgcctctttccatttaagaaaaatcccagaaaccaaatcaaaacaaaaaattctggagaatgcacttgtccaacataaagcaactaaacagtcactgtcccgattattgttctctggcgttttacctaccagcccggtactgcttccagatgttttgctaccttttttttttaattaaaaaattttttttataattatactttaagttctgggatatatgtgcagaatgtgcaggtttgttacataggcatacatgtgacatggtggtttgctgcacccatcaacccatcatctacattaggtatttctccaaatgctattcctcccctagcctccaacccctcaacaggccccggtgtgtgatgttcccctccctgtatccatgtgttctctttgttcaactcccacctatgagtgagaacatgcggtgtttggttttccgttcctgtgttagtttattgagaatgatggtttcccatcaacgatagattagataaagaaaatgtggcacatatacaccatggaatactatacagccataagaaaggatgttttgctatcttaaagagaagcaagaactgaaagaaattcccctggatggacragaattctataagtgtgtgaaaaatacaacaagtagaactcattaatttatcagattttaatattaacacatgggtaagttgagctttaaagctaataactctactatttctaaatatcaatgatctgcagagattggtgacattcttattccctacatagaattgagatcaccctcccaaaacgcaataaatcagagaggttgatcagcatgaaaatgtctatgttggtcagcaaccatggctaaggaaagaattaggaaattatttcatagctatcatgaggagctaaaataatgaaatataggagatatagactgtt

SEQ ID NO: 547157 - DNA, 573 bp, Homo sapiens
tgatgtggtaagaagatatatggaaactctctgtactttccatttaatttttctacatacataaaattgctctgaaaaataaaatctatttattattattattatcattattattattattattattattattattattattattttgagacagagtctcactgtcgccagcctggagtgcagtggcacaatctcggctcactgcaacctctgcctcccaggttcaagcgattctcctgtctcagcctcgtgagtagctggaactacaggcgtgcgccaccacacctggctaattttggtatttttagtagagacagggtttcatcagattgggtaggatggtcttgatctcttgacctcgtgatccgcccacctcaggctcccaaagtgctgggattacaggtgtgagtcaccgcgaccagccaaaatctgtctttttcaaaaagctaccagatccttaaaggcccttggagatgtggtggaatatagaggagtataaaaggagaatatagagttctggatgamggcatgcagggagttagaataagggaactaactcttctatagctgaag

SEQ ID NO: 547158 - DNA, 543 bp, Homo sapiens
ataaaaatatttaattataaaatgtaataaaaacttattacagccagacctggtctttggagagggatataatccgctgaaatggagaatgatcacccactttctacccacagattaactgcatatttcttatgaatatgcaaagtggctactccatactgcctgtatgtgtagcagggaattgatatttgctactttgaggagmctattttgatcacagtgatatgtgtacaacctgagtatactcagatattgaccattccagaaagaaaagaaaatacccttgatgtctctcctaagggtctctgctttttcagaatgaactttattttgaccgatgagatgttctttagtgggctcataatgactgagcaccacataagaggatcaaagcatggttcagctagttccctgtggctattggtccagtggtggtaaaagtgaatattcaaatcagatatttgaaaaaatatctcaaatcatccagaaatcaaggaaatgatatttcaacagaataattgtgtaggcagcagagcactgaat

SEQ ID NO: 547159 - DNA, 1653 bp, Homo sapiens
caaggtgagtgctcagaaaactctgtggtgatcaagaaagagtagttgaagtaagcatttctatgctgatatttgatgcaaatgactcaaaggagtatttagacctttggggaaaaggtattctttagaccctgggacatggggcagaaccagagggaggcagaagagcccagtggcaatggcgtgcggctgggactttccctgctttgtttggtgcattagaagataagatcacaactcagttcctcatgatcagaagagctggccgggggatcaggcatcccagttaaccggggcagagtcccattccccactgttgtccttgcctaattatgaattgttcccctttcattcttagaagtgtccttgtttgaacagtgtattatgtggtcacacttgaagagataaaccagatgactactttgaaatctcaaataactaggatagaggagccaagcgtcagaaagaatgatgcccacccaggtcctgtgatgkgacctagagctggccacttcaatgcagcagtctctttcccagaagctcaaagtgcttctcagttaggactattttcatcagttcttaccccttcccaatgtcaggttggcactaaagttccggcccttagaacaaagatttttgaaaccccaagttgccacgcacattttggaagtcctttttttcctgcaaagtatctgtccctgcctttccagcaagccttcatccattcttttccatatctcatgatctgagtgctgtagagtatattttatgaggagagagctgcacagagctatctcagaattactgcctctgaagggaggtcagggggcccttgggatatggtagagaggacctggaccctggagccatggaagccttgactccaattctgccacattggcctcatgactgaaggccaggatttctcatgagtaaaatgcacatatggttgatgagagagctaaaccaggaaatgaagtagggtgaccaactatgccatttgttcaagactatcctagttttagctctgaatgtcccaggaaatccctctgaccaggcacactgggatggctggtgaccttgaatgctgcctgatatttactaactactgagtaaattttagttctctcccctcttcctgtaaaaaagaattgcactattaatggtgaaatttaagagatagtgatagattagttagtggtagagctatttgtgggtgcaaggttttcctaaagcacttaaagtagggtgcactccctactctactggcctggtaggctctgactccactggtgaagagaactggccacagactctgggaatcccaaagcactgaatccacctatgtgtctccggtgtggatcttagcatttcaccctttccttgtgtccatagaactgaactggccctggagactgagatgtgctcatgcatctcacgacgggaagcgcgttcttcctggagagcagggagttccatgctgggcattactccatgccctagggatgcagcagccatcagaaccctctcccttccatctcggagcttatactctagggggaaaataaacaaccagccagtaaataatcaggtactgtaagggcaggagtgctaggtagctgaagagctggaaactgaattaggagactgcca

SEQ ID NO: 547160 - DNA, 1653 bp, Homo sapiens
caaggtgagtgctcagaaaactctgtggtgatcaagaaagagtagttgaagtaagcatttctatgctgatatttgatgcaaatgactcaaaggagtatttagacctttggggaaaaggtattctttagaccctgggacatggggcagaaccagagggaggcagaagagcccagtggcaatggcgtgcggctgggactttccctgctttgtttggtgcattagaagataagatcacaactcagttcctcatgatcagaagagctggccgggggatcaggcatcccagttaaccggggcagagtcccattccccactgttgtccttgcctaattatgaattgttcccctttcattcttagaagtgtccttgtttgaacagtgtattatgtggtcacacttgaagagataaaccagatgactactttgaaatctcaaataactaggatagaggagccaagcgtcagaaagaatgatgcccacccaggtcctgtgatgtracctagagctggccacttcaatgcagcagtctctttcccagaagctcaaagtgcttctcagttaggactattttcatcagttcttaccccttcccaatgtcaggttggcactaaagttccggcccttagaacaaagatttttgaaaccccaagttgccacgcacattttggaagtcctttttttcctgcaaagtatctgtccctgcctttccagcaagccttcatccattcttttccatatctcatgatctgagtgctgtagagtatattttatgaggagagagctgcacagagctatctcagaattactgcctctgaagggaggtcagggggcccttgggatatggtagagaggacctggaccctggagccatggaagccttgactccaattctgccacattggcctcatgactgaaggccaggatttctcatgagtaaaatgcacatatggttgatgagagagctaaaccaggaaatgaagtagggtgaccaactatgccatttgttcaagactatcctagttttagctctgaatgtcccaggaaatccctctgaccaggcacactgggatggctggtgaccttgaatgctgcctgatatttactaactactgagtaaattttagttctctcccctcttcctgtaaaaaagaattgcactattaatggtgaaatttaagagatagtgatagattagttagtggtagagctatttgtgggtgcaaggttttcctaaagcacttaaagtagggtgcactccctactctactggcctggtaggctctgactccactggtgaagagaactggccacagactctgggaatcccaaagcactgaatccacctatgtgtctccggtgtggatcttagcatttcaccctttccttgtgtccatagaactgaactggccctggagactgagatgtgctcatgcatctcacgacgggaagcgcgttcttcctggagagcagggagttccatgctgggcattactccatgccctagggatgcagcagccatcagaaccctctcccttccatctcggagcttatactctagggggaaaataaacaaccagccagtaaataatcaggtactgtaagggcaggagtgctaggtagctgaagagctggaaactgaattaggagactgcca

SEQ ID NO: 547161 - DNA, 1653 bp, Homo sapiens
caaggtgagtgctcagaaaactctgtggtgatcaagaaagagtagttgaagtaagcatttctatgctgatatttgatgcaaatgactcaaaggagtatttagacctttggggaaaaggtattctttagaccctgggacatggggcagaaccagagggaggcagaagagcccagtggcaatggcgtgcggctgggactttccctgctttgtttggtgcattagaagataagatcacaactcagttcctcatgatcagaagagctggccgggggatcaggcatcccagttaaccggggcagagtcccattccccactgttgtccttgcctaattatgaattgttcccctttcattcttagaagtgtccttgtttgaacagtgtattatgtggtcacacttgaagagataaaccagatgactactttgaaatctcaaataactaggatagaggagccaagcgtcagaaagaatgatgcccacccaggtcctgtgatgtgwcctagagctggccacttcaatgcagcagtctctttcccagaagctcaaagtgcttctcagttaggactattttcatcagttcttaccccttcccaatgtcaggttggcactaaagttccggcccttagaacaaagatttttgaaaccccaagttgccacgcacattttggaagtcctttttttcctgcaaagtatctgtccctgcctttccagcaagccttcatccattcttttccatatctcatgatctgagtgctgtagagtatattttatgaggagagagctgcacagagctatctcagaattactgcctctgaagggaggtcagggggcccttgggatatggtagagaggacctggaccctggagccatggaagccttgactccaattctgccacattggcctcatgactgaaggccaggatttctcatgagtaaaatgcacatatggttgatgagagagctaaaccaggaaatgaagtagggtgaccaactatgccatttgttcaagactatcctagttttagctctgaatgtcccaggaaatccctctgaccaggcacactgggatggctggtgaccttgaatgctgcctgatatttactaactactgagtaaattttagttctctcccctcttcctgtaaaaaagaattgcactattaatggtgaaatttaagagatagtgatagattagttagtggtagagctatttgtgggtgcaaggttttcctaaagcacttaaagtagggtgcactccctactctactggcctggtaggctctgactccactggtgaagagaactggccacagactctgggaatcccaaagcactgaatccacctatgtgtctccggtgtggatcttagcatttcaccctttccttgtgtccatagaactgaactggccctggagactgagatgtgctcatgcatctcacgacgggaagcgcgttcttcctggagagcagggagttccatgctgggcattactccatgccctagggatgcagcagccatcagaaccctctcccttccatctcggagcttatactctagggggaaaataaacaaccagccagtaaataatcaggtactgtaagggcaggagtgctaggtagctgaagagctggaaactgaattaggagactgcca

SEQ ID NO: 547162 - DNA, 1653 bp, Homo sapiens
caaggtgagtgctcagaaaactctgtggtgatcaagaaagagtagttgaagtaagcatttctatgctgatatttgatgcaaatgactcaaaggagtatttagacctttggggaaaaggtattctttagaccctgggacatggggcagaaccagagggaggcagaagagcccagtggcaatggcgtgcggctgggactttccctgctttgtttggtgcattagaagataagatcacaactcagttcctcatgatcagaagagctggccgggggatcaggcatcccagttaaccggggcagagtcccattccccactgttgtccttgcctaattatgaattgttcccctttcattcttagaagtgtccttgtttgaacagtgtattatgtggtcacacttgaagagataaaccagatgactactttgaaatctcaaataactaggatagaggagccaagcgtcagaaagaatgatgcccacccaggtcctgtgatgtgacctagagctggccacttcaatgcagcagtctctttcccagaagctcaaagtgcttctcagttaggactattttcatcagttcttaccccttcccaatgtcaggttggcactaaagttcyggcccttagaacaaagatttttgaaaccccaagttgccacgcacattttggaagtcctttttttcctgcaaagtatctgtccctgcctttccagcaagccttcatccattcttttccatatctcatgatctgagtgctgtagagtatattttatgaggagagagctgcacagagctatctcagaattactgcctctgaagggaggtcagggggcccttgggatatggtagagaggacctggaccctggagccatggaagccttgactccaattctgccacattggcctcatgactgaaggccaggatttctcatgagtaaaatgcacatatggttgatgagagagctaaaccaggaaatgaagtagggtgaccaactatgccatttgttcaagactatcctagttttagctctgaatgtcccaggaaatccctctgaccaggcacactgggatggctggtgaccttgaatgctgcctgatatttactaactactgagtaaattttagttctctcccctcttcctgtaaaaaagaattgcactattaatggtgaaatttaagagatagtgatagattagttagtggtagagctatttgtgggtgcaaggttttcctaaagcacttaaagtagggtgcactccctactctactggcctggtaggctctgactccactggtgaagagaactggccacagactctgggaatcccaaagcactgaatccacctatgtgtctccggtgtggatcttagcatttcaccctttccttgtgtccatagaactgaactggccctggagactgagatgtgctcatgcatctcacgacgggaagcgcgttcttcctggagagcagggagttccatgctgggcattactccatgccctagggatgcagcagccatcagaaccctctcccttccatctcggagcttatactctagggggaaaataaacaaccagccagtaaataatcaggtactgtaagggcaggagtgctaggtagctgaagagctggaaactgaattaggagactgcca

SEQ ID NO: 547163 - DNA, 1085 bp, Homo sapiens
tatgtgaaaggacctcgacaagaccagtctcttattttagttccaactttatgagttactagctctgcgaccttaggaagctacttaatgtcagattcctcattggtaaaatagggaaacaacacaaagggctatattaagaattaaataaaaagatgcatataaataaataaattcttacacatagtaagtrctcagggccacttccctgctaaatttattattactaaggccttccaaattctatcctcgtgcccctccatgtccatgaaggatggagtatgtgtgatctgaaaggttattaatatttaaaataaaaaccctgccgagttggagcaaaacatcacaaataaattaccttctatcagcagtagtttttttaattggaattatattaccttatcatttgctcatttatatgtaaatgcttacttgtgttcatatcctgccactattttcacatatgcagctcttgtttattcatggaaggggggatgtaaaacattagtaaagaatatgaaattcagaaacgatggccaatcttcatttaaaactatttttgctaatagttttaatttcctttcctcaagtatattttttgaaggatcaagctatgactaagaaagaaatggtctctgcccttgctgagtttatgttggagctaaatactaattcatgcatcgtaacattacctcagtcatagtgtgtaggtttccaaaagatagtatagaaaaaagacctaccagaaaaaatgtactttgggtttcagttttctaattatttttgcaactcatatttccaaaatgtagaaaagttaacacactttcaaagattcccctcttttatttttctccaggaatcttttctggcagttacaagttcagaatgcttttgtgcattccaagcagtcttgcccagattctgccacctgttccatcattctgggtatatttagggtatagttcttttccatatgggcagtgtaattccattaagtagcaatccagcacaatttcttttttttttttttacgttaaacctcgagagttaatcgtccatctgtgtgtaatcatcgattccattaa

SEQ ID NO: 547164 - DNA, 531 bp, Homo sapiens
tattgtaggcatattagtcatcagagaagcagatatattctatgtctcactttaaaaatgaaatacaatttcttaatgaacagcactcaaaaattaaaatatgataaaaatgcratacatacaaatggtgatatttatattggaattgtttgtttagcataactttttgtgttccttaaaagaataaaatttaaaagacataatacatttttaaaaattttgcctaaccaagaataaaagaaaatgtagaatacctgaatgtaaaatttttaagttataagaaaacaggtgtcatatatttgtaaggataataaaagttaataaataatgggtatgaaaaaccatagcatatcattctatcttgaaacttataaaatgctggcaacttctttccatgtataaaataaattagactgattccctaagaattttcttcctcttctggtagaaaattttacaaggttcttttattatataaacatccttgtatacaaatgatagttaaacaatcattggcaatatggtttacaa

SEQ ID NO: 547165 - DNA, 566 bp, Homo sapiens
ctcaggcagaagaatgagaatccaggatgttttacagcaaggatctactggaagaaggaaggagtccaatgagtaacattaatactctgaaataatgaattcttgttattcacatcaaatggctacaagagcaataaacacctgagggaatgaggtaacaaggagcaaagtaactcaactggattcatattccatttgttagtttaagcaattattattattttcttaatgtcaagagtaaacatgcacaaaatatggttaattaaaccaccacgctcataggtcttgtgaaagacagcgagtagtaaatcactaatacagacattgtgcaaagcggaaaaataaacagctactatgggaattcaaaacaaagagccaccaactaaggaagaaaaggaagaattggccataaaaaaaacctgcttctgtttttgtaacaactttgaaagatgaataggaaagtttgtttatttccaaggtgaactttaatcaatgaactgttaacatcattaaatacactgaagcatgtgcaccatgtacttctgcaaagggcaactgtatrcaac

SEQ ID NO: 547166 - DNA, 579 bp, Homo sapiens
tgccacattgggcctggcagaataagcctgtcctgattttgtaccttcctatctcaagatataccaacgtaatttctctatgtaaaattaataggagaatccaaattgctttacttcacaaataaatatgccaaacaatgtctcttaaggaaaactgcaatcaataattaacggagtagctgcaaaataagttgcaaaaagttgaacacaattaatccaatgtttatgctttctttaataaatattcatcttttctaatcctaacttcaagacaaacttaattatttttgtatgcccactttcagacttgtaataggatcctcagggctgacaggggattttcttcaccacactgagcaaagtgtctactcttttctttgttgttcaagtagtgcctggcacttagaactggcattctgtgcatataatgaatacaatgcacatgcacagaaygcctgctacaaatacacacacacacacacgtactaaaacgagtagtaactgacaacacacagtaacatgctaggtgcttatcagagaaaaatcctttaaacagacataatcaaaagaaacacatca

SEQ ID NO: 547167 - DNA, 559 bp, Homo sapiens
aaaacaaaacaaaaattatctttgtaggtgaataagtctttgaccatgtgatcttgtgtcagtcctaaagcagcattgtaacaaaggtggatgttttggagaagctcaaattgatgaattaagagcatgaagacccataaagtggaaaacttctctcattatatcattattaattgactttaaagctctactctcttggctyttaatagaagagtgaaaatctgagaatccctgatattactgccatagggacagcatagagaggctcctgggaagactgtactcaggcttggtaggagaagaaccccatggtgtaaaatagaccaaagaccaacccagacttaattaatccctgggtccaaaggcatagaaataaagaagaaaacattggctagctcacgcatgaggaagatgcctgaagatcaaacttctaaagtctgtgtgtacttctgtctttcctctaactctctctttatagataatgcttctaaattggaaccagtagcctcattagaggcacaatagagcatagtgactataaaataattaggatggtctc

SEQ ID NO: 547168 - DNA, 559 bp, Homo sapiens
aaaacaaaacaaaaattatctttgtaggtgaataagtctttgaccatgtgatcttgtgtcagtcctaaagcagcattgtaacaaaggtggatgttttggagaagctcaaattgatgaattaagagcatgaagacccataaagtggaaaacttctctcattatatcattattaattgactttaaagctctactctcttggcttttaatagaagagtgaaaatctgagaatccctgatattactgccatagggacagcatagagaggctcctgggaagactgtactcaggcttggtaggagaagaaccycatggtgtaaaatagaccaaagaccaacccagacttaattaatccctgggtccaaaggcatagaaataaagaagaaaacattggctagctcacgcatgaggaagatgcctgaagatcaaacttctaaagtctgtgtgtacttctgtctttcctctaactctctctttatagataatgcttctaaattggaaccagtagcctcattagaggcacaatagagcatagtgactataaaataattaggatggtctc

SEQ ID NO: 547169 - DNA, 559 bp, Homo sapiens
aaaacaaaacaaaaattatctttgtaggtgaataagtctttgaccatgtgatcttgtgtcagtcctaaagcagcattgtaacaaaggtggatgttttggagaagctcaaattgatgaattaagagcatgaagacccataaagtggaaaacttctctcattatatcattattaattgactttaaagctctactctcttggcttttaatagaagagtgaaaatctgagaatccctgatattactgccatagggacagcatagagaggctcctgggaagactgtactcaggcttggtaggagaagaaccccatggtgtaaaatagaccaaagaccaacccagayttaattaatccctgggtccaaaggcatagaaataaagaagaaaacattggctagctcacgcatgaggaagatgcctgaagatcaaacttctaaagtctgtgtgtacttctgtctttcctctaactctctctttatagataatgcttctaaattggaaccagtagcctcattagaggcacaatagagcatagtgactataaaataattaggatggtctc

SEQ ID NO: 547170 - DNA, 1510 bp, Homo sapiens
tggagggcagtgccacaatcatagctcaccgcagcctcgaactcctgggctcgtgatcctcctgcctcagccagctgagtagccaggactacaggtgtgtgacaccatgcctagctaatttatttttatttttgtttttttgtagagactgggtctgactgtattgytcaagttggtctcgaattcctggcttcaagtgatcctccagcctcagcctcctgagtcactgggactataggcatgagccattgcacccgctcactccaagtctccttaaatagcaaccaagtcttatggaaaccacacagaaaaggtgaaggcgggacatactgtctgcaggaaaacgcccatccttgctcttccccacacctgccccaggtttctgataaggttttggcctgtggtggtcacataccttgtgatttgtcaccaaccaggtgggaagggccgggtggcaaggagagggtctctatgctctgagatgatgaatagccagcccctgttctgagcaagctggtaccgtcttgccagatgagcctgaaggggcaccgctgaggctcctggcctacgtatgtggggaatttgtaggggatctagcgaggatgcccagcatccaggtctcaatgtctaaaagccaaatcccacttaaggagcagagttggattagtgctgagacagtgaactggtagtttcagcagttctaagcattaagcaacaccccccgccccggtctccatacggagggtctcacagatgtatgagtcacccagctgacttggggaaggttggtgggagggccaacagctaaatgaaagctactttttcttctaaacctctttggattctggaaatagactgattatctcttcattcccgggcattgccaggacaggaagagatttgattaaactcagcaggcagctaatgcgaccttgcgggtggggactaaacaaaaaggtcaaggagaaatgtcaacctcaagatgaacctggtgttatgcaagccaagctggatctgtccctctcctccacccggtcctactgattgatggcttcaggagtcctgttgatcccctcagtgtctctggaacctgtctgcatcctcccatccccagcaccgcctttgcttctcaggaccggagtgattccccactgtctgactacatctatttcttttcttttttttgttttgttttttgttttgagatggagtcttgctctgtctcccaggctgaagtgcagtggtgcagtctcagcttgctgaaacttctgcctcccaggctgaagtgcagtggtgcagtctcagcttgctgaaacttctgcctcccaggttcaagtgattctcttgcctcagcctccagagtagctgggactacaggcgcctaccaccacactgagctaattttgtatttttagtagagacagggttttactatgttggccaggctggtctcgaactcctgacctcaggtgatccacctgcctcggcctcccaaagtgctgggattcca

SEQ ID NO: 547171 - DNA, 1304 bp, Homo sapiens
atcactctggccggtatagtgaccttcctcttttcctgcaggttcagtggtgtatggagcccaaaatggccatgtaatcatctcgttttccacttcactggaaccaatgttgtgtctccaggtggaaacatcctgtgcaaaccagcaacactcaaaattgcaaaagtgggaagcaaacactctgcaagtgggttacgggatggcatagcagaccaaccataggcatttacctccttagagtttcagaagacagtgtggcctcagaagatctgcaaggatttgaggactgggcacttgtctgagtcctttctgaatccctaaggtcttgtccagggtttgatacagcaagatgcccccaactcagcagatatttctaaatgcagatgtacccagtctttcttttccaggacatcctaagcatccagagaaccaccctgtgtctacatccccccaagagccaccttgcccaaacatggacatggtaaggtctctagtctacatccagagaccaacccatagaagattaatacatgtttgaaattggattgaatttccttgataattagtcagaatatgaatgcctcatttcttaagccatgatcaagaatccatacccttctatgaattagtccataaactctccatcaaaaagtggaatgggcccaggcatggcgctcatgcctgtaatcccagcactttgggaggccaaagtgggaggatcacttgagtctgggggttcaactccatcctaggcaacatatgaggcacctatcgccacaaaaacaaccaggcatggtggcgtgcacctgtggttacaactgcacgggaggctgaggtgaggggatcacttaagcctgggaggtcaaggctgcagtgagctatgatgggccactgcactccagcctgggagacagagtgagagactctgtgttcaaaaaataaaaaaggagaatggaaaaagagagagaaatagtatggaagcccaagacatgctgtagcgggttaaacaatgcccctcaaagtacatgtctaagtcataaccctgggacctgtgaatgtcccctatttggaactagtatctttgcagatgtgattaagtgaaggatctctagatgaaaccattctggattcaaggtgggccctaaatgcaatgacgcgtgttctcatagaagagrgaaagactcagagcctccaaggagaaggccatgtgagtgaggacagaggccaagattggagcaatgcgtccacaaaccaaggagtgccaggcctgctggccactaccaggagctgggagaggcaaggaa

SEQ ID NO: 547172 - DNA, 468 bp, Homo sapiens
ggtgtctagtggcacgattttggctcactgcagccttgaactcttgggctcaagcaatcctcctgcctcagcctctcagcctcctgcgtagctgagactacaggtatgtgccaccacacccggctaattttctttttcttttttcaaagatataggggtctcactatattgcccaggctggtcttgaactcctgatctgaaatagtcctccctcttcagcctcccaaagtgttgggattacaggatagtcctccctctttagcctcccaaagtgttgggattacaggaatgaacctctgtgcacagcctatgtttatttttatagtatatgttgcattaactttatttgtaacagatgtttatttttattataaaagtaacaattattgcaagaattttaggaaatacaagayatgaataaaaaacatatgactactcaatatatccatgtaacaaaattgcacttgt

SEQ ID NO: 547173 - DNA, 605 bp, Homo sapiens
agcctcccgagtagctgggattacaggcgcccaccaccatgcctggctaatttttgtatttttagtagaaacgggggtttcgccatgttggccaggctggtcttgaacccctgacctcaagtgatctgcctgcctcggcctcccaaagtgttgggatcataggcgtgagccaccgcacccggccctggattaggtttcaacgtaagaattttaggaagacacaaacattcagaccacagcaaggagatttgatcttccacactccatgtggttttaatgggtttgasagtcataatactctacctccctggctacagatgtgggcgtataccctgggcttagctatcatagtaccccaccattctagatggaatgattgaacaagaaaatgccatttggtccaaatcaggccaatgaaaactcccccgctctcgccccgcagccaggatattacaaatggaggatgggagagaggaagtcttttgtgggttacgcataagatgttgtaagtgtggagctttctgtggccctgtgctggtccttcagtatggaggcacgatgtctacagaaggagagaattcatccagtgcagggtaaagtgagac

SEQ ID NO: 547174 - DNA, 614 bp, Homo sapiens
tgagctagatttattaaggtttctataagtataacttctactggttcaggagatttagttataaatctccttttcattttttggtggttacacttaagctttgaggatatgttctttatttcaaaatgtctaaagttgatccataatttccacttttggtcaacaagtgtaagaactttgatacagtttcttgaaactcgaattactcactctcctcattttgcatgtttcttcctacctgatgtttcagttcaccttgtttctatatttaattctttcttgcttgatatactctatcctgacaactttctttttctctgttttcatgtttgtcttaattatttcttcaggattaagtttatttyaccatgaagcatatattttgttagttctttcagtctttgagtggttaacttagcctttgctcagaaacatctttatttgaataaccttcagttctcatgctcaccttgtaggtcgtcttctgggttctgttattataaagagaagtctccttgtccttcctgtgcagatactctggctagttttctcttgtgggttgcagtttcttcagtggttcttggtctggatttattttcattcattctgcttgg

SEQ ID NO: 547175 - DNA, 396 bp, Homo sapiens
agagcagctggccaatcttcatgtttgaggagggacttgatctgccagcggcaaaagaaatgatgtttgttggaggagaaaaatgggctttgcaagaacagaaagcctgctggatgcccraaacatgttgcaactctggggtcagaaacaaaggtcagaatgtttaagagttggactttttgttttctattcctaaactatgctctttccctaaagttctccaaagaggtcactaatgtcccctgtcaccagctatcacttactttcaaacccagagaaatttctttaggcctttagaattgcatcagtcatagttttagaactccatgatcaactgatattttccaaggagtcttcccagtcactcccccgatccatcccctcccttccttgttg

SEQ ID NO: 547176 - DNA, 396 bp, Homo sapiens
agagcagctggccaatcttcatgtttgaggagggacttgatctgccagcggcaaaagaaatgatgtttgttggaggagaaaaatgggctttgcaagaacagaaagcctgctggatgcccgaaacatgttgcaactctggggtcagaawcaaaggtcagaatgtttaagagttggactttttgttttctattcctaaactatgctctttccctaaagttctccaaagaggtcactaatgtcccctgtcaccagctatcacttactttcaaacccagagaaatttctttaggcctttagaattgcatcagtcatagttttagaactccatgatcaactgatattttccaaggagtcttcccagtcactcccccgatccatcccctcccttccttgttg

SEQ ID NO: 547177 - DNA, 396 bp, Homo sapiens
agagcagctggccaatcttcatgtttgaggagggacttgatctgccagcggcaaaagaaatgatgtttgttggaggagaaaaatgggctttgcaagaacagaaagcctgctggatgcccgaaacatgttgcaactctggggtcagaaacaaaggtcagaatgtttaagagttggactttttgttttctattcctaaactatgctctttccctwaagttctccaaagaggtcactaatgtcccctgtcaccagctatcacttactttcaaacccagagaaatttctttaggcctttagaattgcatcagtcatagttttagaactccatgatcaactgatattttccaaggagtcttcccagtcactcccccgatccatcccctcccttccttgttg

SEQ ID NO: 547178 - DNA, 649 bp, Homo sapiens
atttctagggtttgggttcatatgagggtacaacctcatgaggctttttcaaatgtcaactttgagagttgctccctttcacccctaaaaactaatgcaatgaaaatgttcagttcctctctatttcattagtcactcttcagaatcattgctatttgcttgattttttttttcttttctttttctttttttttctttttttttttttttgagaggaagtcttgctctgttacgcaggctggagtgtagtggtgtgatcttggctcactgcaacctccgcctcctgggttcaagcaattctcctgcctcagcctcccgattagctgggattacaggcgcctgccaccacgcccagctaatttttgtattttagcagagatggggtttcaccatgttggccaggctggtcttgaactcctgacctcaagtgatccacctacctcagcctcctaaatggccgggattataggcgtgagccaccacraccagcctgcttgatttttattctaagccttccgttggcccaaggtggcttggaataagtcctgtaatcaccaaaactttcatgaacctcacctaaaaagcaacgtcttcaagtctggcccgaatttcaggtttgccttttgagggttgttttatccagcttctc

SEQ ID NO: 547179 - DNA, 914 bp, Homo sapiens
ctcagcggctctgcctgttccgtggtctgctcttaagttatcctttcatgaagaaagccttgtggatacgcagggtggaaggaaacggggtaaaggagaggagtgggatgaggagaaaagggaaaggcatgttcggcaggtcgcagagttgagtttgttacttacatgtgttgggaagcattggggtacagtttagaaaactgtggggctgagtcctcggggccgtggggcgcagcgtggctgatcaccatcataacgggcctatggggatacattctcttagacattttgaagtaattaatgctctcgttagtgattaagtctgtgaagtagtcctgaaacatacatttgacacaaaacaaaaattacaaaaggtgacattcatcagatcgcatttgaataactgctttcctcagaagcaattcactgcacgaagtggcaaggtctacagcaggaaggaaggctgcacctcccaaggcagccgaacattttcgataatagagaaaatcagctgccagttgttttctagggttgctagcttggtaacatacgaaaaatggattttaagtaatacacaacttagcaatggggaaaaaaaaagtcaagtcgtgtttgcccaagataatgattaatctggcgataaaagtactagaacacatgaaacaccggatacatatttcagtctcaggtttcattgatgtaattccttggcaaaaaatttaattactttaagggcaggaaacacccacgcccacttcaaatttacagttgcagaacacacacacatasatacacacacgctcacacacacacgcccatgaatacataaacacaagaaaagatattttcttcaaacgaaaaatccacctgtgggaattacaataatcagtaatcaaagccatggccaaaatcca

SEQ ID NO: 547180 - DNA, 592 bp, Homo sapiens
aaaatgcccctaatgcaccctcacagagtgtattccatgattacttatatttgtgtaacttgagggtgttcaaattgctcaaatggcmaactttccaatgagttctaccctacacatcaaattttttactgcaacatttgcctccctgactttcccaggtccacgttacccttttatcctatctttgtttttatttcataactcttattaacttttataaatttataatttgttttctttgtttcttatagtttctgccttaccttccactagaatgtagcctccatgagggtagaaaatggtcagatttgtttctgtgactaagtatgtactcaataaatatttttaattaaaataaatataattctgaaatctactacagactgaaaataaaattctggatatggattaaggaaatctgcattttacataagttctccccattgattcttatgcacagtaaaagttggaaatttttgtatcttaaaatgaaataaatgggtggagctcaagtatgtgcattttgaaaagctaccttggtgactttgtatattctattttctttcccccatcagactggtagattttcaat

SEQ ID NO: 547181 - DNA, 592 bp, Homo sapiens
aaaatgcccctaatgcaccctcacagagtgtattccatgattacttatatttgtgtaacttgagggtgttcaaattgctcaaatggcaaactttccaatgagwtctaccctacacatcaaattttttactgcaacatttgcctccctgactttcccaggtccacgttacccttttatcctatctttgtttttatttcataactcttattaacttttataaatttataatttgttttctttgtttcttatagtttctgccttaccttccactagaatgtagcctccatgagggtagaaaatggtcagatttgtttctgtgactaagtatgtactcaataaatatttttaattaaaataaatataattctgaaatctactacagactgaaaataaaattctggatatggattaaggaaatctgcattttacataagttctccccattgattcttatgcacagtaaaagttggaaatttttgtatcttaaaatgaaataaatgggtggagctcaagtatgtgcattttgaaaagctaccttggtgactttgtatattctattttctttcccccatcagactggtagattttcaat

SEQ ID NO: 547182 - DNA, 592 bp, Homo sapiens
aaaatgcccctaatgcaccctcacagagtgtattccatgattacttatatttgtgtaacttgagggtgttcaaattgctcaaatggcaaactttccaatgagttctaccctacacatcaaattttttactgcaacatttgcctccctgactttcccaggtccacgttacccttttatcctatctttgtttttatttcataactcttattaacttttatamatttataatttgttttctttgtttcttatagtttctgccttaccttccactagaatgtagcctccatgagggtagaaaatggtcagatttgtttctgtgactaagtatgtactcaataaatatttttaattaaaataaatataattctgaaatctactacagactgaaaataaaattctggatatggattaaggaaatctgcattttacataagttctccccattgattcttatgcacagtaaaagttggaaatttttgtatcttaaaatgaaataaatgggtggagctcaagtatgtgcattttgaaaagctaccttggtgactttgtatattctattttctttcccccatcagactggtagattttcaat

SEQ ID NO: 547183 - DNA, 592 bp, Homo sapiens
aaaatgcccctaatgcaccctcacagagtgtattccatgattacttatatttgtgtaacttgagggtgttcaaattgctcaaatggcaaactttccaatgagttctaccctacacatcaaattttttactgcaacatttgcctccctgactttcccaggtccacgttacccttttatcctatctttgtttttatttcataactcttattaacttttataaatttataatttgttttctttgtttcttatagtttctgccttaccttccactagaatgtagcctccatgagggtagraaatggtcagatttgtttctgtgactaagtatgtactcaataaatatttttaattaaaataaatataattctgaaatctactacagactgaaaataaaattctggatatggattaaggaaatctgcattttacataagttctccccattgattcttatgcacagtaaaagttggaaatttttgtatcttaaaatgaaataaatgggtggagctcaagtatgtgcattttgaaaagctaccttggtgactttgtatattctattttctttcccccatcagactggtagattttcaat

SEQ ID NO: 547184 - DNA, 645 bp, Homo sapiens
aaaggggctgggtaaaataaggctgcgacctactgggctgccttcccaggaggttaagcatcctaagtcacaggatgaaacaggaggttggcacaagatacaggtaacagagagcttgctgataaattaggtttcagtaaagaaactggcccaaatccaccacaaccaagatggcgatgaaagtgaactctygtcatcctcattgctcattatacgctaattataattcattagcatgctaaaagacactcccaccagcaccatgacagtttacaaatgccatggcaatatccagaagttaccctatatagtctaaaaaggggaggaaccctcaattctgggaattgcctacccctttccctgaaaattcatgaataatccactccttgtttagcatataatcaagaaataattgtaggtattctaagcagtccatgccactgctctgcctatgcagtagctatttttttatttcttactttcttaataaatttgctttcactttattccatggacttgccccaaattctttcttgcacaaggtccaagaaccctctcttggggtctggatcaggacccctttctggtaacatactgatctattttaaattgtccttaccatcttatgttgtgtcttctattgtc

SEQ ID NO: 547185 - DNA, 542 bp, Homo sapiens
attggagaggctgtttgggtagccttctggtacttgcagagggttgtaacattataaatataaattagrgcttcatttcattcagcttattttgattctacatactatgtcagttactatgctagggattttcacatattatctcatttctgtgtatttataatagctcagtatggttaggtattatactgatcttataatcttataaatttttaaagaccacatattatatatctttttctccttattgttggtattgaggatggagacttttcaaagtggtgttatccgtctacttggaaattggagttggtgttctgctctgtaaaatcctcgaatcctttccttttctggcattctagatgactttaacatgtaccatagaatcaattttcttttgttgctgtttttggatacttcttcactttatgactgtaagctaaatatatatcagtacgttcacttcatcttctattccctgtaatatctaatgaggcacataggaagtatgctgtttcaaagttatcagtatgattttgaca

SEQ ID NO: 547186 - DNA, 669 bp, Homo sapiens
ttgaagtatcagtttaaattctaaaatataaaacatcaggataatcaattaaaatacatgatttgatgtttatcttcatgaactttccatcactccatcgtgtgactatgtccaaataaactagacaagggattggcaaactagggctccatagacaaattctgattcactaacttcaattgtttttgtaaataaagttttattggaacacagtaatgcctattcctttacttttttcctgctagagctgcattcactttacagtggcagcactgagtaactgtgagagatgaagccagctggacttcctgggtccagtggggacttggagaacttttctgttttacaagaggtttgyaaaatgcaccagtcagtgctctgtgaaaatgcaccaatcagccctctgtagctagctagaggtttgtaaaatgaaccaatcactgctctgtaaaatggaccaatcagcaccctgtaaaatggaccaatcagcaggacatgggctgggacaaataagaaaataaaagctggctaccccagccagcaggggcaacctgcttggttccccttccatgctatgaaagctttgttctttctgtcttcacaataaatcttgctgctgctcactctttgggtccgcaccacctttaagaactgttaacactcactggg

SEQ ID NO: 547187 - DNA, 967 bp, Homo sapiens
tgttgcacccatcaacccgtcatctaggttttaagctctcatgcattaggtattttccttacacattaatacttttaaagtgttcaaaacagtgcttcaccctactcagcggtctataaaagtttgcactgatggtgatggtgatgatgatgtctcctctttcaatgaatggccattgtccacccaggtactcaatccaatcaattctcaagacttgtgagttatacttcttgattttgttcacttcctgcacccctctgccactgcmctattcaggctactctcccctctgcttttgtcctatctcctaagtggtctccttgccttaaattttgagcccttccaatccattctccaccccttagtcaaagtgctttttctaaaacaaaactctaaatagctcaactaatttatattcttattagcattgtaagagaatacctatttcccaaaactttactatctataattatttttaaaacatttttgaaaaatggtattttatattttgtttcttggcaaagattgagctttaaaaaacatacgtttgacacttttatcattccctttgtatgatgtctgtttgcgtcttttgccctaaaaggccttcaatattatgacatagtaaatgctatctatgttgtggagcataaatttgaagttggctgaaatttgccttggccagccttggctctgggcctaggaccctccagataagccctttttatggttgcttctaaatgtcatgtgcccatctgttttaatttggcccagtccatgaggacttgagaacaggactccttgaagcacataataatcattgcctcaaagtggcctgttcttcatctctggatggcttcccataatccagctccttccggatggccatttttagttgagacaaccatgccattttgaagcctgctgcttttggaggctaaatataatttctctgggaaaggggcca

SEQ ID NO: 547188 - DNA, 967 bp, Homo sapiens
tgttgcacccatcaacccgtcatctaggttttaagctctcatgcattaggtattttccttacacattaatacttttaaagtgttcaaaacagtgcttcaccctactcagcggtctataaaagtttgcactgatggtgatggtgatgatgatgtctcctctttcaatgaatggccattgtccacccaggtactcaatccaatcaattctcaagacttgtgagttatacttcttgattttgttcacttcctgcacccctctgccactgccctattcaggctactctcccctctgcttttgtcctatctcctaagtggtctccktgccttaaattttgagcccttccaatccattctccaccccttagtcaaagtgctttttctaaaacaaaactctaaatagctcaactaatttatattcttattagcattgtaagagaatacctatttcccaaaactttactatctataattatttttaaaacatttttgaaaaatggtattttatattttgtttcttggcaaagattgagctttaaaaaacatacgtttgacacttttatcattccctttgtatgatgtctgtttgcgtcttttgccctaaaaggccttcaatattatgacatagtaaatgctatctatgttgtggagcataaatttgaagttggctgaaatttgccttggccagccttggctctgggcctaggaccctccagataagccctttttatggttgcttctaaatgtcatgtgcccatctgttttaatttggcccagtccatgaggacttgagaacaggactccttgaagcacataataatcattgcctcaaagtggcctgttcttcatctctggatggcttcccataatccagctccttccggatggccatttttagttgagacaaccatgccattttgaagcctgctgcttttggaggctaaatataatttctctgggaaaggggcca

SEQ ID NO: 547189 - DNA, 954 bp, Homo sapiens
tgtatttagaaaagcacacaggatttacattagtttacttagtgtctttaatgaagtgttttctgtgttaaagaaaaatcaggaaggtaactattgttaagactttgtcactgcccaataaaaacaacttttcagtataattttattcatgaaaattactgtaactctttgcacattttgactgttaacaagattattattaaaaaggaatgaatttatcatatagcatatttatcttaacttctaatttgacttattaacctttttgcatcctacctggtgtaagtggggggataatagtgaactgtgaagaaataaaatcaaagtcaagtacagctggttcattgaccccttacggcattggacaatctttccaggcttccttttgattatttgacagcttggtggttttgttcttagcctacagaccagagaggccacagaacaaactggctatttgtgatagctggagaatccctgagaacagggtgaggttggtaagaacatttgaattcaggaatcttcttaycaactctgaaggactttgcttttagttgttcatacatagcacctctgctaagcaatctgctgtatttaattttttcttcttgttttaattcattaaaaatagtgccagtttaatattttaagggaaaataaagatcagatattgagtaatacaggaagaatcataggaacagatattaaaagatgccccacctccacctaccactgtcttgagtccaagttacctattccctgcctggcgatagcacgagtaaaaataagttaatgaaacattaaagggaaacaagcagctgctcttgccttttaaaaaaacagtgattaaaagcatggactggaaattcaggtacttcgcatctccatttccttctacctcagcttaaacataagcaaaaacaaaacttgaatttaggttaatgccatgacttt

SEQ ID NO: 547190 - DNA, 837 bp, Homo sapiens
ttgacatttgtcaccccactggccttctcargtgcaatcagtaaaaatgctgagaactcttggatcttaatcttcatgactgagttttttttagttgtatagttatcatctgcctttcttcactttgcatttcttcttgaatccattgcagattgacttccactcccactccttcactaaaagggctcttaccaagatcaaatctaatgggtacattttagttcctatgtgatttggcctttcgatgtcaatcatcactcccagccattgattttggtgacccacttccctgtgatgatcttctgatctagtttctcaggttccttcgctagtcctttttctttccctgcccctgacatattgacatttcctggagttggttttgtccttgattcattctcatgtcattctgcacacagtctctgcatgaactcaggcagacccttcatttaatgaccaccttagggctgatgattctcaaatctgtattccccgatcttgcatttgagctccagccccactcatcctctcggatgttctgcaggcccagcaaactcatcatgtccaaagtgaaactttttctctttcctgtctcctctcctctgatctgttctttcttggaacaccacccaagaacgtcacctcctccatcagattgtgagctcctggagggcaggagctgtgtccttctattcatcttcctatccccagaaccttgcacagatcctggaatgtggtaggtgctcagtaaatgtgtgttgaataaatgaatgaatgaatgaacaaatgaatgaatttgcttacttcaaggcaaaagaaccatgaaactgtattttg

SEQ ID NO: 547191 - DNA, 1092 bp, Homo sapiens
aagggaggaaagaagggaataggtatgttggtccacaagttgtaggctcacatacgcctggtcatacatagtgccgaaatgtacaaattgccaatgctgcaaaataatggaacatttaaaacctttctactttatttatttgttttttctaacactgctcttgttcatcaacataggaagaaaaccaataagcacttgggtttgccagcataactcaaggcacatggagtttttaagcttacaaattcttctaagaaatataattttctcatcataatctcctaaacaagaagtgggaaatatttcatttgcaaagaatcttcttttgtttttgatgcaaaggaaaatctaacaataattctttttttcatttttcttttagaaattaagaacatttacattttctgtcactttaacctaatagggtgagatttatgccaatattggrcatcaccaaggaccatatttctgtacctgctatcatggaaggcttaatgagtaggatgatagaaaagaaaaggcaggatttcagaattagactagtgtggcggtttctaatattatggaaagttacttagtcttccagagctttcattttcacctgtaaaatcagctatgtcaaagtcatatggtacaggtatataaagtttcagtttcgggtatacaatagataaaccaataaaagaaaaccagttaatgtagtgatgaactcttaggtaaatataaaaatttttaaaccaaacttacttttgctgtttatttcatcatcctgctttttggttaaaactctagaaatggcaagattttttctgtctttaaagttcttatctttgtattctaaggagattttcacactaccgtctttcatatgttttgatttaagatgacaatattctattcagaattgtaaagaatagtctttaaatgaaaacataattctatgtgtctgtcatattaaataaataggacctcaaaaaatgtcactctacctaaagccaggaaaacctgtgagtcctcatgtttggtagctaattttcttgcaatgaaataccctatggttgaattacaggaaagtctgaatggggaaaagca

SEQ ID NO: 547192 - DNA, 1092 bp, Homo sapiens
aagggaggaaagaagggaataggtatgttggtccacaagttgtaggctcacatacgcctggtcatacatagtgccgaaatgtacaaattgccaatgctgcaaaataatggaacatttaaaacctttctactttatttatttgttttttctaacactgctcttgttcatcaacataggaagaaaaccaataagcacttgggtttgccagcataactcaaggcacatggagtttttaagcttacaaattcttctaagaaatataattttctcatcataatctcctaaacaagaagtgggaaatatttcatttgcaaagaatcttcttttgtttttgatgcaaaggaaaatctaacaataattctttttttcatttttcttttagaaattaagaacatttacattttctgtcactttaacctaatagggtgagatttatgccaatattggacatcaccaaggaccatatttctgtacctgctatcatggaaggcttaatgagtaggatgatagaaaagaaaaggcaggatttcagaattagactagtgtggcggtttctaatattatggaaagttacttagtcttccagagctttcattttcacctgtaaaatcagctatgtcaaagtcatatggtacakgtatataaagtttcagtttcgggtatacaatagataaaccaataaaagaaaaccagttaatgtagtgatgaactcttaggtaaatataaaaatttttaaaccaaacttacttttgctgtttatttcatcatcctgctttttggttaaaactctagaaatggcaagattttttctgtctttaaagttcttatctttgtattctaaggagattttcacactaccgtctttcatatgttttgatttaagatgacaatattctattcagaattgtaaagaatagtctttaaatgaaaacataattctatgtgtctgtcatattaaataaataggacctcaaaaaatgtcactctacctaaagccaggaaaacctgtgagtcctcatgtttggtagctaattttcttgcaatgaaataccctatggttgaattacaggaaagtctgaatggggaaaagca

SEQ ID NO: 547193 - DNA, 599 bp, Homo sapiens
agaaacattccaatgagcaatgataaattggaaggtgaggggaaaatctcttatctctacatagactaaaaagcagttgacaactgttcctacattctctgtgtgcagtcagataaagagtgcacgattggtttcccctggaatcttacactgagggtttttgcctcattckgagtgaatatttgctcagagagccaaaataacacagataaacacatggaaatacatttgtgtaaaatatggggagtcgacaagagtgaggtcctttagaaggatttagggaggggactgggaaaaacagggagcacattgtgtggatgttctcatgaattatttttaatggcccagactgggaacacttttgaatatattaggatgggcattaagtagaacagtcaatttctttcaatactgatgcagtttatccatcaacaggtagatgagatttcaatgtgaaatgaatcatgaaagttaaagtaagtaacatatgggatgttaaaattaattatcattctactcattagagtgcatataatgaacaaaacagtcattaaaattatttatcaaattgaatacagaaaataaaatgcacatttact

SEQ ID NO: 547194 - DNA, 1075 bp, Homo sapiens
gcctgtaagcctttcttgataaacgttttgatgaattagtaaataaagtgttttattttatacagaaatctctgtactttttcatatttgatcatttgtgcgtccagtgacatattgtagacatatacattcactgaacttattactggttgccaagatagtaatagcaaaatctcaaaagctgcatgacaggaattattcaaatagttctatatactgataaatcaaggtttaactatacaacaccctctagtccaatgaaagtagaaattacctgtgaaaattacaatttattttgaatgttcacaaataatcttatctttttatttgtaagtttgactcaaactataaactacacaaataaaaaagtaaaataattatagtaagtagccaaattttattctagttttcttgtttcattcaaattcagtttgtgctccttaatgataacactattgtcaataaaactttacactttaagtgactttccacagttttcccatctgataagaatggtactgataaataaaaaacaacatgcactatccatcttactttcatagactagagataaatcattatgaaccccaattggcagaggagaaaattcgggtgcagacaagttaagtcaggtggcagrttcacacaggaaataaatagtggctatgctcgtataaaaacatcaatcttctgacctctaattcagggcttttccagcactgcagtatgattaatcaataccaggaagcaaactaagtatcaagaaaagatcatccatttgtatcagtctttcctttatgtggttggaatctaaaacaccaagtgcataaaggaatcaaaagtcggaagctttgaccatttgtgaacaatcttttctgtattattaacaggtctgatgataaacacagacatttactaggcccaaattgtgaaaaactttgtagacattttgctaatatgcgggaaataagctctttcttttagcaacttactttgattttcttttatttttatgctgctaagaaagcactcagatgcatgctgaaatatgtattaccttatggattgcagctgg

SEQ ID NO: 547195 - DNA, 900 bp, Homo sapiens
ttttgagacagggtctctctctctgtcactcaggctggagagtgaagtggcataatcacagctcactgcagcttcgaactcctgggctcaagtgatcttcctatctcaaccgcccaagcagctggaaccacaggtgtgtgccatcatgctcggctaatttcttaatattttgtggagatggggtctccctgtgttgcccaggcggatcttgaactcccaggctcaagtaatcctcccaccttgacctcttaaagtgctgggtttaaaggcatgagccactgtgcccagcctaaaatatttctaatacacagagaagtacagcaatatgcccaccacccaaatttatgcgatactttataattccttcacactcctttgataaattatggacagatagaaagtccggcatgaggaggtaaccgcttgagytaactccgacccaataaattatgaaaaaaatctaaaacccctttattaactatcttcttagtcaactagaatcctttcatctggaattgtgtgttgtatgtgtgggattactgaagaacaaaatggacagtaaagtacattgcctactttgcatacctaagattatgaatttggtaactgaaaagatttctaaactttttaggaaactcgattttagttgcaagccacattcattaaaatgtgtgatatgtaaattacacatatcagataatgttttaaaaagagataacaaaaaatatatttttttaaatcgcttgtagtctacaagtgaagtaacagtttttgccactagagggaagctaccttcaaacgcaacaaaagttttttttcttttttctttttctttttttgcctgtagttcaacaagtcctctcccttgtctggtcagatatttggccaacatacaaatca

SEQ ID NO: 547196 - DNA, 900 bp, Homo sapiens
ttttgagacagggtctctctctctgtcactcaggctggagagtgaagtggcataatcacagctcactgcagcttcgaactcctgggctcaagtgatcttcctatctcaaccgcccaagcagctggaaccacaggtgtgtgccatcatgctcggctaatttcttaatattttgtggagatggggtctccctgtgttgcccaggcggatcttgaactcccaggctcaagtaatcctcccaccttgacctcttaaagtgctgggtttaaaggcatgagccactgtgcccagcctaaaatatttctaatacacagagaagtacagcaatatgcccaccacccaaatttatgcgatactttataattccttcacactcctttgataaattatggacagatagaaagtccggcatgaggaggtaaccgcttgagttaactccgacccaataaattatgaaaaaaatctaaaacccctttattaactatcttcttagtcaactagaatcctttcatctggaattgtgtgttgtatgtgtgggattactgaagaacaaaatggacagtaaagtacattgcctactttgcatacctaagattatgaatttggtaactgaaaagatttctaaactttttaggaaactcgattttagttgcaagccacattcattaaaatgtgtgatatgtaaattacacatatcagataatgttttaaaaagagataacaaaaaatatatttttttaaatcgcttgtagtctacaagtgaagtamcagtttttgccactagagggaagctaccttcaaacgcaacaaaagttttttttcttttttctttttctttttttgcctgtagttcaacaagtcctctcccttgtctggtcagatatttggccaacatacaaatca

SEQ ID NO: 547197 - DNA, 628 bp, Homo sapiens
tgaacaaaacaagcctgtctttgtgatgtatcaccattttttataatkctatcgttattattattacttcaccattttgcatctatttttgtgagggtgattggcctataatcttcctttcctagaatttgcttatgaagttttagtgtgaggatatgcaagtctcatataatggggtagtaaaaaaattcctttttttctattctcttagtttatataatattgacattatttcttacttaatatttgacacaatttatcatgattggcatctggaattttccttaatagaaacatttttcattaaagatttaattcctttcataattttagaactagttttgataatttattcttgtgtcggattttaaaaattgtatcatcctaagaatttattggcttataatatcttcttattgctgtttcaatatcaacttcatctgcagtgatgacacatttttacctctggcattattagtgcctccctatctttttaaaaaaattaatgatcaatattgctgaattttatcaattctattagcttttccaaagagttagctttcaattcccttcttatttgtttttctatttcttatcttatctgcatctgatgttagcacttctttct

SEQ ID NO: 547198 - DNA, 1376 bp, Homo sapiens
gaatkcctgacctcaggtgatccccccgcctcggcctcccaaagtgctgggattacaggcatgagccactgtgcccagcctaatttgattattttgcttatctgtcctaagtttcctcacctctgaaatgagaatatcattaatacttatttcaggagctgatgattcagttgttacacataaagcattaataactgtgattcttactctaaatgtgattgatataaaatatatatgcaaagataaatcacttattaaagaatatatatcagttttttaaaatggaaacaaatctaaggggagtatattaaatggcagctgtcattgcaaaagttgcacaaatatcatgttttgctgtaagatcctctggctcagaaaagaaataccagccacagtaggaagttgaattgcctccagggattcaatgagagaaattatctcctttgcataaatgataattaatatcttggggactctcttattaactgtattttcatttacttctccagatgctggttaacctccacacgcttgattttcaagcatctgatctttgataacttccatattaagagacttcatttcaccatctagtatccctgtactttaattgaactaaagatttacaaggacactccattttcctatttacagagaacctagtctgtacctgccattgttttacatacattttcatgtcacaaaattttatttctaaacaacaccctcatttatgtattttctaagtgttcactggagtaacacagagaagaaatgcagtaaacatataatttggattaaaatgtatggaaggaaaaaatccttaaagtaaaaatcatatacaaaaacaaaaagtcattttactactattggctcatggctgtaatcctagcactttgggaagctgaggcaggaggaatgcttgaggccaagagttcaagaccaacctggccaacatagcgagaccccacgtctaaaaagaaaaagaaaaaaaaaaagaaaagaagctatggagaatatgttacacaataccataaactgaacaagacatgaatataacacagcctttggaaaaatgccctttggctaaaattgcttgatcatattatgtaataaacttttccacaaattcatttgcattgaactactgtaaaaatattttaggcaatttaaacagcatttcacaaatattttcaagaatgacgttgtgtaatgggccctatgggttcagcagaaaggaagagtattatctactattatgaagaaagcggaggtcttccctaacaaagaagttagaaatttcttttgtttttttgagagtctcactctattgcccaggctggagtgcagtggtgagatctcagctcactgcaacc

SEQ ID NO: 547199 - DNA, 549 bp, Homo sapiens
acttgaagtataaaataataattttaagtataatatgaaaagtttagtaaattggaaccaagagtatgtaaaaaagataaaaacactacgatcaaacagatcatcccaagactgtaggggagaaaataatcatatagtcatctctgaggcagtaaaaacatctgaaaaaattccaaaccctgttcattaaaaaaaaagagagcgagaacatccttaatgtgatttttgaaaaagtatccagaaagaaactaaaggtctatagtacytaatgatgaaatatttaaagtttcaaatttggtaccaagaacaagagaaggatgtatgtaccacatctattcatcattattctggagtgcctcaccagcgtaatcaggaaagtaaaagaaataaaagactgtgcacatgtgaaatttgaagaattcacaaactcagaattaatcaaagaatgtatcaaggtctctaggcataaagtaaatacacaaaaattaactagatttgaaacatattagcaataaacatgcagaatataaaattttaaaaccaatttta

SEQ ID NO: 547200 - DNA, 1104 bp, Homo sapiens
tatttatcctattaaatttctataggaaatagtctgtaaacttatctacacttacacacataccttgatgtgacaagtatggaagtcatcattgtattcataaaaccttacaatttaaaaagtttaatcttcgatactgacttagaaccaagtgcttaggtgagttatgtaagtgacagaatgatttgacttttttttggtcagaaatataatgaattggattcatccagtagcggsttcttattaaacacatatttgtagttgatatttagaaatatattatgaagtccctagattcctgactttggattgcttaaccaactcaagttctctgactacatatatgtaaaatcttctatactgcctcagaaaaacagaagaaacaaagacaatagacattatgttgataagatgtctaatctatgctaaaatctttccactttattttgccttcacaaaaactctattaggcaaatcttattatttccattatactgataaggaaactgaggtatggaataattgaagagcttgcatattgtattactaataagtcaaagaattgaaattcagttcccaccctggctgactactgtactgaaattacagaataaaattgcagttgcttagaaccagataacaatcaatgcagatgaattttttttgcttttaatagaaggcaattgtatgtaataaataaaattttcaatattaatgttatgaaagattgacttaaaatgacaatttttagaaaggccatatactatgaacaagataggggtagaaaaaacaaaagttatccatgggtaaacttgaacaattttgagaaagaaaatggctcatcaaagatgactttccatcttgtatctccattaactttctctccgacacacaggattaaacatatttggcaggaacttttaatgatggctggtagagaacagatgatattatttattatgtgaattatacaatttagagagatggcatactggggctatttcataaatgtccagtttgggaaagtgaagtctagatacttgaagcatggttattttttgccaatgtcatactgaaatagaaagacaatagatttcaggatgc

SEQ ID NO: 547201 - DNA, 675 bp, Homo sapiens
tacttgggtgggtgaggcatgtgaatcacttgaccccatgatgcacaggttgcagtgagccaagtttgtgccactgcactccagcctgggagacagagtgaaactgtgtctcaaaaaaaaaaattagttgcccataaatgtgtgggatcatatctgggctctactcagttccattgttcagtgcttctatttttatgccagtaccatgctgttttrattactatagctttgtagtatggtttgaagtcaggtaatgtgatgcttccagctttgctctttttgctcgtgattgccttggctattcaggatttcttgtggttccatgtgaattttaggattgttttttctatttctatgaaaaatgacattgaaattttgatagggattgcattcttgaacattatttcttgtaattctccaactgaccatccagttttattcccaatttgcagatgagaacactgaggcatgcagtgctgagaagacttgtctgaggccagaactctagtaagcgtgaggcctggggctgacaccctgccttccagctttcatccagatctgtgtccgctccccaggtgtataaaagcctgaaattccaagctacagtggacacaagaagatgagaggacatcctctaaccaaaggcacactgatcaaatgtgttccagttcattt

SEQ ID NO: 547202 - DNA, 675 bp, Homo sapiens
tacttgggtgggtgaggcatgtgaatcacttgaccccatgatgcacaggttgcagtgagccaagtttgtgccactgcactccagcctgggagacagagtgaaactgtgtctcaaaaaaaaaaattagttgcccataaatgtgtgggatcatatctgggctctactcagttccattgttcagtgcttctatttttatgccagtaccatgctgttttgattactatagctttgtagtatggtttgaagtcaggtaatgtgatgcttccagctttgctctttttgctcrtgattgccttggctattcaggatttcttgtggttccatgtgaattttaggattgttttttctatttctatgaaaaatgacattgaaattttgatagggattgcattcttgaacattatttcttgtaattctccaactgaccatccagttttattcccaatttgcagatgagaacactgaggcatgcagtgctgagaagacttgtctgaggccagaactctagtaagcgtgaggcctggggctgacaccctgccttccagctttcatccagatctgtgtccgctccccaggtgtataaaagcctgaaattccaagctacagtggacacaagaagatgagaggacatcctctaaccaaaggcacactgatcaaatgtgttccagttcattt

SEQ ID NO: 547203 - DNA, 672 bp, Homo sapiens
ttttctccaggctagtatgtttgttgttttatgtttaaaaatgaagtgtagcaaaacccatgtaaggcattaaagataatttgctattgaaaaccaggatgtattttgctaaggggtggtcatcaaattgatgcaggatttttctcagcgtcttcatcagacttgtgacaggggggctccatttactcagctctccatgctcaaccccttgtgggagggagcacatgagcaagtgaatttggatctgcccagggtctctcttcgcgctggcaggagcaagctccatacagtacccatggccagaccaggcaccagtgagatactgcaggacccagcaagccactctgggtgccagcaagagcaagctccatggggcagtgcccaactgtgtgtttaggggggtacctgtgacccccaaggccccacagggggtattacaatgatccttgagttctgccgtccacagacagctacgtgttaacagctcagttggccccttgcctcatcatgtggggcagctgtccaccagtgagggcaaagggccattgtgacaacctttttatgagtacctgcactyggtgggtcctgagctcttgtctggcatccaagaagaattaggcttctagttaacatcctgagctctccatctctgccagagtcctccttgctatg

SEQ ID NO: 547204 - DNA, 553 bp, Homo sapiens
attcaactcaatgaattaatcttttccaactgtactgtttattttagtgtagcgtaacacatttaaacttatttatttatttatttattttttcaccatgcatagtattytattttctcgtttgtcagttttgattttttactttaaactttaggtgtcattaagaaaaaaatacctatcatagaatttgagcatttttagaaatgcaaaaagtcaagttcaactttccaaccagcggagaaattttctgcactagaacgttagctaaacacattgaatgacaggaaacctataagaaagcatattcaatttatgtgaatttccttttgttacaaaggcagataggacagagaaggaaattgattgacttagcgatgcatcaattaactcttcaaggtctggaataaacttagaatttgaaggtgcacactcttgagctatacatttgaatattgactgcaattgcacgtcctatatcaatactcacctgtgttttttaaactgtgaaaccagtaaagcatgatgatgattggcatccctctgcagttaaaaa

SEQ ID NO: 547205 - DNA, 1452 bp, Homo sapiens
atttatgttttcaagtagctgattcttaaggcatagaacattacctcattatgtattcaataaacattattcaataaacatgcattgagcatttgcatttccacatcctgtgcttgatattaaggatgataaggtaagagaaacaaacctacagtctgcagcagagtttctcaactgggggtgattatcccgggggcattgggcaatggcccaagatatttgtgattgtcatgacttgggttgggggaagtttttactggcatcctacaaggcacaggagaggtccacacgacaaataattatccagtcctattgccaataattccagtgttgagaaaccctggtctagagggagcatatcgctcacagttacaattctataaaataagtccaaaaataaagctctcacacacagtgctctctcatagctcagagaaggaagcacccagccttgacaatggtggatggatgtgggttgtgtgtgggaaactccctgaataaagtgtcctctccgttgatgcttgaaggctggggaggaattaatctggcagatgaagagaggtgggttttctagtggagggaacctcatatgcaaattcacagaagcaagcatcatcctggaatgattggggtacggcacagttaggatagctggggtttagatccatgcgagagtcatgagaaagaaggctttgaatcgagttgagggatatgatggtgaaaagcctggagtaggtggaaaagatattgaaccatctccagcaccaggggagagccattgaggggtgataaatagggtggcagcatgggtgcattgcatgctacgcccttcacacagtcgtgtggagtatagcttggaactaggacagtcaggaccagttaattgactggaacaggtcagacatgatgagatggttgaggatgtttgaagacattttgaaggtagaaatgacaggccttttacaaattcactgtgatgagtgaggaagaggggacagtcagaaacaatgctgatgtttttggcttaagatgctgagtggatactggtgtcttcatgtgaaataagaaatccatgctgagaaagatggtgaatttrggtttgggcttggcagtgctacctgtgggtcatctggtcaggaagagaagaagttctggggaagggaaggacactgtggttgaccttgagaatgctcagggtaattgaatacatgtaaaaggaaggagattccgtgtcaggaatcttaggaacaccaaaactcaaggagcaggcaggccaggcggggccatgcaggaaactgaggactgataggaaaaaaaaaaggcaatcgaaaagctggccaggtgcagtggcacacacctgtaatccctacactttgggaggctgaggtgggaggattgcttgagccctggagtttgagaccagcctaggaaacatagtgagaacctgacttt

SEQ ID NO: 547206 - DNA, 1910 bp, Homo sapiens
tgaaacccttggtggtgggttagtggttgcatttaattttcttttgccattgtccgtttttaatttattgaattttcagcgtatgctactttcacaatcagaaaatgacaaatattatctataaaataaaagtatagyttctgccttatcatttcaacaccaatcaagaaccaaaagcaaggtggcaccagtcagcaagccttaaattaaagggtgttttcccagtttctggttaagataggaatgcaagacacagtaaaggtgacaggtatgtatttacacagcacagtcccaacaacaatcatagctttaaagcaaaacctctcactcttcttcttccctgttttatagtttaatttctgcctgcagttgtcttccttttttcatctgtcttattctcactagtcaaggcacaaaatgcaacacaacccttggctagagcctattattatattaaaaggataaaagaagtttgttttgtcgtggtattataaaattgcatatcccttaaacacctatcaagttgtttcatgtgaaaatctttccttgctgccaatataagtcatatttcaatttatttcatttattcatgttcagtcttctaaaatatatagagtaagaggtagtctatttttaatctactagattgatgatgaaatcacaatatgactttagtgaccatttgaagtctcattaggtggcattgtctgaggaatttgttatgactataattttagaagcagaatatatggttcaaacaagacctaaggacccttcagaattcattgccctttcagtagcaaatttttttaaagcagtagcttttagaattttgcatacaatgtttttagaaatggtctttccataaaatctctgggcctaaaatatgtcttcaatttatatataggtaatcaataaaatgccacattattaattcaccttacaggtactttaatgatttttaacatcgtaatattcaactagtgaataaaggaggtagcctttcatttaaattggtggttgaactttgtaattacttcagatgttattgctgatgtttcaaaagctttccagtggaatttttctcaaattaggtatcggactgatatgcttaaccttaggcctcatcttgatgcctctagacagtaagatgaaagaattagttttatcttacaatatgtaccagactttcaactaataagaaaactagaattaaaagactgttctaggacaaagatcatgatatccaggattaaattttagattatgggaagttatttcttattaaattggttcacttttgcaaaactcttctttggaaatactttaagacaaagaaaaatatccatcctgtttgaaatacttaaaaaaaaaagaaaaacataatcaaagtctgttgttatattcattaattaatggataccataatatacacataacattcatcagtaaatacatttaattctcttggttaaaagaggttttggatcatgccactgctgtcacaaactacagcagcccagaccactgagacaatcacagacattgcagacaaagattacaactgaacaatctgcatggagaccatgctactgagtccacccagaacaaaagccaacataccatttccagtcaacaccctactcccaatagacacccaaccaatacaccattcccaatcaacgcccattcccatctacagaaaaaagtctcttcctgcaaaagctactccataaaatgagaaaaaatgacggttccactagatgcatagatatcagtgtcaggacacaagaaacatgaaaaaacaaggaaacatgaaatttgcaaaggaagtcaataattctccagtgacgacatcaaaggaaagaatgtttatgaaatgcctgaaaagtaattcaaaataatgatcg

SEQ ID NO: 547207 - DNA, 1910 bp, Homo sapiens
tgaaacccttggtggtgggttagtggttgcatttaattttcttttgccattgtccgtttttaatttattgaattttcagcgtatgctactttcacaatcagaaaatgacaaatattatctataaaataaaagtatagcttctgccttatcatttcaacaccaatcaagaaccaaaagcaaggtggcaccagtcagcaagccttaaattaaagggtgttttcccagtttctggttaagataggaatgcaagacacagtaaaggtgacaggtatgtatttacacagcacagtcccaacaacaatcatagctttaaagcaaaacctctcactcttcttcttccctgttttatagtttaatttctgcctgcagttgtcttccttttttcatctgtcttattctcactagtcaaggcacaaaatgcaacacaacccttggctagagcctattattatattaaaaggataaaagaagtttgttttgtcgtggtattataaaattgcatatcccttaaacacctatcaagttgtttcatgtgaaaatctttccttgctgccaatataagtcatatttcaatttatttcatttattcatgttcagtcttctaaaatatatagagtaagaggtagtctatttttaatctactagattgatgatgaaatcacaatatgactttagtgaccatttgaagtctcattaggtggcattgtctgaggaatttgttatgactataattttagaagcagaatatatggttcaaacaagacctaaggacccttcagaattcattgccctttcagtagcaaatttttttaaagcagtagcttttagaattttgcatacaatgtttttagaaatggtctttccataaaatctctgggcctaaaatatgtcttcaatttatatataggtaatcaataaaatgccacattattaattcaccttacaggtactttaatgatttttaacatcgtaatattcaactagtgaataaaggaggtagcctttcatttaaattggtggttgaactttgtaattacttcagatgttattgctgatgtttcaaaagctttccagtggaatttttctcaaattaggtatcggactgatatgcttaaccttaggcctcatcttgatgcctctagacagtaagatgaaagaattagttttatcttacaatatgtaccagactttcaactaataagaaaactagaattaaaagactgttctaggacaaagatcatgatatccaggattaaattttagattatgggaagttatttcttattaaattggttcacttttgcaaaactcttctttggaaatactttaagacaaagaaaaatatccatcctgtttgaaatacttaaaaaaaaaagaaaaacataatcaaagtctgttgttatattcattaattaatggataccataatatacacataacattcatcagtaaatacatttaattctcttggttaaaagaggttttggatcatgccactgctgtcacaaactacagcagcccagaccactgagacaatcacagacattgcagacaaagattacaactgaacaatctgcatggagaccatgctactgagtccacccagaacaaaagccaacataccatttccagtcaacaccctactcccaatagacacccaaccaatacaccattcccaatcaacgcccattcccatctacagaaaaaagtctcttcctgcaaaagctactccataaaatgagaaaaaatgacggttccactagatgcatagatatcagtgtcaggacacaagaaacatgaaaaaacaaggaaacatgaaatttgcaaaggaagwcaataattctccagtgacgacatcaaaggaaagaatgtttatgaaatgcctgaaaagtaattcaaaataatgatcg

SEQ ID NO: 547208 - DNA, 546 bp, Homo sapiens
cagacaacaaacaaatactttattcaccttmacatttacaaaggtgcctggagcatgtgtttcagaatttcattatcacgaagaatgtaataacagataaaggaccacacctcagtgctaggcggtagcagagtctagccagacttgtagtttttcttgaaattagtagacagcaccagcataaaaacattccactgataggctatttttttttaagtctgcaaaagcaacctatattctcagagaaggcatactgaggacagtaaatgggagcctttgactccatgactcatggaatgtcagagattgtaggggcctcagaagatcaccttgcttggtttcctgatgccaagggcaaaactggggagacactctgaataaccagatgacttgtccaaagtcatatggtgagaagaacgctatgattacacctcgggtctcttgttatccagataaaaatggaattcaaaagtattattattaggtctttactaattcattgaatttatattagctcagaaaagacaatttcaaatttcatgaaaa

SEQ ID NO: 547209 - DNA, 607 bp, Homo sapiens
gctactaaaaggcaacgcagttttggatttcctcttttggtgtctgggacaaaaaaacatttgttcagctgctagatgttcctggtgcggtaggtgtttctagtgatcgttttatgttggaaatgtacccacagcagctttcatgaagctcggagatttggcgcctgtcctgcttccaggcagaaacgtgtggatcagcaagatcttaggccaattgacagagacagaatcgaagtgcacccttggctttgatcattctctctacaatctggatttttctctttccaaaagccatagaatatgygttaaaagcagccagcaccgtcatttccacagaaacacttgaaggccctcttccatgggaagtgtacttgcttgaattctccataatccattttcttcatcatttttaggtttcagtggaagtgatgcaattagagtgatcttggatttagatagccctttatcatgttcatgtctaccctattctcacagcaaccagtattattcatagaaaatattagctaacactcattgaacacttaccagtgagccagagaattagcaggttctctgtgtgattatcttgttgaccctgaagagagaa

SEQ ID NO: 547210 - DNA, 613 bp, Homo sapiens
cagacaccaccaaggtcaaacagtgtatttgctgtcaaccaagctgtgtcaccaaacttttcacaaggtaactttaataacataattgaaatttgtttctctgggttgggatctaatttcttttgtatgtgatgttattgactgcgaagtaataactaatgagtagatggtatgagaaaagattctgaaatttgtgattacgctgcttctttatgctagctaattcaaaccttttttatttttcttaatctgctagtaagctatgggctttagtggtttttcttttttcttttcacaaatacttctcaatctatgtgctagtaagttacaataaacagaaaagacagactaattcatcacatagttgtataaaacccaatgttgtgggggagtttttaaaaatagctcttatagtcatggtcttcagggaattcatcatctttttggagaaattttcaagaaaaacttgaatttcasccggttatggtggctcacgcctgtaatcccagcactttgggaggccgaggtgggccgatcgatcacctgaggtcaggagtttgagaccagcctcgagaacatggtgaaacctcatttctactaaaaatacaaaaaa

SEQ ID NO: 547211 - DNA, 1415 bp, Homo sapiens
tcaatattagttcgaaaatgtttctcaaatctgttcacttccctctatggccaccatcaccaccaaaaacagtagcaaccttgttcagactgttttgtctcacctgaactactgcaaatgggacagcaggcagtgacctcatcaacgcggaaatctcatgtcattctcctgcttccagaataggtaacgcccctagcgtggcccctgcaccacctccactcactctgctccattcaccttggccttatttggctcctcctaccttccgtgtcccctcacaccacagaccttttgcacactcagtgtcctcctgccagaatccttcagccttgcctcgattcctagcagtgcctgctcagtcctcatatctggactcatgcatcacttagcaaggaagctgttccctggcggggacaaagctccttatgacagcacaggctctttctcctgtgaagcgtctgtcacagtctcaattttatacagcatgtgccttgcatttagtgcccgctttcaccattaaattgtgagctccacgaggttggagattatatctgcttttgctcaccatttatccccaggacttaaaacactgtcagacttataacaggcactcaataaatatttgtcgaatgaattggtgactacataaatcactttgctatggggccctcgacacaggactgaccctccccatcgccttctcctgaggctggcaaaataatgcaaattgtagaaaaaaatagcctgaaaacctgagtgagtctaacacagatgaatcctattagactctgctaaaaagaatggtttttgactttctgggaaaggatccagtacaaggaaatagtgtttctttctcccagcacacggctgtgtccaaagtccagcttgtatttgacatcatccccrtttccttagagctcaagcaaagctctcggtatttcagatgccaaagtctggacacatttgtgaggtttgaatttctgcaccttacttacgtgactcacaggaggaaagtgcctggacttggcagtggcagcctcctctcccatgtggatcaggtcgccatatgatgggctcagatggggacctctgtttctcccaggagcccacagcctgtctcatccaggacagggcatgcactgggagcatgtttggaccacagaccctcctgctgagtcatctgcctccaaactttgaaacaaatccattaagggcagctttggggaacgacgtaatatttttaggtgcctgctcacttcatgcccccttctcctgagaatcccttctgcagaagggcagggctcagctagcaccatctcaggtcacagttgacgggaccatggcgggacaacccatggactgcaggtaaatgagatgatcctcctggaatgggctggcagggagactctctcgta

SEQ ID NO: 547212 - DNA, 1415 bp, Homo sapiens
tcaatattagttcgaaaatgtttctcaaatctgttcacttccctctatggccaccatcaccaccaaaaacagtagcaaccttgttcagactgttttgtctcacctgaactactgcaaatgggacagcaggcagtgacctcatcaacgcggaaatctcatgtcattctcctgcttccagaataggtaacgcccctagcgtggcccctgcaccacctccactcactctgctccattcaccttggccttatttggctcctcctaccttccgtgtcccctcacaccacagaccttttgcacactcagtgtcctcctgccagaatccttcagccttgcctcgattcctagcagtgcctgctcagtcctcatatctggactcatgcatcacttagcaaggaagctgttccctggcggggacaaagctccttatgacagcacaggctctttctcctgtgaagcgtctgtcacagtctcaattttatacagcatgtgccttgcatttagtgcccgctttcaccattaaattgtgagctccacgaggttggagattatatctgcttttgctcaccatttatccccaggacttaaaacactgtcagacttataacaggcactcaataaatatttgtcgaatgaattggtgactacataaatcactttgctatggggccctcgacacaggactgaccctccccatcgccttctcctgaggctggcaaaataatgcaaattgtagaaaaaaatagcctgaaaacctgagtgagtctaacacagatgaatcctattagactctgctaaaaagaatggtttttgactttctgggaaaggatccagtacaaggaaatagtgtttctttctcccagcacacggctgtgtccaaagtccagcttgtatttgacatcatccccgtttccttagagctcaagcaaagctctcggtatttcagatgccaaagtctggacacatttgtgaggtttgaatttctgcaccttacttacgtgactcacaggaggaaagtgcctggacttggcagtggcagcctcctctcccatgtggatcaggtcgccatatgatgggctcagatggggacctctgtttctcccaggagcccacagcctgtctcatccaggacagggcatgcaytgggagcatgtttggaccacagaccctcctgctgagtcatctgcctccaaactttgaaacaaatccattaagggcagctttggggaacgacgtaatatttttaggtgcctgctcacttcatgcccccttctcctgagaatcccttctgcagaagggcagggctcagctagcaccatctcaggtcacagttgacgggaccatggcgggacaacccatggactgcaggtaaatgagatgatcctcctggaatgggctggcagggagactctctcgta

SEQ ID NO: 547213 - DNA, 1415 bp, Homo sapiens
tcaatattagttcgaaaatgtttctcaaatctgttcacttccctctatggccaccatcaccaccaaaaacagtagcaaccttgttcagactgttttgtctcacctgaactactgcaaatgggacagcaggcagtgacctcatcaacgcggaaatctcatgtcattctcctgcttccagaataggtaacgcccctagcgtggcccctgcaccacctccactcactctgctccattcaccttggccttatttggctcctcctaccttccgtgtcccctcacaccacagaccttttgcacactcagtgtcctcctgccagaatccttcagccttgcctcgattcctagcagtgcctgctcagtcctcatatctggactcatgcatcacttagcaaggaagctgttccctggcggggacaaagctccttatgacagcacaggctctttctcctgtgaagcgtctgtcacagtctcaattttatacagcatgtgccttgcatttagtgcccgctttcaccattaaattgtgagctccacgaggttggagattatatctgcttttgctcaccatttatccccaggacttaaaacactgtcagacttataacaggcactcaataaatatttgtcgaatgaattggtgactacataaatcactttgctatggggccctcgacacaggactgaccctccccatcgccttctcctgaggctggcaaaataatgcaaattgtagaaaaaaatagcctgaaaacctgagtgagtctaacacagatgaatcctattagactctgctaaaaagaatggtttttgactttctgggaaaggatccagtacaaggaaatagtgtttctttctcccagcacacggctgtgtccaaagtccagcttgtatttgacatcatccccgtttccttagagctcaagcaaagctctcggtatttcagatgccaaagtctggacacatttgtgaggtttgaatttctgcaccttacttacgtgactcacaggaggaaagtgcctggacttggcagtggcagcctcctctcccatgtggatcaggtcgccatatgatgggctcagatggggacctctgtttctcccaggagcccacagcctgtctcatccaggacagggcatgcactgggagcatgtttggaccacagaccctcctgctgagtcatctgcctccaaactttgaaacaaatccattaagggcagctttggggaacgacgtaatatttttaggtgcctgctcacttcatgcccccttctcctgagaatcccttctgcagaagggcagggctcagctagcaccatctcaggtcacagttgacgggaccatggcgggacaacycatggactgcaggtaaatgagatgatcctcctggaatgggctggcagggagactctctcgta

SEQ ID NO: 547214 - DNA, 613 bp, Homo sapiens
cttgtgatctgcccaccttggcctcccaaagtgctgggattacaggcgtgagccaccgtgcccaggccagattatttataaatagtaaatgttgtacaattaataagcttgctacatatctgttattcaggtgactaggtgtagtgtaaacaattagcaggtaaagaaaaggtacctgatgtcacaagacttgtaactaaaaaagtctaggtgagtctgaagaaaagggggaaaggaaaatattaggctaaatgtaagttgtagtacattagttgagtgattaaaatcaaacatctgttatgaacaacacaagtgaagccagtaagagagttgctatacatttagtggttttcaagcttagctattttaaaaagagctgatattcaggctgcatcctagaaaaactatcagatactcaggatgtgacccaggtctttgtattcttcttgaatttcccagawgattccaagatttagagaacaaaggttgcacctcactgctatgattgaaactgacctacatgaaaaacacatgactggaaaaaagcctatggtggcagcagtagcatattagaatagctttggtatcattcctcaggaggttgaaatatctc

SEQ ID NO: 547215 - DNA, 629 bp, Homo sapiens
gattaggtaaaacatttttagttattctagtccagtttaagcagataatatcttaacttcagttatatctgcactttttgttttttttttttttttttttttgagtcagagtctcactctgttgccaggctggagtgcagtggtgtgatcatggctcactgcaacctctgcctcccgggttcaagcaattatcttgcctcagtcttcagagtagctgggagtacaggtgcgcactaccacacccagctaatttttgtgtttttagtagcaactgtgtttcaccatgttggccaggatgttctcgatctcttgaccttctgatccacccacgtaagcctcccaaagtactgggattacaggtgtgagccacagcgcctggccatatctgcacttttacttctctctttccacatactttatgttattgatgataactattacacattttcatgttatgtatacattaacaatttttgttactattgatattattaacatttctgtctttcaatttttwtaccaaaattatgagtagtctgcataccaacagcacagtaatatagcatttgcctttaaagttacgtgtatgaagtgggttttatacttccgtatgcttttctttttttgtt

SEQ ID NO: 547216 - DNA, 691 bp, Homo sapiens
cagtcaataacagatatatctttccttccagctaagataagcaagcttgtctttctgaccagtctgtcagaagcctaattgaaaaataaaattaacaaatgtggtaaaacgcaaaaatagcctaaatgacttgagggcagggacgtatcatccacttcttttggtaattcccttcttactactttgagcctcagtttctgcatttataaaataagaatcataatcttatctcgtagacttgttgtgaggactaataagataatcaacacgragctcttagaatagtacccagcgcagagtaagactcagtatttggctaccgttatcgttattcccccagcaatggccaacatggtgccatgctcatgttcaaaaacaggctgggcatggtggctcacgcctgtaatcccagcactttgggaggccgaagtgggtggatcacttgacgtcaggagttcaacaccagcctggccaacatggtgaaaccccgtctctactttaaaaatacaaaaaactagcaggccatggtggcaccctcctgtagtcccagctacttgggaggctgaggtgggagaattacttgaacctgggaggtggaggttgcaatgagtcaagatcatgccattgcactccagcctgggcgacagagtgagactttatctaaaaaaaataaaaaataaaaaaaaataaa

SEQ ID NO: 547217 - DNA, 613 bp, Homo sapiens
ttctttcagtattctaagctgatagtttgaaaggcaaaagatcacactcagtcccatatgttcctcccatcccctcatatcgtcccatcatataaagaatacttaaatgctctttactttttacatccatagttatagcctgacataaatacattttttaaaaagaaatataaacaattcccactgattatgttagtggctgcaaaccttaggtaagtaactttattagttcttataaatttcctggttaatattctaagataaatrtctcatgacagggtttgatatattatcagaaagtggtgattttcaggtatgaccacactccagaatgtttattgaatatcttctaattttttaagtgttaaggaagaaagtgacaatatagatgatggcaatgaaataaatatcaacttaaaatatataacatacttattgtggtgcaatctctatggaaaatagtatagtggtttctaaaaatattaaaaatgaagttgtgattcagcaattccacttctgggtgtatttccaaaataatgaaaagcagggtcttgaatagatatttccacacccatttatttcacagcaacagtactcatatcaaccatatggt

SEQ ID NO: 547218 - DNA, 625 bp, Homo sapiens
taagtagacagattcatataattatattcataaatcatctttgaacataaggattaattcaaagcctggtgcataagtgctcaatgaataagtgctaactagatgaaataatattatactctggttaatgaattgacatactacattttactaggagtatttgcatgtgtaacatgccttttggttgcgcacaattaaatgcaagttaatctgattataaaagtttaaaaactggatacaaaaatctccatacaaaagatctctgccgtgacattaattaccactccaagcaccatgcatcatctgacagctacgtggcaatggtgtgaaccacacacaaagccaaaaaaataaaaggatctaattcaaagactatatatacatataagaggttctctgatttttagcccaaattstagtttcctttgtgcaataatgattatggttctttcactgagtgggtgcagcaagaaagcagaactagaaattaggcttatgagggcgtctacacttttacaaagaacatgcctcgcattgttaggttccctaaactcaaaggagagtcagtctaagcattttaggagtcacaatctacaaattcctagaagtaactaataataatgca

SEQ ID NO: 547219 - DNA, 1175 bp, Homo sapiens
gcasggaggaagcctcctttcatgttgaactgcagccgctgctgcctcgcgcctggaagaatggcacattgatttgattttctcatggctgagggggctcaaccagggccgttgctaagagccctccaaaaagccagccctctcctgtgtcaatcaagcccgcctgcctccctcccgctgagagcctctttctcatctgcacaattctttccctcttctggggagacagccgattgtctacgaggccagcagctgcacaaggggatgagggcctgtgggagggtccgttctaccaactgtccatctgtcgggaatagccaagctactttccccctgccctgaggtaacaactgtctggcaggacaggaggggagggactgagagctgctatcatttacttgttcagctgccagcccaacttcacccagaaacttccatcctgaaactgttgtgcctcagtttgacttattcaagggaggtatttttttcatgctactcttaactgaaagacactaagaacaagttttataaattattattataattcttactatatatttttagacagagtctcgctctgttgcccaggctggagtgcagtggcacaatctcggctggctgcaacctctgcctcctgggttcaagcgattctcctgcctcagcctcccaggtagctaggattacaggtgtgtgccaccaggcctggctaatttttgtatttttagtggagatggggttttgccacgttggtcaggctggtcttgaactcctgacctcaggtgatctgactgcctcggcctcccaaagttctgggattacaggcatgagccaccacgcccggcaagttttataaattaaacaaaactcaacgactaagaactcttagagtgaaaggttttgatagaatgtaaagacttcatctgaagtaaggaccgtgaaggcacaaccgacatattgtcagaagtaactgaatatttctcatgggcaaacaagcactcaggagaaaccattagctctaagttggccccacatttttataacagctaaagggcttggcagtttgtcctcctagactgtaagccatttgtgggtaaagattgagtctcattggtgttgtgtaattctctgggtgtttttcatgagaaaaattccacattttttttcgtttggttcat

SEQ ID NO: 547220 - DNA, 1175 bp, Homo sapiens
gcagggaggaagcctcctttcatgttgaactgcagccgctgctgcctcgcgcctggaagaatggcacattgatttgattttctcatggctgagggggctcaaccagggccgttgctaagagccctccaaaaagccagccctctcctgtgtcaatcaagcccgcctgcctccctcccgctgagagcctctttctcatctgcacaattctttccctcttctggggagacagccgattgtctacgaggccagcagctgcacaaggggatgagggcctgtgggagggtccgttctaccaactgtccatctgtcgggaatagccaagctactttccccctgccctgaggtaacaactgtctggcaggacaggaggggagggactgagagctgctatcatttacttgttcagctgccagcccaacttcacccagaaacttccatcctgaaactgttgtgcctcagtttgacttattcaagggaggtatttttttcatgctactcttaactgaaagacactaagaacaagttttataaattattattataattcttactatatatttttagacagagtctcgctctgttgcccaggctggagtgcagtggcacaatctcggctggctgcaacctctgcctcctgggttcaagcgattctcctgcctcagcctcccaggtagctaggattacaggtgtgtgccaccaggcctggctaatttttgtatttttagtggagatggggttttgccacgttggtcaggctggtcttgaactcctgacctcaggtgatctgactgcctcggcctcccaaagttctgggattacaggcatgagccaccacgcccggcaagttttataaattaaacaaaactcaaygactaagaactcttagagtgaaaggttttgatagaatgtaaagacttcatctgaagtaaggaccgtgaaggcacaaccgacatattgtcagaagtaactgaatatttctcatgggcaaacaagcactcaggagaaaccattagctctaagttggccccacatttttataacagctaaagggcttggcagtttgtcctcctagactgtaagccatttgtgggtaaagattgagtctcattggtgttgtgtaattctctgggtgtttttcatgagaaaaattccacattttttttcgtttggttcat

SEQ ID NO: 547221 - DNA, 853 bp, Homo sapiens
agctgtggccattttaatacctgtgtttgatattgctaagaaatatagacggaatgaaaagaaaaatcaggctaaaatcaccatcaaatcaattacactgtgtttaccctcctcagtgtccatcacttgtattatagagacagaagattacatgagccaatcactgaccttatggagagcaggagccaagactggtaccaaaaatccattgtaaatgtaattgacaagctgatttcgaatcaaggggtgagccacctgagagagaggcacataggcatgaaaaaggcaaagagttcaatcttcagttcttaaaataaaacaattctgtgtacatcctgaactcaaaaaggaaatccacattttggccatttattctgtgattaaagaacaaatcagacctcatactgtcatataagcctttcaaatagcttattccagtataaacaccttggttaaaatccgcagaagttgaactttcaaacataatattggtaattttaaactgcgtatttggaaaaaagacaataaatagactgagtatgtataaggattcatacttacacataccatatccagtgtgttaaacatatccagtttgttaaagttaacaaactggaaagtataatttttgccccttactttcttctaaatcacatctcaacctgtaactaattttaaaaactgagtataactgtcaaaacaattaaatacatttattttgctagcagaaaacatttyctcattttaaatatgtatttcctgatagtcatttatattaaagaaaagcatttaaaaatattttcagaaaaatagataatattcaaaagcggaaaacattatcagaagtacaata

SEQ ID NO: 547222 - DNA, 1089 bp, Homo sapiens
ttgctcaatattatctttacacattaaatcttggcatccctaaaagggaaattgaagagctttgtggactttttaatatataggactggccctggatatacccataggcaagacagctgagacttgccttaaaaggggctgggaaagcagattggctatctgtttggaccctrtaattttaccaaggacatagagtggaaggagttgcataagagtacaaagctgtagtccagctttgaccaactagtccatttattcatattgctgaattaaatatttaatgcttattgaatggccatttcattcttgattctagaaggagtccccttattgaaactgagggacagggtaggagcttgagcacaagaaatagagaaaaaaatccaggtagtaactaggaccctcactcattcttatatcccacagagcttttattggtcacgtcaggtgcatggtctaggcagagccaatagcaaaactggtgatgctaggtcacctgggctattgactctgctgataaacagggatgggattcagcaccagcagttgcaaaaatagaggggcagaatatggcaggtcactcttgtgtatagtcaagaaatacttctgactcatccttaatgaaatcaaatccatgggtaaaacatctccaaccttttcccaaagtgagacatagccagaaaacctcctctggaaagattaccagatataatatagaacatcaattaaatgtgaatttcagatagacaacaaataccttttaaattataaatatgtcctattttggcccaaaatagttatattagagaaaagtatttactatgttattgaaattcaaatttaactggatgccttctattttaatgttttaaactccctgaactccctttccccgataatctaccttagtttcctttcttctgtgttcacatgggacttagcacctggtatcactattagctattaaaactttccctaccctgtttgcattgtataaggtacaggcctttaggagcctggcacaagtaagctgtcaggaaaagttaattgaatggaatgatgatggcaacaaatatgtctgagcacaaa

SEQ ID NO: 547223 - DNA, 611 bp, Homo sapiens
gattggaaagggtgtgaaagtgtagaaatgctaaaagtcacaaagtgggaaaagaaaacattatgcacattttgttgttttgcttaaggccttcatgccagccattgtcctgaaaatcacgctagtagtcatccagtccatttcttttctgatcgtgtgtttgctaataaaggacaaccgtgatctgacttcccagaattcccaaccacatatttccccctgtctacatgagatttcatctcatgagatttgccgagagaaaggccaagatgtatatttccaaagagctctctgtgactggccaggtcgagtgtgggatgttttggaggtccagacaagtgatatgggatatgcagagatttgtgtgaactgttaatagaacagtgagactgacagctcactccagggycatgtgtacaactaaattcccaaaaacagcaacagtcatgtgtcaccaaaataataagtgggtcacaggctgattttctgccacttccttgtgactgctaagcatatgccaggcacgttattttttgtatcccagctgcttacacaatcagatatggtaaatcgggcatgctgaaaatttcagtcacattggaatcagcagc

SEQ ID NO: 547224 - DNA, 1246 bp, Homo sapiens
gtgcaagatcctcaacccagaggctccctaggccccacttgccccagctcttgaaagcctggttctgagctctgccaggactggggctcagcactgcccatggaaacaggcatggcagcgaagaaaatcrtaaccaaatatttgtagtcacctctctcctcccttctggaaagggagggtccctggtttgtgggctcttggcctcctggacattattctgtagtgaagggagaaaggttgagatgcagagttggagaaactaacagaggccaaactggtccatttgaggaaagatgggggatcccaggaggggaggaggggacaccctggggaaccgggggccttctcaggtggtccaagtaggggagggcaggacacagaaagtcagaacatggttttgagttttggagacaagagaaaagagggagtgatttggacaactggagaagatcaggctggggagagaaatgtttagagatttggaagatagtgtgtcgtgcgatgtattgtgaaaaccccttcttcatatccgtaaaaaaccaccactgatgatgcgtgatacaattcagtgcttttgcagacggactggtgcctttttaaaataataagaatgcattggcttggctccatctgaattagtagagacagacatcttgagcaggttttatcagtgttccattagctaaatattgggtttcctattttgtggcttggcttaaaccactttgtaggcccttctgcactggaaggcacctcaaaaatcacctctttggcctgcagctccatgtccccaaactcttggctttcctaaatgagtggcctcattcagaagataatacagcatccctcatctgaaaatcaaaatccaaaactgtttgagtgccgacatgatgttcgaaggccaggttcaaaggaaatgctcattggagcattttcgatttcagattttcgaattccaaaatctgaaaaaatccgaaatccaaaatacttctgtaattgtaacctggaatagccattgggtcctgaccttccagctgaggcagccagcagtcaacagaggctgaccatgcacccatcctgcccctcaccctccccgggcttgtgcctcaccccccagcctcccttgcatctgctgggaaggggacacaatgcttctgccctgccttcttggatctcagaccactgtgacaattgcaggattccagccagggaaagtgctacaggtagaggtacttagtactctcca

SEQ ID NO: 547225 - DNA, 1393 bp, Homo sapiens
gactgaataaatgtggaatgaattaacactgctggaggtagaaagactcagttttgcatggtcttgcctttgatctagttctcaaatttcctcctggcacagaatatttatagtgagccttctggaattgccacttgataaccagcaacatgttgtaagatgttgttatagctacaacatctcccacttcttttcgataatttgcttcagcttaaacttggctctgtcttactgccattcaggaagtgtctgtttatgcattcaacctcgcttacctcacggttgaggggtgggctacctatcctctttgctctccattgcagagtagtatatcaccatctctaaaaacaaaaactactcatttgagacccatggcatttatttattctacccttgcccctcctcaaagctgccctcgaatgaccacctattcaccatccgtcattcatcaaagacattgacatttgtctcgtcaccttcctctctactctaaccttgctatcctcttgggtatcctcagtcctccaacgactgcatgaacaacccagtgaataccatggctttctggtttccagcccccactcttccagtttccttctcctccgtaccccttcaaccacccactcccacaagaacattttggaaatatatcatcaccaaaaaccatcccaccgacagaattaataattcaagcatctttccctctcaccatagccccctctactttcagattattaatctacccctgtagaccatctttgatcattttcacaatgtctggtgttttaatcttcaactttctcccaaactgttggcttttccctttcttccctttcactcttttttattttattttaatttattttaattattttaattttttaattttttattttttccctttcactcttaatagctcaaaatatataattcattatttccgtgatactgcctcaaatgccaaactctcttgcttctctgttttttcttttttttacccatatgataacacttaagataaactaagccattttctaactccatgccttcattcaagcagccaagagatacatgataaagtcacaccaatagcagattcactcccacacatttattttttaaattatttatttttattttttagagacagccttcttctgtcatctaggctggagtgcagtggtgctatcatagctcactgcaamctttgaaatcctggcctcaagtgatcctctcaccttggctcccccaaagtgctgggattatacgtgtgagtcactgtgccccaccagcctattcctgcaaattttcactgctccatatttagatctaatcatccactctgatattttccacaaatgatatctctctttaaaacaactgttgtgaactc

SEQ ID NO: 547226 - DNA, 1420 bp, Homo sapiens
caaggtttctagatttgccctttggaaaaaatgttctgagacatgggtagattttgtggcctgtgagctactgggggtctttcaggtctcttgtttgcatatgtatgtatatgtgtrtatatatatatatatatatatatatatatatatatatatataactttaagttctgggctacatgtgctgaacatgcaggtttgttacatagatatacatgtgtcatggtggtttgctgcacccatcaacccatcatctaggttttaagccccacatgcattaggtatttgtcctaatgctctcccttccctttcctctcaccccccaacaggacccagtgtgtgatgttcccctccctgtgaccatgtgttctccttgttcaactcccacttatgagcgagaacatgaggtgtttggttttctgttcctgtgttattttgctgaggatgatggcttccagcttcatccatgtccctgcaaaggacacgatctcattctttttcatggctgcatagtattccatggtgtatatatgccacatttttctttatgcagtctatcattgatggggatttgggttggttccaactctttgctattgtaattttttttaatgaatactaggtgaagcctgtaaaaaaagagttgacaaatgtgctggggtcctggtaattgtaaacaaacacgcaagctgtgggtccacactcagccattaaaaatttaacatttcagctgctttctccctacctgcttttatagtagccatgtctttctctaatactctaccaattctgaaactgttcatgggtcccttttatccctggagaaggcttttaccctttggactttagtttacctagttacctgtgaactcagctctttgatagacccaagaaaagttataattttatagattatctgactttgtttcattattaggaaagtagcaacattctcttgagaatttatgcattgtaagtgaaagaaaaatccaggaaatcttatagagaatggcaatatggttatagatgagaatgtggaaaagatgaattttgaaatacttcctatcatagtacaaattgctacaatgattttagaaaaaagtatatctatacacatacacggagatcatatatatggaaatacgtgtgtgtatttttcctgatgactctgcataataaacataaataaattcttaaagatggaaacaataaataaatgtcactttaaaatgacattcgattaaagtgacattttaaaaagacaatgtaaagctttttccaggccaaactatggtgattatcctatattaagattttaattcttcaaagaaagatagtaaaaagttcaatttctttcactagggaaagaaaattttctttcatcccacaacaaattagtaaagagagcaattatttctgcc

SEQ ID NO: 547227 - DNA, 1420 bp, Homo sapiens
caaggtttctagatttgccctttggaaaaaatgttctgagacatgggtagattttgtggcctgtgagctactgggggtctttcaggtctcttgtttgcatatgtatgtatatgtgtatrtatatatatatatatatatatatatatatatatatatataactttaagttctgggctacatgtgctgaacatgcaggtttgttacatagatatacatgtgtcatggtggtttgctgcacccatcaacccatcatctaggttttaagccccacatgcattaggtatttgtcctaatgctctcccttccctttcctctcaccccccaacaggacccagtgtgtgatgttcccctccctgtgaccatgtgttctccttgttcaactcccacttatgagcgagaacatgaggtgtttggttttctgttcctgtgttattttgctgaggatgatggcttccagcttcatccatgtccctgcaaaggacacgatctcattctttttcatggctgcatagtattccatggtgtatatatgccacatttttctttatgcagtctatcattgatggggatttgggttggttccaactctttgctattgtaattttttttaatgaatactaggtgaagcctgtaaaaaaagagttgacaaatgtgctggggtcctggtaattgtaaacaaacacgcaagctgtgggtccacactcagccattaaaaatttaacatttcagctgctttctccctacctgcttttatagtagccatgtctttctctaatactctaccaattctgaaactgttcatgggtcccttttatccctggagaaggcttttaccctttggactttagtttacctagttacctgtgaactcagctctttgatagacccaagaaaagttataattttatagattatctgactttgtttcattattaggaaagtagcaacattctcttgagaatttatgcattgtaagtgaaagaaaaatccaggaaatcttatagagaatggcaatatggttatagatgagaatgtggaaaagatgaattttgaaatacttcctatcatagtacaaattgctacaatgattttagaaaaaagtatatctatacacatacacggagatcatatatatggaaatacgtgtgtgtatttttcctgatgactctgcataataaacataaataaattcttaaagatggaaacaataaataaatgtcactttaaaatgacattcgattaaagtgacattttaaaaagacaatgtaaagctttttccaggccaaactatggtgattatcctatattaagattttaattcttcaaagaaagatagtaaaaagttcaatttctttcactagggaaagaaaattttctttcatcccacaacaaattagtaaagagagcaattatttctgcc

SEQ ID NO: 547228 - DNA, 1420 bp, Homo sapiens
caaggtttctagatttgccctttggaaaaaatgttctgagacatgggtagattttgtggcctgtgagctactgggggtctttcaggtctcttgtttgcatatgtatgtatatgtgtatatatatatatatatatatatatatatatatatatatatataactttaagttctgggctacatgtgctgaacatgcaggtttgttacatagatatacatgtgtcatggtggtttgctgcacccatcaacccatcatctaggttttaagccccacatgcattaggtatttgtcctaatgctctcccttccctttcctctcaccccccaacaggacccagtgtgtgatgttcccctccctgtgaccatgtgttctccttgttcaactcccacttatgagcgagaacatgaggtgtttggttttctgttcctgtgttattttgctgaggatgatggcttccagcttcatccatgtccctgcaaaggacacgatctcattctttttcatggctgcatagtattccatggtgtatatatgccacatttttctttatgcagtctatcattgatggggatttgggttggttccaactctttgctattgtaattttttttaatgaatactaggtgaagcctgtaaaaaaagagttgacaaatgtgctggggtcctggtaattgtaaacaaacacgcaagctgtgggtccacactcagccattaaaaatttaacatttcagctgctttctccctacctgcttttatagtagccatgtctttctctaatactctaccaattctgaaactgttcatgggtcccttttatccctggagaaggcttttaccctttggactttagtttacctagttacctgtgaactcagctctttgatagacccaagaaaagttataattttatagattatctgactttgtttcattattaggaaagtagcaacattctcttgagaatttatgcattgtaagtgaaagaaaaatccaggaaatcttatagagaatggcaatatggttatagatgagaatgtggaaaagatgaattttgaaatacttcctatcatagtacaaattgctacaatgattttagaaaaaagtatatctatacacatacacggagatcatatatatgsaaatacgtgtgtgtatttttcctgatgactctgcataataaacataaataaattcttaaagatggaaacaataaataaatgtcactttaaaatgacattcgattaaagtgacattttaaaaagacaatgtaaagctttttccaggccaaactatggtgattatcctatattaagattttaattcttcaaagaaagatagtaaaaagttcaatttctttcactagggaaagaaaattttctttcatcccacaacaaattagtaaagagagcaattatttctgcc

SEQ ID NO: 547229 - DNA, 1420 bp, Homo sapiens
caaggtttctagatttgccctttggaaaaaatgttctgagacatgggtagattttgtggcctgtgagctactgggggtctttcaggtctcttgtttgcatatgtatgtatatgtgtatatatatatatatatatatatatatatatatatatatatataactttaagttctgggctacatgtgctgaacatgcaggtttgttacatagatatacatgtgtcatggtggtttgctgcacccatcaacccatcatctaggttttaagccccacatgcattaggtatttgtcctaatgctctcccttccctttcctctcaccccccaacaggacccagtgtgtgatgttcccctccctgtgaccatgtgttctccttgttcaactcccacttatgagcgagaacatgaggtgtttggttttctgttcctgtgttattttgctgaggatgatggcttccagcttcatccatgtccctgcaaaggacacgatctcattctttttcatggctgcatagtattccatggtgtatatatgccacatttttctttatgcagtctatcattgatggggatttgggttggttccaactctttgctattgtaattttttttaatgaatactaggtgaagcctgtaaaaaaagagttgacaaatgtgctggggtcctggtaattgtaaacaaacacgcaagctgtgggtccacactcagccattaaaaatttaacatttcagctgctttctccctacctgcttttatagtagccatgtctttctctaatactctaccaattctgaaactgttcatgggtcccttttatccctggagaaggcttttaccctttggactttagtttacctagttacctgtgaactcagctctttgatagacccaagaaaagttataattttatagattatctgactttgtttcattattaggaaagtagcaacattctcttgagaatttatgcattgtaagtgaaagaaaaatccaggaaatcttatagagaatggcaatatggttatagatgagaatgtggaaaagatgaattttgaaatacttcctatcatagtacaaattgctacaatgattttagaaaaaagtatatctatacacatacacggagatcatatatatggaaataygtgtgtgtatttttcctgatgactctgcataataaacataaataaattcttaaagatggaaacaataaataaatgtcactttaaaatgacattcgattaaagtgacattttaaaaagacaatgtaaagctttttccaggccaaactatggtgattatcctatattaagattttaattcttcaaagaaagatagtaaaaagttcaatttctttcactagggaaagaaaattttctttcatcccacaacaaattagtaaagagagcaattatttctgcc

SEQ ID NO: 547230 - DNA, 1079 bp, Homo sapiens
ctggtcctgaatatgtcttcctgcaagctttcaccctcacttggtactacttaaatcaagtccacaacatctgttctccacatgagtggtttgcttctgcttcttagtgataaattcttaccattgaagtcattaagctttgccattcattcttctttccctagcctgattctttttcctttaggtaagtstgatctgatttttcaggggttgctcggttagttggggatattccagtcttgactgctctgaaaaggcagctcaagcggcatcacttcctgcctgggcatgttgacctggcatgttgccaatctttacctgccagcatctctggccctgatatccctaatggctcacaccctctgccatgtgtagacccctcccttctactcccaaaatgcaaatttacagagaattccccatcactggaattcttcatgcctaaaggacttcagcaatacatgggcacagatttaaacatggtgtctattgggacatgcagatgggagagaaatgagctagggcgacccaggagtgtagcatctcctgttacctgtaccagtggatataatttgcaaactatgtgtacctttgaaaataatcccttccaaaccagatatagtggacagttttactgtttttttttatgttttgataaactatatttttaagggcagttttaggttcacagcaaaattatgcagaaaggtaagaaatttccctttccccacccttccccacacatgcacagcctcccccatcatccacatcccccaccagagtggcccatttgttacaactgatgaacggacattgacacctcatgatcacaagagtccatagtttacataagggttcactcttggtgttgtacgttctatgtttttagacgtgtattcaccattacaatatcatacagaatagtttcactgccctaagaatcctctatgctgcacctattcatctctctctttcctctacagacatcacgttttgatacaacacagtcacttcgattactgcttgtttgaattatgacatttaaaaagtagattgaaattgaaacagtctacggttca

SEQ ID NO: 547231 - DNA, 1079 bp, Homo sapiens
ctggtcctgaatatgtcttcctgcaagctttcaccctcacttggtactacttaaatcaagtccacaacatctgttctccacatgagtggtttgcttctgcttcttagtgataaattcttaccattgaagtcattaagctttgccattcattcttctttccctagcctgattctttttcctttaggtaagtctgatctgatttttcaggggttgctcggttagttggggatattccagtcttgactgctctgaaaaggcagctcaagcggcatcacttcctgcctgggcatgttgacctggcatgttgccaatctttacctgccagcatctctggccctgatatccctaatggctcacaccctctgccatgtgtagacccctcccttctactcccaaaatgcaaatttacagagaattccccatcactggaattcttcatgcctaaaggacttcagcaatacatgggcacagatttaaacatggtgtctattgggacatgcagatgggagagaaatgagctagggcgacccaggagtgtagcatctcctgttacctgtaccagtggatataatttgcaaactatgtgtacctttgaaaataatcccttccaaaccagatatagtggacagttttactgtttttttttatgttttgataaactatatttttaagggcagttttaggttcacagcaaaattatgcagaaaggtaagaaatttccctttccccacccttccccacacatgcacagcctcccccatcatccacatcccccaccagagtggcccatttgttacaactgatgaacggacattgacacctcatgatcacaagagtccatagtttacataagggttcactcttggtgttgtacrttctatgtttttagacgtgtattcaccattacaatatcatacagaatagtttcactgccctaagaatcctctatgctgcacctattcatctctctctttcctctacagacatcacgttttgatacaacacagtcacttcgattactgcttgtttgaattatgacatttaaaaagtagattgaaattgaaacagtctacggttca

SEQ ID NO: 547232 - DNA, 561 bp, Homo sapiens
cattcccagagaacttccctcagaacctaattccttcccagagaacctccctcagaacctcagtgcattgccagagaacctccctcaggacctaatgygttcccagggaacctccctcagaacctaatgtgttcccagagaacctccctcaggacagaatgcgttcctagagaacttccctcagaacctaatgcgttcccagagatcctccctcagaatctaatgcgttcgcagagaaattccctcagaacctgatgcattaccagagaacttcccttaggacctcaatgcgttcccagagaacctccctcagaacctaatgcattccaagagaacctccctcagaacctaatgcattccaagagaacctccctcagaacctcaacgcattcgcagagatcaagacctctacgcgttcccagagaccctccctcaagacctaatgggtacccagagaacctcccacagaacctaatgcgttcccagataacctccctcagaacttaatgcattcccagagaccttccctcacaacctaatgcgttcccacaggacttcact

SEQ ID NO: 547233 - DNA, 562 bp, Homo sapiens
aattaaagaaaaatacaaatcaggaagatttgattttatgcagctaaagtcttaaaaaaatcactaatatttataaagctgctttcaatatttgcagattttaaggagtaagatttccaaataattggaaaatgaactcataacatatcatgcctatgtgaatatcctgattgcagtttaaagctatttttaaatgtaaaatatttatagaagaatatgtcattgtcttactgcaggaggagccagtattgatagaatgttcttggaatgagtctgagctaatacatttaaaagattaagaaaatctataaaaatatgtcatcattttggaagaattgccaagtaaccagagttattctcaaataaagtacatgcactcaatataaattttctgaagcttagttgtrtattttagggattattaaattttgatcagaggtgaataaaaacatattatagcaatatatatcttcccaaaagaattgaaagcaggaacttgaacagatattttttacacccatgttcatagcagcattatccacaatagccaaaaggtaggagc

SEQ ID NO: 547234 - DNA, 847 bp, Homo sapiens
agggagaagacgtcaaagacccttgcgattgatttcacccaaactgatttcatgtaaaccttagaaatctttggtctatttcctccaagaagtatctgaagccatgagttggtagaaagcaaaagtggggacaattttcagtaacattcatctcagtagatcctggcttgaaagttgcctagtttacacaaaactttgaacaagtcagagtaccttaaaactgggagaaaaaggtgaactctctcacattctgctttataatcattttatatttcttcattcagtcagtaatttatttgttatatgaatttttaaaaatggcaagaataagcccctctgtagaatcctgtgacatgatgagtgaggcattattcggcttctgtagcctcctgcacttgattataggctgaaagtgaccacatagagggtgtgctggaggttaatttgtcaataacatttcttaatagtggtaataaatcaattaccttggcatagtratatttaaaataaagatttaactgtaaagatacttagcaatatttcatgtgaaagagaatttaaacagaaagagaattaaacgccttgacatagcaaggcgtactggatacatgtacaagaatcttgaggattgggctaattattcctgatatgatgaggaaacacatatcatatgtaaaatgatgtgcctactgtgtatgtctattaaattttaaggagttctttatagagtgctaacttattccaaagcttatagacttaccttttcaatttctgcattgcctctcaagagaaatagctggattccaaattattttaaaaaaaagggattcaagattactttttaaca

SEQ ID NO: 547235 - DNA, 544 bp, Homo sapiens
aagatgcacttccctgcctggtcgtgacccaatcctgcaatatcctggtccagacccttcagggtggacaggctctgccccagcaagccacagagcagtgggcctggagaggggccctcattgaggaaggcagcacagtgtgtgtgtgctgtggcagcggtggcactcaggagggccacctggtgggggaggcayggtggttttccagggtgggatgtctgagttcctagccagatgagcagttgccaggggacagagaagccctggatcctccttggggccaaggcattgaggctgaagcctgaaggtagatgaggtgtctgtgcagaaacaacagggagaatgccattggaggggagggtgttcagggatgaggacaggagcagagttgccctgatagtcagagtcccagtggacagtgagagagatgggcccatccctgaagacccactctaactagaggatcttaggtctgggcttcagggaccatgaacccctgagatcaagcaccattgagtgtgagcttctgccaggaggaggttgt

SEQ ID NO: 547236 - DNA, 544 bp, Homo sapiens
aagatgcacttccctgcctggtcgtgacccaatcctgcaatatcctggtccagacccttcagggtggacaggctctgccccagcaagccacagagcagtgggcctggagaggggccctcattgaggaaggcagcacagtgtgtgtgtgctgtggcagcggtggcactcaggagggccacctggtgggggaggcatggtggttttccagggtgggatgtctgagttcctagccagatgagcagttgccaggggacagagaagccctggatcctccttggggccaaggcattgaggctgaagcctgaaggtagatgaggtgtctgtgcagaaacaacagggagaatgccattggaggggagggtgttcagggatgaggacaggagcagagttgccctgatagtcagagtcccagtggacagtgagagagatgggcccatccctgaagacccactctaactagaggatcttaggtctgggcttcagggaccatgaacccctgagatcaagcaccattgagtrtgagcttctgccaggaggaggttgt

SEQ ID NO: 547237 - DNA, 947 bp, Homo sapiens
ttgcacttgtatcacctctggccccaccagccagggggttggggccaagagcccaggggcagctttggtcctcagtgaaggctggcccagaggctctaatctatgaccctaacctattttctgactgaaccacatcttcaccactgagaaatattccacaggacatacgcagcccatcttttctaccgtcccgctggacagtagtaactgacatgggagggtgaagccttgagttggacatcaggctccgtgtcctaggaggagggtggaccccccatccccactctgtttgcggcagctgctaacgtctatctctgtaactatttcttttttcatccctaagacttgagctttcagcagtattctctttctttaaaatttctatggcctccactttctcctcttcctctggggctaatcacgaagcttctggaagtccctcaggctgttcatggagcctgaggttgtttgtgaactgtcagtttttccaagcagacttctggctgtgtcgtgctaggcttcctgacgtctttgcctccttctccactgccttgccacagctccctccaatgtcactcttgctcatgggtctcttcacccccttttctccaggcactgagaaacttaaactcttcccaaatcctcccagaactctttattctaacagakctgcctcttctttcaggaagctatctgatacggacaatgtttgtgttccttcaaagttcatttgttgaagctttaacccccaaggtgatggtatttggaggtggggcatttggcaggtgattgggtcctgacagtggagccctgatcaatgggattagtgcccttatcagagacacaagagagatgatctctctctccatcgtatgaggctatagcaagaaggtggcatctgtaaaccaggaagagagccctcactaggaactgaatcagctggcacc

SEQ ID NO: 547238 - DNA, 971 bp, Homo sapiens
taaaacttaaagtataataataataataaaaagaaggaaaaaaaaaaaaaagaaacacgagtcagcgcctgataacactaactactgcgcagccccaggtcaaatgctaatgccggcccctgctccatcacaggctcctgacagcaccagcactcccccaggtgccagccctgccactccagagacccccgcacccagtccctcatggccctgaggctcagtttccccactggtaccagggagtcttgtcctcgccccaccctccagggaacagatctgactgtgacagacgctggtacacgtgccgtgaaaacacacgacagctgccttgattcctaacatataaatacaacgggctttgtgcttctcgccagagcaagtgacataggcaggctcacctcccacagcacgccctaccaggcatctcagccggggcacctgagccaccgcaaagaggcaggtgccacccgagccaggcctcccaggaggctctgactgcagaattcttaaagcattcctccctaccgagtgccgtggaaatccaggctcagaacagccagctgaggttgcttccgctggagtcccaggagactctttaacctcagcttgctggtttactccaattatttttaaatgagccaaaggccgagatcctctccagtgttctcaggaaggctgccattgtccataggaacagagcttactgagttatcacatccagaccctgcatccacaccaaggcacactcagaggaccccagaaaacatcactggaccagggcaggccagtgacaagggcaggccagtgaggtgttccgrgtacaaacatgaggggctacgcaagactcaagctagtctgggggtctcctaagatcgtgcacctggactcctgacctgactcacctagacccagccccgctgggaaataatcctttccttttcttattttttggggacagggtctggagtgca

SEQ ID NO: 547239 - DNA, 971 bp, Homo sapiens
taaaacttaaagtataataataataataaaaagaaggaaaaaaaaaaaaaagaaacacgagtcagcgcctgataacactaactactgcgcagccccaggtcaaatgctaatgccggcccctgctccatcacaggctcctgacagcaccagcactcccccaggtgccagccctgccactccagagacccccgcacccagtccctcatggccctgaggctcagtttccccactggtaccagggagtcttgtcctcgccccaccctccagggaacagatctgactgtgacagacgctggtacacgtgccgtgaaaacacacgacagctgccttgattcctaacatataaatacaacgggctttgtgcttctcgccagagcaagtgacataggcaggctcacctcccacagcacgccctaccaggcatctcagccggggcacctgagccaccgcaaagaggcaggtgccacccgagccaggcctcccaggaggctctgactgcagaattcttaaagcattcctccctaccgagtgccgtggaaatccaggctcagaacagccagctgaggttgcttccgctggagtcccaggagactctttaacctcagcttgctggtttactccaattatttttaaatgagccaaaggccgagatcctctccagtgttctcaggaaggctgccattgtccataggaacagagcttactgagttatcacatccagaccctgcatccacaccaaggcacactcagaggaccccagaaaacatcactggaccagggcaggccagtgacaagggcaggccagtgaggtgttccgggtacaaacatgaggggctacgcaagactcaagctagtctgggggtctcctragatcgtgcacctggactcctgacctgactcacctagacccagccccgctgggaaataatcctttccttttcttattttttggggacagggtctggagtgca

SEQ ID NO: 547240 - DNA, 971 bp, Homo sapiens
taaaacttaaagtataataataataataaaaagaaggaaaaaaaaaaaaaagaaacacgagtcagcgcctgataacactaactactgcgcagccccaggtcaaatgctaatgccggcccctgctccatcacaggctcctgacagcaccagcactcccccaggtgccagccctgccactccagagacccccgcacccagtccctcatggccctgaggctcagtttccccactggtaccagggagtcttgtcctcgccccaccctccagggaacagatctgactgtgacagacgctggtacacgtgccgtgaaaacacacgacagctgccttgattcctaacatataaatacaacgggctttgtgcttctcgccagagcaagtgacataggcaggctcacctcccacagcacgccctaccaggcatctcagccggggcacctgagccaccgcaaagaggcaggtgccacccgagccaggcctcccaggaggctctgactgcagaattcttaaagcattcctccctaccgagtgccgtggaaatccaggctcagaacagccagctgaggttgcttccgctggagtcccaggagactctttaacctcagcttgctggtttactccaattatttttaaatgagccaaaggccgagatcctctccagtgttctcaggaaggctgccattgtccataggaacagagcttactgagttatcacatccagaccctgcatccacaccaaggcacactcagaggaccccagaaaacatcactggaccagggcaggccagtgacaagggcaggccagtgaggtgttccgggtacaaacatgaggggctacgcaagactcaagctagtctgggggtctcctaagatcgtgcacctggactcctgacctgactcacctagacccagcccygctgggaaataatcctttccttttcttattttttggggacagggtctggagtgca

SEQ ID NO: 547241 - DNA, 643 bp, Homo sapiens
cctcctgctctcagacgcaatcttctcctccaggcatggatgtgtgtctgcaactgggcatccaggctgtttgccccctaatgtgctgccccgaacgggctcttaacaggtgggcaggggttgaggggaccaggaggtggctccaaagggtacagcaaggaaagcttttaaagacagctgttgtgctccaggctctccatgccaccacctgccctagcatttattaatagtgttagaattacaagtttatgaaatgaaatataaataaagtttgatttctgaaacttctcacctttttgaactccctaatgttagatggtgtttttgaggctatcctgaaaatctcggatagttgtgtcttttgttgtggttgtttgtgtggctgaattaccatcgagtcatctgttattggaaacytttcaggtatggcttttagaagaccttgacccactcttgcctgttttgactctctggtttattgtggaaagagggatgatgtaggctcatgtctccggcagatcaatcaccttttgccatcaaggatttggcatcagagtttccaagaattatgtgtgcaaattgacatgctggtactttagctaatctgggtgtcaaaacagaatgccatagactaggtgtagca

SEQ ID NO: 547242 - DNA, 937 bp, Homo sapiens
gtgctgaaaggtgacatgaaacaggtcaccatggttcccagattggtgggaagaattcaggtaccacttaaaatggaaaatatcctgtaatgagaatggagctaaaaaccttaccattttcttcctcccttcaaaattccataatacaatggcaaaaagtttcctgtgcggtgctttgcatgagctacaacaaatgttggtctagaaggactaaaaaaagaatttgcatgttttatatatgtgaatataaataatgtaagtataaatatgaatataactataaatacgtagcagaaattgcaaaggcgtttctaaacacatttaatgtggtaacaaagcttatgcaagaaagaatggagagcacggccttccttcacgctgggctcacttggtgactgggcataatggacaggtctgggcaagtcagccaagacgtgagtcattgtttaggttttccttggaaacaaaagctcctgggaatttgacatcaagtgtttgccagactctgcggacttgttagtctcctgcagggccactaacatcgcttctaagatgattccctgagaatcagccagcttcctccgcaaagacttgccctgagtgctaaccagcatggctttgcagagagaagggaatttgggacatgtctcagggagtcattcatccaacattaagacagtgttaacagggaaattgtgtgtgtgygcaaccagacatcacctgccttccctgcagggagcttcgacagctgagaaaatgtttataaagcattttgagctctcactggggtggtactgtagaaaggcaaatctttgatatgactttctcacgtctgtcaactcttattattaagcagaggttgcccctgcctttctcaaagttccaatcatggaaactaattattaggagttgcaggttccatttttcacctacccag

SEQ ID NO: 547243 - DNA, 624 bp, Homo sapiens
ttcttcctgccctgattcttctcgctgttgcttttcactgcatccctgagctctttggtaactctacctctcaccagtttttgcaatttgctgtagacttcaaaatcctggctctacctctccttcctctgtagctgtatttccctgcaaagttggaagccaaccaagatcaagtttccttaactctttttctttcaggggcctggagctgaactcttctgacctacrtaccagaaaggctgtatcttatccttcctcaccaacatctgaaaagttcccccagcagactgattttaggtccctttctgaactagaatctgacaaagacgccacacagttttcagaaactctcaccatgcaacagattttcactatcacacagctggtctgcatttggggccacctctgctttctgagttccaacacaatggatttttgtgggtgtctaccctctttttgctccatgcccatgtcatctttctcctgttgctttctgtgttctgcacttctgcattctcctctcttttgggagaaaattctcttttcttccctctctatgatgtgttatttttttctactcagcctgccgccttctcttgttcctgccaccctttctgctctgga

SEQ ID NO: 547244 - DNA, 558 bp, Homo sapiens
cacacaaatttatttatctgcaggtcttatttgatttagcagagcaccaaatgttccaaaggaagaataatatagtggtgattataattggagtgcttttatagatgtaaggaataagaaagctcatgagaacattttctagtttgtttatttaaataaggaatgaatgttgccttgaatctcaaaaatgataacttatttccagtctggtaggcagagtaaaataagtcacatgtttttgaatttcaactgagagtttcattctgttttgaatttttaaacatgaccttcagrgagtgaaaagttcaaacaaattcatttaatctcagcccaacagttagatattaatatacctccaataattttactaatactaatcctgtgtatttctttgtaaaaagaaataaacttctttatatatatacgtgtatttttctgttttcacgctgctatgaaaaactgccaagcctgagtgatttacaaaggaaagaggtttaatcaactcacatttccacagggctgggaaagcctcaggaaacttacaatcttgccagaagg

SEQ ID NO: 547245 - DNA, 1479 bp, Homo sapiens
tcagcttccctacttttgggattttggggacttgaactggcttcctggctcctcatcttgctgacagcttactatgagacttcaccttgtgatcatgtgagttaattctaataaactgcccttcatacatacgtgtatcctattagttctgtccctctagagaactctcactaatacacagtgtttttacgttttgggctcagaatacacagatcatcaggtttactgcattctcttagcatgtaggagtctactataacatttattatacagaataaaaagttaattttattggtaaaaaagtatttctgatactaattatattaattcccaaagcttcttttggaactgatatgtcaatagttaaagcacttatagtagtcatacctgaaatgtacctttcttaatcagaatgctagatgacccgtcctggcctgttaatttatgattagcttaacaagtgttttttgccttatgtatagcttagaataacacatagataatatcacactctctatgttaaagtatcttaaaagtaaattacaacatcataattctaatcaagaaaaatgagagtaagcaaaatcacacaaaattgaaaacaaatcagttacagagagtgagaaaattggaaaaaaaacgagataacaagccttacaacattatgcaaatgcatttaaaacctagaaaatattatttaaaaaatatatatttataaatgatcaaaattgactttaagtagtaaaagaaaatggagcaagaagcatagaaaatcctgagaaaattattgaaaaactgtcttctaaaattaaaaaaataacaaaaatgacatggtagtctcacatcttttactggttcattagttcataactttaaaaagcacattattcttatgtgatttgtagatcaggagcatggagaaataagacaaacaccaaaattctttattttttggaagataatacatttgacacaagtagcataaaaaatacttatcaaatttgatctattaatctttataaaaaatcctgaattaaagtatgaactcacaggacttagctataaattaaaagaataatacaacatagctaatcaaggttctttataagaaggtgagggtgatacaaataatcatcaatcttttaatttaaaaaaacacaacagagaagtaaaaccttgtcatcacttaaaacagtgccagtttctggctatttataagcaaaaatattgaaactggatcccttccttacatctyatacaaaaattaactcaggatggattaaagaataaaatgtgaaacaccaaaattctttattttttggaagataatacatttgacacgagtagcataaaaaaacttatcaaactcaatttattaatctttttattacaaaatcctgaattaaagtatgaactcacaggattcagctgtaaattaaaagaataatacaacataactaatcaaggttctttataaga

SEQ ID NO: 547246 - DNA, 1479 bp, Homo sapiens
tcagcttccctacttttgggattttggggacttgaactggcttcctggctcctcatcttgctgacagcttactatgagacttcaccttgtgatcatgtgagttaattctaataaactgcccttcatacatacgtgtatcctattagttctgtccctctagagaactctcactaatacacagtgtttttacgttttgggctcagaatacacagatcatcaggtttactgcattctcttagcatgtaggagtctactataacatttattatacagaataaaaagttaattttattggtaaaaaagtatttctgatactaattatattaattcccaaagcttcttttggaactgatatgtcaatagttaaagcacttatagtagtcatacctgaaatgtacctttcttaatcagaatgctagatgacccgtcctggcctgttaatttatgattagcttaacaagtgttttttgccttatgtatagcttagaataacacatagataatatcacactctctatgttaaagtatcttaaaagtaaattacaacatcataattctaatcaagaaaaatgagagtaagcaaaatcacacaaaattgaaaacaaatcagttacagagagtgagaaaattggaaaaaaaacgagataacaagccttacaacattatgcaaatgcatttaaaacctagaaaatattatttaaaaaatatatatttataaatgatcaaaattgactttaagtagtaaaagaaaatggagcaagaagcatagaaaatcctgagaaaattattgaaaaactgtcttctaaaattaaaaaaataacaaaaatgacatggtagtctcacatcttttactggttcattagttcataactttaaaaagcacattattcttatgtgatttgtagatcaggagcatggagaaataagacaaacaccaaaattctttattttttggaagataatacatttgacacaagtagcataaaaaatacttatcaaatttgatctattaatctttataaaaaatcctgaattaaagtatgaactcacaggacttagctataaattaaaagaataatacaacatagctaatcaaggttctttataagaaggtgagggtgatacaaataatcatcaatcttttaatttaaaaaaacacaacagagaagtaaaaccttgtcatcacttaaaacagtgccagtttctggctatttataagcaaaaatattgaaactggatcccttccttacatcttatacaaaaattaactcaggatggattaaagaataaaatgtgaaacaccaaaattctttattttttggaagataatacatttgacacragtagcataaaaaaacttatcaaactcaatttattaatctttttattacaaaatcctgaattaaagtatgaactcacaggattcagctgtaaattaaaagaataatacaacataactaatcaaggttctttataaga

SEQ ID NO: 547247 - DNA, 550 bp, Homo sapiens
tagcaaatgggaattttattatttaatcatctatatttctaggctatttgtgttcctgtataatagcatgtattatttttatgatgaaagcratacatatttatatattattaaatgtatataatatatatttttatataaaaatatatatttaaagatgtatatttatttaaaatatatttatattttaaagatatatatttaaaggtgagaatggtcaagaatgccaagtgctgtacaactattatggaagcttaggaataaaaaggtttcattacatttagcagaataaagtcttattaaaggttatgatctcctagtagaaaaatacactcagtttaacaattgtgcctgtgcctgtcataatttaatatgtatttgttaatttaattcaacaaataaaggatttataaatactaaaactatagaattgcatacatgtctaatatttaggcaaataactctatgagttttcagaaagaaaggttgttgcttacttcaaagattatatcacattatggaggagcatgtccacatgaatttgatgggt

SEQ ID NO: 547248 - DNA, 355 bp, Homo sapiens
ggagtatagttgattgcagggcccttcccccacacccaggtaggggcttcattgtccccacaagttacttatctcaagtctttagggaaatgaaaaaccactctcctctaacagaaggttagttgctaagtatacaattcagcatcctctgggtgttcaggtaagtctgaatttaagttccagaaatgagtgagattcctaggatgactctgaattatcttgacttccctgaatgcttctggctaaaaaccaagctgggattattgatgtgattgtgaatctgrcccatgtcctgggaatgtggattctgctgcatatgtcaattggtttggctctttttttttttttttttttt

SEQ ID NO: 547249 - DNA, 1571 bp, Homo sapiens
ttaaaaagaagagagtttgagaccagcctgggcaacacagtgagaccccgtctccaaaaaaaaaaaaaaaaaaaaggaagggaactatttctgtgcctgagaatggctgtgcttgcgagagtccttctgtatcagaaagcaatgactttttacaggattgcaataatacccggaacccctaaaagaccctggaactggcacaagggtgcctataatttyaatgcttaagagaggtcctgaaggcatgtcactaacacaatgattagagaccatttcttaccacacatcagagagtcttcatgctttggtctcctaccttagagaaagcactgactccattcatcccaaggactgaaataatggtgctgatgaagatgaggcccccaggaataactgcagctatagtgtattcatcacttactactgatatactgattgtcactgtgagttaagtatttaatacagcgatcagcctcatgtgatagacaagaaaaaggagacagagaggctacgtaacttgccccaagtcacacagtaagagctgacacctgatcccaggaagcctggaaccgtgaacactaagtagcctctctactgatatctgctatcatcttaatccagaaaccaccctgtaagtagttataattatctgcaagttacagataagggggaaaatagaattaagaaaggtcagatcacttgtccaactagtaagctataaagccaggagtcaaaaatccaggtctccaacctccacattctatgccttttcactacactgcactcgagggtggtctgaccaaccaccacgggaccaaccaccgtgggacttccatgtagacagctgttcccaggaccagaagaaataatactgggccacagggcacacaggcaatgaagagtcaacacacatgaactagagaggagtcggaggtaactccatgccatgcaggatctgccatctgctgccagcttcatcattctcagacagaaccctcatcctgccacatcctgcttgacaaccacacacgtttccttatcatccactgcttcatgcctcccatcgaatttccagtccctgactctggccacccagcttcatcccactttccctgagataactgccctccaaagtggccccacagcctgtgggcacattccactccctcgggcctgggtgtggttccccacacctgagcgctcctcctcccctctccagccttattccagaaccccgcagaagacctgccttcttcacaaagcctccatctcttctcgtcctttctgagcccctccacctcctcactcctctgcagttccaaacaattcaatccttattcatatccagacagtactgtttgcattgtttctgtttctccaatggaaaattcctcaggggaagaaccatgaccaatcctcaggagatgagggtagcagagggcttcagagcacaggcttgggagttggactgagattaatcctgactctgccacacacttggctgtccaattcctagttaactcccctgccaatggtgataaagacagtaccaactgtctagggtatttcta

SEQ ID NO: 547250 - DNA, 1627 bp, Homo sapiens
gagtattagtcctctttaaatatacatattctatcctcgattcttttttcccactccaataactctcctcaaataagtctggacacttagctccaatgatcagggaggattcaatttttttgaaggcagaaatttatgcaattttgaagaagaaagcaaagttgcaaatacgaaattaggtatgaaagtgaaggtttactaagaataagaaaagaaaacacaacacattggtgggtaggtcattgctggtcctaagtgctacccaccaggccccttctaccgtcagaagatttagaccggggctgccactgctaccaaaactacgaggcctaccctcactcccactctgtcgatttccatttttcacataattgtgctttagaaaatttccccttttgcaaataatgtgcctagttagttgagagatttcactaatgcttatgggtcttttgtgcaatatttcattaagctgttgtatatcctgtttgataactacgaaaggaaatgaacacagttattacaatttaaaaaaatctttcggacaaatctttagtttcttttttccaagagttctattttcttttacatacatttctaaaccacaaccacatgtaaaaatgaattttattttaaaggctcaccattgctctgtaaaatgcacatacatttgcaagatagataaaatatagactacaaattkctctcagtagttaaaattcaattgcattgatgaaatatgggaaaaggttcattttctggtgctgtctttgggttttttgaaatcctggttgctggcttactcactaatttggtaatttgcaataggcttcccagtcattagtgcaaattagcaaggtttagctataatgtgaatattaatatcttcatttagaaccattccacgtgctttctcctggtttctaaggacaagttgttttttgaaaccttggagaaaggctatacaaaatacatgaatatgatgtttatgaaaaggcatttggtagcccatccattatttttcatctcctatgaataaaatgtcagtgactttggtaatattgtatttccaaagccccaaagactgacagacagcctcatgcacatattgtgctatattaaaggaatattggtccttggctagaaaagattttctaacccagtctgagcaataaccacttgatcacacatctcgctggagtctaagctcctgatagcagaatatgtgcctctcatttgctggttccaagccctcactcagcattctgcacagtcactggggctgtgtgccttcagctacatgacctctggggcatgctggagaaatgttgccttctgtccatgacccttttaagaccctttaatgtcttccaaagttgtcaccatggcgctctcttgctttcataattctccctgacaaccactcctcctcaatgcctgctttcactgtagtgcaataatttaagtgcatgccacagacttccactgtcagtgtatttttttctaatagaacaacactggaatttttcttacaaatacaccaaaactagtaactcatgaatttctcaaggataaccttctcagcctagtacctagtatggcttcgcctgactcaggcctcagagaattc

SEQ ID NO: 547251 - DNA, 635 bp, Homo sapiens
tggtgtaataattccaagagggaactgagaaccctaaggagaaatcaggtattctcacaccaaccagcccacgcccagaccttgcctgccttgtcccacctctggtacctgggcaccaggtcaccacctcggttctctgctgcrttctgccccccacaacccccactgctcagtaaactattctctattgagcaccactggctgactttacccaagtggtttccagatgctgggactcccagcctcccgcttccccagccatggagggtggtaggtacaatcagggaagtcattcaagccttctgtaagaagcctgccttggcatctcctggggggacatcattatcatcagtggcactatcgagtggcactgtttcatctttcagcaaaggaactgacagaaaacccggagatgcacctcctaatcgaaactgttccttttttaagttcttgtcccaactacccagttgcttctcacctctgagtaagcaccttctcccatagtaccagaaagtggagtgaactactgggggctcccagaaaaaagtgtgtgaagaggacgctgcagggatcccacgactgcctctcccatcctgcttgtgcctttctacctgtcaaagcagtgctcctggagc

SEQ ID NO: 547252 - DNA, 635 bp, Homo sapiens
tggtgtaataattccaagagggaactgagaaccctaaggagaaatcaggtattctcacaccaaccagcccacgcccagaccttgcctgccttgtcccacctctggtacctgggcaccaggtcaccacctcggttctctgctgcattctgccccccacaacccccactgctcagtaaactattctctattgagcaccactggctgactttacccaagtggtttccagatgctgggactcccagcctcccgcttccccagccatggagggtggtaggtacaatcagggaagtcattcaagccttctgtaagaagcctgccttggcatctcctggggggacatcattatcatcagtggcactatcgagtggcactgtttcatctttcagcaaaggaactgacagaaaaccyggagatgcacctcctaatcgaaactgttccttttttaagttcttgtcccaactacccagttgcttctcacctctgagtaagcaccttctcccatagtaccagaaagtggagtgaactactgggggctcccagaaaaaagtgtgtgaagaggacgctgcagggatcccacgactgcctctcccatcctgcttgtgcctttctacctgtcaaagcagtgctcctggagc

SEQ ID NO: 547253 - DNA, 747 bp, Homo sapiens
tacacatttaaattccttactatgtgtatatctcaatatggctaatgtaaatataacraaccagtgtctaaaacttacatgatctttgtgtagaagcctgagaatcagaagcttggtggtatttaattgtgtttaaaatttttatcatctaagaatttctgcttttgttgttgtttatctgtttttgttttttattgagcacagtatttggcacattttaaaaatgaacataatattttatgaataaaaaattgaataaattatcttgtgttcagctgaactgagcaatcttctacatttcaaacctatcccttcatttctcctttgtaactagatagcacaactattattattttaaatagtttgttctatgtgtgtcttctctgattgactatgatttcacaagggcatcgcctgaatccagcttcttaacagtgttgtcatcagagcccaaagagatagctgatgttcaataatgattgaatgaatttttgttcctttcagtggtgagatgaagaagtgaatgaagaatgaacaaaggccaaaatcagaggtgaagattctgattttgggttttcctgaaatatctttttaaaaatttatctcactttacttcattttgccattgcagatactttctcttcttctaggcccatctcactcttttattcccagtgtggttaacctagtcaactatggggttttccagatggagacttttctagcacttactatcatatatatgca

SEQ ID NO: 547254 - DNA, 1368 bp, Homo sapiens
ttgctagtgtctgcctatcctcgctggagcactctgacttctcccacaagatactgatggatcctgggcctcacaccccataactccctccccgggaacggagctcactctctgcccagcattggtttagaaattatagagaggttctctgattggccagtccgatcaaggtacccaagaatggctggaagcagggtttcccgaagaatgggatgatgagggcagataaaagggatgtttcttacaggcctcatgagaagctgggaaaggtgtccttgcctcttatatccacatggcagttcttagtgatataaaaggacaagccagccaacatccctgatgagcagctctccagtctctttcctctacctgctggcttaaaattgtgatccctctccacccttaagtcggagaagggcagagtgccccccagtcctccgctcagaagcaataagaacagaaaaactgcaggccaggttgagcctcactttgaacatggcaatggctgtttaacaaatgccacaggggcttcttgtgacagggacgaaaagagtgagagggccagggacgctgctgaggggttctgggaagctcaccagggcctttcaggaattgaggctgcctgactgcccggagcctggccctgagagtgggcaggtgtgctgcctgtataatgcccttgatctctaagagaaacagtggcaaaccaatcagatggcaacctcctgccaaggactccattagcccgctctggtggctgcttctgaagtggcggctgctggctccactcgctcccctgttcagagaggacatatgggccaggcagtgatcaatgagggaacatctggcacaggagcaaatcaaacagcaccgatgactaatttaggagtgttgccttgccattgttctttctgtggccccatgcaaaggtcacccagtgtggcaggctcagagaagctgctgcttcaccttcagcagtccccaggatccaacttgtttgccttaaaaatgaatcgatagcttcttctttgagggctgaaacagcagctccctatcactgaatcctgaattctcacgtgcatggtcagccccctccttgcaagcccctaggcacccctgtttcttattagccatttatcatcttgcctctgaagtctctctcttaaaaaaaaaaaaaaaraaaaagaaaaaaaaacactctactgaattcatgttctatttctgcaactgagatttttctcctttgggttcaaataaaagaaatagcaaatattaaagagcatgagagaaaaaggcacacatgcctggcccatgaatagacaagattgcctgtagttctcattttggtggtttatataatagcttcaa

SEQ ID NO: 547255 - DNA, 638 bp, Homo sapiens
aaatctgtttatctatgttaaaatttcccaaatttattggcatataactgcttgtcataatttcttattttttatgtcaggttcatagatttgtatgtcctctgtttacccatgtcttgttcatattttgttccatacgccaaatgtgtcccagattttcacattctaaaacgtttacatacacaaacacacaaccatttatacaatctatccctcaaaccaaaacctacttctcacctttcacaaacagctttacaaggtagggaacgttgttggatcctgcggtagctctctttttagaggaatcaccgtttttcatggtagctgcacaattctatattcttttcaataatgtgtaggaattgcagtttctcttcatccttaccaacacttatcttttgctttttgaaaataatcattctaataagtgtgaagtagtatctccttgtgattttggtctgccttttcctgatgatttttaatgttaagcattttttcaaawccctggtgacaatgtgtataagaccttatgcctattcaactcctttcccctctttttaaacagattatttgagggttctttgttttttctactgagttgtaggagattcttatatgttttagatattaatatctta

SEQ ID NO: 547256 - DNA, 530 bp, Homo sapiens
atcccaaagtgctcagaaggtagaaagccagaaacataaatattacagcaatcactacactgtgttaataacctttacatctacttcttatttcttttccccactaaatgcagaagtgccagtctaaggctttggcactatttgcccyttgtttactaattttattttttgcaagcatgtgttgcacaaacagctctttttactctgccttctatattacttccctttaatctccagtttcctttttctaaaaattatcccccaaatattttatctgtgctatagaggagcccaaagttgaaatgtgaaacttttccaaattgattctaaaatgtgacttagaagttttctgcatagaaattttcagaaaataatcagcagactctcagtctcttccactcaattattctaagaaatgctactgtctagccagatattgatttgtggtggagagaaaccaaaattaatttttgttacttgcaatatttagtttatttgtaaggagagtagaagtaatttacaactggatt

SEQ ID NO: 547257 - DNA, 1341 bp, Homo sapiens
tatcttgcataactgaaactttgtaccctttaatcatcacctccccatttttccctttcccaagtctctggtaaccacaattctactctctgccctgagttcgacttttttaggttccacatgtaagtgagatcatacagtatctttctgtttctggtttatgtcactcagcataatgttctccaggtgcatccttttaaaactcattgtttctttaaatgttttataaacttttaaaaatatacttcctttttttttttttttttccggagttttgcccttgttgctggagtgcaatggtgtgatctcagctcactgcaacctccgcctcccgggttcaagtgattctcctgcctcagcctccctagtagctgggattacargcatgtgtcaccatgcccggcttattttgtaattttagtagagacggggtttctccacattggtcaggctggtctcaaactcccaacctcaggtgatccgcccgcctcagcctcccaaagtgctgggattacaggcgtgagccaccgcacccggccacgatagtaacttcttagattaataaagagatttgaattgtctttagaaaaacaatagagttttgtcttacaaattgtttttagaaaatctatagagttttgttttataaatctcttggattctcctctcctacctcctacccttcaataccaggaccaaagagaagcagcagatcccaagcaccatgcactggcctattagcagggactggcagttggccatgtgtcaagtccaatcagccaccagattcttgtgaggtctgccaactaaggacgaatttcacatcttaaatgattaaaaaaaaatcaaaagaaaaatgacatgtgaaaattatataacattaaaatttttagcgtccacaaataaagttttattgaaacacagctatgtccctttgtttatgtgtagtttatggctgttttgccgtaaaacaacagagttgagccattttggcagagacagcatggtccatggtccacaaatcctaaaagatttactatctggcccttcacagaaaaggtttgctaccccctggcctaaagtagtagtttatataccatcttcaagggatttcagccttacaaaaacaaactaaattccatttaagtgaacattttgatccctccttccctttcccccttaatcgtcatctgctccaaagaactgaaaaatgatttaggcatgatttggatggaaagttatgaaataacaatatctcatctttaaggaatttggtgctcatgatttttaaaaatggacttgttaactttatgattcaaaataaaagcagaagcctttttt

SEQ ID NO: 547258 - DNA, 560 bp, Homo sapiens
cagatatggatatatgcagrtaaagggacagatgtgtttgtgggaacttgaagaagttcgtttccaattctatttactcaataaattagtaagaaagtttattagctggcaatgaaagtagtggagcaactgggaagtaatagaggagttaggttgtaaagcagattttggaaattagaaaaaagagaagaagaaatgaatagccatccaagataatgagaaagtaaaaggactatagacttctgagaatattctcatgtgtttttcaggtacatgcaacttcatgaggataggcattgagagttgggttttaccaagattagtttagccaagcatgtgctaggaagcaagagaaagacaaggaatttgaagatgtgtataactataaatattgtttatatcatattatgtgcattacattatatagctcttactacaaattatttcagttattagtttttgtctctccttccctgctacagctctttgaaaatagaaactgagttttattcatctttgtattcctaccatccagtacagattctgtcaatatgatattt

SEQ ID NO: 547259 - DNA, 560 bp, Homo sapiens
cagatatggatatatgcaggtaaagggacagatgtgtttgtgggaacttgaagaagttcgtttccaattctatttactcaataaattagtaagaaagtttattagctggcaatgaaagtagtggagcaaytgggaagtaatagaggagttaggttgtaaagcagattttggaaattagaaaaaagagaagaagaaatgaatagccatccaagataatgagaaagtaaaaggactatagacttctgagaatattctcatgtgtttttcaggtacatgcaacttcatgaggataggcattgagagttgggttttaccaagattagtttagccaagcatgtgctaggaagcaagagaaagacaaggaatttgaagatgtgtataactataaatattgtttatatcatattatgtgcattacattatatagctcttactacaaattatttcagttattagtttttgtctctccttccctgctacagctctttgaaaatagaaactgagttttattcatctttgtattcctaccatccagtacagattctgtcaatatgatattt

SEQ ID NO: 547260 - DNA, 560 bp, Homo sapiens
cagatatggatatatgcaggtaaagggacagatgtgtttgtgggaacttgaagaagttcgtttccaattctatttactcaataaattagtaagaaagtttattagctggcaatgaaagtagtggagcaactgggaagtaatagaggagttaggttgtaaagcagattttggaaattagaaaaaagagaagaagaaatgaatagccatccaagataatgagaaagtaaaaggactatagacttctgagaatattctcatgtgtttttcaggtacatgcaacttcatgargataggcattgagagttgggttttaccaagattagtttagccaagcatgtgctaggaagcaagagaaagacaaggaatttgaagatgtgtataactataaatattgtttatatcatattatgtgcattacattatatagctcttactacaaattatttcagttattagtttttgtctctccttccctgctacagctctttgaaaatagaaactgagttttattcatctttgtattcctaccatccagtacagattctgtcaatatgatattt

SEQ ID NO: 547261 - DNA, 562 bp, Homo sapiens
ttgcacagctgtcctgatgaatataggatggatgtcagctttgtcttaacatattcatatattggcctttgagtagttttttttgtggctatattggctccaacctcattggaggtaaatctttgggcagaatttaaatctgtatttcaaaaataatgtattttattcatgttttttattaggtccaacactgattcctaaagggttaataaggatggcttctctgaaaatgagattaaacatctcagatgagacctggacgtcagtggcagctgtgggaagagtcaagggaatagtgtttcaggcagagggaatggaaaattccatgtttctcagacagcaaaaagcttgctgtgtcctaaaaaccaacagaaagactgaatataagtaatatatttttcaagatcagagttttgtgcagcaattgtatcacatttaagaaggtacatagaactattcagaatgaatttgcrtaatctagatcaaagacgttcagggagaatcttttacataggacattaatgtgctctcatgagtacggctgccatacacctcccgcttt

SEQ ID NO: 547262 - DNA, 1310 bp, Homo sapiens
cgtgcagagcaggatcagagacttcctctgcccagaagctaagatatcaggcgggccaaaaccatctagctaaagggcaagttgcctttagtctagcctctaaagttcattgaaagactcctagttttcttttccacacttgaccttaaagagagagagagagagagaggaagagagagagagagagagagaggaagagagagagagagagagaggaagasagagagcgcatgcattcattgcccatttccactaagccctgccctaatatgtcagcaggagagccaaacactagcgtatgaaacagcaaaacaagattgattcactcgtaattccattcctattatatcactttcccaatgtgtttgtcttactgaacgataacacaagtagagagtgaaaaatccacagaatatacagcaaagtgccattcatgacaatgtgaattaagtaagcataataaaatcacttttatgtatgttctaataaaatcacttttatgtatgttccagtcctaattcattctgacatgcccttaatttctattttgttatttgtgaaatagaaacctgacaattcactaaatcacctcgagcagctccttttaaaatctattccatttgctggacacaaattaatttttatttaagcattgcactggatttcaacaattcaaagtttgcagtaaggaataaataagtcagatgattgcctaatgacataaacaaaaggggattcatcaaaaatatggctctgccctgactgccgtggtgcctgaaatcccacaatttgtgttgtttctttaggttaaagaatttaacaaggagatccttgtacctggcagggtccctgtcaaaatcttggaaatgaatcttggaaaatttgtagagtgtttatttgcaaagggactaattacaaaggcatggacagagtgtaaggaaagcagaagaggaaggaacccagggctagcagctgtgtatcagtcctcgtcctgagccagttggaacaagttgaagaagaggttactgagttctagaaggcaagaaatcctgcagggcaaaccttcatgaaaggattggatatttcagtacaggggcacagctagacccacagagagggagccaatggaatacatagcctgacctcagcctcctcctacctctgctctctttccaagggctttttactcttagactgattagccctcaacgagcagcacagggagctagaaagagaagacctgcagcaaagagactgatactggtccaatgccagagagggcaggccctgcaagggaattacaaggcaga

SEQ ID NO: 547263 - DNA, 1310 bp, Homo sapiens
cgtgcagagcaggatcagagacttcctctgcccagaagctaagatatcaggcgggccaaaaccatctagctaaagggcaagttgcctttagtctagcctctaaagttcattgaaagactcctagttttcttttccacacttgaccttaaagagagagagagagagagaggaagagagagagagagagagagaggaagagagagagagagagagaggaagagagagagcgcatgcattcattgcccatttccactaagccctgccctaatatgtcagcaggagagccaaasactagcgtatgaaacagcaaaacaagattgattcactcgtaattccattcctattatatcactttcccaatgtgtttgtcttactgaacgataacacaagtagagagtgaaaaatccacagaatatacagcaaagtgccattcatgacaatgtgaattaagtaagcataataaaatcacttttatgtatgttctaataaaatcacttttatgtatgttccagtcctaattcattctgacatgcccttaatttctattttgttatttgtgaaatagaaacctgacaattcactaaatcacctcgagcagctccttttaaaatctattccatttgctggacacaaattaatttttatttaagcattgcactggatttcaacaattcaaagtttgcagtaaggaataaataagtcagatgattgcctaatgacataaacaaaaggggattcatcaaaaatatggctctgccctgactgccgtggtgcctgaaatcccacaatttgtgttgtttctttaggttaaagaatttaacaaggagatccttgtacctggcagggtccctgtcaaaatcttggaaatgaatcttggaaaatttgtagagtgtttatttgcaaagggactaattacaaaggcatggacagagtgtaaggaaagcagaagaggaaggaacccagggctagcagctgtgtatcagtcctcgtcctgagccagttggaacaagttgaagaagaggttactgagttctagaaggcaagaaatcctgcagggcaaaccttcatgaaaggattggatatttcagtacaggggcacagctagacccacagagagggagccaatggaatacatagcctgacctcagcctcctcctacctctgctctctttccaagggctttttactcttagactgattagccctcaacgagcagcacagggagctagaaagagaagacctgcagcaaagagactgatactggtccaatgccagagagggcaggccctgcaagggaattacaaggcaga

SEQ ID NO: 547264 - DNA, 1310 bp, Homo sapiens
cgtgcagagcaggatcagagacttcctctgcccagaagctaagatatcaggcgggccaaaaccatctagctaaagggcaagttgcctttagtctagcctctaaagttcattgaaagactcctagttttcttttccacacttgaccttaaagagagagagagagagagaggaagagagagagagagagagagaggaagagagagagagagagagaggaagagagagagcgcatgcattcattgcccatttccactaagccctgccctaatatgtcagcaggagagccaaacactagcgtatgaaacagcaaaacaagattgattcactcgtaattccattcctattatatcactttcccaatgtgtttgtcttactgaacgataacacaagtagagagtgaaaaatccacagaatatacagcaaagtgccattcatgacaatgtgaattaagtaagcataataaaatcacttttatgtatgttctaataaaatcacttttatgtatgttccagtcctaattcattctgacatgcccttaatttctattttgttatttgtgaaatagaaacctgacaattcactaaatcacctcgagcagctccttttaaaatctattccatttgctggacacaaattaatttttatttaagcattgcactggatttcaacaattcaaagtttgcagtaaggaataaataagtcagatgattgcctaatgacataaacaaaaggggattcatcaaaaatatggctctgccctgactgccgtggtgcctgaaatcccacaatttgtgttgtttctttaggttaaagaatttaacaaggagatccttgtacctggcagggtccctgtcaaaatcttggaaatgaatcttggaaaatttgtagagtgttyatttgcaaagggactaattacaaaggcatggacagagtgtaaggaaagcagaagaggaaggaacccagggctagcagctgtgtatcagtcctcgtcctgagccagttggaacaagttgaagaagaggttactgagttctagaaggcaagaaatcctgcagggcaaaccttcatgaaaggattggatatttcagtacaggggcacagctagacccacagagagggagccaatggaatacatagcctgacctcagcctcctcctacctctgctctctttccaagggctttttactcttagactgattagccctcaacgagcagcacagggagctagaaagagaagacctgcagcaaagagactgatactggtccaatgccagagagggcaggccctgcaagggaattacaaggcaga

SEQ ID NO: 547265 - DNA, 576 bp, Homo sapiens
ctgcctccctgctttaattacttccttgaatcaggtatagaaagcaattgattcatctattgattatggtaaacaagcaccatagggagcttcattgccatttcatagagggcttgtggcaaaaagggatgtatccatccttcagttyataggacaaagaagcccatgcatgaagtcaccatagcacttagagaccagtgtccaccaaccatgaaaaccaaataggctgcaattccttttgattctgcacctccctaagggggcatgaagtttctccaaagagagtttgaaggccttgtctgcccagatctggatgcaaagctcagttaggttcagctctgaggctctgacaccacaggctcaggagtttgcttacattactctgagatcacaggtcaccctccgagatcccagcgaattcactctcccacagtttaccccaggagtccaacaggcagagtgtgagagggtgaaagatgaatctgggtaaagtcataaccattcccagaaaaagaatcccaagcatgtactcagctcaaatatgaactgggggacatccaatgagcctgtcacatg

SEQ ID NO: 547266 - DNA, 570 bp, Homo sapiens
gaaattaacatacaaattacaatgatagattttatttgaagagtttwattttttcctgattataaaaatagtttctttccaggcaaataaaatgtttcatgcactgaaataatcaactgccacctaattttttttaaaatctttcttttcatacaaaatttcaaattatgaaaaaaaatgcagagtgccagttttttgtttgcatgttttttgtttactcatttaatgttttaacaaagacctcaattctatttactaaattttaagtgtattgattttctagagggtatcggaacaaaatactacacattgggtagcttaaacaacagaaatgtattgtgtcacagttcgggaggacagaggtccaagatcaaggtatcagcatgggaggttcctactgaaggttgtgagggatggtctgtaccattcttctctcctagcttctggtagcctcaaatgttgtttgacttgtaggtggtgatctccctgtgtccctgtgaaagaacggagtgatctttctatgtgtgtctgtctctatgtccaaatttccccttttctatgaggaaacag

SEQ ID NO: 547267 - DNA, 703 bp, Homo sapiens
taaacttgccagattcctcttcacctgaccccttaggcattgttccattgtgacaacccccagtaaagtatgagaggccctatttatccacagccttgacaacaaagtgtattctcaaactcttttttctctgcaccactctggtaggtgacaatagtagatcaatgtggtctttcttcgaatttctttatttcggtaagattgaacttcctttcatgtgcttaatatttcttttcagtgaaccatctgttcaagttctgtgttttcttttgggttgggttaagactttttcttctaatgtttctacacctttttatgtatttgggagattagctctttgtctgcaatgtaagttataaatattcattccaatatatcaggagtttcttcacattgcttttgaacttttataaaaatttcgtgtaatataattgttaaacttttattttaaggcttctggattttgagtcataggaagatcttccccactccaggtttataaagaaatttgtattattatctagagcttgcatggtttcattttttatattcaaatctttggttcatttggagtttatcccagcaggaacccttctggaagggaatatttgcagagatttcccagatctatgtgcccttctgcttcctctatgcttactgctctcacctgggccacccmtgaaggtgggcttgctgtttcagc

SEQ ID NO: 547268 - DNA, 589 bp, Homo sapiens
agtcttggaaatattctcagcacataaaacacatccttgtgttattttatgaatcattttctggaagtgtgtgggcttcagagtagggccacactaggtaagcaagrgcatctctcctataatatgtctcctcatgtagatgtcttaaaattaaataaaccatggccttagggagtagaattgttccataagcatcagttttcctgggtctgtttttatcaaactcccagtcctgcatgtgctttttgtcttgctccatggtccaattgccagagaaataggctatgggttgtggaatatctcctagcctttggatcagccagactgtgccttgtttctcatggacatagagtttgaacttctaggggtccatcaatcccaacactagggctgatagcagtttttctttgttggcataaaatgtctgttgacattcatctgtccagggcaggggctctgagttcaatctttttaaagcttcataaaatggtttagccattagccccaaattagaaatccaaatttgacagaagccagccattcctaggaatccttgcaattgccttctattatttggagttttgatggt

SEQ ID NO: 547269 - DNA, 589 bp, Homo sapiens
agtcttggaaatattctcagcacataaaacacatccttgtgttattttatgaatcattttctggaagtgtgtgggcttcagagtagggccacactaggtaagcaagagcatctctcctataatatgtctcctcatgtagatgtcttaaaattaaataaaccatggccttagggagtagaattgttccataagcatcagttttcctgggtctgtttttatcaaactcccagtcctgcatgtgctttttgtcttgctccatggtccaattgccagagaaataggctatgggttgtggaatatctcctagcctttggatcagccagactgtgccttgtttctcatggacatagagtttgaacttctaggggtccatcaatcccaacactagggctgatagcagtttttctttgttggcataaaatgtctgttgacattcatctgtccagggcaggggctctgagttcaatctttttaaagcttcataaaatgktttagccattagccccaaattagaaatccaaatttgacagaagccagccattcctaggaatccttgcaattgccttctattatttggagttttgatggt

SEQ ID NO: 547270 - DNA, 519 bp, Homo sapiens
ggtagaaaatgatattccgccagacatggagggaaggagctacgagtagccgccgagaggccgcggagccagcgacgacggagccagcgaccaccgacccagctgagccgccgcccccgccgcgcccccatggcggccaccaaggacactcatgaggaccatgatacttccactgagaatacagacgagttgaaccatgaccctcagtttgagccaatagtttctcttcctgagcaagaaattaaaacgctggaagaagatgaagaggaactttttaaaatgcgggcaaaatggttgcgatttgcctccgagaacgatctcccagaatggaaggagcgaggcactggtgacgtcaagctcctgaagcacaaggagaaaggggccatccgcctcctcatgcagagggacaaraccctgaagatctgtgccaaccactacaccacgccgatgatggagctgaagcccaacgcaggtagcgaccgtgcctgggtctggaacacccacgctgacttcgccgac

SEQ ID NO: 547271 - DNA, 597 bp, Homo sapiens
cagattctagtttaatccatccacctcattttaaagattttaaaccgaaagcaaaaattaaaaaaaaaaagagagagatatttatttaggatgtcacaggaagttgttggcagagctcagaagtacacggtgctagacttttaggtccagaagagcagtgactatctggccatctcaaagttgaatctcaagaacctaccatacagctgagcacaaaatagaccatcagtacatactggtttgaggaagaaatattcaaatgaaagactagcaccagaatcaggatgtagctgaactacttaaatcccaggatgcaatttatatctcagcactaaaaactgcccttttaaatttagccatcagaactcagaaaaaaagattataaaataaaaagtaagtccttcattgcatgttaaaattagagaaattagagacatagcatttaagtttacaaaatcatcttacagctaagtttttattcaacttgrttttgttttccaatttagtttcaccatctgcatttaagtgacccttccatttggcaaagcagatatttattttagaacaaatcaggagactttcacttccaggaaaaaa

SEQ ID NO: 547272 - DNA, 622 bp, Homo sapiens
catgtgagcacagagagatttttccagtatgaaaatgttgagttaaagtgttctggtgccaaggtcagtagtagttactgtttctcagggaaaagcccaactcaagggtatctactgttcaaccccattcctgtatcccatggctcttcctgaggtcattcccaaggagagcaaaagcctcatactcttatcttgtaaagagtcggaaacctgtggtaaaacaacatggcacatgtatacctatgtatcaaacctgcacattgtgcacatgtaccctagaacttaaagtataataaaaaaaagaaaaaaaacacgcaaaggaatattaatctcttggaggaaatctgcctctagctggaatcccagaagggttcttcccccagtcccccatcccatggcccctttgaaatcccactcttgrtttgttcacctctagtctctccttagtaagctttctctagcataagaatgtcctgctataggaacaactgctgatgtggtgagaagatatactctgtaacatatgcgttctggtggagagataaaagagggtttggtttcctccatcctctttagagattgggttgaccagcttgtcccagatttccctggggaggtgacc

SEQ ID NO: 547273 - DNA, 534 bp, Homo sapiens
tgcagatttgttacgtcggtatacacgtgccatggtggtttactgtacccatcatcccgtcatctacattaggtatttctcctaatgctatccctcccctacccccgaccccctgacaggccccggtgtgtgacacaggccctccctgtgtccacgtgttctcattgttcaactcccasttatgagtgagaacatgcggtgtttggatttctgttcctgtgtcagtttgctgagaatgatggtttccagtttcatccatgttcctgcaaaggacatgaactcattcttttttatggctgcatagtattccatggtgtgtatgtgccacattttctttatccagtctatcactgataggcaattgggttgtcatagtatatatttttaacagcaaattaaatgtagacagattgtgtaactagatccgcaattagaagaaaatgattgaatcttcaggtaggacagacaaatcatctttatatgtgtataatgcataaatacatagatataagtaaatatcctgtgtgttccttt

SEQ ID NO: 547274 - DNA, 1556 bp, Homo sapiens
gacttcttgggctcaaatgatcctttcacctcagcctcctgagtagccgggactataaggcaggcaccaccatgcctggctaattaaaaaaagaattttttttttgtagcaatgaggtctcactatgttgtccaggctgatcttgaaygcctggactcaagtgatcctcctacctcagcctctcaaagtgctggcattacagtcctgaaccaccatacctagccagatttctattactttgacatggtcctggatacttcatctatgtgtgcaaaatttcgtacttatctcttaaatctggagaaaaatggccaaatttggtatagttgaatttatcatggggtgattaataagtgactaaagattgaccttcaaggatctgaagatctgaccagtgtagatttatagtaattatagtaattacatggtacctccaggtattttctatacattgccgtagttagctatgaaaggatgtaaagaataaaggcaattgactattttaaagaaattaacctcagaaggagattcttcacctaaatgtccctgcaaatattattgctttatgctctgagttagctgaaaatgagtttactatgcctggtgtaaacacttgcaccacccacctgtgtcaaagaacttttcactaactgcatcatgactgattgacgtcagtctacttggcaaccaagtgagccacttagaagaaggctccccttatgaggttaatttctttaaaatggtgaattgcccttattccttatgtcttttcataactgattacacaaatgtatagaaaatacctcttgagatacaatacaatctgtaactagtcatcagagaataacacgttattgtaacacagatttagcttggccataaagggcatatttacatacacattgaaaacaactttaataaaatgaaaaacatatatccttggattcttagcaatttaacagcaatgctctcaggggatcaagctactatttattgactccccctgtgtgccttacacgtaattactgaccctcacaacatccctgggagttagtgtcttacaggagacctttgacatttgtgagaggacatcgtgaatattttccaagtcctcaatccaaaagtgtggacatagctgttggttttcctgaattgtatttctttcaagaatcaaatgttgcttgtgaatattctcatgtaagattaaaaaaaatcttttcctgactcttagaactttagttttatctctgctttgagagccactttaataagcaaactaaaatcactctacagaaaggctgtacagcaaatgagtagagaacaaaagctggctaaactgggcagtcagctaagatcactcagtgtctgagaatttgttctagaaaatcaccctccgagaatcatgcagattgtgcttaggcttccttcatatattcatactctcctcgggtgaacataaattggcacatttataaggaaattttattattatatactcaaatatttttaaacatataaatagtttgtcttgttaattctacctcttggaatctatc

SEQ ID NO: 547275 - DNA, 1556 bp, Homo sapiens
gacttcttgggctcaaatgatcctttcacctcagcctcctgagtagccgggactataaggcaggcaccaccatgcctggctaattaaaaaaagaattttttttttgtagcaatgaggtctcactatgttgtccaggctgatcttgaatgcctggactcaagtgatcctcctacctcagcctctcaaagtgctggcattacagtcctgaaccaccatacctagccagatttctattactttgacatggtcctggatacttcatctatgtgtgcaaaatttcgtacttatctcttaaatctggagaaaaatggccaaatttggtatagttgaatttatcatggggtgaktaataagtgactaaagattgaccttcaaggatctgaagatctgaccagtgtagatttatagtaattatagtaattacatggtacctccaggtattttctatacattgccgtagttagctatgaaaggatgtaaagaataaaggcaattgactattttaaagaaattaacctcagaaggagattcttcacctaaatgtccctgcaaatattattgctttatgctctgagttagctgaaaatgagtttactatgcctggtgtaaacacttgcaccacccacctgtgtcaaagaacttttcactaactgcatcatgactgattgacgtcagtctacttggcaaccaagtgagccacttagaagaaggctccccttatgaggttaatttctttaaaatggtgaattgcccttattccttatgtcttttcataactgattacacaaatgtatagaaaatacctcttgagatacaatacaatctgtaactagtcatcagagaataacacgttattgtaacacagatttagcttggccataaagggcatatttacatacacattgaaaacaactttaataaaatgaaaaacatatatccttggattcttagcaatttaacagcaatgctctcaggggatcaagctactatttattgactccccctgtgtgccttacacgtaattactgaccctcacaacatccctgggagttagtgtcttacaggagacctttgacatttgtgagaggacatcgtgaatattttccaagtcctcaatccaaaagtgtggacatagctgttggttttcctgaattgtatttctttcaagaatcaaatgttgcttgtgaatattctcatgtaagattaaaaaaaatcttttcctgactcttagaactttagttttatctctgctttgagagccactttaataagcaaactaaaatcactctacagaaaggctgtacagcaaatgagtagagaacaaaagctggctaaactgggcagtcagctaagatcactcagtgtctgagaatttgttctagaaaatcaccctccgagaatcatgcagattgtgcttaggcttccttcatatattcatactctcctcgggtgaacataaattggcacatttataaggaaattttattattatatactcaaatatttttaaacatataaatagtttgtcttgttaattctacctcttggaatctatc

SEQ ID NO: 547276 - DNA, 1556 bp, Homo sapiens
gacttcttgggctcaaatgatcctttcacctcagcctcctgagtagccgggactataaggcaggcaccaccatgcctggctaattaaaaaaagaattttttttttgtagcaatgaggtctcactatgttgtccaggctgatcttgaatgcctggactcaagtgatcctcctacctcagcctctcaaagtgctggcattacagtcctgaaccaccatacctagccagatttctattactttgacatggtcctggatacttcatctatgtgtgcaaaatttcgtacttatctcttaaatctggagaaaaatggccaaatttggtatagttgaatttatcatggggtgattaataagtgactaaagattgaccttcaaggatctgaagatctgaccagtgtagatttatagtaattatagtaattacatggtacctccaggtattttctatacattgccgtagttagctatgaaaggatgtaaagaataaaggcaattgactattttaaagaaattaacctcagaaggagattcttcacctaaatgyccctgcaaatattattgctttatgctctgagttagctgaaaatgagtttactatgcctggtgtaaacacttgcaccacccacctgtgtcaaagaacttttcactaactgcatcatgactgattgacgtcagtctacttggcaaccaagtgagccacttagaagaaggctccccttatgaggttaatttctttaaaatggtgaattgcccttattccttatgtcttttcataactgattacacaaatgtatagaaaatacctcttgagatacaatacaatctgtaactagtcatcagagaataacacgttattgtaacacagatttagcttggccataaagggcatatttacatacacattgaaaacaactttaataaaatgaaaaacatatatccttggattcttagcaatttaacagcaatgctctcaggggatcaagctactatttattgactccccctgtgtgccttacacgtaattactgaccctcacaacatccctgggagttagtgtcttacaggagacctttgacatttgtgagaggacatcgtgaatattttccaagtcctcaatccaaaagtgtggacatagctgttggttttcctgaattgtatttctttcaagaatcaaatgttgcttgtgaatattctcatgtaagattaaaaaaaatcttttcctgactcttagaactttagttttatctctgctttgagagccactttaataagcaaactaaaatcactctacagaaaggctgtacagcaaatgagtagagaacaaaagctggctaaactgggcagtcagctaagatcactcagtgtctgagaatttgttctagaaaatcaccctccgagaatcatgcagattgtgcttaggcttccttcatatattcatactctcctcgggtgaacataaattggcacatttataaggaaattttattattatatactcaaatatttttaaacatataaatagtttgtcttgttaattctacctcttggaatctatc

SEQ ID NO: 547277 - DNA, 1332 bp, Homo sapiens
ggaaatttaatgtgaaagtttcttgttgcaataaagctgttaggtttggcatgtagactgttatcagatggttcctttgacattacttgagcctttcagtaagtaagacaagcctgaaggattaggttgtcaacttcagcctgtcatctttgagcagaaaaaaagaattccttttctttttcttcctttcttttttttttttttttttttaggttgcatcttccttcaccagctttgagctttggagatcgcagcagaggtagttactggaagacaatctcaggcccacattgatcatggaagtctagcttttaaagataagtgagccaaccaagctgtaaggctaatcaccctgtgcaagtatgaatttatctaaagaggatttcatgtggaacccccggagccggccgccaaacggatgactgcacactttaagaaagttcgtgggacttctcccaatcaactgtcaggccacataaagggtctggaacgcgctgacttaagcaaataatatttagccatctaaggataccgtaaggcccaagattttgctttgttggcgctgacaggaaatattgatacatatcaagtaacactcctgatgcaaaaagcgatatgtgtctcctttcggcactatctctgtttaggaaacaccttgctttaaaagaaagcacaggtgggggcagggacaatgtcaaacccagcacttcactgggttttccagctttcctgggatcacaatttcatgaaaataggaactaagcaaaagtcgtctcctttttgaaaaaaaccaaatgtattggaatttgaatttgcaaactctcagaatgtctagctgacaagtgaaccctgcccataaccccaaaactattccttaagtttattaacctaggaaacctgccactgattaggtttgggtgtgtttctcagcttttacaatagtctaaactatattacaactatgtggttacagggcctaaaaagtaaattgaaatatgtggctattaagtcgcaaatcccctcaataggacatgtgagtcaaaactcaattttttgtgagaagtaatgtctgtaatcctattgactcatcatttttagacatttgtggctttaattacaggggaaaaactgtaatgtcctgtcttgggaaaatttgatagggaacatcgggctgttaccatagaataaaggttgsgttggaggatttaatttaaaaaggaaaaagaaagaaccctattttatcagaatactctaaacattctccatcagtaacgttgtgcctgaggtgatatccttgaagatgctggaggtggcggtgttaatgaaataccc

SEQ ID NO: 547278 - DNA, 1054 bp, Homo sapiens
actcaataagcatatgctaagaatctatttcatgctgggctctgcataatatttttgtggaagtgtatgcccctgaaacagctgcataatccacttctcttccctccccaccatcttccttcctgactgcatggctttaagtaccactcaggctaattaaagtttcaagaacattgatagccatttaaatctagtagttttatatatagcaattttctctggcctttctctgagacaggtataagatttttagattttcatggcagtagaatggagcatattctaatttcctccaaagtaacaacagcagcataaaagaataatctagtgtgcaatctttagtaaatcttttgttcttcaatacttttcctccttcactccctccttacttcttcttttgctctcttttactcctttttttktaacagtaaataaaaggccaggtgcggtggctcacgcctgtaatcccagcactctgggaggccgaggtgggcggatcacctgaggtcaggagttcgagactagcctgaccaacatagagaaaccccgtctctcctaaaaatacaaaattagccaggtgtggtggtgcatgcctgtaatcccagctactcaggaggctgaggcagaagaatcacttgaacctaactccatctcaaaaaaaaaaaaaaaagaaagaaagaaagaaagcaaaataatacagggttgctgaaaatatcactttctaatgaaatcctctctgatcacatttctgaaacatcgtctcttaatgtcagtcatattgttgtctttgtttgcttaagtgcaattaacacaatctataagacttgttatttgttttttcttcctccctctggaaaacactaaatcaaggagcatagacacgttatgtctagtatgcagctgaatccttggtacctggcctaaagttaacaataatttttttttcttttgagacagggtctcaatctgtcacccaggctggattacagtggtgcaattatagctcactgtagtctcatcccccgaggctcaaggggtcctcccacctcagcct

SEQ ID NO: 547279 - DNA, 1054 bp, Homo sapiens
actcaataagcatatgctaagaatctatttcatgctgggctctgcataatatttttgtggaagtgtatgcccctgaaacagctgcataatccacttctcttccctccccaccatcttccttcctgactgcatggctttaagtaccactcaggctaattaaagtttcaagaacattgatagccatttaaatctagtagttttatatatagcaattttctctggcctttctctgagacaggtataagatttttagattttcatggcagtagaatggagcatattctaatttcctccaaagtaacaacagcagcataaaagaataatctagtgtgcaatctttagtaaatcttttgttcttcaatacttttcctccttcactccctccttacttcttcttttgctctcttttactcctttttttttaacagtaaataaaaggccaggtgcggtggctcacgcctgtaatcccagcactctgggaggccgaggtgggcggatcacctgaggtcaggagttcgagactagcctgaccaacatagagaaaccccgtctctcctaaaaatacaaaattakccaggtgtggtggtgcatgcctgtaatcccagctactcaggaggctgaggcagaagaatcacttgaacctaactccatctcaaaaaaaaaaaaaaaagaaagaaagaaagaaagcaaaataatacagggttgctgaaaatatcactttctaatgaaatcctctctgatcacatttctgaaacatcgtctcttaatgtcagtcatattgttgtctttgtttgcttaagtgcaattaacacaatctataagacttgttatttgttttttcttcctccctctggaaaacactaaatcaaggagcatagacacgttatgtctagtatgcagctgaatccttggtacctggcctaaagttaacaataatttttttttcttttgagacagggtctcaatctgtcacccaggctggattacagtggtgcaattatagctcactgtagtctcatcccccgaggctcaaggggtcctcccacctcagcct

SEQ ID NO: 547280 - DNA, 1376 bp, Homo sapiens
cggatgtcctggatgtatattagtgacagaataatttttctttcaaaactaacttatatcattaaatacccttttgtcactttaaaaaaaaaaaagatgcataagctctgaatttcattttttcttttttttttttacttataaattttcaccgcagcatgcaaaccctgccaggattgatggatcagatgtccctctgtggatgtgccatctctcactaggccaaactcagtgatccactcatttcaacctgcttcctgcttcccccaactgtcgtgtccttttaagagtycatgcattgctcggttgctctttttgcgtggattttattaccggaggaatatctcctcaattttcaagacttagcacacatgtcacctgtaaatttcccctcttgcccctttgtagcctcattcttccaaatgtagacttctaagaaaacaatgtcaaaaattatcttttacttgtttgtgtgcatgtttgtttttcacatgagactacaagccccttgatggcaagatatacatcaaatttacttctgtaaactcagaattgagcataataaatgttgcttgctcaataataaataaatgctgctaggtaagtaaatgattgacctagggcattgctgtttttacagcaatattactgtatttcagatagccaagcctaaactaaaaatctcctgttggctgcaaaaagaaagaaggaaattgagagatagaaagaaagaaattgaaacaaaactttagcctgtccaaactcaattccatccagccaacaggattagacctctgtaagagatctcaaaaagtacataaagcagcaacccagaaggaaactttaaaagatgaacaaaaatttcctccaagattgagagaagagagaaaatgtacacatattgtcttccaggggtaacaactatttctttcttttttttttgagacggagtctcactctgttgcccaggctggagtgcagtggcatgatcttggctcactgcaagctccgcctcctgggttcacgccattctcctgcctcagcctcccgagtagctgggactacaggcgcccgccacgacgcccggctaattttttgaatttttagtagagatggggtttcacccgtgttagccaggatggtcttgatctcctgacttcatgatctgcccacctcagcctcccaaagttgtgggattacaggcatgagctaccacgcccagccaagtaacaactatttctaaacagacaagtttagaaagcagaggaagaggaaaaaagagtgacaagtggtaatatggtacatacataggtgtctcaagtcaagggacctgtgttccaccatgatgatgacatattcattggaagttacgggat

SEQ ID NO: 547281 - DNA, 563 bp, Homo sapiens
tgtaacttgtctgtcgctgtcacaacaaaaaacacccgctcttgcgttcacctggcatctgttctcttaaggaccctggattgcattacgttatcagaggtgttatctgaacaaatgtgcgcaggagtcctgttacctacctcccgtgcttaaaaatccttcccacccmcaagctggattttgacctgattgaccgtaatggttccagaggaactattgagccattactatccatcatctaaatgaatacagagggacgcctaaatctccaggttatttgaaagccctgtacatgcgtaagggggtttctaacgagcagacccccaattgtctgcaaagtagttacaggaagtagttgcgttggaagcaaaaattcgcaagtgctgagcaaacttcatttgaaaaaatgaggactttttttttttttttttaggctatggggtgcggagaggtggggttcatttttttttgaatccaaaacaactcaaagcaatatagaccacattctagttaattttctggaagctgctcaattttcactccgaagacaggctggggcgctt

SEQ ID NO: 547282 - DNA, 1344 bp, Homo sapiens
caaatattgtaacaacaatttgtctttataaaatccccttgatttctctttattgtttaagagtccttgcagctaagccgtgtaaaacaggaaatatggctgtttgccagtgttcttaaggaagcaggagtgaagtaaagcaaacaatacaaaaggggtttgtttaaaggatgtacttaatttctgtgtggctgtggtatcatttttctggctctgttgtctttgtcctttttcactgcaaagttgaaattgtactttcacaactattaaaacaaaaataaccagtaatgcgaactgaacccaaagatatctaagataaatatcctcccatgactgtaaatttgtatcctccatatcaccttagaaattttcgtatgcattgactagatttattgctatttttgttctttttttatgtattatcagatattgccgtcagtactattaccrcatttacacaatgttgccttgtgtggaaattctaaacctttgctaactcttggtaaccaaaataacgataaactaaagagattattatcccatcttttgagagaaatgtaaaattattcatttgtctataaagaatctttgacaaaagtattttttaaagcatattgaatcctagccattttattattattagctgtgtacctaaatgatattttagatatgagtataaggaagacaaactttaggttgtcaaagaatgagcatgtctcatgtgttacagtcatggcatgacagttggattacaattatctcttgatgaatcaacttcatctaaaccttaattgcatattaaattatttagtcatttcctgattcagtaatgagaagtcagaatatatagtaatttactgggtagcatgttacatgccatagtttgcggaatgtacttgatcagtaaagtccacagtaaatcaaagacaaatgagaaaattcttttagaattcagttttttttttcttaatttgaagtcactttaaatgctcttatgtaataagaaaagaaccctaggtatatttaaatacttaacctgctataactttttgttggaaaggaggtagattttttttatgagtatttttttcctatgggaaaaaaaataactttggtgatgcagtatgcctttatctgtgtattgttaaaaactaaactaaacaaaaaaaacccctaagaacctttaaacttaacaaagtttatttgagcaggaaaaaggttctagaagcagacagcactctaagatggttcagaatactaccacttacaactggtgagctgttctaataacagggaaaaataggaaatgtcatacagaaattacctgattggtgcaggttggtg

SEQ ID NO: 547283 - DNA, 653 bp, Homo sapiens
aaactcgctattttaaaaggacattggattcaaagttcataaatagaacaagttcaagtttattgtatatgcctgaagcccttaccaagttttaaataacaagtagcaaatttatatttcaagcacagagaatttaagctttccaaaaggccaattcaattttacgttatctttggcaaaaatcatgttaacagaatccaaaasagtaaaacataaaggcctttcttctacaaaaaaaaaatattttatatattttttatatattatatatctttatatatacttatatataatatatattatatatatgactcaggctagctatatatatacagctgtgtgtatatatacatatatacacattcaggctagctatgtgtatatatatagctatgtgtatatatatatatgtatatatatatagctatgtgtatatatatatgtatatatatatagatagcctgaatgtcagcttttaattaagctaatttctggctatagacctctttcaaagaaaaaaaaatattttcaagtttcttaacagattttagctggaataaacagccaatattcctggcttttgactttttttttctttttaaccaagggtacctttccaagtgactcaccaaaaccaataagccttaagaaaa

SEQ ID NO: 547284 - DNA, 2762 bp, Homo sapiens
aattttaatataactaattgggagggtggagtgggtgcttatggatggtggggggaaagggtgtaaaagaaacaaaatcttcatcttctatagtaagaagttaataaataacacttaaaaggaaaaaatcaagaagtggtaataaataaatactatctggaaacatagaagtaataccaaaagaaccaatgacaaatgttgaaagtggctgcctctgtggggtggggaatggaagtaaagggataggacactcctgggttttgccccaaggctgcaggactacttgaaaagtggttagggaatcacagcccagaggtcaactgacctcatacctgctcagactgggggatccttcagagccctggaagattctgcccttcagggacactcatagggttagcaggcctcctgggattgcttagttatgaatgttgtggctcccaggatgtgcccttggcgatgctgtgatgcccctgcccaggtttgtcaggtaccatgatggctccctatgactctcaccaccttcatggctctgagagtgaagcagctaaggaacagtcacctaattaggtgacacagcatctggctttgcctgattcagagagaggacagaggtctagcagaatggtcagtaagatatgctgaagaaggggcgtattagaactgctcatggaagggtgcatccaggctgtgggctggagcttagccagggactagaggcctcagaagagcctgctctggagaaggaggaccaaagggaatcacccagcagtctctacttccaggccaggccctggcaccactgtttgtagctgataaccttccgtgacagcagaggtgcccaagcctggacatcctctgccactagccaggtactccaccccatggagagaaccaagctgtctcttgtcagtccattctaaaaatttgctcagaagtgaaatgaagttgcagaggccctcagatcagcaaagggtccaggacaaaccctggggaacctgattcgaggaaataaaagtttgcaatttggggatctttgaacaagagtggcctcaaatcacactgcagcctgattttttttttttttgaatactcctctgggattttcattgtttatttctaaaatttttaacattttcttattgaggcataatttacagagtaaaatgcacaaatcttaagtgttctctcagtgaccagcctgaagatcaagatataaagcattttccttaagcccagaaagttttctcctgtgtcttcccagtcaccctggctcgtctcccaaccagagtgacacttttctgatttctagcaccctagagtgatctcacctattcttcaattttatataaatgcaatcaaggatatgactttccactgttaatacattaaaggccacaaacagtccttccactttcctctttaaggaaggaaggaaagtgagagaatctctgttgagtgtttaraatgtgccagatgcaagctggaccttccattacatgcaaatgtcctattttaatctttacaccaactctgtgagacaagggagaaaacagaggcagaataatataagtaaaatgctcaaaattgcaccactaataagagcagaagcagcttaaacacaagactctgagatctgagaagcctccctcccaaatctagtgctgcacagaggcagatggaggctgacgtgtcactgaacagctcatgcccccagggatgccagcaatacaaagctgtcagatcctgtccaaccctcacaagcacctgtctccatggcaggtacgcacaatgccatcactaggtgcaggggccaaaatgaaaggtggagacaggccacccactctgtgctggcctgtcccagatttgttcccctgaaagtcagcctggccaagcagcaggctagtgggaaaggggagggggaactgatgggccacagagcagtgggcaccctgtggagttagccctcaccagtggtgccaggtgttggccatggatacaaaggtgtgtggtgggctcagatgggcctggcccctgccacctggtgatgttgaggaatcccagatttggctgctattttacttcaactcccatatttctgggaaaaaagattggctattccaaacactgcaggctcgggtagcttcccctccctgctcacatgaggagtcagaactgatttaactcttcatgcacttaccaagtgcttaataatcgcaacaaccacactaatgactgttgagctcatgggacatgctgtcaagcaagcacagcacatgaaatgactttacttgtgtcctccagtgtccccacgtggcagtccctgggttaactctgggcatgcctggatagaggtgccccagggtcacttttgtttgcaacatataagaccaggtcaacatttctcggtccatggtagcaggctttgacctacctctttgaaagcatgcttcctggtttgtccctcactttagaatgtcacatcccgtgtggcttggagccctgttggaacttcctgcttgaagtcctattgcacctagcatgtgcagtcacatgcattatctcccttcatcctcaaaagattcccattgagaaaaagaccactattgccccatttttcggataaggaaattgagtcccagaaaggataaagaacttgccagccaggaagggtacccaaccaggaaggggcactgctgggatcaagaacccaaaggcttctgaacatatagtgcgtgccttcacatttacatgccaggctt

SEQ ID NO: 547285 - DNA, 1396 bp, Homo sapiens
tctttattgctgtgttcactgtggacttacaggatgtgttctctaacttcttattcttaagaggtatcttcttattcttaaagttttgtattttttatatcaagaatggtagaatttatcaaccacctccacatattattttacaaaaccttggaagggtaaatgaaataatagttgtgaatgcctattcaatcttaggaagaaaagtcacttatgaattgcaggtaccatacaaacaataaggattggaggtatatctgttgctataatgttgggatattttgacagaaacttcactttaaacatatagggtaatgtatcaatcctttttccatgtgaaaccaaagcttcaggcacctgatagaaagggcagtggctcctgtggctcctagaatcacactatgttctgtcttccactctatttcaaaccctttctttctgccatgacatctctttttctcttctggggaaattgactattatttccaagtttctgctgccatattttttaagaaggtagtaatgcccacccactgatatcaggtgtggtgacagtgacttgcactggccaataaaatgtgaacagatggcacatgtcatgtctgagcaggatatttaaaagccattgttttatcattattccttttctctccattacaaaagcgtcatggcccatatgggatcttctttttcagtctcagtctaaaaataaatacaagcagcagaactacctccaattggtggtggacactatctttccttaggaaagggattaagtgtaaccttggatccatttctatgtacaggatgtgactatatctcacaacctctcttactaatamcttggtagtacaatacaataacttatttcctggattactgcaggattactgttaagtgtattatgggagtaaaggaagggaagcaaataattgtgaccaagagaggagcttaggaaatcacattatttttcttgagcactctctcttgcatcctttaggaggataatatatccctaacgcattgcaccgtgacccacttggtcaataaaatgtcagtagaaagggtgcatgccacatctaaggaaagctttgtcttcctgccacaatcagatcagctttgcctaggtaggggctgttccttcagctctatttccagactgaagacaaataacaacagaaatgcatcgaaaacataacgaggaatgcatgagataaagcttacttgttctaagccactgatatgtttgcagttctttgttaatattgtgaaagctgactgatacaccttctccttcttcaaacccggtttctatttctttaccaactagggtgaccaaagtttcggagagccaacctgggatatagccagaccaaacaatatattttatgacctt

SEQ ID NO: 547286 - DNA, 1396 bp, Homo sapiens
tctttattgctgtgttcactgtggacttacaggatgtgttctctaacttcttattcttaagaggtatcttcttattcttaaagttttgtattttttatatcaagaatggtagaatttatcaaccacctccacatattattttacaaaaccttggaagggtaaatgaaataatagttgtgaatgcctattcaatcttaggaagaaaagtcacttatgaattgcaggtaccatacaaacaataaggattggaggtatatctgttgctataatgttgggatattttgacagaaacttcactttaaacatatagggtaatgtatcaatcctttttccatgtgaaaccaaagcttcaggcacctgatagaaagggcagtggctcctgtggctcctagaatcacactatgttctgtcttccactctatttcaaaccctttctttctgccatgacatctctttttctcttctggggaaattgactattatttccaagtttctgctgccatattttttaagaaggtagtaatgcccacccactgatatcaggtgtggtgacagtgacttgcactggccaataaaatgtgaacagatggcacatgtcatgtctgagcaggatatttaaaagccattgttttatcattattccttttctctccattacaaaagcgtcatggcccatatgggatcttctttttcagtctcagtctaaaaataaatacaagcagcagaactacctccaattggtggtggacactatctttccttaggaaagggattaagtgtaaccttggatccatttctatgtacaggatgtgactatatctcacaacctctcttactaataacttggtagtacaatacaataacttatttcctggattactgcaggattactgttaagtgtattatgggagtaaaggaagggaagcaaataattgtgaccaagagaggagcttaggaaatcacattatttttcttgagcactctctcttgcatcctttaggaggataatatatccctaacgcattgcaccrtgacccacttggtcaataaaatgtcagtagaaagggtgcatgccacatctaaggaaagctttgtcttcctgccacaatcagatcagctttgcctaggtaggggctgttccttcagctctatttccagactgaagacaaataacaacagaaatgcatcgaaaacataacgaggaatgcatgagataaagcttacttgttctaagccactgatatgtttgcagttctttgttaatattgtgaaagctgactgatacaccttctccttcttcaaacccggtttctatttctttaccaactagggtgaccaaagtttcggagagccaacctgggatatagccagaccaaacaatatattttatgacctt

SEQ ID NO: 547287 - DNA, 1396 bp, Homo sapiens
tctttattgctgtgttcactgtggacttacaggatgtgttctctaacttcttattcttaagaggtatcttcttattcttaaagttttgtattttttatatcaagaatggtagaatttatcaaccacctccacatattattttacaaaaccttggaagggtaaatgaaataatagttgtgaatgcctattcaatcttaggaagaaaagtcacttatgaattgcaggtaccatacaaacaataaggattggaggtatatctgttgctataatgttgggatattttgacagaaacttcactttaaacatatagggtaatgtatcaatcctttttccatgtgaaaccaaagcttcaggcacctgatagaaagggcagtggctcctgtggctcctagaatcacactatgttctgtcttccactctatttcaaaccctttctttctgccatgacatctctttttctcttctggggaaattgactattatttccaagtttctgctgccatattttttaagaaggtagtaatgcccacccactgatatcaggtgtggtgacagtgacttgcactggccaataaaatgtgaacagatggcacatgtcatgtctgagcaggatatttaaaagccattgttttatcattattccttttctctccattacaaaagcgtcatggcccatatgggatcttctttttcagtctcagtctaaaaataaatacaagcagcagaactacctccaattggtggtggacactatctttccttaggaaagggattaagtgtaaccttggatccatttctatgtacaggatgtgactatatctcacaacctctcttactaataacttggtagtacaatacaataacttatttcctggattactgcaggattactgttaagtgtattatgggagtaaaggaagggaagcaaataattgtgaccaagagaggagcttaggaaatcacattatttttcttgagcactctctcttgcatcctttaggaggataatatatccctaacgcattgcaccgtgacccacttggtcaataaaatgtcagtagaaagggtgcatgccacatctaaggaaagctttgtcttcctgccacaatcagatcagctttgcctaggtaggggctgttccttcagctctatttccagactgaagacaaataacaacagaaatgcatcgaaaacataacgaggaatgcatgagataaagcttacttgttctaagccactgatatgtttgcagttctttgttaatattgtgaaagctgactgatacaccttctccttcttcaaacccggtttctatttctytaccaactagggtgaccaaagtttcggagagccaacctgggatatagccagaccaaacaatatattttatgacctt

SEQ ID NO: 547288 - DNA, 587 bp, Homo sapiens
acctaagattctgacccaccctagtggaccacgtttccaggcttgtctctgcagattcaggaaagacccaaatactacgcccacacggccactaagcaaggtatgagtccagctcgttcaaggactgcagcatcaagcccagcaattgtcttaaagaacctcagtgagccrcaagagtgcgcagacagacaacaaaacaatatcaggaaagtaatgcctgaaggatattataagttcaacaaaaatgtagaaaccacaataaagaaccaaacataatattttggagctgaggaacacaatgactgaactgaaaaattccttagggaacttcaataaagatctctgtcaggcagaagaaagaatcagcaagttagaaaataagtcatttgaaattttcctgttagaaaaacaaaaaagtaaaaagaataaagagtaaataaagcctgtggagtttatgggacaccatcaagcaaatcaacatacatatatgcaaacccctgaaggagcagaggaaaagtggaaaagagtttattttaaaaaataatgacaggaaaattttcaaagaaataaacatcctgatccatgaa

SEQ ID NO: 547289 - DNA, 1563 bp, Homo sapiens
gtataaaaagttggcttgcttaatataacagaaactagccacatcacttttcaggagggacacacaattccagctatatttctcagtgtagggacagtgaaattgcagaaactctaaggcaagatcatctctgggttaatacctttaagtattgctattccacaaaagatttgaattgaattgcatgggtaactaaatatcctctaaaaatatcttatttctaatattttgtttataaatatgacagctgacttggaatacatatgtatttaaatttttaatttgcttaacaaagacttcacattatagaacacagagtaatttatcttttttcccaaaaatgcatgtcctcttatttcaaggatgctgctattgattactttagcatcaataagtgagtgtgacctcaaagatcaacaaggggccaacagatcattttgcgttgtgcacacataaagattttacaataagaattaaaacaaaggcaaatgtttcagtgaggatgcattaactttcagtatatccaaataaaaaattgttttttgtcgggggagtaagggattgtcataatcaacaccttcaggctaaaattcattactacattctttctgttttttttttctttttatttggggggttcggggtggaatcttactctgtctccgctcactgaaacctttgcctcctgggctcaagccccacctcagcctcccaagtagtgggaccaaaggtgcatgccgtcatgcctcgctaattttttctagatacagggtttcgctatgttgctcaggctgatcttaaactcctgagctcaggcagtccacccacctcagccccmcaaagtgctgggattacaggcgtgagccactgtgcctggcccatattaaattatttcaatgtctagaaattaattttgtcatctgaaaggcccgcttttttttccctctggagtactgataataataatgaacttcaacataaagaggtaaaaatagtctttatatatatatatatgtatatatataaatgatgagcttatatatatatgtatatatgtgtatatatatatataatgcccatgatgactgttttattgaaaggtgatgaaaatagagagacttaagataaatgggaaggggtggtaacattagatatgttagaaatgaaattcacaagtactgaaatgacttaataactagaaaagggatggctattgacagtctgctgcaatgaccacattgactatctttgccaactgaatttatcattttactaccttcctcattcacttcaagatttttcttagaaaaactaaaaaatactatctatatttggaaaacatgtttgtaagagcattagtgatcttaatgaaatccaagagccactaaataaaagttaaatattttacccaaaatatagttaaaatatttataaatactatagaatttgaagtgccattataaacatcttaatccttaaataataatttaaaatatatctcctttgtaactacaaactatatatactatatatacactatatatatactatatagtgtatata

SEQ ID NO: 547290 - DNA, 542 bp, Homo sapiens
gttttgtttgccaggattgtccactgtgaagttacccatttttacctctttccctactatattccttagaagcaagtctaagtgcagcctacactcaagggggaatgggtgaaaattaatctttatctcycagagaggcatttatcaatataaattatttgcaattcttggaagaacgaatttctcgtcttcctattatttatttagccaatcaattatttatgttaattatgaactcaaagtttacaattaagtattcaaagtacattgtacttggtcattgtggtgattttacatgtaaaaaatatagctaatctatttctctgtcaatgtcaagaattaaacaatatttcttaattctatcctcactaattccaggtctcagatacagattattttgaaactcttattttgcaatgtatttttttccatttcttctttccttagtcaataggaattgcattctacacttactgagagaaaaatcttttgagttacccctgactcctctcccattctcaccccacatcaaatcagtcact

SEQ ID NO: 547291 - DNA, 1135 bp, Homo sapiens
gcttgttttagacaagaatttaaaaagctatattttaataaactgatgagggttacaagatagtaaggttttaaaaagtcatttttattattagtcctgctaaacatgttaaaattattaatgcttacaaatacttaaaaacagaaaaaatgttgataatttaataggaaaaattaattcaataagtttatcattaaaccatattttaggagataatgatttaacaatatttatatgtatccatttccaatacattggcttgtttttctgtttgtctaatatttattatattatatttaaagttgacctttacagtagaatatttttttgattcctacttcattatctaggttggcttatttcttagttcttctactgcttattactgtagactgtggtgttactttttcaatgttttatgagtagaattttattatatttcctgttgtttattttctttatatgtgttaaccattttcttcactaaattcaagaaaaaaaccacaaagttgcacacatgttatttaagcctattgacagaattttagtgttcattttgtagcctttgcaagatgtaggttgagggtagagctttataaacagcaaacagattatgcataattaagttaatactttatataataaactaaaatgaaattatattttaaaagttataaattactgaatgaatttcaacaaactttacaaagaaatgatattgctgcctctgtttaaaatacagagtttatatttttcacagtcaggctgctatggtttgaatgtgtcctcaaattcatattttagaagcttaatccccagtgcaacagtattgggaggtggggcctagtaagaagtttttaagtcatgagaactctgcctcataagtagattaatgtcattatcatgggagttggttagttattgcaagagcattatgttattaaatgaagcctggcctctkgtacttctatttttcacatgcacttgcccttctgtccttctgccatgagatttctctcttgccagattccacgttcttggacttcccatccttgaaaaccgtgagccatgtaaagttatatcctttttttgagacagaatctcattctgtctccccagctggagtgcagtcaat

SEQ ID NO: 547292 - DNA, 516 bp, Homo sapiens
accactcatagactgctgaatgttcaaactgtgttcaaatagggcaaatgccgagctgtaaccaatctcgctgtttctgtacctcactttcaattcctgtatgtcactttacctttttagtctataaatttgttctgaccatgaggcacccctggagtctcagtgaacccgctgtgattctgggtgctgcctgattcgtggatcattcattgctcaattgaactcctttaaatttaattcagctgaagtttttcttttattagtatccaggtcaacaattcatattgagtgtcttccaatatgcattttattkggcaaaactgatggacaagtgatatggtttggatttgtgtccttgcccaaatctcatgtcaaattggaggaggggcctggtgggaggtgactggatcatgggggcagattttcccctgctgttctcgtgatagtggatgagttctcatgagatctgatagtttaagtgtgtggcacttcccccttagctctctctctcctgcc

SEQ ID NO: 547293 - DNA, 1261 bp, Homo sapiens
acttaagagctgagtagctgggcaggctgataagaacagacaaagcgagctcttttgcaggctagtaaactttcatcttagactactttggttcaggtgagggcggctaagcaggtgggaaggcagggagggggaggccgacaagcaggcattggggcccatccaagcaggggcctagtacgtcctgtttttttgtagtttgctgacctaaaccggatcaagccaccttgtcttggaaatggaccactgcatgcattatttcacctccacccgagtccatctcacgctttcctccctcctcatgcccccttgtcccctcatcctcccaactgccatggctttgtgaggcgccctgggttccatggctaccgtgtcgaccagggcagcccacccacttctcactttggtctggagttagcgagagcgacgctgcttttctcttgctcttcagcctggacctgtgatgtgataggcgtgagaaggaactgtgggttctggcggtaaggaaagtggggccttactttcccatgttcccaaaaggcagatgcaatccctgcactcctgaaggagtcaagcagtaaaggcaacacagcaagactgtccgggactcaggctgtgaggatttgtcttatgaggggcctcagaaaaggccgtttccactgtggggagtagaggaatggaaggtttcaccagggtggggtggcttccagagggtccccatggaaaaagcgtggctgagcaggcccagagggggacgaggacacgtttggggggctggaggagagtgaggatatgctcaggggtgccagagtgtcataagggcagggacggtgaggacagactcagggaccacagtgtcataaaggaagracagggatgaagaggacagacctgtgggaccatggtgtcataaagacaggatggggacttggaccaggatagattcagggaccacggtgtcataaagacaggacggggacctggacagacttgggggaccacggtgtcataaagacaggatggggaccaggacagactctaggggcctggtgtcataaagacagggttgggacctggacagactctaggggcctggtgtcataaagacaggatggggaccaggacagactctggggatctggtgtcataaagacagggatgggaccaggacagactctgggggcctggtgtcataaagacaggcctgggacaggaccgggacagacccgggggaccacggtgtcataaagataggacgggg

SEQ ID NO: 547294 - DNA, 559 bp, Homo sapiens
cagatgataaatatttatgcttaaaatatgtatgtctaattgagtctcttttttattctgttttcttgtttatggcatttgttgtaacaggatagactttttcctcacctaggaaacctatcccatgcctgtcacttatagttcaggaggaagtttttgcacagaccagagagaaattaaaattagatgataaattgaagatatcttacacacagttttttggtgaacactgattttattggtgtcttagatccctagtctacccaaataattttaacagtactgttttttctaatcctgaagtctgatatttatgactcattagcaggaatcaaaactagtgatcagtagaacactttcaaaataaaaatttggaatgcagacttttatgaaaatttaaaagtgctccttaacagaatatcatgggttttcctataaaacttctttaagtattgtaattccagtctgccccaacttwaaaaaaaattcttattaatatgtcagtcattaattgctagtttgggctctcattatttcctgttttttaacaattttgtga

SEQ ID NO: 547295 - DNA, 1320 bp, Homo sapiens
caaaactaaatcaatgaagggattttgctgagaaagtagttaccagcattcacaaagctggctactgggtgaaaaacctgaattctgagttttgcaattaactgcataacactgagtattacctaataatgattcctttgtttttttcagttccttttgcattatataggtgttttcccaaatgtgttctgaaagacattattgctgcaaggtgctctggaagacatttcagggaccatggttaaatcagttaaagaaaagctgtgtactagatccttctctaagaaatgcactggctgggcacggtggctcatgcctgtaatcccagcacttagggaggccaaggcaggcagatcacttgaggtttagagttcaagatcagcctagccaaaatggtgaaaccctgcctctactaaaaatacaaaaaatgttagccaggtgtggtggcatgcacctgtagtcccagttacttgggaggctgaggctatagaatcacttgagcccaggaggcagaggttgtagtgagccgagagcatgccactgcactccagcctgggcaatgggaatgaaaccctgtccaaaaaaaaaaaagcacaatatgtagtctcatactaaaggctttaagaagtcttacagaaaagaaatttaaatcttttggatctatttcttgacatctgtaggaactgtttcataaaatctactttaggaacctgtattagctgctgtccaaggtatcaaacgtctataattctagttccagtaaaaagttgtatataaataacttactttatatgtagtactttaatttgtaatatcagtatggaatcttcttaaggaaacactgaaaaaaacctttaattgtacaagatctttgtacagtatcatggacttttaaacacagaaacacagagaagtattgttttgtcctgtgaataccaaaactttgatttggatttattagtgagaaaaaagcaggatcaaacgtttycctactttttaggagttctgtgcaatacctcaaattctatccagaatgttcctacaaagtacagtatgatgttagacactctttacatccaacatgttttcttttgtttaatttaatttgagctattattggctcaaaatatatagattcttagtgatcttttatatttattgttcataaaataatgttcggcttcctaataagaaagtgaagaggaaaatcaaggtgttttcatcttgcttgtaggatgggtgctgcagacaatatatataaaggacggagtacatttatggaagaactgactgacacagcagaaataatcagaaaagcaa

SEQ ID NO: 547296 - DNA, 1048 bp, Homo sapiens
tgtgttctctgctttccttgaaatcctacgtgcatgctttcaatactttacagcatttaagagtcgcgttatttaatgcacatcctgtgttaacagacacttgtgtgtgctgcacatcaactcctctttgaaatatatcaggcctactttggctgttaaaagcaaaatgaagcaaatccttttcatagaaaaattattaaagtaaggaactatccttgaaattactggttggtatgtttggatttccaataagaaaggaaatacctatatataaaatttgaggttttcctcgatcaatgctgttacaggtccttgaaacccaagaactcacgagggtctgaatcaacatatactggcaataccaaggagcctctaaagcttgatacatctctgatccagacttcttcactggcctcctgtctggtttgcacacacccattcctctccaattcattctccatacatttatatttttaagagagtaaactttcaaaagtaaataaaaatcgaatcgggtcacggttgtacttttgaaaccattcggaggcattccactcccgggagaaacagctacaaagctggtgtgctctggccctgcccactccccagccttagcatgcagcttgccccctctagtggtggtgaagagacactgacatgtattaatccacaggaatcctcccacagccctgtgaagttggcatgctgttatcatcatactcccaccgcagggtccttgcacaagcagttccttttgcctgcaacgtcctgccccatccttcacctcgttttacttccttcactcctaccaacttcagataagaactcagatgccacttccgcaagatggcctttctagttccccgcccccaaaggtttaaccatcgtacattcccatgagcttttccctcacagacagcatgtaacctccttgtcactgtgcattcatcggcttttagtcgatgtctgtctttcctgctggactgcaggctgtgtgaggttagccctttatctgcctagtttcctttccactctatctcagcaycca

SEQ ID NO: 547297 - DNA, 543 bp, Homo sapiens
ctttaataagcatgattttctcttgagtcaagttctctgcaataaccttattctatagatgaggaatcagagacacagggaggttagacagctcgccaaggccacacagcraagcagcagagacaggagctgaacaggatctgttgacaatatttccgcatttagatctttctgagagaaagggctgctcctagctccttgctgtatcccagggtggggcacaatacaggcatctgatgaatacttgaacagttagtgaatgtgaaagtatccacctctttctccacagaaaggacaatgtaaatgtttccaaggagccgctggtgactttaattttttaaaaaaaatctcttcctgaatttgccctctgagtaggttgacattcttgattccaacccttctaatagtctcctgaatgctggcttgttttgctccttttaacatgtatgcagaagggggcctgagcagctgtgtgaccatgagaaagtcacttctttccattcctctatttctcatctgacacgaacagggtggagcagggta

SEQ ID NO: 547298 - DNA, 543 bp, Homo sapiens
ctttaataagcatgattttctcttgagtcaagttctctgcaataaccttattctatagatgaggaatcagagacacagggaggttagacagctcgccaaggccacacagcgaagcagcagagacaggagctgaacaggatctgttgacaatatttccgcatttagatctttctgagagaaagggctgctcctagctccttgctgtatcccagggtggggcacaatacaggcatctgatgaatacttgaacagttagtgaatgtgaaagtatccacctctttctccacagaaaggacaatgtaaatgtttccaaggagccgctggtgactttaattttttaaaaaaaatctcttcctgaatttgcccyctgagtaggttgacattcttgattccaacccttctaatagtctcctgaatgctggcttgttttgctccttttaacatgtatgcagaagggggcctgagcagctgtgtgaccatgagaaagtcacttctttccattcctctatttctcatctgacacgaacagggtggagcagggta

SEQ ID NO: 547299 - DNA, 618 bp, Homo sapiens
taaaaattgtgtagcacagtgcctggcacacgttaagaagtcaaaattattataattcttgtggctctttctaaccccaccaatttctccagtatcatttgctttcattcaccatataattgtttagtgttatcaaaataaaagtgtgctgattcccatccatgcagcaatacaaacaataattatggggtagctggcaagcaagtaactttgatgtcgcagtgctggaaagacacgtagtttatgttttgttttctttcttgattcaagatgtgatttttcatgctgttacagaacaagtagaagcacagcttagagttttaaagtatggatttgtgttcatcccatttcctatctcaaatgatatttgggagagaggagtggatcctttgaatgcatcccactgtccccctctgatacataaaggtatctataaattctgagcactttattttttgwaagtcacaatgcctccaaaggagacaatttttgtgagtgtcagagtcatgagggcttaaaggattctacgctgacaagagaagacgcaaactgtttctcattcctggccaattgttttagaagcaatggttggaaaaggagctggttcttaacttggct

SEQ ID NO: 547300 - DNA, 650 bp, Homo sapiens
tttgacttacgagcaggggtaaaaagtgatggacgatagaagttatgggagctgtgcctcctggtccaaattggtaagtgtctttatatgatgtctrttgtagtgtaaggcttaaaataacaatgatgtgctactttgacatctaaactgggagggcctctgatgtcctaactgcatcatcctacacacttcgctcctactgataaggtgtcctagccaaacaaccctccttattacaaggacaaggcacagtgcctgcttatccctgagtagtagacttcagttccctgccagcccactgaattattcaaacaagccgatcacatccatctgagaaacaaggagtcactccatgctcttgctactataaagcctgctttccacagggtctgcttattcactctgttcctgagcacatccccattcagccctgcatggtgcagtatcttcctctcctcccctggactgtacactactgtcaatctcatctgtccagtattagatgtcatatcttgggccatccccataaccgtagtgtggaatccctccctagtcaatgggatgaagaggagacaatcaaggtatctacatattttacatttttcctctcagatcaattagtacaactgcatgagattttttacatgtct

SEQ ID NO: 547301 - DNA, 650 bp, Homo sapiens
tttgacttacgagcaggggtaaaaagtgatggacgatagaagttatgggagctgtgcctcctggtccaaattggtaagtgtctttatatgatgtctgttgtagtgtaaggcttaaaataacaatgatgtgctactttgacatctaaactgggagggcctctgatgtcctaactgcatcatcctacacacttcgctcctactgataaggtstcctagccaaacaaccctccttattacaaggacaaggcacagtgcctgcttatccctgagtagtagacttcagttccctgccagcccactgaattattcaaacaagccgatcacatccatctgagaaacaaggagtcactccatgctcttgctactataaagcctgctttccacagggtctgcttattcactctgttcctgagcacatccccattcagccctgcatggtgcagtatcttcctctcctcccctggactgtacactactgtcaatctcatctgtccagtattagatgtcatatcttgggccatccccataaccgtagtgtggaatccctccctagtcaatgggatgaagaggagacaatcaaggtatctacatattttacatttttcctctcagatcaattagtacaactgcatgagattttttacatgtct

SEQ ID NO: 547302 - DNA, 650 bp, Homo sapiens
tttgacttacgagcaggggtaaaaagtgatggacgatagaagttatgggagctgtgcctcctggtccaaattggtaagtgtctttatatgatgtctgttgtagtgtaaggcttaaaataacaatgatgtgctactttgacatctaaactgggagggcctctgatgtcctaactgcatcatcctacacacttcgctcctactgataaggtgtcctagccaaacaaccctccttattacaaggacaaggcacrgtgcctgcttatccctgagtagtagacttcagttccctgccagcccactgaattattcaaacaagccgatcacatccatctgagaaacaaggagtcactccatgctcttgctactataaagcctgctttccacagggtctgcttattcactctgttcctgagcacatccccattcagccctgcatggtgcagtatcttcctctcctcccctggactgtacactactgtcaatctcatctgtccagtattagatgtcatatcttgggccatccccataaccgtagtgtggaatccctccctagtcaatgggatgaagaggagacaatcaaggtatctacatattttacatttttcctctcagatcaattagtacaactgcatgagattttttacatgtct

SEQ ID NO: 547303 - DNA, 650 bp, Homo sapiens
tttgacttacgagcaggggtaaaaagtgatggacgatagaagttatgggagctgtgcctcctggtccaaattggtaagtgtctttatatgatgtctgttgtagtgtaaggcttaaaataacaatgatgtgctactttgacatctaaactgggagggcctctgatgtcctaactgcatcatcctacacacttcgctcctactgataaggtgtcctagccaaacaaccctccttattacaaggacaaggcacagtgcctgcttatccctgagtagtagacttcagttccctgccagcccactgaattattcaaacaagccgatcacatccatctgagaaacaaggagtcactccatgctcttgctactataaagcctgctttccacagrgtctgcttattcactctgttcctgagcacatccccattcagccctgcatggtgcagtatcttcctctcctcccctggactgtacactactgtcaatctcatctgtccagtattagatgtcatatcttgggccatccccataaccgtagtgtggaatccctccctagtcaatgggatgaagaggagacaatcaaggtatctacatattttacatttttcctctcagatcaattagtacaactgcatgagattttttacatgtct

SEQ ID NO: 547304 - DNA, 650 bp, Homo sapiens
tttgacttacgagcaggggtaaaaagtgatggacgatagaagttatgggagctgtgcctcctggtccaaattggtaagtgtctttatatgatgtctgttgtagtgtaaggcttaaaataacaatgatgtgctactttgacatctaaactgggagggcctctgatgtcctaactgcatcatcctacacacttcgctcctactgataaggtgtcctagccaaacaaccctccttattacaaggacaaggcacagtgcctgcttatccctgagtagtagacttcagttccctgccagcccactgaattattcaaacaagccgatcacatccatctgagaaacaaggagtcactccatgctcttgctactataaagcctgctttccacagggtctgcttattcactctgttcctgagcacayccccattcagccctgcatggtgcagtatcttcctctcctcccctggactgtacactactgtcaatctcatctgtccagtattagatgtcatatcttgggccatccccataaccgtagtgtggaatccctccctagtcaatgggatgaagaggagacaatcaaggtatctacatattttacatttttcctctcagatcaattagtacaactgcatgagattttttacatgtct

SEQ ID NO: 547305 - DNA, 495 bp, Homo sapiens
gtgattatttccatcataaatcaaaagctttttagagacattatctcattcctttcaacatcattttttagattaaggctgaaaaaakgtcaggcacatcttttttatgtaaaggatagtactttaatagttcaggctatgactaacttgttcaagtttagtcatttctaagcctgaattgaccacttcctttgcggatgtataactatttttagcccaggggcagatatttatataaaattccccaaggacaaccatgctagctctcgtctctgttcccagaatcctgattaaaacgacagcgagaaacaaaacaaagaaaacaaagagagaagagactcatgaagaataatattaaagagcaggaacttacctaatgtaaagtttaccatattgtaaaggggctttttcaaaagtaggtaaaacttcaaagaaatgataatcatatattggtaagatattgtgaaattgatattcttctacattactggtgat

SEQ ID NO: 547306 - DNA, 1218 bp, Homo sapiens
caggctcttcaagagctgcggtcaacaccagctccaggcctcgggctggaagcctcttcagcaagtgccgcagggaggccctgggtgggtgagccgggaggtagaattgcgtaacagctctctatccattgctgcggtcattagccatggagagggtgacgggggctgtaacggggcaagcctcccgggttccagctgccatcctcgcccctctgggctctttcctccctggctctgctgcagccggagcggttgcagggcacacattactcggtgcagtcggacatctggagcatgggcctgtccctggtggagctggccgtcggaaggtaccccatccccccgcccgacgccaaagagctggaggccatctttggccggcccgtggtcgacggggaagaaggagagcctcacagcatctcgcctcggccgaggccccccgggcgccccgtcagcggtacggcctgartctgcaacttccggtctggacgcgcagtgccctgcgcggggcctgctgtgccagggtcagcagctgcctcccctctgcccctggcgcaccacctgtccccctggatggtgccgactgtggtcagcagtcctcccatggtcctggggtttccggggacagagctggaagcagtgagcaccccaaacctgttctgtccggggcagctgcacctgttgttgccagctggagggatctgggagcgcagctttgccaccaagcccctgggcagttggattttccaacattttatcccgaaagcattcaaacgcacagaaaagtggaaggaattggccgccacagagcctgcattctgcaggtgacacgctcctgtgctgcgggccaagccttccagggagtcctgaagtggagattggacttggcatggccctcagtggcctgttggctccggccccaacacacacaggaggggacacagcccgggagggggcgggagggctcaggccccagggacagctgggctcgcagaggacaatccggcacttagggcgggcacctcgggagcgggagctccctgacgccagtcagagagggccgagcggacacttccaccgcctgagggaagagccgggggcggaccctgcttggtgcagaatcacaggagggtcctgtgattttttttaaagtcagacatcagggagagttggtggcgtcagaccccaaaggaccctgtagcggactgtggttggttt

SEQ ID NO: 547307 - DNA, 1218 bp, Homo sapiens
caggctcttcaagagctgcggtcaacaccagctccaggcctcgggctggaagcctcttcagcaagtgccgcagggaggccctgggtgggtgagccgggaggtagaattgcgtaacagctctctatccattgctgcggtcattagccatggagagggtgacgggggctgtaacggggcaagcctcccgggttccagctgccatcctcgcccctctgggctctttcctccctggctctgctgcagccggagcggttgcagggcacacattactcggtgcagtcggacatctggagcatgggcctgtccctggtggagctggccgtcggaaggtaccccatccccccgcccgacgccaaagagctggaggccatctttggccggcccgtggtcgacggggaagaaggagagcctcacagcatctcgcctcggccgaggccccccgggcgccccgtcagcggtacggcctgaatctgcaacttccggtctggacgcgcagtgccctgcgcggggcctgctgtgccagggtcagcagctgcctcccctctgcccctggcgcaccacctgtccccctggatggtgccgactgtggtcagcagtcctcccatggtcctggggtttccggggacagagctggaagcagtgagcaccccaaacctgttctgtccggggcagctgcacctgttgttgccagctggagggatctgggagygcagctttgccaccaagcccctgggcagttggattttccaacattttatcccgaaagcattcaaacgcacagaaaagtggaaggaattggccgccacagagcctgcattctgcaggtgacacgctcctgtgctgcgggccaagccttccagggagtcctgaagtggagattggacttggcatggccctcagtggcctgttggctccggccccaacacacacaggaggggacacagcccgggagggggcgggagggctcaggccccagggacagctgggctcgcagaggacaatccggcacttagggcgggcacctcgggagcgggagctccctgacgccagtcagagagggccgagcggacacttccaccgcctgagggaagagccgggggcggaccctgcttggtgcagaatcacaggagggtcctgtgattttttttaaagtcagacatcagggagagttggtggcgtcagaccccaaaggaccctgtagcggactgtggttggttt

SEQ ID NO: 547308 - DNA, 1218 bp, Homo sapiens
caggctcttcaagagctgcggtcaacaccagctccaggcctcgggctggaagcctcttcagcaagtgccgcagggaggccctgggtgggtgagccgggaggtagaattgcgtaacagctctctatccattgctgcggtcattagccatggagagggtgacgggggctgtaacggggcaagcctcccgggttccagctgccatcctcgcccctctgggctctttcctccctggctctgctgcagccggagcggttgcagggcacacattactcggtgcagtcggacatctggagcatgggcctgtccctggtggagctggccgtcggaaggtaccccatccccccgcccgacgccaaagagctggaggccatctttggccggcccgtggtcgacggggaagaaggagagcctcacagcatctcgcctcggccgaggccccccgggcgccccgtcagcggtacggcctgaatctgcaacttccggtctggacgcgcagtgccctgcgcggggcctgctgtgccagggtcagcagctgcctcccctctgcccctggcgcaccacctgtccccctggatggtgccgactgtggtcagcagtcctcccatggtcctggggtttccggggacagagctggaagcagtgagcaccccaaacctgttctgtccggggcagctgcacctgttgttgccagctggagggatctgggagcgcagctttgccaccaagcccctgggcagttggattttccaacattttatcccgaaagcattcaaacgcacagaaaagtggaaggaattggccgccacagagcctgcattctgcaggtgacacgctcctgtgctgcgggccaagccttccagggagtcctgaagtggagatyggacttggcatggccctcagtggcctgttggctccggccccaacacacacaggaggggacacagcccgggagggggcgggagggctcaggccccagggacagctgggctcgcagaggacaatccggcacttagggcgggcacctcgggagcgggagctccctgacgccagtcagagagggccgagcggacacttccaccgcctgagggaagagccgggggcggaccctgcttggtgcagaatcacaggagggtcctgtgattttttttaaagtcagacatcagggagagttggtggcgtcagaccccaaaggaccctgtagcggactgtggttggttt

SEQ ID NO: 547309 - DNA, 1359 bp, Homo sapiens
tctaaaatctaatttatgctgtcaactgtatgatatagtaccactgtcatatattctcactcaaatgacacatctaaaattatttggcttagtattaaagtaaatcattgctctcgttacatttataggaagagtagattttctactttccttgattttataactggccaatactaaatgaatctgtgtatctctcaggaatttggactgcagtagaacaggagcttattctcaagtctgaatttccaaaagtaggaaaaaaaaatcccaagaatctaactccttacatatattgttattcttaaaaatgtttacaaatttgccactcgaatagtcaactctcatgctaattgagacagaaaataagcacaaataattccctaaagcagttgtttctaacactcaccaaaaataaacttagatacacacgtacaacatatgtagtgtttctaacmctcaccaaaaataaacttagatacacacatacaaaaatatgactgtaataaatgccatcccccaaaaccctagacttctagagtcccatcaatgggccatattttaagcagtaccacaaaacatcagttctagaaaaggacctggtaagtcctgtggagtttggtaacgggacctgtccttctactttcaggatacctaatatttgcaaagtgcattacattctacaaagactagcatatacagcctcaaactttacaacataacaacttcatagtctttcacctactaattccacttctggaaatttgtatgttaagataagtaattacatatacacaaggattcatatataaatgtgtttgctcctgggtcatttaaaaatgttaaaaatttaaggatcctatgttaaggaaacaaataatgatagttacataaaatagataatagaatagtgtgctgctatgtaacaatcacattttaatgatttaatgccatagaaaatgcttccaatattacattaatggagaacagcagttagaagcaatccaagagaataaaaataaaaatacaatatatacagatacatgctttataatatgcgatattaaatatatatgcaaaaattttaacagtggctatatctgaatagtgggattatagatttttattttcttctatattattttatgtttattctaaattacccttaaattagctcatacttttaacatcattaaaattatttttcaaagaaaattaaagtccttagtaatattaacagaagatgccaggaaaactaacacagtagaaattacatagctttgttgaatgaactatgacatttaaaactcaaatataacctgtatctattttttaaaaacacaaaaattttatatacaacaa

SEQ ID NO: 547310 - DNA, 555 bp, Homo sapiens
atattgatgttgccaaatattaattcaggagctggtacagttagaaattagtaacacacacacacacacacacacacacgcgtgcatgcacgtaaaaagcaaggttaaactcgcaaggttaggcaaggttagctrccatatgatagcttaaagggaagaattctgtgctgataaatggagtatttttctccttaactgagtcatcctgtgtcattgttaggcactgtagacagtacataagttaactgagatctgatacttccttttatcccttaaaaatccaacacagggctcactgtaattaggtataaataggtgacttaacccttcagatctttctggaggagagataagtgtcttatgagattgaaataggagggatcaacaaagattgcagaagaattaagggctagcaaaatctgtcatgattccaaaaggatcaagttgaaagtgaaactagttcacacattttcacgacagcttcagagttaacatcctataaaggaatctatcaacattgtgacatttgtttaggcttctataagtgagaaaatg

SEQ ID NO: 547311 - DNA, 611 bp, Homo sapiens
cctatgaatatccagtttgagccatcggatctaagatccaaaaggtaagcatttaaaataaaacacatttcataattagggtctttaatgattaaaatacatctaattataaccaaacatgtatagatttgattataaaatatccactttcttacaggatttgtgtgtatacatgtggagagaagtaaataggaatactatttactggtttatatttktttttttttttttttttcactaaactcaacatctctgttgggggagtggttggggtaactttacaaagtaaggtacattgatataattcatttaacaaatatgtattgattacccactttgcgcaaggtaatatgctaagtgctcgaggtagaagagtaaaagtaatagaaaatcttcatcttcattgaggtaaaatttcagcagatagtttaaaataatttgagtttaaattttatttcattgtatacctgtaaaacccaaaagaatccacaaaaaaattataaacagtaagagaattcaataaagtagctgcttacaaaacaggcaaaaataaatagacttccaatgagaaaatgtaagaaaaaataaaatacatagaaatggtcttgagt

SEQ ID NO: 547312 - DNA, 611 bp, Homo sapiens
cctatgaatatccagtttgagccatcggatctaagatccaaaaggtaagcatttaaaataaaacacatttcataattagggtctttaatgattaaaatacatctaattataaccaaacatgtatagatttgattataaaatatccactttcttacaggatttgtgtgtatacatgtggagagaagtaaataggaatactatttactggtttatatttttttttttttttttttttcactaaactcaacatctctgttgkgggagtggttggggtaactttacaaagtaaggtacattgatataattcatttaacaaatatgtattgattacccactttgcgcaaggtaatatgctaagtgctcgaggtagaagagtaaaagtaatagaaaatcttcatcttcattgaggtaaaatttcagcagatagtttaaaataatttgagtttaaattttatttcattgtatacctgtaaaacccaaaagaatccacaaaaaaattataaacagtaagagaattcaataaagtagctgcttacaaaacaggcaaaaataaatagacttccaatgagaaaatgtaagaaaaaataaaatacatagaaatggtcttgagt

SEQ ID NO: 547313 - DNA, 611 bp, Homo sapiens
cctatgaatatccagtttgagccatcggatctaagatccaaaaggtaagcatttaaaataaaacacatttcataattagggtctttaatgattaaaatacatctaattataaccaaacatgtatagatttgattataaaatatccactttcttacaggatttgtgtgtatacatgtggagagaagtaaataggaatactatttactggtttatatttttttttttttttttttttcactaaactcaacatctctgttgggggagtggttggggtaactttacaaagtaaggtacattgatataattcatttaacaaataygtattgattacccactttgcgcaaggtaatatgctaagtgctcgaggtagaagagtaaaagtaatagaaaatcttcatcttcattgaggtaaaatttcagcagatagtttaaaataatttgagtttaaattttatttcattgtatacctgtaaaacccaaaagaatccacaaaaaaattataaacagtaagagaattcaataaagtagctgcttacaaaacaggcaaaaataaatagacttccaatgagaaaatgtaagaaaaaataaaatacatagaaatggtcttgagt

SEQ ID NO: 547314 - DNA, 611 bp, Homo sapiens
cctatgaatatccagtttgagccatcggatctaagatccaaaaggtaagcatttaaaataaaacacatttcataattagggtctttaatgattaaaatacatctaattataaccaaacatgtatagatttgattataaaatatccactttcttacaggatttgtgtgtatacatgtggagagaagtaaataggaatactatttactggtttatatttttttttttttttttttttcactaaactcaacatctctgttgggggagtggttggggtaactttacaaagtaaggtacattgatataattcatttaacaaatatgtattgattacccactttgcgcaaggtaatatgctaagtgctcgaggtagaagagtaaaagtaatagaaaatcttcatcttcattgaggtaaaatttcagcagatagtttaaaataatttgagtttaaattttatttcattgtatacctgtaaaacccaaaagaatccacraaaaaattataaacagtaagagaattcaataaagtagctgcttacaaaacaggcaaaaataaatagacttccaatgagaaaatgtaagaaaaaataaaatacatagaaatggtcttgagt

SEQ ID NO: 547315 - DNA, 1024 bp, Homo sapiens
ggtggttttaacatacatatacaaattcttcaatatattccttccttcaaatatggattctaccttcccccttcagtgtgggtaaggctggcctcatgagtgtgcaacctgtccagtcacacagagtcccaagttcagaagaatcccgtgtttcatttaatgctctgttgtcgctgccttgaaatttgtaataattttacaacaaaggaccctgcactttcaattttgcactagttccaataaattataatatagccactcctgagtggggtcaaacttagtgacttgcttcttacaaagagaatgtggcagaaggacaatgtgtgacttctgggactatttcataaaagctattacagcctcctctttgttcttactgatcacttaatctaggggaagccagtgccatttaatcatgcatccctatggagagatccaatgaagccctcagatgactgccttgacatcttgtctggttgacaataaaaccagaattggttgacatctcgtttacaatctcataagaaactcttaactcagaaggacccagctaagccaagctgttccccaattcctaagcccccaaaatggtgagacagtaaatgtttattgttgaaagcaactatgttttaagggagtttgttaggcagcgataactaaatgttggcaaagggtatactgaaattggacttctgatagactgcaggcacaaatatacattaattacaagctttaaaataagttcctgctctttaacattaaaattgataaaactctattctaagaaaatacttaaaacagaaaactgttggtttttttatatataagtcaaggtctcactgtcatctaggctggaatgcagtggcgcaatcacagctcactgcagcctcgacctcccaggctcaggtaatctctcaggctcccaagtagctgggactacaggggtgcaccactrcacctagctagtttttgttcttttttgtagagatgggttttcaccatgttttccaggctggtcttgaac

SEQ ID NO: 547316 - DNA, 511 bp, Homo sapiens
tttaaaaatattttattcagtatttttagttttttttccgcaggaaaaatgagtccraatagcctaatctgttttattactgaaaatgaattgccccacttattttttagtaagctgaaaaacaagaaataactccatttaaggttagcaagtttctgataaatatttcaggcatatacctcattaagatatcttcagcaaattccagtatttttccaatttgttattcatgaatatttattagtgatggataataaaatattttaaaattaaactaaattatttatcttctttgtgtaggactaacttcttcagtgcttagagtgtgagaaaaatggcaaatatgaatagtgattctaggcatcttggcacctctgaggtagatcatgaaagagatcctggacctatgaatatccagtttgagccatcggatctaagatccaaaaggtaagcatttaaaataaaacacatttcataattagggtctttaatgattaaaatacatctaatt

SEQ ID NO: 547317 - DNA, 511 bp, Homo sapiens
tttaaaaatattttattcagtatttttagttttttttccgcaggaaaaatgagtccgaatagcctaatctgttttattactgaaaatgaattgccccacttattttttagtaagctgaaaaacaagaaataactccatttaaggttagcaagtttctgataaatatttcaggcatatacctcattaagatawcttcagcaaattccagtatttttccaatttgttattcatgaatatttattagtgatggataataaaatattttaaaattaaactaaattatttatcttctttgtgtaggactaacttcttcagtgcttagagtgtgagaaaaatggcaaatatgaatagtgattctaggcatcttggcacctctgaggtagatcatgaaagagatcctggacctatgaatatccagtttgagccatcggatctaagatccaaaaggtaagcatttaaaataaaacacatttcataattagggtctttaatgattaaaatacatctaatt

SEQ ID NO: 547318 - DNA, 511 bp, Homo sapiens
tttaaaaatattttattcagtatttttagttttttttccgcaggaaaaatgagtccgaatagcctaatctgttttattactgaaaatgaattgccccacttattttttagtaagctgaaaaacaagaaataactccatttaaggttagcaagtttctgataaatatttcaggcatatacctcattaagatatcttcagcaaattccagtatttttccaatttgttattcatgaatatttattagtgatggataataaaatattttaaaattaaactaaattatttatcttcyttgtgtaggactaacttcttcagtgcttagagtgtgagaaaaatggcaaatatgaatagtgattctaggcatcttggcacctctgaggtagatcatgaaagagatcctggacctatgaatatccagtttgagccatcggatctaagatccaaaaggtaagcatttaaaataaaacacatttcataattagggtctttaatgattaaaatacatctaatt

SEQ ID NO: 547319 - DNA, 696 bp, Homo sapiens
gaaaggggctgggtaaaatgaggctgagactattgggctgcattttcagacagttaaggcattctaagccacaggatgagataggagattggcacaaaatacaggtcataaagaccttgctgataaaacaagttgcagtaaagaagctggccaaaacccaccaaaaccaagatggcgatgagagtggcctctggttgtcctcactgctacactcctgccagcagcatgamagtttgcaaatgccatggcaacgtcaggaagatacctatgtggtctaaaaggggaggcatgaataatccaccccttgtttagcatatcatcaaaaaataaccataaaaatgggcaaccagcagcccttagggctgctctgtctatggagtagccattctttattcctttactttcctaataaacttgctttcattttagtctgtggactggcccctaattctttcttgtgtaagatccaagaaccctctcttggggtctggataagaacccctttccaataacaggactacaggcatgagccaccatgcctggccttatatctattatgactaaggaagatctaacttgtcagaaaactatctaaagcctttaaaaaacagaaaacttagattcatctcaattcatattctcttgcccatggtctggcctacatgggaggtatagtggatcaatccaaattacagg

SEQ ID NO: 547320 - DNA, 686 bp, Homo sapiens
ggtgtgaaggtatgtaagaattagttgatgcttataaatagttctcatgagatatttactaaactttttcttctagcttgaaaaaaacaaacactgacctgctgtaagaatgttgtccttagtaaaaactataatgtgttcttatttttgaagctcttaaatcaactttatgaaaaacatgcaaattaaagataaataattcagcctctagaactcttcatatgtataattatggcacaaatatcattgttactgtctttttccaatgttaggttgagagtttgttccagaaatatcacagtaggcgtagctcaaggatcaaagctccatctcgtaacaccatccagaagtttgtttcacgcatgtcaaattctcatacattgtcatcatctagtacttctacatctagttcagaaaacaggttagtactttttaaggatttcaaacattaatccagtgttacttttaattttaggggtaattttttatatctacttgttaagttgctctaaaatgatttaattattgaatcttggctttcaagttaaaatcaagggtgaagatactaaaagttcgctgggcatggtggctygtgcctgtaatcccagcaccttgggagactaaggcagaaggattgcttgagcccaggagttcaagaccagcctgggcaacatagggatacccca

SEQ ID NO: 547321 - DNA, 982 bp, Homo sapiens
cagactctccccttggtctagcaaaattagtctttaattcatctgaaagagaattaagctaatacaataaaagtaaaaatgcgctcttttgcgtcctttgacgaatgctgcctcctttcaaccgtctgtctgaggatcaatagtgggtctgtaaggagcgccagcatttgctagagcaggcagtgagatgatggattttaatcattcacatgattttataaccacgaaacaaagaaggcggatctggcttccacatgcataatctcagttttgctgtttttgattttgccagtcctacatgcaattcctgtctggaaggygcatgtcccgtttccaaattccattccacacctccatgtttgcttctcagtgaccgatacgggcaacttgtgtgtttcattggggcccttttcccattagccccagacctggagaggggtggcactgggaagtcctgagctgagcctcctggctggcgttgaggtgagtggggcatctcaggcgtaatcacctacagtaagcaagcttcagagtgagcggctctaacaatgggaggccaggcaatctgtgacagttgataggattattattattacagagcgcaaaaagcttctgctttcttttctgctcctttgcagacctcataaggcctctctgtgatttctgcatagttaatttgtcagtttataaattaccacattatgttaacgctgaatgcttcaaaacacaaatatatgcacagagggcttgaatatttgaagtgttttagtactatggggaaataattttgttgtcaagctgtggcagatatagaactgctaggggatacatggccatttcatcaggactgtgtcgatgatggcctgtgaacatccaagggggaaaatcatcttttatcactattgtgtaccgtgccggtccagatggaggataaaacatgcatgagttgcccgcagctctgaaaataattatactcatttgc

SEQ ID NO: 547322 - DNA, 929 bp, Homo sapiens
ggttgttttgttttgttttgtttttgtgcctgtcatcttcacaggaagagcttcccctgggcaactgctgcctctttagtctggggcccagaatgaacacatgtggagtagcccagagcttgatcgacaaagaggagccaagcccaggtggagacaccagyttgaaacagagcccccagctgaccgccattcaacctgtatgcccatgagaaatacatgcgcatggctgcattccaccaagagcatgagagaaagctggtgacatccgctgctaccagcacaggcatccctgcaggactccttgtgctttctctacactctgcttctactccataaatacttcctttactaagccctcagggaaccatcctaatttgagtgtcagctgtttcctgtactgacactgaatgaatgatacaagcactgggcccagtccagccccacagccatgtcacattgtcagcaaaagttcaaaatactacacttgagaccaactgcccctacccccatttgtttcccatttgctatttaaactgaaacccttatcttagaagctggtcatgagatcttattttatcttttttatgtgttagtttttagaatttcaacttgttatttggaaaaaatttcaaacatatgcacaagtagagacagcattataacaaacacctatgtacctgtgatccagcttcaacaatgatggacattttgccactcttatttgatctattcccctactgtttttttttttctctctaaatctaatgacctttcaaattccagaggaatctagagattccatcgtacttctaatcttctgtaatctcttggcagcatttgctgctattgctcactcttgccaatctgccattgctgtctcctagttcttttatctcttgtgactgctctccatttccagtttttgactc

SEQ ID NO: 547323 - DNA, 929 bp, Homo sapiens
ggttgttttgttttgttttgtttttgtgcctgtcatcttcacaggaagagcttcccctgggcaactgctgcctctttagtctggggcccagaatgaacacatgtggagtagcccagagcttgatcgacaaagaggagccaagcccaggtggagacaccagcttgaaacagagcccccagctgaccgccattcaacctgtatgcccatgagaaatacatgcgcatggctgcattccaccaagagcatgagagaaagctggtgacatccrctgctaccagcacaggcatccctgcaggactccttgtgctttctctacactctgcttctactccataaatacttcctttactaagccctcagggaaccatcctaatttgagtgtcagctgtttcctgtactgacactgaatgaatgatacaagcactgggcccagtccagccccacagccatgtcacattgtcagcaaaagttcaaaatactacacttgagaccaactgcccctacccccatttgtttcccatttgctatttaaactgaaacccttatcttagaagctggtcatgagatcttattttatcttttttatgtgttagtttttagaatttcaacttgttatttggaaaaaatttcaaacatatgcacaagtagagacagcattataacaaacacctatgtacctgtgatccagcttcaacaatgatggacattttgccactcttatttgatctattcccctactgtttttttttttctctctaaatctaatgacctttcaaattccagaggaatctagagattccatcgtacttctaatcttctgtaatctcttggcagcatttgctgctattgctcactcttgccaatctgccattgctgtctcctagttcttttatctcttgtgactgctctccatttccagtttttgactc

SEQ ID NO: 547324 - DNA, 929 bp, Homo sapiens
ggttgttttgttttgttttgtttttgtgcctgtcatcttcacaggaagagcttcccctgggcaactgctgcctctttagtctggggcccagaatgaacacatgtggagtagcccagagcttgatcgacaaagaggagccaagcccaggtggagacaccagcttgaaacagagcccccagctgaccgccattcaacctgtatgcccatgagaaatacatgcgcatggctgcattccaccaagagcatgagagaaagctggtgacatccgctgctaccagcacaggcatccctgcaggactccttgtgctttctctacactctgcttctactccataaatacttcctttactaagccctcagggaaccatcctaatttgagtgtcagctgtttcctgtactgacactgaatgaatgatacaagcactgggcccagtccagccccacagccatgtcacattgtcagcaaaagttcaaaatactacacttgagaccaactgcccctacccccatttgtttcccatttgctatttaaactgaaacccttatcttagaagctggtcatgagatcttattttatcttttttatgtgttagtttttagaatttcaacttgttatttggaaaamatttcaaacatatgcacaagtagagacagcattataacaaacacctatgtacctgtgatccagcttcaacaatgatggacattttgccactcttatttgatctattcccctactgtttttttttttctctctaaatctaatgacctttcaaattccagaggaatctagagattccatcgtacttctaatcttctgtaatctcttggcagcatttgctgctattgctcactcttgccaatctgccattgctgtctcctagttcttttatctcttgtgactgctctccatttccagtttttgactc

SEQ ID NO: 547325 - DNA, 929 bp, Homo sapiens
ggttgttttgttttgttttgtttttgtgcctgtcatcttcacaggaagagcttcccctgggcaactgctgcctctttagtctggggcccagaatgaacacatgtggagtagcccagagcttgatcgacaaagaggagccaagcccaggtggagacaccagcttgaaacagagcccccagctgaccgccattcaacctgtatgcccatgagaaatacatgcgcatggctgcattccaccaagagcatgagagaaagctggtgacatccgctgctaccagcacaggcatccctgcaggactccttgtgctttctctacactctgcttctactccataaatacttcctttactaagccctcagggaaccatcctaatttgagtgtcagctgtttcctgtactgacactgaatgaatgatacaagcactgggcccagtccagccccacagccatgtcacattgtcagcaaaagttcaaaatactacacttgagaccaactgcccctacccccatttgtttcccatttgctatttaaactgaaacccttatcttagaagctggtcatgagatcttattttatcttttttatgtgttagtttttagaatttcaacttgttatttggaaaaaatttcaaacatatrcacaagtagagacagcattataacaaacacctatgtacctgtgatccagcttcaacaatgatggacattttgccactcttatttgatctattcccctactgtttttttttttctctctaaatctaatgacctttcaaattccagaggaatctagagattccatcgtacttctaatcttctgtaatctcttggcagcatttgctgctattgctcactcttgccaatctgccattgctgtctcctagttcttttatctcttgtgactgctctccatttccagtttttgactc

SEQ ID NO: 547326 - DNA, 1288 bp, Homo sapiens
gctcactgcaacttccgcctcctgagttcaagcaattctcctgcttcagtctcccaagtagctgggattacaggtgcccaccaccacacctggctaatttttttatatttttagtagaagtggggtttcaccatgttggtcaggttggtctcaaacttctgacctcaggtaatccacctgccttggcctcccaaggtgctgggattacaggcttgagccacggccaagaaatactaaatttgattgatttatatcaacatcctgttccttgatggtggggtaaaatgaggcttgatggagtgatagaaccttaattttcctcaakaaagcaaaatatcctaacgtggcttccaaattttaacatcgcgcaattgtacgaatttttatttaatgcctttcagactgagtgttgagggccaggctgtgtcttctacggctttgcattctccacagcatctggcattaggcccggcatattgcaggcactctataaatggcagctgcctgaataagggggtattatcatttgggggttttgttaaaaatgggatcacgaaggagaaagtgtttggaggaggctgcatgaacaactcgctattcgtaaggccatgctgtgagggggtgttttgaggacacactatcccggaagaagtggcttccagaagcacaagaaagccttttattttgtgaaatgagacccagatggcaataccaaataacaacaattatgatgatacattttttataaaagatcccaggcctgacaatgtctggctttaaattataaattggctcattatcaggaaaaaaatatttattgaaacacagcaatgaccaatgagctcattatcctaaggtggcagccaagaagtcctaagacacagacctgttgtaaaaatcaggcagttatttgtgcaagcggtatttggtgcatagcttctcaacagggataattttgttccaagatgagtaccagggacaggaatcagactttggggtcctagtcgatcatctggaaaataggtctaattgggatgtgtcccttggaggtttgcttcattaatttctggttgagagctcagaaagcttcaaatcagactcctcagcactgtgctcagccttatttaaatacctacatcaaactgcttagtctatttcactttatttcttaagcctctctgttttttgttgttgctacattaagactttcttaggaatttgcctagattcagctaaccgtccctctacttccttcttcagaagactcttctttgtgtctcctggggca

SEQ ID NO: 547327 - DNA, 733 bp, Homo sapiens
ctaggagcacatgtctatagtcccagctacctgggaggctgaggtgagagcattacttgagcccagatgtttaagtccagcctgagcagcagagcaaggccccatctcaaaaaaaaaaaaaaaaaaaaaaaattgttcatagcaacttactcatagccaaaaactagaaacaatccaaattgctatcaacaaatgaacagataaacaaactggtatatggatacaacataccattggaacattctgaacaataaaaagtaatcagctacatataagctagaacatggataaatctcagaaacattatgccgaatgaaggatgccagacacagagtatatactatattattatgtttatatgaaattatagaaaagaaaaagttcatctatggtgacagaaagcagatcagtggctaactgagaccagagttgggagaaggactgactataaaagggcaagagagaactttctggggtgatgaacatgttttgtttcttgattgtggcggtggttataaagaggtatacatgtgtcaaaactatcaaattatacactttaagagtgcatttgatcgcacgtaaaatgttcctcaataaagttgatttttaaaaaataatataacacaataatacattgccacaattctatgtaataaaagcaacaaattaaaagattaaaagaaaaaagcccacttatgattccatwatcctaacaaagctttttcattttctg

SEQ ID NO: 547328 - DNA, 519 bp, Homo sapiens
tgggaggccaaggctggcggatcacttgaggtcaggagtttaagaccagcctggccaacayggcaaaaccccgtctctactaaaaataaaaaattagccaggtgtggtggcaggtgcctgaaatcccagctactcgggaggctgaggcaggagaattgcttgaacccaggaggcggagggttgcaccagagtcgaaattgcaccctgcactctagcctgggtgacaagagcaaaacactgtctcaaaaaaacaaaaaacttgcaaattccttagttattacagtttactgtttttcattttattattgactgccaccctttgctctgcttatgttaattcccaaagacacataatgcttcaggaatactgcgtcaagtttcttttaaaaacatgcatagaaaagaatggtagacactgtatatcaatgggaaaaggataaatttctcaaaaagtggcacaggaacaactcgttattcatatggaaaaaaattacagaggctgccatcctcacactctat

SEQ ID NO: 547329 - DNA, 1410 bp, Homo sapiens
tgttgttgacaagtaatttgttatagtagctctaacyaagactagtaaaaataataaagaaaatattcacagacataatcaggaaatatttctccggggcctgacttagcctaagctatttccattttttttttttttttgagatgaattcttgctctgtcacccaggctgtagtgcagtaccacaacctcggcttactgcatcttgtgcctcccagattcaagcaattctcatacctcagcctcccacgtagctgtgactacaggcgtacaccaccacaaccagctaatttttgtactagagacggaatttcaccatgttggccaggctggtcttgatctcctgacctcaagtgatctgcccacctcggcctcccaaaatgctgggattacaggcatgagccaccgagcccagcctatttctacttcttagaggccccacaaaatgataatgaaccagatgaatagtttctatgtagcttttgaagcaaacactacagggttggttggcatatatatattgctaagcaggcaaagcttaaattatggacttcagatgcccatttttacattggtttctaaacccataacttcatataacttcatcctcttcatcaggaacccagtgtctcggggtccaaggacaccttagtgtgagtgccagctctgctactcagcagctgtgtaattctgtgcaaatcatctaacctctcaaagcctcagttttgttacctttaaaatgggcctaatgccttccccacagagaacctaaaaattaaagatcagactcagggtctgacccattgagtgacactgaaagcccatggctttcaagaaatgttacttccttactcccaaatccaaacctgctctaagggagtgataactgactcttaattgttgtaggcactatattagatattgctgagtacacattttcactctttccactaaactgtgattttcattttataaaaactgtgtaatgattttgttgttgttgatcatttgttttccccaaagtgaaatgcagaacccaggctagtagcagataatagcagagccactgtggttgaaatggggagaggggttcagggctggaccacttgatattctgcacacctgagcctcctctgcagagcagagcgctcccagaacacagcttgaaaacctctgcataggccatcatgcttcacaggaactgttgcaaaaggatctcatttattaatgaggccatatcacaggttaataactcattatgatgtatcctctcaatatgtttgcatttgcctattacctaactctgaagaatgtgtttctaaatatgaatattccagcataacaccaatcagctagaggttatttatttttcccaacttggggatgagctgaaagggtggagcagttgagg

SEQ ID NO: 547330 - DNA, 538 bp, Homo sapiens
ggcagggggagaggcgaggcaggggggacaggatcaaggtcactcacatgtaggcttcctccgacccgtgtctgcttcctgcgggaggaggcgagaattgggcctgagcccctgggtgtggcccccaccatggcctccccctttctccaggagcctacctacctttgctgaagttctggtacctggaagatgctggatctggaagaaagacccagctaattgctytctcccctggcccctgctttgcacccagctcgggtgctgcagcccaaggcagggccagctatttcccgtgtctgagcctttgcagtgctccctgtcccctcagtggggcatgtgcgagtgtgcaccctccccctgccaggccgattccaggagcctgccctgccccagcctgtgtgtctctcctggggaggcctcgcctggccccgcagcccccactgcacgacgcctgtcccatggggttttcgcctgtcttagtcccagcttggctaggcctgtccctgtccctgccctgtgccactcaccctccaggctg

SEQ ID NO: 547331 - DNA, 559 bp, Homo sapiens
cctcagtaacactcagtaagtgtggcctcactgattctcaaaagagtaaaataaaagtgggggatggggagggagaagaggaactgataggccattccagtgtcttgtgtatttagaatgcrcagacccactagctttaaaatattactttatgtaacttaactttttgctagttagacttgggaagggtgatgagagagatggagtatggcaagagtagtgtaagagacatacaattcaactttctgtaaaaaagtaaatgcataatctttatacacggtttttcagttgtctgtaaagccaaccacataattaggccaagttatttgagcacaggagagagaccaagactaccttgtatttttgatagacttggtttaacttaaaaatggagaatgactaagacaggcttataaacattaaagtaatttagaaacttacatatttacaaattaaatgcttttacccacaaaatatcaaatgcagcataattatgctattcataagatagtaataggattaaattttttttttttttgagacagagtctcactctgtc

SEQ ID NO: 547332 - DNA, 560 bp, Homo sapiens
catcattctaagtgctttacaacgattagcttctttaatcctcataactccaggaggtgcgttgctatccccattttgcagatagaaaaccaaggcacagagaggctaagtaatttgctcaagggttatataaagatcacacgtacatacasgtataatgtctgcttggaaaagacgttctgtgctaggcgaaagtaacagaggagaaggaacatttcttctactagacatgataaataattggctttccttaatacttacaataaccgtgtgatgtaagtattttcctgatcttatagagggggagactgaaacttagcgaggttcaatagcttgcgcacggaccccatggctagatggagtgaccccaaagcatgaacatgtcctacgtgccatacaactttcatctgggcctgtgattgagaatcgtggccttagcacatctcttgccaccccagggaaggatctgcctagccacctggcctccgcctgggcaccacaagggacagggaccccacagtgggtggccaaacacgtaagagcctgctctgcccttcact

SEQ ID NO: 547333 - DNA, 560 bp, Homo sapiens
catcattctaagtgctttacaacgattagcttctttaatcctcataactccaggaggtgcgttgctatccccattttgcagatagaaaaccaaggcacagagaggctaagtaatttgctcaagggttatataaagatcacacgtacatacaggtataatgtctgcttggaaaagacgttctgtkctaggcgaaagtaacagaggagaaggaacatttcttctactagacatgataaataattggctttccttaatacttacaataaccgtgtgatgtaagtattttcctgatcttatagagggggagactgaaacttagcgaggttcaatagcttgcgcacggaccccatggctagatggagtgaccccaaagcatgaacatgtcctacgtgccatacaactttcatctgggcctgtgattgagaatcgtggccttagcacatctcttgccaccccagggaaggatctgcctagccacctggcctccgcctgggcaccacaagggacagggaccccacagtgggtggccaaacacgtaagagcctgctctgcccttcact

SEQ ID NO: 547334 - DNA, 373 bp, Homo sapiens
ttagagaaaatgctctaagtatatatacacatgtagtagataaacagagttacaaattgatagttacaagcaaatgtacagaataaaaatatgtaccatgagcctagtgttgatttttaccacacacacaaaaaaaccaatgttaatgattaaatcacaatttcctgatgatatacaagataaaaaacagggatgaaagtgtagaaacacacaacaaagtaaattattaagaaaagaaatgaacacaatataggataaagacaawtgcagataggagaatttaacacctatggtggcacatttagaccaaatactcttttttcaataaagccaaaataaattgtttgataatattctgtttactaaaaaaaaa

SEQ ID NO: 547335 - DNA, 2103 bp, Homo sapiens
agcaatgatggattaatgttttgtacaaaaaaagaatgaaacctcaaacatcctgcataactctcatctttctgcttttcttcatcagttttccatgaagtggaaagcaattaatacttccagcaagtgccctcatccaatgtgggaatgggagctggtgtgcaaatctgcagaaggrccataagaatcccttgtacttcagacctcttgtacctctgatccacattcagagggctcaggagagttgggtcacagtggtctacagcagtagcctcccaaacgaaacatcttcctgtgattcttccattttctctgtctcacacacttgcacccttcctgcttcctcacatcacctccagataatcaactatacccaacttcttttcacagactttgctttcagtcactgaaatatacaaatataaaggttctttctttctttatgtaaattatacaagaataacaatgatgaaaggtgtacaagaataagggacaatataattcttctgattagagtagcatgtttccctagccctcatcttcccaaaacagacaccctacttatcaacacttgatagaggtgagaaacccttcagtcctttaagaagtttgtattgcactttcaatgtgtattgatataaattcttggccttcttttctttttctgggaagtctgactatatattagtttgcctacaacactgcaagtacccagaaaacaaatcaaaacattttaaaaagccgtaggttcctgattattgattctgagcgtgaattgaaggctaatttgccaggtgcaccatctccactaatagccatcccagtctttacatctgcctgtagtgccttcttgtagtgtgagaaaaactaggcttccccttagaggagtgcatagaaggtgaaaacagacatgaatttctaaaatgtgaaacagatttttttttaactctagtaaattagagtcagcagagaccatgtatataatttaaagtttcttgctcaagtagcatacttgagtaaataaaaagagtatgggaaatttttccaaattggggcctgagattggccccttctcacagttatttaggtagtgcatattacgatttcagaatttgtcattcatgttgtagtatttaaaatggagcccacgttataatcattttttttctgcacacaataatcaccaacagtttattacatttttgcctgaatgtgaaacattgatgccagatgtacatcgtttgtaaagccactgactaaaccatgtggtttataaatcctatttacctgccagtttttatacctatgtctcatctccattgtttagagagaaactttgtgacattcagtctttaatagagcaagagaaagttggaattgtgttttcacaaaaaccatgcattcagccttggaaaaagtagtaaatagatcagaaaaattcctctctcttttgtaaggcgaactaagctgttctccaagactctttgatgtaaactggaggataatctctctgaagtcatccctgagccagcttctgagcactatcagctctaagatttaacagcatttcaaagattcacatctgtggtagaggactgaaggtaataaggacaatatctgatcattgcatggcatcacattcactagatacataaaatatttagactactgtctgaattttagtttcattaaatttctatcgctttacaattaaaaaaaatacagttgtggcctggcccagggaaagaggccttcataagtttggatggtcattaaacagtagattgaagcatctttgtgtaaagttataaagaattatacattatattttagttgttttttcagtgaatttatttgttattcttagacctgagggggtcaggtggttacattattaattatttttactaatagtacatcatcagaaatatatctttaaaaaactgaagtaattctggtgaagcatacgtaatgactgatattccatatatatgtaaattatatatatactaacatatacgtatgtgtctatatatatttatatatatatgtatatatacactaattcttacagttttttttgtttttgtgagagttaggatt

SEQ ID NO: 547336 - DNA, 2103 bp, Homo sapiens
agcaatgatggattaatgttttgtacaaaaaaagaatgaaacctcaaacatcctgcataactctcatctttctgcttttcttcatcagttttccatgaagtggaaagcaattaatacttccagcaagtgccctcatccaatgtgggaatgggagctggtgtgcaaatctgcagaaggaccataagaatcccttgtacttcagacctcttgtacctctgatccacattcagagggctcaggagagttgggtcacagtggtctacagcagtagcctcccaaacraaacatcttcctgtgattcttccattttctctgtctcacacacttgcacccttcctgcttcctcacatcacctccagataatcaactatacccaacttcttttcacagactttgctttcagtcactgaaatatacaaatataaaggttctttctttctttatgtaaattatacaagaataacaatgatgaaaggtgtacaagaataagggacaatataattcttctgattagagtagcatgtttccctagccctcatcttcccaaaacagacaccctacttatcaacacttgatagaggtgagaaacccttcagtcctttaagaagtttgtattgcactttcaatgtgtattgatataaattcttggccttcttttctttttctgggaagtctgactatatattagtttgcctacaacactgcaagtacccagaaaacaaatcaaaacattttaaaaagccgtaggttcctgattattgattctgagcgtgaattgaaggctaatttgccaggtgcaccatctccactaatagccatcccagtctttacatctgcctgtagtgccttcttgtagtgtgagaaaaactaggcttccccttagaggagtgcatagaaggtgaaaacagacatgaatttctaaaatgtgaaacagatttttttttaactctagtaaattagagtcagcagagaccatgtatataatttaaagtttcttgctcaagtagcatacttgagtaaataaaaagagtatgggaaatttttccaaattggggcctgagattggccccttctcacagttatttaggtagtgcatattacgatttcagaatttgtcattcatgttgtagtatttaaaatggagcccacgttataatcattttttttctgcacacaataatcaccaacagtttattacatttttgcctgaatgtgaaacattgatgccagatgtacatcgtttgtaaagccactgactaaaccatgtggtttataaatcctatttacctgccagtttttatacctatgtctcatctccattgtttagagagaaactttgtgacattcagtctttaatagagcaagagaaagttggaattgtgttttcacaaaaaccatgcattcagccttggaaaaagtagtaaatagatcagaaaaattcctctctcttttgtaaggcgaactaagctgttctccaagactctttgatgtaaactggaggataatctctctgaagtcatccctgagccagcttctgagcactatcagctctaagatttaacagcatttcaaagattcacatctgtggtagaggactgaaggtaataaggacaatatctgatcattgcatggcatcacattcactagatacataaaatatttagactactgtctgaattttagtttcattaaatttctatcgctttacaattaaaaaaaatacagttgtggcctggcccagggaaagaggccttcataagtttggatggtcattaaacagtagattgaagcatctttgtgtaaagttataaagaattatacattatattttagttgttttttcagtgaatttatttgttattcttagacctgagggggtcaggtggttacattattaattatttttactaatagtacatcatcagaaatatatctttaaaaaactgaagtaattctggtgaagcatacgtaatgactgatattccatatatatgtaaattatatatatactaacatatacgtatgtgtctatatatatttatatatatatgtatatatacactaattcttacagttttttttgtttttgtgagagttaggatt

SEQ ID NO: 547337 - DNA, 2103 bp, Homo sapiens
agcaatgatggattaatgttttgtacaaaaaaagaatgaaacctcaaacatcctgcataactctcatctttctgcttttcttcatcagttttccatgaagtggaaagcaattaatacttccagcaagtgccctcatccaatgtgggaatgggagctggtgtgcaaatctgcagaaggaccataagaatcccttgtacttcagacctcttgtacctctgatccacattcagagggctcaggagagttgggtcacagtggtctacagcagtagcctcccaaacgaaacatcttcctgtgattcttccattttctctgtctcacacacttgcacccttcctgcttcctcacatcacctccagrtaatcaactatacccaacttcttttcacagactttgctttcagtcactgaaatatacaaatataaaggttctttctttctttatgtaaattatacaagaataacaatgatgaaaggtgtacaagaataagggacaatataattcttctgattagagtagcatgtttccctagccctcatcttcccaaaacagacaccctacttatcaacacttgatagaggtgagaaacccttcagtcctttaagaagtttgtattgcactttcaatgtgtattgatataaattcttggccttcttttctttttctgggaagtctgactatatattagtttgcctacaacactgcaagtacccagaaaacaaatcaaaacattttaaaaagccgtaggttcctgattattgattctgagcgtgaattgaaggctaatttgccaggtgcaccatctccactaatagccatcccagtctttacatctgcctgtagtgccttcttgtagtgtgagaaaaactaggcttccccttagaggagtgcatagaaggtgaaaacagacatgaatttctaaaatgtgaaacagatttttttttaactctagtaaattagagtcagcagagaccatgtatataatttaaagtttcttgctcaagtagcatacttgagtaaataaaaagagtatgggaaatttttccaaattggggcctgagattggccccttctcacagttatttaggtagtgcatattacgatttcagaatttgtcattcatgttgtagtatttaaaatggagcccacgttataatcattttttttctgcacacaataatcaccaacagtttattacatttttgcctgaatgtgaaacattgatgccagatgtacatcgtttgtaaagccactgactaaaccatgtggtttataaatcctatttacctgccagtttttatacctatgtctcatctccattgtttagagagaaactttgtgacattcagtctttaatagagcaagagaaagttggaattgtgttttcacaaaaaccatgcattcagccttggaaaaagtagtaaatagatcagaaaaattcctctctcttttgtaaggcgaactaagctgttctccaagactctttgatgtaaactggaggataatctctctgaagtcatccctgagccagcttctgagcactatcagctctaagatttaacagcatttcaaagattcacatctgtggtagaggactgaaggtaataaggacaatatctgatcattgcatggcatcacattcactagatacataaaatatttagactactgtctgaattttagtttcattaaatttctatcgctttacaattaaaaaaaatacagttgtggcctggcccagggaaagaggccttcataagtttggatggtcattaaacagtagattgaagcatctttgtgtaaagttataaagaattatacattatattttagttgttttttcagtgaatttatttgttattcttagacctgagggggtcaggtggttacattattaattatttttactaatagtacatcatcagaaatatatctttaaaaaactgaagtaattctggtgaagcatacgtaatgactgatattccatatatatgtaaattatatatatactaacatatacgtatgtgtctatatatatttatatatatatgtatatatacactaattcttacagttttttttgtttttgtgagagttaggatt

SEQ ID NO: 547338 - DNA, 2098 bp, Homo sapiens
taaaattctccattaacgtaagacaaaaaaatgaaaagagaaaaaaaggaacagaaagaacataaatggatactttccataagcataactgaatttctgctcttccgaaattcagttgaagctactgaaagaagaaaagaaacttttgactccctttctctctaacctcccaggtttaaattttggacacatgttaaataatggaagttcctagaaaaggttacttttgattcacaacgtgggcaggaaagtgctgggtagagaagggtgtggtccctgggtagggctccaccccagggtataggctgatagacctaggtgagaataggcatttctgttttcctgcctaaatgctgcatttcccaagaccaccctggcctgccacgcccgcatcgtgtgcctgtgaaaacgccgagaccctagtggtctagctggacgtggagaggaacgctgcggcgtaaggacacgccaacagatgctggcaggccagcaggccattaactggcagaacgacgcgaagtttggccagggctgtcagaggagagcccgggccactgaacagcctactccaggggaaaaccatttcccttttgtctcccccatctgttgagacctgcttccaccaataaaagcttgcactcattctccaagcccacgtgtgatccaattcttgcagtataccacggcaagaaaccccgggatactgaaagccgtctgtgcttgcgataaggcagggggtctatttgagctgactaacaccagctgcctaccgagggctaaactaaaagagcaccctgtaacacacggccagtaaacattcacccctagacactgccatagtgtggagccccataacctgcctatctgcatgctcccctagaggttggagcagcggggcaccgaagaagtgagccacccccatcgcacaccctgccagggggacaagggagcttttccccttcactttcagagccaggcagaggagaggctttaatacctgctcttcataggaatcaacaacaataaaaagtaactacacaatgactcccggcatgccagagcaagaatatcatgcagctgtttgaatgcattgccacgggtaaagtgatgcccatgaggacgatgaattggtatgtttccgagatgggctgtaaggcagtggcgatgacatggtctatgagcaaatgctgttatgccagctctaagatttgaatattctcatttggaacggacttgtttgaggcttgtcgattagtaacacagcacgatgataaaggtaagcttttgggagctaggcagacatgagcttcattctgtcaccaycaattattgctcatgtaaccttttacaagtaattaaaacaatttgaacctgtttattcgctaaattgggaaaaaagtacttagctcacagtacctttgtgagtattaggtataataatgtgtataaagtaatcgctatgtaataggttttcaataactattcatgcatttattccacccactcccactccactgcactgtgtttaagtgtacctactcaagggtaactacctacacggtagttaagagtagggtctacagacagattacctggattcaaatcctggctctgcttaattaactcatcattaaaaaaggcggcaataagggtaccttctctgtagagacattacgatgaatacatgggctgatatgtataaagtgcttagaagagtggcaaataggcggaatgtaatgtttgctattcctattatttaactgggttattggtgctctgttaattcacaaatactctcagaatcatttggctttatgttcctttttcttattgaaattcaaatcattctccttcattgatttatgcacaagtatgactttgttttcagcagctccttttgtagaaatctgtttggaaggggtattgtggcaaaggaagactcagacccatgaacaaagaagcacacagtaacacattctaatggactgataaatcctgagaagggcaaagctggttcctaaagtggctgaggtcctaaaataaggaggtgtacaggaggaatcaaaagcaaaagttaaaactttgtatctgttgtctt

SEQ ID NO: 547339 - DNA, 594 bp, Homo sapiens
aaaaagattatgttaagcaaatcaaatatattcaatattaactctaacggcaacaataatgaccatagacagtacggttgataaaatggaaagaaggttgaatctcatagatagaactatcagtgtataaaataagtctatcacatgctttttgtgggatccaagacagtgcgttaacatctcaaaacatcagtgtcctccgagacaaataaacaaatgtgtttgcagtgaagatgagtaacattcatgacatataggacacacttaatcaataactatttgtgttacactgtatatcttgcctttaacaaaggatgattaaaawttttccaatctgattttaatttaattttatcctgttgttacaaggcaatgtcttttctaataacttctgctgcaaattacaaaacatttctgtctaagggaaatcatgttattttcctgttcaaaagccaatcatgtttgtctcaaggtcaacaaaaacaaaaaaaggctgtgaatagtggtcaagtgcttaattttcttttcaaaagataattacttagggagataaaatttatagtcaatggcaaggtaaatctttgggtcaatgaa

SEQ ID NO: 547340 - DNA, 595 bp, Homo sapiens
taaaaacccaagatacaatcaaaatcccagatgctggtctctattcccatgaaaaagtgctcatgacatattgagaagacctacttacaaagtggcatatattgcaatttattttaattaaaagatacctatttatatatttctttatagaaaaaagtctggaagagtttacttcaattgtagcaatgtcagggtggtggcagtataggtgatttttcttttaattctgttaatttacctgtatttcctaatttttctacaatgaagatgaattccttgtataaaaataagaaaagaaattaatcttgaggtaagcagagyagacatcatctctgattgtcctcagcctccacttccccagagtaaattcaaattgaatcgagctctgctgctctggttggttgtagtagtgatcaggaaacagatctcagcaaagccactgaggaggaggctgtgctgagtttgtgtggctggaatctctgggtaaggaacttaaagaacaaaaatcatctggtaattctttcctagaaggatcacagcccctgggattccaaggcattggatccagtctctaagaaggctgctgtactggttg

SEQ ID NO: 547341 - DNA, 557 bp, Homo sapiens
taaaactcaacagaattagtatactttaaatcactattcttatcttgtcagcttatggaattctaaaccttacttatttattttttaagtcctgaaaaagctttagatatttggtggtagttaatatatacccaggctggagtagagcagtgccttcaaggcttaccgcagccctgacttcccgtgctcaagtgatcatcccgcctcagcctcccaagtagctgagactataggcacgcaccaccacacccagtcaatttttaactttttttttgtagagacagggtctatgttgcccagcctggtcttgaactcctgggctcaagtgatcctcctgcctcagcctcctacagtgctgggattacaggtatgagcacagcttccagactctatttttttttctttaggctgatgaattgttgttttcattctgttcatytgatagtgtactgacactttctattgtcaattcagacaactgccaacttagataattccaaacttaaaaatttattttctctacttaccatctaataattctagagtaactgtaggat

SEQ ID NO: 547342 - DNA, 1165 bp, Homo sapiens
tcagctcatctaaaaattgaaaaaaaaaaggtattggtataaatatagtctttaaaccaaatttagccctgttcagcacactgctttcactggtttgccaaaatttataatggaaagggtggtgtargcagcagtggggcttctgaaaacttctgttcccctcaagcttccaggacaagtgcctcctcctcacagtaagcctgctccaactcaagcagtagcaaagtcctgggtcgatgccaacctaaaaattgggcatggggaggaaggaagcattaggcaactatggtggggtaagataagggactgaggaaagaaaatgtcattacaagtggtgtggttgacactgtggggaccagggtcagtctaaacaggaggtgtggaaaaaggaacagcatggagaaacttgagagcacaacgacacatttctgttagatgctaaggcaaaatgatgattccagagcatggaggtgcccagaaagcagcagtgtgtgtgcaggtacttgggagaagaagggagagggagacagttctggaaagggaaaaggaatctctttcctagtgtttctttctttttttttttttttcatctcatctcaaggcttacatttgaatatttcttttcttaaagcttcagaagcagtcattgagtattcatctgtatgaagggaaaagagaactgtgctaagagctattcctttactaataatttttttaaacctgagcaattggctgggcatggtggctcacacctgtaatcccagcactttgggaggctgaggcagtggatcatgaggtcaggagtttgagaccagcctgcccaacatagtgaaaccccatctctactaaaaataataattaaaaaaaaaatagctgggcatggtggtgcacacctgtaatcccagctactctggaggctgaggcaggagaactgcttaaacgtgggaggcagaggttgctgtgagccaagatcgcaccactgcacttcagcctgggtgacagagtgagactccatcgcgggggaaaaaataaaacaaaacaaaaatcctaagcaattaccctcacaccttatgcagtacatttgttcttcatcaatatctaattcccttgttctctccttcatgcatttcacatggtggtatagttcagcaaatcaaaattttta

SEQ ID NO: 547343 - DNA, 1165 bp, Homo sapiens
tcagctcatctaaaaattgaaaaaaaaaaggtattggtataaatatagtctttaaaccaaatttagccctgttcagcacactgctttcactggtttgccaaaatttataatggaaagggtggtgtaagcagcagtggggcttctgaaaacttctgttcccctcaagcttccaggacaagtgcctcctcctcacagtaagcctgctccaactcaagcagtagcaaagtcctgggtcgatgccaacctaaaaattgggcatggggaggaaggaagcattaggcaactatggtggggtaagataagggactgaggaaagaaaatgtcattacaagtggtgtggttgacactgtggggaccagggtcagtctaaacaggaggtgtggaaaaaggaacagcatggagaaacttgagagcacaacgacacatttctgttagatgctaaggcaaratgatgattccagagcatggaggtgcccagaaagcagcagtgtgtgtgcaggtacttgggagaagaagggagagggagacagttctggaaagggaaaaggaatctctttcctagtgtttctttctttttttttttttttcatctcatctcaaggcttacatttgaatatttcttttcttaaagcttcagaagcagtcattgagtattcatctgtatgaagggaaaagagaactgtgctaagagctattcctttactaataatttttttaaacctgagcaattggctgggcatggtggctcacacctgtaatcccagcactttgggaggctgaggcagtggatcatgaggtcaggagtttgagaccagcctgcccaacatagtgaaaccccatctctactaaaaataataattaaaaaaaaaatagctgggcatggtggtgcacacctgtaatcccagctactctggaggctgaggcaggagaactgcttaaacgtgggaggcagaggttgctgtgagccaagatcgcaccactgcacttcagcctgggtgacagagtgagactccatcgcgggggaaaaaataaaacaaaacaaaaatcctaagcaattaccctcacaccttatgcagtacatttgttcttcatcaatatctaattcccttgttctctccttcatgcatttcacatggtggtatagttcagcaaatcaaaattttta

SEQ ID NO: 547344 - DNA, 582 bp, Homo sapiens
atggtggctggctagatcagatctcctcaaccaccatgattatctgacataatttttgcaaaggtggtttcagcaagaaatcaataacacttgtttggtaaacaaacccttacttggtgttggagttttaaaacagtacaatgggtttataacaatacattttgataaaaatctaattatacttatttaaatgtaaataatatgaaaaaagttcatgcaaaaggcaattgttgaattaagtttagagcttttgttttgtrtatcagtacacaaatacttttagaagaaaaattttttttttattattatactttaagttttagggtacatgtgcacattgcgcaggttagttacatatgtatacatgtgccatgctggtgcgctgcgcccactaactcgtcatctagcattaggtatatctccctatgctatccctcccgcctccccccaccccacaacagtccccagagtgtgatgttccccttcctgtgtccatgtgttctcattgttcaattcccacctatgagtgagaatatgcggtgtttggttttttgttcttgcgatagtttactgagaatgatg

SEQ ID NO: 547345 - DNA, 582 bp, Homo sapiens
atggtggctggctagatcagatctcctcaaccaccatgattatctgacataatttttgcaaaggtggtttcagcaagaaatcaataacacttgtttggtaaacaaacccttacttggtgttggagttttaaaacagtacaatgggtttataacaatacattttgataaaaatctaattatacttatttaaatgtaaataatatgaaaaaagttcatgcaaaaggcaattgttgaattaagtttagagcttttgttttgtgtatcagtacacaaatacttttagaagaaaawttttttttttattattatactttaagttttagggtacatgtgcacattgcgcaggttagttacatatgtatacatgtgccatgctggtgcgctgcgcccactaactcgtcatctagcattaggtatatctccctatgctatccctcccgcctccccccaccccacaacagtccccagagtgtgatgttccccttcctgtgtccatgtgttctcattgttcaattcccacctatgagtgagaatatgcggtgtttggttttttgttcttgcgatagtttactgagaatgatg

SEQ ID NO: 547346 - DNA, 582 bp, Homo sapiens
atggtggctggctagatcagatctcctcaaccaccatgattatctgacataatttttgcaaaggtggtttcagcaagaaatcaataacacttgtttggtaaacaaacccttacttggtgttggagttttaaaacagtacaatgggtttataacaatacattttgataaaaatctaattatacttatttaaatgtaaataatatgaaaaaagttcatgcaaaaggcaattgttgaattaagtttagagcttttgttttgtgtatcagtacacaaatacttttagaagaaaaattttttttttwttattatactttaagttttagggtacatgtgcacattgcgcaggttagttacatatgtatacatgtgccatgctggtgcgctgcgcccactaactcgtcatctagcattaggtatatctccctatgctatccctcccgcctccccccaccccacaacagtccccagagtgtgatgttccccttcctgtgtccatgtgttctcattgttcaattcccacctatgagtgagaatatgcggtgtttggttttttgttcttgcgatagtttactgagaatgatg

SEQ ID NO: 547347 - DNA, 672 bp, Homo sapiens
aatctagagcaaaaggctcttttgctattttatcaacatgcatagtcattggcttcttttaaaaacctctttcattttagacatgtgttgctaaaattttataagcccacatggtaaaaaatcagaatgtaaaattatattgactaattagaatatgcacagtctttcagaagtacttaagcacctactgtatgctagggatgataccaggaactgggaatatgacaaggtcctgctcttagagtgtttacattccaatggggagagctagtcaataaacacacaaacaaatgataaacagtaataatcatcatcagataatgaaagtatcagtgaattaaagtgtgagagagtacccctagagtttacattacagtcattttgacgagatgatgtctaatttgaatgatgaatggtcagaagaagccaatgtaaagaagaaaatcaagttgcyaaaattcaatccaccaaaagccatttccagagactaatttgcatttttaaaggaatcaggaaactgaaaacattggtggaattgtggcaggtatctccctcagaacatacacacaggcacacacacacacatgcacacaactttgcatctcattattattgctactgtttgtgaaataaatataaattaagtcctaagtataagatctattgtagatc

SEQ ID NO: 547348 - DNA, 672 bp, Homo sapiens
aatctagagcaaaaggctcttttgctattttatcaacatgcatagtcattggcttcttttaaaaacctctttcattttagacatgtgttgctaaaattttataagcccacatggtaaaaaatcagaatgtaaaattatattgactaattagaatatgcacagtctttcagaagtacttaagcacctactgtatgctagggatgataccaggaactgggaatatgacaaggtcctgctcttagagtgtttacattccaatggggagagctagtcaataaacacacaaacaaatgataaacagtaataatcatcatcagataatgaaagtatcagtgaattaaagtgtgagagagtacccctagagtttacattacagtcattttgacgagatgatgtctaatttgaatgatgaatggtcagaagaagccaatgtaaagaagaaaatcaagttgctaaaattcaatccaccaaaagccatttccrgagactaatttgcatttttaaaggaatcaggaaactgaaaacattggtggaattgtggcaggtatctccctcagaacatacacacaggcacacacacacacatgcacacaactttgcatctcattattattgctactgtttgtgaaataaatataaattaagtcctaagtataagatctattgtagatc

SEQ ID NO: 547349 - DNA, 672 bp, Homo sapiens
aatctagagcaaaaggctcttttgctattttatcaacatgcatagtcattggcttcttttaaaaacctctttcattttagacatgtgttgctaaaattttataagcccacatggtaaaaaatcagaatgtaaaattatattgactaattagaatatgcacagtctttcagaagtacttaagcacctactgtatgctagggatgataccaggaactgggaatatgacaaggtcctgctcttagagtgtttacattccaatggggagagctagtcaataaacacacaaacaaatgataaacagtaataatcatcatcagataatgaaagtatcagtgaattaaagtgtgagagagtacccctagagtttacattacagtcattttgacgagatgatgtctaatttgaatgatgaatggtcagaagaagccaatgtaaagaagaaaatcaagttgctaaaattcaatccaccaaaagccatttccagagactaatttgcatttttaaaggaatcaggaaactgaaaacattggtggaattgtggcaggtatctccctcagaacatacacacaggcacacacacacacatgcacacaaytttgcatctcattattattgctactgtttgtgaaataaatataaattaagtcctaagtataagatctattgtagatc

SEQ ID NO: 547350 - DNA, 1242 bp, Homo sapiens
gatacgcccagtgttctctgtatgtgtgattggaagacgccattgctggacaggaggaagtgcagatgccctaaacatttaaccaggttcacatagaacagtaggctctgctttaagagggcagattaagtgcatgtatttacttgctttccatggaatcccacttaaataacacttgaacaagtagaataaattcttaacagtactgagtgctgtttttgacatattcctgaaaaccaaatacatgggatcatattgatacaaaatcatagcaaggaatgacaactcttttccccaaagagccctgtgcccatctgcattagattcccaaggctgccataaccaagcactggtgccacaaacagggaggtttataacacagatgtatcttcttacagtcctggaggataaaagttcgaaataaaggtacgagcaaggttagttccttcggagagctctgggggaaaatatgttctgtgcctttctcccagcctctggggttcccagcagtcctcggcgctccttgcattgtagacacatcgctccagtctctacctctgtggttatatgggttctccctgtgtgtttctgtgtgtcttcatctcttctcctcctctcctcctcttttttttttttgagatggtatctcactctgttgcctaggctggagtgcagcggcgtgatctcagctcactgcaacctccgcctctacagttcaagcgattcttctgcctcagcctcccaagtagctgggattacaggtgcccaacaccatgtccggctaatttttttgtatttttagcagagacaggatttcaccatgttggccaggctggtctcaaactcctgacctcagatgatccgcccacctcagcctcccaaactgttgggattacaggcatgagccactgagcctagccttctcctcttataaggacaccagcgatactagattcagggtccatcctactccaatatgatcttatcttaattacatcttcaatgaccctatgcccaaataaggtcacactctgaggtagcagggactagaacttcaacatatcttttatcttttaggggggcacaatttaacctgtagcaccatcattcacctgtttgcgttcagattaatttcctactctctctctctctctctstctctctctctctctgctctttctgtgtctcaaagtattaactcctataatctatattttccagactcccttgccaaactggctt

SEQ ID NO: 547351 - DNA, 518 bp, Homo sapiens
aaagtaacatagtacaaacagtacattttagaaacacctggtctagtctcagaaaggtttctaacagcagtagccagggctggcaatacagagccagcaaggagaacagaaagtctaaacatctggcggcttgctgtcatcagagaggcatgcagaacacctgaaaatcagaaatgtcaccacatattaggaatcatttatttttcctaaatctttttttttttttttgaggcggagtcttgctttatcacccaggctggagtgcrctggtgcaatctcggctcactgcaacctccacctccagggttcaagcgattctcgtgcttcagcctcccaagtaactgggaccataggcgtgcaccaccgtgcctggctaatttttgtatttttagtagaggcggggtttccactgtgcctgacctattttttccaaatcttatcctcctaacacaataaggtttagtgacaatcactaataagtgtaagaaaacaattcattttccttttcaaatagagaa

SEQ ID NO: 547352 - DNA, 518 bp, Homo sapiens
aaagtaacatagtacaaacagtacattttagaaacacctggtctagtctcagaaaggtttctaacagcagtagccagggctggcaatacagagccagcaaggagaacagaaagtctaaacatctggcggcttgctgtcatcagagaggcatgcagaacacctgaaaatcagaaatgtcaccacatattaggaatcatttatttttcctaaatctttttttttttttttgaggcggagtcttgctttatcacccaggctggagtgcgctggtgcaatctcggctcactgcaacctccacctccagggttcaagcgattctcgtgcttcagcctcccaagtaactgggaccataggcgtgcaccaccgtgcctggctaatttttgtatttttagtagaggcggggtttccactgtgcctgacctattttttccaaatcttatcctcctaacacaataaggtttagtgacaatcactaataagtgtmagaaaacaattcattttccttttcaaatagagaa

SEQ ID NO: 547353 - DNA, 443 bp, Homo sapiens
aatttaatctgtgtgccttgaaaactttttttttccctgcaaacttttaaaatgagagtacaatagtaaattatttaaaattaaactggggaaaaacacaggcacacttttctccattgtttactactctgatctagacctgggttaaatttctaaaatrtataatacctttcatcattcttaagttctattatcaaataatggttagtgttatagaaagttattctccaaatacccaaagctttacatttacttaatatctgagaaaatatcacctaccagtcaataacaattaactaaagaatgatcacatttctagcctccccacagggcccaataaccaggccttaaggccgatgcttatttatttatttatttatttatttgtttgtttgtttgtttgtttttgagacggagtctcgctgtgtcgccctggctggagt

SEQ ID NO: 547354 - DNA, 1303 bp, Homo sapiens
tgaatgaattttttatttcagttattgttttcttcagctccagaatttgtttctttttatagtctctatctctttgctgatattttcattttgcttacatatcattttcctgattttattaatttgtttatttgtgttctcttataacttactgaattcctttaagatgattattttgaattcttcgtgaggtaatagatctgcatttctttagtgtcagwtactgaagatttattttattcattttattatgtcatatttccctcagtctttgtgtttattggaattttgcattggtatttgtgcatttgaagatacagccacttcgcctagtctttatgaactggcttccacagggaaagaccttcaatgcccagccttacaagagattttggaagtatcttaaaccttttctttggactcatgtgtgcacttaattaaagagatttattggtctctctctctctctttcttttgcccatagtctcttgttctcactggtttctgactgctgttccatgtgctaggacactgaaagtatgctatactcctctcccactttcactcactgtctcccaaattcacagaaccataccagcttcagccagctacctgcaccttccctttattcttaactgctcataggcatccaaaatatgcaggtttcatcagggctctgggtaaggtaaaacataaactggactctcaaatagcactctgaaaggccagggacactggatgcatgttcctccctttcatttccctctgagggggaagtcatacactgaggttctctctcttggcattgagctgtgctggcttgagggagggactaattctggtaaagtaagcttgttgcaatataggctacttaatatgaatatgttaaaatatatttttatgtttttattaacttcctcttaagtaatattttcattgtaatttcattttttaagagagatgccatgatgtaatatagtagcagatgttggagtgagggaaaagtacttgaggtctaatctcagctctattactcattagctctgaggcctcggactactcacttaacttcctgaaggtttagtttagttgtttataacatgggaataagaatagctaacttgcagtgtggatgtggaggttagagataatatacatatctgatcagtgcctaatacatcaatatgtaattctttaagtgatataactaaagatgcagctgaaaactgaagatgataagtgaaatccatcatttctctacacattatagaattccgctagggatttcccaagtgtgacactg

SEQ ID NO: 547355 - DNA, 1303 bp, Homo sapiens
tgaatgaattttttatttcagttattgttttcttcagctccagaatttgtttctttttatagtctctatctctttgctgatattttcattttgcttacatatcattttcctgattttattaatttgtttatttgtgttctcttataacttactgaattcctttaagatgattattttgaattcttcgtgaggtaatagatctgcatttctttagtgtcagatactgaagatttattttattcattttattatgtcatatttccctcagtctttgtgtttattggaattttgcattggtatttgtgcatttgaagatacagccacttcgcctagtctttatgaactggcttccacagggaaagaccttcaatgcccagccttacaagagattttggaagtmtcttaaaccttttctttggactcatgtgtgcacttaattaaagagatttattggtctctctctctctctttcttttgcccatagtctcttgttctcactggtttctgactgctgttccatgtgctaggacactgaaagtatgctatactcctctcccactttcactcactgtctcccaaattcacagaaccataccagcttcagccagctacctgcaccttccctttattcttaactgctcataggcatccaaaatatgcaggtttcatcagggctctgggtaaggtaaaacataaactggactctcaaatagcactctgaaaggccagggacactggatgcatgttcctccctttcatttccctctgagggggaagtcatacactgaggttctctctcttggcattgagctgtgctggcttgagggagggactaattctggtaaagtaagcttgttgcaatataggctacttaatatgaatatgttaaaatatatttttatgtttttattaacttcctcttaagtaatattttcattgtaatttcattttttaagagagatgccatgatgtaatatagtagcagatgttggagtgagggaaaagtacttgaggtctaatctcagctctattactcattagctctgaggcctcggactactcacttaacttcctgaaggtttagtttagttgtttataacatgggaataagaatagctaacttgcagtgtggatgtggaggttagagataatatacatatctgatcagtgcctaatacatcaatatgtaattctttaagtgatataactaaagatgcagctgaaaactgaagatgataagtgaaatccatcatttctctacacattatagaattccgctagggatttcccaagtgtgacactg

SEQ ID NO: 547356 - DNA, 1303 bp, Homo sapiens
tgaatgaattttttatttcagttattgttttcttcagctccagaatttgtttctttttatagtctctatctctttgctgatattttcattttgcttacatatcattttcctgattttattaatttgtttatttgtgttctcttataacttactgaattcctttaagatgattattttgaattcttcgtgaggtaatagatctgcatttctttagtgtcagatactgaagatttattttattcattttattatgtcatatttccctcagtctttgtgtttattggaattttgcattggtatttgtgcatttgaagatacagccacttcgcctagtctttatgaactggcttccacagggaaagaccttcaatgcccagccttacaagagattttggaagtatcttaaaccttttctttggactcatgtgtgcacttaattaaagagatttattggtctctctctctctctttcttttgcccatagtctcttgttctcactggtttctgactgctgttccatgtgctaggacactgaaagtatgctatactcctctcccactttcactcactgtctcccaaattcacagaaccataccagcttcagccagctacctgcaccttccctttattcttaactgctcataggcatccaaaatatgcaggtttcatcagggctctgggtaaggtaaaacataaactggactctcaaatagcactctgaaaggccagggacactggatgcatgttcctccctttcatttccctctgagggggaagtcatacactgaggttctctctcttggcattgagctgtgctggcttgagsgagggactaattctggtaaagtaagcttgttgcaatataggctacttaatatgaatatgttaaaatatatttttatgtttttattaacttcctcttaagtaatattttcattgtaatttcattttttaagagagatgccatgatgtaatatagtagcagatgttggagtgagggaaaagtacttgaggtctaatctcagctctattactcattagctctgaggcctcggactactcacttaacttcctgaaggtttagtttagttgtttataacatgggaataagaatagctaacttgcagtgtggatgtggaggttagagataatatacatatctgatcagtgcctaatacatcaatatgtaattctttaagtgatataactaaagatgcagctgaaaactgaagatgataagtgaaatccatcatttctctacacattatagaattccgctagggatttcccaagtgtgacactg

SEQ ID NO: 547357 - DNA, 1303 bp, Homo sapiens
tgaatgaattttttatttcagttattgttttcttcagctccagaatttgtttctttttatagtctctatctctttgctgatattttcattttgcttacatatcattttcctgattttattaatttgtttatttgtgttctcttataacttactgaattcctttaagatgattattttgaattcttcgtgaggtaatagatctgcatttctttagtgtcagatactgaagatttattttattcattttattatgtcatatttccctcagtctttgtgtttattggaattttgcattggtatttgtgcatttgaagatacagccacttcgcctagtctttatgaactggcttccacagggaaagaccttcaatgcccagccttacaagagattttggaagtatcttaaaccttttctttggactcatgtgtgcacttaattaaagagatttattggtctctctctctctctttcttttgcccatagtctcttgttctcactggtttctgactgctgttccatgtgctaggacactgaaagtatgctatactcctctcccactttcactcactgtctcccaaattcacagaaccataccagcttcagccagctacctgcaccttccctttattcttaactgctcataggcatccaaaatatgcaggtttcatcagggctctgggtaaggtaaaacataaactggactctcaaatagcactctgaaaggccagggacactggatgcatgttcctccctttcatttccctctgagggggaagtcatacactgaggttctctctcttggcattgagctgtgctggcttgagggagggactaattctggtaaagtaagcttgttgcaatataggctacttaatatgaatatgttaaaatatatttttatgtttttattaacttcctcttaagtaatattttcattgtaatttcattttttaagagagakgccatgatgtaatatagtagcagatgttggagtgagggaaaagtacttgaggtctaatctcagctctattactcattagctctgaggcctcggactactcacttaacttcctgaaggtttagtttagttgtttataacatgggaataagaatagctaacttgcagtgtggatgtggaggttagagataatatacatatctgatcagtgcctaatacatcaatatgtaattctttaagtgatataactaaagatgcagctgaaaactgaagatgataagtgaaatccatcatttctctacacattatagaattccgctagggatttcccaagtgtgacactg

SEQ ID NO: 547358 - DNA, 1303 bp, Homo sapiens
tgaatgaattttttatttcagttattgttttcttcagctccagaatttgtttctttttatagtctctatctctttgctgatattttcattttgcttacatatcattttcctgattttattaatttgtttatttgtgttctcttataacttactgaattcctttaagatgattattttgaattcttcgtgaggtaatagatctgcatttctttagtgtcagatactgaagatttattttattcattttattatgtcatatttccctcagtctttgtgtttattggaattttgcattggtatttgtgcatttgaagatacagccacttcgcctagtctttatgaactggcttccacagggaaagaccttcaatgcccagccttacaagagattttggaagtatcttaaaccttttctttggactcatgtgtgcacttaattaaagagatttattggtctctctctctctctttcttttgcccatagtctcttgttctcactggtttctgactgctgttccatgtgctaggacactgaaagtatgctatactcctctcccactttcactcactgtctcccaaattcacagaaccataccagcttcagccagctacctgcaccttccctttattcttaactgctcataggcatccaaaatatgcaggtttcatcagggctctgggtaaggtaaaacataaactggactctcaaatagcactctgaaaggccagggacactggatgcatgttcctccctttcatttccctctgagggggaagtcatacactgaggttctctctcttggcattgagctgtgctggcttgagggagggactaattctggtaaagtaagcttgttgcaatataggctacttaatatgaatatgttaaaatatatttttatgtttttattaacttcctcttaagtaatattttcattgtaatttcattttttaagagagatgccatgatgtaatatagtagcagatgttggagtgagggaaaagtacttgaggtctaatctcagctctattactcattagctctgaggcctcsgactactcacttaacttcctgaaggtttagtttagttgtttataacatgggaataagaatagctaacttgcagtgtggatgtggaggttagagataatatacatatctgatcagtgcctaatacatcaatatgtaattctttaagtgatataactaaagatgcagctgaaaactgaagatgataagtgaaatccatcatttctctacacattatagaattccgctagggatttcccaagtgtgacactg

SEQ ID NO: 547359 - DNA, 551 bp, Homo sapiens
cactgtctttactgtagttatctgaagaactaccaccctttttcttcctatccaggtgaggcagagacacaaagatatggaagaacattggacagatttacatcgatatattaattaaggtgatttcagagttggagcaggagaggaagccttatagatatttttttttctttttgcttgcttgtattttctttttaattattattcagtayttcaagtagacagaaaagtacagaggataatacaacaaatatccaggtacccaccacccagcatttttacatagtagcatttgatgttttgaaataagacataaaacattccaaataccctatcaccgaggatcctgcatcctcttcttttcccagaagtgaacatttctctgaatttgatgcttattatgcccatgcatgttgttatacttttactacatattttatgtagctacagcataatatgctatgtttactttatatagtgacctcatactatacatatcctcatgcaattttttagactctgtttgagaattatatattttgattcaggta

SEQ ID NO: 547360 - DNA, 628 bp, Homo sapiens
tttctgtgctgaccctcttaaagccctaagggaaagagactcaggaaaccacatttcccaaatccagtgacaatacacccatttttgcaggacgcagagtatacgaggaggtrtattttggaaatctctggcttcagactaagaaaaatgtgacttattgtccgcatgaccttgaactacatcttcaccttgctggtcttcagttccttactcacagagtgtgctaatgtcatctcccaactcagagggtctctgtaaggatgggccaggctgcgtggttctgggggtgactaagatactgtcccagtctttggtgagacccagcagcggttaatcatggaaatgaatgatacagagaagtctagttctaacagaaatggcacagagcctgctgtggacatcggggtcaggacctctccctgtaccttccttctgtctgtctcacctaatgccctgaagcttcctgagtgggtctgcatttatacagcgatgctccagggagcagtctgccattactcctctgtggtgcttgcagacttctggtgataggtctagttttcctttgtctggtatataaattgatgtaattggtgatttttaatgtgcagatgttggacagtatagggac

SEQ ID NO: 547361 - DNA, 628 bp, Homo sapiens
tttctgtgctgaccctcttaaagccctaagggaaagagactcaggaaaccacatttcccaaatccagtgacaatacacccatttttgcaggacgcagagtatacgaggaggtatattttggaartctctggcttcagactaagaaaaatgtgacttattgtccgcatgaccttgaactacatcttcaccttgctggtcttcagttccttactcacagagtgtgctaatgtcatctcccaactcagagggtctctgtaaggatgggccaggctgcgtggttctgggggtgactaagatactgtcccagtctttggtgagacccagcagcggttaatcatggaaatgaatgatacagagaagtctagttctaacagaaatggcacagagcctgctgtggacatcggggtcaggacctctccctgtaccttccttctgtctgtctcacctaatgccctgaagcttcctgagtgggtctgcatttatacagcgatgctccagggagcagtctgccattactcctctgtggtgcttgcagacttctggtgataggtctagttttcctttgtctggtatataaattgatgtaattggtgatttttaatgtgcagatgttggacagtatagggac

SEQ ID NO: 547362 - DNA, 1176 bp, Homo sapiens
aaaaaaaaaaaaagtgaaggatgtaagggaccaagaagagttatcagcaaagagggaactaggctgtctgaaccagacataagccagatgtcagctggggtaatgttgccttttaaaatacagatgagaagcctgcccagaatttcccattgcacaccattttcctaaacaagacaaggctttgcatacagcatccttcttctgaggaccagtcactagcctaccccatctcagccctatttgggctgtgcctgacgtgactattagatattgaaaaagatcatcttttttttttttttttttttttatttagagtctcactctgtcgcccaggctggagtgcagtggcacattctcggctcactgcaacctccacctcccgggttcaagcaattctcctgcctcagccttccaagtaactgggattacaggcacatgctaccatgcctggctagtttttgtatttttagtagagacagggtttcaccatgttggccaggctggtctcgaactcctgaccttgtgatctgcccgcctcggcctcccaaagtgctgggattacgggagtgagccaccgcgtcaggcccaaaaaagatcatcttttttcccatatccctgttgaacatcacctagcttgaggcaaaccccttatcaatcacaagcaagaccatttggaattgtgcattagtcctctacccagcccagtgccaccctctgccagtcttgagtagcctcccagtgggtcctggtatccagaagcagggcaacccgcatcctcttaggcctgtctctcctcattgggaatacagcctgctatgaaaatccatattacctgaggaagggataaaaccacttgcattagttatattttgctacataacaaattacccccaaaactttgtaatttaaaacaacattccttatcccccacagtttctaagtcaggaaaccaggaatgacttagccgcatggcytaagtcagtctggcctgatctctcacaacatctcaagttgttgaccagggctgcaataatccccaaactcgactgtggctgaagaatccacttctaagctcactcacaggtgattggcaggctccagttccttgcagcctctgggccagaggtctcagtacctcgccacacaagccactccacgagctgcctcagtggccac

SEQ ID NO: 547363 - DNA, 1176 bp, Homo sapiens
aaaaaaaaaaaaagtgaaggatgtaagggaccaagaagagttatcagcaaagagggaactaggctgtctgaaccagacataagccagatgtcagctggggtaatgttgccttttaaaatacagatgagaagcctgcccagaatttcccattgcacaccattttcctaaacaagacaaggctttgcatacagcatccttcttctgaggaccagtcactagcctaccccatctcagccctatttgggctgtgcctgacgtgactattagatattgaaaaagatcatcttttttttttttttttttttttatttagagtctcactctgtcgcccaggctggagtgcagtggcacattctcggctcactgcaacctccacctcccgggttcaagcaattctcctgcctcagccttccaagtaactgggattacaggcacatgctaccatgcctggctagtttttgtatttttagtagagacagggtttcaccatgttggccaggctggtctcgaactcctgaccttgtgatctgcccgcctcggcctcccaaagtgctgggattacgggagtgagccaccgcgtcaggcccaaaaaagatcatcttttttcccatatccctgttgaacatcacctagcttgaggcaaaccccttatcaatcacaagcaagaccatttggaattgtgcattagtcctctacccagcccagtgccaccctctgccagtcttgagtagcctcccagtgggtcctggtatccagaagcagggcaacccgcatcctcttaggcctgtctctcctcattgggaatacagcctgctatgaaaatccatattacctgaggaagggataaaaccacttgcattagttatattttgctacataacaaattacccccaaaactttgtaatttaaaacaacattccttatcccccacagtttctaagtcaggaaaccaggaatgacttagccgcatggcctaagtcagtctggcctgatctctcacaacatctcaagttgttgaccagggctgcaataatccccaaactcgactgtggmtgaagaatccacttctaagctcactcacaggtgattggcaggctccagttccttgcagcctctgggccagaggtctcagtacctcgccacacaagccactccacgagctgcctcagtggccac

SEQ ID NO: 547364 - DNA, 2574 bp, Homo sapiens
cttgaattcgagaggaggaggttgcaatgagccgagatcacccaaaaaaaaccgcaatgctggttaaataaaacattgagaaaacatggtgctctgaacaggaatgaggaaacgctatcatctggtatggaaaaaatctccaagacacattaaatgaaaaaagaaagggtcagaatagtgtgtataatgggctaccttatgtgcttttttaattaaaaaaaaaaaaggaagatgataagaacacatgagttttcctatttgcatgatggaggtctagaaggagcctagagactggctacctgttgcaatggggaaggttgtaagatagacgcaggagtgggagggagcctgtccatatggatttttatattgttttattctttaactatgtgattgaattaccagttcaaagaaaaatgtaagaaaaactaaacctttgcctttaccatgtcgcaaacacaagcagaattgtagtgatgttttgtcatctgttttagcattccaccagtgccggggtccccagggcccaggaataagagacacagcttccttctaaagcccactccagtatggcttagtcaggaagttctttcttaggtctgactgcattccctcctgatgaaacatccagcactgcctccttagtgccatgtagctatcaataggtatcctcaactccctccaggccttacttggttggctgggtaagtctaagccctataacctctccctctgagaccctggaatagtttggagttactcagtgagaggacaggcctattgggtctggtaactaaccaggaaaaggaagctaggaaatgaagaaaagagagctcgactgctctcctggccctctcctgtgtgcttccatctcctcttatgtctgaacacacacataacatctctgaatctccctcctactccctgtcttgtccttcatggcctcatcctcttccccagtctcacaggtgagtgcccacgcctgctgtcaccatgacaaccattcacagccggcagatgctgcaggagcacgtgtccatggagttctccagctccaccacccacgtgcagaccttctcccagacaaccaagatcgtgggaggcaagtggaatgggggcagggaagggatcgggaagggcagctattcttcctccacacccatcccttgggtggccccagttttgccactaatgggcccctctggagcccacaataccaacagcaacccccacccaacgtgtgcttctaatcttggctttgttaaagcttcagccagctggatgttcaacacagatcagatctccaggaaaacagcttagaaaagatcaatcatgtggatgtgtgtgaatgattgataaactcttaattgctgaaggagatcagagccataggtgaacagattctatctccaaaggtagaatttcaggcataggggaaattaggaaggtagccaccttatctacatatcagtaatgctgaccctgctccacttaagaaataggagacttggggctaccagtggagaaagaaggtgaacacataaacaagaaggtgaccttaccttccaggcttttagccctctggggccagacttggaaragggcagatccaagggaaagctgagaaatggtctcagagctgaacagagtgttttagtcacgtctctagtggaaagagattaaaagatggccgggggccaagacattggataccccttctcacagtcattgcccctccctcaaagcctcaaagggatagagtccctcaaagtcctccgtgcacagaggtcaaggccagataaacactctataccaaccaacacctcctggccagtgaggcagagcaagtggaacagctgggactcaaggcctatggtctagaccagaagttccaaactcaagtgatttacagcagtgattctctgctgtggccgcacatcagagtcaccttagtgcagggggtgtgaggagggcaaaaatatggcagtacctgagtctcaccccagaccattcaatcaggtatttcttataaagttctccatggattatatatgtgcagccaaagctgtagaccactgaccgacagggcccaggcagggaacataaatgtggggaaaagactggggtaaactagagactgtatatcccatctaaaggggcagccactattcacctcccactgactgttgccatatgggaatacaggttcagtgttgagaatccagaaatctgaatttttatgtgaaatctttctctttcagatgtagggctacttttttgtttaaacattgtggaggtcacataaaagacatctgcaggccaggtgtccactgcactctgcctgtttgagacctcttgttagtatttaaaagcaggccatgagagcttcttaacacacttttccccctctgtcagattagtgggataataaaggcacctacttcagtgggatgctgtgaagatggaataaaatcatctctgatatgtgcctagcacagttcctgactcaaggaaagtgttccatgattcagagcaattgttgtgaattgataactcaccagccaagaagattgt

SEQ ID NO: 547365 - DNA, 546 bp, Homo sapiens
tgtctggttttctgtctcctgactggacttgacctactgtatcattgggagcaagatgaaataaactagaatattrtgcaagaattaaaaaagaataacctaagctaggcacagtggcttatgcctgtaatctcagccctttgggaggacgaggcaagaggcttacttgagcccaggagtttgagacctgcctggtcaacatagcaagaccctgcctttacaaaaaaaaaaaaaaattagccaggcatggtggtgcgcacttgtagtcccagctacttgggaggctgaggtgggaggattgcttgagcccaggagttcaaggctgcagtgatctgtgactgtgccactgcactccagccttgacaacaaagcaagactgtctccaaaaagaagaacatacacttctgcttctgcctgtgaaggatcaactgttacagaaattaccttctcttcataaatagaaaattgcacaaaacatgaaataattgttttcagatcttgtacaagagacagcacaaaactgtgtactttgagagaaaggaaacc

SEQ ID NO: 547366 - DNA, 409 bp, Homo sapiens
caattctcgtgcctcagcctcccacgtatttgggattgcaggtgtgcaccaccatacccggctaatttttgtatttttagtagagacgggttttgccatattggccaggctgttctcgaactcctgacctcaagtgatccacctgccttacccaccttggccaaagtgctgggattacaggcgtgagccactgcgcctaatcgaaacccatatttcttgaactctattttctcaaagtgtgtaaatctaaaacttcccagaaaagatcctctctgtatccaggacccactaaaaagaaatcttattacttcccagaaccctgcaggatcccatctcctcttttgacacattatgtcagtaagtttaatgtgatccaaatccacacatcagtcatgargtttaaaacatc

SEQ ID NO: 547367 - DNA, 558 bp, Homo sapiens
aaacctttagtacaaccgtattacagaaaaatgattcattctttaacactaacgatagctgatgagctcaaaaataaaaaattgcaaaaaaatgttataatgttttaaagtttacgaatttgttttgggctgcattcaaagctatcttgggccacatgtggctggtggctaagggttggacaagcttgaatgagagaattctcaagaattctagtttcttgttcctgaatcttgaggttaatatgttgagtttttggaaatagtttgtttcaggcccattctgagtaattgagatgtctctgaaaattatgttaatattttaggcactgttgtggactctttctcctacattatatttttttaaattgcacagtagtgctatgaagaaagtattaaaatatctatgcagaggagaaactgaggctgayaaagtgctaacaatcttctaagaatagaaatgtgcgttgaacccagatcttttctcactttgaagtttcaaattcatgttctttgcactgaacagtgtatttaaaacatattattacttaaatgttgtat

SEQ ID NO: 547368 - DNA, 1038 bp, Homo sapiens
gaaaaaggttataggcttagaggtattttagtcaaaacaagggaagtgaagaagtagtagctgtatagcagagagagagaacctgtgcagaatgcagagaggaaaaagtacaacagaaaagatcaaacagcaagagaatagcacaaaatggaagggaaggaaaaaaatggagaaataacaagatttgtgaaaggaatggaatagtaatgattatagtatttcatttactgattatatttacaaacatatgaagcatatttacagtagtatatttgaatataacatgcaaaacacacaaacaataaggcctgacccatgagatcaacaaagacatacaaaaccagaatggtgtatcaacactaataacagaagaaatagaccgagacagaaacccaggtgctcacactaacaaagtgcaacagattctgttgtagttggattgatggtcgaaagaattcacaagtacaaggytcacctgacctatcctgaaattagtaatacatgtttaatttttcagtttggtaaaatcatttatcattgttccaatagttactcaaaatcagatttactttagacagtgtgacacagaaaacagaacacaggctttggggtttcataatttagagccagtggttcagaattctatttttggtgttaagttggcatgagttaagccatattatccttgtgattttggataagttatttaacgtttctaggtcaatgtcctcaataaaatggcattaatatagaaaatacttcagtgtttctctagtaattaagtgacattatgtaaaacaaatcttcagcagggtagctggcacacgatcagtgccctatattgatattattttctctgagcttcctagacagcaagctcctgagggcagggatcccatttgtcttcttccctgatgttttcctggtgcttaagtcaatgtctggtacatcaaaagtgctcagtaagtatttgttgaaaaagaaaatgataatttgcatggcatttaaaacgtgaggcaggtggagtgggtaaagcaa

SEQ ID NO: 547369 - DNA, 1014 bp, Homo sapiens
tactgcttttcattttttccccgatgttcgcatattttctgacataaatatttgtttctgtcccttgttcattatttggaatccatctcacctcacctgaacctcttgcttatttctagccacaggattaatttttgccattatatccaaggattataaatatctgtgtaactactaaaaccatgaccctaatggggagagagaaaatttatatttatgataaagaaataatattgtcatttagagttctttagaaatcataaaggattttataaaaattttatagtaataatagtttratttattagtagtattattagaaatgctgatgtcacatcacacatttctagaataactttctaacaggttaaccaagtaactaactataactgtatataatacataactctaactatatttaaagtgatttcagttacataaggatgggctagttgaattaaaatatgttgtatatactttccaaaaaaactaaataacaaacacattgttgaatgataaacatgtcaaaatcttaagcaatttctctttctcttaatagtgctatatttgccaggcagagagaaggtgattacccatgaaaacatttatggaataaaaatggaagctgtcatgactaattccaaagcctaaagatgtttgccaaatagagtttccaaatgatttacttttgttgccaatttttttggctaatataagttttacattattttttgctggttcggcattcggaagctcaattaaagttaaagaaaatggaatttaaaatgacaaaatggctctacttttctgatatgctattatcaagacaaacaggcatattgttcctttctgcttatttcacacataaaatcttcagtcacaatgtggtttattgtattctcacattttcctatataaagatagatagtttgtatctacactattaaagtttctaaatcttttaaatatttttagattcataaactattttccaatagtttgtaatggaatgca

SEQ ID NO: 547370 - DNA, 1014 bp, Homo sapiens
tactgcttttcattttttccccgatgttcgcatattttctgacataaatatttgtttctgtcccttgttcattatttggaatccatctcacctcacctgaacctcttgcttatttctagccacaggattaatttttgccattatatccaaggattataaatatctgtgtaactactaaaaccatgaccctaatggggagagagaaaatttatatttatgataaagaaataatattgtcatttagagttctttagaaatcataaaggattttataaaaattttatagtaataatagtttgwtttattagtagtattattagaaatgctgatgtcacatcacacatttctagaataactttctaacaggttaaccaagtaactaactataactgtatataatacataactctaactatatttaaagtgatttcagttacataaggatgggctagttgaattaaaatatgttgtatatactttccaaaaaaactaaataacaaacacattgttgaatgataaacatgtcaaaatcttaagcaatttctctttctcttaatagtgctatatttgccaggcagagagaaggtgattacccatgaaaacatttatggaataaaaatggaagctgtcatgactaattccaaagcctaaagatgtttgccaaatagagtttccaaatgatttacttttgttgccaatttttttggctaatataagttttacattattttttgctggttcggcattcggaagctcaattaaagttaaagaaaatggaatttaaaatgacaaaatggctctacttttctgatatgctattatcaagacaaacaggcatattgttcctttctgcttatttcacacataaaatcttcagtcacaatgtggtttattgtattctcacattttcctatataaagatagatagtttgtatctacactattaaagtttctaaatcttttaaatatttttagattcataaactattttccaatagtttgtaatggaatgca

SEQ ID NO: 547371 - DNA, 1618 bp, Homo sapiens
acagaagcagatggtagaatggaggttacagaggctgggcattgaggcgaatggggagattatgatcaaagtgtacaaaatatcaggtgaacaggaggaatacatttttttaaattagatttctattacccagtatggtgaatacagctaataatatagtttgtgtatctcaaaattgctgtgtatttcaaaattgctaagaataaatttcaaatgttctgacaataaaaatattaattatttgaggtgatgaatatgttaattagctttatttaattattccatattgtattcataagttgtaacatcacttcgtataacctcaaaagaaaatattatgtgtataattaaatttagggaattttttttttctcatgggtcaagtttatacctggtaggggagctgatgaatggaccccaatgaaaacacacaattgggcatatttgaagggcagaattacatcaaggagaacaggagtgtgagaagttgaagcacagtgagatctgcaataataagaactggtgacttagattccaagtagttacgtctaagaaacttacacacacaccctacaggacaatcagcatttggcgtgtcatggaaaagagaatgaatattggccaaagagttttgacagctaacatcaagagaagtatacaaaagatcagtgatgtaagggattattttgtctccaatatctctcttcttctaccccaaatgcactggtagaatcacgccttaaaggagaaaggaaagatgtgtctcagccaaacactctatccatcaatgaaaataattagcatgtttaaggtgactgaggcagtcatatcaagtgcaaaatttaaggcaggagatcaaaagacttagtagtcaacataaattatattaatgtattttaaaatctacattgaaaaaattccatcatgaaagaaatataaatatttttcataaagacagattcacccagatgcagtggctcacacctatcatcccagtgattcagaaggcagaggcaggaggattgcttgaggccagatgatcatgatcagcctgggcaacacagtgagatcccaatctctaaaaatatatattttttactgcactccaacctgggtgacagcgagactccgtctcaaaaaaatatatatatatatttatatgtatatatatgtatattttaattagttggacatggtagagtgtgcctgtagtgccagctacttgggaggcggaggtggcaggatagctttagcccaggagtttgaggctgcagtgagctatgatcacacctctgtactccagttggaaaacagagtgagatcccttgcctaaaacaaaacaaaacaaaataakacatatttagtcagagtcacgacatcaaacgtgtgatgttggaacagaagtttgacatgtattgctctaggctatctaatagcctagaactaataattaggaactaataattgtcattaatgtagtttttttaaattcgtaatactaatatatatgcaaaaaacccactctgtcagataaaaatactttatgataggttttactttgaattcatgcaattcaataatctatttgatatttgggcaaggggggaggtaggcagga

SEQ ID NO: 547372 - DNA, 1618 bp, Homo sapiens
acagaagcagatggtagaatggaggttacagaggctgggcattgaggcgaatggggagattatgatcaaagtgtacaaaatatcaggtgaacaggaggaatacatttttttaaattagatttctattacccagtatggtgaatacagctaataatatagtttgtgtatctcaaaattgctgtgtatttcaaaattgctaagaataaatttcaaatgttctgacaataaaaatattaattatttgaggtgatgaatatgttaattagctttatttaattattccatattgtattcataagttgtaacatcacttcgtataacctcaaaagaaaatattatgtgtataattaaatttagggaattttttttttctcatgggtcaagtttatacctggtaggggagctgatgaatggaccccaatgaaaacacacaattgggcatatttgaagggcagaattacatcaaggagaacaggagtgtgagaagttgaagcacagtgagatctgcaataataagaactggtgacttagattccaagtagttacgtctaagaaacttacacacacaccctacaggacaatcagcatttggcgtgtcatggaaaagagaatgaatattggccaaagagttttgacagctaacatcaagagaagtatacaaaagatcagtgatgtaagggattattttgtctccaatatctctcttcttctaccccaaatgcactggtagaatcacgccttaaaggagaaaggaaagatgtgtctcagccaaacactctatccatcaatgaaaataattagcatgtttaaggtgactgaggcagtcatatcaagtgcaaaatttaaggcaggagatcaaaagacttagtagtcaacataaattatattaatgtattttaaaatctacattgaaaaaattccatcatgaaagaaatataaatatttttcataaagacagattcacccagatgcagtggctcacacctatcatcccagtgattcagaaggcagaggcaggaggattgcttgaggccagatgatcatgatcagcctgggcaacacagtgagatcccaatctctaaaaatatatattttttactgcactccaacctgggtgacagcgagactccgtctcaaaaaaatatatatatatatttatatgtatatatatgtatattttaattagttggacatggtagagtgtgcctgtagtgccagctacttgggaggcggaggtggcaggatagctttagcccaggagtttgaggctgcagtgagctatgatcacacctctgtactccagttggaaaacagagtgagatcccttgcctaaaacaaaacaaaacaaaataatacatatttagtcagagtcacgacatcaaacgtgtgatgttggaacagaagtttgacatgtattgctctaggctatctaatagcctagaactaataattaggaactaataattgtcattaatgtagtttttttaaattcgtaatactaatatatatgcaaaaaacccactctgtcagataaaaatactttatgataggttttactttgaattcatgcaattcaataatctatttgatatttgggcaagsggggaggtaggcagga

SEQ ID NO: 547373 - DNA, 396 bp, Homo sapiens
aggagcccgccaccacacccgactaatttttttttgtatttttagtagagacggggtttcaccttgttagccaggatggtctcgatctcctgacctcatgatccgcccgcctcggcctcccaaagtgctgggattacaggcattggccacygcgcccaggcccaactcttaatttttaaaggcttctaatcattttataataatatctatatactaatcaattattacataataactagaaaaatatttaccaggtcctcgatattgccatagatattcttcttcatgcctgatgcgcgagtagatacccatcctcctacagtactgaactccagggaatctggttcatgacctgtacaataaccactttctttaagctgaaaaacaaaaatttaa

SEQ ID NO: 547374 - DNA, 396 bp, Homo sapiens
aggagcccgccaccacacccgactaatttttttttgtatttttagtagagacggggtttcaccttgttagccaggatggtctcgatctcctgacctcatgatccgcccgcctcggcctcccaaagtgctgggattacaggcattggccaccgcgcccagscccaactcttaatttttaaaggcttctaatcattttataataatatctatatactaatcaattattacataataactagaaaaatatttaccaggtcctcgatattgccatagatattcttcttcatgcctgatgcgcgagtagatacccatcctcctacagtactgaactccagggaatctggttcatgacctgtacaataaccactttctttaagctgaaaaacaaaaatttaa

SEQ ID NO: 547375 - DNA, 536 bp, Homo sapiens
atggcttaaaataaaagaaacataagyaattagactacttatggaataaaaagttaaagctcatgtaatgtatgaagtgataagcctaggctaataatagctaatatagtttcacactaattttagtagtgggttcctacgcaatcaaaatttaaaaacataatgagggacttaattttggttacgtgacaaaaggaaatgtacttgtttgtgcataggtgagatttcttcttagctcactgttaattgaaacttattacataaatcctgtatacaggcaaaggctaactaatgaacacatttaatgatatttgtaaaaatattcttcctgtgtctgtttctcacagtgtgaaaagaagttggctgctttgtataaaagaaataaagtactttttagcttttgagtttttctttatctgaacaccatcttatctgtgtcagaaacacagacatgagctttttggcaggaagtgtgatcactggccactctgtctttggccaaaggggtttataccccaggctcttaaagggttcac

SEQ ID NO: 547376 - DNA, 536 bp, Homo sapiens
atggcttaaaataaaagaaacataagcaattagactacttatggaataaaaagttaaagctcatgtaatgtatgaagtgataagcctaggctaataatagctaatatagtttcacactaattttagtagtgggttcctacgcaatcaaaatttaaaaacataatgagggacttaattttggttacstgacaaaaggaaatgtacttgtttgtgcataggtgagatttcttcttagctcactgttaattgaaacttattacataaatcctgtatacaggcaaaggctaactaatgaacacatttaatgatatttgtaaaaatattcttcctgtgtctgtttctcacagtgtgaaaagaagttggctgctttgtataaaagaaataaagtactttttagcttttgagtttttctttatctgaacaccatcttatctgtgtcagaaacacagacatgagctttttggcaggaagtgtgatcactggccactctgtctttggccaaaggggtttataccccaggctcttaaagggttcac

SEQ ID NO: 547377 - DNA, 536 bp, Homo sapiens
atggcttaaaataaaagaaacataagcaattagactacttatggaataaaaagttaaagctcatgtaatgtatgaagtgataagcctaggctaataatagctaatatagtttcacactaattttagtagtgggttcctacgcaatcaaaatttaaaaacataatgagggacttaattttggttacgtgacaaaaggaaatgtacttgtttgtgcataggtgagatttcttcttagctcactgttaattgaaacttattacataaatcctgtatacaggcaaaggstaactaatgaacacatttaatgatatttgtaaaaatattcttcctgtgtctgtttctcacagtgtgaaaagaagttggctgctttgtataaaagaaataaagtactttttagcttttgagtttttctttatctgaacaccatcttatctgtgtcagaaacacagacatgagctttttggcaggaagtgtgatcactggccactctgtctttggccaaaggggtttataccccaggctcttaaagggttcac

SEQ ID NO: 547378 - DNA, 1065 bp, Homo sapiens
tcctcatcattaatatttagggcattttatttctaaaattctgcctagtgcaatgacatcatacatgaataatactgcatatcccaacttcaaaggctgacaaatagtttgatgaaagcagcaaatcaagtctggctcagagccatccatgcagcaggcatagaacccagatgtcaaatgtcaaatatcatttaagactagaagagcactaaagcaatggaaaattttacctggataggcgatactgtcccagtaaacagacaacacaagaaggaaatgatatcagggataaaaacacatgagaaacatttaataaccctaagaacatatggaaattaatgatattcagagcttgtagaatactgaagtttttcagcttaaaataatcttcctgctgatgcacagttactggagggctcccaaaatgccacagagaaaattagatgcaagcaaaaaaaaaaaaaaaaagcaaagctctgagattcaggacatggggtagaaataaagtgtaattatttgtgaagatttgaagacatgatgatatggagagagccctaaattgatacttgggctcatgccccagttttctccttaaccatcctaattggacacaattcttggtcttcatttctttatttataaggagggggtttactttgttatcttttaagggactttacattttaaaaatggtatattctatgcatatgatggcaaaggcctattacccagaatgacttctatgagaagaatctctactgaagttggtagagttgcaccccagaatccccagtgttggtaaatgtaataagaactcatagcaggaagaagtgctcctctacttccaccctcaactaccatgacaccataactgcctcaagaacagagggaaaagcttagggaaaagatggaagaagaaaacagatagttaatccaccgtagcctatatttgaccacattattcatttattctcgtttctgcttgaaatgggggctaaattgtgtaaaaaaatttagcacaactcaaaatccygagggtgaggtttttccaatgacggggttctc

SEQ ID NO: 547379 - DNA, 627 bp, Homo sapiens
cagctaaatatcttagaagcccttgtttgtcccttatgggcttcattcacccaatagtaaccaattattctgaattatgtgatattaaatctcttttctttacggttttaccatccatattttaaagtatacatatattaaaactatataaaactgtgtatgtatgttacttagttttgcctgtattttctttttctttcttttcttttctttttttttttttttttgtttgacacagagtctcactctgtcacccaggctggagtgtagtgacgtgatcttgggtcactgcaaactcctcctcccaggttcaagtgattctcttgtctcaggctccygagtagctgggattacaggcacatgtcaccatgcccagctaatttttgtatttttagtagagacagggtttcatcatattggtcaggctggtctcaaactcctgacctcaggtgatccgccagcctcggcctcccagagtgctgggattacaggtgtgagccaccttgcctggccctgtattttcaatttatatacacacgtttattatatattattttggggcttgctattctcagccaactttgtgcttttgagatctgtccaattagctgaacacagctgcagtct

SEQ ID NO: 547380 - DNA, 627 bp, Homo sapiens
cagctaaatatcttagaagcccttgtttgtcccttatgggcttcattcacccaatagtaaccaattattctgaattatgtgatattaaatctcttttctttacggttttaccatccatattttaaagtatacatatattaaaactatataaaactgtgtatgtatgttacttagttttgcctgtattttctttttctttcttttcttttctttttttttttttttttgtttgacacagagtctcactctgtcacccaggctggagtgtagtgacgtgatcttgggtcactgcaaactcctcctcccaggttcaagtgattctcttgtctcaggctcctgagtagctgggattacaggcrcatgtcaccatgcccagctaatttttgtatttttagtagagacagggtttcatcatattggtcaggctggtctcaaactcctgacctcaggtgatccgccagcctcggcctcccagagtgctgggattacaggtgtgagccaccttgcctggccctgtattttcaatttatatacacacgtttattatatattattttggggcttgctattctcagccaactttgtgcttttgagatctgtccaattagctgaacacagctgcagtct

SEQ ID NO: 547381 - DNA, 627 bp, Homo sapiens
cagctaaatatcttagaagcccttgtttgtcccttatgggcttcattcacccaatagtaaccaattattctgaattatgtgatattaaatctcttttctttacggttttaccatccatattttaaagtatacatatattaaaactatataaaactgtgtatgtatgttacttagttttgcctgtattttctttttctttcttttcttttctttttttttttttttttgtttgacacagagtctcactctgtcacccaggctggagtgtagtgacgtgatcttgggtcactgcaaactcctcctcccaggttcaagtgattctcttgtctcaggctcctgagtagctgggattacaggcacatgycaccatgcccagctaatttttgtatttttagtagagacagggtttcatcatattggtcaggctggtctcaaactcctgacctcaggtgatccgccagcctcggcctcccagagtgctgggattacaggtgtgagccaccttgcctggccctgtattttcaatttatatacacacgtttattatatattattttggggcttgctattctcagccaactttgtgcttttgagatctgtccaattagctgaacacagctgcagtct

SEQ ID NO: 547382 - DNA, 627 bp, Homo sapiens
cagctaaatatcttagaagcccttgtttgtcccttatgggcttcattcacccaatagtaaccaattattctgaattatgtgatattaaatctcttttctttacggttttaccatccatattttaaagtatacatatattaaaactatataaaactgtgtatgtatgttacttagttttgcctgtattttctttttctttcttttcttttctttttttttttttttttgtttgacacagagtctcactctgtcacccaggctggagtgtagtgacgtgatcttgggtcactgcaaactcctcctcccaggttcaagtgattctcttgtctcaggctcctgagtagctgggattacaggcacatgtcaccatgcccagctaatttttgtatttttagtagagacagggtttcatcatattggtcaggctggtctcaaactcctgacctcaggtgatccgccagcctcggcctcccagagtgctgggattacaggtgtgagccaccttgcctggcccygtattttcaatttatatacacacgtttattatatattattttggggcttgctattctcagccaactttgtgcttttgagatctgtccaattagctgaacacagctgcagtct

SEQ ID NO: 547383 - DNA, 676 bp, Homo sapiens
tttaaatgagcaaacagtagttagaatacttttcactttcatcaaatgacttcccttttaagagcaggatctggttatatctttacaaagaccctttcctgcttggcaccggaatgcttactgtggacactctatgacaattgcatgtgttttttggtcctattatctttcttttatttacctgtatgtttatagccctcctcaaagttgggaaatgaattgcatttcagaagcctagatctctttcttgaacctcaagatttgtgtatatactgcccatcgcctgacatttccacttggatgtcttatagacacctcaaacttgtgtgtccaaaaattaaattatcctctctcctcttggattccctgcaaagtgacacttatatgcaatagtttatttggaaatttgatcccagggagcaaaatgagggaagaggaagaagacaaaacaaaaagggagatgcagtataagaatgtgttactgagttggtcatcaccatatttgaatgttttctyagtcccttaggaccttctaagaagctttatgaaatgagtctcagaactgtccattaaaggaaagaacggaggaagcatttgtatgtcggctcctgtcctctttgatcgaaggttaatgcccttgggcattaactacttcacacttacaaatcgcacagtt

SEQ ID NO: 547384 - DNA, 545 bp, Homo sapiens
gctaaattcatagaataaaagatatagataaaggatatagttagatgtaaaggataagaaaacttgagacagatgttccagaaagacagaaccaagaaaacaggaagaaatcattaaagaatcaatactgggtctgaactgaaggagagtgatgcacgatacagtgaataagaaaaaacatacccaagacacttcattctctagtttcatagcaccaggagtaaaaaggtcatagaagattctaaaaagaaattttaaaatgaaaatacaactcacttataaaagattgagaatcagaatggcaattgaaggtaatagagaaattctgggggaaatgattttaacccagaattctatacccagccaaactatcagtcaagtgtaccaatataataaacagtttcagacattcaaagtctcaaaaaaatttatcttcttttctcaagaaactattggtgggtgtgcttcctaaaatatsggagtaagaaaaggagaaaaagacatggtgatgggaaagctgactgctgcaatttagaaaaccaaac

SEQ ID NO: 547385 - DNA, 507 bp, Homo sapiens
ctcttttccggattcactttacgtatcctagtccaagtcacccctctctgccccccacagtgttactatcaagaagggggccaggcgagggtgtcagacttccctggctgtagacagggatcagatctgtcattctctgtcatgtgtgacttggcctatgcttgtggatgtggctttactaggttcattgagattgtttatttcttcttttaatttttgagcttattatgaatggttttagactttcctgaatatctacatttttatccagtctgttaacattttctgatattcttcactcttttgagataattttaaggaatttttgtctttgtcctgatgaacctgtaggayagaacttttgctattttctagtgactatgttgctttttgaatatcagccttaaacacacattgacccataaacacaccttgaatccaatcagtgggtttctctctttctagttattttttgagtagctctatctttaggaagaaaataaaaga

SEQ ID NO: 547386 - DNA, 550 bp, Homo sapiens
aaaattctctagttcttttttaaaacttacatatccttttattatagtttctagttctcaatttttcactttaacttctctgagtttcagattttctatctttgcttaaattttagactagttattaaaccaaactagaacagttggtttgaattaaccataacccctcattattagaatcagaagtcagccatccttaaacttcttatcttttcacatctgccatcttttagacacattcctgccattctggaccttaaatatggctaggaaaatatggtgcatggccattaagcattaagaccgggcrtggtggctcatgcctgtaattccagcacttcaggaggccaaggtgggcagatcacctgaggtcacgagttcgagaccagcctggccaccaaggtgaaacctcgtctctactaaaaatacaaaaaaattagccgggcatggtggtggacgcctgtaaccccagctagtcagcaggctgaggcaggagaatcgcttgaacccaggaagcagaggttgcagtgagccgagaccgtgccattgt

SEQ ID NO: 547387 - DNA, 1588 bp, Homo sapiens
tgtgagtattttccttcagttctatgtatatactatacactctgagatcattttactgctgagaaatccgttgcaatctattttcatctgtttatgggtaatctttctttcctcagagccttgaaaagctcttaatttttgattatctgcatttcacaccactgtgcccaagtggatactaaatttcatttaacattcaatgtgaggacttagttatttcctcaaatgttagaaaacaaaacaaaacaaaacaaaacaaaacaaaactctcagctactgttccttcaaatattctttctctactattggttttatttttgtattcagataattttattattttacttactatggaatatttcaatatatrctttttctaattgaatttcttctatctaactattcttgttttctgtcatttgcttatattctataaattcctttcataaaagatgtttattcttcatttatcacttcgggactataaacattttaaaatacttttcaggttgttaaggtattttatttaattttctgattatggatgcatttggctttaatcatattagctgtcttcttgttatgaaatgatactttatagaaacattttaaataatccccccctttgtcactctttttctaatttatgaccacttgtctccatggtcccttagtgtagtagttacacaatgaattccacatagctatccaagttcagaatgcaaaaccaggtctcatatcagcagtttggtgtccctgcattagctaacactgggaaatattgggtaatattagggaaatattgaaaaatccaaatacccatccatttaccatagcacttaactacaagcttgggccagtatcttcccatctcctattagctgcacccccaattaatagctttcttatttatgtctccagtcacatgtcaaagatcgctataccaatccctcagttcaaatcataaaccttacttcattcctccaactaacgaagaacaatttagaattttatgtgagccaaattcccagtcacataatgttgactgcttcaaaaccccaggacccagtaggccgagggctttagcaaggctcatcttactttttctgtttgtcttctgtgacatatcttgcttatcactttttataacttatctatcaatgccatggttttggaatttggataggggaagttgctcaaggtatgaccaaaagtagtataatctttaaaaacagatccagaattaactctttttcatatttaagaaatgttgattcataaggtattcatatttttccaatttatataatattgtaagcatctaatagcatattttagtttattatatgcttcattatgttgcaatagaacataatccttgattacgttgtatggaaatttcaactgattacacttctttgcaaccttgtcagtataggtcacacacatttatttttgcaattgctgtttgcaagatcactatctgcggttcccccaaatcccaggaaatattttagattctttatttacatatacaaacatacacatacatatgcaaacaccctttagtgttgacatcttttaaaat

SEQ ID NO: 547388 - DNA, 1333 bp, Homo sapiens
tttctaatagttcttttggcattgttaatagttttattttgtctgatgaaccttaccagtaaaagaaaatgttaaggaagatatttcaaactgctttgattggtgggataaaatatcctgatgcagtgggaagaagaactctttgagggaataaacagtttggaggagaatgtgctgttacttccagaaaaaaacstattttccctggaaaaaaataaaatccatagaaagtgcccttggaggcatggcaaatgaatgaagacttggttatgttaaagcagcttcattctgagatggaaaaagtgactctttcaatcttaattctctggttagagtctaatagaatttttggtcttgtctctgtgcctattctgaggcccttagagtccttaaaaggtgaatgaattaaaaaatatgaaggatgtttgtccattaaatgccataatgtctctattatttacctatttctttgtaacaataggaaacttgttgatggtagaagttgttcagcactcatacacacatcgttttctgcattactctaattgtttactttgcaatttaaatgctagcagggaacaccaaacattttgctaaattccccattgctgaaatgaagtttaatagccaaaaaattgctattgtatgtattgctattgtgtgtgtgtatatatatatatgtgtgtgtgcatgtgtgtgtatatacacatacatatacctatatttccaaatttgttgtgtaagtatatttcttcgactagcaaatttcagattacaggtactaatgagagtcagatcaaacaaatttaaaatgtattggcaaaattcatttaagcttttataataaaacttaattaaatcatgttttattaatttactatttgtagtaatttattagtgctaaaatgaggttcacttttgtataagaaaaataaataattttactaacatgatagaatagaaatacaaaacacatattcaaagaaaaaacgacagagctagattccatcccccccccaaaaaaaaaaaaaaacacatttgaaggcaaaaatcacattgcaggaattaattcacaatttatagacaaaagtactatgctaattaaaatgtatatattagattttactttactaggcaacatattatgatttatattatttcaaatgttatttttaatgccttaatgttattttcaataatacttatatttatttaaaatattatataatttcatctgtttctctcagattaatctctctcagttagtagagaattgactaatgttgtctttacttctcatcaaacttttatgagatctgaaagaaatgatgca

SEQ ID NO: 547389 - DNA, 1333 bp, Homo sapiens
tttctaatagttcttttggcattgttaatagttttattttgtctgatgaaccttaccagtaaaagaaaatgttaaggaagatatttcaaactgctttgattggtgggataaaatatcctgatgcagtgggaagaagaactctttgagggaataaacagtttggaggagaatgtgctgttacttccagaaaaaaacctattttccctggaaaaaaataaaatccatagaaagtgcccttggaggcatggcaaatgaatgaagacttggttrtgttaaagcagcttcattctgagatggaaaaagtgactctttcaatcttaattctctggttagagtctaatagaatttttggtcttgtctctgtgcctattctgaggcccttagagtccttaaaaggtgaatgaattaaaaaatatgaaggatgtttgtccattaaatgccataatgtctctattatttacctatttctttgtaacaataggaaacttgttgatggtagaagttgttcagcactcatacacacatcgttttctgcattactctaattgtttactttgcaatttaaatgctagcagggaacaccaaacattttgctaaattccccattgctgaaatgaagtttaatagccaaaaaattgctattgtatgtattgctattgtgtgtgtgtatatatatatatgtgtgtgtgcatgtgtgtgtatatacacatacatatacctatatttccaaatttgttgtgtaagtatatttcttcgactagcaaatttcagattacaggtactaatgagagtcagatcaaacaaatttaaaatgtattggcaaaattcatttaagcttttataataaaacttaattaaatcatgttttattaatttactatttgtagtaatttattagtgctaaaatgaggttcacttttgtataagaaaaataaataattttactaacatgatagaatagaaatacaaaacacatattcaaagaaaaaacgacagagctagattccatcccccccccaaaaaaaaaaaaaaacacatttgaaggcaaaaatcacattgcaggaattaattcacaatttatagacaaaagtactatgctaattaaaatgtatatattagattttactttactaggcaacatattatgatttatattatttcaaatgttatttttaatgccttaatgttattttcaataatacttatatttatttaaaatattatataatttcatctgtttctctcagattaatctctctcagttagtagagaattgactaatgttgtctttacttctcatcaaacttttatgagatctgaaagaaatgatgca

SEQ ID NO: 547390 - DNA, 1382 bp, Homo sapiens
tttgaaaagaaatgcatggttttttattttttggttgctattattaagcagaatgtgtttcaaagtagatgtactcaacccaaatttatttataattagtagcttcagctggcatatagcaattaatgtgttttttccaaagggtttaacattcctcctgttatatactgcaagcaacttatttgtttattatattattaaagcagcctttaggccgaagcgtggtaaatgatcacaaatctcaaatttaatgaagtcraaattggtgacattttatttcatttttctcagatcatcatatgataaaaatcacactgcattttacaatatctggaggacatgataaactagagtagctattcaaataaaatccgtactctgtggctaaagctggaaggctgagagttatagtaaagatcacaaattcattaatgagggctctctttataattgaattatctagtctgccatttgttttttgcaatacattactcaatcagtgaccatttattaagggcataatattttccagataccaagctaggaaaatggaaggggctgacgtgtgaagtagattacaaaaacaggaacttggaatgaaggtgaaagtgatagctcagctattagaatgagaatgtgctggatggtcagtgtgaggtggagaaagggaatacctttagaacggtgtgcttttatcaaagtcaaaacagaatagtaacatgatttacctagtactgagccttttagcctttatcctggagcaagaaagtaaaaataaaatggagagaccagtggatgctcactggattattcccaatatttatcaataagaactttcacatatattattttatttggtccataatataaaaatctacttatattttgtttctcttccacgtatttgcaacagagatttcagtttgagtctgtattagactgtgctacatctggaaatgtctaataaacaagtaggatgggccaggaagaaaactgtgttgcatgaatactgatttatttatcactggataagtcatcctgcaggaataaagtcccaggcataaacatcttggctcagagaggaagtcttagttttcagagggaggcagaattctgaatgcagtatagttactgaaaattgcatttatttcctggtgaaactaccattggacctgaaattcacagagaataagagaacggtaagtgaccactgaaatgattctcttataaacttgataaaatattagggtgtttgggatgcctctaaataaagaaagaggacagagcaggtcttcctcaagcacttatctaaaagctgctgtataaataacttatctaaaggcattcatgactcaaatcatgaatggtagcatcaagatacc

SEQ ID NO: 547391 - DNA, 606 bp, Homo sapiens
ttttgtcttatgaaagtaacttctgtagataatttttaaaatcaaatagttctacaaattttaggatgaaatacagtagtcccttgctactccctccgcattccccggattctttagatgcaaccattttcaactaattcttttgttatttacatgtttcaaaataatcccaatcactttttattttatttttttttttgagacagtctcactctgttgctcactctggagtacagtggcacaatctcagctcactgaaatctctgcctcttggatccaagtgattctcccacctcagcctcccaagtagctgggamtacaggtgcatgccaccatgccagctaatttttgtatttttagtagagatggggtttcaccatgttggccaggctggtctcgaattcatgacctcaagtaatacagccaccttggcctcccaaagtgctgggattacaagtgggagccacagtgtgtggcctcaaaataacacccttggttttcagttttacatgtcataataggcagaataatgagccccaaatatgtctacaatcctaatcactggaacctgtaaacatgttatgttccatgacaagtgggaattaa

SEQ ID NO: 547392 - DNA, 630 bp, Homo sapiens
acctggggattacaattccagatttgggtggggacacagagccaaaccatatcagcatgttcgccagtaaaacttgaccttacacatctatcatgcccagaggaaactaacacaaatcagtgccaaatgagtactgtcaataaacatatctgccctgtcacacctctttcaactctagaggagtgagaggcccctaaagtggggaagaagcagaagaactctctggggaattaaggaagaagctaacaagcccttttccatagctggtggcccatcctaacaaaagggggragtcttcaacttcaataaactttaaattctattttatgacaatgatattttagctagtgacccgagattgtctaggagacctagaagtaacttgaaaagtcaagactggtcttaactttatccaagaggataaaattaaggggcaagaggagaattgttccagcagaaaaaattttaaagagcaatgagagaaaattaagttgtttcatgattgtattatctatctgtgtcctactccttcaatataatacttgtacactaaaccaaaaaaagcatttttattatgtaaaatataatagcatctatacaatgcatccaagtatttgacatgcatagtct

SEQ ID NO: 547393 - DNA, 630 bp, Homo sapiens
acctggggattacaattccagatttgggtggggacacagagccaaaccatatcagcatgttcgccagtaaaacttgaccttacacatctatcatgcccagaggaaactaacacaaatcagtgccaaatgagtactgtcaataaacatatctgccctgtcacacctctttcaactctagaggagtgagaggcccctaaagtggggaagaagcagaagaactctctggggaattaaggaagaagctaacaagcccttttccatagctggtggcccatcctaacaaaaggggggagtcttcaacttcaataaactttaaattctattttatgacaatgatattttagctagtgacccgagattgtctaggagacctagaagtaacttgaaaagtyaagactggtcttaactttatccaagaggataaaattaaggggcaagaggagaattgttccagcagaaaaaattttaaagagcaatgagagaaaattaagttgtttcatgattgtattatctatctgtgtcctactccttcaatataatacttgtacactaaaccaaaaaaagcatttttattatgtaaaatataatagcatctatacaatgcatccaagtatttgacatgcatagtct

SEQ ID NO: 547394 - DNA, 780 bp, Homo sapiens
tataaaaagaaataaacttcaatgtattttttattacaactttgtactggttgtaacttgcattagaaaaaaaaaagagatatatamaccacaaagaatctaataagaaatttattatggagatatagcccttaaaatgcaatattaagaacaaagaaatagaaaatggtttagatatctttcttccttcataattaaatactatatgaaacttgtgccacagagctatatgtaatatgaaaagattaacttcatagagatattgtaagtaggtaattttattatttaaagtcctattaagaaatatttgtcttaaatatataggacaatacattatattaaaatggtctctctctatatatatctgtatatcttatacatgtccatacacagaaacataataaacaatcttcacacgaaaccaaaaatagcatacacctaatgttgggttagggaattgcaatttctactttcatagagtcatagaattttaggtggggaagaggcattttgcttgtcatttcttaatataactcaacaagaattgcaacatttgtgtaccaagcaataagtgcaatgcataaaatttcctgtctgtatattaccttcattttgcttgtagtagctgtttgggtggttggaataattttatttttcttttaaaaaagctaacatcagacccctttataatgtcctaaaattatgataatacatttcccaattcaactcaaaatattattggtgtattttgtctattctggatatttgatctgttcaatg

SEQ ID NO: 547395 - DNA, 780 bp, Homo sapiens
tataaaaagaaataaacttcaatgtattttttattacaactttgtactggttgtaacttgcattagaaaaaaaaaagagatatataaaccacaaagaatctaataagaaatttattatggagatatagcccttaaaatgcaatattaagaacaaagaaatagaaaatggtttagatatctttcttccttcataattaaatactatatgaaacttgtgccacagagctatatrtaatatgaaaagattaacttcatagagatattgtaagtaggtaattttattatttaaagtcctattaagaaatatttgtcttaaatatataggacaatacattatattaaaatggtctctctctatatatatctgtatatcttatacatgtccatacacagaaacataataaacaatcttcacacgaaaccaaaaatagcatacacctaatgttgggttagggaattgcaatttctactttcatagagtcatagaattttaggtggggaagaggcattttgcttgtcatttcttaatataactcaacaagaattgcaacatttgtgtaccaagcaataagtgcaatgcataaaatttcctgtctgtatattaccttcattttgcttgtagtagctgtttgggtggttggaataattttatttttcttttaaaaaagctaacatcagacccctttataatgtcctaaaattatgataatacatttcccaattcaactcaaaatattattggtgtattttgtctattctggatatttgatctgttcaatg

SEQ ID NO: 547396 - DNA, 601 bp, Homo sapiens
tttctactaaaaatacaaaaattagccagacatgttggcgcaygcctgtaatcccagctactcgggaagctgaggcaggagaatcgcttaaacccagggggcggaggttgcagtgagccgagattgtgccattgcactccagcctgggcaacaagagtgaaactccatctcaaaaaaacaaaaacaaaaacaaaaacaaacaaacaaaaaacacgctaattcaatcttccttttctgagagtctcaatttggagaaaaataattcaattttctattttgctagtaagaaatatatttgtttctcctccaattgtagaggaaaacaaggaaagagaagatgtatgatgcaaacatcaacagtttcataacgaagacatcaggaacataactaggagggctgaacattttaccattcctccttgaagtttacatataagctttgattcatattaaattttctgctaaaataactacttccttttcagacttcaattccattaaacacacatctatttccattttaaatcacatacaagtgctatgtgatcagagggatgggaaacactaggtaaggcctggtgggtggtaacttcttcatgac

SEQ ID NO: 547397 - DNA, 605 bp, Homo sapiens
aaccatctaaataccaatacctagaaataaaattggtgtcaaactcttcttctaaaatgcctatcaccttgggaaacaattctcaaatactttttcaggatatgtgtactacttgttttgaaccacggctgtaataagaaaaaaaataaaaagaaaattatgtacttcctgacttttttccttaaaaaatggtgttttccttaattgttcattatcagcattatatggccctattttctaggtgagggagacaaaagatagaaccctttctcttagatgtgaatgacgaagcaaacatctgtgactcttgttctttcagatgatcatctagcacagtatwgaccctcagacacaaatagcacatttatggaacaagtcacttaatttttctgttctctgtgtgattaaatagttcttcttctgaagtcgagaaaatgctttctcctcaacattccataaggcctttgaagctaaaagcttattcccatagaataagaagttaacacagggcaatggcctggctaagttttttgcatttttagtaaagacaaggtctcactgtgttgcctggactggactggttttgaactgctgggctcaagtga

SEQ ID NO: 547398 - DNA, 536 bp, Homo sapiens
agccttgggaaaaaggctaaagctttctagcctctacctgaaaatacccactgcatagaaaacccaggagaaaaaattcaacctaggcagtcaagtctgaggtattgtcaccccatttaaatttgaacagggcactctaaaatgacatactggccttcataagaggaacagaaagaggtttgtagtcatgcccataggcctatgttcttaggtaaactaaactagcttgatccttaaaaaacgagagagagatggtgaacagtggaaaaggttcaaaataaaatatgaaagacagcctctgttacagcacttgccatatccccccaggcaactgagtgcagagctgacaaacttatgacatgggagaatgaaataagctttctagaatgcaaggatctgagtacaacaccatatttgaacaacaatagggggcaaggtagtctgggtctttaactatttagaatactctaaaaagagggctggggagagaaaggccaagtgcacatatatttaaagctayccagtaaagacttact

SEQ ID NO: 547399 - DNA, 850 bp, Homo sapiens
tgccctgcaagctcgatttcatataggaaaatataaggaaagcaaagttatcattcaatttaaaattaggcctaaggtaatctatagactayaggaaagaaaggcaccaaaaagaaacataaagaaataaaaagcagaagtctggagaagtgtagtagaaactgagctgcagaattaagctagtttaagatataggcagggatacagtggaagtagacagagcagccaagtgggagtgtgccctctgaccacacacagcacatgaagcaaatccaaacagtggatttctttttctttttttgaaatggagtctcaccctgtcgcccaggctggagtgtggtggtgtgatcttggctcactgcaacctctgcctcctgggttcacgtgattctcctgcctcagcctcctgagtagctgaaattgcagatgcccaccaccatgccaggctagtttttgtatttttagtagtagagatgggttttcactgtgttggccaggctggtctcaaactcctgacctcaggtgatctgcctgcttcggcctcccaaagtgctgggattacagggatgaaccagtgtgcccggtccaaaaagtggatttctgaaaatatgatgtcagtgtatattctcttaaattcaacaactatataaagaactagatagtttgcagttttaaaacaacaaaaaaagcaatttgaagcatgtttaactctttcatgaatcaattgaacagtttttttttaagctacatatgataagactttagaatattgactgcctcaatgtatatagaagactgatacaccaagtagttaccttctgtatggtaacgcttttgcttaaaggagacc

SEQ ID NO: 547400 - DNA, 640 bp, Homo sapiens
tttaatctgtatacacttttacaccaaatttaagctcaacttaaaaaaaaaataaaagtggttaaactcaagaaaaagccccaagattttctaagggtattgttaattggttgttgctgtaaaatgttttgtgaataacaaaatattccaggaacttttaacaaagatctggaatacttcatgtgttatcttgacattggcttaaaggtaagaataaagcaatagcgtgatagatgtgaactatagttcctataaatgcttcatagtgtttgctttgsttcgagattccatgagtgaccaaggagttgaaggggataaaaactccccattcactgtttctacagagcctctacaagacctggacccttggggctgggggatggtgaatatagcaaggtatgatgtgggcatacttaaatgatttgcagcaaaataatgtttatattaaaaatcctgttttccttccttccacccttctgctttttcttaaatctcaccaaagctttattgctgcacaaaaatgaagtccttagaaggccttattaatctggttccagactcctagcatcttcccacttcctcaccatgcttcacccccacaggtcttcgtgtttttgaaacggagtctcgctctgtcgcc

SEQ ID NO: 547401 - DNA, 563 bp, Homo sapiens
agccagggcgacaaagcgagactccgtctcaaaaaacaaaaaaagaacatttaccttgatagaccatattctgtgccataaaataaatctcaaattttaaaagaccaaagtcagaaaaaggtgtttagacaacaaaagcagtatttagcastaaatgtctatattataaaagaagcaatacatcaagtcggaaacctagccttctaccttaagaaaccagaaaataaagagcaaaataaacccaaagcaagtagaagaaaggaaataataaaaagcataagttcatgaaatagaaacagaaaatagagaaatcccatggaaccaaaagttggttctttgagatcaacacaattaactctttaggcagaccaatcaagagaaaaaaagaacatacattaccaatatgaagagtgagagaagtaacatcggtaaagagtctacagatattagaaggataataaagaaatactatgaacaactctatggacttgtgaatctggtgctgcctgaagagtaggaagacatgacctcaagcaggctgcagccctgataatgtgtgactg

SEQ ID NO: 547402 - DNA, 656 bp, Homo sapiens
ttgttgccctttgttgctatcatggaacaggctcatggaaatgttcattattagccacttaggaacaagaccaattcgtttgacctcattagtttgatcatgattattccattttaactaatrcatggtatttatgaaggtgttttccaaagattattcacttgcaagggcattttgtgttttattttactattctgcaaaaagacaaatagataaagtttaggtgataaagttttcttttgtcacatgttgaatgtagtaaaagacaaagcaggtttttttctgttttttttttattttacacttaaacaatgaatgacatcagggtttcagattttttctatatgtcgatacacttgaaaatactagcacatactcttgggataaactgaaagaaacatttataacatcatattgtgatacaggttgaagtaggaggaccagctttttattcagtgaaaacttgcattcatcccaatataaagtttgcaaaaccacagtgagcctagctatatccagggccctactcttggcttaaaacaaaacaatgcaaatgtaatctttcaatggtaaagaacatatgaaagagaatgatcttaaaacctctctaacttggacaaacaaacaggtgaagaataattggaattggtgggaaa

SEQ ID NO: 547403 - DNA, 656 bp, Homo sapiens
ttgttgccctttgttgctatcatggaacaggctcatggaaatgttcattattagccacttaggaacaagaccaattcgtttgacctcattagtttgatcatgattattccattttaactaatacatggtatttatgaaggtgttttccaaagattattcacttgcaagggcattttgtgttttattttactattctgcaaaaagacaaatagataaagtttaggtgataaagttttcttttgtcacatgttgaatgtagtaaaagacaaagcaggtttttttctgttttttttttattttacacttaaacaatgaatgacatcagggtttcagattttttctatatgtcgatacacttgaaaatactagcacatactcttgggataaactgaaagaaacatttataacatcatattgtgatacaggttgaagtaggaggaccagctttttattcagtgaaaacttgcattcatcccaatataaagtttgcaaaaccacagtgagcctagctatatccagggccctactcttggcttaaaacaaaacaatgcaaatgtaatctttcaatggtaaagarcatatgaaagagaatgatcttaaaacctctctaacttggacaaacaaacaggtgaagaataattggaattggtgggaaa

SEQ ID NO: 547404 - DNA, 638 bp, Homo sapiens
gtacaacgttgattggctaattatatataaaaattattacttttaaaaatagctgcataatattttatagtaactacgtgccatgatttatctaaacattccactactgatggattaacagattgtttccaattttttggaaacaatgacaaataatgctgcagtaagaattcttggacatatgctcttgaatactttctgtggcatagatttgttttggcttgctggctgaaattgtaagagcatttcaaatttaatagatrttgcgaattttccttccaaaaatgtatagcagtttacattaacaataccagaaaggggtcatcattctcctgaatacccaacagtactgaatatattgctctttagaaatttttgccaggctgatgcatgaaaaattctatcttgttttagtttgcatttctctgactactgctgagattaaacatgttttagatgtttatgaatcctttggatttcttcttccatgaattgtctaattatgcatgtggctgtgtatgtgtgtatatgtgtatgcatctgtatgtttgtgtgtgtatgagatcaagtgattttcctattgggtaggttgtctttttgaaaatctagtgtaaaggtgcattagttaaaatcaggcc

SEQ ID NO: 547405 - DNA, 638 bp, Homo sapiens
gtacaacgttgattggctaattatatataaaaattattacttttaaaaatagctgcataatattttatagtaactacgtgccatgatttatctaaacattccactactgatggattaacagattgtttccaattttttggaaacaatgacaaataatgctgcagtaagaattcttggacatatgctcttgaatactttctgtggcatagatttgttttggcttgctggctgaaattgtaagagcatttcaaatttaatagatgttgcgaattttccttccaaaaatgtatagcagtttacattaacaataccagaaaggggtcatcattctcctgaatacccaacagtactgaatatattgctctttagaaatttttgccaggctgatgcatgaaaaattctatcttgttttagtttgcatttctctgactactgctgagattaaacatgttttagatgtttatgaatcctttggatttcttcttccatgaattgtctaattatgcatgtggctgtgtatgtgtgtatatgtgtatgcatctgtatgtttgtgtgtgtatgagatcaagtgattttcctattgggtaggttgtctttttgaaaatctagtgtaaaggtgcattagttaamatcaggcc

SEQ ID NO: 547406 - DNA, 1471 bp, Homo sapiens
acatgtgtgtcgtcgatgtgcaggtgtcatgtatctgtgtgggaccattcccttgtgccctcgttgctgcgctggtctccaaggaaatttctctcacctcttttctcttctcgacgccatgtcccggagttgaggatcttccagcgtgaccccaaggaggcttttcgagctctgtgtcccgggctccagtgtcttcgaggggacaacactggctttgtgttttctcatctatggcctttcttctacacagtattgcagtaacgctctcctttatctctttccagcatctggtgtgttttccattagtcggcatgaatcctgccatatcgcggggcgtggtgtttgccgggaaacttgtcctgtggcacagctcatggagaggacattggctgcacatagctgcagacgaagagcaagcatcacttttctcttgtacattcagggatgtgcttcattggcttagaaaacgtcctctgtaaataaactccgtgaggctgggatttaaatgcaggaagcagctggcagctgaagctacctattggactatcatctgcttaaacacgcgagaagcctcttgtgaagtctaaagcaaatacaacggcttatttgagccgtatatacaagagacttaaacaaacctcgtgtaatcctcttaaatgttgcatctccccccacggaaacacaacctgccaattagctcaacgtcctgacaaaacctcccagggctgcactgtaggggagaaaggtgtttatttaataagatctttcagagggaagccagctgcgtgtctgaacatcttgggagcaacaaatgaagacagtacagtctaaagggaggacagtgccagcaagagccccaggagctcggcagacaaagacaggaaaagctggaagtggaaaagctgaacgttcacgtgtaaggaaacccactggtcccttagtacaatcacaactgcctctttcgccaagttcctgagtacagttggtcttagttgtgaaagatcagtctcaactggcaagtgctggtgctggatttgagtccaggtggttagaaccctgctgccaggtttgtattccatggaatcctacaggtgtccattctatggaaggttcccagcaccagtgggtctcatgcatgatcaaagttaaatcagctgggcacggtggcatgcacccatagtcccagtggaggtgggaggactgtgtcaactcaagagttccaaaccagcctggacaacatagtgagaccctatctcaaagaaattttttttaattaaaaattttttgaaaaatttaaagttagtccaaacactaagagaagagagttggggtgtgaggatgcgatagttgtgttattaaatccaactacttggtttccatcggggaagggcccacctcccmaacgtgtcccttgcggggaccatcacgttctgcccctgtgatggtcagctggccacggacttgctctcac

SEQ ID NO: 547407 - DNA, 555 bp, Homo sapiens
aaacagatcatcttataactctaggaaagaatgatccaggtttccaaaacaattagtttgtttttcaataacacattcacagtggaagtgtttacaactgctctacttttctaaccaaaaccaattccattgtgtgacccagttccaacagaagggtagggggatgggggctgcactgccagtggagcaaacaccagggggagcgaaagggcagccagtaagcaaacctgagactgactgggtctccctttgacgtcagcatggagagggctcctcctggcagaacataggtagggctgataagcagtgatcatctgagacacttcctagctctgccttcaatttttcataagatcgtgatctttggtaagtcttttgatcttcatttagccaattcacaagtagatgcttagcggccaacamgaatttcgctacaccatgcccccaatattctaagctgcctgaaggaatttgctgccagagtttgtttgtattctgcaagccattcataactatgtgggtttgcttgcatatattcaggtgaacaggaaggag

SEQ ID NO: 547408 - DNA, 555 bp, Homo sapiens
aaacagatcatcttataactctaggaaagaatgatccaggtttccaaaacaattagtttgtttttcaataacacattcacagtggaagtgtttacaactgctctacttttctaaccaaaaccaattccattgtgtgacccagttccaacagaagggtagggggatgggggctgcactgccagtggagcaaacaccagggggagcgaaagggcagccagtaagcaaacctgagactgactgggtctccctttgacgtcagcatggagagggctcctcctggcagaacataggtagggctgataagcagtgatcatctgagacacttcctagctctgccttcaatttttcataagatcgtgatctttggtaagtcttttgatcttcatttagccaattcacaagtagatgcttagcggccaacaagaatttmgctacaccatgcccccaatattctaagctgcctgaaggaatttgctgccagagtttgtttgtattctgcaagccattcataactatgtgggtttgcttgcatatattcaggtgaacaggaaggag

SEQ ID NO: 547409 - DNA, 548 bp, Homo sapiens
atcagggtcaaatgyttaaattatgtcataaaaagttaccaaaatactgcctatcttttttatcttcaaaccagtggcatagcctacactttgctctctaagatctacccattcttcaaagcacgacaaagcctccctcttccatgaagtattcctcaacaactctagcacacggcaatttctacttcagaacatataagcttaacgataaacttaactcacaaatatgcataaagtctctatgatctacgtgaaagcttagaacaagcatctgtctacattattttttgtaggtattcactataagcagctcaaaagcccttttataaggtaggtacacagtatgtcaactaaaactatcaagggaaaaaagctaattatttgtctaagtatggtcctctatttgcctgtcccattccggcctctagtcccaaaagaaaactaaccccagccccttcatgtcctaccctcaagagaagagatgataactttgtgcacttagtacatgccaaacactttaagacattatctttattactattattatt

SEQ ID NO: 547410 - DNA, 548 bp, Homo sapiens
atcagggtcaaatgtttaaattatgtcataaaaagttaccaaaatactgcctatcttttttatcttcaaaccagtggcatagcctacactttgctctctaagatctacccattcttcaaagcacgacaaagcctccctcttccatgaagtattcctcaacaactctagcacacggcaatttctacttcagaacatataagcttaacgataaacttaactcacaaatatgcataaagtctctatgatctacgtgaaagcttagaacaagcatctgtctacattattttttgtaggtattcactataagcagctcaaaagcccttttataaggtaggtacacagtatgtcaactaaaactatcaagggaaaaaagctaattatttgtctaagtatggtcctctattwgcctgtcccattccggcctctagtcccaaaagaaaactaaccccagccccttcatgtcctaccctcaagagaagagatgataactttgtgcacttagtacatgccaaacactttaagacattatctttattactattattatt

SEQ ID NO: 547411 - DNA, 548 bp, Homo sapiens
atcagggtcaaatgtttaaattatgtcataaaaagttaccaaaatactgcctatcttttttatcttcaaaccagtggcatagcctacactttgctctctaagatctacccattcttcaaagcacgacaaagcctccctcttccatgaagtattcctcaacaactctagcacacggcaatttctacttcagaacatataagcttaacgataaacttaactcacaaatatgcataaagtctctatgatctacgtgaaagcttagaacaagcatctgtctacattattttttgtaggtattcactataagcagctcaaaagcccttttataaggtaggtacacagtatgtcaactaaaactatcaagggaaaaaagctaattatttgtctaagtatggtcctctatttgcctgtcccattccggcctctagtcccaaaagaaaactaaccccagccccttcatgtcctaccctcaagagaagagatgataactttgtgcactyagtacatgccaaacactttaagacattatctttattactattattatt

SEQ ID NO: 547412 - DNA, 1241 bp, Homo sapiens
agacttgaacagttttactctttatatagcttatttccaatagagaacaaatggaaacaagtgctcttggaatctcatattgaattccacagtcacaagcatcctggtcawctcaggggaaaatatcacacacttggtacaaagcaaatagatgagttaaatattatatattaaatgacaaatttattatgatattagtaatttataattattagattgaattatttccataaaaatatgcaaatactattatattgattacaatatcaaataatgatattatagccttaattaacatataagaaaatggcacaattcactttaaatataagggacaaagacaaaataatgaaaaccaagggtttgcatattttgtgattattttataggaaacagctaattattaaactaaggaaaactaaaattaaatatttatttttctacttaagaagtgtcttggccgggcacagtggctcacgcctgtaatcccagcactttgggaagccgaggcaggtggatcacctgaagtcagcagttcgagaccagcctggacaacatggtgaaaccctatctgtactaaaaatacaaaaattggccaggtgtggtggcacatgcctgtaatcccagctacttgggaggctgaggcaggagaatcacttgaacccgggagggggaagttgcagtgagccaagattgtgccactgcacttcagcctgggggacagagcaagacggtgtccaaaaaaaacagtgaattctcctctctgctaggggagcattatattttttgtaattttagaattacatcatttctggtcacagctgtctaagcgggctatgattttgcttcataaagtcttattgattttgattattcttaccttaaagattacatgtgttaccatttatcctaatgaaattaagataaaacctgattttttttaccagcctttagattcagtattagacacagaacattttataaggatccttgataaggctcttacttccttgtcttatcacagaagtagaattagaagctctgtaacaaatatccaacccctccaccattttgataatctgtttttggactgggtatatagtaggtgatcaataaatgattattgaatgaatgaatgtaagcctgaatggatggttctgacttcctgtctgcttatctgcctatccgtccaggtctgtacatctatttctgttggactatatgtgaatcctctcaaaata

SEQ ID NO: 547413 - DNA, 521 bp, Homo sapiens
catttatttccttctgcatatatatgtgtgcattgatgtgcatgtgtatgtatgtatctgtatttatacaagtacataagatataaatatatccatacctatttgtaattgcacacaatttatacatgcagtagtgtataagctgcatgtttcacttactatcaaaatctctgtaagcataatttttatttattctgattatttaatacacagtgatgtaactgtgatcccaaaatgtgcaaagttaaagccttcaactgcagctgaggagagggcaggaatggtatatggggacggtggtgagtcacgaatgatgggcaggcggccatgagcagggcagcctcctccccggggccagggacaggggaatggcctaaggagccaggacccaagggtagcccaggaccggggaagggggcagagacctccycttggcctaggtcaggagctcagaagtgccacatggctgagggggcagcggcccgggaagagccagagcgagagccaggaaagcaccattt

SEQ ID NO: 547414 - DNA, 1191 bp, Homo sapiens
ggaagtgggatgccagtgatttatacacgattttttctatatcctgtgctttccaagtgttttacagtaagtgtgaattattattttaaaagaaaactcaatgttattaacaagaatacctgggccctggccaaggccatcctcgtcccagggtgcatttttctatccctcatcagactcctggtccacttarcatcggtcccacccaattagccctttattatagatcgttttgttctctagttgtccgctctgcataatttagcacggccatatactgtcttgttctcaaacatttaatttagtgtcccttggcctcagtttcttcatctctaagtgcagtggtggcagaaaaggagattattagaggccccttttgtgtgacattctcgtggaaactaaagtaaagctaacactggtttagcacttactgtgtgccagacactctgctaagcacttttcatgcattcgttcatttaattatttcaaataattaaattaattattgcccactccctcccccattttaaagataaagatacttaagttcagagaggtttagaaacttgtccaaggtcacacagctcagaagtggtggagctggacttcaaacctgggcaatctgctcctgggtctgtgctcttcctgctctatgcccagaccctgcatcaggtgcttgatgcacaaaaataaggcaaggtgtttgcctgcaggcagaataatagtaacaatgccagttcacgtgccttaagggctcattgtgtgccagacctttaactcacattaggtcgtggggtccctgcaatatcctatgcagagaggctgccacagttacttaccgtggtacagaggaggagtcaagacccttcattctgcccagactctcacctccaagagggtcccggaagtgtcatttgaacccagaaatctgcctccagttgcttcatttcatccagtgcttacaacacttgatgtcatcagtattactgtgcccatttcacagagggggaaaatgatgaggctcagagaggttaggcaactttcctgaggtctcacagccaataagaaggagagtcctggctggaaatcacagtcacccaaagcctgtggcctaagcaatggaccacactgcctctcagcatcggtggcagggctcagaggccttgaacgagaaccaggcctcccccatca

SEQ ID NO: 547415 - DNA, 569 bp, Homo sapiens
gtatcaggggagtagggggtgaagagagtgcagtcaatgggcacaaacatacagtagatagaaggtatagattctgatatttgatagctgactagggtgattataattagcaataacatactgtgtatttcaaagtagctacaagagagaacttgaaatattcccaacacatagaaatgacaaatattcaaggtgatggataccccaaatatcttgacttgatcatcacactttctatgcatgcaatgaaatatcacatgtacccccataartacataaatattatgtataattttttaaaatagaagaggaaacttggacacatggaagataccaggggcactcatgcacagaggcacaaccatgtgaagaggtaacaaggggagattcatttgcaagcaatggagaagggcttcagaggaaatctaccttgccagcactttaaacttggaattccagcctacagaactgtcagaaaataaatgtttattgtttaagccatctaatctgtggtaatattttgttttggaaaccctagcaaaccaataaggatagtattaaaagactgg

SEQ ID NO: 547416 - DNA, 613 bp, Homo sapiens
gaatggtacataagaaacctgaaatcaatcttccatctcctacaggctcaagtcctgttcagtcgtcatgaagccactcgcagagatccagcgagggtaggggatggcaccccttctcctccagctgacactatcctctcaaagacgtgaaccttatgtgtagctattccgataacatttgtttgactttccagctccctactatttaggccaaggcatacactgcctgggttactaggacattgccaaccccattagcaaagaatagtctaaacttctcaggggatcaccttggagctgttttaatatagaatgcgcgtataccaaaaaggtaggaaatcctaaccacttgagaaccaaacagacttgtagctctaagaaaaagaasagaggtggttgaaccctttggaatcataaaaccaggaggattagaaatcataaaaccaggaggattatataaaaccctgaggattagaaaacaggcctccctgtctgtcctccaattccctgacaatctgaatcatgacgggctgctggatgggtatggatattcccaggtctctgtatcgtaagctaatcagaatgagtgtgtcaggtatgaggagggctgtgc

SEQ ID NO: 547417 - DNA, 843 bp, Homo sapiens
aaaatataaatatagagctgaaataacattatttatgagaatttttctcctgtatacaatgatatgttaccaaggatgcatttttttttttttttttggaactcaaaaggcagacaaaagrgtgaatgctgacaacattttgtctagatcccctttagccacccgttgccctcatgtctaacttctttgggttagtctctaacagctcacagctgctctctcttctgaagaattttccttgactgtatggtaggttcctcacccaggaggtgaaattcaccattcaggggaaacctacaaccaatgactgactgatggaggtataaacagaacagccctcttgtccaaaggggtattttttcccccagagtttgccatgaaattttaatggagctgaacgcactcccactgaaataataattttgtttagtttttattctacttcccttactcttttattccttggattattctctataaattatgcacacctgaatttctgtctcagccctcgctgctgtagaacctgacctaaaataattaacctatctctctttcactatgagagagaagctgacttaaccgaatttgataaatcatcttggttggtccaaacagctatgagcggaaatgttaagtggtagtgcaataaagcaggtttgaaaggaataaaggacattttgaaaaaatatttcaaggtatattttgaaaaaattcagatcaaattatattatgttttgtccattaaggagataagatactctgatttgagcataagtcatgctttctctttattgatcaattattaattgtattgctaacctactttattcctatgggtct

SEQ ID NO: 547418 - DNA, 843 bp, Homo sapiens
aaaatataaatatagagctgaaataacattatttatgagaatttttctcctgtatacaatgatatgttaccaaggatgcatttttttttttttttttggaactcaaaaggcagacaaaagagtgaatgctgacaacattttgtctagatcccctttagccacccgttgccctcatgtctaacttctttgggttagtctctaacagctcacagctgctctctcttctgaagaattttccttgactgtatggtaggttcctcacccaggaggtgaaattcaccattcaggggaaacctacaaccaatgactgactgatggaggtataaacagaacagccctcttgtccaaaggggtattttttcccccagagtttgccatgaaattttaatggagctgaacgcactcccactgaaataataattttgtttagtttttattctacttcccttactcttttattccttggattattctctataaattatgcacacctgaatttctgtctcagccctcgctgctgtagaacctgacctaaaataattaacctatctctctttcactatgagagagaagctgacttaaccgaatttgataaatcatcttggttgrtccaaacagctatgagcggaaatgttaagtggtagtgcaataaagcaggtttgaaaggaataaaggacattttgaaaaaatatttcaaggtatattttgaaaaaattcagatcaaattatattatgttttgtccattaaggagataagatactctgatttgagcataagtcatgctttctctttattgatcaattattaattgtattgctaacctactttattcctatgggtct

SEQ ID NO: 547419 - DNA, 547 bp, Homo sapiens
ggaaagacacatgaccgataataaaactactcggtaagatttatgcaatatattctgcttgccagggattgttctgtgtatttctacacagaatgtaatctttacaatataatccctagattacagataaggaaacgaaaacagtaaagggcagtaatttcccaaggtcacacagctagctgggatttaagtccattatgtctggcaacacagaacacatgccctttcccaggcaggtctatactgcctcacctctgtttccctagctactgtaattgactcagggatgaaccccagctgggtcaatcagaatctttctccaggattttctgctgcatctatcagggaactcttgcatttytgaagtaattaaacattgtccctgaacataaatgacccttgagtgttttaggaagaatgaagaaagaaaagtagagctgaactccatttttgatatttactacagggagtaaagggaagccatgacaacctcacttgaactcttggtccagtcctgtttaatgtccatcctacccaattacgtgag

SEQ ID NO: 547420 - DNA, 550 bp, Homo sapiens
catatttttctgtagaattttcaccttgtgtctatacttttgtttttaaaaatccttttctggctgggcgcggtggctcatgcttgtaatcccagcactttgggaggccaaggcgggcggatcacgaggtcaggagatcaagacaatcctggctaacacagtgaaacccatctctactaaaaatacaaaatattagccgggtgtggtggcgggcgcctgtagtcccagctacttgggaggctgaggcaggagaatggcgtgaacctgggaggcggagcttgcggtgagcygagatggtgccactgcactccagcctgggcaacagagcaagaatctgtctcaaaaaaaaaaaaagtttaaaaatcctactgctggcaattaaagttagttttgtcaagttatgtattaagcacctttcaggaatcatattcttgcttttctctaatctctagtgttctctctgttaattcatatgcttaatactttctaaagatgcagaaaaactggaattctcatgttggtgggaatttaagttatcatgtgttagtct

SEQ ID NO: 547421 - DNA, 1137 bp, Homo sapiens
aaatttacaatcatggcagaagaagaaagggaagcaaaaaccatcttcacatagcagcaggagagagaagggaaagtgaaagggaaagagcccctcataaaactatcagatctcgtgagaactcactcactattatgagatcaccatggggaaaacttcacccatgacccaatcgcttcccatctcccacccttgatacgtggagttkacaatttgaaatgagatttgggtgcagacacagagccaaaccctatcacctgcagtttcagaaaatatattatttcagatcaaacaatgggtatatgaagtcctgcaaacttgatccatacaaaacatatcagtgtattctttcataaaagtcaaaatgctgttgagaaaactgattttcaggattggcaaatcaatatatatctttctaagagttagacttatagttaaaccacataataataaaaaatgtccatgtgtcaaaagccagaataagtgttgatatatgattcatgttttttatgtatctgccacatggatggaagaacttcaatctgtggagagtttttaaatggatatttacaactactttcattttgccattatgttgatgtgattttcttaaatgatttttctctaagcaaggtagaatttgatgaagtttctgctttgcaaattaaagtcatgtctatttttatcttgttgccattatactgatgattacgtgagtataatatttcaaaattttccaaaatgtttagtgatatccttttccacaatttcttgatttatttttaagcaactaaatttatatgaggattctattttttaaactaattcttagaatgacatcttactattataatttttaatcacaaattacactagtggattggtaagagatgaagaaatatttcaaaagctggttggtaaaagatatttccaataaaaatggttttccttagatttatcgtaagaatgtttcgattagaaagtattatacagtattgctttaaaatgactttaatgcaatatagtcattcttctatctgattttatgctacactatttggaaataattataatgttaattaaatttaactggattttcttgaattcgtggctatactagtctaatattttatgctc

SEQ ID NO: 547422 - DNA, 946 bp, Homo sapiens
cttaagagcttctgtacagtaaaagaaacaacagagtgaacagacaacctacagaatgggataaaatgcttgcaaactatgcatctgacaaaggtctaatatccagcaactataaggaacttaaatttacatgaataaacaaccccattaaaaagtgggtaaaacatgaacagacagttttcaaaataagatatgcacatggccaaaacatatattgaaaaatgctcaacatcactaatcattagagaaatgcacatcaaaaccactaaatgttttttaagtctggttagtctatcatcagccttatatttaataagataccattcacagtttttctaacagattgaatatgaggattagtaattattagctaggaagttacttgaatataatatttaagagatctataggctctagagtcagactgcctgaacactcatctgtgctcagatatatattatctatgtaactttgggtgagttactgaacctctctgatgtttaggtttctcatctttagaagagaaataatgctagtgtaagtctcaatgagctattgtgaagataaaaggtagaaaaatctatataaacacttagcaaatgttttgtcagatagygcatactccataaattaacattactctatcgttgtcatcatcatcatcatcatcatgtgatttttcctctatgtgatgatggttttcctatatccatctttgatgagacattaggtttatctactgcccttgtattgagcacatggttggtaggcatccagttctttaagaaatttttaaatggcattttcttttgtccagttggaaaattccccaaaatatttgcatggtggtgtggctattcaaaatatgttgtggaatatacaaacaaaatacagtttattagccaattattttcaaatcgtgtatttttcttattctctcctgcat

SEQ ID NO: 547423 - DNA, 2399 bp, Homo sapiens
gtttcaagaggtcagcataaataatgtcaaagagaaggaaatcccatatatatgtatatatattttctgtttgggaggactaccaaaaataagctcaaatgagagaatacatcaatcttgtattttgtggttatagttgttattgttgggttgtttttgtttctttttatggcaaaggtagtcaagttcatgggttaaaactcatttaatttggaaagaagaaaactacactaactggacaccaccctgtgctaggccctgtgctaggctgggcagcacttcttatacttaatgtgcaaaggaagcccctgggggggtccatgttaaaatgctgattttcattaggtctaggtagagctgatatttttatttctaacaagttcataggtaatgcccatgctgctagtttggaacttctttgaataacaacgggctagagaatatatatatacacatgcacacacatacatacatatacatatataaacatatgcacatgtatatttacacatgaagattcaagaaaaaattaaaacaattccatgagatagatgtttatcattatctgtatttcaccaatacaaaaactgcaaatgaatgaggttgacttgcccaaccacatagataaatggcagaggggattcaaaaccacatttctcttcccttttttcattagttgacatagcatccagaagttgttactgtttttaaactataaactgtaatcaggttaaaaaaataagtaacaatgttgaatttctttttctcataatgtgattgacctccccattttagtaactgttcagattctcctatttcatgtccctgagttttaatggatttaatcaaaactattttcaaatactagttgctagtacatatagtctacccwcgaaatatcttctagatgcttggtccatgactaaatggcacaagtgcctgtattaagagaggtattttgtactctgcaatgatgtatctgaccattcatgttctctcattatactagctagtcttcaggctttttcattatgctatttagtgaggagatgttctaaaacctttactgactctcttcatctccttcacttataatgaatttgtacagaatgctacagccaaggaacacaaaagctgagccccaagaaaaaaaaaagtgattaatgtggactttccctaaacagatggtattaacaacctcagcctgcaaatttcaattttaaaagataacagtctaagtccctgatagctcacaaagtaccttggttacatataatttgtttgtacaaaattgaagattattagttaaataatgattcttttaatcttagcatttacacaagtatttttttcaattgttgtcattgctacatagactcaatcccttggtcttttcctttaagctttttaaaaactaaatgaaggaaggaagacagaggacgtgagtcacatgctaacaaaaataacaaaacagtgttggccacagataatttcctgaaaccggtatgagaaggaataagctatgtgaaagaaaaacattggcaagccattttgtgaaacagtaaaatttccaaatataattgaaaagagaaaaatcttcccaagcaaaatacccatttccaagcctaaggcaacaaataaacaaatgaagggtggggaaagttcagccttaatattaaaaaaaaaaaaaattcaactttgttttctagatatctgatatgattgaggagctgttttaagaaaaacaaagaaacatgtcagtaaaatttccttttgttatatatatattatgatatctatatgagagatttaataaagtgttaaggtatgctgggttcattgagttttagctttggaaacatctccttggataaatggagtttaataatcggaactctatgtaatatatcaagagacccaaaacaaacacacagaacatttgattagctcaacagctgctaaaaatcattttgataaaagtcagccccatttctgatttaaaatttttgttagcatcaggatgaaaaaggatgttatttatatgcaaaaacattaatctacctaaaacagctatttgcttgcttaagagaggaactgttaggcagcccatacattaaaatctggaatagacaaaggatgctcataatcccagtattttgaatttttctaggattttcaactattatcaaaatataaaggaaaaagaattttgctagtctacctagaaaattcaagataatcaattgaaaagttattagactacataagaaatttcagtaaatcagatagacaccagataaaatcaaaagagcaatcactctttggcatgtcagcaatagctggttaaaatataagatagaacaaaaatagtagacaaggacgacaaatatatagaaata

SEQ ID NO: 547424 - DNA, 2399 bp, Homo sapiens
gtttcaagaggtcagcataaataatgtcaaagagaaggaaatcccatatatatgtatatatattttctgtttgggaggactaccaaaaataagctcaaatgagagaatacatcaatcttgtattttgtggttatagttgttattgttgggttgtttttgtttctttttatggcaaaggtagtcaagttcatgggttaaaactcatttaatttggaaagaagaaaactacactaactggacaccaccctgtgctaggccctgtgctaggctgggcagcacttcttatacttaatgtgcaaaggaagcccctgggggggtccatgttaaaatgctgattttcattaggtctaggtagagctgatatttttatttctaacaagttcataggtaatgcccatgctgctagtttggaacttctttgaataacaacgggctagagaatatatatatacacatgcacacacatacatacatatacatatataaacatatgcacatgtatatttacacatgaagattcaagaaaaaattaaaacaattccatgagatagatgtttatcattatctgtatttcaccaatacaaaaactgcaaatgaatgaggttgacttgcccaaccacatagataaatggcagaggggattcaaaaccacatttctcttcccttttttcattagttgacatagcatccagaagttgttactgtttttaaactataaactgtaatcaggttaaaaaaataagtaacaatgttgaatttctttttctcataatgtgattgacctccccattttagtaactgttcagattctcctatttcatgtccctgagttttaatggatttaatcaaaactattttcaaatactagttgctagtacatatagtctacccacgaaatatcttctagatgcttggtccatgactaaatggcacaagtgcctgtattaagagaggtattttgtactctgcaatgatgtatcwgaccattcatgttctctcattatactagctagtcttcaggctttttcattatgctatttagtgaggagatgttctaaaacctttactgactctcttcatctccttcacttataatgaatttgtacagaatgctacagccaaggaacacaaaagctgagccccaagaaaaaaaaaagtgattaatgtggactttccctaaacagatggtattaacaacctcagcctgcaaatttcaattttaaaagataacagtctaagtccctgatagctcacaaagtaccttggttacatataatttgtttgtacaaaattgaagattattagttaaataatgattcttttaatcttagcatttacacaagtatttttttcaattgttgtcattgctacatagactcaatcccttggtcttttcctttaagctttttaaaaactaaatgaaggaaggaagacagaggacgtgagtcacatgctaacaaaaataacaaaacagtgttggccacagataatttcctgaaaccggtatgagaaggaataagctatgtgaaagaaaaacattggcaagccattttgtgaaacagtaaaatttccaaatataattgaaaagagaaaaatcttcccaagcaaaatacccatttccaagcctaaggcaacaaataaacaaatgaagggtggggaaagttcagccttaatattaaaaaaaaaaaaaattcaactttgttttctagatatctgatatgattgaggagctgttttaagaaaaacaaagaaacatgtcagtaaaatttccttttgttatatatatattatgatatctatatgagagatttaataaagtgttaaggtatgctgggttcattgagttttagctttggaaacatctccttggataaatggagtttaataatcggaactctatgtaatatatcaagagacccaaaacaaacacacagaacatttgattagctcaacagctgctaaaaatcattttgataaaagtcagccccatttctgatttaaaatttttgttagcatcaggatgaaaaaggatgttatttatatgcaaaaacattaatctacctaaaacagctatttgcttgcttaagagaggaactgttaggcagcccatacattaaaatctggaatagacaaaggatgctcataatcccagtattttgaatttttctaggattttcaactattatcaaaatataaaggaaaaagaattttgctagtctacctagaaaattcaagataatcaattgaaaagttattagactacataagaaatttcagtaaatcagatagacaccagataaaatcaaaagagcaatcactctttggcatgtcagcaatagctggttaaaatataagatagaacaaaaatagtagacaaggacgacaaatatatagaaata

SEQ ID NO: 547425 - DNA, 479 bp, Homo sapiens
acacacacacacacacacacacacacacacacacacacacatatatatatttccagagaaatctttagttggtaataaggccatttgaagaagcaggcccgaatgaaggaggtcccattcctgacttgcaggagatccttgggactcacagttagacccggtaggatcatgttaccaataagatttttctgtggcacctcaaggtgaagttctttgagtattgagaatgtgctgctaagaaagggaagcaaaagagtgcacaaagcagtagccaaggacacaatcaaacttcgcctagtttcctattctccactgcctggcccaaacactgatatacagctagtttggttgtaaataagtctttctcaaaaggctcaatcsaaatcaaccattgtagccagaaactctatctaaatgtaagtcttccaaaatattttccacatataaaacatttacttcaaatattcaagtttctactc

SEQ ID NO: 547426 - DNA, 630 bp, Homo sapiens
taattttcaaaacaacagtgtcaaatagatattattgtgttttatggacaggaaattgaggctcaggtaatatcaagtgaaatccccaagatcatataattaataaatactgtaaaaacggtagaagtgactcacatttccaatctccatgctatctcatatactctaattgcctcttggggaaacataggctggaagaagaccaggcctcattgtaaactctcgagtgcccagaaattatttacttcaactatttctatcacagtttgtccactttaaatggggtagagattttctgaaacctcctttctcatttgaacaatctgagaatacatgtgtttaggcttaaatcataccagaaactgtcaggcagaacagtycctttgtaagcccaaggattatacaactttagttgtataatttagttgtatgattatacaactaaaattttaaccagatacagtcccaaatgaattatgttaattcactctattatttctctttttaagattacagaaattttatgccaattttatctacattatgctgcaatattctaaatatccctaattaaataccaactattttgatgaaatattttctttaaagtcatcatttattatcatctga

SEQ ID NO: 547427 - DNA, 652 bp, Homo sapiens
aaaaaaatttacatatcaccagcccagaacttagatttcaggcctaaatgccacaatttgcctagaaaagaaaagtgtaggtaagaagcccagttaagacaaaatggtcaaaggtgaggcatgtttagatgtttagactaatactctttttttttttttttgagacggaaccttgctctgtcacccaggctggggtgcagtggtgcgatctcagctcactgcaagctccgcctcccaggttcacaccattctcctgcctcagcttcccaagttgctgggactacagstgcccaccaccatgctcggctaatttttttgtatttttagtagagatggggtttcaccgtgttagccaggatggtctcgatctcctgatcttgtgatctgcccatctcgacctcccgaagttctgggattacaagcgtaagccagtgcacctggccaatactgtcttatattgtaagaatttccaatgatttttacctacatgtgtaatttttttataagagagatacaaaatagccaactaaatgccaaaaacatgtattttggaaaccaatttagttcaacagacggtcatttcaacttagcttttttcttaagcagattactgacttcagggtgaagtctattaacatatagtacaatgaaa

SEQ ID NO: 547428 - DNA, 652 bp, Homo sapiens
aaaaaaatttacatatcaccagcccagaacttagatttcaggcctaaatgccacaatttgcctagaaaagaaaagtgtaggtaagaagcccagttaagacaaaatggtcaaaggtgaggcatgtttagatgtttagactaatactctttttttttttttttgagacggaaccttgctctgtcacccaggctggggtgcagtggtgcgatctcagctcactgcaagctccgcctcccaggttcacaccattctcctgcctcagcttcccaagttgctgggactacagctgcccaccaccatgctcggctaatttttttgtatttttagtagagatggggtttcaccgtgttagccaggatggtctcgatctcctgatcttgtgatctgcccatctcgacctcccgaagttctgggattacaagcgtaagccagtgcacctggccaatactgtcttatattgtaagaatttccaatgatttttacctacatgtgtaatttttttataagagagatacaaaatagccaactaaatgccaaaaacatgtattttggaaaccaatttagttcaacagacggtcatttcaacttagcttttttcttaagcagattactgacttcagggtgaagtcyattaacatatagtacaatgaaa

SEQ ID NO: 547429 - DNA, 539 bp, Homo sapiens
cttcccccatcacaaccataaataagaggcagctggcagggtgtagtgctcacacctgtaatcctagcactttgggagggcgaggcgggcagatcgcttgagctcaggagttcgagacgagcctgaccaacatggtgaaaccccgtttctattaaaaagtacaaaaattcactgggcgtagrggcacacacctgtagtcccagctactcaggaggctgaggtgggaggattgcttgaattcaggaggcagaggttgcagtgagctgagattgcgccactgcattccagcctgggcaacagagtgagaccctgtctcaaaaacaaaaacaaacaaacaaaaaaagaggcagccaacaccccccacctccaaccacaagcccaggagcccaggctggaagacactgaccatggtccattccctgcctgagagggaaagggggtcagccactcagaaataatctggaaatactgtgaggaaataacaccaaactttgagccaaaatcgttttgattttttaatatgctttatgtcttcatct

SEQ ID NO: 547430 - DNA, 1196 bp, Homo sapiens
tattccttatcctcttatgtatcttcatatactctcagtaagttatgaagttgccttcacatagcactgaattatatactctctgttgccaacattataaaatctagatagctcaactccattattgtagtcaagattttggttcccagtatgatcaaagaacagcatactttagggagtttatttctccctaaaggtgaacttcaaggtcaaagatgtttagtgtgatttatagatagttatttaacaaccattgtggttacaagggctggggacctgaagggagtggcatggtccaccctggcagggaggagtatttttatcactggcattgtttagaattggcatgcatggtgataataaaaagtatgcaaatttcaaatctctattattattatattctaaataatttggaaacaatgcacccccttatctcctacacctgtgatggaccactctggctatatccaccccaccttggtattttcttgttggcttttcctaccagactgtaacttctctgagggcatggaagatgttttaactatctttgtataccaaagtttagcacttagtagatgtttkttgaagaaaggaatttcatttgttagaatgtgctcagtgataagtaaccaaacacccaatttacattgatatttacaataaagtggatatactgactcatgagagtcttggttcaatgactaacaaagtcatcaaatgcccacttttttttgcctcaccatcctacattctggggtgtcatctggcctatatagatacaaactggctgccaacaacaccagaggctacagaagtccttgtccatgacagagagagacaaagaaaagtgattccagaagcattctcagaaaagcaaggaagctacttttccaatttctgttctctattctcattgtcttggcttgagtcctgtgcttacccctgaatcaatgacacctagtgccagggaaggagggagctcctcccagagatggaaaggaactggcttatttaccagctgaagtgggcccagaaattgagaagttaccacagtgcctgccaaaagactaaagtgtggttggttgtatagtggggtctgaaggcaagttttgacttaggatagagcttatgatgatatattgaacaaaatctaaatatgacacaatgtacatgaactattcctagaaattttt

SEQ ID NO: 547431 - DNA, 1477 bp, Homo sapiens
gggggtacacaaaatatgaaaccttttaaaactaagtgtgcagagaaatatcatctggcacacacagcaaggaagggctcaatacctagttgaggaataaagaaataaatgaagaatgtgtagcatcagtagactacaagctaacatttactgaygactagctaggtgccaatttttgttcacttatttaatcatttcacagatgaaaaattgatctccagagagattaaatatttgcccaaatttcagctagtcagtgtgcagctgaaattttaccttaaggctggttacagaaccagaactctaaatccttatggtttagtggttaggagtatgctcgctggagccatgtttcctgggttcaagtccctactgcaccacttactagcttgaggggcttacatgatctcttacaactcagtttcctcatctacaaactgaggaggatactagtactttcttcataggtttattctttgaattaactgagatagtatttggaaggaaattcgtatggagtatggcacattgtaagtactcaataaatgacaattataaatatctttaaaagtacctgccactgattttgtgtcttgttttcatgttggcagagacataagaaaatatttctgaccaaaatctatggtcagagcatctttctagacatttattcaagttattgaattttattcagtttcctgctaaataataataatatttgccattggtaactgcttgtgtggaaatacataaacaggaattagtaaagaagggcgccagctctgagtggtataaaggacacggggtctggagccagaaaaccagtttcagtctcaactttgttagtagctgtgtagcttttgacaaacaaattaatatctttgagcctgtctctgccttggtaaagagagttcctgataataatactacctctcaggagataatgggtttgaaagtattttgtaaactgtaaagtactagacaaatattaggtattatgttagcaccgtgagaaggtttgaaaaaagcaagaaaacaacactttgctagtgaagtttgaagagctttctaatttgggagttgttgcagacaccattaagaattgagacacactatgctaaatttagtttaaaacaaacaaaaaaatgaaatgccattcaaccttgaaaaaaaatgtagcttgctgtatgtgtggaaaggactcaaacagattgagagaagcctagagagcaacattgtggatgagcgccccggcggatatagtaagccagaaaatagattggaccatttacaatgttgtgcagtatttaaaagggcagttctatttttggctgtcataaagagacaatggactcctttctttcttttggagctggaacaatgcttgtggtgcacccttctgggcactgcaggtcagctataagccaagatggctcacatactacacacacaaactcacaccccctggaattccccc

SEQ ID NO: 547432 - DNA, 1182 bp, Homo sapiens
tgtatagcattcagttatttttctaaaatgttttgctgatattactttacaaacttctggtagctataattgctgtggataagtcagcttttagctgaactgtcattcctttgtagatagtctttaacttattctgaggtttttctttatcaggaagttctgaaatttcactataatacatctattttttaacatcatatttgaatttaatttttgatctgggagtttcagtttttaattcttgaatattyttaatcattgcctcttcaccattccttccgtttttttttttttttttctgaacctctcactaaacacacctgaggtcactctcaaatctgtttttcttgttccttgtttgctctttattttcattatctttccaagttctgggtgaattccccactactaattgtctctttgtctgagtttatttttaagtttgattgcattttttatttcaatgactatatttcaactttgaaagcatttaattaattctttttcatatctatttggttgtttcagctgtatcttattttgttttataatttgttatttttgtatgagattatttctgtgttaatctctgtgaatgcattgtttcacagataaaggttctaagaatttattttccttgcaataatttattttgcaattgtggattttgttttctattttccttaaatatttcttcatatgttttagaatattttgaggttttttttttgagatagaaagtatttgttcctctttctctttttaaaattcattgaagttcacctaacaaaatcaaccattttaacgtgagcaatccagtggtatttagtacattcaccatgttttataatcaccacctccatctagttatataacatttccacctctccaaaagataatctcatatccattaagcattttatccccgtttcctctcctctgagtccctgacaatcatcagtttgcattctgtctctatacatacagctattctgaatatttcatgcaaacaaaggcattacaaaatgtgaccttttgtgtctggcttctttcacttagcattatgtttttgaggttcatcaacgttatagtatgtatcagtacttcatttctttttatgtatgggtagtattccattgtatgtacagaccacagtttgtttatccattcatctgatgatgg

SEQ ID NO: 547433 - DNA, 519 bp, Homo sapiens
cttatatccatgggggtctcttcattccagaaaaaaaatgaataagcattgcwtttaatgcccattaatgctcattaagtttttagacctattagtgagtgctgaggtccttaaagctcatgcagatttcctcagcttcatttctgttcaacaacagcacttagtaaagggtaatgtattcttttgcaaaatcttgctaagaggaaaataattgccaagagcatcaaacattgctaatgtgaagacacattaaactgtaaatatccttcagaaaatgatgaaaatggcaaaatgagtaaaatcatatcttgattattgtgtccagctacgtcccatttatttcaccaggaagttctatgtctgtcaatctacctggaccctattttcaatccagaaaatagataaggaacctagaaaattttgcactgtgttctgttaattcactttaatcaatagggaaaatgacttgcccaaatcacgctgctgatttttggcaaatgctcgactggaaatcaggcc

SEQ ID NO: 547434 - DNA, 603 bp, Homo sapiens
caattatttaatgccttacatgttgttagtcattaagttgcacatttttcatgataaaaaatgatgctgtgatcatcatatgattcataacgtagggtttgaaaataatggtcatggataagataaactattcaataagggatgtcaagacaataactagtcatctggatacaaaactkagttggttcagcatttataccagtataaattctcagtagtctgtactgagtatttatactgagtatttagtaaattatactgagtacttatgccagtgtaaattccaaatgactcaaagattgaaatgtttaaaaataaaatcataaaagtattaaagggaaggataggaaaaatattcccctaggagagggaaagacctttctaattatgaccaaaaaagtccaggatacataaaattaaggaatgacaaattaaatcccataaaagtatatttatggcaattaaaaaagagaaaaagtaaaaaaggacaaactggataggaatggtagctcataccagtaatcccaacagtttgggaggccgaggcaggaggattgcttgaggccagaagttcaagagtctggacaacacagcaaaaccctg

SEQ ID NO: 547435 - DNA, 1768 bp, Homo sapiens
agtttcattttgtttctgtttccagttctctacaagtcattcatctctatttctttgcgagacagtttcatttgaggctggctttccccctgtggcacaagtggctgctttatgtcagcatttcagtgaagtccttagatgggctctgagtggcccagcttttgtcacatgccccctcctgaacaaatcaactcctgttgggaaggaaggtagtttgccgattggcttggtcaagtcacagtctcccttcttctcasccccttcaagaaggaaatcggcttctttgggctcacaccatcccccagcagatctctggactatgatcaagaacagggagaaaatgaagcaagtgttcccacactagtcatttccaagagctggccagttagcacagaacaagaaaacacacgcacggggcactggcatgtgggcagctgaagaagggccctgaagatgtacaagtcctaatttctggagcccatgaatatgttaggttacatggcaaggagaagttaagggcccaaatgggattacggtcactaatcagctgacctcgatgtcaggagattatcctgaattattcaggtgggatgtgcaagagggaggtaggcgagtccgcgtgagggtgcgcagtgtgagaaagcctcacaacaattgctggctttggaaatggaagggggctgtgagccagggcatgtgggcagctcagagaagcacagaaagagattcttctccacagtctccagaaaggaacgcagccccgatgacgccttggctgtagcccagtgacacccaggtcagagtctgacctccagaactgcaaaataatagatgtgtgttgttctgagccactgagctggtggtaatttgttacagcagcagtgagaaacaaaaacacggcattccaagggcagtactctgcatggcaggagtgacagagtggtgcccagtgcaacggtgtgtgacagaaatacaacatgcactgcaatggggatcttaagttttctagtggccacattaagaaagaaaaagaggccgggtgtggtggctcatgcctgtaataccagcagtttgagaggctgagtgggtggatggcttgaggttgggagttcgagaccagcctggccaacacggtgaaaccctgtctccactaaaaatacaaaaattagccaggagttatggtgggtgcctgtaatcccagctgctcaggaggcgaggcaggagaacacttgaatctgggaggcagagtttgcagtgagccaagatcgcaccactgcacgccagcctaggcaacagagcgagactccatgtaaaaaaaaaaaaaagaaaagaaagaaaaaaaacaggtaaaattaatttcaataatatattttaacccaatatattcaaaatactatcattgcaatgtgtcatcaatatacaaaatattgagaaggtgtttcccattctttttaatccccagttttagaattcagtgtatattttacacacagcacatctcaacatttctgagctccttttcagtgctcatcaggcacacatggttagtggctgctgccctggacagcacaggcctagtgactgtacttttggttgtaagggtggcagtggctggcatgaaccagaacaggggtttgtttgtgacagtgacaaggagaccgctaacccctgctgatctgtgtgtccagttttatttctcttttttctaatttttttatttccatacataccctgcttgtatatcaagctcttttctaatcagggatcc

SEQ ID NO: 547436 - DNA, 1768 bp, Homo sapiens
agtttcattttgtttctgtttccagttctctacaagtcattcatctctatttctttgcgagacagtttcatttgaggctggctttccccctgtggcacaagtggctgctttatgtcagcatttcagtgaagtccttagatgggctctgagtggcccagcttttgtcacatgccccctcctgaacaaatcaactcctgttgggaaggaaggtagtttgccgattggcttggtcaagtcacagtctcccttcttctcagccccttcaagaaggaaatcggcttctttgggctcacaccatcccccagcagatctctggactatgatcaagaacagggagaaaatgaagcaagtgttcccacactagtcatttccaagagctggccagttagcacagaacaagaaaacacacgcacggggcactggcatgtgggcagctgaagaagggccctgaagatgtacaagtcctaatttctggagcccatgaatatgttaggttacatggcaaggagaagttaagggcccaaatgggattacggtcactaatcagctgacctcgatgtcaggagattatcctgaattattcaggtgggatgtgcaagagggaggtaggcgagtccgcgtgagggtgcgcagtgtgagaaagcctcacaacaattgctggctttggaaatggaagggggctgtgagccagggcatgtgggcagctcagagaagcacagaaagagattcttctccacagtctccagaaaggaacrcagccccgatgacgccttggctgtagcccagtgacacccaggtcagagtctgacctccagaactgcaaaataatagatgtgtgttgttctgagccactgagctggtggtaatttgttacagcagcagtgagaaacaaaaacacggcattccaagggcagtactctgcatggcaggagtgacagagtggtgcccagtgcaacggtgtgtgacagaaatacaacatgcactgcaatggggatcttaagttttctagtggccacattaagaaagaaaaagaggccgggtgtggtggctcatgcctgtaataccagcagtttgagaggctgagtgggtggatggcttgaggttgggagttcgagaccagcctggccaacacggtgaaaccctgtctccactaaaaatacaaaaattagccaggagttatggtgggtgcctgtaatcccagctgctcaggaggcgaggcaggagaacacttgaatctgggaggcagagtttgcagtgagccaagatcgcaccactgcacgccagcctaggcaacagagcgagactccatgtaaaaaaaaaaaaaagaaaagaaagaaaaaaaacaggtaaaattaatttcaataatatattttaacccaatatattcaaaatactatcattgcaatgtgtcatcaatatacaaaatattgagaaggtgtttcccattctttttaatccccagttttagaattcagtgtatattttacacacagcacatctcaacatttctgagctccttttcagtgctcatcaggcacacatggttagtggctgctgccctggacagcacaggcctagtgactgtacttttggttgtaagggtggcagtggctggcatgaaccagaacaggggtttgtttgtgacagtgacaaggagaccgctaacccctgctgatctgtgtgtccagttttatttctcttttttctaatttttttatttccatacataccctgcttgtatatcaagctcttttctaatcagggatcc

SEQ ID NO: 547437 - DNA, 994 bp, Homo sapiens
aagcctacactattacaggcaggaggacagaggttgatgctaacactgtatgaatgtatggataactttatcatatttatgtatgagtgattatgtatcccttttgcttttcagtgtcttctcataaacaaccatccttgaaggtaattaaactctcttttgtattttgaactattaactgtatagtctatgaaatatactttatttattgactgttctgtttcaaattccattcaggctacaagtgacaaggaagattctgttccgaatatggccacagaaacaaaggatgaacaaatatctgggacaggtaattttgcaaacacatttaatakgatgttcgttcaagatagaagagatcttctcttcaccaaataaagcagcggggggttcgtcaaatcttcatgttctgatttagtattcctgagattattcatttgtaataagttctcgggtgaccctgatgctgtggtccttgtccatgctgaaagtactaagattttagatgtctgtactttgaaattgggaaaaagaaccatctgacagcaattcaacacataacaggctcaggggacagcatcattttgctttaattctacagcatgtttccatcaagaggggaaagagaaagagatgaaataatagatattagaggtgtcagattgtattgggataaacagagggaaaagtgatcctaataccacaaaaacactgtagaatgacaagtaacaagaccagtgatgtagcaattattttcctcaaggaatagggattgtgagtcaggaaggagagaaaagaagaagttatttatgtaatttgggatttctgctgaggaaacctcagtgaactcacttcaatacatttggaacatttgcataaaagaagacttgattttggcagctccaggcactactggaagcaggaaactatgctagaattgggataaaccacagtgactcattactcctctttaggagtaatttactattaggca

SEQ ID NO: 547438 - DNA, 994 bp, Homo sapiens
aagcctacactattacaggcaggaggacagaggttgatgctaacactgtatgaatgtatggataactttatcatatttatgtatgagtgattatgtatcccttttgcttttcagtgtcttctcataaacaaccatccttgaaggtaattaaactctcttttgtattttgaactattaactgtatagtctatgaaatatactttatttattgactgttctgtttcaaattccattcaggctacaagtgacaaggaagattctgttccgaatatggccacagaaacaaaggatgaacaaatatctgggacaggtaattttgcaaacacatttaatatgatgttcgttcaagatagaagagatcttctcttcaccaaataaagcagcggggggttcgtcaaatcttcatgttctgatttagtattcctgagattattcatttgtaataagttctcgggtgaccctgatgctgtggtccttgtccatgctgaaagtactaagattttagatgtctgtactttgaaattgggaaaaagaaccatctgacagcaattcaacacataacaggctcaggggacagcatcattttgctttaattctacagcatgtttccatcaagaggggaaagagaaagagatgaaataatagatattagaggtgtcagattgtattgggataaacagagggaaaagtgatcctaataccacaaaaacactgtagaatgacaagtaacaagaccagtgatgtagcaattattttcctcaaggaatagggattgtgagtcaggaaggagagaaaagaagaagttatttatgtaatttgggatttctgctgaggaaacctcagtgaactcacttcaatacatttggaacatttgcataaaagaagacttgattttggcagctccaggmactactggaagcaggaaactatgctagaattgggataaaccacagtgactcattactcctctttaggagtaatttactattaggca

SEQ ID NO: 547439 - DNA, 543 bp, Homo sapiens
tcaatttgttttaaacaccatcaaattgctttcaggagtaataggtagatttttctaagaggttttacccatttctcttctcwctatggcattttagatctgttgcttcatgtgggcttattttcttccttcctgcagtatagcctttatagttctaatagtaaaggtctgtggatattaaaccctgagtcatttaacgcagaaatgtgtctttattttgccctcactactaatgattgtgtagttgagtccaagctcgtaccactcacagcacaatagccaattagttgagagacaaagtgttgtggcaaggcaagtgactttaagagagccagctaggccaggcgcggtggctcacacctgtaatcccaacaaacacttaaggaagctgaggcaagtggatcacttgacgccaggagttagagaccatcctgggcagcatggcaaaatcccatctctactaaaaaatacaaaaattagctgggcatggtggtgtgcacctgcagtcccaactactcagaaggctgaggtgggaggatcacc

SEQ ID NO: 547440 - DNA, 377 bp, Homo sapiens
tggtcaccctgatgggaaactgcctcatcattctggttaccctagctgaccccatgctacrcagccccatgtacttcttcctcagaaacttatctttcctggagattggcttcaacctagtcattgtgcccaaaatgctggggaccctgcttgcccaggacacaaccatctccttccttggctgtgccactcagatgtatttcttcttcttctttggagtggctgaatgcttcctcctggctaccatggcatatgaccgctatgtggccatctgcagtcccttgcactacccagtcatcatgaaccaaaggactcgtgccaaactggctgctgcctcctggttcccaggctttcctgtagctactgtgcagaccaca

SEQ ID NO: 547441 - DNA, 915 bp, Homo sapiens
aatattctggactctgacctgtcagattagcacctgttcttcctttgggcagggaggggagctrggaaggcgttagaaagaggctgtgctggtgtgtgcagagtagacagtggggggtttcactagtgcctgcctttgtctgcttctggtctcaacccagtggctgcccctaggtttctggggatggatgatgagagtactgttgacccatgcgcttgtgagccaggcaccttggtaatcagatgcccagcggctgtgagttgtagctgaccacgcccaccagaggaagaatatatcacccagggaaggccatttaaccagagacatgcaatggtgtagccactctgagaccttctgatctacaatgctggggtgagctgctccccgaaatgcccagatatcctaaactcctgagattcaaaagaccatgcagactcttttgcaccatatttctgtgcggagatctttctggcttggatttggggaattcagacagtttcccatgttcaaagaattatcaagattctctccaggaagatttcactgatgcccaggtcagtgctttcctgacctggtgctttcctgcctgccccatactgcactgaaatcaccttctgttggtctgtcttgccgagaccagctcagttgtggagaccctaacccagcagtgctagaggaattaaagacacacacacagaaatacagaggtgtggagtgggaaatcagggttctcacagccttcagagctgagagccttgaacagagatttacccacatatttattgagagcaagccagtgataagcattgtttctatagattatagattagctaaaagtattccttacaggaaataaagggatgggctgaaataaagggatgggtttggctagttatctgcagcaggagcatgtcc

SEQ ID NO: 547442 - DNA, 925 bp, Homo sapiens
cttcctagctgtgcccccacccccagcaagaaaaatgggcttagagaattggatagatctgggtgtttaaatcccagctctgcctaagtgatcttaggcaagcacttaacctcaaatactccatgttttttcatctacacaatagaggtcatcatagtaactgtctcccatggtggttgcgaggattaaatgggattgctagcatggtatctggtgaagcactccataaaagttcaaacagtggtaataataacagtaataacaayagcaatattatctgatctctctgggcctctgttagccagctataaattcgatctctttccctgtcccttccaactttactgagttctttaaaaaccaaaccacgggcttggaaatgccttgatctttactgaccgagttgtatattgggcctagccctggcccttttaaggggcactgtgtggaatggcccggcctcaccagattgaaacttctcactcttcagcagttctccagccgcagtaaagcacgtatggagtggaagttagagcagtccatgcgggagcaggcactgctgaaagcgcagctgacacaggtgaggtgttcagaaggagggatgtggaagaaagatgaccccaggtaaccaggagcaggtgaggaccagtgacagcccttcctaatttctgtgcccattcttgcagttgaaggagtcacttaaagaagtccagctagagagggatgaatatgctgaacatctaaaaggagagagggcccggtggcagcagaggatgagaaaaatgtcgcaggaggtgagatctgacccttcagcccccccacattagataggtcactggatctttctgggcacctgtaaaatgggaatagtagagccagaggtggtcctgggactgggctttgtggaggtgggggcagagaggga

SEQ ID NO: 547443 - DNA, 925 bp, Homo sapiens
cttcctagctgtgcccccacccccagcaagaaaaatgggcttagagaattggatagatctgggtgtttaaatcccagctctgcctaagtgatcttaggcaagcacttaacctcaaatactccatgttttttcatctacacaatagaggtcatcatagtaactgtctcccatggtggttgcgaggattaaatgggattgctagcatggtatctggtgaagcactccataaaagttcaaacagtggtaataataacagtaataacaatagcaatattatctgatctctctgggcctctgttagccagctataaattcgatctctttccctgtcccttccaactttactgagttctttaaaaaccaaaccacgggcttggaaatgccttgatctttactgaccgagttgtatattgggcctagccctggcccttttaaggggcactgtgtggaatggcccggcctcmccagattgaaacttctcactcttcagcagttctccagccgcagtaaagcacgtatggagtggaagttagagcagtccatgcgggagcaggcactgctgaaagcgcagctgacacaggtgaggtgttcagaaggagggatgtggaagaaagatgaccccaggtaaccaggagcaggtgaggaccagtgacagcccttcctaatttctgtgcccattcttgcagttgaaggagtcacttaaagaagtccagctagagagggatgaatatgctgaacatctaaaaggagagagggcccggtggcagcagaggatgagaaaaatgtcgcaggaggtgagatctgacccttcagcccccccacattagataggtcactggatctttctgggcacctgtaaaatgggaatagtagagccagaggtggtcctgggactgggctttgtggaggtgggggcagagaggga

SEQ ID NO: 547444 - DNA, 925 bp, Homo sapiens
cttcctagctgtgcccccacccccagcaagaaaaatgggcttagagaattggatagatctgggtgtttaaatcccagctctgcctaagtgatcttaggcaagcacttaacctcaaatactccatgttttttcatctacacaatagaggtcatcatagtaactgtctcccatggtggttgcgaggattaaatgggattgctagcatggtatctggtgaagcactccataaaagttcaaacagtggtaataataacagtaataacaatagcaatattatctgatctctctgggcctctgttagccagctataaattcgatctctttccctgtcccttccaactttactgagttctttaaaaaccaaaccacgggcttggaaatgccttgatctttactgaccgagttgtatattgggcctagccctggcccttttaaggggcactgtgtggaatggcccggcctcaccagattgaaacttctcactcttcagcagttctccagccgcagtaaagcacgtatggagtggaagttagagcagtccatgcgggagcaggcactgctgaaagcgcagctgacacaggtgaggtgttcagarggagggatgtggaagaaagatgaccccaggtaaccaggagcaggtgaggaccagtgacagcccttcctaatttctgtgcccattcttgcagttgaaggagtcacttaaagaagtccagctagagagggatgaatatgctgaacatctaaaaggagagagggcccggtggcagcagaggatgagaaaaatgtcgcaggaggtgagatctgacccttcagcccccccacattagataggtcactggatctttctgggcacctgtaaaatgggaatagtagagccagaggtggtcctgggactgggctttgtggaggtgggggcagagaggga

SEQ ID NO: 547445 - DNA, 925 bp, Homo sapiens
cttcctagctgtgcccccacccccagcaagaaaaatgggcttagagaattggatagatctgggtgtttaaatcccagctctgcctaagtgatcttaggcaagcacttaacctcaaatactccatgttttttcatctacacaatagaggtcatcatagtaactgtctcccatggtggttgcgaggattaaatgggattgctagcatggtatctggtgaagcactccataaaagttcaaacagtggtaataataacagtaataacaatagcaatattatctgatctctctgggcctctgttagccagctataaattcgatctctttccctgtcccttccaactttactgagttctttaaaaaccaaaccacgggcttggaaatgccttgatctttactgaccgagttgtatattgggcctagccctggcccttttaaggggcactgtgtggaatggcccggcctcaccagattgaaacttctcactcttcagcagttctccagccgcagtaaagcacgtatggagtggaagttagagcagtccatgcgggagcaggcactgctgaaagcgcagctgacacaggtgaggtgttcagaaggagggatgtggaagraagatgaccccaggtaaccaggagcaggtgaggaccagtgacagcccttcctaatttctgtgcccattcttgcagttgaaggagtcacttaaagaagtccagctagagagggatgaatatgctgaacatctaaaaggagagagggcccggtggcagcagaggatgagaaaaatgtcgcaggaggtgagatctgacccttcagcccccccacattagataggtcactggatctttctgggcacctgtaaaatgggaatagtagagccagaggtggtcctgggactgggctttgtggaggtgggggcagagaggga

SEQ ID NO: 547446 - DNA, 616 bp, Homo sapiens
gagccaccgctcccggcccaatttattaatcagaaagaaatagatcggcctggcgtggtggctcacgcttttgatcccaggactttggacaaccgagcgtggggaattgcttgagcctaagagttccagacctgcctgggcaacatggtgaaaatctgtctcttattattattwtttttttcttttgaggcggagtttccctcttgttgcccaggctggagtgcagtggctgggtctccgctcgcggcgaattctgcatcccgggttttggtggttctcctgcctcagcctcctgagtagctgggattacaggcacctgccgccacacccggctaatttttttttttgtatttttagtagagacgggttttcatcatgttggccaggctggtctcaaattcctgacctccggtgatccacccacctccgcctccccaagtgctgggatgacaggcgtgatcggcctggcgtggtggctcacgcttttgattccaggactttggactggccaagcgtgggggattgcttgagcctaggagttccagaccggcctgggcaacatggttaaacccagtctttttttaaattcctttattattattattatttttttttt

SEQ ID NO: 547447 - DNA, 616 bp, Homo sapiens
gagccaccgctcccggcccaatttattaatcagaaagaaatagatcggcctggcgtggtggctcacgcttttgatcccaggactttggacaaccgagcgtggggaattgcttgagcctaagagttccagacctgcctgggcaacatggtgaaaatctgtctcttattattatttttwttttcttttgaggcggagtttccctcttgttgcccaggctggagtgcagtggctgggtctccgctcgcggcgaattctgcatcccgggttttggtggttctcctgcctcagcctcctgagtagctgggattacaggcacctgccgccacacccggctaatttttttttttgtatttttagtagagacgggttttcatcatgttggccaggctggtctcaaattcctgacctccggtgatccacccacctccgcctccccaagtgctgggatgacaggcgtgatcggcctggcgtggtggctcacgcttttgattccaggactttggactggccaagcgtgggggattgcttgagcctaggagttccagaccggcctgggcaacatggttaaacccagtctttttttaaattcctttattattattattatttttttttt

SEQ ID NO: 547448 - DNA, 616 bp, Homo sapiens
gagccaccgctcccggcccaatttattaatcagaaagaaatagatcggcctggcgtggtggctcacgcttttgatcccaggactttggacaaccgagcgtggggaattgcttgagcctaagagttccagacctgcctgggcaacatggtgaaaatctgtctcttattattattttttttttyttttgaggcggagtttccctcttgttgcccaggctggagtgcagtggctgggtctccgctcgcggcgaattctgcatcccgggttttggtggttctcctgcctcagcctcctgagtagctgggattacaggcacctgccgccacacccggctaatttttttttttgtatttttagtagagacgggttttcatcatgttggccaggctggtctcaaattcctgacctccggtgatccacccacctccgcctccccaagtgctgggatgacaggcgtgatcggcctggcgtggtggctcacgcttttgattccaggactttggactggccaagcgtgggggattgcttgagcctaggagttccagaccggcctgggcaacatggttaaacccagtctttttttaaattcctttattattattattatttttttttt

SEQ ID NO: 547449 - DNA, 616 bp, Homo sapiens
gagccaccgctcccggcccaatttattaatcagaaagaaatagatcggcctggcgtggtggctcacgcttttgatcccaggactttggacaaccgagcgtggggaattgcttgagcctaagagttccagacctgcctgggcaacatggtgaaaatctgtctcttattattattttttttttcttttgaggcggagtttccctcttgttgcccaggctggagtgcagtggctgggtctccgctcgcggcgaattctgcatcccgggttttggtggttctcctgcctcagcctcctgagtagctgggattacaggcacctgccgccacacccggctaatttttttttttgtatttttagtagagacgggttttcatcatgttggccaggctggtctcaaattcctgacctccggtgatccacccacctccgcctccccaagtgctgggatgacaggcgtgatcggcctggcgtggtggctcacgcttttgattccaggactttggactggccaagcgtgggggattgcttgagcctaggagttccagaccggcctgggcaacatggttaaacccagtctttttttaaattcctttattattattattattwttttttt

SEQ ID NO: 547450 - DNA, 616 bp, Homo sapiens
gagccaccgctcccggcccaatttattaatcagaaagaaatagatcggcctggcgtggtggctcacgcttttgatcccaggactttggacaaccgagcgtggggaattgcttgagcctaagagttccagacctgcctgggcaacatggtgaaaatctgtctcttattattattttttttttcttttgaggcggagtttccctcttgttgcccaggctggagtgcagtggctgggtctccgctcgcggcgaattctgcatcccgggttttggtggttctcctgcctcagcctcctgagtagctgggattacaggcacctgccgccacacccggctaatttttttttttgtatttttagtagagacgggttttcatcatgttggccaggctggtctcaaattcctgacctccggtgatccacccacctccgcctccccaagtgctgggatgacaggcgtgatcggcctggcgtggtggctcacgcttttgattccaggactttggactggccaagcgtgggggattgcttgagcctaggagttccagaccggcctgggcaacatggttaaacccagtctttttttaaattcctttattattattattatttttwtttt

SEQ ID NO: 547451 - DNA, 777 bp, Homo sapiens
ttcctaacacctctattactcagaccagttccctgattcccttggcttttctcttttattttccatatatttgtcattgtctgactttctgggtgatatttcatttctaaccattctattgaattttttatttcaacaattgtattttttttttcttttttcgagacggagtctcgctctgtcactcaagctggagtgcagtggcatgatcttggctcgctgcaacctctgcctcccaggttcaastgattctcgtgcctcagcctcccaagtagctgggattataggcatgcgccaccacgcctggctaatttttgtatgtttagtagagacggggtttcaccatgttggccaggctggtcttgaattcctgatcttaagtgattctgaagggtttgagagggaagaatctggaaacctagtggcttattagatttagggaacaagaggattggggtacagtagggagatggggattcctggatttctggctttggtgactggatgggagtggtactattcaccaagaggaataaagaggaggagcacacaccccatgggaagagagggtgagttctgtttgggttctgctgaggttaggatgcccataggatggctagaaaatagtttgatctatgagttgagacacttgggagaaaaaagctgagctagacatttaatagatgtttaggtttgggacattaagtttgttgttgttgttgttttgaaacaggattttccccaggctggagtgtagtggtgtgatcacagctcact

SEQ ID NO: 547452 - DNA, 549 bp, Homo sapiens
ctacactcttcttgtacagggatatctagagtaaataaaatagctctaaaacatatacaaattaatttttctttgaatggttttgcatttcttcaaagtataaattggggattcatgtggttcatttctttgctattaactctacgagcaaggaaacatatcacaggataacttccttggttactataargtatcgttatggtatcattcttgacaattgctcctgatgtataaattatagctattattattattattgatacctttgagtatcattttaatatctaagaaaggaaaataacaatttctcataaacctaaattatacaggggtaggaaaaggcaatcatatattttaatgtaaaatatgtagaatacaaaactacagaatgtaaatgctatcacaagtatccttccgttgtttaattagaaaaccctaaaactgactgaaatttgcctgaaaagagtcaatatctaattaccattcggggtgaggagagatgggcaactttgaattgtggcaatacatgggaaataagttgaaaaacaa

SEQ ID NO: 547453 - DNA, 882 bp, Homo sapiens
tctggcaaaccgaaagctgaaagatagtttctatattcaggtttttgtcctgtatggattcatgcaggcaagtgaaaaattataattggttcaagtacctgattatagacaattaaaatgcacaaaaagccctttaccaataaggctcaattttggaaaaaggaaataaagggaagtgaattaatacatatatgtgtctggtcctatttattattttattgaccacaatattaagttatattatgtgagaaacaatagagtattcattaaaacatgatctctgggattgagtcaaatgcttacattcatatcagtgtgtgtcacttatatttatgcaacctttaaaaaaagtactttatctttcactttatctataaaatgaaaatattagtagctatatcattcagaaagtgtttttttatcattcacgaaacaaaaggttcaaaaaagttaagtcacattttaagtcccacagctaatgaacaaacctactttctctccctttagagtttaagacagatcaacagagcacagggaatttggggaagtaataagttgctacgtcttaactgttgaagaaagcgtcaaaagtgtaggtggcaatgttagcatcagttggggagaatactgtcttctctcctgtaattcctttttggttaaagctttctttgtttgaagtagagatgctacctgtcaaaattagtactacctgtgtgatggcatattgcatagtcccaactacacctaaggtgagktgtggggagttggagaaaacagcagacagtgtaattttgaaatagaaagataagagaaatagtaaagagcaaaaatatatatatattaagagagaagttgggcaaaaagattaagaggtaagtagga

SEQ ID NO: 547454 - DNA, 542 bp, Homo sapiens
acacatccacggtgcttcatayagctctagttaaaatactttttcattctaattatttcattttcatatggtaaaaatgaaataaaatttgtttttaagttaaagtaacttttacagaaccaaaatggttcaattatgtagactagctaagctaggttacagtaacagtataatttatcaaatgtattcatttgtgtctattgaaagcattgttaattttgaaatagttccaactgaagaaaaaacaatatactatatacatggatgaaagtaacatataacattttactatttttattttagcaccatttttggaaaacacaaaaaatagatacaactaaggcttcatcatacccatctatttctattttctccctctttccttaaacctaggctttatcccaaagctggtgtgtattattctcatacatattcctattctttcactacttacatctttatctacaacattgcatgaaattgtttaatctagacataataaatggcatctttaatgtgtatagtgcatcacaacttacttt

SEQ ID NO: 547455 - DNA, 620 bp, Homo sapiens
caagccagacaaaaaaagaatataaagtatgattacatttacaaaaaatctttggaartgtgaattaacctacagtgagagaaaacagattagtggttgcctgggaatggggagggaattaaggaattagaaagggacatgaggaaactttgggggatgacgaatatattccttagctaaactgtggagatgttttcacaagcgtatatatatgtcaaaactattaaatttatatactttaaatatgtgcagtttattctatatcaattatacttcaatgaagctgttaaaaaatgtttagtttctcagtcatgccagccacatttcaagagctcaatagctacatgtagctagtggctactgaatggacactgtagataaaggcgttccatcattacacaatgtaccactcagtggcactactctcccctaattaggagagaggaaactacaccacagagactcaccacttgtttctctaaacgaagttttattacaacacagctatgcccattcatttcttcattgtctatggctgctttagcactataatggcagaactgagtagcctgtaacaaagggcctacaaaccttaaatatttagtatctggtcctttaaa

SEQ ID NO: 547456 - DNA, 927 bp, Homo sapiens
gttttttaacagtagaccaaacattacaaatgttccattgattatgcatatgggaagaagtgttacaaatgcttttctcccacttaattttcctgtgtgaactaaatccaaacatatctgaattttcataattcaaagaaaatatctgtgccaacattctgagaacaaatagctgccaagcaaaacctgacagcatattccttggtgacatccagtctttaaaagctgtgtacacagagtgagcagctatctaaaactgagctcatatgcaaatgtgaacattcctcacttaaaattacattgtgtacattaaaactttctctagagtctatgaaatgttcaggaaaaatgtagctgagcttgatcttaagtaccttgcctcattatttttttttttttgtcatttctagctactagtctgtccaaagaaaacaactttcttatttcttwtagttttgtgtgtaccctgagcttgattcccagttgctgctataaaaaactgaaagggttcccaacactgctatttttctttttttctctgttactaacatttaaacatcaaagatattctggtacttttatgttgtagagtatatataagaccatattttccctaaaggtatttactatccagggtgtgtttgtgtgtgtgtgtgtgtgtgtgtgtgtacgcacacgtgtgttttcttagctgttagccttttttagaagtcacctaactgatagcattttcctatcacaagatcactggcagtgcgtggaggaagaacttgagtgaggccatattaacagcagggagatgagttaggagatttttaaaaataatgtattcagatttaaaaaaaaaaaaaaaaaagccctatcttaacatcgaaaacgtatgttgtgatgaccttgggaattttttaaatttaagcatgttatcag

SEQ ID NO: 547457 - DNA, 927 bp, Homo sapiens
gttttttaacagtagaccaaacattacaaatgttccattgattatgcatatgggaagaagtgttacaaatgcttttctcccacttaattttcctgtgtgaactaaatccaaacatatctgaattttcataattcaaagaaaatatctgtgccaacattctgagaacaaatagctgccaagcaaaacctgacagcatattccttggtgacatccagtctttaaaagctgtgtacacagagtgagcagctatctaaaactgagctcatatgcaaatgtgaacattcctcacttaaaattacattgtgtacattaaaactttctctagagtctatgaaatgttcaggaaaaatgtagctgagcttgatcttaagtaccttgcctcattatttttttttttttgtcatttctagctactagtctgtccaaagaaaacaactttcttatttcttttagttttgtgtgtaccctgagcttgattcccagttgctgctataaaaaactgaaagggttccmaacactgctatttttctttttttctctgttactaacatttaaacatcaaagatattctggtacttttatgttgtagagtatatataagaccatattttccctaaaggtatttactatccagggtgtgtttgtgtgtgtgtgtgtgtgtgtgtgtgtacgcacacgtgtgttttcttagctgttagccttttttagaagtcacctaactgatagcattttcctatcacaagatcactggcagtgcgtggaggaagaacttgagtgaggccatattaacagcagggagatgagttaggagatttttaaaaataatgtattcagatttaaaaaaaaaaaaaaaaaagccctatcttaacatcgaaaacgtatgttgtgatgaccttgggaattttttaaatttaagcatgttatcag

SEQ ID NO: 547458 - DNA, 927 bp, Homo sapiens
gttttttaacagtagaccaaacattacaaatgttccattgattatgcatatgggaagaagtgttacaaatgcttttctcccacttaattttcctgtgtgaactaaatccaaacatatctgaattttcataattcaaagaaaatatctgtgccaacattctgagaacaaatagctgccaagcaaaacctgacagcatattccttggtgacatccagtctttaaaagctgtgtacacagagtgagcagctatctaaaactgagctcatatgcaaatgtgaacattcctcacttaaaattacattgtgtacattaaaactttctctagagtctatgaaatgttcaggaaaaatgtagctgagcttgatcttaagtaccttgcctcattatttttttttttttgtcatttctagctactagtctgtccaaagaaaacaactttcttatttcttttagttttgtgtgtaccctgagcttgattcccagttgctgctataaaaaactgaaagggttcccaacactgctatttttctttttttctctgttactaacatttaaacatcaaagatattctggtasttttatgttgtagagtatatataagaccatattttccctaaaggtatttactatccagggtgtgtttgtgtgtgtgtgtgtgtgtgtgtgtgtacgcacacgtgtgttttcttagctgttagccttttttagaagtcacctaactgatagcattttcctatcacaagatcactggcagtgcgtggaggaagaacttgagtgaggccatattaacagcagggagatgagttaggagatttttaaaaataatgtattcagatttaaaaaaaaaaaaaaaaaagccctatcttaacatcgaaaacgtatgttgtgatgaccttgggaattttttaaatttaagcatgttatcag

SEQ ID NO: 547459 - DNA, 927 bp, Homo sapiens
gttttttaacagtagaccaaacattacaaatgttccattgattatgcatatgggaagaagtgttacaaatgcttttctcccacttaattttcctgtgtgaactaaatccaaacatatctgaattttcataattcaaagaaaatatctgtgccaacattctgagaacaaatagctgccaagcaaaacctgacagcatattccttggtgacatccagtctttaaaagctgtgtacacagagtgagcagctatctaaaactgagctcatatgcaaatgtgaacattcctcacttaaaattacattgtgtacattaaaactttctctagagtctatgaaatgttcaggaaaaatgtagctgagcttgatcttaagtaccttgcctcattatttttttttttttgtcatttctagctactagtctgtccaaagaaaacaactttcttatttcttttagttttgtgtgtaccctgagcttgattcccagttgctgctataaaaaactgaaagggttcccaacactgctatttttctttttttctctgttactaacatttaaacatcaaagatattctggtacttttatgttgtagagtatatataagaccatattttccctaaaggtatttrctatccagggtgtgtttgtgtgtgtgtgtgtgtgtgtgtgtgtacgcacacgtgtgttttcttagctgttagccttttttagaagtcacctaactgatagcattttcctatcacaagatcactggcagtgcgtggaggaagaacttgagtgaggccatattaacagcagggagatgagttaggagatttttaaaaataatgtattcagatttaaaaaaaaaaaaaaaaaagccctatcttaacatcgaaaacgtatgttgtgatgaccttgggaattttttaaatttaagcatgttatcag

SEQ ID NO: 547460 - DNA, 1438 bp, Homo sapiens
attataggaatgaaagtgcccgtgaaagcctttgtgattctcctcatcagaatctctcaagagtgagtatagataagataaggtaaagataagaaaggatagttaatgattttaatctgtctttgactgaatttagtggtcgaatatttggttttgtatgtgtttcatcttattctatttgaaaatagcattctttttgtatttgggataacagtaaactcatttatgtagggacatctttttagctcaaatgtgagatatttcattttagagttttaaattttatttgaaaaacaaagtagtgtttggatttaaaatggttaattgtcaagtttatctttccccacttaaacatttattgaaccaagtgcgaaataccagttactggaaatgcacagatcattgaaacactgttcgtgttcccactgagcttatagtctcactctgaaagcaaacaggagcaggtgctattcactctaatgagtgcagtgcccagggtaatacaggaacacagagaaggagcttcttcacttttagatctctaaagtgctctcaggctcttttagacttttattctatgtcaagtaatattttcttgtggttaaatttgtaacataacacagtcatcaccagccagtattaaccactggtaacaaagtatttttcttgtttaatatttctaggcataaatatatttttactttgcctagatttatttttataagaatccgttttaaaatatcctgtttttagttataaattttttttcatttctgcaagaattctgtaaacaaacttttaaatgattgcttatattgtttatttgaaaaatactccatagtttcctttgccacatctctgttgggtatctgaatttagctcttagggtataaataaaatttgagcatggtaatttttcattgggtttcatttaattcatatataattttgccacttgtttaaacttttgaagttgaaaccaaagagactgaatgatggcaaaacgattttctttctattttgagaaaatttattttgaatcctctcctgaaacccaatattgacttttaggttataaactgctttatttttctcaaagggattttaatataaatttaaaatagttagcagcaatgttactcttctattctgcatctcccaaaggcaagcctatttaatgactagggaatttaaagtcttgattttgtaattggttagcttctcattttagtaggagagagaaaccttcagatttcagtattttaggttgtatttaataaacatttcctaccttttaagtttataaatcaaatgagtaastgactgaacaaaaaggtctacagacaatgtattcaggctatatttcagaaggaagttgcttctaagttacataaatgaagacttcattaaaatagtgttttcttatatttaaaattga

SEQ ID NO: 547461 - DNA, 970 bp, Homo sapiens
tcatctccacagcaattttgtaaaacgtacattatctctgagtgttacctcaaatttttctacctttctttctttcccccacctttatttgtattcactgtattgtattgtattgtattgtattcatttattctttttgaatagataccaaatcctatacatgatccagaatctaaaatgtatggaaaggtctgcaataaacctcatcccttaaccatccaggtcccctcctcataggcagtgttgttagtttctttgtgtcyatccacagatactctttggatacccttttatattcttctttctctttgtatatatggatgtcacataccgtgtacactgctatgcactttgcttttctcacttaaccatatttcttaaagattatttcatattattctataaatgttctcttattctttttttacatttatacagcattccagttggtgatttattcccagatggtttatttaactagttcctgttgatggacatttgcgttttacatatctccttttataggcattcgagatatggttgttacaggtgtttaagaagtgagattgtgggtggtttctagatttgtgccatagttagtaagtcttcaccattttaaagctgtggaaagattttcttgtggtttcttctagggcttttatttgttacattttaattttttcatatacttggtatttaaccaggcataaggtatgagttatagattcaactgtgattttttttctagatgtttactgtttatctcatctttaggagttaaataagccagtttttattatattgtaaatttccatatatattgaggtctgtttctgaacttctgtcctgctccattgatctgctaacttttcatgcaccaatactgcactgttttaattactaaggcattatactatgctttcatatctgatgggcttaattctccctgttactttttgttcaaagtgtt

SEQ ID NO: 547462 - DNA, 648 bp, Homo sapiens
ctcagctcatagcaagctccgcctcctgggttcacgccattctcctgtctcagcctcccgtgtagctgggactacaggtgcccaccaccacgcccggctaattttttgtatttttagtagagacggggtttcactgtattagccaggatggtctcratctcctgaactcatgatccacccgcctcagcctcccaaagtgctgggattacaggcatgagccactgcgcccagcctagttttctcttaatataaggcagactccatgtggcttaggacaattactatgtgtggttgcatgctgcattctaatgtagcatcttctgcagaggaatcttccaccatcatccatctatcagttcagccaagtctctgattggccctgcttggatcaattgccaacacctgaaccaataccggtgtccagacgaagaagttaccatgactggtcaagcctggatcatgtgctgttactatagtgaaataagtgaagcctgggaattgtagcccatcagaatcacaggatgtagaggaaagacacttctgaagagaaaggatgctgaacaaaaaacaaaaaaagacccactacgtaggaaagcacagagtcatgatctctggggtaaatcatattaccccagaaagtgtttaggc

SEQ ID NO: 547463 - DNA, 1151 bp, Homo sapiens
ggagacccagaccatgatgtctgaccaggcccgttgtggttcctgaatcctaagcagctgggccttcactccctctgaagatgtgtggaaacaccacaggcggtttcacaggaaccatttcccactgggcctcacctcagaacaagccttccttgttcggggaagggcaagactccgcaggtgcagccctcaccatggtcctgccgctccaccacttcctgtccaggccacttattcgtcactggtcctgtctcagatgctacacagaggacgctctgggccttgggaaggcraggggctaaggctgccacctcttaaatctgccacccacaaaagctcgcagagaaatcaaggccttggctggacccagggaaatgattgtgttgcttttattgtgtgcccagtgattatctactctcaaaaccttgtagatagtggctgggcacggtggttcacacctgtaatcccagcattgtgggaggccaaggcaggcggatcccttgaggtgaggagtttgagaccagtctggccaacatggtgaaaccctgtctctactaaaaatacaaaaaaaaaaaaatgagctgggcgtggtggtgtgtgcctgtaatcccagctactagggaggctgaggtatgagaatcacttgaacccaggaggtggaggttgctgtgagccaagatcatgccactgcactccagcctgggtgacagagtgagaccttgtcaaaaaaaaaagaaagaaagaagaaaggaaggaaggaaggaaggaaggaaggaaggaaggaaggaaggaaggaaggaaggaaggaaggaaggaaaagaaagaaacgttctagatagggaataactgcctccactttacagatgaaaaaatgagggtcagggaggttaagaaacaacacaccaagctagtaaagggtgcaaataggactcaacccaacagccccacatcccaacccaccacaatagatacttcactatattcttggtcacaaagtataagctcctgagggcatgcctgggcctctcaattctgtatgcttccctccctagagtggagcacacagtcatgtaaatttgcagcaagcagctcttatgggccttggaatctcactacctgggcttcggcttcctcatctgtcaaatggggat

SEQ ID NO: 547464 - DNA, 1226 bp, Homo sapiens
ccaccttggcctcccaaagtgctgggattacaggcgtgagccaccccgcccagccctgtttttttttttttttttttaaataatagccatcctagcttgtccgaactgctatctcatggttttgatttacatttccttaacaattagtgttgttgagcgtccttttatatacttgttggctatctgtgtcttctttggagaaatgcctgttcaagtcctttgcccagttttaaaatctgattatttgggactttttttttttttctattcacctgtaggaattccttatatattttggatattagtcccttatgagatagtttgcaagtatttcctctcattctgtagattgccttttcaatctactggtaattacctttgctgttcagaagctttttagtttgacatgagcactttaaagtttcagatgtatgtgaatataaggatggtgtcagattatttcctgggcatttttgaaggcaaatagcttactgaagtagtctaacacaggaggctgagtagggaccaccagtggagtctctaaagaaaaaggtaaggcaatggctaccccaggagcaactcagcagtttcagagcctccatatgaaaaagcactcaggtagaaaaggaagcagatgcactttaacaagagggagatttggggcatgatctgatgctcccaggaaacttgactgctcctaagggatccacagttactgaggagggcaaggtagaaccgaagatatctaggcacgtgatctacacagagaccaccacatcatgtatgccacaagcagcagaagaatgagacaaactagggaggggcatgtagttaagatcaccccttccaatatatcctgtcaccttctgccaggctccaacaacaaaacaacaacccggagaaggagagagaggaataaaagaacaaactatcccctggccacygaatatcacttgagccaaacctgaaacataatgaggtttacatttcacgtgaatttcattgagtgaaaacaacagcgtatgtcattgagatttggaaaagaaattgatctgttaaacgatgactgaaggcattcatcagaaaaaaagagaaaaagtattgttcagtatttgtaccttattttgactattcaggaaagtggctgcattaatattgaccccaaatcagactatctctactttccatcaactgatcctgatccttcccactaaagacatcatcta

SEQ ID NO: 547465 - DNA, 1392 bp, Homo sapiens
tgtaatctcggcactttgggagaccaaggcaggcagatcacttgaggtcaggagtttgaggccagcctggccaacatggtgaaaccccatctctactaaaattacaaaaattagcagggtatggtggtctgcacctgtaatcccagctactcaggaggctgaggcaggagaattgcttgaacccggcagggagaagttgcagtgggtggagatagtgccactgcattccagcctgggcaacagagcgagactctgtttcaataaataaacaaataaatagccataattagccatattagccaaatactagctcctttacttcycagtgaccacttagatcctcactgctatgaaggcctgttcattattaaccaaaaggaaaacaataatggagctactacctcaatttcaatttgatgaaaaactgtggactacagttttgctttgttttctttccctcaaggactaatttttttttttgtcttccaggctcattggcccattgtttttggaggcaagacataatcaaatgaaagacccagcacactgggaattaaatgactcactggaattcagttcaatttcagtcacatcttttgagtgtctgtgacatgctacctactctgctaggtacctaggacacagaatgagtgcagcctggcccctgtctattgcagattgctcacaatttgcccagaatttatgtatgtatgcagttagccataatgtataatactaaatctatgttctcctagaaacaaagtattatggaaagaaacgaggtgtggggatgggtaattctactgggtcagggaagcttttgaaaacttctaagagatagctgcttttaaactggactttgaagtatcgatggtgaaaaaagacattctttactgtgatagcaattattacaaagttgaaatgatctattaaggagtttttttccccattaaagtgtgagccttaaaaataaggcctctgccttactcagttttgtgtcttactagcccttaacaccacggctgttacataacaagggctcagtacatgaatgaaggaattggctaggcaacacaatacattttaaaaggcatatttgtaaaacatgagattacagtccctcaacctttaacatacaagatgaagaaggacaactgaagaaactctagtatgtaacacatacgcatgattcctcaactacctgcaaaagcactggataaacagttttgaaacatgctttctactctgagtttagcattgaaatttatttatcatcttcttatccttgatgactagatgttaatatttttcaacatctaaatcctagagcctggcaaagtttaagaatttggtcttacctgaggcgaatgactttacacagcttaaaagagg

SEQ ID NO: 547466 - DNA, 1392 bp, Homo sapiens
tgtaatctcggcactttgggagaccaaggcaggcagatcacttgaggtcaggagtttgaggccagcctggccaacatggtgaaaccccatctctactaaaattacaaaaattagcagggtatggtggtctgcacctgtaatcccagctactcaggaggctgaggcaggagaattgcttgaacccggcagggagaagttgcagtgggtggagatagtgccactgcattccagcctgggcaacagagcgagactctgtttcaataaataaacaaataaatagccataattagccatattagccaaatactagctcctttacttctcagtgaccacttagatcctcactgctatgaaggcctgttcattattaaccaaaaggaaaacaataatggagctactacctcaatttcaatttgatgaaaaactgtggactacagttttgctttgttttctttccctcaaggactaatttttttttttgtcttccaggctcattggcccattgtttttggaggcaagacataatcaaatgaaagacccagcacactgggaattaaatgactcactggaattcagttcaatttcagtcacatcttttgagtgtctgtgacatgctacctactctgctaggtacctaggacacagaatgagtgcagcctggcccctgtctattgcagattgctcacaatttgcccagaatttatgtatgtatgcagttagccataatgtataatactaaatctatgttctcctagaaacaaagtattatggaaagaaacgaggtgtggggatgggtaattctactgggtcagggaagcttttgaaaacttctaagagatagctgcttttaaactggactttgaagkatcgatggtgaaaaaagacattctttactgtgatagcaattattacaaagttgaaatgatctattaaggagtttttttccccattaaagtgtgagccttaaaaataaggcctctgccttactcagttttgtgtcttactagcccttaacaccacggctgttacataacaagggctcagtacatgaatgaaggaattggctaggcaacacaatacattttaaaaggcatatttgtaaaacatgagattacagtccctcaacctttaacatacaagatgaagaaggacaactgaagaaactctagtatgtaacacatacgcatgattcctcaactacctgcaaaagcactggataaacagttttgaaacatgctttctactctgagtttagcattgaaatttatttatcatcttcttatccttgatgactagatgttaatatttttcaacatctaaatcctagagcctggcaaagtttaagaatttggtcttacctgaggcgaatgactttacacagcttaaaagagg

SEQ ID NO: 547467 - DNA, 1526 bp, Homo sapiens
accccccctccaaaattactttagcattgttgactatttaatcttgagaagcaaaaggatttgtaagtccaggcattattcttatgggtcaaaactcacatgaaatctggatactgtgtttcaataaaagctcatgaattctatacaactgttatggtaaaacatattcaacaaatatttatatgtctctggcatagtattcttttcaattttgaggtttctcccatatattagtataaataagatttacaagctaagactgtttcaagcttgtgccatggtttataaagttgcatttgaaattaaagtaaaataattcataaagtttctatgattctgttacttaccatctaaccatattgattcctatgctttggagtgttgtctgactcagagaacacccactaaatgcatataatgagcatctgccaaaggaatccagatagtattctgttctgtgtgccttcatatcacagtgagcaggggtggggaatggaagcccagtacattttcttcaatataatagcagtgatggtgagcccctggtgctcctcagccccatagcttcaggattcagtttatcaactgtcaataggcaaaggcatgtttttcttttcccatgagctgattaaagttgtggtttcttgtaattcatggcattccattgtatttatttctgctgggattttcaggctggattactgtaactaatataccactaagtctgtgctgcaaaatccttgaccttttgaatcctcttttttagcagaaaattggcataagaaatttcaacacaataaatgctttaattttttcttaatcttgatccagaattcacatggttcaatttaattacgtcagaggctctttgccaccagtattagtttggattaagggtttttggaaattgtggtgataggagaaaaagagagatgagataattctatttgcagtggattattaggagagaaacaaaaatataaaatatgaatcctttgttttttttctaaaataatttgtgcccacagctcaatttgagcacatggatttggctggcctcccaaaccatgtgacttggaaattgatttaatctttcctcccaaatcatgtgacttggaaattgatttaatctttcatatgtgatcaaagaatctttatgcaccgcccccccgctcctccttcagtagcaaaatgatggactctttgcatccatagcctacctgtgtaggattgggagagatttcgaactaggagaagaaatggaggcagcagcagaaaggtgttatgctcagagtctgtagggatattgttggtccaaactcatgtgacttatttctgttgttttaggagtctgcaaactttctctttaaagggcctgagggccaatagtaaattaatttaggttttgcagctgacatacggtttctctgatttcttcttcttmttattcttttgcttgtttttttgcttttgtttttacaacactttataaatgtaaaaaccattcttagctcaaagatagttca

SEQ ID NO: 547468 - DNA, 2557 bp, Homo sapiens
  misc_feature 2482: n = A,T,C or G
ttggagataatcattagtcagtgattaattgaaaactgaccagacagaaaataaggacattggagtcctgaggagggaaaaaacacataacctctgcatttgtatttgaaatcccaatgctaatgtacaattatactttccattttaaaagaaaatagattttattaatactctgaatacaaatatcttgaaaattaaaatattattttgaaagggttaaagattgacatatgctaccatattaaaaagattttaatcagattgccaataaaaatttaaaagtttagtttgtaaatacaaacataaacgcattttcaccaattcttttttctagtagatctttgatttctgtccttcctgatgtcagtttctttttcagaaaaaytctcttcaattttcttaatattcaaatagtattttaaaatgtttacgacagatggaactgcccctcgactttaattttagttatgaccatttactgcagttgttcccaaacttgtatttaaattgtgataagttttaatataaaactttaattattaacatggaagtgtaatcaaaacataatgtggcacaggaaagcagtttgtaggtattatatactagtatgccatttttgtttaaaatgtattgcaaatatttgggaggagtatataataaattattaacagtggttattagcatatattttctgttttttaatgagcaaaacaattttaatcactgaaacaagaaaagtatttaaaatagcacctagaatagtattttgctatgctctggtgttaggatgtttacttttgaggattttgatttcaggtgctcctatctttggagcactgatgttagattcgacctatcttcttcgtatctcctactttcaactcctttgcaaatatgtacttaggttagtattaagcttgggatttgaggggaagaacttcagcttttaaaacaaccgaactccatttgaaagaagtttgccattaatgtctccccttggttttatttatgtttacagggatgtggtcacttagcacatgtatatagggtaaatgcaaaccataatataatactagggcagatgtatgctactaccacaattcagtggaggaagttctgtgttcatagtaagtttctttcttcagaaactcaaacccttgctgtctgtccattgataagaactgataggctagtttaggtaacctaagacatacagatgcactttatttctctgaatattattttcctctttcttttcacttttaaggctcaatcctatgcctctggaatcctagtataattcctcctgtatttgtttctcaatttgttcttttgcagtagtctatccattcatgtggatgaacgtcactctggatagaggaagggcaatcccaggcaatcatacacataaaatcaaatgtccttcattttttccagagggattctggattttccacagaggatcaatgctacttctttggcatcttgttcacccaggaatgtatagcctgtgtttgctagtgatttacaaaaataaaaacaaagttttgtcccacatttcctacaaataacgttttattggttatgctttttcaaagcattgatctccttactgtgtaatgctcaactcaattcagttgaaatattacagagtttcacactctaactacctctaaatatcaatttgagggtaaaggaaaataatgaaagaatcacaatgtagtgaaaagagcacaggctttagggtcagacagatctgggtctgagttacctctcttgttcactgtatgactgtggtcaaatcatatgacccacctgagcctcagtttcctcatctgcaaagggcagattgtgataccatctacagtgaggattgacagtgcatgcagaatatctgacacatgatatggtagctactattggaatttatgaatatgaaagtattttataatttaccaagtgctttataagtgaggagttaagactctccttcttctgaaaactttccatctcgattcttctcagattcatatgcctgaagcaccaaactgcttggcatttaccaagatccataatcttgtcccctttcctttcatttattttggaactgtagttactgacttctcctcttcttttctccccacctcggcaccccggtggagctccttgtctgaattctgcttgagcactctgtatttgtttccatgcacagatgtatatgtttaagtgtgtatcttttctccccagccagcacttaacacagtatgttgctcatgatgctttgctccttactgcatgttgatactgggattcaacagaaaatatatggtccatagactttggcttggatatactggccgtcatgagggacttggaatgaacttgagagttcaatctggtttgagttctggcactgacattgaccgtctctggggacttgcttaatatctcagatttttttttttaactccggaggacacanattagattatggttgagagaattgttaaagatctgccttgggacagagtattttcttacatatgttaatttggat

SEQ ID NO: 547469 - DNA, 2557 bp, Homo sapiens
  misc_feature 2482: n = A,T,C or G
ttggagataatcattagtcagtgattaattgaaaactgaccagacagaaaataaggacattggagtcctgaggagggaaaaaacacataacctctgcatttgtatttgaaatcccaatgctaatgtacaattatactttccattttaaaagaaaatagattttattaatactctgaatacaaatatcttgaaaattaaaatattattttgaaagggttaaagattgacatatgctaccatattaaaaagattttaatcagattgccaataaaaatttaaaagtttagtttgtaaatacaaacataaacgcattttcaccaattcttttttctagtagatctttgatttctgtccttcctgatgtcagtttctttttcagaaaaactctcttmaattttcttaatattcaaatagtattttaaaatgtttacgacagatggaactgcccctcgactttaattttagttatgaccatttactgcagttgttcccaaacttgtatttaaattgtgataagttttaatataaaactttaattattaacatggaagtgtaatcaaaacataatgtggcacaggaaagcagtttgtaggtattatatactagtatgccatttttgtttaaaatgtattgcaaatatttgggaggagtatataataaattattaacagtggttattagcatatattttctgttttttaatgagcaaaacaattttaatcactgaaacaagaaaagtatttaaaatagcacctagaatagtattttgctatgctctggtgttaggatgtttacttttgaggattttgatttcaggtgctcctatctttggagcactgatgttagattcgacctatcttcttcgtatctcctactttcaactcctttgcaaatatgtacttaggttagtattaagcttgggatttgaggggaagaacttcagcttttaaaacaaccgaactccatttgaaagaagtttgccattaatgtctccccttggttttatttatgtttacagggatgtggtcacttagcacatgtatatagggtaaatgcaaaccataatataatactagggcagatgtatgctactaccacaattcagtggaggaagttctgtgttcatagtaagtttctttcttcagaaactcaaacccttgctgtctgtccattgataagaactgataggctagtttaggtaacctaagacatacagatgcactttatttctctgaatattattttcctctttcttttcacttttaaggctcaatcctatgcctctggaatcctagtataattcctcctgtatttgtttctcaatttgttcttttgcagtagtctatccattcatgtggatgaacgtcactctggatagaggaagggcaatcccaggcaatcatacacataaaatcaaatgtccttcattttttccagagggattctggattttccacagaggatcaatgctacttctttggcatcttgttcacccaggaatgtatagcctgtgtttgctagtgatttacaaaaataaaaacaaagttttgtcccacatttcctacaaataacgttttattggttatgctttttcaaagcattgatctccttactgtgtaatgctcaactcaattcagttgaaatattacagagtttcacactctaactacctctaaatatcaatttgagggtaaaggaaaataatgaaagaatcacaatgtagtgaaaagagcacaggctttagggtcagacagatctgggtctgagttacctctcttgttcactgtatgactgtggtcaaatcatatgacccacctgagcctcagtttcctcatctgcaaagggcagattgtgataccatctacagtgaggattgacagtgcatgcagaatatctgacacatgatatggtagctactattggaatttatgaatatgaaagtattttataatttaccaagtgctttataagtgaggagttaagactctccttcttctgaaaactttccatctcgattcttctcagattcatatgcctgaagcaccaaactgcttggcatttaccaagatccataatcttgtcccctttcctttcatttattttggaactgtagttactgacttctcctcttcttttctccccacctcggcaccccggtggagctccttgtctgaattctgcttgagcactctgtatttgtttccatgcacagatgtatatgtttaagtgtgtatcttttctccccagccagcacttaacacagtatgttgctcatgatgctttgctccttactgcatgttgatactgggattcaacagaaaatatatggtccatagactttggcttggatatactggccgtcatgagggacttggaatgaacttgagagttcaatctggtttgagttctggcactgacattgaccgtctctggggacttgcttaatatctcagatttttttttttaactccggaggacacanattagattatggttgagagaattgttaaagatctgccttgggacagagtattttcttacatatgttaatttggat

SEQ ID NO: 547470 - DNA, 678 bp, Homo sapiens
aatttataaaggaaagatgtttaattgactcacagttccacatggctgggagaggcctcaggaatcacggcagaaggcgaaaaagcaaggtacatcttacccagcaacaggagagaaggagtaggcaggggaaactgccagttttatyccatcagatctcgtgagaactctctcactatcatgagaagagtatgggggaatccgccccacctggtcccttcctcatcgcgtgggaattatagtttgtgatgagatttgagtgggagccaaaccatatcaggtatatttctacaatagaatattatttggcaaaaaaaggattatagtatcaatgctattatggggatgaatcttgaaaatattagctaagtgaaaatagccagtcacaaaagaccacatattatattatttcatttatataaaatgtccataatatgcaaacctatagagatagaaagtagattagtggttgcctagagcagggtggaggaggactggggaaaatggggagtaattgacagtagatacagagtttcttgtaaaggcgatgtaatattctaaaattgattgtattatagttacggttatacaacttgatgaatactataaaaaccatcaaattgtttttacataatctttacatcgaaattcattcaacatattggtgaatttgtggta

SEQ ID NO: 547471 - DNA, 678 bp, Homo sapiens
aatttataaaggaaagatgtttaattgactcacagttccacatggctgggagaggcctcaggaatcacggcagaaggcgaaaaagcaaggtacatcttacccagcaacaggagagaaggagtaggcaggggaaactgccagttttatcccatcagatctcgtgagaactctctcactatcatgagaagagtatgggggaatccgccccacctsgtcccttcctcatcgcgtgggaattatagtttgtgatgagatttgagtgggagccaaaccatatcaggtatatttctacaatagaatattatttggcaaaaaaaggattatagtatcaatgctattatggggatgaatcttgaaaatattagctaagtgaaaatagccagtcacaaaagaccacatattatattatttcatttatataaaatgtccataatatgcaaacctatagagatagaaagtagattagtggttgcctagagcagggtggaggaggactggggaaaatggggagtaattgacagtagatacagagtttcttgtaaaggcgatgtaatattctaaaattgattgtattatagttacggttatacaacttgatgaatactataaaaaccatcaaattgtttttacataatctttacatcgaaattcattcaacatattggtgaatttgtggta

SEQ ID NO: 547472 - DNA, 678 bp, Homo sapiens
aatttataaaggaaagatgtttaattgactcacagttccacatggctgggagaggcctcaggaatcacggcagaaggcgaaaaagcaaggtacatcttacccagcaacaggagagaaggagtaggcaggggaaactgccagttttatcccatcagatctcgtgagaactctctcactatcatgagaagagtatgggggaatccgccccacctggtcccttcctcatcgcgtgggaattatagtttgtgatgagatttgagtgggagccaaaccatatcaggtatatttctacaatagaatattatttggcaaaaaaaggattatagtatcaatgctattatggggatgaatcttgaaaatattagctaagtgaaaayagccagtcacaaaagaccacatattatattatttcatttatataaaatgtccataatatgcaaacctatagagatagaaagtagattagtggttgcctagagcagggtggaggaggactggggaaaatggggagtaattgacagtagatacagagtttcttgtaaaggcgatgtaatattctaaaattgattgtattatagttacggttatacaacttgatgaatactataaaaaccatcaaattgtttttacataatctttacatcgaaattcattcaacatattggtgaatttgtggta

SEQ ID NO: 547473 - DNA, 779 bp, Homo sapiens
agacactgcctttctctgaaaactgcccttacctctttgttacaattcacttcaagatctgttgagtaggaacatcaaaaatgcaaataaaaagtttcaagtattatgaaagaatgcaataaaactgcctttaaaaaaaatctcaagatggaggtggagatcctgtgatcatgaaatctgaataggctgctcctgtgtccttcagtggtgatggctctgaaacccttgtgttttatgaacttcatgccctggtcttcaaacgaattcagtgcaggccaagaagcacagtttggcctgggttggatgctctatattttcaaasagtgaaatgccttgagacacagcctttgctatagtacctgctaaaacttcaacgtgtggataaatatagcttacattgaatcgaatagactcagcgagagtggcagtgaaggatgccctctggaagattcgaggtgctgaggccaaagggctagcaaggaaagagcgtgcaggtcaggcccttcagcctggtggaagagcaggcagggagggtcctatggttcctgggaggacccgaagcatgatcacctgtcaagagccaagagccctaatggccagcgccggggaaagggcccccgaggggcagtcagcagccctgcaggggcggcgttcacactcctgtgtggcacgggacactcatggctccaccagctcctgaagcttctgggagccagagagtcagcagggagaatcccacacacgggcactcagttcctggaaaccctgcatgagatgcg

SEQ ID NO: 547474 - DNA, 779 bp, Homo sapiens
agacactgcctttctctgaaaactgcccttacctctttgttacaattcacttcaagatctgttgagtaggaacatcaaaaatgcaaataaaaagtttcaagtattatgaaagaatgcaataaaactgcctttaaaaaaaatctcaagatggaggtggagatcctgtgatcatgaaatctgaataggctgctcctgtgtccttcagtggtgatggctctgaaacccttgtgttttatgaacttcatgccctggtcttcaaacgaattcagtgcaggccaagaagcacagtttggcctgggttggatgctctatattttcaaacagtgaaatgccttgagacacagcctttgctatagtacctgctaaaacttcaacgtgtggataaatatagcttacattgaatcgaatagactcagcgagagtggcagtgaaggatgccctctggaagattcgaggtgctgaggccaaagggctagcaaggaaagagcgtgcrggtcaggcccttcagcctggtggaagagcaggcagggagggtcctatggttcctgggaggacccgaagcatgatcacctgtcaagagccaagagccctaatggccagcgccggggaaagggcccccgaggggcagtcagcagccctgcaggggcggcgttcacactcctgtgtggcacgggacactcatggctccaccagctcctgaagcttctgggagccagagagtcagcagggagaatcccacacacgggcactcagttcctggaaaccctgcatgagatgcg

SEQ ID NO: 547475 - DNA, 1553 bp, Homo sapiens
tgtcagttattcttgaccctaaaatccctagatcttccaataaatatggaaatttgccttaataccaagatttctgcaatacttgttgaatgtcagaaaatttcttctggcaggaaattagatcaatctggggcgaggtcctgctgtgctgttagacttcagaagctttagtttaattgcactacagagtgaatgtgtgtgtggtggagggtggtggtcagtggtagacagctccaagctttatgcatttgatgtttctttctaactaatcctttaactaattcaatcatccattcattctacaaatatctattgagtaactagctgctggcaagatagccataaacatgagagaaaactccctgccttcacaagacttctattgtagtagtagagttcaacaataacaaacaaataagcaactacagtatttagaaaaaataaaactgcataaaataatgtcgtgtactaatataggttacaataaaaattaagcaaggtaaaggtgagtaggagaccacacaggtattttagatagggaggtctcaggggcctgtgtgaggacgtgacatttgggcacagactggcatgaagtgagggaacaagccattcagtgatatagagcaaaactatcacaggagaatccagagtgaaggcaaagtcacagaggctgaaacatgtttcctatatccaggagcaacctgagaggatcccatgccgggacaggtgtgactacaacagaatgagagcaagagagagtgacagcagatgaagtctgagaattagccaacagctaccaggtaagttcctgggaaacaaagttctatgtcggagcagaactcacagcaagagatgaattaggtgaagcatcccttttattgtgtcccaattaaagttgttctagtggctctagatcagtgcttttcaaaggttaatatgtatatgaattacctgaggatcttatgaaatgccacttctgattatctaagtctggggtgggttgtgatcacagaacaagcttctatactgttgttcctggtctactttgaggtgcaaggctccagagtatagatcatcatcagactgaagtccacactcctttggtttataaaagctttgtttctaattatgtcttcaacttcatttttgctggtcactctccccaccaccatctcccttccctactttatatgctccaggtgtatctctttctttctcgaacacaccaggagctctctcattctcaggccttcacaaagttagtgtctctcttcctagagcaaacatctctccctcttcaccagtcttagtcctctattagttcctagcttagtttttactcccctagtgtagggttttgctgccctctcacatgccactaaagctytctatccaccttcttaacactcacctgtcatttagcccagttcttagaggaagacccagattcctgtgctggttgttgcagtcctagagcatagcacagtgtttacaacaaaagtccccactaaatatttgatgtgtaaaagcatgattgaaggagttaaaccaca

SEQ ID NO: 547476 - DNA, 642 bp, Homo sapiens
tgcttttgctcagcacttgggcacttcgtggccgtgtgtctcatatgatgttcataatgcttttttttccctctccttccccccgtaatactttatgaatagatgtttccacttctgaatagttctccgattagaatagcagttacaaaatgggtaagacttcacctcgtcctttaaaacaggaaaattgatagaattcctccacctcctttcattactgaggctgtcagatgattctttaagcaaaaccccagtgttctcttgtctgatgaagtcagtgtaagtgatggtatttttacattgactttaatatgaaaggaactgtttaattgaacggtttcatctcaaggccaggctttrgactccttcttgggctcatgcatgggatccttcttttgcacacctgtggcctccctggaactacttctggtggtttccctggacttagtatcccccaaacctggcagcccagggcctagtgacaggcagaggaatgtattgctcttgctctgtggggtcaggtagggccgggggaggtcctgcatgaatattttcagtgctgattcagaaagagcattgggcatacacttcaggaaaccctacctggaagctacagcagcactgctctatcctagactgacc

SEQ ID NO: 547477 - DNA, 1500 bp, Homo sapiens
agctgagatagtgccactgcactccagcttgggtgacagagtgagactccatctcaaaaaaaaaaaaaaaaaaaggatgaaaatgtatcaccaaaatagaaaggaatgagaatattatactgaggtaggctccacttataagaatctaagaatatagagaaaaaaagcaagttgacagagctctttagaaactgtcagctggatgaagtattatcagcaatctgagataagcaaagcaaatctgattgttaagtaaaaggtcaaaaccatttgtttcacaaaagagtaaggctgagaagaaagttcctctacactagatgtctycagcatgtaacatcaggatgccaaaacttcaggatatgcagatgtcacagaaatttcctcctctcccattttcctggtgctgttaattggcagaagcctctccccagcaagagcactgatagggtttggatgtttgtcccctctaaacctcatgtttaaatgtgatccctaatgttggaagtggggtctggtgggaagtgtttgggtcatggggcagatccttcatgaatggcttggtgcctccccatggtaatgagttactgcaatatctgattgctaacaagagcctgggacctcccccctctctcttgctctctctcttgccatgtggcatgcctatgcccctttcaccttctgccataattggaaggttcctgaggccctcaccaggagttgatgctgagactatgcttcctgtacagcctgcaaaactgtgagccaaaataaacctcttttctttaaacattcctcagtctcaggtattcctttacagcaatgcaaagtaaacattctcatcgcaccgtactcagattaactcctttcaaaacacttctcattggcattctctagtcctgagtggcaccagtttgcacaattagctttttttggatcagttattcaggaatcaatcaagttccttatcctggatattttattgatgagaatcctgaaattaaccattccagttataaattaatattgtgccccattgagatctttttttcacagcaagacttcacttgtcctaagtgaattccacatatgactcataagacatttgcctaatgtcaaatgtacattctcaattgctttctaacatgcctcttataaattcatttgctgtggaaaactaaaagttccaagctcactttatattagatttctcaagagattccacattttccttcattagccaccaaagtacaagagaaggaatgatacttttgagaactgcatgcaaatattcttattaatagaaaaggataacttgtgatatgaaaacaggatggattaaatcatttcattattatatgaaatgtacttggtattatttaactctacaataaaggattagtagttattttgctaaatgaattcattttgctaaccattacatggcagaataaatcttggttaatcttaccctcagctggtgggtctgtgtttgtattcccc

SEQ ID NO: 547478 - DNA, 1500 bp, Homo sapiens
agctgagatagtgccactgcactccagcttgggtgacagagtgagactccatctcaaaaaaaaaaaaaaaaaaaggatgaaaatgtatcaccaaaatagaaaggaatgagaatattatactgaggtaggctccacttataagaatctaagaatatagagaaaaaaagcaagttgacagagctctttagaaactgtcagctggatgaagtattatcagcaatctgagataagcaaagcaaatctgattgttaagtaaaaggtcaaaaccatttgtttcacaaaagagtaaggctgagaagaaagttcctctacactagatgtcttcagcatgtaacatcaggatgccaaaacttcaggatatgcagatgtcacagaaatttcctcctctcccattttcctggtgctgttaattggcagaagcctctccccagcaagagcactgatagggtttggatgtttgtcccctctaaacctcatgtttaaatgtgatccctaatgttggaagtggggtctggtgggaagtgtttgggtcatggggcagatccttcatgaatggcttggtgcctccccatggtaatgagttactgcaatatctgattgctaacaagagcctgggacctcccccctctctcttgctctctctcttgccatgtggcatgcctatgcccctttcaccttctgccataattggaaggttcctgaggccctcaccaggagttgatgctgagactatgcttcctgtacagcctgcaaaactgtgagccaaaataaacctcttttctttaaacattcctcagtctcaggtattcctttacagcaatgcaaagtaaacattctcatcgcaccgtactcagattaactcctttcaaaacacttctcattggcattctctagtcctgagtggcaccagtttgcacaattagctttttttggatcagttattcaggaatcaatcaagttccttatcctggatattttattgatgagaatcctgaaattaaccattccagttataaattaatattgtgccccattgagatctttttttcacagcaagacttcacttgtcctaagtgaattccacatatgactcataagacatttgcctaatgtcaaatgtacattctcaattgctttctaacatgcctcttataaattcatttgctgtggaaaactaaaagttccaagctcactttatattagatttctcaagagattccacattttccttcattagccaccaaagtacaagagaaggaatgatacttttgagaactgcatgcaaatattcttattaatagaaaagkataacttgtgatatgaaaacaggatggattaaatcatttcattattatatgaaatgtacttggtattatttaactctacaataaaggattagtagttattttgctaaatgaattcattttgctaaccattacatggcagaataaatcttggttaatcttaccctcagctggtgggtctgtgtttgtattcccc

SEQ ID NO: 547479 - DNA, 1500 bp, Homo sapiens
agctgagatagtgccactgcactccagcttgggtgacagagtgagactccatctcaaaaaaaaaaaaaaaaaaaggatgaaaatgtatcaccaaaatagaaaggaatgagaatattatactgaggtaggctccacttataagaatctaagaatatagagaaaaaaagcaagttgacagagctctttagaaactgtcagctggatgaagtattatcagcaatctgagataagcaaagcaaatctgattgttaagtaaaaggtcaaaaccatttgtttcacaaaagagtaaggctgagaagaaagttcctctacactagatgtcttcagcatgtaacatcaggatgccaaaacttcaggatatgcagatgtcacagaaatttcctcctctcccattttcctggtgctgttaattggcagaagcctctccccagcaagagcactgatagggtttggatgtttgtcccctctaaacctcatgtttaaatgtgatccctaatgttggaagtggggtctggtgggaagtgtttgggtcatggggcagatccttcatgaatggcttggtgcctccccatggtaatgagttactgcaatatctgattgctaacaagagcctgggacctcccccctctctcttgctctctctcttgccatgtggcatgcctatgcccctttcaccttctgccataattggaaggttcctgaggccctcaccaggagttgatgctgagactatgcttcctgtacagcctgcaaaactgtgagccaaaataaacctcttttctttaaacattcctcagtctcaggtattcctttacagcaatgcaaagtaaacattctcatcgcaccgtactcagattaactcctttcaaaacacttctcattggcattctctagtcctgagtggcaccagtttgcacaattagctttttttggatcagttattcaggaatcaatcaagttccttatcctggatattttattgatgagaatcctgaaattaaccattccagttataaattaatattgtgccccattgagatctttttttcacagcaagacttcacttgtcctaagtgaattccacatatgactcataagacatttgcctaatgtcaaatgtacattctcaattgctttctaacatgcctcttataaattcatttgctgtggaaaactaaaagttccaagctcactttatattagatttctcaagagattccacattttccttcattagccaccaaagtacaagagaaggaatgatacttttgagaactgcatgcaaatattcttattaatagaaaaggataacttgtgatatgaaaacaggatggattaaatcatttcattattatatgaaatgtacttggtattatttaactctacaataaaggattagtagttattttgctaaatgaattcattttgctaaccattacatkgcagaataaatcttggttaatcttaccctcagctggtgggtctgtgtttgtattcccc

SEQ ID NO: 547480 - DNA, 592 bp, Homo sapiens
cacmcagaggaaagcctacgtgaggacacagcgagaagacagacagctgcaagctgaggaaagaggcctcagaagaaaccagctctgctgacaccttgacattgggcttccagcttgcagaactgtgagaaaagtcctgtcgttgaagccacaagtctgtgatattttattatgatcaccctagcaaactaatacaagtccccgaaagccacactcagctttctgtctttacttttccattttgtttagaatatatcttggaaggtttccgaaccaattccaagcctagcaaaagaaaaggtcagttcatgagttctgtggagacatatcccaaaatataacctggcaatactgtgcctgatccatatttgtcttgaagataaccactgctaggaaaatattcctgaaattcttagcaggccatagcaagttgctttaggactttcatgactggttgtcagtcataccctcacactaaccctgtttgtgcccttgtctttatgtgtttttagtgagaatatactttctagaaactaaacagaatggcaatatgatgtaatgccaagatagcaaggacagttttgatgtccct

SEQ ID NO: 547481 - DNA, 689 bp, Homo sapiens
gcccagtacctagcccaactggtcagactcactgagtgtttgcagaaggagagaaggaagaatggcgagcttagacagaaagcagcaagtccaggccagtgggaagtrcagcctcctcagtgagggtacggaacatggggagggggctaggcaggagagatgccaaactgttgctagataaacccacacactgcctccgtcgctgcccattccagaactccaggccgcaggaaccggaaccgccaggtcgcaaggctctcccccagggtccggaggcctgccctctcccccagctgcggggagactcaccatgttcttagtgagctggtcgctcttctccaggctgtctcggatgaaggacagagtctcctcctcctgggggcaggcaaggggaggacatcaccagaaaccagaagctaaaggagaccactgcgtcccaaccccacggcctagcccccaaccccatctcctcgctgggtgcgctccctcccacccctgcctcctccatgagtagacaatcaggccccgctgttggcccctttccctcacctcctccccagcctccccaggcccacgcccacctgcttcagcttgtcctcaatctcccgccgtcgagcggatgcctcctgtgggggaatcatcgctctgaaccccgcggctcccactccccagtatctttcctccgcggg

SEQ ID NO: 547482 - DNA, 560 bp, Homo sapiens
ttcttgaattaaaggtcacagaattgatctttatgcactatcttgttgtttccaagtgactgagtcatgctaaaagccttgaatccactatcttggggggaaaaactttttattttgaagcaaacctccacacattgcatcattttatctagagttcagtgtatatctctaaaataagtatttccaaactgagatttagaaccmacatatagatttaagtatttatcaaagatcatgctaataggttgagtttgagttttctttacactttttgtttaaatatttttttaaaatgagaggataaatattgcagccaggacctgatggcattgaaaagccacttaaagatatcatctaaatgcctttagttaatcaatgtaatgtcttaaagttagggtatttaagagactttctaaaggtagagttgtggttggagatagtttagactagtactcaagtctactgactcctagaatcaattagtttcaaagaaatttatatatttatggctgtataaactgtaaactgtagtagtatatgccatctactttgatgactta

SEQ ID NO: 547483 - DNA, 1474 bp, Homo sapiens
agaaacccaatgatcttcattggttcaaatgtcaggagctgaggggtcccatctaaaatgctgataaacagagctataaaggatgccttctatgctgaaacacaaaactcctgtccttaccttttatgctcttatctatgtgcccaaggaaccatgtaatccccagtacaagagtagatcgtataatttacacatatatagtggatcagagacctaatgtagagacgacagccatgcccagtcttacccagccacactcacaaatcaaatcctcctgcttatcagctttgggctagattttgaacttggcttaattttaaccctttttctggcacctacaattttgtttggaaactaggcttgcactaggaccataggcttgcattacatagatttagaatattcctattttactcttcatccttggacagaatttagctctctttctctcccttgccctttctgcctattgattccaaaggcaacgttgcctctagattgggggcccagagataggattcaaatcaaagtatatcgaattgcaaagcaattctcactgttgcataacctctccgagtcagttaccctatcttaaaactaatcaaaatgtcaaagacttataaagaataatttatataattaacttacataaagcactttgtaaaatgccctgaatggtataggcgcttaataaatgctggccatagttttttatcctttgctatattccctaacaaaccaaacaaaaatcaaagcacagtcttttcatggggcttattggaaaaatggtcatcataccctctttccctctattgttcctgtgacatattttaagtatttataattgctgttcagattggtgacaattttcatttcacaaaatgactcttcttacaattatgcttaaagtcctctctaaatggttcttaaatgtgttaattatgcaagatttatcacctgacatatgaaaggctaacttttcaaatgatttcagagtaaatggaatgctaagccctctcccaaccagtaatagtaatgtgttcatttgaaccaggtcacgagcctgcctgcctagagaagtgaagcccctggaatgtctctgaagcaaacgggcaggtgtgtctgcatgaaaaaaggcaaaatcgaccatggagcattgggttaaatgcaggatgataggcgactctgcaactcactttacaatcacttaaccccttttggtcctttgagacctaaaggtgctgctgacaagaaatgcaagcctgtctgtataggtattatgagtccaggataatggtcacatagcactttggaaataaaaagtatttaacccttctagcatgttcctcagtcaagaacaaaaaaaggtaacttttaaaagctcaaataagtatgtattcccctgtgggggggaaaaraaacttctggctgaatttaatattactaacaaaactacaactgtaataggagtact

SEQ ID NO: 547484 - DNA, 784 bp, Homo sapiens
tctagaggctttgagtacttgagagtctgaaagtactagtaggtcctacagtcaattatctctatcttattctcaaacttttttatagtatttttaattcgtcactcttgaaaaaaatctgcaaaataagccaattttgtgagttcttcttgaccattactgttaaaataatccatttacattatttaggttttactttttatcttttctttccatgatgaaaaattatatttttcaactctgactgtaaaaatattatagccatggtcaggtgtgatggctcacacctgtaatcccaacactttgggaggccaaggcaggtggatcacttgaggtcaggagtgtgagaccagcctggccaacgtggtgaaactccatctctattaaaaatacaaaaaattagccagacctggtggcacatgcctgtaatcccagctactcaggaggctgaggcaggagaatcacttgaatctgagaggtggaggcttcagtgagccgagatcatgccactgtactggatgacatcagtgcctggatgacagagcaagactcttcaaaaaaatatatatatataatatatatatattttatacataatatataatatacattataaatataaaatatattatatatcataatatataatataacatataatatatattataatatataacataataatatatattataatatataaaatataacatataataatatatattataatatataaaatataayatataataatatatgttataatatataaaatata

SEQ ID NO: 547485 - DNA, 784 bp, Homo sapiens
tctagaggctttgagtacttgagagtctgaaagtactagtaggtcctacagtcaattatctctatcttattctcaaacttttttatagtatttttaattcgtcactcttgaaaaaaatctgcaaaataagccaattttgtgagttcttcttgaccattactgttaaaataatccatttacattatttaggttttactttttatcttttctttccatgatgaaaaattatatttttcaactctgactgtaaaaatattatagccatggtcaggtgtgatggctcacacctgtaatcccaacactttgggaggccaaggcaggtggatcacttgaggtcaggagtgtgagaccagcctggccaacgtggtgaaactccatctctattaaaaatacaaaaaattagccagacctggtggcacatgcctgtaatcccagctactcaggaggctgaggcaggagaatcacttgaatctgagaggtggaggcttcagtgagccgagatcatgccactgtactggatgacatcagtgcctggatgacagagcaagactcttcaaaaaaatatatatatataatatatatatattttatacataatatataatatacattataaatataaaatatattatatatcataatatataatataacatataatatatattataatatataacataataatatatattataatatataaaatataacatataataatatatattataatatataaaatataacatataataatatatrttataatatataaaatata

SEQ ID NO: 547486 - DNA, 784 bp, Homo sapiens
tctagaggctttgagtacttgagagtctgaaagtactagtaggtcctacagtcaattatctctatcttattctcaaacttttttatagtatttttaattcgtcactcttgaaaaaaatctgcaaaataagccaattttgtgagttcttcttgaccattactgttaaaataatccatttacattatttaggttttactttttatcttttctttccatgatgaaaaattatatttttcaactctgactgtaaaaatattatagccatggtcaggtgtgatggctcacacctgtaatcccaacactttgggaggccaaggcaggtggatcacttgaggtcaggagtgtgagaccagcctggccaacgtggtgaaactccatctctattaaaaatacaaaaaattagccagacctggtggcacatgcctgtaatcccagctactcaggaggctgaggcaggagaatcacttgaatctgagaggtggaggcttcagtgagccgagatcatgccactgtactggatgacatcagtgcctggatgacagagcaagactcttcaaaaaaatatatatatataatatatatatattttatacataatatataatatacattataaatataaaatatattatatatcataatatataatataacatataatatatattataatatataacataataatatatattataatatataaaatataacatataataatatatattataatatataaaatataacatataataatatatgwtataatatataaaatata

SEQ ID NO: 547487 - DNA, 784 bp, Homo sapiens
tctagaggctttgagtacttgagagtctgaaagtactagtaggtcctacagtcaattatctctatcttattctcaaacttttttatagtatttttaattcgtcactcttgaaaaaaatctgcaaaataagccaattttgtgagttcttcttgaccattactgttaaaataatccatttacattatttaggttttactttttatcttttctttccatgatgaaaaattatatttttcaactctgactgtaaaaatattatagccatggtcaggtgtgatggctcacacctgtaatcccaacactttgggaggccaaggcaggtggatcacttgaggtcaggagtgtgagaccagcctggccaacgtggtgaaactccatctctattaaaaatacaaaaaattagccagacctggtggcacatgcctgtaatcccagctactcaggaggctgaggcaggagaatcacttgaatctgagaggtggaggcttcagtgagccgagatcatgccactgtactggatgacatcagtgcctggatgacagagcaagactcttcaaaaaaatatatatatataatatatatatattttatacataatatataatatacattataaatataaaatatattatatatcataatatataatataacatataatatatattataatatataacataataatatatattataatatataaaatataacatataataatatatattataatatataaaatataacatataataatatatgttataatatataawatata

SEQ ID NO: 547488 - DNA, 541 bp, Homo sapiens
aaatacaagttgaattggacagggatagtttagggaagggaatagggtgctcacttaaatacaggggaaagaaggacagaaggcagttcaaaaaatgtgattttcccccctattgctttgtgaacctgagagtaaagatagctctagggcaatgattcttactctctcctaaaagtatacggaaactcattgctcttgagaatgaatataagaaggaatagaaaagggttacaaycaaatcccatgaaaatcttttagagaatttacagataataggagcaaaatttgaactctactaacaaggaaggtattcaagaaaaacatacccaaaacgtaaagatataaagtacaatctaatattttaaaaagaagtaaaggttctatgaaatatatagcagttttgaacaaataaaattaattagaatattctagaaatgtataaattggtcatttgcatcaccattgtctcaaccctacctgagatacttcaatctttaaatgtggggcaatactaataaactaacaaaggaaattgagatgg

SEQ ID NO: 547489 - DNA, 358 bp, Homo sapiens
atgagttgtctagggtttggtgaaagcaatggtattgaaagtggttttctcatcaaattagttcctgagtcatgtgtcggacactgtttctatcttgagcagcttctctagcctttctaaatcctgtgacctgcctgtgatccttttaagatttctttctgtttaatyagccacaaacagcttctgttgcttgcaacccaggctcctgagaagagactggagaagcagatcactttattaatgtgcttcatgtagagggagtagagatttccacctctaccatacccaaataactggtattggctgtacctttctaatgtgagcaactttaaaattgaacagaatatatgaaacctct

SEQ ID NO: 547490 - DNA, 1060 bp, Homo sapiens
agcagctggcaggagggcaaacccaacaacctgtaggtctctcacaaacatgctgtattacagggaaatccctgacacgtgcgaatgtctgtacttcccctgggattccctcttactagaaggagcacaactttaagtagggattttaaaataccctgagcagtcaagagagagacaagaagaaagagggggaaaagtttatacaatattttagtgtttgtaattttcttcctgctttttgaacgcagggccccacatttacaatttgcattgggccccacaaatcacgtagccaactctgttacaaggaagtgcttctctataatttctaaaaaagaataaatacagaagaaacaggctgctgcaaccacccccaaggctataaacgatattaattttcacccctgatcatttccattctagattccccttgctctcaggcaaagttgcagccagtctagtttgcttgcctgattggggaacacaccttcaaacctgagtggcatgtgctcttgattgccttggctttcycatgctctggttgctgcaattgcctattcaataagcatggaagcctggagaagtgccccagtgacttccccaagtttcagatatatttctctttgcccacattacataaaagcaatcctggctcctcataataatcagggtcaattactcctgtcaatgtagtaattcatttactacaatatagtagttcatttatctgttggttcatagtcaagactcaggttcagtagagaaaacattttctttcagtcccaaatcagcacattcagtacagcagagcccaaaatgcagaaacagaaataccaattttgcaagctggtcgccgtattagtttgctagggctgtcataacaatgtgccacagaccacatggattaaacagtagatatttattttcttatgagtttgaagatcagatgtttgagatcaagggatcccaggtttggtttattctggggcctctctccctggcatgcagagggctgttttgtcccttctgtgtcttcacatggtcttccctctgtacatgt

SEQ ID NO: 547491 - DNA, 1060 bp, Homo sapiens
agcagctggcaggagggcaaacccaacaacctgtaggtctctcacaaacatgctgtattacagggaaatccctgacacgtgcgaatgtctgtacttcccctgggattccctcttactagaaggagcacaactttaagtagggattttaaaataccctgagcagtcaagagagagacaagaagaaagagggggaaaagtttatacaatattttagtgtttgtaattttcttcctgctttttgaacgcagggccccacatttacaatttgcattgggccccacaaatcacgtagccaactctgttacaaggaagtgcttctctataatttctaaaaaagaataaatacagaagaaacaggctgctgcaaccacccccaaggctataaacgatattaattttcacccctgatcatttccattctagattccccttgctctcaggcaaagttgcagccagtctagtttgcttgcctgattggggaacacaccttcaaacctgagtggcatgtgctcttgattgccttggctttcccatgctctggttgctgcaattgcctaytcaataagcatggaagcctggagaagtgccccagtgacttccccaagtttcagatatatttctctttgcccacattacataaaagcaatcctggctcctcataataatcagggtcaattactcctgtcaatgtagtaattcatttactacaatatagtagttcatttatctgttggttcatagtcaagactcaggttcagtagagaaaacattttctttcagtcccaaatcagcacattcagtacagcagagcccaaaatgcagaaacagaaataccaattttgcaagctggtcgccgtattagtttgctagggctgtcataacaatgtgccacagaccacatggattaaacagtagatatttattttcttatgagtttgaagatcagatgtttgagatcaagggatcccaggtttggtttattctggggcctctctccctggcatgcagagggctgttttgtcccttctgtgtcttcacatggtcttccctctgtacatgt

SEQ ID NO: 547492 - DNA, 519 bp, Homo sapiens
aattaacctttattgtgctaataagatattgggtatgtgtgttgctgaaaaaaagtccttcctcctaggttttatggttgatggatagtacaaattcatccttaaattctgcccacttgatctgcatgtctttgtgtctgtccacttctcttcactgtgcctccactacaatgctgccactttgtcacttatctggactcagatggagcctccggaggactcaagatctgtgctctcaggcctgtttccaatttattttccacatcacaccagagtagtctttgggaaaagcaaatctgatcctatcycttcccttccccaagcccctttctattagaataaaggaaaaccctcatgagtcaagggtgcagagttctgtgtggcccttcacttacttgctgactattcatggagtgcctgtttgtgccctatgctgttctaggcagggcctttgcactgttggtgctcacgttgaatggtgcaggatcctctgtccacatctccagcctgactttgagc

SEQ ID NO: 547493 - DNA, 986 bp, Homo sapiens
tagaaaagcataaagacgatacaagccatctaaactgggctataaatctccgtgattttatcaagagtaaattagaaaataatgctatgtattactggaagtaaacacgcatgaaacttccttttttccattttttgttaatgatgtgtgcatactcccatgcaggttctttaaattctaggagcctgcattcccccttctgtaaattggggataacaattcagcaacaacatgctttttgaaattgtttttaaggtaatggacatgaaggtatattggtaaaaatctagcctatggtacaaatgtcagactatactcatttaggcaaacatcctaaagggtctcattctgaaccacatctgctggaacgggccttgccccatcccattttttcgctaaggtgaattcttaagtgaccaatggacaaagtggtttccatggaaagtgtggagcggcagggaccctcaggggatcagctggcacacacacctactccctgccactgttaagactgaggccttaagtgccctactgcactcctacgttggcaacagaccatgggaagaaacgtgtgtgactgctcaaatccctcccttcacagggggccaggctccgccccagctgggcactacctccttggtttgggggtgtagagctggagcagggagatcccagctaaaataacaggagatgctggggcgggaggaatgggtaggccacattscgggatccagggccaagagatgaacagcgtcaaaggcaagaagcaaagtcaacctcagagacaaaaattggcaacttggaaggggagaaattgagatctggtgaaattttttgccaagtggatgggagaaaggggttgggatgagatggggctgaagggaaagcctatagcagttgccccaaacagtagtgagggtgttagccctgccttcctggattaacaagggtctgatagatagctccacctagttattgcaggtttc

SEQ ID NO: 547494 - DNA, 551 bp, Homo sapiens
tccctcctataagaccccttccaccttttattattctaagcgagcatgggttggagtttatccattggaaccaagaaagtgctggttatcacaaactgtagacttcacaaggccaggattctgtcttgccgttttttgtgtatcactgatggtttctatgacaggtggcctcaaaaytggtttttgaagagatacctgtcggccaggggtggtagctcatgcctgtaatcccagcattttgggaggctgaggcaggaggatcgcttgagcctgggagtttgagacaagcctgggcaacatggggcaaaaccccatctctacaaaaaatacaaaaattggcttggcatggtggcacgagcctgtgatcccagctacttgggaggctggtgtaggaggattgagcccgggaggttgaggccgcagtgagctgtgatctgcccccactccattccagcctggatgacagagtaagaccctatctcagaaaagatatatatctatctatatctatatcgatatctatatctatatctatataaattctttttttg

SEQ ID NO: 547495 - DNA, 562 bp, Homo sapiens
ggtgcagcacaccaacatggcacatgtatacatatgtaacaaacctgcacrttgtgcacatgtaccctagaacttaaagtataataataattaaaaagagaaaaaaaatacaccccaaaaaagataagtgcagtatgatctctgatagcaaaagaaaattgaaattacccaaatatctaataggaaatgatcgacaaaactctaatatagaactttaatgaagtatttgatatttttaatgtcaactacaaaaattttatagtaatgtgggaaaatacttgattctatattaagtagaaaattcaatattcaatttgtacaataatatatttatgccttaattatttttaagtatatagtgagaagacctgtaggaaatataccaaaatatccaacggtgtaaatatctggatggcaagaatgtttcttttcctctcttctccatattttccaaatcgtctatattatgtctggagagtgcaatatagtcaggtgctcctgacagcctggattcagacccccagcctcatactaatgagataatgtatgcatgcaccaagca

SEQ ID NO: 547496 - DNA, 665 bp, Homo sapiens
ttgctctgaaacagtggttctatcctttgtccttattctctcaccatcatgccctcttcctgaaccaccaaaggcacaacagcacttacacatcccaactgccacttacacacagacgcagaccccaaatctgtctctccagacctgcagtttttttctgagctctcctgctggaaaacatcagctagaagtcttttagtcatctcaaacataaaagctgaaaaatcaaactcaatgatccccaattcactcttctctttctgtgctgtcttggtggaatgataccatcaaaaccagaaccctgaagtcacatagactcccacttcttttcttatgccaactgagttggtcaccaggtcccaagaatgcctccttgttgacatctctaagatttgccttttatcccsactgccacttccttagctcaaaccccaaacatcatttgcctgaaattctataataatcttacatctggtgctttctgtctccaaccttctactactctactgctgccagaattacctttacaaaacatcaattagactatgtcaattccttgcttaaatcttcatatccagagtgtaccacacactctcacatgactccttacatggcccttcctataccttgtcaccaaatttgaaacattcaggctgctctatcct

SEQ ID NO: 547497 - DNA, 534 bp, Homo sapiens
ggaacactggctttgtaacgctttgcaaaggtctagaaagtcattgtaggctccttggagtgggtccaatgtgactgtggtccagtagatttgtttttttacttagaaataatttttctagcaaagagatagaaattrggtgctcttttttttgctttaagatagagatcaaatataataaaacggtaaatcctacagcacagacagaaatagccatattagagccagacgcagtggctcacgcctgtaatctcagtactttgagaggctgaggtgggcagattgcttgaggtccagagttggagaccagcctggccaacatggtgaaaccttgtctctactaaaaatacaaaaattaaccgggcatagcggtgtatgcctgtaatcccagctactcgggaggctgaggcaggagaatcgcttgaacctgggaggcggaggttgcagtaagctgagatggcgccactgcacacttgcctgggtgacagagcaagactccatctcaaaaagaaaaaaaagaaatagccatatcac

SEQ ID NO: 547498 - DNA, 914 bp, Homo sapiens
tgctccccgcctataaatttccgctttgcccatgctgtgttcacagttgagtccaatctctttcctccactgcaagaccctgttgcagtggccccgtgcctatctcaatggtcttaaataaggtcttctttaatatgctttagcaaatatcactgaataattttttctttaatacaacttccaagttttttacatattacagctaaaactgtaattcctttctattaatagttcagtattgtattttctgtgtgaaaagkctttagaagttattccgcatgtgtagggggtttccagcactaagattgatcatagattgggtaagattgacataatagagaaactgtatttcctatgcaggaaatgtttttgaccagaaaaaatagtatttaatcaggtggaaattccgttctgatttccccttcttttaataatcatcttctttttttttttttttttgaggtggagtctcactctgttttgcacaggttggagtgcagtagcatgattttggctaactgcaaactccgcctcccagggtcaagtgattctcctgcctcaactttctgagtagcaggactataggcacaggcctggctaatttttgtatttgtagtagaggtggggtttcgccatgctggccaggctggtcacgaacccctgaccttaagtgatccacctgcctgagcctcccaaagtgctgggattacaggcgtgagccactgtgcctggccccttcttttagtcttctattttataatgacaacaacaaatttagagatggagaacatggatatgaaagtgatgtgtcactgagtctttttacttactgcatgaacaagagtaatattttttcagttttattgaggtataattgacaaatagaaattgtatttaaggtatacaactcgatg

SEQ ID NO: 547499 - DNA, 914 bp, Homo sapiens
tgctccccgcctataaatttccgctttgcccatgctgtgttcacagttgagtccaatctctttcctccactgcaagaccctgttgcagtggccccgtgcctatctcaatggtcttaaataaggtcttctttaatatgctttagcaaatatcactgaataattttttctttaatacaacttccaagttttttacatattacagctaaaactgtaattcctttctattaatagttcagtattgtattttctgtgtgaaaagtctttagaagttattccgcatgtgtagggggtttccagcactaagattgatcatagattgggtaagattgacataatagagaaactgtatttcctatgcaggaaatgtttttgaccagaaaaaatagtatttaatcaggtggaaattccgttctgatttccccttcttttaataatcatcttctttttttttttttttttgaggtggagtctcactctgttttgcacaggttggagtgcagtagcatgattttggctaactgcaaactccgcctcccagggtcaagtgattctcctgcctcaacttyctgagtagcaggactataggcacaggcctggctaatttttgtatttgtagtagaggtggggtttcgccatgctggccaggctggtcacgaacccctgaccttaagtgatccacctgcctgagcctcccaaagtgctgggattacaggcgtgagccactgtgcctggccccttcttttagtcttctattttataatgacaacaacaaatttagagatggagaacatggatatgaaagtgatgtgtcactgagtctttttacttactgcatgaacaagagtaatattttttcagttttattgaggtataattgacaaatagaaattgtatttaaggtatacaactcgatg

SEQ ID NO: 547500 - DNA, 553 bp, Homo sapiens
aagtctttttgtttccttaacaaatgttaagctaatgttttgacagtgattttcttgtatgtcaggaaccaatcaaacaggcaaatacaagaaaaacaaaaaggaaaacaagtaatcattgtccagcaaaatatgtctctaggccatgcagactggctttgtgctgggttctttaaagccggcacaaagtgtgtgttcactcttgcactgagtgaagttcaagttcactcttgcacagagcttgcactgaggggagggatcggccaaggtgaaagtgtagggtcttcttatgacatttgtcagcatgtggcttaacctatgaatacatgtgactttccagactctcccatgtacgtgaatgattttgtrtgtctttttttgaaatactcttctccaccttttcttactgtgctgaaggtgatctactatatgcgtaaactttaatttttgccctaagcatctgtggtttgttaagtctccttgcagagtttcttaataatgtccattccttatctgttctgtattcaagcaacacagaaaaaaaagcctttca

SEQ ID NO: 547501 - DNA, 628 bp, Homo sapiens
ctgccatatgcctctttccaatggactattcctgaggtatattccttatataaagcaacagatgcaaacaaagtgctttcctgagttctgtgtgccattctagcaatttrttggtgtcattggaacacccaatttatagcctgtcagtcagaagtacaagtagccacctgggacttgcaacagatgtctgatctgatctgagaacagtttgtgggagtgagccctttagcttttcggatctgagctgaatccaggtagacagcatcataaccgaatttttaattgcaggtggcccaggtggtgtccccagagaattggagaatttcttggtgtagagaaaaagtatatttggtcagaaggattgtgaaagtagagaatcgagtttttgtttcaccgtgcatctttgtttttttattgtttttcctctcattcttctcaccttggtaattgtttctttcattttcctgaatctctgaaaagaaagggcctggactctcagatttcttggcctttgatatttggaaggatgaactccagtctcccacagaaggctagaggtgaaggaacattcagacacataagtttccaagataaatcgtctgagaacatctccaaggtgtcttctggg

SEQ ID NO: 547502 - DNA, 547 bp, Homo sapiens
cagttaaccatgtcttgaggttaatgcttattagaatttcccttctggcccactgttactggactttaattyccattgtcaacaactataaaattggataaaatatatgaaacagtaatgtataaaaaggataatatatcatgaccaaatagtgtttatcccaggaatacaaaattggtttaatatgaaacaatgcagttcaccttattaatagagcaaaggagaaaaaccaaatgattatcttaatagaaacaaaaaagcctttgacaaaattcaacacctttcattataaaaactcttagtaaactaggaatagaagagaatatcaacctgattaagtgcatctagctaaaatcattattggtgaaaagtagtctttcccccttaagctcagaaaaaagggaagattgtctgctttcttcacttgtcttctagttgaactagaatcctagtagtgcaatagataagaagaagatatgaagaaataaaaggtatatagattggaaattaggatataaactacctttatgcagaggtgacatgttta

SEQ ID NO: 547503 - DNA, 547 bp, Homo sapiens
cagttaaccatgtcttgaggttaatgcttattagaatttcccttctggcccactgttactggactttaatttccattgtcaacaactataaaattggataaaatatatgaaacagtaatgtataaaaaggataatatatcatgaccaaatagtgtttatcccaggaatacaaaattggtttaatatgaaacaatgcagttcaccttattaatagagcaaaggagaaaaaccaaatgattatcttaatagaaacaaaaaagcctttgacaaaattcaacacctttcattataaaaactcttagtaaactaggaatagaagagaatatcaacctgattaagtgcatctagctaaaatcattattggtgaaaagtagtctttcccccttaagctcagaaaaaagggaagattgtctgctttcttcacttgtcttctagttgaactagaatccyagtagtgcaatagataagaagaagatatgaagaaataaaaggtatatagattggaaattaggatataaactacctttatgcagaggtgacatgttta

SEQ ID NO: 547504 - DNA, 547 bp, Homo sapiens
cagttaaccatgtcttgaggttaatgcttattagaatttcccttctggcccactgttactggactttaatttccattgtcaacaactataaaattggataaaatatatgaaacagtaatgtataaaaaggataatatatcatgaccaaatagtgtttatcccaggaatacaaaattggtttaatatgaaacaatgcagttcaccttattaatagagcaaaggagaaaaaccaaatgattatcttaatagaaacaaaaaagcctttgacaaaattcaacacctttcattataaaaactcttagtaaactaggaatagaagagaatatcaacctgattaagtgcatctagctaaaatcattattggtgaaaagtagtctttcccccttaagctcagaaaaaagggaagattgtctgctttcttcacttgtcttctagttgaactagaatcctagtagtgcaatagataagaagaagatatgaagaaataaaaggtatatagattggaaattaggatataarctacctttatgcagaggtgacatgttta

SEQ ID NO: 547505 - DNA, 546 bp, Homo sapiens
caaggtgcgaaaacaaaaaatccaactacctggtgatactggggaatgatcaaaggcagaaagattctggagatgacttttttgcttggaagaagggaatacattgggtgattttatttttaggtttcttttgtgtgtgtgtgagatggagtctcactctgtcacccaggctggagtgcaatggcacaatcttggctcactgcaacctctacctcctgggttcaagcaattcctgtgcctcagcctcccgagtacctgggattacaggcatgcaccactacacccagctagttttcgtatttttagtagagatggggtttcactgtgttggccaggctagtttcgaactcctgacctcaggtgatccgcctacctcagcctcccaaagtctgagattacaggcatgagccactgcacctggccatttcttggtattttctaacatatttagaaggcattcaagggtgaacaagtgatcctatgtggttgcamagtttctacattttatgtgaaggattactctattaattttccactattgtaggt

SEQ ID NO: 547506 - DNA, 553 bp, Homo sapiens
aggcgacaaagagtcagagtcagtcacagacagaggagaggttcgacacagtcagtgtgactccaaagaccacgtcctctctgcctccgacaacaccattctgcctatacacaagccatgatttatggcaataccawccttgtcaccaataaagagagagggggaaacagggcagttaacatgtgctgggaaaacccaaaagataattctttaagaaccaggagcatatctcttcccccacaaacgctctcttgattgggctagtcaggtggacaaaagaaaacatagaaaaatgggtggccacaggatggggcaagaatggagggagataatcacctgatagagaggccctggttgagatttctgcagagcttatttccagggcaaatcgtgaaggcaagctggctgtatgcagccaataacctttcaaagctgactgtctagcgtttctgtctcagggagccaatagagaaacacaaaagcaggccaactgtttattttgaatgtgataatacctgtacttaaccaatggctttaaattattttaaaaata

SEQ ID NO: 547507 - DNA, 553 bp, Homo sapiens
aggcgacaaagagtcagagtcagtcacagacagaggagaggttcgacacagtcagtgtgactccaaagaccacgtcctctctgcctccgacaacaccattctgcctatacacaagccatgatttatggcaataccatccttgtcaccaataaagagagagggggaaacagggcagttaacatgtgctgggaaaacccaaaagataattctttaagaaccaggagcatatctcttcccccacaaacgctctcttgattgggctagtcaggtggacaaaagaaaacatagaaaaatgggtggccacaggatggggcaagaatggagggagataatcacctgatagagaggccctggttgagatttctgcagagcttatttccagggcaaatcgtgaaggcaagctggctgtatgcagccaataacctttmaaagctgactgtctagcgtttctgtctcagggagccaatagagaaacacaaaagcaggccaactgtttattttgaatgtgataatacctgtacttaaccaatggctttaaattattttaaaaata

SEQ ID NO: 547508 - DNA, 1368 bp, Homo sapiens
  misc_feature 1224, 1234, 1258, 1261, 1263, 1267, 1268, 1269, 1270, 1271,1272, 1273, 1274, 1275, 1276, 1277, 1278, 1279, 1280, 1281,1282, 1283, 1284, 1285, 1286, 1287, 1288, 1289, 1290, 1291,1292, 1293, 1294, 1295, 1296, 1297, 1298, 1299, 1300: n = A,T,C or G
  misc_feature 1301, 1302, 1303, 1304, 1305, 1306, 1307, 1308, 1309, 1310,1311, 1312, 1313, 1314, 1315, 1316, 1317, 1318, 1319, 1320,1321, 1322, 1323, 1324, 1325, 1326, 1327, 1328, 1329, 1330,1331, 1332, 1333, 1334, 1335, 1336, 1337, 1338, 1339: n = A,T,C or G
  misc_feature 1340, 1341, 1342, 1343, 1344, 1345, 1346, 1347, 1348, 1349,1350, 1351, 1352, 1353, 1354, 1355, 1356, 1357, 1358, 1359,1360, 1361, 1362, 1363, 1364, 1365, 1366: n = A,T,C or G
actcttgagattcaagggtaggctttccattttctagagcctagtatatatatgtcaaatatcaaggtcctagtagcaactttttggggtaacaaatctgttctatatcttacttgtggtggtaattacatgtttggacatatttgtcaaaacatatataagtctacactacactaaaaagagtaaaattcgctataagtaagttaytaccttaaaattaggaaaataaacataatatggagtaggaaaaaagtgacacatacaataagaaaactttttagatgtatataatagaacatattctttttaaatgcataaacaaataataacagaacaaaaatctacaagagacagatgaacgccagtttcagcatagtcaatacttccagggagcagaggagagtggaagtatttggctctatctatagtgatttattttatttttaagaaaagagggatctaaagcaaacatgacaaaatttgaacatctgtttacttttgatagtaggtacaaaagtgtcatattattttctgatctttctgtatattaaaaaaaatttttttgagacagggtctggctctgttacccaggcgggagtgcagtggcgtgatctcggctcactgcaacctctgcctcccaggctcaagcaatcctcccacctcagcctcctaagtagctgcgactacaggcacccaccaccccacccagctaatttttgtatttttagtagagattgggttccaccatgttggccagtctgatcttgaactcctgagctcaagtgatctgcccaccttggcctcccaaagtgctgggatgacaggtgtgagccaccatgcctggcctgtatattaaaattttctttataatttgttaaaaagttttaaaatcatacacacacatacacacactcacacacacggccctgaatgtccctggtcctggccctaaacaatagatttggaaatcagaggcaagtaactaagagtaaagatgaaagcaaaagaattagccattgtggtgagtcctaaggttgcagtggggctgggattttagcctcctgtccagagaagtggcctggaagtggcagatcttatagagtcccagcagatctgagaactcctgggagaatttccccatcctgcagggtacagaggcagccaggtgcttcccatggctcaaaagggcatggaaggagtgagtgacgtcagatctgagaggtnaagggcccanaattggctgtttctgctccttggngcngntccnnnnnnnnnnnnnnnnnnnnnnnnnnnnnnnnnnnnnnnnnnnnnnnnnnnnnnnnnnnnnnnnnnnnnnnnnnnnnnnnnnnnnnnnnnnnnnnnnnnnac

SEQ ID NO: 547509 - DNA, 611 bp, Homo sapiens
gtggttctcaagtgacagtggtcaaaccaacacactgatttggattctaagatttattttttttggtctgggggccctacctcagcaaaaggaacaatagttacaacaattatgacagcaaaaagtttgagaccagcttggccaacaaagtgaaatcccatctctactaaaaatacaaaaatcagctgggcatggtgggaagtgcctgtagtcccagctacttgggaggctgaagcaggagaattgcttgaacccgggaggcgaaagttgcagtgagctgagatcacaccactgccctccagccagggtgaaagagcaagactctttctcaaaaaaaaaaaaaaaattgtgattttttattattttgtttacagccaagctccttaattttggtattcaaagtgcttcatgattttactctgaacrccctattccagccttaattctcacttctcacttagtataacttgtatcttcatcaaactgcacatttgtcaacagaatataaaataaaactccgaaaaacccctgcactcttgctgatttctaaacatgcttcattttcccaagtttttcttcccctgaactctgcctgtcaaaatattacccgg

SEQ ID NO: 547510 - DNA, 658 bp, Homo sapiens
caagtgctttagatcaaatgtggggattacgttccaagggatgggttatgagtacatacctcaaaagagaaatccaaacacagaaaaacagccccagttaatactctggacacataagtacacttattccccttcttcacatgcacccgggagtgtatacaattgcatagttgactttttttcccggaaaaaaatataaagaaaaaggaaaattggcccaggataggtcttccggtttaaagctcttagaaatggctctggccagagcataggctgttcagacttgtgctttgtgcaaaatgcgaaggagctccccctactgtgtccgcatccccactcccagcccctagagaacagggaagggtcagggaaagggagaaacctaaagacagatcagctcattgggagtcatctgtgctctgtggttatagttcactaaaatatatttctctaactacctttttataaattgcccctatatgtttcaacatcagtcctaatatcaaaaatatctcttcttagaaagtatttttaattattttaataaactaaccacagattaaggtcagctatggcttaacaaaagaagccgggatgttaagttcattctccaaaagtagagcaaagggagaaagaaccacttaagtaggaggraaaa

SEQ ID NO: 547511 - DNA, 1470 bp, Homo sapiens
ttttttttttttttgagacagagtctygctctgtcacccaggctggagtgcagtggcacaatcttggctcactgcaagctctgcctcccgggttcacgccattctcctgcctcagcctccccagtagctgggactacaggcacctgccaccacgcctggctaattttttctatttttagtagagacggggtttcactgtgttagccagcatggcctcgatatcctgacattgtgatctgcccgcctcagcctcccaaagtgctgggattacaggtgtgagccactgcctccagccatgggacatcttaatatccttctggtgccctctaagaaaaatcctcaggtgtgaatcattaggatacactgcctgatgcatccttccatgtcccagagctgcctggctcagaactcagggggttcaggaagttaaattgtggaaatctcttggatttgcacctggatcccagcagacctgttatttccctacctccatcaagaggattataaagtgttgacttttactgacacagcaagaattactttcacagagaaacagatgagaggagatacaagctctggaggtgtggtaagttcaggggctagagtgtcaaatctggggtctgggctggggagcctgagctctgaggccttggaccactggcctgaatggaatctgtttagggtgggcagcttcgggtccttccataacctgagaagagagagttacttaaggcctttactgatcctccttcttataaaataatgagtttgggtgggtatttgtgatggactgttatcacaacattaccttttttgggctggactattccttgatgatccaggaacatggtcatctcatgattaaaggcaacgatgttcctcttcaatcctcaaccaactggtcaaatatgagaaaaacaatgtatctatggtcctccaggttcatctgcggtggctgctcgtagcataggctgaatttgataggtgtcctgaatcctactgtgggacttctgcttgtgggacagaaacaggcctacagtatggactctgcctcaaccttgggtctagctgctttgatgaaacctccccttcgatgacatattctgactagtttgaggagggacagaggggagccaccctccatcttatcctaggctaactcaagtcagaaggctgtcagctatgtaatagctgatcattgttaccacttattcaggtcttaggatttcttcatgagctcctttaacctcaccgccactcaatgacagaagttctcttatttccctcaggacaagaacacaggacatagaagagttaataaatttgcccaccgtcttacaattaataagtagtaaagccaggatttaaactcagacagtttgggtctagagcacacacttctaaccctgtgctgcctacctaggataaaatatataaaatataccaacctgtcccaacctttgaaatgcc

SEQ ID NO: 547512 - DNA, 1470 bp, Homo sapiens
ttttttttttttttgagacagagtctcgctctgtcacccaggctggagtgcagtggcacaatcttggctcactgcaagctctgcctcccgggttcacgccattctcctgcctcagcctcccmagtagctgggactacaggcacctgccaccacgcctggctaattttttctatttttagtagagacggggtttcactgtgttagccagcatggcctcgatatcctgacattgtgatctgcccgcctcagcctcccaaagtgctgggattacaggtgtgagccactgcctccagccatgggacatcttaatatccttctggtgccctctaagaaaaatcctcaggtgtgaatcattaggatacactgcctgatgcatccttccatgtcccagagctgcctggctcagaactcagggggttcaggaagttaaattgtggaaatctcttggatttgcacctggatcccagcagacctgttatttccctacctccatcaagaggattataaagtgttgacttttactgacacagcaagaattactttcacagagaaacagatgagaggagatacaagctctggaggtgtggtaagttcaggggctagagtgtcaaatctggggtctgggctggggagcctgagctctgaggccttggaccactggcctgaatggaatctgtttagggtgggcagcttcgggtccttccataacctgagaagagagagttacttaaggcctttactgatcctccttcttataaaataatgagtttgggtgggtatttgtgatggactgttatcacaacattaccttttttgggctggactattccttgatgatccaggaacatggtcatctcatgattaaaggcaacgatgttcctcttcaatcctcaaccaactggtcaaatatgagaaaaacaatgtatctatggtcctccaggttcatctgcggtggctgctcgtagcataggctgaatttgataggtgtcctgaatcctactgtgggacttctgcttgtgggacagaaacaggcctacagtatggactctgcctcaaccttgggtctagctgctttgatgaaacctccccttcgatgacatattctgactagtttgaggagggacagaggggagccaccctccatcttatcctaggctaactcaagtcagaaggctgtcagctatgtaatagctgatcattgttaccacttattcaggtcttaggatttcttcatgagctcctttaacctcaccgccactcaatgacagaagttctcttatttccctcaggacaagaacacaggacatagaagagttaataaatttgcccaccgtcttacaattaataagtagtaaagccaggatttaaactcagacagtttgggtctagagcacacacttctaaccctgtgctgcctacctaggataaaatatataaaatataccaacctgtcccaacctttgaaatgcc

SEQ ID NO: 547513 - DNA, 1470 bp, Homo sapiens
ttttttttttttttgagacagagtctcgctctgtcacccaggctggagtgcagtggcacaatcttggctcactgcaagctctgcctcccgggttcacgccattctcctgcctcagcctccccagtagctgggactacaggcacctgccaccacgcctggctaattttttctatttttagtagagacggggtttcactgtgttagccagsatggcctcgatatcctgacattgtgatctgcccgcctcagcctcccaaagtgctgggattacaggtgtgagccactgcctccagccatgggacatcttaatatccttctggtgccctctaagaaaaatcctcaggtgtgaatcattaggatacactgcctgatgcatccttccatgtcccagagctgcctggctcagaactcagggggttcaggaagttaaattgtggaaatctcttggatttgcacctggatcccagcagacctgttatttccctacctccatcaagaggattataaagtgttgacttttactgacacagcaagaattactttcacagagaaacagatgagaggagatacaagctctggaggtgtggtaagttcaggggctagagtgtcaaatctggggtctgggctggggagcctgagctctgaggccttggaccactggcctgaatggaatctgtttagggtgggcagcttcgggtccttccataacctgagaagagagagttacttaaggcctttactgatcctccttcttataaaataatgagtttgggtgggtatttgtgatggactgttatcacaacattaccttttttgggctggactattccttgatgatccaggaacatggtcatctcatgattaaaggcaacgatgttcctcttcaatcctcaaccaactggtcaaatatgagaaaaacaatgtatctatggtcctccaggttcatctgcggtggctgctcgtagcataggctgaatttgataggtgtcctgaatcctactgtgggacttctgcttgtgggacagaaacaggcctacagtatggactctgcctcaaccttgggtctagctgctttgatgaaacctccccttcgatgacatattctgactagtttgaggagggacagaggggagccaccctccatcttatcctaggctaactcaagtcagaaggctgtcagctatgtaatagctgatcattgttaccacttattcaggtcttaggatttcttcatgagctcctttaacctcaccgccactcaatgacagaagttctcttatttccctcaggacaagaacacaggacatagaagagttaataaatttgcccaccgtcttacaattaataagtagtaaagccaggatttaaactcagacagtttgggtctagagcacacacttctaaccctgtgctgcctacctaggataaaatatataaaatataccaacctgtcccaacctttgaaatgcc

SEQ ID NO: 547514 - DNA, 525 bp, Homo sapiens
aggcaattcacccacctcgacctcccaaagtgctgggattacaggcrtgagccaccatgcccggcctaggatttttctttaattggcaagattttgtaatagacagctaagtgtgagatgcagagggaaaaggcttagatgtgaaaccgtacctaggagaggaagaccgataagatgcccacatataacctatgttaagactatggaacaccatttggggcccaagttcaggaaaataatcctgagataaaagtggcctgaaagactctatagactaagaagggcttaacatgagagaaagctgatgctgtttgtaaaaactgctgtgagagccgtggaaagctggaggttgccgccgagaatgtctcctgaaccagaccagtcccatgggaagtccaaattacaaccagatagtacaaacatggaaagcggagacacagaaaccgtccgttctttaggaatgagagttttagagttatgttttagaatgagtgggcccgcagacagtggcttggcaaatttgca

SEQ ID NO: 547515 - DNA, 542 bp, Homo sapiens
ttgtgtttgtgacggtcatcacttaaagaatcctgtctaaacactcacccacaatcagctgacagtgactctttggctggccccactgccatcaaggcagaaagtgatgcttaggacagcaacgagtgtttactgatattgttcctatttctatttggagtaaggcattctgggagcaataagagaaagtattattgttgatcagaactggatgcccatgtcaaattttgagcatgtttatctcatcaacaagtccatagtcttctcctaagtactcagtaatggagacattcgcaattggcaacagggcaattctccattgtaacaacgttcaggtttctctgtcacactaaaaaggagagtgactaaaattaaatctctcctcccttactttacttctaaaaagactcctagggtcatgggmgggggggggtggtctttctaatataaaggctagacttacacaagtatatttttaaacgtccttattgatattatcttaatatcaaatggattatactcatgcttttgaaattggtaat

SEQ ID NO: 547516 - DNA, 612 bp, Homo sapiens
tcaaagccgtcccgggccacatgcaccctgtgggggacatgggctggagaagcttgctctagaggcttgctcttaaccaacataatatactagaaaccctgtgtaataatattaatagcaatggcaaaaatgacgacaatcctttactttcacatgatttgttatgtacaaagcatttcctcatacatgttaccacatgttcaagtggtgggactgagaaaggacacagcaactcttaacctccccggaaagatgagaaatctaaagattagacaaagatgagcatgatcaagacactcctgataactggtgtgttaccaacaaaatgttcartctcagattcagatacatctacccgggaattaaagttctctccattttactgagacttcactcatttcctgggggcaacagctcatggtggcatgagaggagtccttccaatgtctactccttggatgttcctaacattagtcacaaccgtcatatcatgcaagctcccaaaagctctaagaggcagaggtgggaggtcacttgaggccaggaggtcgaggctgcagtgagctatgactgcaccactgtactccagcctgggtgacagagcaagaccca

SEQ ID NO: 547517 - DNA, 651 bp, Homo sapiens
ggctcttaaaaggcaagactgggaggcagaggtgggaggatcacttgaggccaggagatcgaggctgcagtgagctatgatcgcaccactgtcctccagcctgggtgacagagcaagaccctaactcaaaaaacaaaaaaacaggcaaggctgatgcaaaagctcaggcaaacactgcatgggcactcgctaacctactgacctaccgaaggtcaaacagttaaaaagcatatgtaacccaaagaggtggggtgtgtgtgtgtgtatgtgtgtgtgtgcgcgtgtgtttgtgcgtttgttgttttttttttttgagacagagttttgctcttgttgcccaggctggagtggaatggcacaatctcggctcactgcaacttccgcctcccgggttcaagcaattctcctgcctcagcctcccgagtagctgggatgatagagcatgcaccaccacacctggctaattttgtatttttattagagatgggatttctccatgttggtcaggctggttttgaacccccaaactcaggtgattagccctcctcagcctcccaaagtgctgacattacaggcgtgagccaccacgcccggccaagarctgtgttttaagagcaattttctttacagaagataagcctctgtttcatc

SEQ ID NO: 547518 - DNA, 563 bp, Homo sapiens
gcggtggctcatgcctgtaatcccagcactttgggaggctgaggcagggggaccatgacgtcaggagttcaagaccagcctgaccaacatggtgaaaccctgtctctaytaaaaatacaaaaattagcagggcctggtagcgtgtgcctgtaatcccagctacttgggaggctgagacaggagaatcacttgaacctgggaggcggaggctgcagtgagccgagatcgcgccactgtactccagcctggatggcagagcgagactgtctcaaaaagaaaaaaaaaaaaaaaaaaacctaagtagataaatctttttttttaaggacaatgaaatcttctaggtatttaaaattttaaggtggctgggtgcagtggctcatgcctgtaatctcagtcttttgggaggccaaggcaagaggactgcttcagcccaggagttcaagacctgcctgggaaacatggcaaaactctggtctctacaaaaaaaatacaaaaattagccaggtgttgtagtgcattcctgtagtcccagctacttgggaggttgaggtgggaggactgcc

SEQ ID NO: 547519 - DNA, 880 bp, Homo sapiens
attacccagtcttaggtatttctttaagcaacacaaaatggactaacacgcccatctaagagaagtgaaagaagttatcaatagaaagaagttgaagaagataattagatgaaaaaaataaaaaaacagagaagaagatatatgagccttttaattgaatgggcaccaaaaccattccataaagaaaattaataaaacctaaacataatgtgatggaaactctgaacgtcacagataaaggaacaaggatcttattgggaagactctaacttctcattcagcaataattaatgctagaagaaagagagactattttaaacctctagtggaatatgagcatagagttatattactagccaaattttcatgattaagagagaataaaaggattgttttaatacacaaagcctcagaatgactgctttccataaactatgaaagaagatcttaagtatacactccaactttgtamaaatggatttcaatacaaataaagacatgaatttaaaaaaattagtgtaccaagaaattattaaatgtgttatcaaaacaattattaattcttctaaaaatgagaatttatcattggtattcagaatatgctcaatctgaaagggaaagtgatataaaagtaaaataagtggaaatttgctactttttttgttctttgggaaaatcttatctagtcattgataggaaaacaaataaaataaattaaattattagattctaaaagattgtgagatatatatatccttcttgatataacaaaacaactacaataaaaagttaataaaatataaaaagtcaggaaagaaaaatcaatacagaaatatgaataataaagagtaaaagtaagatttgttggaatcaacagtga

SEQ ID NO: 547520 - DNA, 586 bp, Homo sapiens
gatattgtgataggatcaactaagtagtaatcttagaaataacaggaggagccaagatggccgaataggaacagctccagtctacagctcccagtgtgagtgacgcagaagacgggtgatttctgcatttccaactgaggtaccgggttcatctcactggggagtgccagacagcaggtgcaggacagtgggtgcagcgcactgtgcactagccaaagcagggtgaggcgatagtgcaaggggtcaaggaattccctttcctgtcaaagaaagcggtgacagacagcacctggaaaatcgggtcactcccaccctaatactgcgcttttccaacrggcttaaaaaacagcacaccaggagattatatcccacacatggctcagagggccctacgcccacgaagtctcgctcatttctagcacagcagtccgagatcgaactgcaaggcagcagcgaggctgggggagggacgtccgccattactgagttagttgtttgactaggtaaacaaagcagctgggaagcttgaactgggtggagcccaccacagttcaaggaggcctgcctgcctctgtaggctccacct

SEQ ID NO: 547521 - DNA, 656 bp, Homo sapiens
gacaattcttctcccaatgtggcccatggaagctgaaagattggacccttttggtttaatatataaattgaagtagcatattgttatggagtgaagtccacaacactggatttcagtgcagtttggaacctattggctaagtgactctgagcaagtcatgccatatctgaacctcagtttccccatctacaaaataaaggtagagattagataatctatgaagtcttaatttctaaatgtttataatcaagttttagaaaattctttggaatagtttcaataggaatgataccagttcttccttatacaaggaaggtggaattcagctatgcatctgtctgatcctggtttttttctggttggtaggctttttaatttttattccatttcagaacttgttattggtctgttcagagattcaatctcttcctggttcaatattgagaagttatatgtttccaggaatttatcaatttcttctatgttttctagcttatgcgcatatyggtgcttataacagtctctgagggttttctgtatttctgtggggtcggtggtaatgccccctttgtcatttctgattgtgtttatttaaactttctctttttttctttattagcctagctagtggtctacctatcttattaattcttcca

SEQ ID NO: 547522 - DNA, 656 bp, Homo sapiens
gacaattcttctcccaatgtggcccatggaagctgaaagattggacccttttggtttaatatataaattgaagtagcatattgttatggagtgaagtccacaacactggatttcagtgcagtttggaacctattggctaagtgactctgagcaagtcatgccatatctgaacctcagtttccccatctacaaaataaaggtagagattagataatctatgaagtcttaatttctaaatgtttataatcaagttttagaaaattctttggaatagtttcaataggaatgataccagttcttccttatacaaggaaggtggaattcagctatgcatctgtctgatcctggtttttttctggttggtaggctttttaatttttattccatttcagaacttgttattggtctgttcagagattcaatctcttcctggttcaatattgagaagttatatgtttccaggaatttatcaatttcttctatgttttctagcttatgcgcatatcggtgcttataacagtctctgagggttttctgtatttctgtggggtcggtggtaatgccccctttgtcatttctgattgtgtttatttaaactttctctttttttctttattagcctagctagtggtctacctatcttattaattcwtcca

SEQ ID NO: 547523 - DNA, 654 bp, Homo sapiens
gacaaacagagagccaagtcatgagtgacccattcacaattgccacaaagagaataaaatacctgggaatacaacttacaagggatgtgaaggacctcttcaggsagaactataaatcactgcttgaggaaataagagaggacacaaacaaatggaaaaacattccatgttcacggataggaagaatcaatatcgtgaaaacggccatactgcccaaaataatttatagattcagtgctgtcctcatcaaactaccattgactttcttcacagaattagaaaaaaactgctttaaatttcatatggaactaaaaaagagctcatatagccaagacaattctaagtaaaaagaataaagatggaggcatcacgctacctgacttctatctatgctacaaggctacagtagtaaccaaaacagtttcttaaactataaaataagcagagtgttttcttacctgtaaaattaatattatcaacctgaggggaataacagaatcattttgagtagtgttattaatggttgttatttctccatagggtatatcagaacttctgaatgaatgggtattggagcgtgtgttttatgaaaactccccccaaatatttcacctctcctcaaacttccacctccagcctaaacagtgtttaata

SEQ ID NO: 547524 - DNA, 731 bp, Homo sapiens
ttgcaaaggctgctccacagaacagagcatccgccattgctggaggaatggagcccagttgctttctgtgtgtagatgctgcaataagtgctttctatctcttaccttagtttgtttttcctaaaaccttcaggcacacaaagatggcacagcttgaaagtaatgagccagggttccaattcacagcccatcaataagccaccrcccttcccacacaaatgacagcatgaagatctgtgaacagtacaagaggacctatggtcatccagaataaacacaacagaacattacccagagttccttttagggttggtgtggccaaatggctcagcagaatgtaaaagatggtgttctatgtatctttcaggaagtgtcttcaagggaggggttgtgccttgtttgatatctttctacttcctacatgctagaatgtggatgtgatggctggagcttgagcagtcaacgtggcccatgaggcaataccctaagaatggcagaacagaaagagaaaagctacttgagtcctgaaaacttgctggagcagagctgccttaccagctctgtgctgctcatctctgcacttcactatgagaaagaaagaaacttccatctggttttagcgtttgtcatttcagttttctgtgacaagtagagtaatctaactgaaccgatgtgttgtgcgaatacagcagtgtgctgtattcattctactgacggtggtcatttaggtt

SEQ ID NO: 547525 - DNA, 731 bp, Homo sapiens
ttgcaaaggctgctccacagaacagagcatccgccattgctggaggaatggagcccagttgctttctgtgtgtagatgctgcaataagtgctttctatctcttaccttagtttgtttttcctaaaaccttcaggcacacaaagatggcacagcttgaaagtaatgagccagggttccaattcacagcccatcaataagccaccgcccttcccacacaaatgacagcatgaagatctgtgaacagtacaagaggacctatggtcatccagaataaacacaacagaacattacccagagttccttttagggttggtgtggccaaatggctcagcagaatgtaaaagatggtgttctatgtatctttcaggaagtgtcttcaagggaggggttgtgccttgtttgatatctttctacttcctacatgctagaatgtggatgtgatggctggagcttgagcagtcaacgtggcccatgaggcaataccctaagaatggcagaacagaaagagaaaagctacttgagtcctgaaaacttgctggagcagagctgccttaccagctctgtgctgctcatctctgcacttcactatgagaaagaaagaaacttccatctggttttagcgtttgtcatttcagttttctgtgacaagyagagtaatctaactgaaccgatgtgttgtgcgaatacagcagtgtgctgtattcattctactgacggtggtcatttaggtt

SEQ ID NO: 547526 - DNA, 960 bp, Homo sapiens
agaaaatgtgcaatcccaggccaataagcaaatctttgcccaaaataaacatatttcttctgctacatctcactgcggcccttagaaaaaccgtaccaatgacttatcttactggaggtgttaataccaccaacatattttattccttccttcaatttttccagtttctttaccagcagtatctgaacttttcatttaggaaacaccattcttcatggtgcttatgaaaacaggaggtgcctgaaggaggctgagaagaggttygcagcttctactgtccttgataggggaggggaggggagactgcatgccatctgatattcaattcctcaaccatactggcaatttgttttggctagaacatttaaaagtgtaatagctccactgggtttccttattccacttctcagatttcagaaaatctttataattcctgagtagttgcagtgagtgtgtagaaagacaccatcatcaacataaggattcaaaaggcaactgttgggcagtaggaccatcacctatgacctctgggcccccaccgtcatcataaacatccacttctgcttggccacactttttcttatttctttttccccagtaagctgccacttattgagataaaagccatacagcacacctcctaacctggtttttgatacttcatgggcctgatgcttttttttttgaaacggagtctcactgtcgcccaggctggagtgcagtggtgctatctcggctagctgcaagctccacctcctgggttcacgccattctcctgcctcagcctcccgagtagctgggactacaggcgcccaccaccacgcccggctaattttttgtatttttagtagagatggggtttcaccgtgttagccaggatggtctcaatctcctgacctcgtgatccgcccccgcttggcctcccaaagtgctgggattataggcatgagccaccacgcc

SEQ ID NO: 547527 - DNA, 960 bp, Homo sapiens
agaaaatgtgcaatcccaggccaataagcaaatctttgcccaaaataaacatatttcttctgctacatctcactgcggcccttagaaaaaccgtaccaatgacttatcttactggaggtgttaataccaccaacatattttattccttccttcaatttttccagtttctttaccagcagtatctgaacttttcatttaggaaacaccattcttcatggtgcttatgaaaacaggaggtgcctgaaggaggctgagaagaggtttgcagcttctactgtccttgataggggaggggaggggagactgcatgccatctgatattcaattcctcaaccatactggcaatttgttttggctagaacatttaaaagtgtaatagctccactgggtttccttattccacttctcagatttcagaaaatctttataattcctgagtagttgcagtgagtgtgtagaaagacaccatcatcaacataaggattcaaaaggcaactgttgggcagtaggaccatcacctatgacctctgggcccccaccgtcatcataaacatccacttctgcttggccacactttttcttatttctttttccccagtaagctgccacttmttgagataaaagccatacagcacacctcctaacctggtttttgatacttcatgggcctgatgcttttttttttgaaacggagtctcactgtcgcccaggctggagtgcagtggtgctatctcggctagctgcaagctccacctcctgggttcacgccattctcctgcctcagcctcccgagtagctgggactacaggcgcccaccaccacgcccggctaattttttgtatttttagtagagatggggtttcaccgtgttagccaggatggtctcaatctcctgacctcgtgatccgcccccgcttggcctcccaaagtgctgggattataggcatgagccaccacgcc

SEQ ID NO: 547528 - DNA, 960 bp, Homo sapiens
agaaaatgtgcaatcccaggccaataagcaaatctttgcccaaaataaacatatttcttctgctacatctcactgcggcccttagaaaaaccgtaccaatgacttatcttactggaggtgttaataccaccaacatattttattccttccttcaatttttccagtttctttaccagcagtatctgaacttttcatttaggaaacaccattcttcatggtgcttatgaaaacaggaggtgcctgaaggaggctgagaagaggtttgcagcttctactgtccttgataggggaggggaggggagactgcatgccatctgatattcaattcctcaaccatactggcaatttgttttggctagaacatttaaaagtgtaatagctccactgggtttccttattccacttctcagatttcagaaaatctttataattcctgagtagttgcagtgagtgtgtagaaagacaccatcatcaacataaggattcaaaaggcaactgttgggcagtaggaccatcacctatgacctctgggcccccaccgtcatcataaacatccacttctgcttggccacactttttcttatttctttttccccagtaagctgccacttattgagataaaagccatacagcacacctcctaacctggtttttgatacttcatgggcctgatgcttttttttttgaaacggagtctcactgtcgcccaggctggagtgcagtggtgckatctcggctagctgcaagctccacctcctgggttcacgccattctcctgcctcagcctcccgagtagctgggactacaggcgcccaccaccacgcccggctaattttttgtatttttagtagagatggggtttcaccgtgttagccaggatggtctcaatctcctgacctcgtgatccgcccccgcttggcctcccaaagtgctgggattataggcatgagccaccacgcc

SEQ ID NO: 547529 - DNA, 960 bp, Homo sapiens
agaaaatgtgcaatcccaggccaataagcaaatctttgcccaaaataaacatatttcttctgctacatctcactgcggcccttagaaaaaccgtaccaatgacttatcttactggaggtgttaataccaccaacatattttattccttccttcaatttttccagtttctttaccagcagtatctgaacttttcatttaggaaacaccattcttcatggtgcttatgaaaacaggaggtgcctgaaggaggctgagaagaggtttgcagcttctactgtccttgataggggaggggaggggagactgcatgccatctgatattcaattcctcaaccatactggcaatttgttttggctagaacatttaaaagtgtaatagctccactgggtttccttattccacttctcagatttcagaaaatctttataattcctgagtagttgcagtgagtgtgtagaaagacaccatcatcaacataaggattcaaaaggcaactgttgggcagtaggaccatcacctatgacctctgggcccccaccgtcatcataaacatccacttctgcttggccacactttttcttatttctttttccccagtaagctgccacttattgagataaaagccatacagcacacctcctaacctggtttttgatacttcatgggcctgatgcttttttttttgaaacggagtctcactgtcgcccaggctggagtgcagtggtgctatctcggctagctgcaagctccacctccygggttcacgccattctcctgcctcagcctcccgagtagctgggactacaggcgcccaccaccacgcccggctaattttttgtatttttagtagagatggggtttcaccgtgttagccaggatggtctcaatctcctgacctcgtgatccgcccccgcttggcctcccaaagtgctgggattataggcatgagccaccacgcc

SEQ ID NO: 547530 - DNA, 960 bp, Homo sapiens
agaaaatgtgcaatcccaggccaataagcaaatctttgcccaaaataaacatatttcttctgctacatctcactgcggcccttagaaaaaccgtaccaatgacttatcttactggaggtgttaataccaccaacatattttattccttccttcaatttttccagtttctttaccagcagtatctgaacttttcatttaggaaacaccattcttcatggtgcttatgaaaacaggaggtgcctgaaggaggctgagaagaggtttgcagcttctactgtccttgataggggaggggaggggagactgcatgccatctgatattcaattcctcaaccatactggcaatttgttttggctagaacatttaaaagtgtaatagctccactgggtttccttattccacttctcagatttcagaaaatctttataattcctgagtagttgcagtgagtgtgtagaaagacaccatcatcaacataaggattcaaaaggcaactgttgggcagtaggaccatcacctatgacctctgggcccccaccgtcatcataaacatccacttctgcttggccacactttttcttatttctttttccccagtaagctgccacttattgagataaaagccatacagcacacctcctaacctggtttttgatacttcatgggcctgatgcttttttttttgaaacggagtctcactgtcgcccaggctggagtgcagtggtgctatctcggctagctgcaagctccacctcctgggttcacgccattctcctgcctcagcctcccgagtagctgggactacaggcgcccaccaccacgcccggctaattttttgtatttttagtagagatggggtttcaccgtgttagccaggatggtctcaatctcctgacctcgtgatccgccccygcttggcctcccaaagtgctgggattataggcatgagccaccacgcc

SEQ ID NO: 547531 - DNA, 1048 bp, Homo sapiens
atccagagtatgatgaactgatgtcaagaaagacaaattcttcaatttactttatatcaaaggtatttaaaaaacaacagagatcatgtttgggtcatattaggaagacatacttgaaaatatccagagttctgtgacactcaattaaaactaaagctaaaatttacattaaagaaattgataagattgagcatgtattgatactaaaaaaataatttttgaagcaccatggtgcttactagacatagtgtgcatactattacatcctcatacatttaaatcttggcccaactatttaagacttacatctaakgtttagagctcttcctatttgtaaataataggtgataacacattctcttaagggtagtcgtttcagcctgagaagttatgcctgtcataaatatcagaggcagtatggcaaacagtaggagcccaataaatgctgactttctcaattttttttgtctgtgaataatgaaggatagagtctgtgcttatttcatgtgcttaccctttatgactaacatgttatttggcagaatttcaacaaatgccagctaaattaaatcttgaatcaaaataatccagaactgcaaataattgccagaaaaaaatatccaaaaaagtgtaggaagaacaatacacaaaaaatagagaagaataggaatagaaaatgtcaagtattttagagcaaagaacatttgcaaaagttgcttttatttttttcaggttgactaatcaggagactagaaactatattttcattgaagacaggtttttcattaaagtgtggtatttatttgttatttttagaagtatgaagtttaatatcaaaattacaagtcagaaataaaaactgtgctgctacagtctgaaaagtgaacacttgtgccttaaattcaagcaataagttacatatagctaatcttagaacaaccagtttagaaaattaaaacttatagggtttaacaatcttgatatccttaaatgaattactcaacaacattgccatttggggggaaaaggaatagaaaacatcatagca

SEQ ID NO: 547532 - DNA, 1048 bp, Homo sapiens
atccagagtatgatgaactgatgtcaagaaagacaaattcttcaatttactttatatcaaaggtatttaaaaaacaacagagatcatgtttgggtcatattaggaagacatacttgaaaatatccagagttctgtgacactcaattaaaactaaagctaaaatttacattaaagaaattgataagattgagcatgtattgatactaaaaaaataatttttgaagcaccatggtgcttactagacatagtgtgcatactattacatcctcatacatttaaatcttggcccaactatttaagacttacatctaaggtttagagctcttcctatttgtaaataataggtgataacacattctcttaagggtagtcgtttcagcctgagaagttatgcctgtcataaatatcagaggcagtatggcaaacagtaggagcccaataaatgctgactttctcaattttttttgtctgtgaataatgaaggatagagtctgtgcttatttcatgtgcttaccctttatgactaacatgttatttggcagaatttcaacaaatgccagctaaattaaatcttgaatcaaaataatccagaactgcaaataattgccagaaaaaaatatccaaaaaagtgtaggaagaacaatacacaaaaaatagagaagaataggaatagaaaatgtcaagtattttagagcaaagaacatttgcaaaagttgcttttatttttttcaggttgactaatcaggagactagaaactatattttcattgaagacaggtttttcattaaagtgtggtatttatttgttatttttagaagtwtgaagtttaatatcaaaattacaagtcagaaataaaaactgtgctgctacagtctgaaaagtgaacacttgtgccttaaattcaagcaataagttacatatagctaatcttagaacaaccagtttagaaaattaaaacttatagggtttaacaatcttgatatccttaaatgaattactcaacaacattgccatttggggggaaaaggaatagaaaacatcatagca

SEQ ID NO: 547533 - DNA, 1048 bp, Homo sapiens
atccagagtatgatgaactgatgtcaagaaagacaaattcttcaatttactttatatcaaaggtatttaaaaaacaacagagatcatgtttgggtcatattaggaagacatacttgaaaatatccagagttctgtgacactcaattaaaactaaagctaaaatttacattaaagaaattgataagattgagcatgtattgatactaaaaaaataatttttgaagcaccatggtgcttactagacatagtgtgcatactattacatcctcatacatttaaatcttggcccaactatttaagacttacatctaaggtttagagctcttcctatttgtaaataataggtgataacacattctcttaagggtagtcgtttcagcctgagaagttatgcctgtcataaatatcagaggcagtatggcaaacagtaggagcccaataaatgctgactttctcaattttttttgtctgtgaataatgaaggatagagtctgtgcttatttcatgtgcttaccctttatgactaacatgttatttggcagaatttcaacaaatgccagctaaattaaatcttgaatcaaaataatccagaactgcaaataattgccagaaaaaaatatccaaaaaagtgtaggaagaacaatacacaaaaaatagagaagaataggaatagaaaatgtcaagtattttagagcaaagaacatttgcaaaagttgcttttatttttttcaggttgactaatcaggagactagaaactatattttcattgaagacaggtttttcattaaagtgtggtatttatttgttatttttagaagtatgaagtttaatatcaaaattacaagtcagaaataaaaactgtgctgctacagtctgaaaagtgaacacttgtgccytaaattcaagcaataagttacatatagctaatcttagaacaaccagtttagaaaattaaaacttatagggtttaacaatcttgatatccttaaatgaattactcaacaacattgccatttggggggaaaaggaatagaaaacatcatagca

SEQ ID NO: 547534 - DNA, 516 bp, Homo sapiens
cactcccgattccattcatggccttttatcctctgccctgagcccaggccgattggctgctatcaagtcaactgcctaggctctcctactggctgatttcaggttggttcagctaatgtgtcttagcttgaattccttgaaaataggctttgagatggagagttgtttgggaattcatgcataattctctcaaaagatacacttggaaggaagtaaagtaggcagtattaccaaaggagaagctgacctgcagtatgattacatctgaggactcagccatcctaaggggaactctggagctctgatgatccttcagaattgttccagtttgaattggtccaatttgaggcaagggacagacctatgtagccccacttcatccaatcattgattctgcaccagcagttaaatattcctagcagcaggggactgcgtgcctrggtttttaagagatgatctagttagagccccataaaatccactaaagagcagagggtggaagaagacataggtctg

SEQ ID NO: 547535 - DNA, 515 bp, Homo sapiens
tcctgtactttytccatacactggaaattatttcaacctgaaaacctgaaaagcccatgaaggaaagaacaaagtaggctggacgccagcgaaggggccagcctggctctctccatcttgctcctgcccatttccgcaggccgccagcattctcccatggcagagctctgggctcacagccttagagacccagggcccaaatggcaggttgtgtttcctttgttcctggacgttctggccagaagatccccatggaaggccttcgatggctctgtcttgggtgaggccgactctgtgggctgtggccagggtcggaggctccgtggtcaggagcccagccagctcccaggcagccctgctgccaccctaggctcttggtgatttgccaactgcacttgtcccccttccagggagcacctgatgcccctccctgaccctcctcagccctccctgagtggtaccattcccagcttcagaggctgacacaggacctgggcagtccaagcccagccaat

SEQ ID NO: 547536 - DNA, 877 bp, Homo sapiens
tgccaggcggcctgtgcccttgcaggttcctgactcaaggagatcttagggaaggcccagagatgatttcactttgggtgagcacatgcaaaaaggggcgtgtgcagattcttcacaagctctgcttggacactggcccaccatcccagcacttaacgcgactggcccaggtggcagaggcactggtgtccatcagggcccacaggtcgggaatgcacactgctaactgcaatttgctttgctctmattcattttagcaggggaactgctgcaaagaacatccctaaaaagaatatcatggtctggacttttttttttttttttttttttttttgagacagagtctcgctctgtcgcccaggctggagtgcagtggtgcgatctcggctcactgcaagctcctcctcctgggttcacgccattctcctgcctcagcctcccagatagctgggactacaggcaccagccaccacgcccggctaattttttgtatttttagtagagacggggtttcactgtgttagccaggatggtctcgatcttctgacctcgtgatctgcccgcctcggcctcccaaagtggaaatttttttttttaagttacagaaaccacagttgagaatttcacagtaatcaacccactggcacgtctgttatgaggtcttcatcatcccacaaacgcgttgttccgccttgatcttgtgaggcgctggccctcttcttgtggagttctcaccggctcagagggtcagtgtgagtgagccgatgtgtgccgcacacccaggatgtctacaggactgggggctggaaaattgagtgacatctcttgccctggcacctgtggcaggcagttctgggtaaccaacaggaatccctca

SEQ ID NO: 547537 - DNA, 877 bp, Homo sapiens
tgccaggcggcctgtgcccttgcaggttcctgactcaaggagatcttagggaaggcccagagatgatttcactttgggtgagcacatgcaaaaaggggcgtgtgcagattcttcacaagctctgcttggacactggcccaccatcccagcacttaacgcgactggcccaggtggcagaggcactggtgtccatcagggcccacaggtcgggaatgcacactgctaactgcaatttgctttgctctcattcattttagcaggggaactgctgcaaagaacatccctaaaaagaatatcatggtctggacttttttttttttttttttttttttttgagacagagtctcgctctgtcgcccaggctggagtgcagtggtgcgatctcggctcactgcaagctcctcctcctgggttcacgccattctcctrcctcagcctcccagatagctgggactacaggcaccagccaccacgcccggctaattttttgtatttttagtagagacggggtttcactgtgttagccaggatggtctcgatcttctgacctcgtgatctgcccgcctcggcctcccaaagtggaaatttttttttttaagttacagaaaccacagttgagaatttcacagtaatcaacccactggcacgtctgttatgaggtcttcatcatcccacaaacgcgttgttccgccttgatcttgtgaggcgctggccctcttcttgtggagttctcaccggctcagagggtcagtgtgagtgagccgatgtgtgccgcacacccaggatgtctacaggactgggggctggaaaattgagtgacatctcttgccctggcacctgtggcaggcagttctgggtaaccaacaggaatccctca

SEQ ID NO: 547538 - DNA, 877 bp, Homo sapiens
tgccaggcggcctgtgcccttgcaggttcctgactcaaggagatcttagggaaggcccagagatgatttcactttgggtgagcacatgcaaaaaggggcgtgtgcagattcttcacaagctctgcttggacactggcccaccatcccagcacttaacgcgactggcccaggtggcagaggcactggtgtccatcagggcccacaggtcgggaatgcacactgctaactgcaatttgctttgctctcattcattttagcaggggaactgctgcaaagaacatccctaaaaagaatatcatggtctggacttttttttttttttttttttttttttgagacagagtctcgctctgtcgcccaggctggagtgcagtggtgcgatctcggctcactgcaagctcctcctcctgggttcacgccattctcctgcctcagcctcccagatagctgggactacaggcaccagccaccacgcccggctaattttttgtatttttagtagagacggggtttcactgtgttagccaggatggtctcgatcttctgacctcgtgatctgcccgcctcggcctcccaaagtggaaatttttttttttaagttacagaaaccacagttgagaatttcacagtaatcaacccactggcacgtctgttatgaggtcttcatcatcccacaaacgcgttgttccgccttgatcttgtgaggcgctggccctcttcttgtggagttctcaccggctcagagggtcagtgtgagtgagccgatgtgtgccgcacacccaggatgtctacaggactgggggctggaaaattgagtgacatctcttgccctggcacctgtggcaggyagttctgggtaaccaacaggaatccctca

SEQ ID NO: 547539 - DNA, 791 bp, Homo sapiens
attataaattatcaggactgttgagttayattcagtttttgtttttgtttttcaatggctccttaaggtttgtactcccagagagccatgtggagttgcaataatacttaaggagttaatttgtgctgtctaaatacatctcatgcccatttgatgttgacctttatagagcagaatttctgaaaaggcataagctttaaaggaatagaattctggtttgctgcagagcttcatttcatccttggttataggattccagtgatttggcctcatgtgcattttttaaaaagttgtttaaccaaatgaatcttcctctttgtttttcatttcttttttctgttttctgccctattgagaagtttgtgttctttgatgaatgtttatcagccaagacagagagaagttgtatccatgttgttcttgtatgtatcgcatgataaagcaggaagcatggacaggatgaccgaacaggggctgttgctggaagttgtattagaggaaagctcttggaaagttctggcttcggaaattttcttcttgtttggtcccaaaacttctgatcttattttgaggagaagtctgacttaaaactttaataaattagaatagggatcatcatttttgtagtctaaagggttgtcaaaaataactatcagttaatccaaattaacagttgagcacatttcaaaacatttcagaaagcattcctgagcacattccaagcatagggctgcaataagtatttgaagactcataaacctgtgttcaagacacatgaacctttctctctg

SEQ ID NO: 547540 - DNA, 1144 bp, Homo sapiens
gttcagagggtggcccagaagagaactttttagataactccctggtgctgcacaattctgtctctcacggccaagtttcgtggtcccagactcactggtatcagcacaagttcctcttttgattttgtttctcctttcacagaactaacttaatcaccactgctttctcaaacacgtggacagcattctcaggcatcatttagggcagtggttttcaactgaggggtaagtttgctctgctgttaccttcccccaccttggggcatttggaaacatggcaacacctggagatagttttggttgtcaaaacagggggcaaggggagttctactggcattagtgggtagaggccagggatactgctcaacacccttcaatgcacaggacagcctctcacaacaaagaattatccagccccaaatgttaagtgtgctgtsatcaagaagtcctggtctagggtcaacacaggaagttggtggctgttcccttttctgatatagtaagagagcagacacagcggaatgaatagagctcttgaccaagagtcagaagatctgggttcagggccccactttgcaccaactagctgtctgaccttgttgagatcatttaacctccgcaaggctgatttcctcgtctgtcacttaggagctgtgacgcctgcctttcttacttacacgcttgttgtcagaatcacaagtgagaatgtcagtggaatctctttgaaatgcttacatgttattgttttatttgactgtgacagcaaatcaagcttatatgggtgtttttgtgtctaatgtcaatgcaagaatagtttcggcagggtttctgttgccctgtgttcaatttccagggtcatagcctccttctcacatttgtgtgggaaaggagctcatatacaaagggtgtttcctggaactgtgggcagggcttcaaacatccctgcaattctctaagcctgcagctctccacactgaaacttgtggtctagaaattctcttttaaatgcttgtgagacctctgaaggggttcgctccagaaaagcagggcctttttagcactgaaagttggattttattttgccacataagagacttagggctgtcgcccctcctgggtgaagatatgcagtgttatggcaaca

SEQ ID NO: 547541 - DNA, 1144 bp, Homo sapiens
gttcagagggtggcccagaagagaactttttagataactccctggtgctgcacaattctgtctctcacggccaagtttcgtggtcccagactcactggtatcagcacaagttcctcttttgattttgtttctcctttcacagaactaacttaatcaccactgctttctcaaacacgtggacagcattctcaggcatcatttagggcagtggttttcaactgaggggtaagtttgctctgctgttaccttcccccaccttggggcatttggaaacatggcaacacctggagatagttttggttgtcaaaacagggggcaaggggagttctactggcattagtgggtagaggccagggatactgctcaacacccttcaatgcacaggacagcctctcacaacaaagaattatccagccccaaatgttaagtgtgctgtgatcaagaagtcctggtctagggtcaacacaggaagttggtggctgttcccttttctgatatagtaagagagcagacacagcggaatgaatagagctcttgaccaagagtcagaagatctgggttcagggccccactttgcaccaactagctgtctgaccttgttgagatcatttaacctccgcaaggctgatttcctcgtctgtcacttaggagctgtgacgcctgcctttcttacttacacgcttgttgtcagaatcacaagtgagaatgtcagtggaatctctttgaaatgcttacatgttattgttttatttgactgtgacagcaaatcaagcttatatgggtgtttttgtgtctaatgtcaatgcaagaatagtttcggcagggtttctgttgccctgtgttcaatttccagggtcatagcctccttctcacatttgtgtgggaaaggagctcatatacamagggtgtttcctggaactgtgggcagggcttcaaacatccctgcaattctctaagcctgcagctctccacactgaaacttgtggtctagaaattctcttttaaatgcttgtgagacctctgaaggggttcgctccagaaaagcagggcctttttagcactgaaagttggattttattttgccacataagagacttagggctgtcgcccctcctgggtgaagatatgcagtgttatggcaaca

SEQ ID NO: 547542 - DNA, 646 bp, Homo sapiens
aggcttactctaaaaccctaatcatgaagtagtacattcagataatagggaaattaaaatatatcaaaatgaaacagcagaaagtaaacatgccatccttattttatgtcactggaaaaaagtgtgtgtgtgtgtgtgtgtgtttagcactagcatgtggcattacaggacatttaggttaccatttaaaatttctctaacaaattatggtaataaccatttattgaatctaacaaaatgacttcttttgaaacatggtagcctgagcttaattgtctgtcatcatctctatctaaacccctataaaaaatttctgtctcacaactttttttttgygaaatgcttaagttcaattatttttaattttgtttgctttttaataaatatattgaaggttaattttattttaataactaccttagtcatatcacatacattttgaaaggcaacgtattcatttctaaataatctttccgtgataatacttatttttcaactgcaagtttattggaagagtgttatttaaaaagattgtaggggttgtaactatctgtttaccccttcattcatcgagctatccatcaatgcaagcatcagtcttccaaatcagtactatttatctctatcatttcttgtgtatattttg

SEQ ID NO: 547543 - DNA, 646 bp, Homo sapiens
aggcttactctaaaaccctaatcatgaagtagtacattcagataatagggaaattaaaatatatcaaaatgaaacagcagaaagtaaacatgccatccttattttatgtcactggaaaaaagtgtgtgtgtgtgtgtgtgtgtttagcactagcatgtggcattacaggacatttaggttaccatttaaaatttctctaacaaattatggtaataaccatttattgaatctaacaaaatgacttcttttgaaacatggtagcctgagcttaattgtctgtcatcatctctatctaaacccctataaaaaatttctgtctcacaactttttttttgtgaaatgcttaagttcaattatttttaattttgtttrctttttaataaatatattgaaggttaattttattttaataactaccttagtcatatcacatacattttgaaaggcaacgtattcatttctaaataatctttccgtgataatacttatttttcaactgcaagtttattggaagagtgttatttaaaaagattgtaggggttgtaactatctgtttaccccttcattcatcgagctatccatcaatgcaagcatcagtcttccaaatcagtactatttatctctatcatttcttgtgtatattttg

SEQ ID NO: 547544 - DNA, 646 bp, Homo sapiens
aggcttactctaaaaccctaatcatgaagtagtacattcagataatagggaaattaaaatatatcaaaatgaaacagcagaaagtaaacatgccatccttattttatgtcactggaaaaaagtgtgtgtgtgtgtgtgtgtgtttagcactagcatgtggcattacaggacatttaggttaccatttaaaatttctctaacaaattatggtaataaccatttattgaatctaacaaaatgacttcttttgaaacatggtagcctgagcttaattgtctgtcatcatctctatctaaacccctataaaaaatttctgtctcacaactttttttttgtgaaatgcttaagttcaattatttttaattttgtttgctttttaataaatatattgaaggttaattttattttaataactaccttagtcatatcacatacattttgaaaggcaacrtattcatttctaaataatctttccgtgataatacttatttttcaactgcaagtttattggaagagtgttatttaaaaagattgtaggggttgtaactatctgtttaccccttcattcatcgagctatccatcaatgcaagcatcagtcttccaaatcagtactatttatctctatcatttcttgtgtatattttg

SEQ ID NO: 547545 - DNA, 681 bp, Homo sapiens
gagacgggttttcactatattggtcaggctggtctcaaactcctgacctaatgacctgcctgtctcggcctcccaaagtgctgggattacaggcgtgacccaccgcgmctggcctgctccatcttaaataaaaaaaaaaaaatttattcagagacagggtcttgctctgtcacctaggctggagtgcagtggtgcaatcatagctcactgcagcctctaccgcccaggctcaagtgatcctcccatctcagcctctcaagtagctgtgattacaggcgtgaggcactacacccagctaaattttaaaattatagaatatttgctgctttgtttcatgaactatgtgctcaaaactattttgctcaccaggtattttctttttatatttaaactctccaccaactaggatggttggttctccacaagggaaaatctgggcatgccagcttttaacactgttaccatgtgctataactaaccaaggtgttcttagagaggtgtcagtaaagaattatttcgagcagccagaagcctcctggaagaagaaaacagccagcaaagctttccataacatttctttatcttatctgagattccaagaccctttctgcaactgtaggaatttaaaggaggtgattttgtagtgaagactggtttacaagctttaattagactgcacca

SEQ ID NO: 547546 - DNA, 681 bp, Homo sapiens
gagacgggttttcactatattggtcaggctggtctcaaactcctgacctaatgacctgcctgtctcggcctcccaaagtgctgggattacaggcgtgacccaccgcgactggcctgctccatcttaaataaaaaaaaaaaaatttattcagagacagggtcttgctctgtcacctaggctggagtgcagtggtgcaatcatagctcactgcagcctctaccgcccaggctcaagtgatcctcccatctcagcctctcaagtagctgtgattacaggcgtgaggcactacacccagctaaattttaaaattatagaatatttgctgctttgtttcatgaactatgtgctcaaaactattttgctcaccaggtattttctttttatatttaaactctccaccaactaggatggttggttctccacaagggaaaatctgggcatgccarcttttaacactgttaccatgtgctataactaaccaaggtgttcttagagaggtgtcagtaaagaattatttcgagcagccagaagcctcctggaagaagaaaacagccagcaaagctttccataacatttctttatcttatctgagattccaagaccctttctgcaactgtaggaatttaaaggaggtgattttgtagtgaagactggtttacaagctttaattagactgcacca

SEQ ID NO: 547547 - DNA, 1288 bp, Homo sapiens
ccccactcttaaaacaatattatgtaattcatatccaggagacaagacatgtgctaatcaaaggtgttagtgatgggggtaattaactaagggttgagcatccctaatgtgaaaatctacattacaaaatgttcccaaacccaaaaggttttgagcattgacatgatgccacaagtggaaaattctacttatgacctcaaggtaagtcaaagtcaaaatgcaatcaaaatttagttgcatgcacaaaatcattaaaaatatttttttaaattacgttcaggctaygtgtataaggtgtatatgaagcataagtgacccttgtgtttaaacttgggcccatccccaagatatctcattatgtatatgcaaaaatccccaaatgcaaaaaagtccaaaatccaaaacacttctgattctgaccatttcagatatgggatatgcaagattaccacaaaagctaagataatcagtaacaaacaataaagcgtaagactcatacccagaagttcaaaagaaaaaatgtccaataattgaactctatattaatttatgccaattctgcaaattattccttaatgagtcaagtatcaaaacgagaaatgtacacattcttcttagtatattttgcctgtaatatttattcattttggggacactccctcttttcatcctaataatgccataacatgtactttttaagaaaattaatttgttttaaaagtcacatttataatttatatgcagtaaaatttacccttaccaaagatctagaatagttccatcacctcacgaaatgcccgcagcccttatgtagtagatttcctcccccagccccaggtaaccactgatctgatttctgtccctatagttttatcttttccagaacatcatataaatggaatcattcagtatctttaaattatctggaaactttcacttagcataatgcttttggaagtctttcacattgttgcatgtatcaactgttccttcttttttttaactgctgaatagtattccatgtgcattcatgtattacattttgtttgtccatttaccagttgatggatacttcggttgtgtatagttttatactgttatgaataaagctactatatagacatttgcatacaggtcttcatgtagacacattttcatttttattgaataaatacctagaaataggatgactgtactgtgctagagcaacatataaaactaaccaatcttttttttttttaaactaaccaatcttttgaagcagtattccatgtagtttacaagtcat

SEQ ID NO: 547548 - DNA, 562 bp, Homo sapiens
ccttgctgtgtctgaatctggttctgatccttgctctgtctcttcaaactgtgttttttgcttttttgtctatcttgtaatttctttttgatagctgggcatgatgtattgggtaaaaggaatggctgtcaatcggcctttagtaatgtggtgatagggtgtgtggggagggaaagtgttctatagtcttatgagtgggtctcagtcttctagtgagcctgtgcctctggactatgaactgcacatttgcttctcagtgtttccctctcttttggtaggacagaatgactagtgccagctagaattggttatttcccttcctccaggacacttaggctctgacaagtgtttaggctttgsttgaagagtttccttgaggacacatgtcatatgcatgatagttttatatatgtgcttaatgtatattaaaaagacaacacctgtttgataaatgaattgttgaataagagagagtgctctgatgtatttcaaaatagttctattccccacagaacttgccgtctgaagtacaaggggatttttctcctatattcactgtaag

SEQ ID NO: 547549 - DNA, 640 bp, Homo sapiens
ggcctcaaaattgggagtagggacataaaatgtgtgtgtgtttgtgtgtgtgtgtgttttagaacaggctcgaactggactctaccaccccctcccactgtgacgacttcccagtgggggagcaagtcccttgaaaacagccagccttttgtttggggtattagagcaatttcatttcagtcctgttcattattcagaaaatttttttttaaatatcatttattacactctttgcttttatttttttgaggcagaaactcactgtcgcccaggctgaagttcagtggcaggatctctgctcactgcagcctccgcttcccgggttcaaacaattctcctgcctcagcttcccaagtaactgagactacaggtgtgcaccaccacgcctgggtaatttttgtatttttagtagagaacgggatttcattatgttggccaggctactcttgaactcctgacctcaggtgacccacctgcctcggcctccaaaagtgctgggattacaggcgtgagtcaccacrcccagccccattatttaaaattttgtttaaactccttgcacagcttttttcctcaggtgaggctggagccatggacctggctctgtgtgtgtgtgtgtgtgtgtgtgtgtgtgtgtgtg

SEQ ID NO: 547550 - DNA, 518 bp, Homo sapiens
cttcctttgtttaataggtggtttaagcaaggtctgagcatccctcaagtcctgctgtggaccacacaaaggcaaggagctgaccaggaggtgtcagttccctgagagacagggccaaaggcagtgtacccttgaggtgtgtgtgtgaggggcaaatgatgtctcctgtattgggatcygcagggcatgggagtgggctcagtctctgacccagctcagggacaaatcctcttcctgagacccccgggggctgatggtgcttgcgtgggtgagcagcagctaagctgtgctcttccactccatcctggagggctgcctcctcagggccctgatgaagttatctgggcagggtggggcatgctgatttcatgaaattactgggagatacaatacatggagaaggctgggagagctgtcactgggctctctctccagagatgctccctgtaccaatggctgggggaagaggaacaggacgagagaggcaaagggctgtggggagcctgggaccgtgttgg

SEQ ID NO: 547551 - DNA, 1547 bp, Homo sapiens
aacaaaaacaatccagatgaccatcaactgtttcgcaataaaaaggaataaaattctaatacctattacatactactaataatatgtgctgcaacatagattaacctccagaaatgctgagtggaagaagaaagatgcaaaagatgacccattgtatggttcaacttatatgtaatatccagaagaagtctatttatagagacaaaaagcataacattggcccgttgggcctggtagtgagataagggagtgactgtaaataggtacaagctttcattttgtgtcataaaatgttctaaaactgaattgtggaaatggttacatgactccaaaagttcacaaaaaatcattgaattgtgtacttgtaatgggtgaaatataaagtatgtacattatacttcagggtgtctaggggagggatagcattaggataaatacctaatgtaggtgacgagttgatgagtgcagcaaaccactatggcatgtgtatacctaagtaacaaaactgcatcttctgcacatctaccccagaacttaaagtataataaaaaaagaaaaaaaagttttaaaagatgattaaatacaatgaactgccttttatcagacagaagaattaggtaaagccattaacttaataggagacttacattcccaatctcttagttacctttatatctaaaaaaggattttctcattttaagcatagaacagtcaaaatttgaatcttaaaatttatatctattagaatctagtatgatttattttaaaattttattgacatagaaaatatcagtttgaccattctataatttcaagtatcttatccaaagataagtgatctttaatagaggaatttttgtttgaatgattttcaataattaaagagataaaagctttccatgtgaaatgccaatgaattcgggtaattctgaccatttatattactgcctgtagtctactacattaccctgttctctcttattgaatcataatgagaaaaaaatgtaagatatgtgatggataaaaatatagagaaatgtaattgttagaattaaataattcttcattctcctttctcaattcactgttacaaaaatgtttgaacatgtattaaataaaagggaaatgcatataggtatatgattgtaatagttcagttagatgtttatcaaataacataaaatgatttaaatttctttcaagaaaattaataatgccacagcactttcatagtttaggacaatgttagtagtttttaactttttaggacatattcttactctaccttttccagtagtattgtttgttttcttctgagacttctagccttctttgatcgttggcaaggtttatgatttgattagaattttatttrtaaaaataggtggtaggtaaaatttagcctgtgggttgtagtttgtagaaacttgcataaaatcagaagcctagtcaatgagtaaaaatacattgactaaaataagtgttgttcctttatcccaaaccatggcaaagtagtatcttgtctttattattatatatttacaaag

SEQ ID NO: 547552 - DNA, 2234 bp, Homo sapiens
ttctctgaaaagcatattaattcatttgaaaatatatttatttcttaaaaaccacattagcagactccgtctcaaaaaaaaaaaaaccacattagcaccttaattgtcctatcttggggttatttttctaaattgaggctaagtgttcaccactctattactaccagctcagtaaaagcttccctttcctctctatgctgtttccatctttgagtgattcaaaatatgctcatgttgcatgtgtagtgaaatatttttaagattgtagtttatagagtaacttagggcacagtgtgacattcttttaaattggcatgatctgagagagaattaaatttgctcatttttcacagtacaaggccatcagaaaggttgtctttcacaggcactatcacttagacttagaagagggactagagggaagaagcctagcctcaggtacccggtgaggaacacgcatggtccatagtggcatcaggatatttgggacagcagtctagggagcgagcccagcctaatgggagctttgacacataccgtactcagaattcagaatctccactgactcttacatttataggggttggcattcctcagcccacacccctactccccaccttggccattcttactttctccatttggctcctatgccatggaaatgaaaaagatagcacctgccaaagcctgatgtcatccaagtttctgcacaaacacaagataccataaaactaaaccaaagaaagcacagtggcaacgtagcattgtattttcattatgttagtttgtggcacctatctgattctccttcggttcaccttgccttagcgttattaaatgcggtagctgaaagagaatttggaaatgatttcttctcacctcctcatttcatggagagtaaatggaagtctacagtggctaagtgacttacacaatatcacatagctaaatggtggcagctagaggacttgaacccagatcctcccactctcgggtgaaccagtacatatttttcartcagtcaagactttcctatttggtacctaccatgcatctgactatgctcctacgtgccattaaaaaatggtcataaaatataatgtccagcattgcaactctttggaaagaaaaactcagttataaatgcatgcaagcaagagaccaaagagttaatcagaaaagaaataattttcacataaagcgatctttcttcctttcttcattgtgagctgagagaggattgtagcaatacaggttgagcaattttcttttttatgaatctcgtgctcaatttatgaaagccattttgcaacccatttacatgcagtaaacctttgccttaaagttctgtcatttaccttgatcatgattatttatagtccttttagacaaggctctttactggtttagctctcaagcacagcactgtcacaagccagttttctacgtctttcaaggcagggtaggaagctaagacagggccagtcttgtagctcgctgtgaggaatgggggctttgggtaatgggaagaacactagttggcatcaggagtcttgcattcgcaacctctgcactctcactctgtaatcctggccatttatgcttctttagtttcagtttgttcacttatagaaatggagcgacactttcatcacaaggctataaagtggagttgaagtgaagtactttgtgtgcaagttatattgtaaatagtgaagagtaagttgttttatgaactaattatctataatatgaactataaatcattgaaaaaggaatggtgtgtctaacctaaaatatttcttgattacctgtgatgttgtgcctcctgtagagcatacaagaatggaccagggacctttactcttggcacataggagactctcaatcagtacttgttgcattaatgaataaatacagtttctgggtgaaagtcagtatcctaggcgtagtgtagaatacaggacaaatgaccatcatcccaagcctcaaggtgcttacaattaagatggtagccataaatgtgcaaagagccagtaaggtaagtcatggttctacacaagagaagaagatatggtgtaaaaatgtgtctgaggccctcaccagagaattggtacagcaggagcctttcctcttcctacctctgggtgagtttatctacctccagcctctcttgcccacccatgcactctttgtatcagccatggtcccagcaggactagatgccctgctgg

SEQ ID NO: 547553 - DNA, 638 bp, Homo sapiens
tttgagccaggacgtttttccagtttctgaatccaattgtaaatccctcatttttttaaaaacctctaccagacttttaaaaagttgtcctcaaaaaactttctaatctagagagagaaagagcacggcaacttctaagtgatgctggcgagaaagtcaggagacttggcacttacaactttctaaagatctgaatgcaaatgtcacctggagcattggagtatgccgaggcccctgggtgatgaaagtgagggagaaatgagagggcaggggtgcgccaaataaggggggatttcactcctgtccatccctgggcttgtgtaactcaaggtattggagagtcaaagtgtgctcttggttttactgctaccatgaagagacgaaaagygagcccgcagacttgtggccctttccctgacctggtaagagaaatattgcagggtgttttaggatgatgctggaaagaggcaggagccctctctgtctctgagggtctgcagggcacttccccaagggcaggtggggcggacacaaaggagcttggggcggacacaaaggagcttggggcttccttcctcttggcctccctctgggctggaccctgagctctgcctggggatgatgcagggaagaccccc

SEQ ID NO: 547554 - DNA, 549 bp, Homo sapiens
aagaaagttgtaatccagtgagtgagaggaccaagtaaatggatgactccaatcccgtgtcattgagggaaacccattttatcgcaaactgacctaagtaaaaatcgctgtccatcttaaccccatcagatggacacagaacccctgctgcaggccatgatgcaggcaatgagtccaaccactcacctgacagctcagctctttctacctgaatagtagatgactggctgtgttctttggtcctgagatgtgtttcagacccattctgtgtgaaaatccatacctctggcctagtgctctgtacttgtgcattcctataaaagtccatgattctgtgtagtagatgttatcrtacatttatacatttatttcatggataagaaaatgtgggttgattagttatttttcccttctgggatatcagccttttgcacagttttgctttagcgggagagacctccccttccatctgtgacagtggaactctggcaactacacttcacttcagcctccttatttgaaaagagaggaagaatcatgtaaggaact

SEQ ID NO: 547555 - DNA, 1107 bp, Homo sapiens
gtgttggattgggtctcttgattctataattatatgtcagccagtcgaatgatggcaacttttaaggactggtccttagggaagaggaggtcaagtggtaaagacctaattccacacagcccaggtgactacatggagaatgtgctcaaaggcgaagtttatgctctgagctggacagtgtagactattaggggaaaacagtgaatgggaagaaaaggtgtgtggcccagattcaatttctagacacttcctttcctattttttctaccaagactacctagcagtggcaagtatgttctgaacattctgcagaaattccttctacctcactgaagtttcaagtaattaatgtgaaatggaggagttgacacagattaaatgggcacacatataaggacattcacagtcattttgtgaagcactattatgagacctaaatagcaagaagcaaatgtgaataactctgtcatttaaaaatttttaaatccaaattggattttaayatttttcttctttttactttattgcctttccaatgcagataccgttaaacatattggcagttttttctcaaagcaaataggtgaagtttctctctgtctctcctagagagaccgtcctggatttgattccctatggcttgggcttgtgttcctcccttccttctgtggtgtgctgtagaaccatgcaggcttccctctccactatgactgacttcaactgcatcttcagttgctcttcttccctccaaacaaaacaaaacagcaaagcaaacaaaagccaaaccaaaccaaaacgctactcctcttaccctagaaacaatcacccaagaagctctggtttgttcgtgcagtagcttaggtcacacaatcaatgaatggaagacacagaactagcagaactagaacgctattttttttttttttgtaacagatagcttgtctttacttttttaaaaaatgtaacttaaaattaaaaaaaaaatttccataagttatcggggtacaggtggtatttggttacatgagtaagcagaacgctgattttgattctcaattcagtattcctactagctcaggcctctcccaggcagtgtcttcatggtgt

SEQ ID NO: 547556 - DNA, 1107 bp, Homo sapiens
gtgttggattgggtctcttgattctataattatatgtcagccagtcgaatgatggcaacttttaaggactggtccttagggaagaggaggtcaagtggtaaagacctaattccacacagcccaggtgactacatggagaatgtgctcaaaggcgaagtttatgctctgagctggacagtgtagactattaggggaaaacagtgaatgggaagaaaaggtgtgtggcccagattcaatttctagacacttcctttcctattttttctaccaagactacctagcagtggcaagtatgttctgaacattctgcagaaattccttctacctcactgaagtttcaagtaattaatgtgaaatggaggagttgacacagattaaatgggcacacatataaggacattcacagtcattttgtgaagcactattatgagacctaaatagcaagaagcaaatgtgaataactctgtcatttaaaaatttttaaatccaaattggattttaacatttttcttctttttactttattgcctttccaatgcagataccgttaaacatattggcagttttttctcaaagcaaataggtgaagtttctctctgtctctcctagagagaccgtcctggatttgattccctatggcttgggcttgtgttcctcccttccttctgtggtgtgctgtagaaccatgcaggcttccctctccactatgactgacttcaactgcatcttcagttgctcttcttccctccaaacaaaacaaaayagcaaagcaaacaaaagccaaaccaaaccaaaacgctactcctcttaccctagaaacaatcacccaagaagctctggtttgttcgtgcagtagcttaggtcacacaatcaatgaatggaagacacagaactagcagaactagaacgctattttttttttttttgtaacagatagcttgtctttacttttttaaaaaatgtaacttaaaattaaaaaaaaaatttccataagttatcggggtacaggtggtatttggttacatgagtaagcagaacgctgattttgattctcaattcagtattcctactagctcaggcctctcccaggcagtgtcttcatggtgt

SEQ ID NO: 547557 - DNA, 862 bp, Homo sapiens
ctgcctcggcctcccaaagtgctgggattacaggcgtgagccactgcgcccggcctacacatactcttaatccccagccagtcttatgaaatagatagtgttattattctcattttactaatgagaaaactgaggcatagagaggttcggtaacttcccagggtcacattaataatagtggagccggctgggcacggtggctcacacctgtaatccyaggtctcagggaggcagaggtgggaggatagcttgagcccaggagttcgagacctgtctgggcaataaagcgagaccccgttctccacaaaaaggaagaaaaaaaaagacaaaaaaaaaaaagcgtaataatagtggagccagggtttacatcccagccttgtcacttttaatgatttctccatcacttcttcctaaataagcttccccaaacaattctctactcttatgttttccaaatgtctgttagcaactcattcaaattttacacatgaagttgctgtgagcaacattcatctcactgttagattgggggcaaaatgttgcaagtcgattgtcatatttctttataaaaagatattcctttggcaaagccgttatcaaaagtaccctttccctgccttctgcactctctttgacactgaaacatcaatatggtctttcaagaacatcagatacacttcagccaacttccaactacaagcaaactcagtgttctcccaatgtttccactgtggggtaaaggcactggcagttttaagagtcaagaaccttggactcatccttggcacctccctctccctcccaagccgccacccatagctaatccatcaccacagcctgtcatttactggagtctccagcc

SEQ ID NO: 547558 - DNA, 1362 bp, Homo sapiens
aacattttgtggatcgataatattatttattccctactctgaaagggaatctttgatgtggatgtatgaattctgataccttttagaataaagaaaaaaatcagtcattttatttgattaccttatacacattcattattcttaataaaataatgattagaaagaacactcagtatcatagagctgtggtctatactatcaacacaggaagcattgattgatatccatagatcctggctagatcaaacctgaagagaacataggatggagctgcagatatggttgattggcacaatgacttctgggtgaaatttttatctgtatttaacgtgtcaatgaagggccaatatagaatttatctttgggatagataaaaacaatatattattgaatttcatcaatatctgagcaaaaccaagccccaaaacaatggcgttcatagatgctgatataatattcctggtcagaccaatagaggttgaccttttgacaaaatataatttacgtctcttcctacatttctgctctattgatttatatataggctggacttcacagaaaagagcatgcacttttaaattattctgctttgtaacagaaacagacttttcacacatgctgcatactgggtaaatattctttatttcccttcttcatgaaaacaaacgaagtaaaagaaaatcccagcctgtcacattgaaattcagtgtttgagcccaacatgccaattctcattcttgggccttgtggtccacagtttgagaagttgtatcttttttaacctatttttccagggaggctttatcgtaatagacaataatttacaaatacaaaatggacatttgtgaatataacaagcaaataaaatcatgctctaggatgagatgggcatcaagagaagaacgttcagcttcctgaaagattttacattgcactatactctggtacttaatacacatacattctatacaatcgttaaaggttttcctttctttctyccttccttcctctctgccttccttctttccttccttccttccttccttttttgtttatttttgtttttgcttttaaatctgagactgatctcaggaaaaggcagtctgactcttttagtttaggaacactgaagataagagagaattgtaaaagctttaaagagaaagaataggttaacgataaaagatgaaaaccagttagacatcagacttcaatcactatgcaaggagataatggagtaatattttcaaagtggttaagaaatgcactttgagcttagggtctcatatccagctaaactattattttagtgtaagggactattaaaacactctctcccggctgggcacggtggctcacgcc

SEQ ID NO: 547559 - DNA, 1362 bp, Homo sapiens
aacattttgtggatcgataatattatttattccctactctgaaagggaatctttgatgtggatgtatgaattctgataccttttagaataaagaaaaaaatcagtcattttatttgattaccttatacacattcattattcttaataaaataatgattagaaagaacactcagtatcatagagctgtggtctatactatcaacacaggaagcattgattgatatccatagatcctggctagatcaaacctgaagagaacataggatggagctgcagatatggttgattggcacaatgacttctgggtgaaatttttatctgtatttaacgtgtcaatgaagggccaatatagaatttatctttgggatagataaaaacaatatattattgaatttcatcaatatctgagcaaaaccaagccccaaaacaatggcgttcatagatgctgatataatattcctggtcagaccaatagaggttgaccttttgacaaaatataatttacgtctcttcctacatttctgctctattgatttatatataggctggacttcacagaaaagagcatgcacttttaaattattctgctttgtaacagaaacagacttttcacacatgctgcatactgggtaaatattctttatttcccttcttcatgaaaacaaacgaagtaaaagaaaatcccagcctgtcacattgaaattcagtgtttgagcccaacatgccaattctcattcttgggccttgtggtccacagtttgagaagttgtatcttttttaacctatttttccagggaggctttatcgtaatagacaataatttacaaatacaaaatggacatttgtgaatataacaagcaaataaaatcatgctctaggatgagatgggcatcaagagaagaacgttcagcttcctgaaagattttacattgcactatactctggtacttaatacacatacattctatacaatcgttaaaggttttcctttctttcttccttccttcctctctgccttccttctttccttccttccttccttccttttttrtttatttttgtttttgcttttaaatctgagactgatctcaggaaaaggcagtctgactcttttagtttaggaacactgaagataagagagaattgtaaaagctttaaagagaaagaataggttaacgataaaagatgaaaaccagttagacatcagacttcaatcactatgcaaggagataatggagtaatattttcaaagtggttaagaaatgcactttgagcttagggtctcatatccagctaaactattattttagtgtaagggactattaaaacactctctcccggctgggcacggtggctcacgcc

SEQ ID NO: 547560 - DNA, 995 bp, Homo sapiens
atattggctgtgggtttgtcataattagctcttattattttgagatacgtcccatcagtaccgaattttttgagaatttttagcatgaagggctgttgaattttgtcaaaggccttttctgcatctattattttgttaatattgtaagaacatttaaatattaattcatctggaatactttggtgcatgcagagtgtttagactctggcttaaatttttccaaatatttaaccagttaactcagcattatttattaaagaatttaatcttccccatttacttgaaaccacaaatttaactcctatataatctttggtcttttcttgaaaatgctttacaataactgaataatctattattttatttaatacatatttgtggtatattttaatgcctagcacttctgtgctccactggtggttcttcctttcaatattttgtttyccttcatgaattacttattcttccagacaaaagataaaattgctttgccaaactcaaaacaaaaaaaactctttgatattttatttgctattttttgaatttataaattagtgtagtgatagttggcatctttgccacttagttcctctcattgaagaatataatatatttctctatttagtaggtactgccaaaaagttttcttcggtgattgtaccaatttacactttcatacagtgtgtgaatgtttcaatcattacacatctttgccaactcttagtacttttgcctttttcattttaactattctagtggctatgacattgcttatgactttatttgcatttctttgatgattaataaaattatgtgccttttcatgttcttatttgccgtttggatgttctgattttaatcaagtgtttattcaaatctttcctctgcttttttatattgtattgcttgcctttctctttttgtttttttataagttatttgtacactcaggatttgagtcctttatcagatgtatgtatttcaacggtcatctc

SEQ ID NO: 547561 - DNA, 995 bp, Homo sapiens
atattggctgtgggtttgtcataattagctcttattattttgagatacgtcccatcagtaccgaattttttgagaatttttagcatgaagggctgttgaattttgtcaaaggccttttctgcatctattattttgttaatattgtaagaacatttaaatattaattcatctggaatactttggtgcatgcagagtgtttagactctggcttaaatttttccaaatatttaaccagttaactcagcattatttattaaagaatttaatcttccccatttacttgaaaccacaaatttaactcctatataatctttggtcttttcttgaaaatgctttacaataactgaataatctattattttatttaatacatatttgtggtatattttaatgcctagcacttctgtgctccactggtggttcttcctttcaatattttgtttcccttcatgaattacttattcttccagacaaaagataaaattgctttgccaaactcaaaacaaaaaaaactctttgatattttatttgctattttttgaatttataaattagtgtagtgatagttggcatctttgccacttagttcctctcattgaagaatataatatatttctctatttagtaggtactgccaaaaagttttcttcggtgattgtaccaatttacactttcatacagtgtgtgaatgtttcaatcattacacatctttgccaactcttagtacttttgcctttttcattttaactattctagtggctatgacattgcttatgactttatttgcatttctttgatgattaataaaattatgtgccttttcatgttcttatttgccgtttggatgtyctgattttaatcaagtgtttattcaaatctttcctctgcttttttatattgtattgcttgcctttctctttttgtttttttataagttatttgtacactcaggatttgagtcctttatcagatgtatgtatttcaacggtcatctc

SEQ ID NO: 547562 - DNA, 540 bp, Homo sapiens
atatgatgtctccaccccagggtgaacacgggtcatatgtaacatgcatgtgtgttcaatacgcatgagtcaggatggccttcataaatattcatagctccttctgtaacctggtgaatatgtatgtttaccctgtttgttcagcataaagctcctaccccatcccttctcctttcaagggcctgtctctggtatttgccagaggtcatgcttcccagccagctagatggccaccttgaaggttgtaaccttttccaagaaatatagactccttttccaaacttataattctgtaatttttcagtgatcagaggtgtaaaagtgaaagtgagaaaactgatcatagcaagaggcaaaaaatgctggagtgaggggatgggggaactgatacttaactaaaagaattgttaagagaatggctggggctcaaagccaaccccacttagcattgctcttgcagggatgsggctctgtgaacctccagggacaggagagacttgcctgacaggcaccctgaggccagagaggcgtccttgcttc

SEQ ID NO: 547563 - DNA, 540 bp, Homo sapiens
atatgatgtctccaccccagggtgaacacgggtcatatgtaacatgcatgtgtgttcaatacgcatgagtcaggatggccttcataaatattcatagctccttctgtaacctggtgaatatgtatgtttaccctgtttgttcagcataaagctcctaccccatcccttctcctttcaagggcctgtctctggtatttgccagaggtcatgcttcccagccagctagatggccaccttgaaggttgtaaccttttccaagaaatatagactccttttccaaacttataattctgtaatttttcagtgatcagaggtgtaaaagtgaaagtgagaaaactgatcatagcaagaggcaaaaaatgctggagtgaggggatgggggaactgatacttaactaaaagaattgttaagagaatggctggggctcaaagccaaccccacttagcattgctcttgcagggatggkgctctgtgaacctccagggacaggagagacttgcctgacaggcaccctgaggccagagaggcgtccttgcttc

SEQ ID NO: 547564 - DNA, 569 bp, Homo sapiens
ggctgtttcccatctgtgcacttcactcttggaccggctcctcaacttctcaggcttagtttcctgatctktaaaatgggaatgatgacgcctatctcttgattcaaacttaaaacaaaatgcattttttaagataaccagtgaactttgaatacagacaggttactaggtgacatttaaaaattactgttaatttagctgtgtgaaaacagcatcgtaattcagtaagaaaattgcctttttttttttttttgagacagagtcttgctctgtcacccaggatggaatgcaatggcgtgatctcggctcactgcaacctctgcctcctgggttcaagtgagtctcctgcctcagcctccccgaatagctgagattacaggtgcccaccaccacgcccagctaaattttgtatttgtggtagagatgggctttcaccacgttggccaggctggtctcgaactcctgacctcaagtgatccacctgcctcagcctcccaaagtgctgggattacaggcgtgagccaccacgcctggcaaaaatggccacttttgagatgcattctgaagtg

SEQ ID NO: 547565 - DNA, 569 bp, Homo sapiens
ggctgtttcccatctgtgcacttcactcttggaccggctcctcaacttctcaggcttagtttcctgatctttaaaatgggaatgatgacgcctatctcttgattcaaacttaaaacaaaatgcattttttaagataaccagtgaactttgaatacagacaggttactaggtgacatttaaaaattactgttaatttagctgtgtgaaaacagcatcgtaattcagtaagaaaattgcctttttttttttttttgagacagagtcttgctctgtcacccaggatggaatgcaatggcgtgatctcggctcactgcaacctctgcctccygggttcaagtgagtctcctgcctcagcctccccgaatagctgagattacaggtgcccaccaccacgcccagctaaattttgtatttgtggtagagatgggctttcaccacgttggccaggctggtctcgaactcctgacctcaagtgatccacctgcctcagcctcccaaagtgctgggattacaggcgtgagccaccacgcctggcaaaaatggccacttttgagatgcattctgaagtg

SEQ ID NO: 547566 - DNA, 548 bp, Homo sapiens
tatccaatcagtccaatagtgccatcacttcactaccaagcagcttcccatttccagttcctaattcaaccatcattttgaagagcacarcctaagaggttagccttaaatatgtccctttgacatatttctcacttgtagtcagaggaatatttccaaaaggcaaaccatatttttctccttacctctattttgtccactagttctctctccttctcttttgttctcttcctcccttgcctacagctcgctccctgcttcaagcacccaccgttctcaagataaagtctgaattccttaaaatggtaaagactcgtgtagcctagcccccagcctcatcttctgccttcctgctgaacttcaagttcaaacacaacaaaccttctctagtcttcagagtgaccttctttgttagatgggtcctttcccccaacatccctctttgactggttaacttctgtttatcttttacatcttagcgtagcccaccagcaggtagatttgagtataaagggttttgttttcttctttcaaataaacattggtcg

SEQ ID NO: 547567 - DNA, 548 bp, Homo sapiens
tatccaatcagtccaatagtgccatcacttcactaccaagcagcttcccatttccagttcctaattcaaccatcattttgaagagcacaacctaagaggttagccttaaatatgtccctttgacatatttctcacttgyagtcagaggaatatttccaaaaggcaaaccatatttttctccttacctctattttgtccactagttctctctccttctcttttgttctcttcctcccttgcctacagctcgctccctgcttcaagcacccaccgttctcaagataaagtctgaattccttaaaatggtaaagactcgtgtagcctagcccccagcctcatcttctgccttcctgctgaacttcaagttcaaacacaacaaaccttctctagtcttcagagtgaccttctttgttagatgggtcctttcccccaacatccctctttgactggttaacttctgtttatcttttacatcttagcgtagcccaccagcaggtagatttgagtataaagggttttgttttcttctttcaaataaacattggtcg

SEQ ID NO: 547568 - DNA, 546 bp, Homo sapiens
caattaaaatagaatagtaaatattaaagagaataatccctattgtttagatatttccatttttaagattgtcagtacctaaagaacagatgcaagacatgcattgttcatgtcaaattaatggttttaaaaataaaatcatataaaaatggtagtatttatcattaatagatgtaatctcttcagaattgacatatacaatttatatttgcaaaatygatgtcaacagacaactggcaatatattacaatttttgtgttttattatcttcaaatcaagaagtttctttggaaataaatgctgaaaaccttaatcacatttttagaatttaacacaaaaatacagatgtaagggaaattttatctgtaccttaaatgaatgagatttacagatatacaaattcatctttaagaagtctgaaagtaatcgttgcataatagttttttattccatgacataacgccttatcagatctctttagaagatacgtctaatagtatgtacattacaattactcttctggggaatataatacctgcttacctg

SEQ ID NO: 547569 - DNA, 517 bp, Homo sapiens
tgttcaagacgccaagaacctggacaccctccactgttaacatcaaattctgaaagtgccacatggtattacacaaatgtacatagtcataagactaaacatttctgcattttctaactcatcctaacaaatgacttctacaaaagccacgaagacaaattagaggagttaaatactttatattgcaacctctgagtttcttcccgctatgaacagaagcataatttcttgctcagtgatgaccacatcaaagatttataccttgaacaccatatttaaaagtgtacctagtgctcccaagtttttcttactctcatatttttatagagcacattcatttctraatcattataaaattttatatatttattatgttaactgttattggatgtcctctccaatcatgctctttaaattattagtaccacaaggccagggacactggttcgtgcctgtaatcccagcactttgggaggccgaggtgggtggatcacttgaggccagagttcaagaccag

SEQ ID NO: 547570 - DNA, 284 bp, Homo sapiens
aaaaaaaaaaaaaaaaaaaggaggaagaagggagataacaaaagggtattggggctttaaagaagggtcagcagttctccaattttcacatttgacgactcatttaattccccaatgagtcctcaaagtcttggaatgaagtatggtmacctcttgctgcagtcactcatgccagggagttctgtgaaatctggggaggggttacctccagtacccaaggatgctgagcaagggactatcagttgtccctctatatccaatcttccttcttccaaagtaaaatg

SEQ ID NO: 547571 - DNA, 1071 bp, Homo sapiens
atttgaaaacaataaattacagcattttcccccaaacggaaaaagcattaaacaaataatgaatattggggcttcaggacaataaaaggaaatttggacaagggtattccagaaaaatccacctctttatttttcttgtcaaatgggaatagatgctttttttgaatataaaatcttccttgtgtttgtgaggcaaaataacattagatggcaactgattattctgagatcttttgacttggcagacgcaaacatgttgagatgaaatttgtcaaggcaaaatattttccaaaaatttaatttaataattatataaatactgtgataatagcaacaatttatagttgccaggtgagattacttgtaatttaataattttttaaagcaccaatctccagtcatatcaaatgaatctctgggtggctagctttgtatagaattgtggtagtgacaataaaccatacctagcaccctatagttgaacactttcaccaacaacccactgtaagtcatacagagttaatgtgaggacacactgaatcctttggactttattgactcatgaacctcattaaatgaacttttttccctaaaataatttcagtctcctctctcgtgaagaaaagttatctgaaaaaggaatgtggaggaaagagactttattccagtgaastgtttgcatcctctgttgcaaaacaaaggtgcattccagaaaacaaagggaagacttgggttttatagcaaaagttcgctgtccaggttcccacataagtttctttaggcaaatgaaggtttgaaactggcttagttctggcccactgtggtggctcacatctgtaatcccagcagtttgggaagcccaggtgaatggatcacttgagatcaggagtttgagaccagccggggcaacacagtgaaaccctgtctctactaaaactacaaaaataaataaataaataaataaattggctgggtgtggtggtgcacacctgtaatcccagctacttcactgggtgaggcggcagaggttgcagtgagccaagatcatgccaatgcactccagcctgggtg

SEQ ID NO: 547572 - DNA, 559 bp, Homo sapiens
gctgatttacagttccgtccccgcacgggaaaagctgcgtcgacacccctcctgcctgaagtggaagcctatctccaactcctcgtggtcatcttcatgatgaacagcaagcgctacaaagaggtatccaggatgyagtgagagcgattcataagccccaagtgatgcaaggggtttggcggggagatggtccctggtgaagaaatggaaataatcattgattcttaagaactgtcccccacactctttccccatagaggtatgcgtttgatcccacatcccaggagaacccactcttgctctgggcactgtgggacagggcttgcagtggtcatgctgtaccggtctgtgggggataccagcgtagtacattcttggggaaaagtaggggcatttggagacagaaagacctgggttccaatcccagccataccctaggcaaattaatttctcccagctatatgtaagatggggataatagtgcctaccttacaagatggttagcgttacataaaataatttgtttagaaatacttagcgcaatgatctgcatatagta

SEQ ID NO: 547573 - DNA, 587 bp, Homo sapiens
tgttcttggtccttagaacagaaaacatattcttcttgtactctgtttagtgagttcagttaaggctattagtttctgagctgttttataagccaggagtcggcccactgctgtctcccttgactatacattcaataaatagaatgtgattatacaaaactaaattttccagaaccattattgaaagtgccataggaacgtctaattaataagaatactatagaggaataatcaggatattacgaattaaatcctgtccctccaaaagatacattcaagtactaagtcctggtacctgtgaatgtaacctaatttggaaatacagcctttgcaaaggtatttcgtttaaggctgtactaaattgggggaagatgctaatccactaygactagtgtctttatcaaaggaaaaaatttgtacatagacgtggaaacagggacacagaagaaagaacattatgcgaagacagaagtggagatcggggttgatgctgccacaggtgaaggaacacctgggctacaagaagctggaaaaggcagggaagggttctcatctcaaagtctttgaggcagcaaggccctcccaac

SEQ ID NO: 547574 - DNA, 512 bp, Homo sapiens
ggtgcaattggatgtgggggtaaactagcatgcacctgccttccggcctagaggactcggaagctcctgcaagcaggcgaggtgaccctctacagcccaatcagcccagcccttccccagacatcaccaaccccaaagggctacactcccgcttaaaattacaatcacaaaccaattcctcccgtaatagaaggyattttcatatataaatcaatatatcttcctttctctttctgtaaggaagacagaggattgtaatttatttctctttccttctgtgtataaactaattttttcttgttataaaagaaagagaattctaatttgctgctttggaacaagcccagcgacggagcctaaatatgtggagggaactctggagattacagagtgaagttcagctgacctggtgccacaaattaagctgcagtccacttaagctgccaacaacaataaattaagctattgtgcttggaggacgttgggatcggcactgcataggatcaaggctc

SEQ ID NO: 547575 - DNA, 512 bp, Homo sapiens
ggtgcaattggatgtgggggtaaactagcatgcacctgccttccggcctagaggactcggaagctcctgcaagcaggcgaggtgaccctctacagcccaatcagcccagcccttccccagacatcaccaaccccaaagggctacactcccgcttaaaattacaatcacaaaccaattcctcccgtaatagaaggcattttcatatataaatcaatatatcttcctttctctttctgtaaggaagacagaggattgtaatttatttctctttccttctgtgtataaactaattttttcttgttataaaagaaagagaattctaatttgctgctttggaacaagcccagcgayggagcctaaatatgtggagggaactctggagattacagagtgaagttcagctgacctggtgccacaaattaagctgcagtccacttaagctgccaacaacaataaattaagctattgtgcttggaggacgttgggatcggcactgcataggatcaaggctc

SEQ ID NO: 547576 - DNA, 972 bp, Homo sapiens
aataaagttctatgacagagaagcaayccagagttgattcttttgctaaatagccacatgttcggtcagaaaaaatggctatcaaattacaaatttgacaaaaatattccccgatttaaaggatttcaatatctacctaacacttgtgaagcctatctaatgataactttacaaaagtattgattttaaaatatttatcaaacaacttcagggtggtttgataaattttaagcttccttaaaagtatcttcaatactactaaacataaaatgtcaagttttccataatttaagacattcattattctattattacctgaagctgatggatttgattcccaatttagaaagaaagaattctgacaacgctgaaaaagccaggtagatccaaaggacacttatttagatcactgtagtctaaagaggacagtaataatattcttcatcatttaaatcatccctagtatattgcacttgctgctgtctacttaaagatgctacaaaattttgactcatatagagtaataagttttacctttattcagcttagacttctgtgaacagcatagtggtaggggatctaagagaaaatgatgacacaaactttaatatcttgcctgaaaagaatcttgggcaaacactgaactgagtgtgtttgttgtgaagtatcatgcatttgactggcaatcaattgttctagttgtaattagaacaagttggggaaataaaatgccatgcaacatcaattcagtgagaaaaagaaaagttgatttttaatcaaaagaggcaagctgaattttttgagagatctgttgagctttgttactctctagctggaaacttacggttaattaaaccctccagaaatatttcattttgtttatatactaaagatacaaaaatgccttaaagagtcattgagataattaaattttatcatatatataatgtgtttataattgtgcatgatata

SEQ ID NO: 547577 - DNA, 972 bp, Homo sapiens
aataaagttctatgacagagaagcaacccagagttgattcttttgctaaatagccacatgttcggtcagaaaaaatggctatcaaattacaaatttgacaaaaatattccccgatttaaaggatttcaatatctacctaacacttgtgaagcctatctaatgataactttacaaaagtattgattttaaaatatttatcaaacaacttcagggtggtttgataaattttaagcttccttaaaagtatcttcaatactactaaacataaaatgtcaagttttccataatttaagacattcattattctattattacctgaagctgatggatttgattcccaatttagaaagaaagaattctgacaacgctgaaaaagccaggtagatccaaaggacacttatttagatcactgtagtctaaagaggacagtaataatattcttcatcatttaaatcatccctagtatattgcacttgctgctgtctacttaaagatgctacaaaattttgactcatatagagtaataagttttacctttattcagcttagacttctgtgaacagcatagtggtaggggatctaagagaaaatgatgacacaaactttaatatcttgcctgaaaagaatcttgggcaaacactgaactgagtgtgtttgttgtgaagtatcatgcatttgactggcaatcaattgttctagttgtaattagaacaagttggggaaataaaatgccatgcaacatcaattcagtgagaaaaagaaaagttgatttttaatcaaaagaggcaagctgaattttttgagagatctgttgagctttgttactctctagctggaaacttacggttaattaaaccctccagaaatatttcattttgtttatatactamagatacaaaaatgccttaaagagtcattgagataattaaattttatcatatatataatgtgtttataattgtgcatgatata

SEQ ID NO: 547578 - DNA, 2176 bp, Homo sapiens
tccttgaaaacataattatgctttgatttgaattagctagtgattgtctaagtgtggctgtggacttggagtccctgagaccctctcacaggtctacagggtcaacacgactakttttataaaaatagcaagatagtattttccttttgcgctgtattcacatttggacttatggtacaaaaacaatggtgagtaaaactgccagctcctgagcataaaacaaggcacaaatcataggcatcataactgtactagtagtcactgtattcactgccacacacgtgcaggaaaaacaaaacaaaacaagactttcactaaagaatattctcttattaattgcattaaatctcaacccttgaatacacaaccttttaacattctgtatgactagagtaaatacaaagcacatatacttcatatcaaagtatgatggttgcctcccaggaaagcacttgtatgactgtttgagagctgaactagctactttttctagggaacaccatttttacttgaattaatgataacaaagtatattattcagatttaagtatctggcagacactttctcaaaaataaacaatgtgagcctgtcatttcaaggaaaacaactaatagcatttgttgccaatgataaaatttgagctttcaagggaaaattcaaatactggaatgctcatatccatcaccacaagcttgacagcttcaaatcttacagacttctgatgagattagagatgatattaacaaatgtaattttttgatattgtataatgaaaggtgacatttgtaagatctgcacaactcacaagcaacattttacaaaggaataatgcacgatgataacaaatcaggcatgggtaaaagatccattcaagttcaaaataggccaatggattgtaatgcaacaaggtaacaatcaccttgatgtggtgattcacccacctcagcctcaggagtagctgagtagctgggtctaaaggcacatgccaccacacccagctaattttttggatttttattagagacggggttttgctacgttgcccagtctgatctggaactcctggcctcaagtgatcctcccatctcggcctcccaaagcgctgggattacaggcgtgagccaccacacccagccctaaatagctctttaatcccttcttttgcggattagtagttcagctctctctaaataaagtttcctgtggaaggagagttgttatttattccctgtatggcatttgggagaagtgaaaaagatttgagtatatcatgaataagaaagaaaagagcataagagaatacaccagacagaagggaggcttttgtaagtgttgattaaagtaacagacacttacttattatagagaagacaaggtatttgctagagaaaagaacgaaaaagagaaaaagagggagaggaagagaaaaaaaagcaaaattacaagtgattgcatacatagtgagaggagaatatcaaaatgtatgctctttcttaaaactgcccagaaaaatctacctattcccttggctgaccagtcttcacccatttcactgttcatgtgcagaactggcaagagttaatgacagaaaattaaattatgtgtcaattttgttccttcttagcaagtctgataaaatactaaaggctataaagggataaatattgccctaaatcaaatctggataatattgaaaagagactccttcattttacagactaggaaaaccaagtccttcaaaaagcaaagtcataacagaacttaaacttatgcttcaatttgtactttgatacctattatccaattacctttcttttctcaagaaattacttctgtcgtgtttgttcagggactgaatacgtcaaggatggggaagctctccattaggaataaccatgctcagtgccacaaaacaaaatggtacaggtttggatttggtttttcattaggaaaaaagtaaacaaacattctctgcttttaacacaacataaatacagtgacctggttgtcctcaactggttcctcatgtaatgttggggtctcagtttccacttcattaaaatgagaaatctacataattcccaaagtcctttcttagaaagttggataattctaaaatcgctgaaaaaagaagtgtttgggggaggaagtatgaaatacacccggaatgtgtgt

SEQ ID NO: 547579 - DNA, 2176 bp, Homo sapiens
tccttgaaaacataattatgctttgatttgaattagctagtgattgtctaagtgtggctgtggacttggagtccctgagaccctctcacaggtctacagggtcaacacgactatttttataaaaatagcaagataktattttccttttgcgctgtattcacatttggacttatggtacaaaaacaatggtgagtaaaactgccagctcctgagcataaaacaaggcacaaatcataggcatcataactgtactagtagtcactgtattcactgccacacacgtgcaggaaaaacaaaacaaaacaagactttcactaaagaatattctcttattaattgcattaaatctcaacccttgaatacacaaccttttaacattctgtatgactagagtaaatacaaagcacatatacttcatatcaaagtatgatggttgcctcccaggaaagcacttgtatgactgtttgagagctgaactagctactttttctagggaacaccatttttacttgaattaatgataacaaagtatattattcagatttaagtatctggcagacactttctcaaaaataaacaatgtgagcctgtcatttcaaggaaaacaactaatagcatttgttgccaatgataaaatttgagctttcaagggaaaattcaaatactggaatgctcatatccatcaccacaagcttgacagcttcaaatcttacagacttctgatgagattagagatgatattaacaaatgtaattttttgatattgtataatgaaaggtgacatttgtaagatctgcacaactcacaagcaacattttacaaaggaataatgcacgatgataacaaatcaggcatgggtaaaagatccattcaagttcaaaataggccaatggattgtaatgcaacaaggtaacaatcaccttgatgtggtgattcacccacctcagcctcaggagtagctgagtagctgggtctaaaggcacatgccaccacacccagctaattttttggatttttattagagacggggttttgctacgttgcccagtctgatctggaactcctggcctcaagtgatcctcccatctcggcctcccaaagcgctgggattacaggcgtgagccaccacacccagccctaaatagctctttaatcccttcttttgcggattagtagttcagctctctctaaataaagtttcctgtggaaggagagttgttatttattccctgtatggcatttgggagaagtgaaaaagatttgagtatatcatgaataagaaagaaaagagcataagagaatacaccagacagaagggaggcttttgtaagtgttgattaaagtaacagacacttacttattatagagaagacaaggtatttgctagagaaaagaacgaaaaagagaaaaagagggagaggaagagaaaaaaaagcaaaattacaagtgattgcatacatagtgagaggagaatatcaaaatgtatgctctttcttaaaactgcccagaaaaatctacctattcccttggctgaccagtcttcacccatttcactgttcatgtgcagaactggcaagagttaatgacagaaaattaaattatgtgtcaattttgttccttcttagcaagtctgataaaatactaaaggctataaagggataaatattgccctaaatcaaatctggataatattgaaaagagactccttcattttacagactaggaaaaccaagtccttcaaaaagcaaagtcataacagaacttaaacttatgcttcaatttgtactttgatacctattatccaattacctttcttttctcaagaaattacttctgtcgtgtttgttcagggactgaatacgtcaaggatggggaagctctccattaggaataaccatgctcagtgccacaaaacaaaatggtacaggtttggatttggtttttcattaggaaaaaagtaaacaaacattctctgcttttaacacaacataaatacagtgacctggttgtcctcaactggttcctcatgtaatgttggggtctcagtttccacttcattaaaatgagaaatctacataattcccaaagtcctttcttagaaagttggataattctaaaatcgctgaaaaaagaagtgtttgggggaggaagtatgaaatacacccggaatgtgtgt

SEQ ID NO: 547580 - DNA, 635 bp, Homo sapiens
tgttcagcctataataaaaaataacaaagcaaataggaaataaaacatcattaatgaaaaccagaaacaacaaacagtacaaaaagaaccacaggaaatctagatattagattgtaagtgtaaaccaaaaataaaattcaaaggccccctgcaaccatctgagtggactccctcctgggccagggcactctgaaatttaaccagaaagactggttaaggccatgatgggaagctggggatggacatgcctcatgataccctccagtgttarcatcaacacagaccttaagtctgagaagaaacatctacagtctattctctctagagcctactatttgcaggcttcatctgtgtgataaaacctagctctccacaactctttatcataactctttcaaccaactgccaatcagaatatgtttaaatctacctatgacctggaagctccctgtccctcttcaagttgtcccacccttccagatcaaaccaatgtaaatcttaagcgtatctgattgatgtctcatgtcttcctaaaatgtataaaagcaagctgtgctctgaccaccttgggcacacattgtcaggacctcctgaggctgtgtcatgggtgtctaaaagatgggtacttctgctcg

SEQ ID NO: 547581 - DNA, 536 bp, Homo sapiens
gttgagacgcattgataaacggcagaaagtactattggacttcaagagattagaatagaatctaataagtaaatgttaataattgataatgtcccaggctttagcttctatagttaattcatggttgttctttattatttatttatttatttttatttatttatttctgagatggagtttcgctcctgttgcacaggctggagtgcagtagtgtgatcgcagctcactgcagcctctgcttcccaggttcaagtgattctcatgcctcagcctcctgagtagctgggattacaggtgcatgccaccatgtccagctaatttttgtattttttgtagagacagggtttcaccatgttggccaggctggtctcgaactcttgacctcaggtgatctgcccmccttggcctcccaaagtgctgggattacaggcatgagccaccgcgcctggccaggttgtattttataaataaatacataaagtaaatggggatatgaatggaccaatggcgatagtgtgccctgaaaatggttgcta

SEQ ID NO: 547582 - DNA, 1002 bp, Homo sapiens
ccctcacctcagacggtgtgggccaaccttccaccgctagaaatggaagtgacaaccgcaacttccttttgtgagacaaaagggaatttattacattgggtagaaaaggatatactcaagtaggagtacgacacgtagagagtcagggaaaagtccccagtcttgcggcttcagcctgacgtgtctagagtcatttctgttttactgactaaactcttactgttacacaagtttgaacacactcacatgctatctatctacacacacacacacacacacacacacactcacacggaattaataaacatgcattaaataaaacaatagcatctacaccaggagggagttagtggagtcaaactgatttaagaatctttcattgttttggtggaagttgaaggttttgatcaacttttggctttggtagattgataatgcatgttgctgggtgcggtgagacacctgtagtcccagctactcaggaggaggatgaggtggaaggatcacctgagtcgaggagtttgagaccctgtctctcaaaataaaaaagaatgcgtgctgcaccttctgaggtaatcactaaaagaatgggaaaagatgtttttacaaattaaaattaattttttttctagagtcagttactcccaagaaaagggcaagaaaggagacaaaaagcaatatggggcaggcaggacaaatagaaaacaaaataagatggtaaatgtaaacccaaagwtacatagtatattgattatataattattctattaaagggtaaagattatcaacatgattttaaaataaaaattcaactatgcgctttttacaaaagatacataaaaacacataaagggtaaatgcagaaggatagaaaaatataaaccatgcaaatcctaaccaaaagaaaacctctgtatagtatgttaattattgtaaatatccatgttattaatagctgacaaagtagatattaagttaaaagaagttacaaaggctgggcgt

SEQ ID NO: 547583 - DNA, 1410 bp, Homo sapiens
ccaaatatgcaatgacattttttcagaaaggcaaaacaaaaacaaaaccttaaaaaaaaaaataaaacttctgtgcttccttttcttggtaagaaatcagctcacgtggtttttttcatttttctcttttgttttttagacacagggtctcgctctgttgcccaggctggagtgcagtggtacaatcataactcactgcgaccttacactcctgggctcaaacaatcctcctgcctcagcctaagtaggcccacaggcaaacaccaccatgcccagctaattttttatttcattttttgtagtgactggatctcactatgttacccaggmtggtctcaaactgttggcctcaggaaatcctcccacctctgcctcccaaagtgtcggggttacaggcatgagccactgtgtccagcctagctcacaggtttgactgtgatttttttttttttttttttgagacagagttttgctcttgtcacccaggtgggagtgcaatggcgcaatctcagctcactgcaacctccgcctcccgggttcaagcaattctcctgcctcagcctcccaagtagctgggactacaagtgcctgccaccatgcctggctaatttttgtactgttagtagagatggggtttcaccatgttggccaggctggtctcgaactcctgacctcaggtgatctgcctgcttcggcctcccaaattgctgggattacaggtgtgagccactgcacccagctgaactgtgatattttaaatctataagttttgacaccctgccctccacttgccaatttattctttttagataacagggaaaaaaaaaataaccaatcagatttaaaggacttaataaatctaccacttctgctcctatcaggagcacccagtattcctttaaaataccagaccaagtgacagtggtgactgccaggaacgttagccccctgaagtatcagcgtttgagttctctgggcattctgtgggccctgcagtggcacttgtccaaaagtggtacttccccactgttggagaatcagacgtgtacccatgagaagagcttttactccgataaggggaagaaaaaatcacccccaaacccaacagctctggccatgagtactttcctcttgtcttgtcccttaagggttactttttgcagtgcagcaagagagaccgacatcaaccctgagttacaagcaatagatagtgatggctggagggagtgagcaggaggaacccagtgctccccacacccattcacatcccacccttgtgtttctcaggcacatggcaaaaataacaaatccacaaactacagctagatttttaaaatccactcaatctaaggaggggaaaaagcaggaaggagaactgggtaggtaaaagacacagggaaaataacaaaa

SEQ ID NO: 547584 - DNA, 345 bp, Homo sapiens
gatcgtggactctcagattccttgagaacacatgaacrctgctgcatgaaactagcaaaccactggctacttagagggtttagcagaagacgtagagcggcaagacaagtaagcaacatgcttttctgggtcgagctgggtaagaagattttgtaaggacccatgcagctccctagtgtcttgatacttgtgggggctggagaaatgtctgtcgtgtactaccaactggtcacaaataagcatgagtgttttcatgagcctcctagatatatgtgtatctcttaactccacaatctaagattacaaagtaagaaacaggcaagctcaccagctagaatcagagca

SEQ ID NO: 547585 - DNA, 2618 bp, Homo sapiens
ataaagaagtatacatgggagacttttcattttgttctgtactaagaaaaattcttatgccctgggatcctgttgatctgtgaccttacccccaaccctgtgctctctgaaacgagtgctgtgtccactcagggttaaatggattaagggcggtgcaagatgtgctttgttaaacagatgcttgaaggcagcatgctcgttaagagtcatcaccactccctaatctcaagtacccagggacacaaacactgcggaaggcctcagggtcctctgcctaggaaaaccagagacctttgttcacttgtttatctgctgaccttccctccattattgtcctatgaccctgccaaatccccctctgcgagaaacacccaagaatgatcaataaaaaataaataaataaataaaaagaaagaagaaaaagaaaacttggatccacgtggattttattctggtgtcggacgtgaaatatgcataactttcttcgattttcccaaggttgtgccgtgtgtgtccctggcaacctggaggaaaggatttggtcgggcagttagcccagtgtggggaggtgacatttgcagagactgaagacaggaggcacagtctcctccatacacagagaccacagacggagagagctgcatgtgcaaaggtctcaaggtgggaggaagcttggctcattcccagaacagcaaggccagtgcggctgtaggtgctggggaagcaaggaggacagggatgggttcctggaggggccagcccaggtaggacctagtaggtaactgtggagtctggcttggatttgggctctaatggtaccgaggagctgcaggcaagatctttaaaactgttcacttgawaagataagacccagacgggaaactggggggcctaaggttatggacagttcaaattttgctgcaaattggctgggcgtggtggctcacacctataatcccagcactttgggaggctgaggcatgtggatcacctgaggtcaggagtttgagaccagcctgaccaacatggtgaaacccagtctctactaaaaatacaaaaattagccaggtgtggtggcgggcacctataatcccagctacttgggaggctgaggcaggagaatcacttgaacccaggtggtggaggttgcagtgagccaatatcgtgggactgtactccagcctggtgacagagtgaaactccatctcaaaaaaaaaaaaaatttgctgcaaattgacgaattgttctccaaaaacctgtattattttccctcacctttcacttgatgttatttccgtatcatttgctattttattaaatatttctgaagcatggtttttaataactgcatggtttcttaaaaaacatatttattgagatatagttgatatatagtaaactatacatatttagagtgtacagtttgataagttttgacatctgtatatacctgggaaaccatgaccacaaccaacatagtgaacacatccatcgcccccaaaagttcctcgtaccccattggggtgtttccctcctgccaccccctccccaggcagcagcccttctgctttttggtaatgattgcctggtgcttctcaccatatggctgccttgtaattatttgagcattcctctactgttagacatccatgtttatcccatttttgctacttcggctaggaagagcattctcatacatacagatatcttcatatacttgactatttccttacaacaaattctagaactggtatctccagaccaaaggttatgaatgttaagaatttggaagcaatttgcccaatcttgttcacaaggcttgctaggtatgacatgcactttccatttgattttctttctgaaaagttgaatcatcataatgccaaaaaaaaaatactaaccctccaagcgtggctcagatatttctgcttggacctaagaggtggctatttttggaaaggtccttttgtggctgtgaaggaaacaaatattccctcttccttcagatcctaaagtactcagtacctttgtggagtttgctgtgggagcacccaatagcctgccctcagccatttcccttcctgcagaattcaggaggcttctgcagcaaggatagttcaacccccttcaactctgcaggcttctctggtggaggcagggacctccagagtgactgacagtagttccaaggcaggcggagtgggagaactggcctctctgtaaccttacctgccaggggccctccacttcccaggtgtggaaactgaggcttagagaagggtgaggactggctgaaaaatcccatagcagatgagcaacagaactggaacccaacccagctctgctccactctgacggccacaacagcccagcaggtggtctgagtggtgctggggacaccagatgtgactcaggtgagatatgaacacatgggctttatatccacagccaggtatttattttaatgtgtatcaataagtagctgtgacatcgaggctacgatttcacagctgcagtgatgtatgacaaggttaaaggagggatttaagctaaaaagtgaaagaaatgaggctgggttcacacctctaatcctagcactttgggaggccaaggcgggt

SEQ ID NO: 547586 - DNA, 960 bp, Homo sapiens
ttttctttttcttttyttttttttttttagacagagtctctctctgtcgcccaggctggagtgcagtggcacgatctcggcttactgcagcttccatctcccgggttcaagcgattctcctgcctcagcctcctgagtggctgggactacaggcgcgccaccacgtcctgctaattttttgtatttttagtagagacagggtttcaccatgttggccaggatggtctcgatctcctgacctcgtggtctgcccgccttggcctcccaaagtgttgggattacaggcgtgagccaccgtgcccggccgcagtgtaggtttctgttactgtcattttccgtctaaggagatggagacagagaggggttaagtaacttgccccggggtgacacagtgtagcccgatttgctgtcaggcagtctgcttccagagtttgcagtcagccatatgtgggtaggatttgtctgagatgcttttgatcatggcaatggagagcttttgcagttatgttgagtttcttagaatcccagctgtttcatttatggctgtgtgactttgcaggttctgtctctgagccttacttacttcatctgtaaaactgggatgattcccacctcacaggcttgctctgagaacgaaacgatcccctgtcagtcaggtgctcagcgtggtgccaaggacagagtcagcccccatggcagtggctctttctgaggatgctgagcagactggcagggcgagcctgggaagggcctggctaaggagctagtcttctgttctgtgtatgaaggatgggccatcagcggggttaagcaggtgagggaggcgaatagctttgcattttaggaggatttcttgggtctcctgcttttgattggacgtggagaggccagaggtaaggtagttgagaggctctgtttagtccaggtgagcagtgatgtggatttgaaccggggctgtgg

SEQ ID NO: 547587 - DNA, 960 bp, Homo sapiens
ttttctttttcttttcttttttttttttagacagagtctctctctgtcgcccaggctggagtgcagtggcacgatctcggcttactgcagcttccatctcccgggttcaagcgattctcctgcctcagcctcctgagtggctgggactacaggcgcgccaccacgtcctgctaattttttgtatttttagtagagacagggtttcaccatgttggccaggatggtctcgatctcctgacctcgtggtctgcccrccttggcctcccaaagtgttgggattacaggcgtgagccaccgtgcccggccgcagtgtaggtttctgttactgtcattttccgtctaaggagatggagacagagaggggttaagtaacttgccccggggtgacacagtgtagcccgatttgctgtcaggcagtctgcttccagagtttgcagtcagccatatgtgggtaggatttgtctgagatgcttttgatcatggcaatggagagcttttgcagttatgttgagtttcttagaatcccagctgtttcatttatggctgtgtgactttgcaggttctgtctctgagccttacttacttcatctgtaaaactgggatgattcccacctcacaggcttgctctgagaacgaaacgatcccctgtcagtcaggtgctcagcgtggtgccaaggacagagtcagcccccatggcagtggctctttctgaggatgctgagcagactggcagggcgagcctgggaagggcctggctaaggagctagtcttctgttctgtgtatgaaggatgggccatcagcggggttaagcaggtgagggaggcgaatagctttgcattttaggaggatttcttgggtctcctgcttttgattggacgtggagaggccagaggtaaggtagttgagaggctctgtttagtccaggtgagcagtgatgtggatttgaaccggggctgtgg

SEQ ID NO: 547588 - DNA, 960 bp, Homo sapiens
ttttctttttcttttcttttttttttttagacagagtctctctctgtcgcccaggctggagtgcagtggcacgatctcggcttactgcagcttccatctcccgggttcaagcgattctcctgcctcagcctcctgagtggctgggactacaggcgcgccaccacgtcctgctaattttttgtatttttagtagagacagggtttcaccatgttggccaggatggtctcgatctcctgacctcgtggtctgcccgccttggcctcccaaagtgttgggattacaggcgtgagccaccgtgcccggccgcagtgtaggtttctgttactgtcattttccgtctaaggagatggagacagagaggggttaagtaacttgccccggggtgacacagtgtagcccgatttgctgtcaggcagtctgcttccagagtttgcagtcagccatatgtgggtaggatttgtctgagatgcttttgatcatggcaatggagagcttttgcagttatgttgagtttcttagaatcccagctgtttcatttatggctgtgtgactttgcaggttctgtctctgagccttacttacttcatctgtaaaactgggatgattcccacctcacaggcttgctctgagaaygaaacgatcccctgtcagtcaggtgctcagcgtggtgccaaggacagagtcagcccccatggcagtggctctttctgaggatgctgagcagactggcagggcgagcctgggaagggcctggctaaggagctagtcttctgttctgtgtatgaaggatgggccatcagcggggttaagcaggtgagggaggcgaatagctttgcattttaggaggatttcttgggtctcctgcttttgattggacgtggagaggccagaggtaaggtagttgagaggctctgtttagtccaggtgagcagtgatgtggatttgaaccggggctgtgg

SEQ ID NO: 547589 - DNA, 1485 bp, Homo sapiens
tcaggaaatacaaacagactacaaaacagaatagagctagcttttgccacagaattgagatgtcatcagcagagactcattcaacaaatatttattgagtgctaattatgtgctagacatggttccggatgctgaagatacaacagggaacaaaacagaccaacatccctgccctccgggagctgacaggaggatgctgtgtctggatccagctattaggcctggggtccggatcatattagagatagattccaaattcaagactatgcattgagcactttctgaatgcttggcactaagacaaagacccattcctaaaaagcttattaaagtcaatcaactagccgctatttactgagcagcaactataaactctgctaggcactttgcagtttatcatttaataacagtgttacataggttttattatccccactcaaacctagagaggttagtcagcttgccaaaatggccaggagtggttggactagaagaaaagagcaagtgcagatcttatgtcagagtctgtactctgttccctcactaccaccgccttctaccacaggggtccccaagcccaggccagagaccgggaccagtccctcacctgttaggaaccaggctgcacagcagaaggtgaacgggggcgaatgagtgaagcttcatctgtatttacagccactccccatccttcgcattacccccgagctctgcctcctgtcagatcggcccaggcattacagtctcatagcacaaaccctactgtgaactgcacatgcgagggatccaagatgcgtgctctttaygagaatctaatgcctgatgatctgtcaccgtctccatcaccttcagatgggaccttctagttgcaggaaaataagctcagggctcacactgattctgcattatggtgacttgtataattaattcattatatattgcaatgtaataataatagaaataaagtacacaataaatggaatgtgcctgaatcttcccaaaaccattcccatccccgaccatccatggaaaaattttcttccacaaaaccagtccctggtgccaaaaaggttggggagggacaactgttctgtgtaaagagtgggggcactttacctacggtagcccatagaaatacagtcgacccctgaacaacttggaagttagaggaactgacctcctgcgcactcaaaaatccaagtaaattatggactccccaaaaacttaactactaatagcccactgttgaccagaagccttacagaaaacataaacagttgattaacacacatttttagatatgtattatatgctgtattcttacaataaagtaagctagagaaaagaaaatgttattaagaaaatgataaggaaaagaaagcacatttagagttctgtcctgtcattatcaatcctgtaagtttatgtctcctgcttagaagatgaattgtctttatgaaatgctgggcaactgcagctacagac

SEQ ID NO: 547590 - DNA, 597 bp, Homo sapiens
ggaaggctcccaattctttccattttccaagacaccgtgctgagttgggcaaacaaaacaaaaccctcagagtaagacacacccttgcatggatggactagagcatgatacatgatatttagcaagatcttagaagaaaaggtagattgaaatcaacatcccacctgccctcaaattatcaccctcagaatgttagagcaaatagaacgtctgacaatgttttccataattgaaataaaaataartggtttagcaatgatgctaacaatctacagggatagagggagagggaaaaggagggaagagaggagagagagagggagggaggaaggaaggaagaaagaaggaagaaaggagggaaaaagagaagaggggaggagggaaggaagaaaaagaagaaaagaaataaggaaatagaaagagaaagaaagaagaagaaagaaaaaagaaagaagaaaggaagaagaaagagaaagaaagaaaccatcatagtatacaaaagacagataaccatcacagactggaagaatgcataaaacaaggaacagatgcaactaaccctagagttctctaagccatagtaaaatttaaaatatg

SEQ ID NO: 547591 - DNA, 597 bp, Homo sapiens
ggaaggctcccaattctttccattttccaagacaccgtgctgagttgggcaaacaaaacaaaaccctcagagtaagacacacccttgcatggatggactagagcatgatacatgatatttagcaagatcttagaagaaaaggtagattgaaatcaacatcccacctgccctcaaattatcaccctcagaatgttagagcaaatagaacgtctgacaatgttttccataattgaaataaaaataaatggtttagcaatgatgctaacaatctacagggatagagggagagggaaaaggagggaagagaggagagagagagggagggaggaaggaaggaagaaagaaggaagaaaggagggaaaaagagaagaggggaggagggaaggaagaaaaagaagaaaagaaataaggaaatagaaagagaaagaaagaagaagaaagaaaaaagaaagaagaaaggaagaagaaagagaaagaaagaaaccatcatagtatacaaaagacagataaccatcacagactggaagaatgcataaaacaaggaacagrtgcaactaaccctagagttctctaagccatagtaaaatttaaaatatg

SEQ ID NO: 547592 - DNA, 591 bp, Homo sapiens
ttttcagttctcttgggagtatgcttaggagtggaattaccaagtcatggaaactatgtttaacttaaacataaagcactgtcaaactgtctttcaaagctgctgcactattttacagtcccatccacaatatatgagggttccagtttctccgtgtggctctccaagccctcctttacttgtcttcaccgcatttatcactgcctgacataccctatattcttttattacgtctggttcttctattagacagtgagctcggagaagtgggggatctctttggttagctctgcagccccagcaccacacagtggctggcacagagtgcaacgctcaacccatgtcttgaatttgtsaatatagttctgtaaccttttttcactaacctagtcccttgatcttcattttacatctgattacctttagttacccaagtactttattttgtatttaacttgcattcaaaaaacaggatctcagttcttccttcttgtaaagtaagaaaatcttatttatgatatatgcagttgacttatcttgcctcaacagaagaaaagttaaatattacatttttttcttttaggaaatatc

SEQ ID NO: 547593 - DNA, 630 bp, Homo sapiens
caaatacctcttaccagttccctctcaggacgcatggggattatgagagctacaattcaagatgggatttgggtggggacacagtcaaaccatatcagagtcaaattagctgccaatatcaagttttcttccttatttttttccctgctayctgcaatggaacacaaatacagaggtgtgaaagatgtctaatacattttgcaaatatccaccattcttgagaaccagcctcctcttgtagtggtgggcagaatgtgaagcatgtctccttgaacaagtcgcttgcaggtggcaactgactttgtttgcaatctggtgacttcactaaagtagatgttctttttcaaatgaagactatctatttgttagaaaaatctgattttccttagaataatactttgggacaaatagaattatcatgagttgattatttgaataactagagcagagcaataaagttgcctttaaaagtttgtgtatagcacacaaattcccccgcagtatgtattctatactgagtggttatgagccactgactgaccagaaacatatcttccttagtgtcttatgacacagctaccatttcttttctttaagaataaagactagtttcatttggaagttattacc

SEQ ID NO: 547594 - DNA, 907 bp, Homo sapiens
ggtactgcaaaagatgagtttctaattgagacagacaatgaactgtgcatcagaaacagctgcagggaaacatctcattgcatttttacatgtttaatatgctgaatttccacattagatggtcacaattttgattcctaagacatccaggtgcctttacatctgtgtggtatatttagaaagtaagaaatatcagatggaaaatattttatgttcatagtatgccttttttagttttcccttattaatttcattatccttatatgctatgtaaatgagaacagcttgtttagcaatgacattttgtataagtttggatgtcatagttctttcccttttccatgaaaagggacataaacctttgttctatggtaaatacctatatttacctgtaggcagtatattaagagaagccaggaaacaaaccttatttccctaaaaatggtatttgttttaggcaaggtaattctggtatcacatatagacccaaatctcactgactccacactgtagaggttaacgtgggtgtttacaggatgtatccaacacagatcagcaggctttgctctatattcagttagggcccagactgagactactccatcctcttgtaacatcaccatgtcttccacacatgaygttcaagattgccacatcaggggaaaggagcatggagaactcacaatcacccctattcccttaattctgcagtgaaaagaatcactttcactccaaggacattgaccggaactggtcttatgaccttacatgaagtacaagagaggctgggaaatgtagaggagcaatctgatatttggcaaagattactgttcctgccacagtttttttttttttaatctgtgctctcaagggatacaaagcacaaatcgattatccccttcaacag

SEQ ID NO: 547595 - DNA, 1488 bp, Homo sapiens
ccagcccccagagggcgggcttgagccaagaggcggccgcgcaccctctcccggccacttcctcgcttcctcccttccaacgtggggaacagcctgtcccggggactcttccgtgcaccggtgctccaggcgcagctgcccgccccacatctcccgcgggaagaactcgcccccagcgtccccgaggcccgccctcctcggcggccgggacaggcggcggcgggctaggggctccccgtgcagcccctcaccataggcagcaccaggccctggttgtagtccgtgtgttccccgatgaggttgacgcggcccggcgctgacacggccagctcgggctcggccccgaactcctcccggaaggctcgccgggcctcggccagcagctccgcgacctggggctgtctcaaagcagccatgacgcgcgcctgcagctctgcacagctgctccggcacagccccgtcggcgcgggatgctcgggcggggccccgcgcgggggtgcgcacattcccgccagccccgccccgcgcccggacgccccgcccccagacctcagccggttccgcccccacccgcaactcccgtgggaatccagctgctgggtggtgggtggcaggggctaatggtgccgggtgggatacagcgcccccgatggtgtccttccctctggacttcgggaagaaccaatgagcactcactagagtgagaatagccctgagtggcacttggcatgaccaggatttctgagctgcccttccctggcgctggtgactttctatgtgcctcaccacccaccaccacccacacagccagagcaatggagctggcacccggttgacctgggattcccaaagggatcccctaggtccccagggccagcagctgtgagaggtcatcagcctctgatcaccggtctccaagagggtgacctgacactcactgtaagtagagataaagacagacaagtttgggccgggcgcagtggctcacgcctgtaatcccagcactttgggaggccgaggtgtgcagatcacctgaggtcgggagttggagaccagcctgaccaacatggagaaaccccatctctactaaaaaatacaaaattagctgggcatggtggctcatgcctgtaatcccagctactcgggaggctgaggcaggagaatyacttgaacctgggaggcggaggtttcggtgagctgagatcacaccattgcactccagcctgggcaacaagagcaaaactctgtctcaaaaaaaaaaaagacaagtttggtggtgaccagagagtcaattttacaagctccttttctaggtaatacgcaacagctcctagcaatggagaattggactagggtggcggtggccagcagtgggcccagcccctcccttaaggacctgccacagctgtccaggtaggttgtgctgttggccccagcaggcactacttcagcccagaagcccttgtctcagaggcgtggccttgttcc

SEQ ID NO: 547596 - DNA, 1561 bp, Homo sapiens
  misc_feature 49: n = A,T,C or G
gctgtggatacacaccaacacctgttaactgcaatcacctgttactctntctgcacaggggagccaggagtaggagtgccatggcattaaatttcctaggactatgactcaggcaattgaagataagcaccaattttttctactttttgaatgcaacattgctaaggagtattctgtattgcttcctggagttctctagcataactgaacatagattgcccactgtagaaacctgctcaataacacactttattaaatttctctccattctttacttccttactttcttaccagtgtttcctggacgaccccacaaataaactacctgtactcaaaccttttaaagaaacccagcctttgatagcaaccattatatactgcatgattttatgtatgccatctacaaagtagaactcagttgaaatgtttaaagtttactttttcctttattaatttaatcttcataataattctacaatgaaagtattaggctctttattttacaaagaaattgaggttcagaaaggttaatgtcttgctgaaaattcatatatttagtcagtgacagtgctgagagttgagcctttttatttgaactcaagtccatatgactagtgtggaggatttctgtttgaatgcgtttgtgcaaaatctggttgatcagttgttagtgatattgaagaagtgttttgaaatatatgcacatgttgcctgaggtcactgatagttttttttataccattcagcatcaaattatataaggtataagaccttgtcatgcctatgagattaggtattcctctgtcattggaggaaactctgaaaatatcttattttcactgaggttatcaaagcagccatgttttctgtagtgaaatagtggagagttatataatgtactcccttatctagctttaaatatatctatgtctttcagagcattctggtaaatcgcattgcactgaaaaggaaagcacagataaaattggggattagtgatctttactaacctgaagaaaaggcttgaaagcatggaactgggttgaaggtaaaatgtatccattggtagaacacagaaaatactatattttgtygacttcatatttgagcatcatctttctcttttgcccctttgctattgcttgctgaagagggtgttctctaaaatccagagatcctttttaagaatttatagcagggctgcccccttaatcttttcctcatctataaatcactgatcttgaagctttgctttgaaggtttatatgaaatgcatccaaatacctagtatatactaggcattcaacaaatggcaaaatatcatccatatggcaaaataatctcttaaagcagaaatctttgaatgtttggtcctttcttaactctgacccttttgctagtcaggactctattcacattacctaggaaataagaaggactgatattggaaaaaaaaaaaaaaagagagagggagacaaagacagacagagagaaaagaaggaaggaaggaaagaaggaagtcaatttttttttttaatttccaaataaggccttggaatcc

SEQ ID NO: 547597 - DNA, 1561 bp, Homo sapiens
  misc_feature 49: n = A,T,C or G
gctgtggatacacaccaacacctgttaactgcaatcacctgttactctntctgcacaggggagccaggagtaggagtgccatggcattaaatttcctaggactatgactcaggcaattgaagataagcaccaattttttctactttttgaatgcaacattgctaaggagtattctgtattgcttcctggagttctctagcataactgaacatagattgcccactgtagaaacctgctcaataacacactttattaaatttctctccattctttacttccttactttcttaccagtgtttcctggacgaccccacaaataaactacctgtactcaaaccttttaaagaaacccagcctttgatagcaaccattatatactgcatgattttatgtatgccatctacaaagtagaactcagttgaaatgtttaaagtttactttttcctttattaatttaatcttcataataattctacaatgaaagtattaggctctttattttacaaagaaattgaggttcagaaaggttaatgtcttgctgaaaattcatatatttagtcagtgacagtgctgagagttgagcctttttatttgaactcaagtccatatgactagtgtggaggatttctgtttgaatgcgtttgtgcaaaatctggttgatcagttgttagtgatattgaagaagtgttttgaaatatatgcacatgttgcctgaggtcactgatagttttttttataccattcagcatcaaattatataaggtataagaccttgtcatgcctatgagattaggtattcctctgtcattggaggaaactctgaaaatatcttattttcactgaggttatcaaagcagccatgttttctgtagtgaaatagtggagagttatataatgtactcccttatctagctttaaatatatctatgtctttcagagcattctggtaaatcgcattgcactgaaaaggaaagcacagataaaattggggattagtgatctttactaacctgaagaaaaggcttgaaagcatggaactgggttgaaggtaaaatgtatccattggtagaacacagaaaatactatattttgttgacttcatatttgagcatcatctttctcttttgcccctttgctattgcttgctgaagagggtgttctctaaaatccagagatcctttttaagaatttatagcagggctgcccccttaatcttttcctcatctataaatcactgatcttgaagctttgctttgaaggtttatatgaaatgcatccaaatacctagtatatactaggcattcaacaaatggcaaaatatcatccatatggcaaaataatctcttaaagcagaaatctttgaatgtttkgtcctttcttaactctgacccttttgctagtcaggactctattcacattacctaggaaataagaaggactgatattggaaaaaaaaaaaaaaagagagagggagacaaagacagacagagagaaaagaaggaaggaaggaaagaaggaagtcaatttttttttttaatttccaaataaggccttggaatcc

SEQ ID NO: 547598 - DNA, 1561 bp, Homo sapiens
  misc_feature 49: n = A,T,C or G
gctgtggatacacaccaacacctgttaactgcaatcacctgttactctntctgcacaggggagccaggagtaggagtgccatggcattaaatttcctaggactatgactcaggcaattgaagataagcaccaattttttctactttttgaatgcaacattgctaaggagtattctgtattgcttcctggagttctctagcataactgaacatagattgcccactgtagaaacctgctcaataacacactttattaaatttctctccattctttacttccttactttcttaccagtgtttcctggacgaccccacaaataaactacctgtactcaaaccttttaaagaaacccagcctttgatagcaaccattatatactgcatgattttatgtatgccatctacaaagtagaactcagttgaaatgtttaaagtttactttttcctttattaatttaatcttcataataattctacaatgaaagtattaggctctttattttacaaagaaattgaggttcagaaaggttaatgtcttgctgaaaattcatatatttagtcagtgacagtgctgagagttgagcctttttatttgaactcaagtccatatgactagtgtggaggatttctgtttgaatgcgtttgtgcaaaatctggttgatcagttgttagtgatattgaagaagtgttttgaaatatatgcacatgttgcctgaggtcactgatagttttttttataccattcagcatcaaattatataaggtataagaccttgtcatgcctatgagattaggtattcctctgtcattggaggaaactctgaaaatatcttattttcactgaggttatcaaagcagccatgttttctgtagtgaaatagtggagagttatataatgtactcccttatctagctttaaatatatctatgtctttcagagcattctggtaaatcgcattgcactgaaaaggaaagcacagataaaattggggattagtgatctttactaacctgaagaaaaggcttgaaagcatggaactgggttgaaggtaaaatgtatccattggtagaacacagaaaatactatattttgttgacttcatatttgagcatcatctttctcttttgcccctttgctattgcttgctgaagagggtgttctctaaaatccagagatcctttttaagaatttatagcagggctgcccccttaatcttttcctcatctataaatcactgatcttgaagctttgctttgaaggtttatatgaaatgcatccaaatacctagtatatactaggcattcaacaaatggcaaaatatcatccatatggcaaaataatctcttaaagcagaaatctttgaatgtttggtcctttcttaactctgacccttttgctagtcaggactctattcacattacctaggaaataagaaggactgatattggraaaaaaaaaaaaaagagagagggagacaaagacagacagagagaaaagaaggaaggaaggaaagaaggaagtcaatttttttttttaatttccaaataaggccttggaatcc

SEQ ID NO: 547599 - DNA, 1561 bp, Homo sapiens
  misc_feature 49: n = A,T,C or G
gctgtggatacacaccaacacctgttaactgcaatcacctgttactctntctgcacaggggagccaggagtaggagtgccatggcattaaatttcctaggactatgactcaggcaattgaagataagcaccaattttttctactttttgaatgcaacattgctaaggagtattctgtattgcttcctggagttctctagcataactgaacatagattgcccactgtagaaacctgctcaataacacactttattaaatttctctccattctttacttccttactttcttaccagtgtttcctggacgaccccacaaataaactacctgtactcaaaccttttaaagaaacccagcctttgatagcaaccattatatactgcatgattttatgtatgccatctacaaagtagaactcagttgaaatgtttaaagtttactttttcctttattaatttaatcttcataataattctacaatgaaagtattaggctctttattttacaaagaaattgaggttcagaaaggttaatgtcttgctgaaaattcatatatttagtcagtgacagtgctgagagttgagcctttttatttgaactcaagtccatatgactagtgtggaggatttctgtttgaatgcgtttgtgcaaaatctggttgatcagttgttagtgatattgaagaagtgttttgaaatatatgcacatgttgcctgaggtcactgatagttttttttataccattcagcatcaaattatataaggtataagaccttgtcatgcctatgagattaggtattcctctgtcattggaggaaactctgaaaatatcttattttcactgaggttatcaaagcagccatgttttctgtagtgaaatagtggagagttatataatgtactcccttatctagctttaaatatatctatgtctttcagagcattctggtaaatcgcattgcactgaaaaggaaagcacagataaaattggggattagtgatctttactaacctgaagaaaaggcttgaaagcatggaactgggttgaaggtaaaatgtatccattggtagaacacagaaaatactatattttgttgacttcatatttgagcatcatctttctcttttgcccctttgctattgcttgctgaagagggtgttctctaaaatccagagatcctttttaagaatttatagcagggctgcccccttaatcttttcctcatctataaatcactgatcttgaagctttgctttgaaggtttatatgaaatgcatccaaatacctagtatatactaggcattcaacaaatggcaaaatatcatccatatggcaaaataatctcttaaagcagaaatctttgaatgtttggtcctttcttaactctgacccttttgctagtcaggactctattcacattacctaggaaataagaaggactgatattggaaaaaaaaaaaaaaagagagagggagayaaagacagacagagagaaaagaaggaaggaaggaaagaaggaagtcaatttttttttttaatttccaaataaggccttggaatcc

SEQ ID NO: 547600 - DNA, 1561 bp, Homo sapiens
  misc_feature 49: n = A,T,C or G
gctgtggatacacaccaacacctgttaactgcaatcacctgttactctntctgcacaggggagccaggagtaggagtgccatggcattaaatttcctaggactatgactcaggcaattgaagataagcaccaattttttctactttttgaatgcaacattgctaaggagtattctgtattgcttcctggagttctctagcataactgaacatagattgcccactgtagaaacctgctcaataacacactttattaaatttctctccattctttacttccttactttcttaccagtgtttcctggacgaccccacaaataaactacctgtactcaaaccttttaaagaaacccagcctttgatagcaaccattatatactgcatgattttatgtatgccatctacaaagtagaactcagttgaaatgtttaaagtttactttttcctttattaatttaatcttcataataattctacaatgaaagtattaggctctttattttacaaagaaattgaggttcagaaaggttaatgtcttgctgaaaattcatatatttagtcagtgacagtgctgagagttgagcctttttatttgaactcaagtccatatgactagtgtggaggatttctgtttgaatgcgtttgtgcaaaatctggttgatcagttgttagtgatattgaagaagtgttttgaaatatatgcacatgttgcctgaggtcactgatagttttttttataccattcagcatcaaattatataaggtataagaccttgtcatgcctatgagattaggtattcctctgtcattggaggaaactctgaaaatatcttattttcactgaggttatcaaagcagccatgttttctgtagtgaaatagtggagagttatataatgtactcccttatctagctttaaatatatctatgtctttcagagcattctggtaaatcgcattgcactgaaaaggaaagcacagataaaattggggattagtgatctttactaacctgaagaaaaggcttgaaagcatggaactgggttgaaggtaaaatgtatccattggtagaacacagaaaatactatattttgttgacttcatatttgagcatcatctttctcttttgcccctttgctattgcttgctgaagagggtgttctctaaaatccagagatcctttttaagaatttatagcagggctgcccccttaatcttttcctcatctataaatcactgatcttgaagctttgctttgaaggtttatatgaaatgcatccaaatacctagtatatactaggcattcaacaaatggcaaaatatcatccatatggcaaaataatctcttaaagcagaaatctttgaatgtttggtcctttcttaactctgacccttttgctagtcaggactctattcacattacctaggaaataagaaggactgatattggaaaaaaaaaaaaaaagagagagggagacaaagacagacagagagaaaagaaggaaggaaggaaagaaggaagtcaattttttttttwaatttccaaataaggccttggaatcc

SEQ ID NO: 547601 - DNA, 1561 bp, Homo sapiens
  misc_feature 49: n = A,T,C or G
gctgtggatacacaccaacacctgttaactgcaatcacctgttactctntctgcacaggggagccaggagtaggagtgccatggcattaaatttcctaggactatgactcaggcaattgaagataagcaccaattttttctactttttgaatgcaacattgctaaggagtattctgtattgcttcctggagttctctagcataactgaacatagattgcccactgtagaaacctgctcaataacacactttattaaatttctctccattctttacttccttactttcttaccagtgtttcctggacgaccccacaaataaactacctgtactcaaaccttttaaagaaacccagcctttgatagcaaccattatatactgcatgattttatgtatgccatctacaaagtagaactcagttgaaatgtttaaagtttactttttcctttattaatttaatcttcataataattctacaatgaaagtattaggctctttattttacaaagaaattgaggttcagaaaggttaatgtcttgctgaaaattcatatatttagtcagtgacagtgctgagagttgagcctttttatttgaactcaagtccatatgactagtgtggaggatttctgtttgaatgcgtttgtgcaaaatctggttgatcagttgttagtgatattgaagaagtgttttgaaatatatgcacatgttgcctgaggtcactgatagttttttttataccattcagcatcaaattatataaggtataagaccttgtcatgcctatgagattaggtattcctctgtcattggaggaaactctgaaaatatcttattttcactgaggttatcaaagcagccatgttttctgtagtgaaatagtggagagttatataatgtactcccttatctagctttaaatatatctatgtctttcagagcattctggtaaatcgcattgcactgaaaaggaaagcacagataaaattggggattagtgatctttactaacctgaagaaaaggcttgaaagcatggaactgggttgaaggtaaaatgtatccattggtagaacacagaaaatactatattttgttgacttcatatttgagcatcatctttctcttttgcccctttgctattgcttgctgaagagggtgttctctaaaatccagagatcctttttaagaatttatagcagggctgcccccttaatcttttcctcatctataaatcactgatcttgaagctttgctttgaaggtttatatgaaatgcatccaaatacctagtatatactaggcattcaacaaatggcaaaatatcatccatatggcaaaataatctcttaaagcagaaatctttgaatgtttggtcctttcttaactctgacccttttgctagtcaggactctattcacattacctaggaaataagaaggactgatattggaaaaaaaaaaaaaaagagagagggagacaaagacagacagagagaaaagaaggaaggaaggaaagaaggaagtcaatttttttttttaatttycaaataaggccttggaatcc

SEQ ID NO: 547602 - DNA, 949 bp, Homo sapiens
aactcaggggtaggctttgggctgggggagcagggaaaaaagaaaaacaaaccacttaaaattttagggacatctcctgccaaaagcttttttttttttttttcaaataaaaaaaaaaaacaccccgatctgaagccaatgaagcaaacaggaaagcagcgtctgggcctgctctgagggcagatggcagcctcttgggtttcagaatgagttgatcattgcgtaaacaaggtggcctctgggcgggggcagcctgctctgtaagagctcttccccaasgggcacttgggccctttagtgtccacattcttcaagcctggcagtgccctgccctggagtcccttcaagttcaatgttgcttggcaacttacaatgtgctattacgaccgtgtctgttattccccatgatgatcctgtgaacgtggtgtggattagtagatccatcttatggaaaggggtaccctgggtttcagaaaggtagccttgctagctcaaggtcaggtggagaggaaatggcagagccaagcacaggacacaggcctctgttttgccgtttagctaggcaagtgcaacaggaaggaagggggaggcatgcgtgaccctggggagggctgagagccttaaccataacatcaccttggggtttgttgagtgtccttgagtaagcacgggctctggaacaaaagagcatgaactcaagccccagatccagatcctcctagcaggaaagtttctgagatttcttgggaaacttaaccttgggaaagtttctgagatttctgagccttgggttcctcatctgtgaaatggggatagtagtaggacctgccttataaagatgcggtgggaattcaatgagctaaagcctatgaaatgtttagagccacttctggcacaccctgagtgttagctcttattgcaacatcctttcatgtaaactcatttaggg

SEQ ID NO: 547603 - DNA, 949 bp, Homo sapiens
aactcaggggtaggctttgggctgggggagcagggaaaaaagaaaaacaaaccacttaaaattttagggacatctcctgccaaaagcttttttttttttttttcaaataaaaaaaaaaaacaccccgatctgaagccaatgaagcaaacaggaaagcagcgtctgggcctgctctgagggcagatggcagcctcttgggtttcagaatgagttgatcattgcgtaaacaaggtggcctctgggcgggggcagcctgctctgtaagagctcttccccaaggggcacttgggccctttagtgtccacattcttcaagcctggcagtgccctgccctggagtcccttcaagttcaatgttgcttggcaacttacaatgtgctattacgaccgtgtctgttattccccatgatgatcctgtgaacgtggtgtggattagtagatccatcttatggaaaggggtaccctgggtttcagaaaggtagccttgctagctcaaggtcaggtggagaggaaatggcagagccaagcacaggacacaggcctctgttttgccrtttagctaggcaagtgcaacaggaaggaagggggaggcatgcgtgaccctggggagggctgagagccttaaccataacatcaccttggggtttgttgagtgtccttgagtaagcacgggctctggaacaaaagagcatgaactcaagccccagatccagatcctcctagcaggaaagtttctgagatttcttgggaaacttaaccttgggaaagtttctgagatttctgagccttgggttcctcatctgtgaaatggggatagtagtaggacctgccttataaagatgcggtgggaattcaatgagctaaagcctatgaaatgtttagagccacttctggcacaccctgagtgttagctcttattgcaacatcctttcatgtaaactcatttaggg

SEQ ID NO: 547604 - DNA, 944 bp, Homo sapiens
ttcctgttctgccgttcagtgattcaaaatattcaagagctcccggccgttgtgcgctgagccggggctgggaatacaaaatagaataggtttctgcctttcgggcctagcagtgtcagtgtggaagcagatgggtgagcgaatggcgttgtcacacaaggcccacgggggaagtgctaaggcaggagtggtcagtgctttgtgtgggaggcaggcagggcttcagggaggagggtgtmggggtgagcctgtagggtgagcctttaggcctcggttgtccttagccagcaagatgtgtgtggggcgatttctggggagagggcggtgttggctgtttggaacgtggccctcagaggactgttgggccaagtgcttgttgcgtgagctgtggcttcagtgctgctcagagtgatctttgggctctgtcctccagctgagcacctgcagtgcccctctccttagacggccccgggaagagcgggcaggagcaggtgggccaggaccctgggaccaccttgaaatattttctaaatacagtgcacacacacatatccacacacagataaatatatagagatagatgtgtacacacacaaacacacccacacacagagttaatcttccttattagcagattctatatttgtgaatttgcctacttgctaatatttgctcgcaacccccaaatcaatactcacagcactttctcagtcattcatgaacctgtgcagaacagcagaaaaatggactgactcaacacccgtgttcccagcagaggtggaacaaggtgatgctttgccttcttttcttcagctcaaactggaaacaagtctcttttttgaggcctagttagtatcatgtttgggggacttttgtgctttttggggtgattttgatgttttaaatggcacccaagtgtagagctgaagtgctgtctcttattc

SEQ ID NO: 547605 - DNA, 944 bp, Homo sapiens
ttcctgttctgccgttcagtgattcaaaatattcaagagctcccggccgttgtgcgctgagccggggctgggaatacaaaatagaataggtttctgcctttcgggcctagcagtgtcagtgtggaagcagatgggtgagcgaatggcgttgtcacacaaggcccacgggggaagtgctaaggcaggagtggtcagtgctttgtgtgggaggcaggcagggcttcagggaggagggtgtcggggtgagcctgtagggtgagcctttaggcctcggttgtccttagccagcaagatgtgtgtggggcgatttctgrggagagggcggtgttggctgtttggaacgtggccctcagaggactgttgggccaagtgcttgttgcgtgagctgtggcttcagtgctgctcagagtgatctttgggctctgtcctccagctgagcacctgcagtgcccctctccttagacggccccgggaagagcgggcaggagcaggtgggccaggaccctgggaccaccttgaaatattttctaaatacagtgcacacacacatatccacacacagataaatatatagagatagatgtgtacacacacaaacacacccacacacagagttaatcttccttattagcagattctatatttgtgaatttgcctacttgctaatatttgctcgcaacccccaaatcaatactcacagcactttctcagtcattcatgaacctgtgcagaacagcagaaaaatggactgactcaacacccgtgttcccagcagaggtggaacaaggtgatgctttgccttcttttcttcagctcaaactggaaacaagtctcttttttgaggcctagttagtatcatgtttgggggacttttgtgctttttggggtgattttgatgttttaaatggcacccaagtgtagagctgaagtgctgtctcttattc

SEQ ID NO: 547606 - DNA, 944 bp, Homo sapiens
ttcctgttctgccgttcagtgattcaaaatattcaagagctcccggccgttgtgcgctgagccggggctgggaatacaaaatagaataggtttctgcctttcgggcctagcagtgtcagtgtggaagcagatgggtgagcgaatggcgttgtcacacaaggcccacgggggaagtgctaaggcaggagtggtcagtgctttgtgtgggaggcaggcagggcttcagggaggagggtgtcggggtgagcctgtagggtgagcctttaggcctcggttgtccttagccagcaagatgtgtgtggggcgatttctggggagagggcggtgttggctgtttggaacgtggccctcagaggactgttgggccaagtgcttgttgcgtgagctgtggcttcagtgctgctcagagtgatctttgggctctgtcctccagctgagcacctgcagtgcccctctccttagacggccccgggaagagcgggcaggagcaggtgggccaggaccctgggaccaccttgaaatattttctaaatacagtgcacacacacatatmcacacacagataaatatatagagatagatgtgtacacacacaaacacacccacacacagagttaatcttccttattagcagattctatatttgtgaatttgcctacttgctaatatttgctcgcaacccccaaatcaatactcacagcactttctcagtcattcatgaacctgtgcagaacagcagaaaaatggactgactcaacacccgtgttcccagcagaggtggaacaaggtgatgctttgccttcttttcttcagctcaaactggaaacaagtctcttttttgaggcctagttagtatcatgtttgggggacttttgtgctttttggggtgattttgatgttttaaatggcacccaagtgtagagctgaagtgctgtctcttattc

SEQ ID NO: 547607 - DNA, 932 bp, Homo sapiens
tcttttgtatttcttatatggaaataccatataagaatgagcatgcttggtataactcaaagcctgtttatttgcaaggctgtattgaccctggacaataaatatttgtatgttatggatgggaaacaagtccgcatgaaaagctcctgctgtcttttaggaaagcctattggctgtggttgtatatctctttccaaagggaaattggtgaactttctgctatagtgttttccataatgacagcataaaaactgaaataaactcatcttgtcagtggtcacttttgggtttggtgtatattagggagcaattttgcaatgtgtttaaaaattacattcaagaattaattttgtgcaccttattttaatgccatatttccattcaagctctgcatgtcacaacagtctgtgatgattcttttggcattgaaataattatccatggcacttaaaccgtgtttctttcatcatttcatggcagtaagagcttcaactgctatttgttgggaacccatcctgactagctcgttcactagggcttcatgttttattgtgatgattggcagtcttgtgtttcaggcattttcagatttggaaagttactatgattctcaaattataaatgcaaaagtatcaatgaatttattttcacaaactattttaattcattatggacaataagtcrtttaattagaaatcaataatttaaataatattttatttgttggagcattcataaatactacatcttcaagtcttgctttattctacatgttacatacacagtaaaatatttaataacagtgttacatattttccctccttctccaactatccacaagctgaggcttaaaataaacagtggaatgagtaaagacccaaagtaatatagcagcaaagctgtagttgatttttataataaaataatagata

SEQ ID NO: 547608 - DNA, 614 bp, Homo sapiens
taaagcaatctttagaaaggaaaactaaaatggaggcatcacatgtccttatttcaaactatattacaaagccataataatcaaaacagtgtggcactggtataaaaactaacacatagatcaatggaacacaatataacccccakaaataaatccatacatatatagtcaaccaatctttgataggagtgccaagaatacacaatggagaaaggatggttttttcaataaactgtattagaaaatgagacctacccgtggagaagaattaaatcagaccctcctcctaaaccatataaaaaattaactcaaatttgattaaagacctaaatgtaagatctgaaaccttaaaactcctagaagaaaacatagggataaagctccttgaacactggtcttgacaataaatttttggaagataccaaaagcataggaaaccaaagcaaaaataaacaagtagggctacattaaactaaaatgattctgcacagaaaaggaaaaaaatcaacgtaatgaaaaggcagcccaagaaatgagggaacatatttgacttctctactttatctacccctgacctgctcctcaaacagccaccactcctttctatgacatgt

SEQ ID NO: 547609 - DNA, 509 bp, Homo sapiens
cacttgaacccgggaggtggaggttgcagtgagccgagatcgccgagatggcgccactgcattctagcctggacgaaagaaactctgtctcaaaaaaaaaaaaaaaaaaaaaraaagaaaaagaaaaaagaaacttgaggcagggctaactctgcgtttgttatgattaggctacaggaaacccggagttgctgggaaatgagtcacagggtcactcagcctttctgtggcgaaacatcgacttcctacgacctagaaatcgccgccagggctaggctggtgtttgtcctaagtgggtacttgcttgggttgagaaatcacattttggctattccccgacttgaaccaggggatagaaatcgtagtcaccggctgggcgcagcggctcatgctgtaatcctggcagtttgggaggccgaggcgggcagattattgaggttaggagttcgagaccagcctggtcaatatgatgaaacaccgcctctagtaaaaatacaaaaattatccgg

SEQ ID NO: 547610 - DNA, 509 bp, Homo sapiens
cacttgaacccgggaggtggaggttgcagtgagccgagatcgccgagatggcgccactgcattctagcctggacgaaagaaactctgtctcaaaaaaaaaaaaaaaaaaaaagaaaraaaaagaaaaaagaaacttgaggcagggctaactctgcgtttgttatgattaggctacaggaaacccggagttgctgggaaatgagtcacagggtcactcagcctttctgtggcgaaacatcgacttcctacgacctagaaatcgccgccagggctaggctggtgtttgtcctaagtgggtacttgcttgggttgagaaatcacattttggctattccccgacttgaaccaggggatagaaatcgtagtcaccggctgggcgcagcggctcatgctgtaatcctggcagtttgggaggccgaggcgggcagattattgaggttaggagttcgagaccagcctggtcaatatgatgaaacaccgcctctagtaaaaatacaaaaattatccgg

SEQ ID NO: 547611 - DNA, 509 bp, Homo sapiens
cacttgaacccgggaggtggaggttgcagtgagccgagatcgccgagatggcgccactgcattctagcctggacgaaagaaactctgtctcaaaaaaaaaaaaaaaaaaaaagaaagaaaaagaaaaaagaaacttgaggcagggctaactctgcgtttgttatgattaggctacaggaaacccggagttgctgggaaatgagtcacagggtcactcagcctttctgtggcgaaacatcgacttcctacgacctaraaatcgccgccagggctaggctggtgtttgtcctaagtgggtacttgcttgggttgagaaatcacattttggctattccccgacttgaaccaggggatagaaatcgtagtcaccggctgggcgcagcggctcatgctgtaatcctggcagtttgggaggccgaggcgggcagattattgaggttaggagttcgagaccagcctggtcaatatgatgaaacaccgcctctagtaaaaatacaaaaattatccgg

SEQ ID NO: 547612 - DNA, 917 bp, Homo sapiens
aaactccatttgcctcttcgagcattatctctgaatatatatgccaactctccttcagggcagctatgtttcaatggagcttgcattattccttctcccatactacaaaggttttatcatagttgttcagctacagtcatgaaagtgataactgtcacttattccttcatagattttccctacaacatatttctaagcaagtagccttacttttcttttgatttcaaatacactatctgctaatgtaaaatgttattttaaagtttgaattattaacaaaaaatatgsatttaaagaaaatgatgtaactggcaaaaaaaaaaaaacaacacacatagtgttatgtgtccaagaaaacccttctgaaaagcatcagatttcatttgagacatgaagaataagtagatactactaagcaattattgggatggaaacattaaatgcagaggatagcctgaagaccagtaggtgaaaaaaatatttgagttaataaaagtgataatggtgagggaattaaaaatggtgaattcgtaaagctgaggctgatgtttaaaagaacagaatatacagagtctgttaggccacaatcacgatgttgaattttatcataaaagcaatgagtactctttgaaattatttttatgcagagaagttagatggtaatattggcttcataataatggtgatgcatctattagtagaaatgctaaaagtagaattaacctgtcccttatgtgatacagtcacaccaggacctgtggacgttcatatgacaaaaaataataaaaaataataaaaggtacattaatatatttaaaaatcaccataactgaattgtcagaaaattaacagaaacaagaaggaatgtgtgcagattgatctattgaaaggatattcagaactaaatacagtgtctc

SEQ ID NO: 547613 - DNA, 917 bp, Homo sapiens
aaactccatttgcctcttcgagcattatctctgaatatatatgccaactctccttcagggcagctatgtttcaatggagcttgcattattccttctcccatactacaaaggttttatcatagttgttcagctacagtcatgaaagtgataactgtcacttattccttcatagattttccctacaacatatttctaagcaagtagccttacttttcttttgatttcaaatacactatctgctaatgtaaaatgttattttaaagtttgaattattaacaaaaaatatggatttaaagaaaatgatgtaactggcaaaaaaaaaaaaacaacacacatagtgttatgtgtccaagaaaacccttctgaaaagcatcagatttcatttgagacatgaagaataagtagatactactaagcaattattgggatggaaacattaaatgcagaggatagcctgaagaccagtaggtgaaaaaaatatttgagttaataaaagtgataatggtgagggaattaaaaatggtgaattcgtaaagctgaggctgatgtttaaaagaacagaatatacagagtctgttaggccacaatcacgatgttgaattttatcataaaagcaatgagtactctttgaaattatttttatgcagagaagttagatggtaatattggcttcataataatggtgatgcatctattagtagaaatgctaaaagtagaattaacctgtcccttatgtgatacagtcacaccaggacctgtggackttcatatgacaaaaaataataaaaaataataaaaggtacattaatatatttaaaaatcaccataactgaattgtcagaaaattaacagaaacaagaaggaatgtgtgcagattgatctattgaaaggatattcagaactaaatacagtgtctc

SEQ ID NO: 547614 - DNA, 917 bp, Homo sapiens
aaactccatttgcctcttcgagcattatctctgaatatatatgccaactctccttcagggcagctatgtttcaatggagcttgcattattccttctcccatactacaaaggttttatcatagttgttcagctacagtcatgaaagtgataactgtcacttattccttcatagattttccctacaacatatttctaagcaagtagccttacttttcttttgatttcaaatacactatctgctaatgtaaaatgttattttaaagtttgaattattaacaaaaaatatggatttaaagaaaatgatgtaactggcaaaaaaaaaaaaacaacacacatagtgttatgtgtccaagaaaacccttctgaaaagcatcagatttcatttgagacatgaagaataagtagatactactaagcaattattgggatggaaacattaaatgcagaggatagcctgaagaccagtaggtgaaaaaaatatttgagttaataaaagtgataatggtgagggaattaaaaatggtgaattcgtaaagctgaggctgatgtttaaaagaacagaatatacagagtctgttaggccacaatcacgatgttgaattttatcataaaagcaatgagtactctttgaaattatttttatgcagagaagttagatggtaatattggcttcataataatggtgatgcatctattagtagaaatgctaaaagtagaattaacctgtcccttatgtgatacagtcacaccaggacctgtggacgttcatatgacaaaaaataataaaaaataataaaaggtacattaatatwtttaaaaatcaccataactgaattgtcagaaaattaacagaaacaagaaggaatgtgtgcagattgatctattgaaaggatattcagaactaaatacagtgtctc

SEQ ID NO: 547615 - DNA, 352 bp, Homo sapiens
ctcaattttattaatttataaattatattaaattgtatatttaktaaattctgacacaggtaagttaaattgcctatggtgtctttgataataagtgatagagttactcctctatactagtcttccccacacctaaccttgggctcaagtacaggaaatctgtgtaactgctaccacacctaggcaacctaacatcctaactggtttgaggataacgtccctggcagtagccaagctatagaaacaatctaagtgttcttcttgggacaagtggctaacaaaactggggtatatattattgagttctaaaaaagaatgagatcttgccatttgcacaacatggatgagcctg

SEQ ID NO: 547616 - DNA, 482 bp, Homo sapiens
aaatagtctagtacagtacctaaaagggacccctatttgtgagcttttcaaattactctttttatcctcaaatagctttagtaaattttctccctgcctgggataagttccatcggtctttttaccttcaaatattcttgatgtaatttatctatagtttgttaaatacttagaataagagttgtgtttttaccattgagtyttggacaccgacaatgctatagaaacatttttttttgtaatacctaatctgaatttcaaataatactttaaacatgaagcacttatttttaaagcactctttaaatatattttaaaatattttattttgtatgaagctatttaagaaatagctaactcagtgcttactgcatttggaggactatcctaaactaagagacatatgctaaagaaataatacagtacacttgacccttgaacaacttggagattagggacgctgaccctccatgtagtcaaaa

SEQ ID NO: 547617 - DNA, 544 bp, Homo sapiens
aataaatatgaaagtcaatagattgataacattaaaattaaccaagttcaacctatttgtgcattttagagatgagaaatagatgtcaaattgcctttgtgctggctattcgtcatttggccgccacacacccagacccgttttctccctctctgtcctgctatgtgcctcaygaggaaatcccctcacgaggagactgcaatagtaggcagaataatggcccacaaaagatgtccatgccctgattctcagaatggcaaaagcaactttgcagatgtgattagagttaaggacattgagttagggagattattctagattatctgggtggacccaaggtacttacatgcaatcttaaaagtagagaacgtctcccagctgtggtcagagaaagagacgcaatgatgggagaagggtcagaggactcaactctattgcattgctggctacgaagatggaggaaagggccatgtgtcaaggaatgtaagtagtttccggaagctggaaaagcaaggaaatggattctcccctggaatcatcagaa

SEQ ID NO: 547618 - DNA, 1183 bp, Homo sapiens
aaaactgatacttatttatgtttatatataatatacaatttttttcaggagaatcaggaaacatttaccagtgcatggctggttacaacacatttccaggcatgatgggatccaacttaaaaaatgggtaacgtttttcaaagttttccccaaatgcaacaaccccattagaattatcataaactggccagacgaggtggctcacacctgtaatcccagcattttgggaggccgaggtgggcagatcacctgaggtcaggagtttgagaccagcctggcctatatggtgaaaccctgcctctactaaaaayacaaaaattagccgggcatgaaggtgcatgcctgtaatcccagctactcagggggctgaggcaggagaatcacttgaacctaggaggcagaggttgcagtgagccaagatcgcatcattgcactccaacctggatgacaggagccaaactctgtctcaaaaaagaaaagaagaagaagaaaaaaagaactatcataaattattttcaagacccagaaacaaaatgttggcagcatagagagtaagcgggactggcaccaggtggaaaaagtaagttccatttatctccatctgccagtagaaacaaattcattctctccacccagaggagcagtctgcagtgtattattattattattatttttttcaagacggagtcttgctctgtggctcaggctggagtgcagtgacaccgtcttggcgctcactgcaacctccacccccgaggtttaagcgattctccttcctcagcctctggagtagctaggattacaagcacaggccaccacacctagctaatttttgtatttttagtagagacggggtttcaccaggttggtctcaaattcctgacctcatgatctgcctgcctcggcctcccaatgtgctaggattacaggcgtgagccaccatgtattcttcaaatttccttgcctcccagagacgagtgagggaactaagttgtttaatatttaaatgaacaaacaaaacaacccttgcgtcttggttagcgtgtgttacagcaaattcggagcaaaaccaattagcacacaaataatctatagtttccttgtatgcttttcaagagaagcacatcatcaagtgtgctatattcataaaaaggaatattattcggctttaaaaatgaagtat

SEQ ID NO: 547619 - DNA, 1183 bp, Homo sapiens
aaaactgatacttatttatgtttatatataatatacaatttttttcaggagaatcaggaaacatttaccagtgcatggctggttacaacacatttccaggcatgatgggatccaacttaaaaaatgggtaacgtttttcaaagttttccccaaatgcaacaaccccattagaattatcataaactggccagacgaggtggctcacacctgtaatcccagcattttgggaggccgaggtgggcagatcacctgaggtcaggagtttgagaccagcctggcctatatggtgaaaccctgcctctactaaaaatacaaaaattagccgggcatgaaggtgcatgcctgtaatcccagctactcagggggctgaggcaggagaatcacttgaacctaggaggcagaggttgcagtgagccaagatcgcatcattgcactccaacctggatgacargagccaaactctgtctcaaaaaagaaaagaagaagaagaaaaaaagaactatcataaattattttcaagacccagaaacaaaatgttggcagcatagagagtaagcgggactggcaccaggtggaaaaagtaagttccatttatctccatctgccagtagaaacaaattcattctctccacccagaggagcagtctgcagtgtattattattattattatttttttcaagacggagtcttgctctgtggctcaggctggagtgcagtgacaccgtcttggcgctcactgcaacctccacccccgaggtttaagcgattctccttcctcagcctctggagtagctaggattacaagcacaggccaccacacctagctaatttttgtatttttagtagagacggggtttcaccaggttggtctcaaattcctgacctcatgatctgcctgcctcggcctcccaatgtgctaggattacaggcgtgagccaccatgtattcttcaaatttccttgcctcccagagacgagtgagggaactaagttgtttaatatttaaatgaacaaacaaaacaacccttgcgtcttggttagcgtgtgttacagcaaattcggagcaaaaccaattagcacacaaataatctatagtttccttgtatgcttttcaagagaagcacatcatcaagtgtgctatattcataaaaaggaatattattcggctttaaaaatgaagtat

SEQ ID NO: 547620 - DNA, 537 bp, Homo sapiens
tgcttcctcacatttgtgtaagaatgctctaacattaaaatgcttagatattcatctttcaatttccatatttcttttgaggaacaccaatgccatcatcatattgcctctgtaatcacttttgttattggtacaagtgttgacatagaactttttccttaacaatctgaagayagttgaaataaaaaagagataatttttaaaaagtccttaaggtaggaaatatcaaaagcaaaataaattcagtgtttacaagataaaccttatctttccagcctattttatctcctagtctacacatattctctttgaatgcattgcttatgagttttgtctagagagcaaccatcctggtaaacttcatactcaagagagtaggcagaggtcttcccttccagtccagatttttcactcctagtctcacaaacttttattactcaaattgtcaatacgagccagaacttggatgagtaataacacacagtccatattactccaaatgattcttttaaaagaaaccacaactagtcatcaaaa

SEQ ID NO: 547621 - DNA, 1188 bp, Homo sapiens
tggataagaagacctgttagtgaagatggtcagataattcttctctgaaaagacttttgggttgaggtataaattatgacataggacacgggataatttggcagtacaactttctatgtgaaggactgtgatgagtgaggctgatggaataagaacaagataagtgtgcaggcttcaatgggagatggttgaatgagatttggagaggggtcagtaaaaatttggattttattcggagagcaacgggaagcctttggaaggtttaaacaygagagtggtatgattcattataagagtatttgttttacaataaacaatgctcatctcctctgttatctcatttaaccatcaccacaaacatgaactctaagctttagtatcaggaatgcaactggagctcagagaggatatttgctctatccaaggtcatttgggtaaaagggaaaattgaggattttgcaggatggccagcaagcattggctgcctctcaactggagctctctttgtttaataattgatggaagggaaaagaaacctttctaaaattgctgctaaaagacacaatgtagcagagtgatttttttttcaatactctctgcaaagtaagctaaaactcatctttccaatgagcatgagtataatgcctttcctgatttttttccaagtctgtcttttacccacggtctttgctgagcatgcatgtgcaactccctaccagcttctaaggctttagctgatgacctgcaatctggaaaaggatcgagagatcagagtggagggaatgctgaggggatgtaggaggtaccagaaaggggtgatccacacagcaggcttcagacagcctgactcaacaacaacagagctgtgtataaaggtctttgcaatgtttagctttatgtgaaatcaagttatatactgtgatgaaacatctaccagtttctagagtcaatatatttaaaattagtttcaatatgactgatacacattgtttggtttatgtagacttcacttcagtggtattatagtgtatgtattttaaatatttcattacattttatgctgtttcatgatatttttcatgtaatgctctgaattttatatgaactctgaaagaaaactttacctcatttacatagtatagttgatctttcttgtaattcaggatttgagaacttactccaaaatta

SEQ ID NO: 547622 - DNA, 616 bp, Homo sapiens
cgccctgcatttaaaaatagcgacgtgacaaatcatttaaatccatgttttgtatttgtatttgggatggttgcatgttttggtttcttctattttgcttgatttatttatttatttattttatttatttatttttttgagatggagtctcactctgtcacccaggctggagtgcagtggcatgatcttggctcactgcaagctctgcctcctgggttcaagtgattctcgtgcctcagcctcctgagtagctgggattacaggtgcacgacatcactcctggctaatttttgtatttttagtagagacagggtttcaccatgttggtcaggctggtctcgaactcctgaccttgtgatccacctgcctcagcctcccaaagtgctaggattacaggcgcgagccactgcgcccggccttgctcttgattttaaaggggttgtggactggtcttgttatttttggggtttcctgtgtgttgtgttasagtttaatgagatcaaacacactctagagttgcccattaagttcaccatctaaatcagttgtcctttatggtaacacaggattcacagagcagcaatctctttttgggtcaggcagcaacctttatttg

SEQ ID NO: 547623 - DNA, 651 bp, Homo sapiens
agagatgatgacaactctgaattctcatgtcattttaaagatgaatcagtttggtatgagatccttcttggtaagggaaaatacttctcattctaccccaattcatgtcaaatttccctacagggatttcaatccaatgtgcctattgttttaaggaatagtcactgacactacaacattacatcatgtttctgtagagggaaagagaaaggaataaaaataaagccagtatttatttttcaccttctacctatcacttgcttacattattatttaattatcaaaacaaccatataatacaggaatcccttttcccaacctttacagaatagaaatcaaagtttagttaacttaagggacttattcaagatcatataacggtaaaggacagagataaaaacaagtttatcctggcttgagaattcatgttaataagttgcttataaccaaatatgcaatcaaatagtagagatttcatgaaatggcataagaggataaaataggccatatatatgcaagtactaaataacatggtattaatctcactcataaatattgaatgaaaagaaygtaatcagttgagattatctcaagaatgtatctggaaaaaggtgagatttttaggagattaaaaactgctcattttggaca

SEQ ID NO: 547624 - DNA, 1112 bp, Homo sapiens
ctaaaactgctgtgttatttgtgggctcataatgtggctaataaagaaacaaaccatcaaaacttgagtagtaattatgaacaaaacacaaaaaactttaaaatagaaaaagtttgaaggaaagcatattgaataaaatgttgctagaagcaggtgcttcatatttttcctatgaacaatagtgctttgcaggattctaacaaactagcacttagctaagactacaaatatacaattgccatgatattacttttgcttggaaatgttgggtgagtttgtagcagagaaggtagtgaaaataccactttccactgatgccataatgacatgttccagaacagactaatgataagaaggatcatctcagagcacagagttatagtatgtttttcattgcaacttgcaaatgcccagatgtggctaacatgacaatttataaaatacatatatatgatttgaacatagtagctatggaaaggaagaatatgttcttcagcttcattgctggaaaacacaaccctgaaacataaaagtataaaggattacatagtttttaaaatgtggtttacagcttaagatttttttgaatatgttttgaggacatggctgtgatatcagaaaaccttctgaagttcttatgtagattaaggagggacctggtgccagaatgtaaatcaacacactgcttctttcagggagagagatttgctgtggaaaaaaaaaaaagtgcctagtaacttagtaacatttgttaattatagaaaggctaaaatgttaaagttgagactattactatgtggtaaaatggaaagctgatcataaataacaattaatgctggtttaggaatcaaatattctgttccaaatgttcaattactgaataaacatttagtatttctacaaaataaaaaaaatcatttagtcccaacttttacaaactgtaagttggacaactagtcttcatattaaatatattcagcatttataattttttaaatttttccttgcaaagaagaatacaacacagctttcaatggcagataaactgaagagtggatacaagagttaaatgtctggaaggatcatctctaycgattccttaacatgtttca

SEQ ID NO: 547625 - DNA, 1290 bp, Homo sapiens
tctatgccaggaaccaggagcagagaccaaacatatatttattatatcacaatatcacattgagaaacttaccagagtaagtgccacaagaacacaggtcttctaacctccagctcagggttcttcctaacacactttgggcccaaggaacctgacttaaattaaaggactcctatgggcttggaatactccaaactctgggtaattatgtgctgtaaagggcaggacatcagagaaagaagctaaagggtagtcgaagtccaaaaccaaaatcaggtgccaaatggaaggagcagaatggggccagtgtgtgatcagattctcattcctgagaaaggacagaggagacacacaagcatgcaggacaggtcatagtggggaggtgggccagaagcacggggatttccaggactgaatctgggaacaagtttgccttagaacactcctcttttccatggggcaggtttagtgaatgcccctttaaaagatctgcctcatactgactctttgttctatatattagggcaagtcaacagggtaacattgagcaggtcctgggctctactgggtaattggcatgtcaggagacactgggagaatatcccaccccacatagcaaatgtcatctcggggtctccttgcaggctccctgtggccctggcaggagctgtctcgaacagaagtatgtgcttgaattttagctcctgccctgccatattcagatgaaaaactgaggctcagagaggctggcttccagaaatgacatgggtggtaaccagaagacactttatttaactctggccttcactatcccacttcggtgctcctgccaccccatcaagctctcccctaagctacctcctgcttttctaaacataagtattataggtgatgatgttttgatttgtttttttaaatacttgagatagggtctcgctatgttgcccaggctggtcttgaactcctgggctcaagcagtcttcccacctcagcctcccaaagtaccrggattacaggtgtgaaccaccacgcccagctagctatgattttgtttaaatactttcaaaattcttgtgttttttcattttttgtattttattgatatagttgtacatgtttgggggtacatgtgatattttgatacatgtatataatgtgtaatggtcaaggtgattatgtttttttaattaattacactttctttctttttttttttttgcaaatgctgtagatgtcatgataccccctgagatattttcgaaactcaaagatctcaaatctggagttggg

SEQ ID NO: 547626 - DNA, 1290 bp, Homo sapiens
tctatgccaggaaccaggagcagagaccaaacatatatttattatatcacaatatcacattgagaaacttaccagagtaagtgccacaagaacacaggtcttctaacctccagctcagggttcttcctaacacactttgggcccaaggaacctgacttaaattaaaggactcctatgggcttggaatactccaaactctgggtaattatgtgctgtaaagggcaggacatcagagaaagaagctaaagggtagtcgaagtccaaaaccaaaatcaggtgccaaatggaaggagcagaatggggccagtgtgtgatcagattctcattcctgagaaaggacagaggagacacacaagcatgcaggacaggtcatagtggggaggtgggccagaagcacggggatttccaggactgaatctgggaacaagtttgccttagaacactcctcttttccatggggcaggtttagtgaatgcccctttaaaagatctgcctcatactgactctttgttctatatattagggcaagtcaacagggtaacattgagcaggtcctgggctctactgggtaattggcatgtcaggagacactgggagaatatcccaccccacatagcaaatgtcatctcggggtctccttgcaggctccctgtggccctggcaggagctgtctcgaacagaagtatgtgcttgaattttagctcctgccctgccatattcagatgaaaaactgaggctcagagaggctggcttccagaaatgacatgggtggtaaccagaagacactttatttaactctggccttcactatcccacttcggtgctcctgccaccccatcaagctctcccctaagctacctcctgcttttctaaacataagtattataggtgatgatgttttgatttgtttttttaaatacttgagatagggtctcgctatgttgcccaggctggtcttgaactcctgggctcaagcagtcttcccacctcagcctcccaaagtaccaggattacaggtgtgaaccaccacrcccagctagctatgattttgtttaaatactttcaaaattcttgtgttttttcattttttgtattttattgatatagttgtacatgtttgggggtacatgtgatattttgatacatgtatataatgtgtaatggtcaaggtgattatgtttttttaattaattacactttctttctttttttttttttgcaaatgctgtagatgtcatgataccccctgagatattttcgaaactcaaagatctcaaatctggagttggg

SEQ ID NO: 547627 - DNA, 843 bp, Homo sapiens
tggatccatccccttttattgtgactttcctgttcctcctgatgcaaacatacccaaaaattggggcttagccctagaggattcttggcttcactcaggaaagaattcaagagaaagccaacagtgaaataaagcatgtttattagagcaaaagcgtatggcaaaatggctgctccatagacagaggagggctatcccatatgcagagctgcccagagtggaatttttggattgctggctggctatattaatacccaatctaaattatatgctaattaatgggcagattattcatgaactttctggaaaaggggtggggcatttccagtatcatataagttaatctctagatgttgccatgccagcatttgtaaacagtggtggcaggtatgtcttacagcatgcaactgcaaatgagcagtgagggttactggaggtcactttcatcactacctttgtcctagctggtttcagccgatttctttactgcatcctcctttgaccagatcttgtttgggttcacgcacagaaaacaagtcctgctgatctcctactttgctcctactaaaaaaagcaaagaatacgcctgtgcaaagaccttattctgccccagcttgggttcatccatgcgacttgctttggcaaaatggacatgaatgggcatgagtgaacaaaagtatgcaaagcactttttctgtcttagctaagaggcaccctctgggtctctgatactctttyagccaactcccactccagtctcaggaccacaagtaagctcaagtgctctcccattcttcttggggcagcaggaaagccagtaggttgtctaaggtcctgtctgcc

SEQ ID NO: 547628 - DNA, 1604 bp, Homo sapiens
gcccagctaatttctgtatttttaggagagacagggtttcaccatgtgggccaggctagtctccaactcctgacttccggcgatccacctgcctcggcctcccaaagtggatyttctttttttacccatgcacttgcccaagctgactttctggctcaaacctttcccctggccttgcatcctctctatccatctgcccaaacctccctcactctccaaagtctcatttcaaatgttgcctttccctgaagcttctcccggaatgacccatctctccctcctcattctgatcatttcctctttgaattcccgtagtgttaggtatgccctcctcttccagcactgaatccagccttgcctcgcattagagtcatttgtacacctgaccttaatccccctgagggcagggatagtttgtgtttatcccaaagtcctgaaacaactagtacagaacctgagacacaggaaggccccagaattgcctgccgaatagaacagtgatagtgctgaatttggttcctcctttaacctgtgtgaccccagacgtttgttttctatgaagtctcaaaacatggttatgtttcctaatttacaacgaacacatggaaacccatgttttgaaaacgggggtggggaggatgaactgaaggcagcctcttcagccaagttccaaaggccaggtggcccactgtgaaccttgtttaaccacacagaacatatgaatagctacaacaagggatctaacagttaccagaatgttttcagaaaggtgacttcagaagtgccaagcttcaggaagacctggactgagaagggatcagacaactttaggaaagcaggtaccaaacagcccttttacagtttacacacaggccttggtgtcagaaaaatactggtttgagtactggttatgcatcagagatgccactctggacaagctccttatgctctctgggactctgctttctcatctaaaaaatggggatcacctgaggtcaggagtttgagaccagcctggccaacatggcaaaaccccatgcctgctaaaaatacaaaaattagatgggtgtggtggctcgcacctgtacttgcagctacttgggaagcggaggcaggagaattgcttgaacctgggaggcagaggttgcagtgagctgagatcgcaccactgcactccagcctgggcaacagagtgagactctgtctcaaaaaacggggcggggggtggtggataataatagtgcctacctcaagaggttgctgtgaacaccagaagaagcaatacacaccaagtgcctacagatagtaagcacttggtaaaaatgtaactgccattaacaataaatatgatgctcacagggtcagtggaaaaagtagtggaaagtaggagtggtgggaacagaacaggagggaacaaagcacctctgagtagacctttctgtatagctccgactctccgtctcttattatgtttcaccctaataattcattaaaactaggataggaaggctgagggtgtttttggaatacaaacactaatgaaccaaactgcattataaatagtggccacactgaaagggatgaagaagaaagtaactactttt

SEQ ID NO: 547629 - DNA, 1604 bp, Homo sapiens
gcccagctaatttctgtatttttaggagagacagggtttcaccatgtgggccaggctagtctccaactcctgacttccggcgatccacctgcctcggcctcccaaagtggatcttctttttttacccatgcacttgcccaagctgactttctggctcaaacctttcccctggccttgcatcctctctatccatctgcccaaacctccctcactctccaaagtctcatttcaaatgttgcctttccctgaagcttctcccggaatgacccatctctccctcctcattctgatcatttcctctttgaattcccgtagygttaggtatgccctcctcttccagcactgaatccagccttgcctcgcattagagtcatttgtacacctgaccttaatccccctgagggcagggatagtttgtgtttatcccaaagtcctgaaacaactagtacagaacctgagacacaggaaggccccagaattgcctgccgaatagaacagtgatagtgctgaatttggttcctcctttaacctgtgtgaccccagacgtttgttttctatgaagtctcaaaacatggttatgtttcctaatttacaacgaacacatggaaacccatgttttgaaaacgggggtggggaggatgaactgaaggcagcctcttcagccaagttccaaaggccaggtggcccactgtgaaccttgtttaaccacacagaacatatgaatagctacaacaagggatctaacagttaccagaatgttttcagaaaggtgacttcagaagtgccaagcttcaggaagacctggactgagaagggatcagacaactttaggaaagcaggtaccaaacagcccttttacagtttacacacaggccttggtgtcagaaaaatactggtttgagtactggttatgcatcagagatgccactctggacaagctccttatgctctctgggactctgctttctcatctaaaaaatggggatcacctgaggtcaggagtttgagaccagcctggccaacatggcaaaaccccatgcctgctaaaaatacaaaaattagatgggtgtggtggctcgcacctgtacttgcagctacttgggaagcggaggcaggagaattgcttgaacctgggaggcagaggttgcagtgagctgagatcgcaccactgcactccagcctgggcaacagagtgagactctgtctcaaaaaacggggcggggggtggtggataataatagtgcctacctcaagaggttgctgtgaacaccagaagaagcaatacacaccaagtgcctacagatagtaagcacttggtaaaaatgtaactgccattaacaataaatatgatgctcacagggtcagtggaaaaagtagtggaaagtaggagtggtgggaacagaacaggagggaacaaagcacctctgagtagacctttctgtatagctccgactctccgtctcttattatgtttcaccctaataattcattaaaactaggataggaaggctgagggtgtttttggaatacaaacactaatgaaccaaactgcattataaatagtggccacactgaaagggatgaagaagaaagtaactactttt

SEQ ID NO: 547630 - DNA, 548 bp, Homo sapiens
ggaagtgacaggcagccaggtcgtgcagtttcattccctgggccctggtgacatcactccacaaacccgtctgtcccaaaagccaggagcctgagtcacctccaagcagatgaacctactgcagtttgaggatcatgtttattttagccagagaaaaaacaatctcgccccaaataaacttttctccaggcctcagtcattccctagaatggatggccatgagcctttcagacctcaccaagaagacagcatcaaagaagggagaccactggcccctgagcatccactcatccagccacttacgacgyggccctgcctgatgaccccagggtaggtggctggtgcaggtctgagcagttgctcagggaactcggcaaggagatgacacactcccacttctcaggcgagcctggtctacacatgcgcccaccccatgtctgtctgcttcctcccgctctgctgggccagccacagcgtgtcagggcagatgtggaagcagcgcaaataatgtcatgaggactgggcagcacagagaggcttgggcagga

SEQ ID NO: 547631 - DNA, 548 bp, Homo sapiens
ggaagtgacaggcagccaggtcgtgcagtttcattccctgggccctggtgacatcactccacaaacccgtctgtcccaaaagccaggagcctgagtcacctccaagcagatgaacctactgcagtttgaggatcatgtttattttagccagagaaaaaacaatctcgccccaaataaacttttctccaggcctcagtcattccctagaatggatggccatgagcctttcagacctcaccaagaagacagcatcaaagaagggagaccactggcccctgagcatccactcatccagccacttacgacgcggccctgcctgatgaccccagggtaggtggctggtgcaggtctgagcagttgctcagggaactcggcaaggagatgacacactcccacttctcaggcragcctggtctacacatgcgcccaccccatgtctgtctgcttcctcccgctctgctgggccagccacagcgtgtcagggcagatgtggaagcagcgcaaataatgtcatgaggactgggcagcacagagaggcttgggcagga

SEQ ID NO: 547632 - DNA, 1399 bp, Homo sapiens
aaatgtctattcatgccctgtatccactttttaatggggttattttcatttttcttgtaaatttgtttaagtttcttatagatgctgtatattagacctttgtcagatgcatagtttgcaaaaattttctcccattctgtaaattatctgtttactctgttgatagtttcttttgctgtgcagaagctctttagtttaattagatcccctttgtcaatttttgcttttattgcaattgcttttggtgtctttgtcatgaaatctttacccatgcctatataacrtaatttttataaccaactctcattgatgaacatttgaacttttcagtttttcaacattgcaaacaagtttacaataaaaagctgtatagatatttatctccacacttgttttattgtatctttaggaaaccacccagagatggaataacaggattttaggcaaagtacactcccatacacattctgcacaccccccaaaaaaagtgtatgtgatttctattatctgatcttaatttgtgctttacagatttctacaactggcaagataaagcttatattataaggctggggaataaaattagagattcaaggatgaaaaaaaaaaaaaagcctggggcttctaagttaggaatccaagcacaaagcccaagtacaaaaggagctgagacaattttaacaatattaataatagctaacacctgaaaacaatttatcatcagccccaaacaggaacaaaataaggaataaagatgtgtaattatccagggaattcataaagcacaaaaatctagagcagtagttctcaaacttgaatttatatcaggatcacccacagggtgttaaaaaaaaaccattgttgagccatactccaagagtctgattcagtgggtctttaacaggatctgataatctcaatttctaataatttctcaggtggtgctgatgctgctggtaaagggaccacattgagacgccctgatctggataacatagactagaaaggtaactctcttatgtttcagctgatattggtcaaaatattgttccaacttttcacttagcccatgtgaacaaatctctgtagataaagatctagtgataactaatttcttccaacttttgtttgaatctcctttttttctatgtgtttctgaaaccaagccaattttcctttaatctctgctcccttaatgttctatatctccccatctccattacaggactgatattagaaatttaaaatttaatgaaaaacatcttcaataactgaatttgtcaagtgactatatctgaaaagtaggtacggatctttgtcacatatgcctgcatagagccaagctagagaaaatgcacagatttaatatgtatagtggaaagtggaattaactaccttt

SEQ ID NO: 547633 - DNA, 983 bp, Homo sapiens
agaatcagtcttttaacatttttctttgataccatcaaacaagcaaaactatatgtattttgcttttaatttaataaacctttattaatgaagatgtatttggtaatgttatttttaggaatttcttggaataggttttaattttgctccaactggagacaccattgttaaacggtctgcaaaaatcatgctacagaattattagttcttcccaaacagtggcccttcagggaaaaataattcctgttttcataatttctaaagtatatttggttctgtttgaaggtcatgatgatcatgtggcatggtcttgggggcagtgctattttacaggtgattcattagtttatgaatgagtcttgtcactggtcaagttactccatcttctagtggatttcctcaataagcctaaaggttaattgataaagtaatcaatgaaaatagagtttacattttgttctgccatctctttttaaatatcagattaatgtcgctgctaaaagaggaatgaaatttgttggattcatatcacagcattattctccatctaaattctgcaatggaaccaaccatgatggagatatagaatcgatgctacatgtgagacacggttcagatgaaaactgtagaagttggaatgaagggacgttaagtgggcagtcatctgaaagcggaattgaggaagaacttcatcatgaaagtggacagtatcaaatggaacaaaatggcagccctacttcctctaaatcaagaaagggagaaggtaatagacaagattagtagaaagagaatatactatagtttaagcaaaataagtttttgaggttttttttagaaatatgagtcaaagtaaattgctaaagattataatgactaaatgaactaatamaaacctcatgatttttaaaagttattacagctagcaataaggcagggcagttttttagacagttgtctctggcagaacataaaatgccatccac

SEQ ID NO: 547634 - DNA, 1196 bp, Homo sapiens
acacaataattagatgagaaataaaatataattaagcgttctgcatgattagcagtgatgcaatcttaatatgataaacacattattgattwaatcaaaatttgagaaatagttgaaacaactatattgagtgggagaaggtgtgtgtatgtggggggtatgcgtgcatgttatgtatctgtgtgcatgtgtttctaggggagaagcactgtaagagatttaacccttcatcttctacaataaaaacaatgatgtcaaaatatttaaaaatcaagaaaaagcaatatggaagtgaacgctgaaaaaatagctatgaagatgtttgcccctgacgaataggaattagggatgggatgggtagggccaggagaaagaagttttgtccttactgtgtgaatcttagaactgttttgataaaattaaaaatttcactgtgataaaaataataacttaacaaaataaaataaactttttgactatataatctttaagctccttgaagtgattggatggaatgcaagaaaaagaaataaaggggaagggagagtattattgggaagaaccagtctgtagaacaaaaatcccagcctaaaatgatttatgcagctttgtctttgttatctatcaataagaaacaatgttcatttgttcactcattcattcatttgcacccaccaaatatctgctgagcacctggtatatgccatgctctgctactgattatccgaacatcaaagatgaagccaggcacagtggctcacacctgtatacccagcactctgggagggtgaggcagatggatcatctgaggtcaggagtttgagaaccacctgaccaacatggtgaaaccccatgtctactaaaaaaaatacaaaaagattagccaggcatggtggtgggcaccggtagtcccagctactcaggaggctgaggcaggagaatcacttgaactcgggaggtggatattgcagtgagccgagattgtgccagtgcactccagcagcctggatgacagaatgggacttggtctccaaaaaaaaagaaaaaccaaaaaaaaaaaaaccccaaaaaacaaaccatcaaagatgagtgtggtgcagcgcagtactcacccccacagagttttcattctaatcttggtgctccatactctgctcaccaccaagtaactttagtactgttatcttctcagagca

SEQ ID NO: 547635 - DNA, 576 bp, Homo sapiens
tagcacaatgcctggtagactttgacgaatggtgattatcatagttacttttgtgtagaagctacagaactctttaagtaaaacaagtttacaaaaaactagcagaccttggtaacatgcaaccagttatgcctgtgtgtgaattggattaattatttttagaaaaatgaattttttaaaaattgtggtgattctctcatgggtatataaatatgtcaagacctcaaactgtgtactttaaatatgtgtggattatcatatgtcaattatacmttaacaaacttgtttaaaacagagtggaactaaaattttcaacaggaataagatggaagactgagatcagaatttaaagttcctaaggtctttatgctattcagaagactgaatatattaatattagactttgttaaatcaagtatgtattttaaagttgcaagtaccaccactaaaacaaaagatatggattatgtaagcaattgagaggaaaaattggaataaagaaaatttgaaatatccaaaagaagtcaggaaagaaagaatgataaatcgaaaattaaaaataacattaatatctca

SEQ ID NO: 547636 - DNA, 576 bp, Homo sapiens
tagcacaatgcctggtagactttgacgaatggtgattatcatagttacttttgtgtagaagctacagaactctttaagtaaaacaagtttacaaaaaactagcagaccttggtaacatgcaaccagttatgcctgtgtgtgaattggattaattatttttagaaaaatgaattttttaaaaattgtggtgattctctcatgggtatataaatatgtcaagacctcaaactgtgtactttaaatatgtgtggattatcatatgtcaattatacattaacaaacttgtttaaaacagagtggaactaaaattttcaacaggaataagatggaagactgagatcagaatttaaagttcctaaggtctttatgctattcagaagactgaatatattaatattagactttgttaaatcaagtatgtattttaaagttgcaagtaccaccactaaaacaaaagatatggattatgtaagcaattgagrggaaaaattggaataaagaaaatttgaaatatccaaaagaagtcaggaaagaaagaatgataaatcgaaaattaaaaataacattaatatctca

SEQ ID NO: 547637 - DNA, 622 bp, Homo sapiens
taggcctgctaagaagtacaacctcgggatgttagcatttcagacctaagagtacctaagtgtttgccttccaattgtattaagtttacctttgcctgattgyaaaaatgcagtacagaatgtacataagatataaataacaagaaaaattcatcacctcacaatctagtgaaaattaaatgacagttataacagtgtaataattcctttttgtattttctatacattttgatacagtggatatcaaatagtagataaagttttgaaccctggctttgttatttgatattatcttatgacatttttcagtgtcatacccaaacacttcatagacattatttttaatgactgcacaatgttccctggcatgattgttcatagtcactatattccctaaaaatggaaattttgttttaagtgtacagtattataagtataaagttatgcagtaaccaaaatttaatttacttttttaggttataaaactaatacatgttatggaaaatatggagaataaagaaaattacagtaaatcaaaaacaagtttatctccatttctttccttcctaggttaatcacttgtaacactttagtttattttttccaggttccagaagtcttt

SEQ ID NO: 547638 - DNA, 659 bp, Homo sapiens
caagcagcccctgagatgaggagtcatgtgggagtaatttattaagaaggcgatctcaaaggaagatagggaaggagaagggaaagtaggatatggaagagagagaagccaagaaagtgattttttcaaagtccagctgcagcctcatccaacttgaggccagggagtcagactttcagacacttggaccagtcagtcactgcctaagaactgtacagagggttaaaacgccccattctctcagctccgtgcagagatccttaaagacagtcccagttgtggctgggtgcagtggctcactcctgtaatcccagcaattcgggaggccaaggcaggtggatcaagaggtcaggagttcaagaccaacctggccaatagagggaaaccccatctcttctaaaaatacaaacattagccgagtttggtggcaggtgcctgtaatcccagctactcaggaggctgaaacaggaggatcgtttgaactcaggaggyggaggttacagtgagctgagatctcgccactgcactccagcctgtgtgacagagctaaactcagtctcaaaaaaaaaaaaaaaaaagaagacagtctcagtttcaggccttcggaagcctttggaagcaaagcacaaagcagctggaagaggcttacagaaagagca

SEQ ID NO: 547639 - DNA, 574 bp, Homo sapiens
aaaattgatttaactaggttgtcattttcatttttccaaataggagtatgactattatgtgaaaaacttatcataacttggtaatattgatgctgctgctgataatgatgatgatgakgaggaggaaggttgagaagggacccacaccttgagcaagctttgcttttcacaatcctctttaattctattaataggacccaaggagaagctcccactcagtcagagtaggcctaccccttccccaacatgatcagtaagttctgaaccatagttcctcaacgtcttctgctcaattttcagaattcggaaaggagccacatacatctaccctttccactaaaactcactgacttgagtccatccaccaagactcacctcatgatttttattcctgttgcatcaacaccataagcatctcttaattccaggtctttcttcatttcccactctctaatccccataaggctctgccatttcttgatcctatctttttttccacacttttgtaacttttgaaattcaccacgattctcttcatctttttccttcactgaaaacctggctctcctctgag

SEQ ID NO: 547640 - DNA, 681 bp, Homo sapiens
gggtcttttcataaactgacatttaacatctagataatacaaaagcttctataaacaagaaaaagtaaataaaccaatagaaaaatggacaaaagacacaaagaaaaaaatacaaagatagaaaaacagcaatatctgaaaaaatattcagcytgataaaaatcatgtaaaaattatgtattattggctatcagatgtgcacactttaaattagatagtatctactgttggcatattcgaaaacaggcattccaacatggtgggtgtacattaaattgctactacctatttggtaggtaatttgttatttcaattaaaatttgcaattgccttcctagactcagcagttctacttttaagtatctattcaaaataacaatatacacacaaagttatacaaacatgtttatctcagccttctctgaaataataaaaaggtatataactaaaaatcatatatgttaaataaatgaataaataaatgtataaatataaaaccttgtaactatacataaataaagatttatagttaaataaattatggtacatttggggaggcacagtagtaaaaaagaataagaaagataaatacataccgacatgtaaagaggtccaaagtatgctggtgctcttgcaaaaagcaagtcacattatatacacatcatatgattacatttgtat

SEQ ID NO: 547641 - DNA, 581 bp, Homo sapiens
ggttaatgcrtgactgagtatgtgaatgaatgaacttcaaatatctcaaagaatctctgccttttgcttgctaatccaatggatgaccttataaatgagcaaatttcctgcttgttgatttgcttagtccctaggtttttcttaccacagtactattaagagtaagcttatgggtttcctacacaatgtggtctaatttgcttcattacataatatacttataatcccagccacctgagttgtagatgtgagcttttggtcacaccagggaacggtatagctttggatctctcacaattatggctgtcacagaaaagaaggccagttggctttactaataaatttgcaggctcaagttcatgcactaaagaagacatattattatggtaatagtgagaaattgctcataaagctgagttgattgcacttttgtgaagttcagcatattgaaaatggtttggaactactttttgatatttttagttaattatagtctgaaacagttttataactcattctgattttaattaagtaggtttatttacatcagccactgagaatttatatgtaactggttattc

SEQ ID NO: 547642 - DNA, 619 bp, Homo sapiens
tggcttgtagatggccaccttcttgctgtgtcttcacatggtctttcctctgtgcctgcctgtgtcctaatcccctcttcttgtaaagacaccagttgtattagattagggcccactctaatagytttattttaccctaacaccagccaaccaaattaaggtgtcatgtgcatgcgtgtgcagctatgtgtagcactggcagggaatggctataatcacagggcaggagagctaaggtggaaaaattggatggcttcattgaagcccagagttaagattaattcacatgctgaccattgcaatgctgggcattggtttttttccccccattcttatttccaaggacatcaggccccagactactgtgagatgagtcagggaatcaatgaccaagtttttcacctaaaaagagcttttcaagactctgggtcaacccaaaggcacattaatagaagctcttagttaatattttttcagtgatcaggatgatggactagcaagtgggcctgttaggtttgctggtgacactgtggacatcattaaataacatgcaaatcattaactaggaatgtagacagggtgccaagacttaatcgttttaatttccacccatgggtaa

SEQ ID NO: 547643 - DNA, 508 bp, Homo sapiens
atattacatgatagcgtatttctgagagtactttcctcatcattcttttttggataggcatctgcattctcttaatatgcaatgagtagaatatgactatggactcatttgactaattaaaaaaattgctcatgcacataaagtagcttgtataagatcatattgcaatttagtattcatgccagaagtaaaacctacatttagtagttttgaatacagtgtataatcatttgagatttaccaagtggggatcgagtaactggcgaaaagtctgtatacattttttaaaacatgtttagatcattatatttatttttcagccttattaaggtataactgacaaaatttcaatatattacaaatatacaatatgattattgagtctatgtctaaattgtgaaatgattaccacaatcaatttacacatccatcaccccacatagttgctattttatgtgttgggggaggcrtgctgaagacagttaagatctactctagcaaattttaa

SEQ ID NO: 547644 - DNA, 554 bp, Homo sapiens
agctgagatggcaccatcgcactccagcctggacaacaagagtgagactccctctcaaaaaataaaaataaaaaataaaaatatgtaatagatttattgttccttgwaatatatgaataaaatttttaaaaattagttttaatttcaaatattaagagatataactcatgtaaaaaagcccattggagagcttcagtgatttttaaatgaggggttctgagttcaaggagtttgagaactgctagcatatcttaatctctcagtttgaaaatctccctctcaactacaggcatgcctcattttattgcacgtttctttattgcactttacagatattgagttttttttttttacaatttgaaggtttatggcaaccctacattaagcaaatctattggcaccattttttcaacagcatgtgctcactttgtatttctgtgtcacatgttggcaattctcacaatatttcaaacgttttcattattatatttgtaatggtgatcagtgatcggtgatctttgatgttactattgtaattattttggcatcccttg

SEQ ID NO: 547645 - DNA, 554 bp, Homo sapiens
agctgagatggcaccatcgcactccagcctggacaacaagagtgagactccctctcaaaaaataaaaataaaaaataaaaatatgtaatagatttattgttccttgtaatatatgaataaaatttttaaaaattagttttaatttcaaatattaagagatataactcatgtaaaaaagcccattggagagcttcagtgatttttaaatgaggggttctgagttcaaggagtttgagaactgctagcatatcttaatctctcagtttgaaaatctccctctcaactacaggcatgcctcattttattgcacgtttctttattgcactttacagatattgagttttttttttttacaatttgaaggtttatggcaaccctacattaagcaaatctattggcaccattttttcaacagcatgtgctcactttgtatttctgtgtcacatgttggcaattctcamaatatttcaaacgttttcattattatatttgtaatggtgatcagtgatcggtgatctttgatgttactattgtaattattttggcatcccttg

SEQ ID NO: 547646 - DNA, 644 bp, Homo sapiens
ggaggcaaaggtgtgtatattaggagggagggagagacagcagaagggaagatggcaagcacgatggaaggcaggcttgaatgccgcctcctgcacacctcgccagttctctgcgtgtgtcctgattgagagtctctgggcagattcttctttcccaaacagtaacatatggtggtcactgaggcattaactgccaccaagagcctccggagtcacctggcctctccccttccaggacataggaaattcctctgcagcctccccaccgcagatgcctycaaggaccaaggacagggaatccaggcagcccacccgatggctgccagctgtcatggtcaggaagttcttctttcagacagcctgaaatccatctcccccagactctcctcattgatcttagttccgccatctgaggccacaggcattgtgtggactttcccttccacaggccagcccttgagctttccaagacagatcaaccagctctttcctcctctgggcacacagcgctggtccctggggccatttcctttagggtgcatttgggtctttaccccgtcttgtccacttggctgcgaaacatcccctggcccatagctgggaactccagggtgaaactaacattccaggtggccctgcggccc

SEQ ID NO: 547647 - DNA, 599 bp, Homo sapiens
aggagtgcagcccaacttgggctttaaccgtattagcgtcaccccaacagcacattccctggataggaagtgggccaggtgtctaaagatggacctcatgaccatctttgctcagcctgaggattttgtaatggttggtattcacggggaggtggggatggcttcctggcctgatgagcagtcacctgcctgctatgcttcccaccgtggtcaagagaacgcatggggtctgtgactgcacccagtgtgtcctgggcatcaccctgtggagcaggaggagcctgggatgtggcaaaactcagacctgagctcaaattccagaccagccactgtcctgctgggcagctttgagcagattacttaacctttytgagcctctgttccctttttggtagagtggggatggcaacatctaccttcctggggtgactatgggggtttagcagtcaccaaggtggagggtctggcacacaggtattggataaaaaatatcacattaatcaagggacatgggcatttgcaggtatgtgagttaggaaagagggagcgtgaggctggcaaatttctacaccagcgtgagactggataaggacagactc

SEQ ID NO: 547648 - DNA, 538 bp, Homo sapiens
aaagctcgctcagtggctgctcacctactgctgtgcaattagattcctaacagaacgctgactgcagtggcaaaatcttggctcactgcaaactccgccagaagcgattcttctgcctcagcctcccgagtagctgggactaccggtgcggaccaccatgcccggctaatttgtgtatttttagtagacagggtttcaccatgttggccaggatggtctcratctcttgacctcgtgatccacctaccttggcctcccaaagtgctgggattacaggtgtgagccaccacgactggcctagtatagaagttttaagaaacccctgtggggaaagagaggaaggaggactagtaagaggctgaccaagaagggttcctggtcaccatttctgtttcagctagagctttgtttttttattggtggtacttaactgtctccataggagggcctatgagacagcaatcttcttagaaaggggtgctaggagatcagtcaaagacatatgcgaaagcaagtgtgctgcttttagttgttcatt

SEQ ID NO: 547649 - DNA, 538 bp, Homo sapiens
aaagctcgctcagtggctgctcacctactgctgtgcaattagattcctaacagaacgctgactgcagtggcaaaatcttggctcactgcaaactccgccagaagcgattcttctgcctcagcctcccgagtagctgggactaccggtgcggaccaccatgcccggctaatttgtgtatttttagtagacagggtttcaccatgttggccaggatggtctcgatctcttgacctcgtgatccacctaccttggcctcccaaagtgctgggattacaggtgtgagccaccacgactggcctagtatagaagttttaagaaacccctgtggggaaagagaggaaggaggactagtaagaggctgaccaagaagggttcctggtcaccatttctgtttcagctagagctttgtttttttattggtggtacttaactgtctccataggagggcctatgagacagcaatcttcttagaaaggsgtgctaggagatcagtcaaagacatatgcgaaagcaagtgtgctgcttttagttgttcatt

SEQ ID NO: 547650 - DNA, 832 bp, Homo sapiens
tcccttctggaaccacattaaaatgtatccctaaacagcctttcgctaggaatcccccctgctattccactagtacataaatgcagagaaccacatctggctactgggaagcacatcaatcacagctcaggattcattcattccgcggtcgctggtggtttatttgaaacacacaagccagcacacacagctggacacagcaaaccaggttggcactcttaattacctaattggtggttctgttgtaggctcttttttttttcaggttaaactttcttaatgcataaatgatcgatccatgtatttgtttactcttcttccttgatattcagcattttaaaatgagtgcccagggctgggcacagtggcttccatgtgtaatcacagcaccttgggtgtccaaggtgagaggatcacttgaccccaggagttcaagaccagcgtgggcaacatggcgagacaccgtgcctacaaaaaatttaatattagccagctatggtggcatgtgcctgtgttcccagctatttaggaggctgaggtgagaggattacttgagtttgggaggttgaggctgcagtgagccaggatggtgctgcygcactccagcctgggtgacagcaagaccctgtctcaaagaaaaagtaaataacgtaacataacgtaacataacataacataacataacataacataacataacataacataaaacaaaatgagtacccagtggtcaataatgaaagcagaatcatcctggaaactggtccatgcagactgactcctgccctcctaccaagttggctactacagctgaagtgcccactctcctacc

SEQ ID NO: 547651 - DNA, 832 bp, Homo sapiens
tcccttctggaaccacattaaaatgtatccctaaacagcctttcgctaggaatcccccctgctattccactagtacataaatgcagagaaccacatctggctactgggaagcacatcaatcacagctcaggattcattcattccgcggtcgctggtggtttatttgaaacacacaagccagcacacacagctggacacagcaaaccaggttggcactcttaattacctaattggtggttctgttgtaggctcttttttttttcaggttaaactttcttaatgcataaatgatcgatccatgtatttgtttactcttcttccttgatattcagcattttaaaatgagtgcccagggctgggcacagtggcttccatgtgtaatcacagcaccttgggtgtccaaggtgagaggatcacttgaccccaggagttcaagaccagcgtgggcaacatggcgagacaccgtgcctacaaaaaatttaatattagccagctatggtggcatgtgcctgtgttcccagctatttaggaggctgaggtgagaggattacttgagtttgggaggttgaggctgcagtgagccaggatggtgctgctgcactccagcctgggtgacagcaagaccctgtctcaaagaaaaagtaaataacgtaacrtaacgtaacataacataacataacataacataacataacataacataacataaaacaaaatgagtacccagtggtcaataatgaaagcagaatcatcctggaaactggtccatgcagactgactcctgccctcctaccaagttggctactacagctgaagtgcccactctcctacc

SEQ ID NO: 547652 - DNA, 832 bp, Homo sapiens
tcccttctggaaccacattaaaatgtatccctaaacagcctttcgctaggaatcccccctgctattccactagtacataaatgcagagaaccacatctggctactgggaagcacatcaatcacagctcaggattcattcattccgcggtcgctggtggtttatttgaaacacacaagccagcacacacagctggacacagcaaaccaggttggcactcttaattacctaattggtggttctgttgtaggctcttttttttttcaggttaaactttcttaatgcataaatgatcgatccatgtatttgtttactcttcttccttgatattcagcattttaaaatgagtgcccagggctgggcacagtggcttccatgtgtaatcacagcaccttgggtgtccaaggtgagaggatcacttgaccccaggagttcaagaccagcgtgggcaacatggcgagacaccgtgcctacaaaaaatttaatattagccagctatggtggcatgtgcctgtgttcccagctatttaggaggctgaggtgagaggattacttgagtttgggaggttgaggctgcagtgagccaggatggtgctgctgcactccagcctgggtgacagcaagaccctgtctcaaagaaaaagtaaataacgtaacataacrtaacataacataacataacataacataacataacataacataacataaaacaaaatgagtacccagtggtcaataatgaaagcagaatcatcctggaaactggtccatgcagactgactcctgccctcctaccaagttggctactacagctgaagtgcccactctcctacc

SEQ ID NO: 547653 - DNA, 832 bp, Homo sapiens
tcccttctggaaccacattaaaatgtatccctaaacagcctttcgctaggaatcccccctgctattccactagtacataaatgcagagaaccacatctggctactgggaagcacatcaatcacagctcaggattcattcattccgcggtcgctggtggtttatttgaaacacacaagccagcacacacagctggacacagcaaaccaggttggcactcttaattacctaattggtggttctgttgtaggctcttttttttttcaggttaaactttcttaatgcataaatgatcgatccatgtatttgtttactcttcttccttgatattcagcattttaaaatgagtgcccagggctgggcacagtggcttccatgtgtaatcacagcaccttgggtgtccaaggtgagaggatcacttgaccccaggagttcaagaccagcgtgggcaacatggcgagacaccgtgcctacaaaaaatttaatattagccagctatggtggcatgtgcctgtgttcccagctatttaggaggctgaggtgagaggattacttgagtttgggaggttgaggctgcagtgagccaggatggtgctgctgcactccagcctgggtgacagcaagaccctgtctcaaagaaaaagtaaataacgtaacataacgtaacataacataacataacataacataacataacataacataacataaaacaaamtgagtacccagtggtcaataatgaaagcagaatcatcctggaaactggtccatgcagactgactcctgccctcctaccaagttggctactacagctgaagtgcccactctcctacc

SEQ ID NO: 547654 - DNA, 544 bp, Homo sapiens
agataatatttcattgattttttactcatttaagtcagactaaagtgaacatgtctcttgaatgtaaatacttatgaactgatatttttctttcctttgagaaatttctaaatttcaatttaccagttcagagactatggatggtatttaggtcaaatgaatttccacgaaagttcttctcctatggatsagcaagagttccaacgttccatgccctgaccaacacaagctatgattcaatttttccagattatctcaaaattattttgttacatttaaaagaatattggtgttatttttaataaaagcattcttacgaaagtcttcaaaaacccccatgctaatgaatccaaaggtggattctctaaggcaggcacaatgtgtggctgcgccagtgctgtcttgtccgtgtcacagagaaacctcatactctacctccccactgtggcatggctggaacggtccgactccatgggctccatctgcctaagattggtgtgcactgtgcttcccacctgcaccagcgcagcagcacgtccagccc

SEQ ID NO: 547655 - DNA, 656 bp, Homo sapiens
ccatatggatcatatgttgaagccctaaccccctagcacctcagaatatcactgtatttggagataggggctttaaataggtgattaagtttaaacctatttagctcatttagggtgagctctaatccaatcagactcatgttgttataggaagaggagattaggacacacagagagacaccagggatggacaggcacagaggaaagaccatctgaggacacaccagaatcgaccatctgcaagccaagaggaggtctttggaggaaccaaccctgctgacaccctgatctcagacttccagcctccagaattgtgagaaaattaatctctgtcatttaagccacccagtctgtagtactttgttatggcagctccagcaaactatatctacagtaatccatcaccacttatgacaggctctgccacatagtaggtgtgtgtgcacacaccacacacaaacatgtttagaatatgaaatccgtgaaccctactcccacactgataacagttcaggaacagttgattttccctcagggaatctggtttgttttcctagtttccatcccatcaagaccccttcccaccygctgggaaatacttgcctgaacccctcgttcctttcacaacacacacctgatggtaggaagaagcttcc

SEQ ID NO: 547656 - DNA, 656 bp, Homo sapiens
ccatatggatcatatgttgaagccctaaccccctagcacctcagaatatcactgtatttggagataggggctttaaataggtgattaagtttaaacctatttagctcatttagggtgagctctaatccaatcagactcatgttgttataggaagaggagattaggacacacagagagacaccagggatggacaggcacagaggaaagaccatctgaggacacaccagaatcgaccatctgcaagccaagaggaggtctttggaggaaccaaccctgctgacaccctgatctcagacttccagcctccagaattgtgagaaaattaatctctgtcatttaagccacccagtctgtagtactttgttatggcagctccagcaaactatatctacagtaatccatcaccacttatgacaggctctgccacatagtaggtgtgtgtgcacacaccacacacaaacatgtttagaatatgaaatccgtgaaccctactcccacactgataacagttcaggaacagttgattttccctcagggaatctggtttgttttcctagtttccatcccatcaagaccccttcccacccgctgggaaatacttgcctgaacccctygttcctttcacaacacacacctgatggtaggaagaagcttcc

SEQ ID NO: 547657 - DNA, 1392 bp, Homo sapiens
tgaaaattagccaggcgtggtggtgcacacctgtattcccagctacttgggaagctgaggcaggagaatcgcttgaacccgggaggtcgaggccacagtgagccatgattgtgccactgcactccagcctgggtgacagagcgagaccctgtctcacaatgacaacaaaacccaaaaaacccaccaaaaaacctattggtttcaccaaagatcttaatctagattcctatatcctaaagaatatatctttatcactgaggcctcagcctcccgagtagctgggactacaggcacacaccaccatgcccggctaatttttttgtattttttagtaaagacggggtttcaccgtttttaccaggatggtctcaatctcctgacctcgtgatccggctggcctcggcctcccgaactgctgggattacaggcgtgaacgactgcccccggtgagtccaatcattyctaaaccaccttctcaaaatctggtatttgccatccagtcctaactggatgtctagcatatggtgatggtgtgtgtgcgtacagaggtcaccttccaagtgggtcctgcacccaccatcaccctcactctctccaatccctcaagggtgtccagccctctatggctcacaccctcagcacagcaattcaacccttgggtggtgttcctggctaagcgtgaccctgaagcctcccagcctctgcccctgctcatggctgtcccctgcaatcagccccttcactgtgggacggccacccacgcagggtctgaagagcctctctctgaggtagtagctgattgctgtgcctggcttctcccaagctctggatgtccagccagtgattctggggagaggggtgcctggcaaaggggggcccccaccagcacttcactctgtgcttactgtcctccccacccaaggaagcttgaaccatcaatgtctcctccaaacccagccccagtgcccagccaaggaaaggcccctgatcctgagcctggctagtgactgcgagatccttggcctctccccagctgtgtgaggctcccggggctagcctgggccaaggctccaaatgcggcagctgcctccatgggaaccagctcttaggagccagccaggctggagtgtcctataccttatggccccaacacttgtttctagaagccttcccatctctccctgatctttgactcttactatgaccccacacggtgctaggcctggcagagtccagtggttaaatgctgggacttcatgtgtcagtttccccttctgtaaaatggagatgacaccattcctgatacagcagtgttaggattcaatgagaaaaaatgcataaagcacttagcacagcacctggcacatagtggatgctccataaatgaagctg

SEQ ID NO: 547658 - DNA, 592 bp, Homo sapiens
attattttaccatttccccttagatcatggcttcatttttttgcaagtatggaaaacaagccatttaagtacctcttataagtttcaagtgacaattagcaaggctttcaaaccacaatatttccttttaggaakttttaaaatatttattaaaataacagatgaatacaattttaaaaccaaatgataatacaaagattaggacatgaaatgagagtttcctctttaacccaacccatcttccagattcctgctttgcagaggtaagagtattagctagtttttataatacttccaattttctaaacaatatccttacaagactgacatttattgattttgtttttaaaatattatttacttcatgctatgagagatgctgatctaactctcttaaaatgcgcgcacacacacacacacacacacacccctcccatgtagttttaatttaaatttttgataagtcagaagtgtttgggtaagttgaatattgaatcacatagtatactgagcctcataatacactacaattacacattcttgatggtgaagctatttcccctggagtaaataactatttattattcttatt

SEQ ID NO: 547659 - DNA, 592 bp, Homo sapiens
attattttaccatttccccttagatcatggcttcatttttttgcaagtatggaaaacaagccatttaagtacctcttataagtttcaagtgacaattagcaaggctttcaaaccacaatatttccttttaggaagttttaaaatatttattaaaataacagatgaatacaattttaaaaccaaatgataatacaawgattaggacatgaaatgagagtttcctctttaacccaacccatcttccagattcctgctttgcagaggtaagagtattagctagtttttataatacttccaattttctaaacaatatccttacaagactgacatttattgattttgtttttaaaatattatttacttcatgctatgagagatgctgatctaactctcttaaaatgcgcgcacacacacacacacacacacacccctcccatgtagttttaatttaaatttttgataagtcagaagtgtttgggtaagttgaatattgaatcacatagtatactgagcctcataatacactacaattacacattcttgatggtgaagctatttcccctggagtaaataactatttattattcttatt

SEQ ID NO: 547660 - DNA, 649 bp, Homo sapiens
gctattctcatgatggtgaataagtctcacaagatctgatgggtttatcaggggtttctgcttttgcttcttcctcattttctcttgytgttgccatgtaagtgccctttcacctctcgccatgattctgaggcctccccagccatatggaactgtaagtgcaattaaacctctttttgttcccagtttcgagtatgtctttatcagcagcgtgaaaatgaactaatatactacctcagatgtcctgggcttgtaggataggtaggtggaaaatgcagcccaaactggtatgttcctcaattccaggtaccccagaaactatgcccagagaggagacagtggcacagaacaagccaatggaggaatcgtggactgctttccctattctgggcagagttgggtgtacctcatgggcaggccagactctgctgtactctgaaacccctgggcagaggggttcccaaggcctctaagagtaggcccggatttttcttcaagcacaatcaatacttttctagtaacaggctctgttaacataaacttttccaatcccacaggcctggctccccatcttggccctgcaacttctgaagggctttgggtctttttgtaaaaggaggtaaacagaatcattgggctgttgtgagaa

SEQ ID NO: 547661 - DNA, 649 bp, Homo sapiens
gctattctcatgatggtgaataagtctcacaagatctgatgggtttatcaggggtttctgcttttgcttcttcctcattttctcttgctgttrccatgtaagtgccctttcacctctcgccatgattctgaggcctccccagccatatggaactgtaagtgcaattaaacctctttttgttcccagtttcgagtatgtctttatcagcagcgtgaaaatgaactaatatactacctcagatgtcctgggcttgtaggataggtaggtggaaaatgcagcccaaactggtatgttcctcaattccaggtaccccagaaactatgcccagagaggagacagtggcacagaacaagccaatggaggaatcgtggactgctttccctattctgggcagagttgggtgtacctcatgggcaggccagactctgctgtactctgaaacccctgggcagaggggttcccaaggcctctaagagtaggcccggatttttcttcaagcacaatcaatacttttctagtaacaggctctgttaacataaacttttccaatcccacaggcctggctccccatcttggccctgcaacttctgaagggctttgggtctttttgtaaaaggaggtaaacagaatcattgggctgttgtgagaa

SEQ ID NO: 547662 - DNA, 390 bp, Homo sapiens
agagtgagaccctgtctcaaaaaaaaaaaaaaaaaaaaaagcaagattcacacactttcagcctcctcgaggacccacgggcacttgacatgttagcatggttccaaccccacgctcacttggctgcaggatattgagagtgcggagtgcaagagggagccagccttgaggacgtacctgccccggttcaggccactttctgcactccaggacaccccaacccttaccttctcccttccctgctaaatcatgggcctgactcccgagggaccacccaggggaaaggaaccagtttccacggcacctatgggccaaataagtacgaycacactttctccgcctctcttgttcttgtgcctacccaataaacagcatctccacgtgacaaga

SEQ ID NO: 547663 - DNA, 390 bp, Homo sapiens
agagtgagaccctgtctcaaaaaaaaaaaaaaaaaaaaaagcaagattcacacactttcagcctcctcgaggacccacgggcacttgacatgttagcatggttccaaccccacgctcacttggctgcaggatattgagagtgcggagtgcaagagggagccagccttgaggacgtacctgccccggttcaggccactttctgcactccaggacaccccaacccttaccttctcccttccctgctaaatcatgggcctgactcccgagggaccacccaggggaaaggaaccagtttccacggcacctatgggccaaataagtacgatcacactttctccgcctctcttgttcttgtgccyacccaataaacagcatctccacgtgacaaga

SEQ ID NO: 547664 - DNA, 571 bp, Homo sapiens
gtcacatgggaaggacacgtgggctcctgggctggagcacagaacaggaggtgaggatggggtgcagatgcgggcgggccttgtcaggctgtggaagggctgaggctttgtcctgtgcggggagccgtggccactgcaygggggatgaaaggaggcttgatgggaggccaggagcccagggaggaggccaggaggctgataggaggtgggggagcagctgggacgggcctcaggtcttccctgcagtgggagcagggaagagcagaagctctgggagactccctgggtgtttggggctgcggtgtccaagagctgctggacccttgggactggaactcaaaagcaggctagggatggataaagattgggatggcccctggagaggcaggaactgcagccacagtggtggggactgggacgaggaagggtgagaaagcgagggtgaccacctcccccactgcaccccccagggtgtgctccgtgcgctccgtggacggctcacccacgacagccttcacagtgctggagtgcgagggctcccggcggctcggctctcggccccggcgctacc

SEQ ID NO: 547665 - DNA, 571 bp, Homo sapiens
gtcacatgggaaggacacgtgggctcctgggctggagcacagaacaggaggtgaggatggggtgcagatgcgggcgggccttgtcaggctgtggaagggctgaggctttgtcctgtgcggggagccgtggccactgcatgggggatgaaaggaggcttgatgggaggccaggagcccagggaggaggccaggaggctgataggaggtgggggagcagctgggacgggcctcaggtcttccctgcagtgggagcagggaagagcagaagctctgggagactccctgggtgtttggggctgcggtgtccaagagctgctggacccttgggactggaactcaaaagcaggctagggatggataaagattgggatggcccctggagaggcaggaactgcagccacagtggtggggactgggacgaggaagggtgagaaagcgagggtgaccacctcccccactgcaccccccagggtgtgctccgtgcgctccgtggacggctcacccacgacrgccttcacagtgctggagtgcgagggctcccggcggctcggctctcggccccggcgctacc

SEQ ID NO: 547666 - DNA, 1118 bp, Homo sapiens
caccttaggctgggacgctcgccccagtccgcgccttcccccaacgccctgtggggactttggctttttccaggaaatgccgtaaagggatgaaaggcggggggggggcggcggaggccaaaaccaagggtcaagttcgggccgggagaacggtgcctagagatgggggagggatgatcccgtttccccttcccccaccggaacccccctgtctccatcccagctggagaagagcgtccggcgcctccgggagaagtttcatgggaaggtatcctccaagaaggcgggggctctgatgaggaaattcggcagcgaccacacgggagtggggcgctccatcgtgtacggtgaggctgcaggggtcccgggcctggtgcggggaccgcgcgtgggagcgccgagggggcgtggtctagggagaggcgttgagatcacctcccccggaggtcccagccttggggaggctctgcgtcgcggctctgggtggcctggaactcccacagacccttcaagggcccttcccttatatgcactctcccccgcaggggtaaagcaaaaagatggccaagaactaagtaacgatctggatgcccaggtaacctatcccctcccctcgcaaaggaccgggtcacgggagggagagcaagaggggggacccgacccgttcatggtgactgacccccctctgaaacaggagggaccaggcattgtcggtccataactcatcacccaatctcactttttcacctctccatcatttgtccggccagggagcctgcaaacagtaggcgctcattatgtgctgattgtattcaatgggggagagagccatgaaactaagcaatgaaaggagccaggattattgccatcatagcgggggcgcagaggtcagagaaggcttactggaggaggaggtaccaagtcttaaaggatggggaggagtgagccctgggaggggaaagggaaagaaaggcaggggtcttggggtgggggagggaatggcataagcaaaggctgggaggtggggaagggttgttagtggcagtctctagaaaggctrggatgagcagaggattggggaggagagagaggcaggggaatggaacccttgtgttgaa

SEQ ID NO: 547667 - DNA, 600 bp, Homo sapiens
tgccctcatcaccagggactgaccccctctagtgctcccagcactcaagtctgggggtgtttttgaccttctgaatgtgggctttcttttcgaactgcggggaaggggactccttatcttaactgatcagaaagtttgtgtttcttccctttggactccttgatcaaatattaattctagccacccttaattccagtttcccttcgctctgggtaattttgttcccttgcgtgaatgtgtgcgatttttagtttctttggtttctggatggaattwattgtgagcttgttcaggttcttttaaattttcttgtttgtgtgtgtttatctgtgtggtttctacccaagagatttcgcctatgttggagtgccatgatgatgcaaaatctctgtatgtcatttgttccgtatataagtggtaagcatttttttgtgtgtgtgacggagtctcgctctgtcgcccgggatggagtgcagtggcgcgatctccagctcactgcaagctccgcctcccaggttcaagccattctgcctcagccttcccagtagctgggactacaggcgcccgccaccacgcccagctaatttttttgtattttta

SEQ ID NO: 547668 - DNA, 600 bp, Homo sapiens
tgccctcatcaccagggactgaccccctctagtgctcccagcactcaagtctgggggtgtttttgaccttctgaatgtgggctttcttttcgaactgcggggaaggggactccttatcttaactgatcagaaagtttgtgtttcttccctttggactccttgatcaaatattaattctagccacccttaattccagtttcccttcgctctgggtaattttgttcccttgcgtgaatgtgtgcgatttttagtttctttggtttctggatggaatttattgtgagcttgttcaggttcttttaaattttcttgtttgtgtgtgtttatctgtgtggtttctacccaagagatttcgcctatgttggagtgccatgatgatgcaaaatctctgtatgtcatttgttccgtatataagtggtaagcatttttttktgtgtgtgacggagtctcgctctgtcgcccgggatggagtgcagtggcgcgatctccagctcactgcaagctccgcctcccaggttcaagccattctgcctcagccttcccagtagctgggactacaggcgcccgccaccacgcccagctaatttttttgtattttta

SEQ ID NO: 547669 - DNA, 656 bp, Homo sapiens
atccatcctcggcctcccaaagtgctgggattacaggcgtgagccaccgcgcccggccctacagttgattttaagaaattatattgacataaaaaagcatacaaaaggattaccctttataaaggctgggatcttccgctgaccgccccagtctgtcttcttttagaacctcctttttgttctaagaggtgggatcatgctaagaactttcaattgattatgccgtttgatctttacatcaaccacatgaggtagataaatttcagagaattaacttaagatcgcacagtgagtaagtggcagacacagaactggacccaggcagtttgagtccagagctgtggctcctcacgtgtgtattacacagtactactcctctgcccactaatgtgtgtgacactgcaaatggatgacagcaaattagcaacaattgactgggttaaaactgtccttaataaacacagtgcccattattcatacatatacacttatacttctataaacctaaagaattaagaaggaaaataattctggaaattaaatgctgttactttaattaccttcaagacgttctccactagaaaagttaagaaattcaaatattaagactcaaatctcattcatcataatyacactgaattagaatctaaaagaat

SEQ ID NO: 547670 - DNA, 602 bp, Homo sapiens
actgaaaacatggttgaagaacaagaaagtgtcttggaaggagtttgtgctaacgttaaagcttttggactttattcagtaagttataagacaacccttgaagcgttttaagcagagacgtgatctacttccacaaattctgcttagttttacatatgtcttgaaatggtttgtttgggtaaacctctgcttctaatttgctatttacatttgcacatcaaaagatatttttaatggaaaagtacatgtaaattatatgagaccagtgctgtaaatgtaactactctgaaaacattttgcaattactgctgtggaatatgttaaagcatatatgtttacattgaaatccagattcctaaatgttaacctatctctgaatgtttgcaatgattccatcttggcaaacacatagctcatttattgaggcttacattttactgacactggcttaacaaggcactagaggctttagcttacatttctccataaaatgctgttacaattatgcagrtctgttcctgcggctgccattgctctacctaattattttttccgtactcatttgagtgtttcgattcttttttttcaacatattatcggct

SEQ ID NO: 547671 - DNA, 602 bp, Homo sapiens
ttgctcatctaactttgagcattttttccagaatttattgtattcaggaataagataggagtaaaattgaatggcagacctcagaattttgctacctgaagatttttttttttttttttgasacaaagtcttactctcttgcccaagctggagcgcagtggtgcgatctctgctcacgcaatctccacctcccgggttcaagtgattcgcctgtctcagcctcccgagtagctgggactacaggcacgagtcaccatacccggctaacttttgtatttttagtagagacagggtttcctatgttggccaggctggtcttgaactcctgacctcgtgatcctcctgcttcggcctcccaaagtgctgggattacaggcatgagtcacctggcccggccttaacatttttatctcaagcacctttaaaaaggagttttcacttctcaaatcctaccaacaatgtgctgaggacaaataaaataaggcttatctaagctgaaagagttttcactaatttaaaatatgataaatgaagactagacaagttaaagattgaatgagaaagagaaaagaagaaaaagagatgaaaaggagaaaaaggag

SEQ ID NO: 547672 - DNA, 644 bp, Homo sapiens
ttgatgccaaccttttagcttgatgcctctggccatatttgtataccatacaattttattcacgaacaaagtgattcctttttaaattttattttattagttctgagaaaggcttataaatcttaaaaaaattcctttcattaggatgacccatatttaaaataaaaacagcttttgttaagttttaaggtcataatctatttattctatctatctctattaagataagcattgtctactttttccttgattaattttttctttaatttttgataagacactttacatgagatctatcctcttaagagatctaaagtgcacaaatctgtattttaacctatggacataagactttacatgagatctctgggactaattcacyttgaacaattacaattttatagatattgagtagtaactcactgttttcctctcctcccagctcctagtaatcaccattgcattctttgaatctagatgtccgacaattttagatacctcatatgagtagaattatgcagtatttgtccttctgtgactggcttatttcactcataataagatccttttcaaaatatctcgctgtaggaaaccatctactttacctgtacacgaacagggaaaactttaaacatttaaacttt

SEQ ID NO: 547673 - DNA, 644 bp, Homo sapiens
ttgatgccaaccttttagcttgatgcctctggccatatttgtataccatacaattttattcacgaacaaagtgattcctttttaaattttattttattagttctgagaaaggcttataaatcttaaaaaaattcctttcattaggatgacccatatttaaaataaaaacagcttttgttaagttttaaggtcataatctatttattctatctatctctattaagataagcattgtctactttttccttgattaattttttctttaatttttgataagacactttacatgagatctatcctcttaagagatctaaagtgcacaaatctgtattttaacctatggacataagactttacatgagatctctgggactaattcactttgaacaattacaattttatagatattgagtagtaactcactgttttcctctcctcccagctcctagtaatcaccattgcattctttgaatctagatgtccgacaattttagatasctcatatgagtagaattatgcagtatttgtccttctgtgactggcttatttcactcataataagatccttttcaaaatatctcgctgtaggaaaccatctactttacctgtacacgaacagggaaaactttaaacatttaaacttt

SEQ ID NO: 547674 - DNA, 569 bp, Homo sapiens
aaagtctgttttatctgaaggaataaccaaaaggccagttaacccayacattgttaaaataaaaagaaatatacataccttcaataacttattttaacataaaacttataaatgtacattatctgtttttttcaaggaggggcaaggcttctttttataaggatgagtttcccaaatgaagttacacgttgttcttttagtgtaaatagtatcttttagtgtaaataaaaatgatttatttttgagttccagttcagaatgattttaggtagcatgagaaacctgaaaataattgtgaaattgtttgactgcagacttttgatgttacttttcccaattttctaagttgtctccctcacacaatttgacaagactttctttttcagcagtttatttttataaatcattttcaaaacattcaacttagttttcaaaacattcaacttccttcaaactttgtttgaaggaagataacacttttttgcatttaatccatatataaaatacctaattgattatataactacatataattgcaattacatgtaaaattggcattaacaggatca

SEQ ID NO: 547675 - DNA, 569 bp, Homo sapiens
aaagtctgttttatctgaaggaataaccaaaaggccagttaacccatacattgttaaaataaaaagaaatatacataccttcaataacttattttaacataaaacttataaatgtacattatctgtttttytcaaggaggggcaaggcttctttttataaggatgagtttcccaaatgaagttacacgttgttcttttagtgtaaatagtatcttttagtgtaaataaaaatgatttatttttgagttccagttcagaatgattttaggtagcatgagaaacctgaaaataattgtgaaattgtttgactgcagacttttgatgttacttttcccaattttctaagttgtctccctcacacaatttgacaagactttctttttcagcagtttatttttataaatcattttcaaaacattcaacttagttttcaaaacattcaacttccttcaaactttgtttgaaggaagataacacttttttgcatttaatccatatataaaatacctaattgattatataactacatataattgcaattacatgtaaaattggcattaacaggatca

SEQ ID NO: 547676 - DNA, 548 bp, Homo sapiens
acaaatgacacatagttatttcactatctaaaatcctgtaaccaaatgatcactttgtaccaaaggtgttcagaaacccactaccattcttaggatctattgttgtgactaaaccaggccagtgatttataaagaaaggcacaagagtcttgaactttatttatttatttatttatttatttatttatttatttatttatttatttttgagacagagtgttgctcttgtagcscaggctggagtgcaatggtgcgatcttggctcactgcaacctccgtctcccgagtttaagagattcttctgtctcagcctcccgagtagctaggattacagtcacccggcatcgtgactggctaatttttttgtactttttgtaaagatggggtttcatcatgttggccaggctgatctcgaactcctgaccacaggtgatttgcctgcctcagcctccctaagtgctgcgattacaggagtgagccaccatgcctggccaagagtcctgaactttaaagaaagaagaccaacctgtgaattaaggagcttgccc

SEQ ID NO: 547677 - DNA, 611 bp, Homo sapiens
ctggccaacatggtgaaaccccgtytttactaaaaatacaaaaattagcaggatgtggttctcaaagtgtgccctccagtccacttgtctcagaaccactcacatgagacccactgcaccacacatatgctatactcagggctctcaacccaggcagtacattggaatcacccgaggaggtagtttaaatatacaggtacttgttagaaatatagtcctacagactgagaaagcctgtgatgggtccctacgcatccctgtttttggcaaattctcttggtgattcttttctcattcaggattgagaatcatttttttctatccactagaaccgggttttctaattgctacttaggagtttagtggatagtattgttgttcaactgacatctttacatcaatttccacttactccatcttactattgtatctacaaagataccgtgagaaaggctattatgaaagttgagccaaaccttaaggtggctttaatggaatgaccaggaggaaggcacatctgttccctcctggcctgactctttctcttgagtacacattctcctctgaagtaaaaggagcacagagagtggcaacccaaatcctatttctca

SEQ ID NO: 547678 - DNA, 633 bp, Homo sapiens
aaaatacttttatattataatttaaggagcatcatagaatcttwtaaatttgcaactccaaccctacaatcatgacattggcctgactgtatttttgtgctctttggcacaaaagggcaaaacatttatcttcaagagagacctggaagatgttggacataaaagtttaaaactaaaaagaaaacaatttttttcataaagaactaccttttctaaattgtcaaatatgcattgaaaacaaggatatctagtgttttggtgttaatactttggctgtttttgaggaactagagatttatgctataggattttaaggtgaggttagcacagtgtggttttcagatcaataaaggactttgtgtcaaggacctcctggttgcttgcctagtttattgtgacttaacaaaagagcccaggaacagtattgctcagcagaaggaaaacaaaaataggtgagctcatagctcatcttgaagagacaaaaaataccaagatcaagggtgctcacaaagaagtcctgtttagagaatgccagaattccatagtgaaatcactgttttcaagtcctgcccttaaaaacatgaccttggaaatgttttcaaacacacaaaaattcacaaacagtgtcacaag

SEQ ID NO: 547679 - DNA, 571 bp, Homo sapiens
atccctgggccttcacttcatctgtaaaatgggttagtgatgctatgtagtacgaatatgttaattactttatgtttgttatctcatttgttcctcmctgtcaatttttacaaaagagaaggtagacattctgagggttaaatgatgtggcaaaagttacaccagaggtcagagtctcatattaaatttaagttataattgtctctgaatcatttttgtatgcacatataataatttacttcaatatttctaaaatatatttacaggagatttcaaaaatatacttggtgatattagtcctggatgttgacacaaaatgagaaagacgcaaacaaacaagcagacaaaattaatgaataattaataaataagtaaataaatgattgatgatgaaatgaactaggcaatatacatttccccttttctaatcttcaacagggcataatggcagtgctaccaattgctcaaaggccagagattcttacctgactacatgaaaaccccagaagtatcttttattgacattatgtaaggtagctagacgcagataaaacactcttttctcccagca

SEQ ID NO: 547680 - DNA, 571 bp, Homo sapiens
atccctgggccttcacttcatctgtaaaatgggttagtgatgctatgtagtacgaatatgttaattactttatgtttgttatctcatttgttcctccctgtcaatttttacaaaagagaaggtagacattctgagggttaaatgatgtggcaaaagttacaccagaggtcagagtctcatattaaatttaagttataattgtctctgaatcatttttgtatgcacatataataatttacttcaatatttctaaaatatatttacaggagatttcaaaaatatacttggtgatattagtcctggatgttgacacaaaatgagaaagacgcaaacaaacaagcagacaaaattaatgaataatwaataaataagtaaataaatgattgatgatgaaatgaactaggcaatatacatttccccttttctaatcttcaacagggcataatggcagtgctaccaattgctcaaaggccagagattcttacctgactacatgaaaaccccagaagtatcttttattgacattatgtaaggtagctagacgcagataaaacactcttttctcccagca

SEQ ID NO: 547681 - DNA, 513 bp, Homo sapiens
tcagcttggaacagaaaatgaacagtgggacctaattgaatattatgtgtttaagatggctaaaccggataaaattttgaaataagaaatgcatatacatacatataaaataaagattaaaagatgatcagcacaaataaagaaatgtatgctagctgaacatatttcagtgtgtaggcaaaagtatttattgagtataaaaaagcatgctgtcctgaaatggtgtaagtgtttctatatgaagaccaaagtggtttcaaactttaaatataaaacatttcatttataactagttcattaracatgttagtatggtttttaacttaaaaatttgaattttttggaggcctttttaaaaattctaggaatttagacatgattttaatgttggtggtctttgttttgcctagcaaaatacaacttatgttctcatatatgatccttaacagccccaaattgtttgatactcatttgttaaatggagtaaaaggttcattcttgataacgctagat

SEQ ID NO: 547682 - DNA, 526 bp, Homo sapiens
caaacaaaaacaccatcatcacccgttagataacctattttagggtttccctgattttataaagcatttgtctgacatattataactattttaattactaaaaaatacccatatgtattatgcactctatatacacataagatataaatggctgaactaaaatcctcattggaaaattcttgtatattcttttaaaagtccacagcataaaagtctactttgtgagcctgaaaaagtagacttctacatcatcagcatgtaaaaaatctttaaatytcattgaaacctattcttaattatttaacactcctatcatgttcaaatgttgtgattaatagaaatgatcctaaacttgtagtcattcgcaaagccctataatatgctataaaaacaatctactgacttgttatctgggttcttcattctaatctttctgaataatgaggtgacttcggtatattaatgatgtcattttctggtttttatcctcaacagaagcatatgatggaaaccatttatctcaaac

SEQ ID NO: 547683 - DNA, 617 bp, Homo sapiens
tgtcattgttattgtgcctgaaaccattgcctgaagtctcagaattaggcttctgcaacacaagcacttgaacccaagacttactatgggttctgtataagtcaacgaaacctccaacctaaaaatttgcgtacactcctacctctgacccacttcacctacaatgagaattatctattaaattgatgatctctaaaatctgatctggctctttgattccaagactatataatgcttagataataataattcctttccatttcaatctatggacgtaatggaggaagtaataatgtgaagaaggccagctagcagcttttaaaaatggagtgttgctgtaaagtgtaaataagaaaatggcagaaaggaaagttaagcaatgacttgcttgagaaaygaaaagacaagcaattattcagatgggaacatcatataaaatatgtgagcaagataaagcagtaacatttttctgaattgttatttttataatgagaaacgtaatgcttaacacacattttcctactgtggacaatgtgctgtcccaaactcctgagttgtgatgattttactgggactctcaatggatcttttccttaacaacaaagttgggggtggag

SEQ ID NO: 547684 - DNA, 651 bp, Homo sapiens
tttttattaaacttttttgctttattttttaattaatgtatcacattgacatattgtatagtgagtacaggagaaacacattgcttagatgttttagcttccacttcaatatgtgtaaggatccatttatatatacagaaagccattgacgtgcttacatcatcaaaaacataaattttaattctaaatcactattttgtggacattaacttttgatgaatgtgggatctacttttttgaagtttcattgaaaataagcaaaaaggaacaggattttttggtagtaagtaaagaatcatctacttaattgacacataactataatattaaatttgtttttagccaattggcactgatacaataggcattgataacttcttatagaaacacaaaaagtcctttacaaaatatcagtgtacgtcctatgataaaatataaaataacatattaatmaaatgtttgagaatgtttatgtgtttttttaatggcagtaatttaaccttagtaatttaatatactaatctttattgtgaagccctcagagttcctccaacttgttttacacagtgcacacttctttacagacctttacgaggtcagttttctgcggaagacagtttagaataatttgctccaggcagcattttctga

SEQ ID NO: 547685 - DNA, 651 bp, Homo sapiens
tttttattaaacttttttgctttattttttaattaatgtatcacattgacatattgtatagtgagtacaggagaaacacattgcttagatgttttagcttccacttcaatatgtgtaaggatccatttatatatacagaaagccattgacgtgcttacatcatcaaaaacataaattttaattctaaatcactattttgtggacattaacttttgatgaatgtgggatctacttttttgaagtttcattgaaaataagcaaaaaggaacaggattttttggtagtaagtaaagaatcatctacttaattgacacataactataatattaaatttgtttttagccaattggcactgatacaataggcattgataacttcttatagaaacacaaaaagtcctttacaaaatatcagtgtacgtcctatgataaaatataaaataacatattaataaaatgtttgagaatgtttatgtgtttttttaatggcagtaatttaaccttagtaatttaatatactaatctttattgtgaagccctcagagttcctccaacttgttttacacagtgcacacttctttacagacctttacgaggtcagttttctgcrgaagacagtttagaataatttgctccaggcagcattttctga

SEQ ID NO: 547686 - DNA, 413 bp, Homo sapiens
gtgcaggagccctggtcgtgtctgcctggaggggtcagggctcaggcggggtgcagccrtgcaggagccctggtcgtgtctgtagcttgggtgcctgggttttaggtctgagaggccagagctgccagggtgggcttgtagggtagagagggacagctgggtttacagtggctttggctactcgtgaggtgctggggcaggacctggagttggagctcagtgtgggagaaggtctggggtggggggtggttgctgtgaaggtggtgttcgcagccgccaggctggaggaataagcacagagagtcaccctcagtgaagaagtcggtggggggagcaaacgagggtggacattgagggaggaggcctggggaagggatcctagggtggggaatgagtgctctggggagggccct

SEQ ID NO: 547687 - DNA, 595 bp, Homo sapiens
tgagacttaaacaaattttgatttgtgaagaaaacatgaaaaaagtccaaaagaaaccccctcaaagggcccgagtgtcaacagttcccctttggagcagctcatccatctctcargtgggggtcctccggcaggcagcttcctctgtggcgccaggtgggtccagagtgggcccgctcctttagaagtcaggcaggccaggcagagggaagagagaggcgaagctctcaacctcctcccggagagcctgcacggccgcctggtacttatcccctgccagtctctccttgaactctttcagggtggctctgacaccagtgtcgctctggatctgcagggtcagctctatccctgtgccacaagacacaaatgagtcaccccacactacacaccaaagggggtacaatggctgggggccgaggcacaaatgtcagaatgtcccccagctggggagtgtggcagggcacaaggtctccatgcttacctcaattactctgagatgcacccacccttggacagatgtcctgggcagcccaaatttataaccctctcagacaaggtgatttacatgtgttttttgctgtctcccacccca

SEQ ID NO: 547688 - DNA, 595 bp, Homo sapiens
tgagacttaaacaaattttgatttgtgaagaaaacatgaaaaaagtccaaaagaaaccccctcaaagggcccgagtgtcaacagttcccctttggagcagctcatccatctctcaggtgggggtcctccggcagscagcttcctctgtggcgccaggtgggtccagagtgggcccgctcctttagaagtcaggcaggccaggcagagggaagagagaggcgaagctctcaacctcctcccggagagcctgcacggccgcctggtacttatcccctgccagtctctccttgaactctttcagggtggctctgacaccagtgtcgctctggatctgcagggtcagctctatccctgtgccacaagacacaaatgagtcaccccacactacacaccaaagggggtacaatggctgggggccgaggcacaaatgtcagaatgtcccccagctggggagtgtggcagggcacaaggtctccatgcttacctcaattactctgagatgcacccacccttggacagatgtcctgggcagcccaaatttataaccctctcagacaaggtgatttacatgtgttttttgctgtctcccacccca

SEQ ID NO: 547689 - DNA, 595 bp, Homo sapiens
tgagacttaaacaaattttgatttgtgaagaaaacatgaaaaaagtccaaaagaaaccccctcaaagggcccgagtgtcaacagttcccctttggagcagctcatccatctctcaggtgggggtcctccggcaggcagcttcctctgtggcgccaggtgggtccagagtgggcccgctcctttagaagtcaggcaggccaggcagagggaagaragaggcgaagctctcaacctcctcccggagagcctgcacggccgcctggtacttatcccctgccagtctctccttgaactctttcagggtggctctgacaccagtgtcgctctggatctgcagggtcagctctatccctgtgccacaagacacaaatgagtcaccccacactacacaccaaagggggtacaatggctgggggccgaggcacaaatgtcagaatgtcccccagctggggagtgtggcagggcacaaggtctccatgcttacctcaattactctgagatgcacccacccttggacagatgtcctgggcagcccaaatttataaccctctcagacaaggtgatttacatgtgttttttgctgtctcccacccca

SEQ ID NO: 547690 - DNA, 530 bp, Homo sapiens
ctctctctctgtttctctcctctctgtctcttaaaaaattccttgctactaataattactgaacttttaaaaagtggcagagagtgacgagactacagtaattgttctctgtataagtcaggcatcagctgggctcacactgcctaaaaaaaaactaggcaaatttgattagaacccatattccatactctacataaagtttattttcatagtctatattcttatgatttctgagagttctgatattcccatggtcatcttttgttcaagcttattgcctttgctgaattacttttttcctctatatatcatgcttctaacatcaaatgtatatcaactctattctggggagaaaaaatacatatatagtatgtatatgtgtatagatatacatatatagtatgtatatgtgtatagatatacatacatatatacacatatacccacaaatactttttttcactcaaaggaactataygtatagagaccattactaaattttagtgctcatacttgatttgtatcacaaa

SEQ ID NO: 547691 - DNA, 1578 bp, Homo sapiens
acccaggaggtgggcattgcagtgagccgagattgcatcactgcactccagcctgggcgatggagcaagactccatctcaaaaaaaaaaaaaaaaaaaaaaaagataacataaggatattatatattactttaaggtagtacattttgaaatacaggtgaaaagaacaaaatcctagaaatatgtaatttaccaaacctgattcaagaagaaatggaaaagctgataaccttctaaccattaaatcagtttaattagatcaatttaaatctgataaattttcccacaaagaaaacacaccaggtctagatggttttatatatgggaaaatttgaataaattctggatagattaaagaacttgaatgcaaacggcaatacccaaaaacatttaggagataatatggaagatatctaaatatctgtatgacttcagaatgagtgagatttctttgtttttgtttgtttgttttgttttgagacaggatctaactctatcatacaggctagaatgcatggctcactgcaacctcaatctcctgggctcaagtgatcctcctgcctcagcctctgtaatagctgggactacaggtgcatgcctaccatgcccagctaawttttttttttttttttttttttttttttttttttttttacaagcagggtctcactatattacccaggctgattttgaactcctggcctcaagcgatcctcccactttggcttcccaaagtgctgggattacaggtgcaagccaccacgcccagcctagagtggtgattccttaaataagacccaaactacattaatattaggatcctcttcagccaggaacgatggctcacacctgtaatcccagcactttgggaggctgaggcgggcggatcatgaggtcacgagttcgagaccagcctggccaaagtggtgaaaccctgtctctactaaaaatacaaaaattaaccaggtgtggtggcaggcacctgtaatcccagctactcgggaggctgaggcaggagaatcacttgaacttgggagctggaggttgcagtgagccgagatcataccactacactccagcctgggcaacagagcaagactccgtctcaaaaaaaaaaaaaaaagaaaagaaaaaaattaagatcaatacaagatagcttaaaataacccaaaaatcctcaaactgggagaagatatttgcaacataagtaacagaaagaagattagtattcaaaatatatgaagaactcctggctgtagaaataaaagaaaaaaaaagacaagcaacataattttttaaaagtggacaaaaagacttgaacagaaaaagaaatacaaatgttataaattttcaataaacataaaaagattgcttgaccttataaataatcagagaaatgcattttaaaaccatagtatggtatcacttcacatacctctaattaacaataactcaagtgataatgaaattaagtgttggcaaagatgggaaacaattggaactcttctacagtggcaatagaagtataagttggtataaccagtttgagaaacaatttggtattttccagtaaagttga

SEQ ID NO: 547692 - DNA, 550 bp, Homo sapiens
taatattgtttaatatatgacagggtaagtttcctttcattagtaccaatttttggtgtctttgatagtcataaaaaaagtattattccaaaaaattgcagaacgtgctcttggcagaatggaactttgtttgacagttgcaggaaaaacctgtatttccaaacaaagaatgactgcaagatttctctgtatatttggccccaaagaaaatattttatgtttcacccacaaatttatgagtgacttcacttcagctttctcacttagrcgttatgtgtggtgagaagagctctggaaaaaaagtcagaaatcctcaacttgaaaccaactttaattctttgcaggtgtctaacctgagactggttgcttattgtcttagagtttttgtttccttaagggtaaaatatgagtataatttctattctacctttcacacagggctgctgtaaagaatgagataatatatttgaaatctcttttaaaactacttagcattataggtaacaaattaacatttaattaaaaagttactgttgtacttgagccagag

SEQ ID NO: 547693 - DNA, 1539 bp, Homo sapiens
atcatccacatccactcacctcacacttcctaccctgaaaggttcactcaacagggaaaacaggagccagaaaacgcccctcagaggggacctgcgggcggaggcaaaacccctaggtttccagcctacttcctagacagtgagtctttcacgcatcctcccccaactctgtgagaccactgcttccgcagccgcagggaggagctccttctagtttcgtgcctttcttcccatggccttttcctcaggcccgtrgtctgctcttgcttctttccttcctagctaccactcctcctaaatacagcaaggatgcactccgttctcaccctcctaaccaccatggccccccaacctcagtgatcacagacacatggcaggaatggtgttatgtatggcaccaacgctcagctacagcctttcagaactggactcacatcattcacggggagctcctgcaaccacctgttctgagaaagccccacatctgtgtggtggtgctggactccccacacctgtgctactggtcctaagcctcctcacacctgtgctagtggtcctggcctccccacacctgtgctagtggtcctggcctccccacacctgtgctagtggtcctgggccccccacacctgtgctagtggtcctgggtccccccacacctgtgctagtagtcctagtccccacacacacctgtgctagtggtcctgggccccctacacatgtgctactggtcctgggccaccccacacctgtgctgttggtcctaacccccccatacctctgctggtggtctgtgctagcaggactatgctagcagtcctgggccccttgtgtccactcagggcaccattagtgtgtgcccactgtgtgccaggccacctagccctgaggtccccaaggctggccctgctccagcccacccaccagcttcaggagagcaccacgggcagccaatggctgtggatgggcaccaggaggactctgacagtgctggacagggtgctggggttaagcgaagacccaactggtgggtggagggttggggctctggggctgtcactactggagcgggagggtacacaagctgcggcaaagtaatccctgcagtcctggatcaaggttggtgatgccagtgtgaacagctgcatggtgaccatggatacaggcggaggcctgctgtaacacagacacctgcaccacgcaggcattgcactcacatgcatcctctttgccagcgctgagagggccgggaagcaaggacaccccaggagcaacacacatacttgaaccaggtttgcttagagaaatggctgcttccagaaccaggcagggcagactcatggtgagcctggagcatcttgcagtgccacaaaataagaaagtgctcaagcaagcaaacaaaaagaaacaaaatgcacagtaatgggaacgtgtcacaggaatgcaggagccagctgaaggagctcccaatggccaaagctggagaaatttgagcaagaaaatgaataaaataatgttggattacaacccaaaggacaa

SEQ ID NO: 547694 - DNA, 773 bp, Homo sapiens
tctgaatattagttctgtgaaacagtctatgcataagaattcgttggaatacattaaacaatattttagtgtcgaatataattgtaccttttttcatgtttctacataattctcaaacatatttggataaaaacatgtcttgcattgaccagctctgatcacaactatatgaaaattgcaaagcaaaacaactttttatcagtaaagcaaggaaataaaaataagtcaartaggtgtatatcagtaaagtaaaaattctactatcttatgccccacaagaccgtaagtcttttaactttttataatattttttcaagtttttgtgaagtaatcacctaagaaattaaagaattctagaaaatgttcaatttaatgactcttgaaaaattaattcaaagaagaccttctgaagattttcttaaatacatgatgagagagaaaataatgattagcattttatttcaatagaaattctataaaattcagactaacaatcagtgattctcaaaaatatgtgatgttgatttgcgctatttggaggaaatacaaaatataatctcttagttattgatgatcatttttaagtatattactggtattaagaaagtaggttatcttacgcttagaacaaatacactttctttatgaaaaacagctacaacattttctaaaaaaactcattgacctgcatatatatgtcatagacaatgtatgacaatttttaaaaatatttcttttgataactaaattaaaaataaaacaaaagtgtctta

SEQ ID NO: 547695 - DNA, 773 bp, Homo sapiens
tctgaatattagttctgtgaaacagtctatgcataagaattcgttggaatacattaaacaatattttagtgtcgaatataattgtaccttttttcatgtttctacataattctcaaacatatttggataaaaacatgtcttgcattgaccagctctgatcacaactatatgaaaattgcaaagcaaaacaactttttatcagtaaagcaaggaaataaaaataagtcaagtaggtgtatatcagtaaagtaaaaattctactatcttatgccccacaagaccgtaagtyttttaactttttataatattttttcaagtttttgtgaagtaatcacctaagaaattaaagaattctagaaaatgttcaatttaatgactcttgaaaaattaattcaaagaagaccttctgaagattttcttaaatacatgatgagagagaaaataatgattagcattttatttcaatagaaattctataaaattcagactaacaatcagtgattctcaaaaatatgtgatgttgatttgcgctatttggaggaaatacaaaatataatctcttagttattgatgatcatttttaagtatattactggtattaagaaagtaggttatcttacgcttagaacaaatacactttctttatgaaaaacagctacaacattttctaaaaaaactcattgacctgcatatatatgtcatagacaatgtatgacaatttttaaaaatatttcttttgataactaaattaaaaataaaacaaaagtgtctta

SEQ ID NO: 547696 - DNA, 773 bp, Homo sapiens
tctgaatattagttctgtgaaacagtctatgcataagaattcgttggaatacattaaacaatattttagtgtcgaatataattgtaccttttttcatgtttctacataattctcaaacatatttggataaaaacatgtcttgcattgaccagctctgatcacaactatatgaaaattgcaaagcaaaacaactttttatcagtaaagcaaggaaataaaaataagtcaagtaggtgtatatcagtaaagtaaaaattctactatcttatgccccacaagaccgtaagtcttttaactttttataatattttttcaagtttttgtgaagtaatcacctaagaaattaaagaattctagaaaatgttcaatttaatgactcttgaaaaattaattcaaagaagaccttctgaagattttcttaaatacatgatgagagagaaaataatgattagcattttatttcaatagaaattctataamattcagactaacaatcagtgattctcaaaaatatgtgatgttgatttgcgctatttggaggaaatacaaaatataatctcttagttattgatgatcatttttaagtatattactggtattaagaaagtaggttatcttacgcttagaacaaatacactttctttatgaaaaacagctacaacattttctaaaaaaactcattgacctgcatatatatgtcatagacaatgtatgacaatttttaaaaatatttcttttgataactaaattaaaaataaaacaaaagtgtctta

SEQ ID NO: 547697 - DNA, 1584 bp, Homo sapiens
cactccagcctgggctacagggccacactctgtctcaaaaaaagtaaactagtaaactagagactctactgtagtatatttcaggacctagaagttttacttttataaacatggtgcctggaagatgtcactaatgtattttacttcagcatagggaacaaactttttaagtatattaataaatattcctgtatggtaagtttttaaaattttttaaaataaactttatgaatatgacaaataaaaaagaaagttcgggcctaaaaattagagcttttgggaaagcactaattatctcagatattagttcaaaatcaaaaatatacatggatgatgctataataataggctgtttttcattgataataagtttggcattaataatatgaccaggaataaatttatttaagaaatgtagatgaagtatcgatattatcatgttatagggatcaggtaagagttatcaccaaattctgcccctgtcatttgacccttttgtttaagaattcctgagggcactgtacacactacagatgttatcagaaaaagttacgttttaatgggtgacttcagtagcacaataacaatagcaggtatttcaaaaagtctgacatgcatcatgcagtttaggtttgccatattatccagcctcagatacttcctctacattttggcataggcctatctgaatgatgttcaggctactattcagagaaagagtggcctaggccaacagacaactagtccaagtacccacacaaccaggtagatttagagaaagagaaaaagcagcttgccctgctggactgggcccagccaatatctgaagcaggcaggtgaaaaggaaaaggtgcagatggatcctgacctgaaggtggatcctgtccagtataaaatgtggccccacaaggactcagcactaattaccagattaacaacccctcccaatggacgcagcagaaggaaatataggaaggagacaaacagaaggaagccaggcaggggaacaggttcagatgccccctccatagaacatagtaggaatatattttcttctatatagaataaaccagtgacctttgtccatttgtcaattactttctaatttcctatctgataaagctttcttgtaatggcctctaaattttgcttaaacctgagttactttaacagtgatgtagcaaataaaattaaacactgwaaattattgttcagtttatgaggattgctttggagtttcaaaattagtaacaacataaaaatgtcttggctatagaagaacatattaatcactgttgtcaaagctttgtagcaccttgtctaagtgttaataatctgttgaccaaattcagcaaaatacaattttgaggttattcaaaagctttatttttattcatgataccaacatgttccttatttctatgccaaaaaaatccaaaattagcaatactggttggtaatactctgaatttgtgtcaaaaattgtcacttgaaatttttcttggaagtagtgcttgataatttgtaattccaatgaagttatacataaaacccttgcagcatttatttatttcttgtagtagc

SEQ ID NO: 547698 - DNA, 1130 bp, Homo sapiens
ttcttcctttctactatggattcattatgtcaaatttttaagaaatttttttatattatctatatcattttaaaattatttttgtttaraaaattgtttcactaactggttactcactagatgtatggggttcaaatacaatttttaaataacataaaaaataaaagcagattttggattggttaaatcatttaaatgctttcaaaattactctcataaaaaggatgaaacttatgctaactactgacaaaaaaactatctattaataccacctagtgaaaaatattgttctactcacgaaggatcattaattactgtcttcagtgcattcagcaggtctgtactcgacattgtgttgaagtccactctaacagctgttcccttggccttcatgtgagcaatgttatcagattgatcaaaaaacaatggaatgcccaccatagggatcccatggtagattgtctcgtagatgccattggctccaccatgagttataaaagctctggtttttggatgacctaggattggatgaatgttagcaaaattattcataggaataaaatgagatgcacaatgaaaggctctgaaagtgacagtgttttctagattacacattgaactaatttgctattacttttcagacttcagaggaaaaaacaggtacttgtgttggagatgtaactgaaggctatatggtgtgtgtgacttcagactgcaaaacttaatacaagatttccagttggactaatgaaaaagggcattctagattttaaaaatgtgcacaaaagaggacagcaaagagatgggcatgaaatgaagtgttattctaagtacagtcacagagtgtgatatgtggggtgtgcaaggcagcaggcagtggcttggtggtggtgctaggattgaggagagacaggtcacacttcatcatgaaatgtgtcattactttaagattaagattaggaatttagtcctccagaaaatacagagtcactggtgatagaagagctattatatttagtggcatttgaaataaccctgcaggagaggaaaaaacaggtgtaaagctgtagaaataggagacagagggacagcccgggaagatattgtaaaattctgtgagatataataac

SEQ ID NO: 547699 - DNA, 1493 bp, Homo sapiens
tctagtggctaaaagaaaaacaaaagacctctaaaacttcaacaagaccttcaagatcacagaaatttttaaaatttgattccagttaataacagaggtggtgccagaatgcctggactgcagtggatgtrccccacctctttgcttaaaaaaaaaaatgtcaatagccaggcatagtggctcacgcctgtaatcccagcactttaggaggccaaggcgggtggatcacctgaggtcaggagttcgagaccagcctggccaacatggtgaaatcctgtctccactaaaaacacaaaaattagtcaggcgtggtagtgggtgcctgtaatcccagctactcgggaggctaaggcaggagaatcacttgaacctgggagggggaggttgcagtgagccaagatcgctccattgccctccagcctgggtgacaagagcaaaactccatctcaaataaataaaaaggaaaaaaaagtcaataaactgtacaaatttaattacagtaattcatttggcttttagtgtatcttctttgtcccaattaaacagttgcttgctgtgatgtaatcttaaaatatctttgtaagaattttcttttaacataattttaaaatgcattaaaaacatggcatggtggctcacacctataatcccaacattttgggaggccagggcgggtggatcacttgaacccaggagttcgagaccagcctgggcaacatgatgagaccttatctctacaaaaaattagccagacgtggtggcacgcacccgtagtcccagctactcaggctgaggtgagaggatcacttgaacctggaaagcagaggttgcaatgagctgaggtggtgccactgctctccagcctgggcgctacaactgctctccagactctgtcttgaaaaaaaaacccaaaaacttccagaagattttccaatccactgttaacatcattacatttcatttatgaaaaataaaaacttcatttatgttactgtgatgaaacagtcaacatagattgaaactcatcagtttagcatttcattcaactttagcattcattcaacgtagattgaaactcatcagattagcatttgtccttgtaatattggaataatttagaaaggcttaagagtgaatgttggccagatgtggtggctcatgcctgtaattccagcactctgagaggccgaggtgggcagatcacctgaggtcgggagtttgagaacagcctggccaacctggtgaaactccattgctactaaaaataaaaaaattagctaggtgtgttggcaggtgcctgtaatcccagctacttgggaggctgaggcacgagaattacttgagcctgtgaagcagagattgcagtgaggcgatatcgtgccactgcactccagcccgggcaacagagtgagactgtctcaaaaaaaaagtaaatgttgattttttacattggtgtgactacttcagaacctgcaaaatagttttatgctgat

SEQ ID NO: 547700 - DNA, 911 bp, Homo sapiens
ggttatatgcccaaagttagctattgaaacatttatgacaggaaaagagaaagaacaaaagaacgaagaaaaataaatttttatcaaaagacagagatagctaagtaaatcattattatactaagatattctgaaaaccaaaaacagcgtggaagatgtttaaagtgattttatttcttaaatttttatttatttattagtttaattatttcaagatggagttttgctcttgttgcccaggctgaagcgcagtggcgtgatctcggctcactgcaacctctgcctcccagggttcaagccattctcctgcctcagcctcccgagtagctgggactacaggtgcccgccaccatgaccggctaatttttgtatttttagtagagacagggtcccaccatgttggccaggctggtctcaaactcctgatctcaggtgatcccacccacctccacctcccaaagtgctgggattacaggcatgagccatggcacccggtcttaaagtgattttagctgggaaatatgtttggaaagcctgggtgggaacacagaaatataaacctattttgttatgcttgtggagtttttaaataaactttctttaaccattgttatttaatagtctattaaatagcttaaacaacagacacttttatagtacacatgaacatatttcagccaaaatgtgaccaaactcatgcacagatttggaaatggaacttttgacaaatgactgagggttccttgaatacactggtgtgatgtgtttggcttgctcatctgtcttcaacccatctttccaacagtgtcctgtcatgtcttcctctggctcctaatcycttcttcatctatttctaaagttgtgcctactatcttatttgtttcctatcatccacagaatttatctgagtc

SEQ ID NO: 547701 - DNA, 686 bp, Homo sapiens
gaatccaacagaaatagatacacatgcaaagcagtgtgtattggacatgaatcaccataggggtgtctcatcctcatcgtatctatgaagaagagatgttaacacacaccagcctaacagcaatagcatagatgacacagggaagacatggaatgtttttctttcctctcgctttgttttattttttatttttgtcttatttatttatttatttattcaagataggatctcgctctgtcacccaggctggagtgcagtggctcaatcttggctcactgtagccttgacctcctgggctcatacagtcctctcatctcagcctcccaaatagctgggacctcaggcgcatgccaccatgcctggctaatttttttgtatttttttstagagataggatctcactatattgcccaaacacatctcgaactcctggactcaagcgatctgcatgcctcggcctcccaaagggctgggattacaggtgtaagtcaccgtatctggcctatttttgtgtttaaccaatacttttattttttcttttaggttggacaaaacgtctaatgtataatattaatatattcacctttataccaatacagttgtgaaatataattttctttcttctttttttattaagtccaacttttattttagatttggggggcacatgtgtaggtttgttacat

SEQ ID NO: 547702 - DNA, 541 bp, Homo sapiens
taaggacgcaagcaaagtaatgtaggagtacattttccttgtacaaatgaaaactacagatgaggctaaatctccctttgatctccagctccaatcttggcttccttccacctctccagcggcaacccctattttcgatttggtgtgactccttccaacttttttctytgcattttacatacatgtgtgttttgctttattagtcttttaagattaatgatattgtgcatattatccagccacttaatttctgggttaacaatatatctgggagatcaggtgagtacaaatctacaaaaacatttcattggatgctcccacaccgcccccactttgcagatgagcagaggctcagcgaatgttgaagtgactcatcacagctggtgagtagtgaggcaggattcagacagggatgtgtctctccaagtttagcatgaatctgtcctctccctaatctgcctatagtttctttctttcttttctttttttttttttgtttccctgacatcatcaagtgggccatttaaatagaagattggtc

SEQ ID NO: 547703 - DNA, 541 bp, Homo sapiens
taaggacgcaagcaaagtaatgtaggagtacattttccttgtacaaatgaaaactacagatgaggctaaatctccctttgatctccagctccaatcttggcttccttccacctctccagcggcaacccctattttcgatttggtgtgactccttccaacttttttctctgcattttacatacatgtgtgttttgctttattagtcttttaagattaatgatattgtgcatattatccagccacttaatttctgggttaacaatatatctgggagatcaggtgagtacaaatctacaaaaacatttcattggatgytcccacaccgcccccactttgcagatgagcagaggctcagcgaatgttgaagtgactcatcacagctggtgagtagtgaggcaggattcagacagggatgtgtctctccaagtttagcatgaatctgtcctctccctaatctgcctatagtttctttctttcttttctttttttttttttgtttccctgacatcatcaagtgggccatttaaatagaagattggtc

SEQ ID NO: 547704 - DNA, 1041 bp, Homo sapiens
tggcgtgatgtcagctcaccgcaacctccacctcccagcgattctcctgcctcagcctcccgagtagctgggattacaggcacgcaccaccacacctggctaatttttgtatttttagtagagacagggtttcaccatgttggccaggctgttcttgatttcctgacctcttgatcagcccatatcggccccccaaagtgctgggattacaggcgtgagcctgttaattttaaaaaatgtttccaacttgtgttttctttaagtaaaaatttttaagaaattaaaaagcctgttcttgtttgttgaaaataaaagttatttctccctctttctcttctctgtttaccgagcaatttttgatatattacagtcacccctaagcatacatgagtgttggttccaggacgtgcatgtaggatgcatgtggagtggcgggygggggcggtcttaggcctcaacgctcccatgtgtgtttgacttttttctttctgatacggtgttataactcaagcgattacttttttggtttacaaatgaggagactgattcttagagaagtcgttgtgcccatggtgaatcaatggaagagagagaactagaacccaggtcctctcatcctttgccctgggttttgtcccttgggctttgtctctcgtacttttgaaatcttaccatgattccctttcaggggccctcatgtattcctttcccactggctttgaatacttcgtctttcacacttgcagggacagtattaccctgttcgtagggacagtattccaccaggtgttcaagtgtggcatattgctaagtttgccttgtgtcattctgtggaaggagcaaaggatttggtattagacaaccagggtttgagttttaactacacatcattgtcaggaaaatgaaggtaaccatgattcctcaaactgttgtgaagttcaaatgagataaatctatgtggaggctctttgtaaactggaaagtgttctatagacattaatgaacgatagcactcaccgtcttagcagaagggagtacaga

SEQ ID NO: 547705 - DNA, 540 bp, Homo sapiens
acatttgctccatggctaattatgaggaacgattcattcagaggccatgaagctaattgaccggcacgaaaaccagccctaccaagcaacctaaagcaactgaccacgggctgtggcgacrctcttcaacttttttcagatttgcagagtgatttgactaagccagggttttatagggttctttctgctccttcacagccccttaagcagcaggcattggtccattctgaagtccatgagcaacatttcttcaggactcaatacttgaattttatattaaaaaaaaagtttttttaggacaatctgcattctatgtctggtttgatttcatgtgacactgagaactgagaaagtgatcattcgtaagtaaaatttttgacatggcacctatgtatgctgggttctctaacttggtcccagtgccatgtattccactatattgtccccatgagatgtcctgcaagtttaagtatttcagaatccaaataacatctaccaggaagtccatgaaaaagctctttgtttaaaaaaaaaaagttc

SEQ ID NO: 547706 - DNA, 540 bp, Homo sapiens
acatttgctccatggctaattatgaggaacgattcattcagaggccatgaagctaattgaccggcacgaaaaccagccctaccaagcaacctaaagcaactgaccacgggctgtggcgacactcttcaacttttttcagatttgcagagtgatttgactaagccagggttttatagggttctttctgctccttcacagccccttaagcagcaggcattggtccattctgawgtccatgagcaacatttcttcaggactcaatacttgaattttatattaaaaaaaaagtttttttaggacaatctgcattctatgtctggtttgatttcatgtgacactgagaactgagaaagtgatcattcgtaagtaaaatttttgacatggcacctatgtatgctgggttctctaacttggtcccagtgccatgtattccactatattgtccccatgagatgtcctgcaagtttaagtatttcagaatccaaataacatctaccaggaagtccatgaaaaagctctttgtttaaaaaaaaaaagttc

SEQ ID NO: 547707 - DNA, 662 bp, Homo sapiens
ggccttgaataagaaactatgtagtggttgctgctcacagccaacttctaaccacaaactgttggaatttgactctggggataagagaatggagagatgaaaagaacttgggttcctgaagatgttgttcagctgctgaatcaaacctgaaatccaacctagttgtgggcatcttgtgatgtacatttatatattccatccagtttgaattgaggtttctgtttatttcaaatgaacactaatagagaatttggtgaattatagaagttctaaggagcagaagtgccacaggctacaaacgcaggagtcaaagaaagcccaagtcatatgtgagcctcactgatacctatattcctgccaagtctgtggatccctggaggccagtgcagtcagcctcacctctggatctggctgtgtgattctcagggtggggtataatgaaatacttaaaaaattrcaaaaagaatgtagtgatgtcagaggtgtttaaaccagagtgactccatattgaataggggctgggtaaaataaggcaaagacctcctggattgtattcacaggaggttaggtattcttagtcacaggatgatataaaaagtcggcacaaaatacaggtcacaaagaccttgctgataaaagattgtagttaaaaaaaaaaaaaa

SEQ ID NO: 547708 - DNA, 551 bp, Homo sapiens
ttccaaacagagaagttaagattgattttgccaaggatgttaaaatatcaatactaaacttgcctctgttttctgatcttgaaaaaaaagatgatctgcaggcagtttttcatttttgctaatttctaatcaataaatatgctgctgtgctttatctgccttgtcaaactctataatgaatacccaaacaaaaatttttcatgctggtcttagcacttcatgagcggaggccccaacattatcttaaaatctcacagactccatgcccccaaaaacttatcctcttcccagtcatcgagtaagtgccttttcctttggttctctccttkatgaaggcacgaaccatccacccacttggatctggaagtcatccctctatgtttccttgccacttaccaagtccagcttttatctgtttactttccttccctacctatcactttagtttgggcccttcccacttctcatttggattatagcttcctaactagtctccctttcaatccactctccctcttgccaggggtgatctgatcttatctccagattaa

SEQ ID NO: 547709 - DNA, 566 bp, Homo sapiens
gcccggccaccttgttatttttttatggatgtactgccagataaagtatgataccagattaactttcaatttcagatatatagtaaataamtatttttaatctaagaatctatactaaattgtggttcacatttatgctaaaaattgttccttatctgaaattcccaatgttaaataaggatcttatatttttatttgctaaatccaacaacactacattgtgttttaaagtgaattcggaaagaagctttggtggttttacattgcagtctttctcactgttttagcattagtcctatacacaaaattttccaactatatgtatttatggtgctgtagagagtctactgtaactctaattctaatttttgaaacagttagtgctcaaataaagatcgataactcctctggccatccagtagcacactgacagaacaaaacagacatggctgggtccttgccagaggtgatttctgtggtcctagggctaagaaagggtgaaatttcatggcattttcatcaaaacgttattggaccaacatacttcaaattaccttctatttcta

SEQ ID NO: 547710 - DNA, 564 bp, Homo sapiens
gataatcatatttaattttttatttctgtttttataatgttaatgctaacttataaggaaaccaaattagtaaataaagattatggaccatcaaataataaagaaattcactgatacttgtttctccttccacctatttagttgcctatattatttgggagaaatatagtcacagtttcataacttttatagaagttttgtataatctttatataatatttgttggtgctatgctacacacacacatatgtagtagaatgtatatgtacactctaaagtttcaaataaakcatactaaacgatttttcttgaagtaacagttgtaaacgttatactttaattgagttaaattcacaaaatccaagtattcgaaacaataaaaagaaaatattttctgatcaaatttaaagttaaaaacaacatactctctcataagaaataagcttggacatgaccttttttagcataatgactactgtcatttcaatgtcaacctttgaaagcatccattcttgttaaaaacatttgccactgctgacaatttcagaacaaaagttaagtggg

SEQ ID NO: 547711 - DNA, 564 bp, Homo sapiens
gataatcatatttaattttttatttctgtttttataatgttaatgctaacttataaggaaaccaaattagtaaataaagattatggaccatcaaataataaagaaattcactgatacttgtttctccttccacctatttagttgcctatattatttgggagaaatatagtcacagtttcataacttttatagaagttttgtataatctttatataatatttgttggtgctatgctacacacacacatatgtagtagaatgtatatgtacactctaaagtttcaaataaagcatactaaacgatttttcttgaagtaacagttgtaaacgttatactttaattgagttaaattcacaaaatccaagtattcgaaacaataaaaagaaaatattttctgatcaaatttaaagttaaaaacaacatactctctcataagaaataagcttggacatgaccttttttagcataatgactactgtcatttcartgtcaacctttgaaagcatccattcttgttaaaaacatttgccactgctgacaatttcagaacaaaagttaagtggg

SEQ ID NO: 547712 - DNA, 1106 bp, Homo sapiens
attttcaggctatttgacaataagaggtgtccactgagatgtaagcagaagttgtcaattaggattttcaggaaaattcctcaggagagaaatagacactgtcgtacaccctttatctttgcccactacctttttcttgcttcttgaaataggcatgatggctgagtttcagcagctatattggtgtattaggccattgtgatagtcaattctatgcgtcaacttggctaagtcacattacccagatatttggttaaacactagtatagatgttactgtgaaggtatttttaaaatctgagattaagattttaatcagtagaatttgagtaaagcagattaccctctacagtctgctttggttgtgatttggcctcatctaatcagttgaaagtcttgtgagaaaaaaagactcatgtctcttsaggaagagagaattctgccagcagtctgcctttgctcttgagctgcaatgtcagctcttccctgggtctccagcccactggcctacccgcagattttggacttaccatcttttggaatcatgtgatccaatttctcaatataaatcaggctgtcctctcccccaccctccttgcccactgtgtgtgatacacatcttattggttcagtttctctggagatctctgattaatacagccatgaaagtcatgtgcaaaggacagtggagcagaaagttgtaagaaaccaggatctctgatatctgtcatacttccacaccagctttaaactgcttacctttgtactttttttatgtgggagacaagaagatttgtacttttttataagtttttcactagattttttgttacatacagtcccaaataacactaactgagaaaataacatttaaaaaattacctgaatcatggctgactttttttttcatacaatagccatgcactgcagaagaccaagtggattccattttcttcacctgttcattagtctctatttattttaaaatgtgtgaagggacatggaactctgggttctctagtatctgttaataataatcaatgaccatgaatcaggccaacagaatctttcaggtttatctggtactaccacatgaagagaaatttc

SEQ ID NO: 547713 - DNA, 1106 bp, Homo sapiens
attttcaggctatttgacaataagaggtgtccactgagatgtaagcagaagttgtcaattaggattttcaggaaaattcctcaggagagaaatagacactgtcgtacaccctttatctttgcccactacctttttcttgcttcttgaaataggcatgatggctgagtttcagcagctatattggtgtattaggccattgtgatagtcaattctatgcgtcaacttggctaagtcacattacccagatatttggttaaacactagtatagatgttactgtgaaggtatttttaaaatctgagattaagattttaatcagtagaatttgagtaaagcagattaccctctacagtctgctttggttgtgatttggcctcatctaatcagttgaaagtcttgtgagaaaaaaagactcatgtctcttgaggaagagagaattctgccagcagtctgcctttgctcttgagctgcaatgtcagctcttccctgggtctccagcccactggcctacccgcagattttggacttaccatcttttggaatcatgtgatccaatttctcaatataaatcaggctgtcctctcccccaccctccttgcccactgtgtgtgatacacatcttattggttcagtttctctggagatctctgattaatacagccatgaaagtcatgtgcaaaggacagtggagcagaaagttgtaagaaaccaggatctctgatatctgtcrtacttccacaccagctttaaactgcttacctttgtactttttttatgtgggagacaagaagatttgtacttttttataagtttttcactagattttttgttacatacagtcccaaataacactaactgagaaaataacatttaaaaaattacctgaatcatggctgactttttttttcatacaatagccatgcactgcagaagaccaagtggattccattttcttcacctgttcattagtctctatttattttaaaatgtgtgaagggacatggaactctgggttctctagtatctgttaataataatcaatgaccatgaatcaggccaacagaatctttcaggtttatctggtactaccacatgaagagaaatttc

SEQ ID NO: 547714 - DNA, 536 bp, Homo sapiens
tcttaccatactcstgaaagccaccttagggaaagaagcactgctgggtatggagagattattacagagacagatcactttttcccaaaagagctaagcatttcttataaggttcattttatttaaccagacaaagctttaaagtggagtggatatctagttggtttttggtctcccctcacaacctagagaggttcctggaagaaaatgagataagctgggagataaagaaatcagtggatacaccaacagccaaccaaaagattcttctagacatcttcaggtaccccaagaagaaagtgaaaaagagaagagtctttgactcctctctcaagaaagttgtattatccattcatgctagaatcaggaggacttctgcaactgaggatcactaaccctgggcaatttccacttgaacacttcaagacttctttctgggcaccatcatccactcatctatgacttaatcagtccaagcacccaggcttattctactaggcaaataatctttctatggggacattgactaacccacg

SEQ ID NO: 547715 - DNA, 603 bp, Homo sapiens
agataacagaaggtccaaatcaggagaaaggtgaaggaaagtcccaggactatagctatgcaaacctagacaactctatcttctaggtcttctattcagagttcattttgactatcatatttttaatttcatagagctctttcttgttgtcttatggtttcttttcatagcgacctgttcttattttgtaggtgcaatctcttttgttatctctttaaatacattaatctttaggtttgttacaaacttagaaccagaccagattagagtatgaagaatggaagctataggaaggaagtttaaggaaaaaatggcattggtaaatcctwacatttgttggcccatttgatggcactgcagcatttggaaaaaattaaccacgggatgaaagaaaattaggtaaattagtttatcatttggctcaaaggctagtcatgtttacctggtcataataatataaaacctaactactaatttaacaaaaaattatgacagaatctaaattgggaggatggaagaaggatacagaagaaagagagaataaagagttaaatcctcactttatcaattcttaatttataaaaaagtaatacctaaactatt

SEQ ID NO: 547716 - DNA, 2153 bp, Homo sapiens
tttaaaaacacacacacaatcaaacgattgccggtttggcattgagaagcagcagacccaggcttgagcctgtttactgtgcatttcctgatacagagaaaagcaagtacagttgagaaaacaccacaaagcattatatagcaacagctcgtgtgcttcagaagagaaatggatacattaggaaaagtttttttccctttgatgtagaatatgctatctttttaaatgggagttaacttaacataaataaaattcagcccgtaggcttcagaaaactaatgttgtatttgacagtgtcatttctgtgatcctgaaagcatttggggagttaacttgggccttcatcatgactttccttcatggcatggaaagcacattatttttttaaactctgttttattgatttccccttactttctcccacatgttccctttgccagcggttatctctgccccttctgctctcccacatgctgtgagggcaggtggggtttctcctgtgtctttgcctgcaggtggtccaagcgccgctgccctcttgctccatccttgtttgaaaacctcttcctgtatggtctttgaaaagaagataagccaaaggccctggacctaccttcaagaagagatcagaaaaagccttctgttcctacgctgaaccatttgcagaatgtgcaatttgcagttagcattttttttttttagagacgggtcttgctatgttgcccaggctggtctcgaactcctgagctcaagcaatctgccctcctcagcctcccaaagggctaggattacaggtgtgggccaccacgcccagcttgcagttaatacatttttagttgaacttggagatgttccccctcctttcaggacacagagtgtatgagcctggtagatggacaaaactgttttgtttgcttttgtgctttttatttccataaaagagccctgaatagtcaaataccaggtgatttgacacccccaccacccaaccgccatccaagatttggaagtcttttttctttaaacaaaattaataggccgggtgtggtggctcacacctgtaatcccagcactttgggaggccgaagtgggtggaccacctgaagtcaggagttcgagaccagcttggccaacatggcaaaaccccatctctactaaaaatacaaaaaattagccgcttgtggtggtggacgcctgtaataccagctactcgggagcgtgaggcaggagaatcacttgaacccaggaggcagaggttgcagtgagctgaggtcgcgtcattgcactccagcatgcgcaacaagagcaaaactccatctcaaaaaaaaataattttatgtaaatgcatatgtagaaacttgaaatacagtgtgctttgcaacgtgggacgaaacattggtaacaagtattttttaccataagtgtccattttgaccatttttagtgttttaggaattgcttttgaaactgattatatttgaaacatataagactacaattggagaatccttgatattaaaaagttgccatgattaaaaagtctttcagaatttcttggttagtaagatttggaagcttatagcttctagagtttgtttttagaacaagaggtatgtttgtgtgaaagtgagatgggaactcatgaaatgaatgcaaaattgtgtgcacatatgcatatggttgtgttctggagaaagccttggtagcttttaatcaattctcaagagggttcatgacacaaagaattcccaatttgcctgtctcgctttccttcccacacccaccctcccttatcagtagtaactagcttgctctctcttgccagctgcctatttatcccttcccagatgaattgtccttcttgttttctgaccaagcaaagctgagcaaggagaactcaggagctggtgcccaggtgggggcgtcaggtagatggcaagactgctgggagcgccgcagtgagtgccctctgggtgagctgttaggaaggcagacagcttcccctgcccaacactgaccaggaaacgtgggcagtccaagatgccactctgcagtcaaacttctattacattgaggataagttgaaagagagtgtcaaggggaaaatggaattgggtagtggctttccaccgttacctgtttktgtccagtta

SEQ ID NO: 547717 - DNA, 564 bp, Homo sapiens
tgctttacaaatgttaactcattttatccacataacaaacccmtgagaaggtatttcctgcccattttaaagtggcagtaattaagaatagaccatttaagtgtcttgctcaaggttatactgacatagctgttctgtggcagagttagagtctgttcgcaggcagtctggttttagatcctgcacttaaagcatctggcacttcaccgagcctatgacatccctgctgtagtagggcctacattgcaacaattacatgtggcaagatctgcacagacttgcgttcaagaccaatgcagagctatagacttcttgaatagctgcaggaagctaaaatacgtattttattttattatgattatttttttgagacagagtttcactcttgttgcccaagctggaatgcagtggcgcaatcttgactcactgcaacctctgcctctcgggttcaagtgattctcctgcctcaggctcccgagtagctgggattataggcgcccgccaccatgcctggctaattttgtattttcagcagagatgaggtttctccatgttggccaggct

SEQ ID NO: 547718 - DNA, 620 bp, Homo sapiens
ttttagctgcttttaaatttatccattagatgtctrccttacatataatattaaccctttgcacatacattcttaagaaatatgtagaaggcagctcatgtggataaatactttaaaaatcatttttatttaatcatttacctggaaagtccctatattttaacataactttatcataattgcagtatatgatgtcctacagaaagctcacttggggttgatctcattaacctgtgttaaataccacatatgcatttatacatatgcatgctacgccttaagaaggccacactttgcaaaggtagattggtgatttgtggctatgcaatgtgatgtactatgctagctccagtccctcaggaaagtctctgtgttgaggatggggtggggatggggagttcttgggcttgcctgggctcagtagggtcaagtccatagttaaaatttttagtgactcacagaccataggcatagtcagccagacaaagttttgcttggggttcttttttcacttcaactcttttcgtgggtagggtgaatcaatgcatagtacagcaatgtgattcagacagaaggagaaaaggaccaccattttatacatgtgcatatagggcaggatc

SEQ ID NO: 547719 - DNA, 615 bp, Homo sapiens
tttcaaggagtgcagcaaaaaaaatgactatctctaatatgggaatacattgaggatgagaataaagaaaagaactgtagtaaaacaaacatttttgtattgttttcccaaagctatttagtaattttccccctattttagaggcagaatcttggtatgttgtctagactggacttaaactcttgggcaaaagggagccttcacctcacctcccaagtagctgggacttcagatgtgcaccactgtgccagacctaggtttttatttggtaatccttgatgggacacaaggagaaagatgaactgattgtcttggagttgttcaatgttaagtgtaggttgagacraaaacttttactggaatgaaatgactcttttggttgaaaataagattgtctcagaacttaagaaatgtcactagaaaagggcagccaagttaaacaggactttctcaatttctttgctaaaactctaacttatttggaattcaactttgacttcagaagttcaaatgacctctgtgtttaaaaccatattctctgacaaagaaaggtgtaacttatgatgacatccaatatgatttaaaatgatgacattgtagacatagatacactat

SEQ ID NO: 547720 - DNA, 572 bp, Homo sapiens
atggtattcctttatagtcccatcttatttcaaggcaactcactaatcctgttctcaatcaccataattttgattaaaattatttttagtatacatattgattacatttccagtggacttgaattaattatatagtcttgatttgtaggttggcttaaactaaacagtttgtaaagaagaatatctggcttatttgatttgtataacttttttatggaaatactgaactgtatctgaagttttccatttccccagaacacaagtaaatacgttagaagttttagttaacccccccctttttttttttttgcatttatggtttaatattctgaatagataatagtcaaatgggtcaaaagtataacatataamagttgtaattttttggatttttactagctcggagtgtatatatgtgaattatttcagtaaaatacagattaccttctaaaacatataccagtttatactccacgtaatatgagagtgctcccttagtcttgccaacacaatgttgccaacagtgtgtatgtatacatatatatttttacatatgtgtatacttaaaatat

SEQ ID NO: 547721 - DNA, 530 bp, Homo sapiens
aaaataatgactttttcccccaataattgcccctgctatattccttatttctgaatggtacctcctagctatatagattatctgaggagcttactgaaatgctgattctgaagataaggggcatggctttaagattctgtatttctggcgagtacccaactggtgctcatgctgctgattgagaaccacttctgaatatagcaaggctgtaaattatccactacgtgccctcgtaattgtcttagttcaagcccagattattgtagtagacttagtatttctttgccttagttgatctgtgacccctccaatatctattccacactgttgcctaagtggccttagtaaaattcaagtctggttattttattcccctgcttggaatttctcaatgtagaatgaaactcattcakcattaacacataggcccttcttgatctgacatcgtgtttctctagttagactaaagaatccccactatgaagttgtttcatccgtaagtacctttgaacccagaagccccctttctc

SEQ ID NO: 547722 - DNA, 1549 bp, Homo sapiens
ggaaatggaaccagggtcttggactgaatgcaaagcaggagtaagcttcccccatgtgaataaaaaggctggaaaaagctgtagcaagagttgattaaggttctgttttttttcatagctgcatgcccaaaaaggaaggtaggaggacattaacacatcctttctcacaggaccttmgctacgctgctacctgattctgtgtctggctttgcagtatctcaaggcttttataaaagctggttctggactgtttactatggggacgtggagagtcggtggggacagcagcaaagccaccagagaagcctcctagaaaagatgaaactacaacccaaaattcggaacttgaacaggaaaataaataccaggaagatcaatttaattaactgactcccttggaaattaaaatattaattaaaagtttaaaggattttaagtcattatgtttaagattgttaaaggcaaatgaaggaaaaccaactataaaaatcaacattaattaggcacaaatggatgaaaaacaggagtgtatgaaaaacaaggaatttgaaatctaggaaataaaagtatgctgatgataattaaagactcaagggataggatatactagactagatacaggtgaagagataactaatacattcaaggtaacactacgtaatgctcctgagtgcaggccagagaaacgaagagacacagaaagaaaaaacaagaaacaggtagacacagaagctagagtgagagactacaacatgcaccaataaagagtcaagaaagtacaaaagaggaaattccagagaagcattatttgaagatcttattccagaatactccagaactgaataaagtcatgaaccctcaccataaagatattctgtatgtactgagaaaagtaaataaaattaaatctttacctagacatatctgtgaaactgaagaacatcaatgatagaaaaatctttggagtcatcagggagaaatgacttgttacctacaaagtggcatttaggttaaaagacgacttcttggccagacactgtggctcacgcctgtaatcccagcactttgggaggccgaggcgggtggattacgaggtcgggagttcgagaccagcctggccaacatggtgaaaccctatctctaccaaaaatacaaaaattagctggacgtggtggcacgtgcctgcaattctagctactcgggaggctgaggcaggagaatggcttgaacctgagaggcggaggttgccgtgagccgagatcgtgccactgcactccagcctgagcaaaaagggtgcaactccaactaaaaaaaaaaaaaaagacttatccacaacagtctattctagaacttcgtgaagtgaaatttttacgggctggaaaaatatctgttagggctagggccagacatggtggctcacacctgtaatcccagcactttgggaggccaaggtgggtggatcaaaaggtcaggagttcaagaccagcctggccaatatggtgaaccccccccgcccgtctctactaaaaatacaaaaattagctgggca

SEQ ID NO: 547723 - DNA, 1549 bp, Homo sapiens
ggaaatggaaccagggtcttggactgaatgcaaagcaggagtaagcttcccccatgtgaataaaaaggctggaaaaagctgtagcaagagttgattaaggttctgttttttttcatagctgcatgcccaaaaaggaaggtaggaggacattaacacatcctttctcacaggaccttcgctacgctgctacctgattctgtgtctggctttgcagtatctcaaggcttttataaaagctggttctggactgtttactatggggacgtggagagtcggtggggacagcagcaaagccaccagagaagcctcctagaaaagatgaaactacaacccaaaattcrgaacttgaacaggaaaataaataccaggaagatcaatttaattaactgactcccttggaaattaaaatattaattaaaagtttaaaggattttaagtcattatgtttaagattgttaaaggcaaatgaaggaaaaccaactataaaaatcaacattaattaggcacaaatggatgaaaaacaggagtgtatgaaaaacaaggaatttgaaatctaggaaataaaagtatgctgatgataattaaagactcaagggataggatatactagactagatacaggtgaagagataactaatacattcaaggtaacactacgtaatgctcctgagtgcaggccagagaaacgaagagacacagaaagaaaaaacaagaaacaggtagacacagaagctagagtgagagactacaacatgcaccaataaagagtcaagaaagtacaaaagaggaaattccagagaagcattatttgaagatcttattccagaatactccagaactgaataaagtcatgaaccctcaccataaagatattctgtatgtactgagaaaagtaaataaaattaaatctttacctagacatatctgtgaaactgaagaacatcaatgatagaaaaatctttggagtcatcagggagaaatgacttgttacctacaaagtggcatttaggttaaaagacgacttcttggccagacactgtggctcacgcctgtaatcccagcactttgggaggccgaggcgggtggattacgaggtcgggagttcgagaccagcctggccaacatggtgaaaccctatctctaccaaaaatacaaaaattagctggacgtggtggcacgtgcctgcaattctagctactcgggaggctgaggcaggagaatggcttgaacctgagaggcggaggttgccgtgagccgagatcgtgccactgcactccagcctgagcaaaaagggtgcaactccaactaaaaaaaaaaaaaaagacttatccacaacagtctattctagaacttcgtgaagtgaaatttttacgggctggaaaaatatctgttagggctagggccagacatggtggctcacacctgtaatcccagcactttgggaggccaaggtgggtggatcaaaaggtcaggagttcaagaccagcctggccaatatggtgaaccccccccgcccgtctctactaaaaatacaaaaattagctgggca

SEQ ID NO: 547724 - DNA, 1141 bp, Homo sapiens
gatatttttccataccctttttctccacgctgagagttaggacataggggagcttgggggagttacagaacatctccagggctgggcacttagaaggatcttgctggttgattcatttaaacataaattatagctatatttgatttactgtctaagtcagttgccagtccaaacccagcctctgacacataccagtactggggaaatagatcaacctcttgaggactcattcctcatctatraaatgggaaaaatagcacctccctcataggtttatgagtaataagtgaaataacacatgaaaacccagcccagcacttaatctacagtgagaaaaaaataagtatgtatttccttttcctggtcctccttcctacgtagggagttaaagagataagcaggagagaagaataagaagctagattgtcatgagtctcagaaagaagccttcttcatacctatttgactctagagatgtgatctctcttctgcctaagctgaaagaatcatctggaataaccacagaaaatcgggtcactgtcttagatgtagatatgctgttgcagatgttccagataaaaaaatggaagaggggccgggcgcggtggctcacgcctgtaatcccagctctttgggaggctgaggcggctggatcacaaggtcacaagatcaagactatcctggccaacatggtgaaaccccgtctctactaaaaatataaaaattagctgggcgtggtggtgcacacctgtagtcccagttactcaggaggctgaggcaggagaatcacttgaatccaggaggcggaggttgtagtgagccgagatcgcaccactgcactctagcctgggtgacagagcgagactccagctcaaaaaaaaaaaaaaaaaaaaggaagaggaatttctttctggtcagaagatgggtgatagccacatgtcccacttgttctggtcttcagtggtaactgatcactctgcccctctttgggtgtcctgggttttgtagctgtgttttcacatcaactttatgtctggttttatcttaaccctttccttcacttctcttctactttacccaccattcttcttcttcttacatgttttctacattgctttatgttatgtacctcacaagccaa

SEQ ID NO: 547725 - DNA, 631 bp, Homo sapiens
aaacatatctttcttttaatcactttgtgtctgcccatccgtctcatagggagtgtgaaaggtggcactgcagtcatgggagtggaaaaggagtaattataacaatggaggtctagtggacccattagattatccttctgggactaaaatgagggtaaaaaatgagatgaaagattgaggaacagctaattcaggaactatcagaagaaaataatctggtagaattgtgaaggagcatttgtactctcagtattaaattgcaggatgcaattcagggtcctagtgtggtctatacaacaccttacatttaagagtaagaygaagctttccacagtatcaagcattcacagtcatcatctcttattctactttcaattcaccctccactctagacatacctgcctctcagtgtgacaccccttcacaccatttttcatatgtctctctctctctctgtgtcacccgggctagttttctcacttcttttctggaaactgacatcaagttattcagccactgcttgttcctgcagctcattcaatctttcattcattcagctatgtaactgaatgtcatcatgtaactaagtccaccagccagtgcttattatgtgccaggtgcagaaagtact

SEQ ID NO: 547726 - DNA, 631 bp, Homo sapiens
aaacatatctttcttttaatcactttgtgtctgcccatccgtctcatagggagtgtgaaaggtggcactgcagtcatgggagtggaaaaggagtaattataacaatggaggtctagtggacccattagattatccttctgggactaaaatgagggtaaaaaatgagatgaaagattgaggaacagctaattcaggaactatcagaagaaaataatctggtagaattgtgaaggagcatttgtactctcagtattaaattgcaggatgcaattcagggtcctagtgtggtctatacaacaccttacatttaagagtaagatgaagctttccacagtatcaagcattcacagtcatcatctcttattctactttcaattcaccctccactctagacatacctgcctctcagtgtgacaccccttcacaccatttttcatatgtctctctctctctctgtgtcacccgggctagttttctcacttcttttctggaaactgacatcaagttattcagccactgcttgttcctgcagctcwttcaatctttcattcattcagctatgtaactgaatgtcatcatgtaactaagtccaccagccagtgcttattatgtgccaggtgcagaaagtact

SEQ ID NO: 547727 - DNA, 631 bp, Homo sapiens
aaacatatctttcttttaatcactttgtgtctgcccatccgtctcatagggagtgtgaaaggtggcactgcagtcatgggagtggaaaaggagtaattataacaatggaggtctagtggacccattagattatccttctgggactaaaatgagggtaaaaaatgagatgaaagattgaggaacagctaattcaggaactatcagaagaaaataatctggtagaattgtgaaggagcatttgtactctcagtattaaattgcaggatgcaattcagggtcctagtgtggtctatacaacaccttacatttaagagtaagatgaagctttccacagtatcaagcattcacagtcatcatctcttattctactttcaattcaccctccactctagacatacctgcctctcagtgtgacaccccttcacaccatttttcatatgtctctctctctctctgtgtcacccgggctagttttctcacttcttttctggaaactgacatcaagttattcagccactgcttgttcctgcagctcattcaatctttcattcattcagctatrtaactgaatgtcatcatgtaactaagtccaccagccagtgcttattatgtgccaggtgcagaaagtact

SEQ ID NO: 547728 - DNA, 1008 bp, Homo sapiens
tttttgtagagaaagggtcttgccatgttgcccaggctggcctcaaactcttggcctcaagcaatcctcctgccttggccttccaaagcactgggattataggcatgagccactatgcccaggcctattctcagtttttagagatgaccaaatttcttggctggtggtcccattcttgcatttcaatgccagaaatagcaggttgaatcctattcatgttccatttttctgtgtgaagctgagacaggttctctactcttaaggacactgtgattagattcagcctacctggaaaatccaggataatctcctcatctaaaggaccaaaaccttaattgcatctgcaaagttctttttgccatgtatggtagcatattcacagattccagggattaggatgtggatatttttgagggacccttattctgcctaccacaggcagagaccagaattttcttgtactatatgataaaagaattacatagaaaaacaacaagtacaatagaatttaaaaatcctaaaatatttccttgagaagactgataaaattgaataaactgctaccaagaagaactttgaaaaagaaagggaaactatcaagaaagagaaaattttcaccacagaccctacagatattaaaaagcaaatagtatgttacaacaaacagccttaggccaatacatttggaaatttggttgaaatggacacattctgtgagatatgcaaattatgtaagmtgacaaaagaagaaacagaaatctgaatgctttggtatctactaaagaaatggaattcattattaaaaacctctccacaaacaaaactcccagcacagaagacttcattggtgcctttttccaaaattcaggaaaaggtaaactaatcttgtacaaaggcttctagaaagtagaaaaaaagagactcttgcctaattctttttatgaggccagcataaactgattccaaaaccgaaggagttgtaagaaagaaaaacgacaaactctttcc

SEQ ID NO: 547729 - DNA, 1008 bp, Homo sapiens
tttttgtagagaaagggtcttgccatgttgcccaggctggcctcaaactcttggcctcaagcaatcctcctgccttggccttccaaagcactgggattataggcatgagccactatgcccaggcctattctcagtttttagagatgaccaaatttcttggctggtggtcccattcttgcatttcaatgccagaaatagcaggttgaatcctattcatgttccatttttctgtgtgaagctgagacaggttctctactcttaaggacactgtgattagattcagcctacctggaaaatccaggataatctcctcatctaaaggaccaaaaccttaattgcatctgcaaagttctttttgccatgtatggtagcatattcacagattccagggattaggatgtggatatttttgagggacccttattctgcctaccacaggcagagaccagaattttcttgtactatatgataaaagaattacatagaaaaacaacaagtacaatagaatttaaaaatcctaaaatatttccttgagaagactgataaaattgaataaactgctaccaagaagaactttgaaaaagaaagggaaactatcaagaaagagaaaattttcaccacagaccctacagatattaaaaagcaaatagtatgttacaacaaacagccttaggccaatacatttggaaatttggttgaaatggacacattctgtgagatatgcaaattatgtaagatgacaaaagaagaaacagaaatctgaatgctttggtatctactaaagaaatggaattcattattaaaaacctctccacaaacaaaactcccrgcacagaagacttcattggtgcctttttccaaaattcaggaaaaggtaaactaatcttgtacaaaggcttctagaaagtagaaaaaaagagactcttgcctaattctttttatgaggccagcataaactgattccaaaaccgaaggagttgtaagaaagaaaaacgacaaactctttcc

SEQ ID NO: 547730 - DNA, 557 bp, Homo sapiens
atgttttagagctttgttcaggtgtgagttataatgctgttggccatgagttcaatgttaatgaatcaataatgtaagttaaataacctaatcttgtattttccctaaggatgacaatttagtatacattaatttggggttcatggtgactttatggaaccaaataataaattctataaattcttatagaatcaaataatgagaataaactctgtatataatttttacatatacatatatcattttcatatatttatataatttttatttcttatatatacataattttaacatacatatatgtttgattgttttgctatattctacgtctcttagcctcttttccattattttgtattctttttctctctgactttcagtcaaatgttttcttattgaccctcttgctgtgtcttgacagctcatccacgaagatttggatatatatayacacacacacacacacacatacacacacacacacatatatatatatatatatatatgtaatatgaatttcagaaggaaaggagaaagagaacagggcagatgcattg

SEQ ID NO: 547731 - DNA, 598 bp, Homo sapiens
ttaattacaatgaaataaaggttaaactattaaaatgtgttcagagggcattattataaaacattacctttacacacaggcctgtgatcactccaagcagcaaaaacttcagctatccgttgacaggtgatgctctttgcgccctgtaggacataatcttcatcacaagagaactgcacagttgatccaaggctaaagttaaataaaagagaaaaaatatgataagaaagatgcaacataataactaggcttcacttctgctggcaatatccaataggtcaaatatgtactatagtgacaaaaagtattttggaaaacaaaatgtgaaagtatgacttgtagaaatgtaaagctatcatcaaatttaatcatcttgttaatagatgtagaacgaaggtcaaataattcactaagtttaccatgctaagtagatggtaaatgtgaatcaaaatgtggctattctgacttgaattccagtacagtgcttgtgttcataycatattacggtgtttttctggcatgtatttacatgtgtatgtttgcagatgtgtctctacatgtgtatgcatttacacatgcatttgtgtctataaacatg

SEQ ID NO: 547732 - DNA, 553 bp, Homo sapiens
tgagataatgtatttaaagcactaagccaaagaaatacctggcacatagtaaacacgtgatgggtggtggttattataatggttattattagtaatgaatggcaacatttactgttgccctaaagccccaaagaatcctttactatctatattttaaactttcttcccagagcacacttaagaaatgattgacattttcccttccctctgacccctgctctctaggttaatggtctgaggctctgttccatctttgtccctttccagagatttaatctctctctctctctccctctctctctctctctctctctgtgacatgggacttatatgattgacacacaggaccacccacttatyatttacactagtggaagtaagatggttccaaaagctgggtgaggatttgaagtgaccagaatagttgccaggatcatgtattctttcatatacaaaaaacacatttgttgaaagccagtggtctaggtgtaggatctgatttagtgtgggttatttgtcaatgtgggcaggggaagggatgcagcataataat

SEQ ID NO: 547733 - DNA, 553 bp, Homo sapiens
tgagataatgtatttaaagcactaagccaaagaaatacctggcacatagtaaacacgtgatgggtggtggttattataatggttattattagtaatgaatggcaacatttactgttgccctaaagccccaaagaatcctttactatctatattttaaactttcttcccagagcacacttaagaaatgattgacattttcccttccctctgacccctgctctctaggttaatggtctgaggctctgttccatctttgtccctttccagagatttaatctctctctctctctccctctctctctctctctctctctgtgacatgggacttatatgattgacacacaggaccacccacttatcatttacactagtgraagtaagatggttccaaaagctgggtgaggatttgaagtgaccagaatagttgccaggatcatgtattctttcatatacaaaaaacacatttgttgaaagccagtggtctaggtgtaggatctgatttagtgtgggttatttgtcaatgtgggcaggggaagggatgcagcataataat

SEQ ID NO: 547734 - DNA, 536 bp, Homo sapiens
gggtgtaagagaatctaggagtggctatagaaattgtaagaaaaggcaaggcctggtggctcatgcctgtaatcccaacactttgggaggccaaggcgggtggatcaccaggtcaggagttcgagaccagcctggccaacacagcaaaaccacatctctactaaatatacraacagaattggctgggtgtggtggtggatgcctgctaacccaggtgttcgggaggctgaggcaggagaatcacttgaacccaggaggcggaggttgtggtgagctgagatggtgccattgcactccagcctggtgacaagagtgaaactccccctcaaaaaaaaaaaaaaaaaaaaaaagaaaagaaaaagaaaaaaaattgtaagaaaagaaaaatgtacaacgcatggagggaaaagatgggaagagggagcttgtatgtggaatgtctgtgagtaaccagcagctgtcaaaggctacaggtctcagggtggcatcttcatcagtaaacacgatcatcacaaggaagaattcctaaagctcca

SEQ ID NO: 547735 - DNA, 536 bp, Homo sapiens
gggtgtaagagaatctaggagtggctatagaaattgtaagaaaaggcaaggcctggtggctcatgcctgtaatcccaacactttgggaggccaaggcgggtggatcaccaggtcaggagttcgagaccagcctggccaacacagcaaaaccacatctctactaaatatacaaacagaattggctgggtgtggtggtggatgcctgctaacccaggtgttcgggaggctgaggcaggagaatcacttgaacccaggaggcggaggttgtggtgagctgagatggtgccattgcactccagcctggtgacaagagtgaaactccmcctcaaaaaaaaaaaaaaaaaaaaaaagaaaagaaaaagaaaaaaaattgtaagaaaagaaaaatgtacaacgcatggagggaaaagatgggaagagggagcttgtatgtggaatgtctgtgagtaaccagcagctgtcaaaggctacaggtctcagggtggcatcttcatcagtaaacacgatcatcacaaggaagaattcctaaagctcca

SEQ ID NO: 547736 - DNA, 548 bp, Homo sapiens
gaaaataaataagtaagcctcagaattggaagaaagtcagagcacaagtttttgatgttgatgaagtccagtttataaattctttttttaaatggttagtgcttgttgtgtcctgtttaaaaaatcttcgcttatcccaagctcacaaagatattctcctatgtttttctgaagaggccatataagattagcctttacatttaaatctacaatccaactcaaaattaatttttgtgcatggtctgaggtagcagttgaggtayatttttgctatacagttacccaattgttccagcatcatttgtagaaaaggcttctctttccttacggaatcaccatgatgtctttagagaagatcaactgaccacatatgtatagatgtatgtctggactttattctgttccattgaactatctgcctgcccttttgtcaataccgtcttaattactatagctttgtatttactcatgaaagtagtgtgtgtagatgctccaactttgtaattttttaatgattgtttttactattctatttactttttattacg

SEQ ID NO: 547737 - DNA, 1280 bp, Homo sapiens
tctataaatctgtagagacatggtggtaatgcagtaaatcaacaggcctggaacgtcccaatgtggatgcttcgtaaatgcctcttgaaaccagggaagagagatggtccctcttgctttctcaactatattcggaaagcataatgaaagctttggacatgtctcctccagagtttggaacaatagtgtttcctcggactaggctagcttcatttatttagttatgcaggactttattccaaatcgttttcgctaccaccaactactactctttggcacctcctttttctcctccctaattagcccccagcatggatttagctagtggttctcattttcagcaaaaccctgcttcttggttttattttaatacatagaggacatacatccgtgtcttgcaaactgaattctagagccttgtgaacgttttcattgtttcattttttttttaaggaactaaaacatataaagaatattaagtgtctgttggatgttttcaattaccgttagattataacttttcctttagttaacactgggaatcagcaagatttgttggtgaaaagatagatgaatgtaacatctactgctctgcatttttagataaaagtttagctgattacattgttacattctgatgtcacttaactgaatgtccttcagtctaagatggtaagagaatttaaaacccaggaaagatttggggtttagttttccttttcttttaacaggggaaataagaaaccaataccatatgtggtgagaattaaatgttagagagtcttaaatttactatatttgcctatacttttcaaagtcgaagacagatggatttctgcttgcactgcttaattggtattatctacgacagctctgtgatccatgctgaaacacaagscagtccccaaatttaaggtcattaaattgttcaccttctctaagggcttactttaaaaaaataagttataactttttagacaagcaaataattatgtcacttctcatttgcttgtgttgtaagatgttatctcagacctaaattatttattatcaatgctttgaaactatgagctctgtatgtaagatattatcgtcattacatacatatgttatgaacatcaagttgctggctttaaaaaaagaaaaaaagcaaattaaagatgagttcaagggaaaaaataagaattttttcctctgagaaataaagcattcctaaatgtagcatttcctttagttcatttatttagtttatgatttcaatctgatttcagaccactttt

SEQ ID NO: 547738 - DNA, 1280 bp, Homo sapiens
tctataaatctgtagagacatggtggtaatgcagtaaatcaacaggcctggaacgtcccaatgtggatgcttcgtaaatgcctcttgaaaccagggaagagagatggtccctcttgctttctcaactatattcggaaagcataatgaaagctttggacatgtctcctccagagtttggaacaatagtgtttcctcggactaggctagcttcatttatttagttatgcaggactttattccaaatcgttttcgctaccaccaactactactctttggcacctcctttttctcctccctaattagcccccagcatggatttagctagtggttctcattttcagcaaaaccctgcttcttggttttattttaatacatagaggacatacatccgtgtcttgcaaactgaattctagagccttgtgaacgttttcattgtttcattttttttttaaggaactaaaacatataaagaatattaagtgtctgttggatgttttcaattaccgttagattataacttttcctttagttaacactgggaatcagcaagatttgttggtgaaaagatagatgaatgtaacatctactgctctgcatttttagataaaagtttagctgattacattgttacattctgatgtcacttaactgaatgtccttcagtctaagatggtaagagaatttaaaacccaggaaagatttggggtttagttttccttttcttttaacaggggaaataagaaaccaataccatatgtggtgagaattaaatgttagagagtcttaaatttactatatttgcctatacttttcaaagtcgaagacagatggatttctgcttgcactgcttaattggtattatctacgacagctctgtgatccatgctgaaacacaaggcagtccccaaatttaaggtcattaaattgttcaccttctctaagggcttactttaaaaaaataagttataactttttagacaagcaaataattatgtcacttctcatttgcttstgttgtaagatgttatctcagacctaaattatttattatcaatgctttgaaactatgagctctgtatgtaagatattatcgtcattacatacatatgttatgaacatcaagttgctggctttaaaaaaagaaaaaaagcaaattaaagatgagttcaagggaaaaaataagaattttttcctctgagaaataaagcattcctaaatgtagcatttcctttagttcatttatttagtttatgatttcaatctgatttcagaccactttt

SEQ ID NO: 547739 - DNA, 1280 bp, Homo sapiens
tctataaatctgtagagacatggtggtaatgcagtaaatcaacaggcctggaacgtcccaatgtggatgcttcgtaaatgcctcttgaaaccagggaagagagatggtccctcttgctttctcaactatattcggaaagcataatgaaagctttggacatgtctcctccagagtttggaacaatagtgtttcctcggactaggctagcttcatttatttagttatgcaggactttattccaaatcgttttcgctaccaccaactactactctttggcacctcctttttctcctccctaattagcccccagcatggatttagctagtggttctcattttcagcaaaaccctgcttcttggttttattttaatacatagaggacatacatccgtgtcttgcaaactgaattctagagccttgtgaacgttttcattgtttcattttttttttaaggaactaaaacatataaagaatattaagtgtctgttggatgttttcaattaccgttagattataacttttcctttagttaacactgggaatcagcaagatttgttggtgaaaagatagatgaatgtaacatctactgctctgcatttttagataaaagtttagctgattacattgttacattctgatgtcacttaactgaatgtccttcagtctaagatggtaagagaatttaaaacccaggaaagatttggggtttagttttccttttcttttaacaggggaaataagaaaccaataccatatgtggtgagaattaaatgttagagagtcttaaatttactatatttgcctatacttttcaaagtcgaagacagatggatttctgcttgcactgcttaattggtattatctacgacagctctgtgatccatgctgaaacacaaggcagtccccaaatttaaggtcattaaattgttcaccttctctaagggcttactttaaaaaaataagttataactttttagacaagcaaataattatgtcacttctcatttgcttgtgttgtaagatgttatctcagacctaaattatttattatcaatgctttgaaactatgagctctgtatgtaagatattatcgtcattacatacatatgttatgaacatcaagttgctggctttaaaaaaagaaaaaaagcaaattaaagatgagttcaagggaaaaaataagaattttttcctctgagaaataaagcattcctaaatgtagcatttcctttagttcatttatktagtttatgatttcaatctgatttcagaccactttt

SEQ ID NO: 547740 - DNA, 1325 bp, Homo sapiens
tgactctgagaaaatagcctaatcatgtgcaatttaaatttggtaccttctttaaaagataacccaatacagatgcggtgggtaataagccactttgtactgactccaaccctcacaccctccatcctctccttctgacaatccagctttcttaaatgcttcctgtctcagcaaaggtcaaatattaaaagtcagagagctcagaaatacaaatgaacactatctaagcctcagcaacagaggctctttgagaaagacgatgcaaacaccaaagagtgtaagaaaaagcatgaaagaagcagcatcacttgtaatcagtagcaagctctgaagcctgtctgtcccttttagatgcttcacactttattattaatccaccagtgacagcagagcttggttaggagggacatctttcatctctgatcctctccctgacaactaaaatagggtgagcacatttgcataacagaagaaagggacagattgccactccagaaggacccgcaggacacctgtcagaaatattaaaaagcaggataatctcacaaaatatgaaatgcttcatgtatcggtctggagagagttgatggaaaggctaccatggaaagaaataaaatgtgggctctgtcccatctccaaaccctcatcttgtgaatgacttggagtctattcagcatcctgaagtcctctctctctgtcctttgtcccacccattgaaaatacttccaggctgctatcttttgttacataacacaagaacagttgagttaggggagctcaggaacaattttcttggctctcttccccacctgagccagaacatcataccctccactcccaacacactcctgaccttcacccaccccatccatctcacctccagtaggagaaccttgcctgcttatagggctctgggagatgtgctcctgttctcgggtcacattcagaccacataaagacattattttcagtagacagaactaaaactgcaattagaacagtattccaattcaggcccactgtgagctaaacaggcattcatggcagcctgtgtattacattgtttcttaaaaaatgcaatccaggtaaacaaaccaattttgggaatgtggctcctttggtcaactgcatccaagaaaggtaaagttacgtctccccaaaagactctgcaatctaaaggaaacagagcaggagaatggtggagcgatggggaattgtttgggcatggccaagggaaacacaagccttaacattttgttgtgttgaactggctgtggtccacggccctcrctgctaaacaggacaatggatcagggattaaattt

SEQ ID NO: 547741 - DNA, 416 bp, Homo sapiens
ttcaagctgcaagtttgattgcagtctgctttttggaccagcagctacctgggctgtatgaccagctttatattatcttactctgaggacaagggtgagacatgttcgtctcatggtaggttgctgaaatataatacagcaagtccaactttgcaaatatatttcaactgtatgcttatttcatgccagctgatatcctgttggccaaaataagtcacatgttcaagcccacgtgcaaagaggtgtggatatatacttcacatgccatagaccacgttaagaatatgaaggtgtagtttaactaaagcagactgaagaattgacaatgattcaataaattacacatcacagaaatgtcctagcttaragtacctactgcatgcaggaaatttttgaagggcatgtatatatttgat

SEQ ID NO: 547742 - DNA, 486 bp, Homo sapiens
  misc_feature 386, 387, 388, 389, 390, 391, 392, 393, 394, 395, 396, 397,398, 399, 400, 401, 402, 403, 404, 405, 406, 407, 408, 409,410, 411, 412, 413, 414, 415, 416, 417, 418, 419, 420, 421,422, 423, 424, 425, 426, 427, 428, 429, 430, 431, 432: n = A,T,C or G
  misc_feature 433, 434, 435, 436, 437, 438, 439, 440, 441, 442, 443, 444,445, 446, 447, 448, 449, 450, 451, 452, 453, 454, 455, 456,457, 458, 459, 460, 461, 462, 463, 464, 465, 466, 467, 468,469, 470, 471, 472, 473, 474, 475, 476, 477, 478, 479: n = A,T,C or G
  misc_feature 480, 481, 482, 483, 484, 485: n = A,T,C or G
aatttaaaactctattacaagagttttattatggtattaaagagcataaatgcagcattcataaatggcttcgttgaatattttgaagatgtcacattcccctcacccrtcttacaatttaaattcagtctaatcaacatctaagaatttttttttgaaaggggcagagtggaggctaaaatttatatgggataataaatacagaaagaggatctctgtttttctttagacattaacaagatacagcaggagctggcaaactccccctataaaccaaatctgggctgctgcctgtttattcaaataaagttttactgggggcacagccacgcctactcatactgctttcatgctgccatgacaaagttgagtaattgcaacagacnnnnnnnnnnnnnnnnnnnnnnnnnnnnnnnnnnnnnnnnnnnnnnnnnnnnnnnnnnnnnnnnnnnnnnnnnnnnnnnnnnnnnnnnnnnnnnnnnnnng

SEQ ID NO: 547743 - DNA, 1229 bp, Homo sapiens
aaatacaaaaagaaaaaaatattagccaggcatggtgtgcctgtggtcccacctattcaggaggctggggcaggaggatcatttgaactcaggagtttgaagctgcagtgagctatgactatatcactgcactctagcctgggcaacaaagtgatacactgttaaaaaaaaaaaaaggaagaaagagagagagagagagggagacagggagggaggacagaaaagagaagaaaagaaaagaaaaagagaaaggagggaaaaaggaatgtccctataattttgccaaaaaatgaatttatcaaaaattttcccagaaaagtttcagttgctcacgaagttctatatagaattcaaagaaaaataacatgaaatttacacaaactgtttcattttaagtgactagcataatcctcaacaaacacctgacaaaaccactataattcttttttttttttttttgagatggagtctcgctctgtcgcccaggctggtgcagtagctcgatctcggctcactgcaagctccgcctcccgggttcacgccattctcctgcctcagcctcccaagtagctgggactacaggcgtctgccaccacacctggctaattttttgtatgttttagtagagacggggtttcaccgtgttagccaggatggtctcgatctcctgaccttgtgatctgcctgcctcagccgcccaaagtgctgggattacaggcgtgaaccacgcgcctggcccaaaaccattataattcttaacgaaacagagaatgaaagtacatgacaaaaataaaacatacgtcaggagatggacaaatgaatttacagtatcctaagagtttcagaggattcagaaagaggaaagaagcacatagtaacattaactttttaaaaagctaatagagagggtagaatggaacgagtggaacaaaccagaataggaaagacaaatacaaaacatttaataagatggaaggcttacaccaggtgcagtggctcattcctgtaataccaacactctcaaaactgaggcaggaagatcacttgagcccgggactacaaagctgcagtgagctaggatcctgctayttgcactccagcctgaacaacagaatgaaaacctgtcacttaaaaaaaacaaaactttggaatagtgaaggcctttcaaactaataactccaaataccgacatcatgaaagactaataaattgtacaaaattaaaataaa

SEQ ID NO: 547744 - DNA, 1135 bp, Homo sapiens
  misc_feature 476, 477, 478, 479, 480, 481, 482, 483, 484, 485, 486, 487,488, 489, 490, 491, 492, 493, 494, 495, 496, 497, 498, 499,500, 501, 502, 503, 504, 505, 506, 507, 508, 509, 510, 511,512, 513, 514, 515, 516, 517, 518, 519, 520, 521, 522: n = A,T,C or G
  misc_feature 523, 524, 525, 526, 527, 528, 529, 530, 531, 532, 533, 534,535, 536, 537, 538, 539, 540, 541, 542, 543, 544, 545, 546,547, 548, 549, 550, 551, 552, 553, 554, 555, 556, 557, 558,559, 560, 561, 562, 563, 564, 565, 566, 567, 568, 569: n = A,T,C or G
  misc_feature 570, 571, 572, 573, 574, 575: n = A,T,C or G
tacaggcatgagccgtcacacccggggtaaatagggattttaaaatagctttgtgtgctggcaaatatctttttctggagagtggaatgacattctgtcatgtttaattttttaggctatgagaccgctaaaagggatatctaactctcttctccttttcttattccctagggtattcactttagtggaaaacagcataggttaatatcaactggctccataaaaatcaacttgtccctttaaatatatcaaatactttaaatagtttttccaatattaaatatccatgttcagaatatggtggtgattatgctgtatttaataagagaaattactttgagagtgatgttggcaagattatgtcaagtagcagccaaggsctgatatgccacactgtcaaaccaatgattttttttctttctttcttttgccactgttactatattaatatacttttagtatttccactcaccccnnnnnnnnnnnnnnnnnnnnnnnnnnnnnnnnnnnnnnnnnnnnnnnnnnnnnnnnnnnnnnnnnnnnnnnnnnnnnnnnnnnnnnnnnnnnnnnnnnnnagcttgtttgtcactcgagttgactgtatatggctttcacatagtgaaagtggttaagaatgctatagtgcctgagtttacatcttagcttcaccttttttcctcacctatggaaagggggttattggccgggcgcggtggctcacgcctgtaatcccagcactttgggaggccaaggcgggcagatcacgaggtcaagagattgagactatcctggacaacatggtgaaaccctgtctctactaaaaaatacaaaaattagctgggcgtggtggtgcatgcctgtagccccagctactcaggaggctgaggcaggagaatcgcttgaacctggaagttggaggttgcagtgagctgagatcgtgccactgcactccagcctgggcgacagagcgagactccgtctcaaaaaaaaaagaaaaagttgggggctgggcgcagtggctcacacctgtaatcccagcactttgggaggctgaggtgggtgggtcacgaggtcaagagttcaagaacagcctggccaacatggtgaaaccccatctctactaagaatacaaaaa

SEQ ID NO: 547745 - DNA, 1135 bp, Homo sapiens
  misc_feature 476, 477, 478, 479, 480, 481, 482, 483, 484, 485, 486, 487,488, 489, 490, 491, 492, 493, 494, 495, 496, 497, 498, 499,500, 501, 502, 503, 504, 505, 506, 507, 508, 509, 510, 511,512, 513, 514, 515, 516, 517, 518, 519, 520, 521, 522: n = A,T,C or G
  misc_feature 523, 524, 525, 526, 527, 528, 529, 530, 531, 532, 533, 534,535, 536, 537, 538, 539, 540, 541, 542, 543, 544, 545, 546,547, 548, 549, 550, 551, 552, 553, 554, 555, 556, 557, 558,559, 560, 561, 562, 563, 564, 565, 566, 567, 568, 569: n = A,T,C or G
  misc_feature 570, 571, 572, 573, 574, 575: n = A,T,C or G
tacaggcatgagccgtcacacccggggtaaatagggattttaaaatagctttgtgtgctggcaaatatctttttctggagagtggaatgacattctgtcatgtttaattttttaggctatgagaccgctaaaagggatatctaactctcttctccttttcttattccctagggtattcactttagtggaaaacagcataggttaatatcaactggctccataaaaatcaacttgtccctttaaatatatcaaatactttaaatagtttttccaatattaaatatccatgttcagaatatggtggtgattatgctgtatttaataagagaaattactttgagagtgatgttggcaagattatgtcaagtagcagccaaggcctgatatrccacactgtcaaaccaatgattttttttctttctttcttttgccactgttactatattaatatacttttagtatttccactcaccccnnnnnnnnnnnnnnnnnnnnnnnnnnnnnnnnnnnnnnnnnnnnnnnnnnnnnnnnnnnnnnnnnnnnnnnnnnnnnnnnnnnnnnnnnnnnnnnnnnnnagcttgtttgtcactcgagttgactgtatatggctttcacatagtgaaagtggttaagaatgctatagtgcctgagtttacatcttagcttcaccttttttcctcacctatggaaagggggttattggccgggcgcggtggctcacgcctgtaatcccagcactttgggaggccaaggcgggcagatcacgaggtcaagagattgagactatcctggacaacatggtgaaaccctgtctctactaaaaaatacaaaaattagctgggcgtggtggtgcatgcctgtagccccagctactcaggaggctgaggcaggagaatcgcttgaacctggaagttggaggttgcagtgagctgagatcgtgccactgcactccagcctgggcgacagagcgagactccgtctcaaaaaaaaaagaaaaagttgggggctgggcgcagtggctcacacctgtaatcccagcactttgggaggctgaggtgggtgggtcacgaggtcaagagttcaagaacagcctggccaacatggtgaaaccccatctctactaagaatacaaaaa

SEQ ID NO: 547746 - DNA, 533 bp, Homo sapiens
attctcttcataacatttatcactatcagaaattattttaagtattgatttacttgagcagctgtttattatccatctctgcttcctcaagttttgtgaggacaattatctttaattttgtttatcaatgtattcccaataccttgagtgcctggcaaacagttggcacaaaattagtgtgtgtttaataagtgaatgcaaaggaatgaatatctaaaggcaaaaatattcagtcacttagaccctagcacgtaatcgtcaccgagtgaaataatcatctacatatatcctctaggggaaaaaaacacattactttaaaatgaaatatgaaaattaacagataaattctggtcaaatggatartatagaaaaatatttttgaattttttataaaattttataattttttaaaaaactttattaaaaattttccccagctttattgaaatattgacataaaaattatgtatatttaaggcatattgtgtgctgttttgatatatagatacattgtcaaattgttaccacaatga

SEQ ID NO: 547747 - DNA, 672 bp, Homo sapiens
tgggaggccaaggtaggaggatcacttgagcctagaagcttgagactgcagtgagctgtgattgcaccactgcactccagcctgggcaagagagaaagaccctgtctctaaaacaaacaaacaaacaaaaacaggttgaactaaacagtgtattatttatagaaatacacatcagagataaaagatatgaagaagaagcagatgattatcacaaaattcaggagagctggggggaagccaggcatgtgattaggaaagggtgcaaatgggactttgaggaaggatgggtgagtactgctctatttcctaacctcagaaatataacatataatatttatattatatttatatttatatttatattatccttgaaaatgaacatatcttttcatacactcttttgtgtgtttgttacattatatagtaaaaagaaattttaaggaataaatttaaagttytataccatggtccaaaccactgccccctccaaaaaaaaaaaaaccagaataatctaatcaatacaaagtgcagaaaagacaggggatttaatgggtggtgtaagtcagagtcaggtgtctaggctacatttggagaattgtctctaccctattcctgtgcaggccagctgggatcatggttgggttcatggctggagtcatggctggagaccat

SEQ ID NO: 547748 - DNA, 1360 bp, Homo sapiens
ctgggccttcctctttctctatatgaccattcctgatccaggaagatatgacttctcatggtagtcccagcattcctaaaaaaaggaagagaagacaagctccaatacactagtactttttaagcatcatttaatattatgtatgttaatgtcccattgattacagccaatgacatggctaatccaaagttcaagtagagagagagatattacttcctgatgggaggatggcaaactcacaatacttacaggaaagggggaaatttatagttactttttcccaagtctactacagtaaggaggtataggagaatagatattatgtaggcaaaaccaatggctgtctcatcttttatattttactatcttttaacctgttaatatcttaattaataaaacttaaagaaaacctgtgcattctaggcatggcatccctgtaactttctaatttycaaatcagtgattgttaaattttcttagatttaggtcacttggaaaatctgatcaaagttatggtatattatggactgaatgtctatgtacctccaaattcatatgatgaatcttcaacccttagcatgactgtatttggagatgtggcctctaaggaaataattaagggtaaatgaggtcataagggtgggttttaatctgataagattagtggcattgtaagaaagagacaccagagagctccccatctcttcttttgtgtgtacacactgacgaaagaccacgtgagtgacgggatagtgagaaaacagccatttgcaagccaggaggagaaccaccaccggaaacccagctggaaccttgatcttggactttcaggctccagaactgtgagaatgtaaatttctgttatttagggcacccagcattttgttatagcaaatcaaacagactaatacaactgccttttatctaattaaaagtctttacattaagtttttttgtgtgtgttaaagttgcagctgggatttcagtctcctgagtggatcctgatagatgcaggagagagtggtgagaaggaaagaggagggatttatctgtgagttcccttctaaccattgtttcctattgtccaggttctcaatgcccagagtttagctcatggagcctttggataagctatattactcaggtctaatagtgatgggaagaattagaatttcagtagttatctcaggagacagaactgctcctgtatcaactggaataagtccgatttatacttggttgcctcagtggtgactgggtggagccccagcagagttaggcaccatggtggtggcaaggatttgatccagatagtggatgctccatcagcctggactacaaaagtgggcacagaatggag

SEQ ID NO: 547749 - DNA, 1360 bp, Homo sapiens
ctgggccttcctctttctctatatgaccattcctgatccaggaagatatgacttctcatggtagtcccagcattcctaaaaaaaggaagagaagacaagctccaatacactagtactttttaagcatcatttaatattatgtatgttaatgtcccattgattacagccaatgacatggctaatccaaagttcaagtagagagagagatattacttcctgatgggaggatggcaaactcacaatacttacaggaaagggggaaatttatagttactttttcccaagtctactacagtaaggaggtataggagaatagatattatgtaggcaaaaccaatggctgtctcatcttttatattttactatcttttaacctgttaatatcttaattaataaaacttaaagaaaacctgtgcattctaggcatggcatccctgtaactttctaattttcaaatcagtgattgttaaattttcttagatttaggtcacttggaaaatctgatcaaagttatggtatattatggactgaatgtctatgtacctccaaattcatatgatgaatcttcaacccttagcatgactgtatttggagatgtggcctctaaggaaataattaagggtaaatgaggtcataagggtgggttttaatctgataagattagtggcattgtaagaaagagacaccagagagctccccatctcttcttttgtgtgtacacactgacgaaagaccacgtgagtgasgggatagtgagaaaacagccatttgcaagccaggaggagaaccaccaccggaaacccagctggaaccttgatcttggactttcaggctccagaactgtgagaatgtaaatttctgttatttagggcacccagcattttgttatagcaaatcaaacagactaatacaactgccttttatctaattaaaagtctttacattaagtttttttgtgtgtgttaaagttgcagctgggatttcagtctcctgagtggatcctgatagatgcaggagagagtggtgagaaggaaagaggagggatttatctgtgagttcccttctaaccattgtttcctattgtccaggttctcaatgcccagagtttagctcatggagcctttggataagctatattactcaggtctaatagtgatgggaagaattagaatttcagtagttatctcaggagacagaactgctcctgtatcaactggaataagtccgatttatacttggttgcctcagtggtgactgggtggagccccagcagagttaggcaccatggtggtggcaaggatttgatccagatagtggatgctccatcagcctggactacaaaagtgggcacagaatggag

SEQ ID NO: 547750 - DNA, 1360 bp, Homo sapiens
ctgggccttcctctttctctatatgaccattcctgatccaggaagatatgacttctcatggtagtcccagcattcctaaaaaaaggaagagaagacaagctccaatacactagtactttttaagcatcatttaatattatgtatgttaatgtcccattgattacagccaatgacatggctaatccaaagttcaagtagagagagagatattacttcctgatgggaggatggcaaactcacaatacttacaggaaagggggaaatttatagttactttttcccaagtctactacagtaaggaggtataggagaatagatattatgtaggcaaaaccaatggctgtctcatcttttatattttactatcttttaacctgttaatatcttaattaataaaacttaaagaaaacctgtgcattctaggcatggcatccctgtaactttctaattttcaaatcagtgattgttaaattttcttagatttaggtcacttggaaaatctgatcaaagttatggtatattatggactgaatgtctatgtacctccaaattcatatgatgaatcttcaacccttagcatgactgtatttggagatgtggcctctaaggaaataattaagggtaaatgaggtcataagggtgggttttaatctgataagattagtggcattgtaagaaagagacaccagagagctccccatctcttcttttgtgtgtacacactgacgaaagaccacgtgagtgacgggatagtgagaaaacagccatttgcaagccaggaggagaaccaccaccggaaacccagctggaaccttgatcttggactttcaggctccagaactgtgagaatgtaaatttctgttatttagggcacccagcattttgttatagcaaatcaaacagactaatacaactgccttttatctaattaaaagtctttacattaagtttttttgtgtgtgttaaagttgcagctgggatttcagtctcctgagtggatcctgatagatgcaggagagagtggtgagaaggaaagaggagggatttatctgtgagttcccttctarccattgtttcctattgtccaggttctcaatgcccagagtttagctcatggagcctttggataagctatattactcaggtctaatagtgatgggaagaattagaatttcagtagttatctcaggagacagaactgctcctgtatcaactggaataagtccgatttatacttggttgcctcagtggtgactgggtggagccccagcagagttaggcaccatggtggtggcaaggatttgatccagatagtggatgctccatcagcctggactacaaaagtgggcacagaatggag

SEQ ID NO: 547751 - DNA, 2378 bp, Homo sapiens
cattgaaaattggactatacatttattttacaaaatatacatagcaaagaattttagttggtttgttagttaattagtttatataccttcacatttctcatatcatactgtagagaccccctctggtccataaataatacatttatttccttcccccttctataatatatgactactgattcccattaataattactatattcctacccccactctccctgttggacaatttgtctccaattactttcaaccatttctttctcaagaatatatatttttatgatttttgttgtctcctgtatgagccagaatcccaggaggaaacagatggcccactcagaaatggggtcattggaggagtttaataaagcatctaattataaagttgtgggtgaggttaagggaactatcagagaggaacagtgccctagggctggcgaactttaatgagcatgggttagaagggtttctgcaagtcaaagagaactgtgtattgagattgtgatgtttcctggaggcagtgaaggaacctcggcaatagataccctgtccacacactagcccaccctatgttctactgccaaagcctcccaccagctgaaactaactgtaaccagagggcaagggagattgctcatcaaatccagaaagataaacctcacagaggcactttgcaaggcagacaaagataaaatgaacaaagtatgtgtcacatatttacaaaataacacgggaaagacctcacattcttgtggtggcacattataattatttatgggcccattatatattttcttttgaagttatttctgatgaattgacttgtaatcttaattattgtgcattatcaactctgtatcctgtacattttactttttaaatgaaaacataaaatgagttcaaaaatcctattagctcaaaatgagttcaaaaatcctattagctcactagtttagatctttctaccctgcagaacaaatacggattttgaatcagaaaaaaatgacttcagttctgactcttttgtctttgtaagatatgttattttgtactttgtaagatgagacttattttctttttttaaaagagattgtaataatacctaatagagtttttgaaggaataaactaatattttaaggtgtctaaatacagttatgtgtttgtgctctctctgagacagagactgacagagactcttgtatgcaaaaagcagaaaaacaaatcagtggatgtgaaacaaggaagacagccaatgtaagtgcatttctgagttcatcgctgccatttgtcactgatgtttgattacacctgtccgttataaatttccttattaaatgcatctaagaaatgactccccaggggacaaagcaataaagcccatatccataagttctaattttctactgataatgggctgaccctctagtgttctcaccctcacatcataagggtgaacatgcatgactgcacagtttcctgaggacactgcatgcaaaacctgcctggaacaggttgctacagctgtggatagagtatgagtgtagaatgaaaggattttgaagtggtacataagaaaygtccagtgcaattcttgacacttgataagtatgttaagggctataaatataaatataaacatttttattaattaaccactaaatattattaatataataatgcaataaatcagagtatgacattaccactgtgtgagataaaatgttctaagaatttgaacatagcactatacaggtaaaaaagaactctgacaataactgtcaaccttggaattggaatgcaatgacataaaatgaaaacttcccattcgacttctcaaagttaattcttacatatgcctctcttttcctttcttaacttcacctttattaaaaaatattttatccaaataaaatatttcaagttcagcaacatcattcattcatttgtattggctacctactgtgtgtcagatatttttccaggacctgaagataccacagtgaacaaaaaagtttcaagtcactatgctgattgagcttacattctagtggtggaaacaaataattgaaggcgaaagggcccattgatggaaaagcattgcatgtagaaagaacagctgtgcaaaggactcaagcatgacttatgtatttagaaaaatgtaaggaggccggtgatacaagaatgtagtgagtgatggaaagagttattaagagaagttagagaggatacaggtccagattttgtagctttccatgtaattgtacacgttggacatttgatgaatgagagagatagccactggagaatatcaaactgaagaatataaagggatcactttggctcctgtgatgagaaaaatattttgggatgcaaaga

SEQ ID NO: 547752 - DNA, 643 bp, Homo sapiens
atcctcacttaataattacccagagcaatatttgataactttatatacaatgaatggcataaatcctagctcaaaatatatctctttgtcattagcgagaataaatataactcttaggataaaccaggtaagtattccctgttatctgagcaaagcaaagaagcagtgacctactttcctttcacattttgcctaccagcagyattaaatcaaatggaacacattaaaaccgtcacgaaaggcagacaatagtttccctctgattgcctgcctcagcctggtagcagtgtgaaagttacaaaagtcatttgtatcaactcattaccatgtcacctcatttcatgcccctgctggataagtggcaataagccccatgttagcgtattccacattgtcaccattagaacaaatcctaatagcacccagctgtcgaagattaccccagacagttattgagatttaggaggggcagcttgctactgatttaggatgtattctttcgaatgccctatcatttattctagaatggagaaataaagctaattttatgaagagtactcatgaattattttcttcatgtcagatactataatactcccaacagagtgttcttcttgaactttcattcaaggtaatgatgttg

SEQ ID NO: 547753 - DNA, 966 bp, Homo sapiens
cacacatgcgtatatatgtatttatacacacacagctttttcagtgtgtttttacttttcagaattccaaagcaatcatcatatatgtatgtgtttccaaagcacacttatcaccatgtattaccatgaaaacgtcttgtctgatcactgtctgatcagattaatttgtacagctcttgtacaagactactaacaaaagaaatttgacattttgtctttgtctgtacatactgctcccctatcacattcattccctgttaacctacttaggatcatggatataccagatttaatagtaggaaagataaaatggataacacagaattgtccaagaaactgaaatttttcacctacagatcactttcagaatcatttccttttaaacaaaccataacccatttaagtttccacatgyagtcttaaaaacattttaaaaatttcaaaatcttatttatcttatatttcctaagatgattttattattcctacgttgattatgacacaagaggaaacaaaaaagatctcgattcaacttctatgttgtcaaagtcccttttgtctctatgagccacatataacaaatatcacacaacttgttccccacctctgtgccaaaaacacaggataggttctgtcattgttttcttctcaaaagtttggcagctttgctctttttctccagccccatctgtctgtttgcagctgctcagttactgttgatttacagttttagctttcaaaatcaatcattaaaaggtttttgtggttgctaaatgaaaattcctgaaaccccaaactctaatgccccatctctttccatctaccccaacctcagatgttcactctcagaataatttcagatcaatataacagtgatcatttttaatatcagaatttttaaagttcacttatatattaatccatttttacaatataaaagtaaaattattttgcctgtatagaaaa

SEQ ID NO: 547754 - DNA, 966 bp, Homo sapiens
cacacatgcgtatatatgtatttatacacacacagctttttcagtgtgtttttacttttcagaattccaaagcaatcatcatatatgtatgtgtttccaaagcacacttatcaccatgtattaccatgaaaacgtcttgtctgatcactgtctgatcagattaatttgtacagctcttgtacaagactactaacaaaagaaatttgacattttgtctttgtctgtacatactgctcccctatcacattcattccctgttaacctacttaggatcatggatataccagatttaatagtaggaaagataaaatggataacacagaattgtccaagaaactgaaatttttcacctacagatcactttcagaatcatttccttttaaacaaaccataacccatttaagtttccacatgcagtcttaaaaacattttaaaaatttcaaaatcttatttatcttatatttcctaagatgattttattattcctacrttgattatgacacaagaggaaacaaaaaagatctcgattcaacttctatgttgtcaaagtcccttttgtctctatgagccacatataacaaatatcacacaacttgttccccacctctgtgccaaaaacacaggataggttctgtcattgttttcttctcaaaagtttggcagctttgctctttttctccagccccatctgtctgtttgcagctgctcagttactgttgatttacagttttagctttcaaaatcaatcattaaaaggtttttgtggttgctaaatgaaaattcctgaaaccccaaactctaatgccccatctctttccatctaccccaacctcagatgttcactctcagaataatttcagatcaatataacagtgatcatttttaatatcagaatttttaaagttcacttatatattaatccatttttacaatataaaagtaaaattattttgcctgtatagaaaa

SEQ ID NO: 547755 - DNA, 966 bp, Homo sapiens
cacacatgcgtatatatgtatttatacacacacagctttttcagtgtgtttttacttttcagaattccaaagcaatcatcatatatgtatgtgtttccaaagcacacttatcaccatgtattaccatgaaaacgtcttgtctgatcactgtctgatcagattaatttgtacagctcttgtacaagactactaacaaaagaaatttgacattttgtctttgtctgtacatactgctcccctatcacattcattccctgttaacctacttaggatcatggatataccagatttaatagtaggaaagataaaatggataacacagaattgtccaagaaactgaaatttttcacctacagatcactttcagaatcatttccttttaaacaaaccataacccatttaagtttccacatgcagtcttaaaaacattttaaaaatttcaaaatcttatttatcttatatttcctaagatgattttattattcctacgttgattatgacacaagaggaaacaaaaaagatctcgattcaacttctatgttgtcaaagtcccttttgtctctatgagccacatataacaaatatcacacaacttgttccccacctctgtgccaaaaacacaggataggttctgtcattgttttcttctcaaaagtttggcagctttgctctttttctccagccccatctgtctgtttgcagctgctcagttactgttgatttacagttttagctttcaaaatcaatcattaaaaggtttttgtggttgctaaatgaaaattcctgaaaccccaaactctaatgccccatctctttccatctaccccaacctcagatgttcactctcagaataatttcagatcaatataacagtgatcatttttaatatcagaatttttaaagttcacttatatattaatccatttttacaatataaargtaaaattattttgcctgtatagaaaa

SEQ ID NO: 547756 - DNA, 1300 bp, Homo sapiens
tgtggtttcatggaagaatggtgtctgagctacattttgtcttattctaaaagtaaaaggaatgggactgatctggaagcacatagattccagatcaatactaataccagactattgtaatgccaatttataaaaggaagctaggtatccattaaaatgacagaaaatcaacaggtattttttgtaacagatcattgagttggatgtgaaatggtttaaagctttaactattccaggggctcctgcaaagtgtaaacttagtgtttccttgagttagcactgaaaggagagcaggattgagggacaaaagaagcaatccagtcatctagtaatatgactctggatgatgtttgctctaaattgctcccagcatcagtatgtggaaggtggacagtgtgtgtgaacttcaaagcccccgcagggcttcagttggcttgaataaaatgttactggttatcctgccaccttgtggctatgggccaacatgccagggtgtggaggaggaagggaggaaattaatgaatcacagagttgcctgactgaagaaggaaagctcagaaacacatcctcttctctcttccctatagatgtcaacttgcccatcacttgattagctaaaagtgaatagggcttaaagttcagtccttgagtgagattttgcttatatagccctcctaggacttttgtcctatcagagtagcttgttgcacagtgtgctccttgtgatcaacrgttagttaatcttgtctctccaaaatctaaagtttaaatccttattcattaaatcagactgtttatcaagtatagtgctttactaacgagattatttcagaaataagcgaacaaaacaataagacgtatgctgtttgttttttgagacagggtcttgctctgttttccaggctagagtgcagtgacacaatcacggctcactggagcattgaccttgtggctcaagcaatcctcctacctcagcttcccaagtagctgggaccaaaggtgtataccaacacgcccagctaggtgtttttatgtctgtctgtttgtttgttttattttgcagagatggaggtctccccaggttgtccaggctggtctcaaactcctgggctcaagtgaacctcccgccttggcttctcaaagtgctgagattatgggcgtgagccactacacctgcccaatattgttgatcagagtaaagaaatgacataaacacccagtaacagttagaagccgtattcagattagctataattttcactagaaccatcccaatctcttgaaagataaaacatcaaat

SEQ ID NO: 547757 - DNA, 650 bp, Homo sapiens
agtcgtaatcgacaaagtggagaaaacatacaaatctttgcatggtgctaacatttggactgtggcttcattgtttcttattaacattttagtgaaatattgctagaaggagactgaaaatgaagtatgaaaagttaaatgggatttctgttccaagttagtccttttcagatgagaggaactaagaagttacagggaagaaacaataatatctgctgagcaagatttttgcagggcaggccaaggaattaccaaggagaaaaaggaaatgtcagcttcaccttgcatctgctcccgagccaggtcctgagcaccccctgctggcgctgatcgtcccctggtgtctgatcycctctggttccctcagcttccctggtggtgtctgagccgctctactggtgtctgagcccctctgcctgccctcagctccccctcgtggtctgagccaccctggtggtgtctgaaccccgcttgtgatgtcctgagcccctctattagtgtctgagccctactggtgggtcctgagcccctttggtggtgtctgagccccctggttttgagcccccccttctgcatcctgagccctcctggtagtgtctgagtgttattttcaccatacactcaaataagattgagcagtgattctttca

SEQ ID NO: 547758 - DNA, 650 bp, Homo sapiens
agtcgtaatcgacaaagtggagaaaacatacaaatctttgcatggtgctaacatttggactgtggcttcattgtttcttattaacattttagtgaaatattgctagaaggagactgaaaatgaagtatgaaaagttaaatgggatttctgttccaagttagtccttttcagatgagaggaactaagaagttacagggaagaaacaataatatctgctgagcaagatttttgcagggcaggccaaggaattaccaaggagaaaaaggaaatgtcagcttcaccttgcatctgctcccgagccaggtcctgagcaccccctgctggcgctgatcgtcccctggtgtctgatctcctctggttccctcagcttccctggtggtgtctgagccrctctactggtgtctgagcccctctgcctgccctcagctccccctcgtggtctgagccaccctggtggtgtctgaaccccgcttgtgatgtcctgagcccctctattagtgtctgagccctactggtgggtcctgagcccctttggtggtgtctgagccccctggttttgagcccccccttctgcatcctgagccctcctggtagtgtctgagtgttattttcaccatacactcaaataagattgagcagtgattctttca

SEQ ID NO: 547759 - DNA, 650 bp, Homo sapiens
agtcgtaatcgacaaagtggagaaaacatacaaatctttgcatggtgctaacatttggactgtggcttcattgtttcttattaacattttagtgaaatattgctagaaggagactgaaaatgaagtatgaaaagttaaatgggatttctgttccaagttagtccttttcagatgagaggaactaagaagttacagggaagaaacaataatatctgctgagcaagatttttgcagggcaggccaaggaattaccaaggagaaaaaggaaatgtcagcttcaccttgcatctgctcccgagccaggtcctgagcaccccctgctggcgctgatcgtcccctggtgtctgatctcctctggttccctcagcttccctggtggtgtctgagccgctctactggtgtctgagcccctctgcctgccctcagctccccctcgtggtctgagccaccctggtggtgtctgaaccccgcttgtgatgtcctgagcccctctattagtgtctgagccctactggtgggtcctgagcccctttggtggtgtctgagccccctggttttgascccccccttctgcatcctgagccctcctggtagtgtctgagtgttattttcaccatacactcaaataagattgagcagtgattctttca

SEQ ID NO: 547760 - DNA, 500 bp, Homo sapiens
ggtggctcacacctgtaatcccagcattttaggaggcagagtgggcaaatcacttgaggccaggagttcaagaccagcctgggcaacatggcaaaaccccgtctctacaaaaaatacaaaaattaactgggtgtggtgttgtgtgcctgtagttccagctactcgggaggctgaggtgggagaatcgtttatgcccaggaggcggaggctgcagtgagccataatcaccccactgtactctagcctgggcaacagagccagaccctgtctcaaaaaaaaaaaaggaaaaaaaaatacatccttccttggctagtcattactacagagagaggaaaaagtaagtgggcttgctggggaagaaagaaaaattgtgaatatgtasttttgtctaaggaaattggctatttctggtccttctgaaggtaaatggactaaaggactgcattgaaaatcttccagatcatgtatttattaggtagaaattgattatgtctacaatt

SEQ ID NO: 547761 - DNA, 1531 bp, Homo sapiens
tttttatgctgcaagagctcccttcaagttttccttagagtcaactttaattgcttagacttagactctccaaaagagagacctttgttaattttgcttccaaatccatgaagaggcaaggctttgttttttttttgttttgttttattttttttttaaagaacattttagaaaaaatgaccaatgaatgaacttctctttcatctctattctcatgtcaaatgataaggcataaagcaaatggaggaccttctagacctagaaggatatatcttataagtgaatccattcccaaaagtgccagtgcttgtttagctgagtcagttaatcttgacactaaggaattattacagtgtttaaatttcattttttaggttgtagcatggcaggaaatacttgatgaggctctacctctttgacttggatttgtgataagaaagtaagttttgggagggcgaggtgggcagatcacttgagctcaagagtttgagcccagcctggccaacatggtaaaaccccgtgtctactaaaaatacaaaaattagctgggtgtgttggggcatgcctgtagttccagctactctggaggccgaggcaggagaatcacttgatcctgggaggtggaggttttagtgagccgagatcctgtcactgcactccagcctgggtgacagagcaagactctgtctcaaaaacaaaaacaatgacaacaagtaagttatttggcctaactcatagccacttctggagaaaacagttcaaggcacatagcccgtgataagtgctgctgtttcttttcttttcttgttttttttttttggttttttttgggggcgaggggggtatagggtttcactcttgtcactcaagctggactgcagccttgatcttggctcactgcagccatgagctcccaggctcaagcaatccatctcccaagtagctaagactacaggcatgcaccaccacacccgactaatttttgtaaattttgtagagatggagttttatcatgttgcctaggttggtctcatacccctgggctcaagcggtctgcctgcctcagtctcccaaagtgctaggattgtaggcatgagccactgcacctggtcgagtgcttccttttctatgaggccagaatgtttctatcacacctagactaactagtaatgtaattttatctacctggttagttagataaaatttatctaattatatatatttatactgcaaagcattacatgcttataggtttggcttttctttcaagaaagcaatgatacctcctgagtattttcttccatccccatgtcaatcactcccaccctttctccttaaaaattattttggagaccaaagtataatagattttacccagaagtgatatttctcaccaatgtaaactttgtactttatctcttaaarggtggaaaaaaagtatagtaaaatattacatatgcacagagcctagagattatattttattctattattcttccaagttgagttttgtgctggtcttatttttatc

SEQ ID NO: 547762 - DNA, 1562 bp, Homo sapiens
agtaataagagtactagaaaacatattgcctgtaggagctgttgttattgagggcaaaagggtagagagtgtatacatttctcagaaatatgaataattaaagattcctttaaattagagtcaccttgcagctgaagccacatcttacaagaaacaaaaagttttgctatggcttctatttgatagctttgttatgcaactgtatcataagtactatgccaatttaagtgtttaaaatgtatttattgtgatgagttgacatgtggtcatttttcaattacattaattcatttatattactgataatgataatgacaacaaaacttcatcttttatgtctaaatcaactaamtatctaactactttagaaagtgcttacttaaaaaccagtatcattagtttgcatgagagtacttttttgttaatattgcctcattattttaatttttaaagaatgaaaacaatttcctgaatattgagtaaataaaatgaaatttatattactgtctactagcacttgctgcttaagcaaaattatgaacacattagaaaggccaaaaggcactggttgtcattatgaaagcatatgctttggctctaaggtatactaaaaaatagttccttttcttgggcctttttctttggcttatgtgttctatttttatctatttccacatatcaaaactaccctttcaggtgttatatctgctcagagtccttctcccttagcagactaatgtaataaacatttgcattatttaagagtttcacatgtaaatccattatcccatttcagaaaccatatttactctatcagaaaggcttattagaagtctaactatttgctctcactttcctgggacactaaagtagattttaggaaacactaaggtcttggcatgctcaattcctcttatgatggaagtgaccaggtcagggtcccttccacaagtggccaggctttctgtcatctgattgggctaccatggcatgatgtattgtactggggatatgcaccatagcaaagacatttctatgctagcttgaaacaagatcattgcccaatagtgttgtctcaaactagagaattacctactgatccatttagattgtatctcctggggagattgaatatgaagcagagagaaaaagaggaaatcatagtagaagatagtagatgggaatacggtaggcatagaggccaaaaagtgtaaaggagaagagtgacttattgtgttatagagtccctagatagggtgcattagatgctctctgttgagggaaagacaagctgagaagttcaaccggctgatattcgtgctgcagagccactgctgcatcctgaatggcaaagcgtacttatcaaatttttctgctgaaacactttctcaaattccctctttcatgtagctttacaagtaaaacttccttatatgaggtaacctctacatctctattctactataatctgtaaaatctaaactaatgaaatttctccacgtgctcctttcaccattgcacaagattttatagcattattcttgcaaatgcaggtgatttca

SEQ ID NO: 547763 - DNA, 1191 bp, Homo sapiens
cccccgggtctctgctgtgaggaggagggaggggacagacctccatggcrccacagtgtcctggggaactgaggcgagtcacagaggctgcagaggaaagtgtgaacttgtcacagtgggggaaggacgtggtgccgaggccaggctgcagggctccctgtgcctcccagccccgcacctcctccctctggaccggctcccacaaggacatcccacctggtcagcagcccacggaggctcccgtgcagggaccaccccctccccgtgctgggccggctccggggccaccccctcctccctgctgcccccagagctgctcaccctggggatcttccccccatcctcttctggctcaccgtgggctcaggccctgcccgatggctggggatctgggggcctcactgggtatccttaactgtccgctgcccacagccagtccgagcatttgaggaagtgaatttccaaaaaatgcttccatctcacgttcagacacctgcttcccagctccgcctccagcaccaagtctgcacattgcactttaaacgaacagcaatctccaggattatcatgccgcgttgttctgcgcccatggtcggagggttcctacccactgttcctcacctccggtccacgtcggggctggccaagactgattggtgtgcagtgtccctgtgggagccgcctcacctgggtcccacacaccctggctccatgtcagactctgcctggaatggacgcaggagcagagtggccgccagcttggggatggcgcgcaccttcagccaggaagaaagcctttgcggtgggaagccactggcgttctgggatcgctcgttactgcagcgcagcttagcgaaagctgactatggcttctccactgaaaacctgacatttgtaacgaaacgggattcacttggatgacacctttaagatacgaagtctatccatgaccatgccactctccagttaagatgttagtactttcagtaaacctgtagaattttctcaaagaactttcagtttttaaattagatatagtcttagtactcaattttttgatgctgtaagttttttaaaattacattttgcttgttctagttcctagaagtggaaatgacatatgtacactgactttgtgtgtagataccaaataaatgctttttaattctaatcatttataatttgggggca

SEQ ID NO: 547764 - DNA, 1191 bp, Homo sapiens
cccccgggtctctgctgtgaggaggagggaggggacagacctccatggcgccacagtgtcctggggaactgaggcgagtcacagaggctgcagaggaaagtgtgaacttgtcacagtgggggaaggacgtggtgccgaggccaggctgcagggctccctgtgcctcccagccccgcacctcctccctctggaccggctcccacaaggacatcccaccyggtcagcagcccacggaggctcccgtgcagggaccaccccctccccgtgctgggccggctccggggccaccccctcctccctgctgcccccagagctgctcaccctggggatcttccccccatcctcttctggctcaccgtgggctcaggccctgcccgatggctggggatctgggggcctcactgggtatccttaactgtccgctgcccacagccagtccgagcatttgaggaagtgaatttccaaaaaatgcttccatctcacgttcagacacctgcttcccagctccgcctccagcaccaagtctgcacattgcactttaaacgaacagcaatctccaggattatcatgccgcgttgttctgcgcccatggtcggagggttcctacccactgttcctcacctccggtccacgtcggggctggccaagactgattggtgtgcagtgtccctgtgggagccgcctcacctgggtcccacacaccctggctccatgtcagactctgcctggaatggacgcaggagcagagtggccgccagcttggggatggcgcgcaccttcagccaggaagaaagcctttgcggtgggaagccactggcgttctgggatcgctcgttactgcagcgcagcttagcgaaagctgactatggcttctccactgaaaacctgacatttgtaacgaaacgggattcacttggatgacacctttaagatacgaagtctatccatgaccatgccactctccagttaagatgttagtactttcagtaaacctgtagaattttctcaaagaactttcagtttttaaattagatatagtcttagtactcaattttttgatgctgtaagttttttaaaattacattttgcttgttctagttcctagaagtggaaatgacatatgtacactgactttgtgtgtagataccaaataaatgctttttaattctaatcatttataatttgggggca

SEQ ID NO: 547765 - DNA, 1191 bp, Homo sapiens
cccccgggtctctgctgtgaggaggagggaggggacagacctccatggcgccacagtgtcctggggaactgaggcgagtcacagaggctgcagaggaaagtgtgaacttgtcacagtgggggaaggacgtggtgccgaggccaggctgcagggctccctgtgcctcccagccccgcacctcctccctctggaccggctcccacaaggacatcccacctggtcagcagcccacggaggctcccgtgcagggaccaccccctccccgtgctgggccggctccggggccaccccctcctccctgctgcccccagagctgctcaccctggggatcttccccccatcctcttctggctcaccgtgggctcaggccctgcccgatggctggggatctgggggcctcactgggtatccttaactgtccgctgcccacagccagtccgagcatttgaggaagtgaatttccaaaaaatgcttccatctcacgttcagacacctgcttcccagctccgcctccagcaccaagtctgcacrttgcactttaaacgaacagcaatctccaggattatcatgccgcgttgttctgcgcccatggtcggagggttcctacccactgttcctcacctccggtccacgtcggggctggccaagactgattggtgtgcagtgtccctgtgggagccgcctcacctgggtcccacacaccctggctccatgtcagactctgcctggaatggacgcaggagcagagtggccgccagcttggggatggcgcgcaccttcagccaggaagaaagcctttgcggtgggaagccactggcgttctgggatcgctcgttactgcagcgcagcttagcgaaagctgactatggcttctccactgaaaacctgacatttgtaacgaaacgggattcacttggatgacacctttaagatacgaagtctatccatgaccatgccactctccagttaagatgttagtactttcagtaaacctgtagaattttctcaaagaactttcagtttttaaattagatatagtcttagtactcaattttttgatgctgtaagttttttaaaattacattttgcttgttctagttcctagaagtggaaatgacatatgtacactgactttgtgtgtagataccaaataaatgctttttaattctaatcatttataatttgggggca

SEQ ID NO: 547766 - DNA, 1191 bp, Homo sapiens
cccccgggtctctgctgtgaggaggagggaggggacagacctccatggcgccacagtgtcctggggaactgaggcgagtcacagaggctgcagaggaaagtgtgaacttgtcacagtgggggaaggacgtggtgccgaggccaggctgcagggctccctgtgcctcccagccccgcacctcctccctctggaccggctcccacaaggacatcccacctggtcagcagcccacggaggctcccgtgcagggaccaccccctccccgtgctgggccggctccggggccaccccctcctccctgctgcccccagagctgctcaccctggggatcttccccccatcctcttctggctcaccgtgggctcaggccctgcccgatggctggggatctgggggcctcactgggtatccttaactgtccgctgcccacagccagtccgagcatttgaggaagtgaatttccaaaaaatgcttccatctcacgttcagacacctgcttcccagctccgcctccagcaccaagtctgcacattgcactttaaacgaacagcaatctccaggattatcatgccgcgttgttctgcgcccatggtcggagggttcctacccactgttcctcacctccggtccacgtcggggctggccaagactgattggtgtgcagtgtccctgtgggagccgcctcacctgggtcccacacaccctggctccatgtcagactctgcctggaatggacgcaggagcagagtggccgccagcttggggatggcgcgcaccttcagccaggaagaaagcctttgcggtgggaagccactggcrttctgggatcgctcgttactgcagcgcagcttagcgaaagctgactatggcttctccactgaaaacctgacatttgtaacgaaacgggattcacttggatgacacctttaagatacgaagtctatccatgaccatgccactctccagttaagatgttagtactttcagtaaacctgtagaattttctcaaagaactttcagtttttaaattagatatagtcttagtactcaattttttgatgctgtaagttttttaaaattacattttgcttgttctagttcctagaagtggaaatgacatatgtacactgactttgtgtgtagataccaaataaatgctttttaattctaatcatttataatttgggggca

SEQ ID NO: 547767 - DNA, 1191 bp, Homo sapiens
cccccgggtctctgctgtgaggaggagggaggggacagacctccatggcgccacagtgtcctggggaactgaggcgagtcacagaggctgcagaggaaagtgtgaacttgtcacagtgggggaaggacgtggtgccgaggccaggctgcagggctccctgtgcctcccagccccgcacctcctccctctggaccggctcccacaaggacatcccacctggtcagcagcccacggaggctcccgtgcagggaccaccccctccccgtgctgggccggctccggggccaccccctcctccctgctgcccccagagctgctcaccctggggatcttccccccatcctcttctggctcaccgtgggctcaggccctgcccgatggctggggatctgggggcctcactgggtatccttaactgtccgctgcccacagccagtccgagcatttgaggaagtgaatttccaaaaaatgcttccatctcacgttcagacacctgcttcccagctccgcctccagcaccaagtctgcacattgcactttaaacgaacagcaatctccaggattatcatgccgcgttgttctgcgcccatggtcggagggttcctacccactgttcctcacctccggtccacgtcggggctggccaagactgattggtgtgcagtgtccctgtgggagccgcctcacctgggtcccacacaccctggctccatgtcagactctgcctggaatggacgcaggagcagagtggccgccagcttggggatggcgcgcaccttcagccaggaagaaagcctttgcggtgggaagccactggcgttctgggatcgctcgttactgcagcgcagcttagcgaaagctgactatggcttctccactgaaaacctgacatttgtaaygaaacgggattcacttggatgacacctttaagatacgaagtctatccatgaccatgccactctccagttaagatgttagtactttcagtaaacctgtagaattttctcaaagaactttcagtttttaaattagatatagtcttagtactcaattttttgatgctgtaagttttttaaaattacattttgcttgttctagttcctagaagtggaaatgacatatgtacactgactttgtgtgtagataccaaataaatgctttttaattctaatcatttataatttgggggca

SEQ ID NO: 547768 - DNA, 608 bp, Homo sapiens
gaagcagccagattaatttctcagtaacctctgagagcaattgtatagatttttccatgtttgctcaggcacaggagaaatgagacctgagcccttggtgccaaagtgtttcttctattactgactcacaaaaatgacagtagaaatcaggaaataaaatgctcattctaagaatgattaaagtgcatggatgcagccttgctcatctcagctgatctaaacagcgccctcacaggagggagagaaaactgctgccgtatcaagtaatccattaaaaccttgtgaattgattctttaaacgcacagaaacaaaaacataaaatgactcctctcccttgaagtgatatgatttttccccctcctctaatcttgttccatcaaaagcctacaggtgggaagggaaaaagcacaggttacttgtatagctgtgacgtaatatcacctgatgggagccaatgggatggagactttcagcagggatggcccaggcattgcaaacacattcagcagcaggagcyattcacttctaacccactgttcaggggaaaagcaggaaatgcccacacagctgctgacaaagatcctgggggctatttgccaataactgt

SEQ ID NO: 547769 - DNA, 968 bp, Homo sapiens
attatgttgagtcttccaatccatgaacatsgtattcttggattattggtatgtatcttcatttatttagatctttggtttcttttttcagcattttgtaattttcagcatgtaagacctgaaggtgttttgttaaatttatacctaagcatttcctttttttttgagtgattgcaaatggtattgtaatttaaatttttgtgaccttgtgtttattgctggccatgggcagaaggaatagaaagaggtagacagggcagccagctggagagggctaagctacaactgtacattgagcatgtgggcagagtgctggtggtaccaatcctggaggcaggtcagcatgggctctatagccccaggacatacttttcccttgatttcttcaggtgttcctcatccaggtcttgcatgaactccgtgtctatgacgtgggcaaggatgctgaaggaatgtgactggcctgtcctagaccatggtggccagtccttggtgttctccatcagccactgcttggtggcatctgggaccagcagttggagcagctgtccattctgctatggtgcattgccagcaggtggtgggggtgccctgaagggccaggccatcttgttgaaggtgctgggtgcaagcgtgaactgcagggggtttgtggcaggagccagaacctcctgtggtttgctctgaactggctgagacctgctgagacccaggctgaggcactttatgcaggctcagatcatttgcctccaggagtgagccaggaaatggagaagggcacattgaggtccttgcccccttgcagctggaagcctcaaggtgctgacctcttcagcaatgctttgaagaaatccatgatgccagcccctgcttagcccactggggagctgcttggcatcaggctccagggagccgcatcaggattggctgcccatgttcttaaattattttaaatttgctgaagtttg

SEQ ID NO: 547770 - DNA, 968 bp, Homo sapiens
attatgttgagtcttccaatccatgaacatggtattcttggattattggtatgtatcttcatttatttagatctttggtttcttttttcagcattttgtaattttcagcatgtaagacctgaaggtgttttgttaaatttatacctaagcatttcctttttttttgagtgattgcaaatggtattgtaatttaaatttttgtgaccttgtgtttattgctggccatgggcagaaggaatagaaagaggtagacagggcagccagctggagagggctaagctacaactgtacattgagcatgtgggcagagtgctggtggtaccaatcctggaggcaggtcagcatgggctctatagccccaggacatacttttcccttgatttcttcaggtgttcctcatccaggtcttgcatgaactccgtgtctatgacgtgggcaaggatgctgaaggaatgtgactggcctgtcctagaccatggtggccagtccttggtgttctccatcagccactgcttggtggcatctgggaccagcagttggagcagctgtccattctgctatggtgcattgccagcaggtggtgggggtgccctgaagggccaggccatcttgttgaaggtgctgggtgcaagcgtgaactgcagggggtttgtggcaggagccagaacctcctgtggtttgctctgaactggctgagacctgctgagacccaggctgaggcactttatgcaggctcagatcatttgcctccwggagtgagccaggaaatggagaagggcacattgaggtccttgcccccttgcagctggaagcctcaaggtgctgacctcttcagcaatgctttgaagaaatccatgatgccagcccctgcttagcccactggggagctgcttggcatcaggctccagggagccgcatcaggattggctgcccatgttcttaaattattttaaatttgctgaagtttg

SEQ ID NO: 547771 - DNA, 1874 bp, Homo sapiens
agattatcaagtttggtttggtttgctctattttaaaatgatagaataaatttagaaatagatttaaaaaaaattgatggattaggaaaacgtgaattatttaattgagagtttttaaatctgttacaaaaaaagcctgagaagaaagtcaagcacagtcttcatgcacatgaaagagtatttgtgggttataaaattaggaccttttccaatttttgcaaaagttaaagctataaaataggcacttaggccggtgtggtggctcacatctgtaatcccagcactttggcaggccgaggtgggyggatcacctgaggtcaggagctcgagaccagcctggccaagatggtgaaaccccatttctactaaaaatacaaaaattcgccgggtgtggtggcgcacgcctgtaatcccagctactcaggaggctgagacagggcaatcatttgaacaaggggggaggcagaggttgcagtgagccgaggtcgtgccactgcactcctgcctgggtgacagagtgagacttcgtctcaaagtaaattaaattaaattaaaaagccgccacttaaattgtgcaaagtatattaagattacccataaataatcttataaaataagactgattaaatactggaaaaacttccaaagatggctgtccctgtctgtttttagaaattctagaatatctaatgaattatataatatttcctgattccttttaaaattaattaggtatatttagtatatgttgcatactagccatccacccttctctttagatcacgttagcccctggtaagaagaaaacttccaaacaaaaagtaagaagcccagaacgttaccacatattagtgatggttttgtgacctaagagactaaggagtttgtcatttttagacatcgatggactaattcaattcattccagtaagagagaagatgttagacattttcatttaacttatggcaaattctatactttttaaaaaatctgctccagaaatgcatctgtctaacaagcatctttatttaaaagaaacaaagaaaattttgttggtattttgttaagaaaatgagtttatcatattaaactcccaagaaaattatgtgaagtgagtattattctttattttaaaaatgaggactgtgtaggtctcaaggaatctttgtgacagagttaagattaattggtttagtggaactgattaccatagaccctgatttctgttaatagccatgtttatcatcttaatgtgaaatttgctttaagcaatttattcaatcacacaaatgtatgatgcattgaaccggctacatttgacatcagataaatattgaggtttgagaggctcacttatgctataatatgtcaccccaggtacagccctctctatcccacaaaatagtttaaattattattttttaatgtagacaataaatttgaaaagatttgaaaatcatataatatacttcccatttctcatatcaaatgagataattctgggtctacaaaaacctgaagctgtaggttatttaatctgttatcttgggttatttatctgacttaaggtaaggaacctgatattttacttttaagtataaccttttctaatagaagggaaaatcaaagattaaaatagttgtagcaaaaataaatataattatggcaatatagcaataacatattaatggcaataataacatgcagataaactacaaatcaagataaaaggaacaaaatccgatttatatttaatcttgagtatttttacattgaatgtactaaatatttagtccatttaaaatcaagtttatgtaattttagagtcctatttaattattttaatatatgtttcaattctaattgcaaaacat

SEQ ID NO: 547772 - DNA, 544 bp, Homo sapiens
gttasttacagtttcttgacatgttgccatcaaaatctctctgaggcacatgacaattagcatatatataaacttaatttcttttaataaaagacactaataaaatactttcacaagtcacatgtaaaactctgagtatttgcaaatagcagataacgtgtatcctaataatactttcttacccaatttacaagtataatgtttgtgtaaaagagaatgctattaagcagcaaatgtaaatttcttctatattttgatgggttaagaagccacttagaaagtatttgctaggcatatgggttgtgaaactctcaaggccattagatgaggaggaagtaatgaatggtatttctgcttggataggatatttccttattttgcttctctcaagtcagatttaaaaatttcatcagatgagatcgagcgcattcaggggaaaaaggagaattttagaccaatatccctgatgaacatcgatgcaaaaatcctcaataaaatgctggcaaaccgaatccagcagcacatcaaaaagcttatccaccac

SEQ ID NO: 547773 - DNA, 544 bp, Homo sapiens
gttagttacagtttcttgacatgttgccatcaaaatctctctgaggcacatgacaattagcatatatataaacttwatttcttttaataaaagacactaataaaatactttcacaagtcacatgtaaaactctgagtatttgcaaatagcagataacgtgtatcctaataatactttcttacccaatttacaagtataatgtttgtgtaaaagagaatgctattaagcagcaaatgtaaatttcttctatattttgatgggttaagaagccacttagaaagtatttgctaggcatatgggttgtgaaactctcaaggccattagatgaggaggaagtaatgaatggtatttctgcttggataggatatttccttattttgcttctctcaagtcagatttaaaaatttcatcagatgagatcgagcgcattcaggggaaaaaggagaattttagaccaatatccctgatgaacatcgatgcaaaaatcctcaataaaatgctggcaaaccgaatccagcagcacatcaaaaagcttatccaccac

SEQ ID NO: 547774 - DNA, 544 bp, Homo sapiens
gttagttacagtttcttgacatgttgccatcaaaatctctctgaggcacatgacaattagcatatatataaacttaatttcttttaataaaagacactaataaaatactttcacaagtcacatgtaaaactctgagtatttgcaaatagcagataacgtgtatcctaataatactttcttacccaatttacaagtataatgtttgtgtaaaagagaatgctattaagcagcaaatgtaaatttcttctatattttgatgggttaagaagccacttagaaagtatttgctaggcatatgggttgtgaaactctcaaggccattagatgaggaggaagtaatgaatggtatttctgcttggataggatatttccttattttgcttctctcaagtcagatttaaaaatttcatcagatgagatcgagcgcrttcaggggaaaaaggagaattttagaccaatatccctgatgaacatcgatgcaaaaatcctcaataaaatgctggcaaaccgaatccagcagcacatcaaaaagcttatccaccac

SEQ ID NO: 547775 - DNA, 544 bp, Homo sapiens
gttagttacagtttcttgacatgttgccatcaaaatctctctgaggcacatgacaattagcatatatataaacttaatttcttttaataaaagacactaataaaatactttcacaagtcacatgtaaaactctgagtatttgcaaatagcagataacgtgtatcctaataatactttcttacccaatttacaagtataatgtttgtgtaaaagagaatgctattaagcagcaaatgtaaatttcttctatattttgatgggttaagaagccacttagaaagtatttgctaggcatatgggttgtgaaactctcaaggccattagatgaggaggaagtaatgaatggtatttctgcttggataggatatttccttattttgcttctctcaagtcagatttaaaaatttcatcagatgagatcgagcgcattcaggggaaaaargagaattttagaccaatatccctgatgaacatcgatgcaaaaatcctcaataaaatgctggcaaaccgaatccagcagcacatcaaaaagcttatccaccac

SEQ ID NO: 547776 - DNA, 601 bp, Homo sapiens
taaacacacattccttttctgaattttgtgatgtttctaatagttgttggctttcctacatttgtaacttgtgatttttcctttcacatgtaagtttgtataacttttttttttgagacagagtttcactcttgttgcccagattggagtgcagtggtgccatcttggctcactgcracctctcgaactcccgacctcccgggttcaagcgattctcctgcctcagcctcctcagtagctgggattacaggtgcccgccatcgtacctggctaattttttttgtatttttagtagagacagggtttcaccatgttggccaagctggtctcgaactcctgacctcagatgatctgcctgtcttggcctcccaaagtgtaagtttgtataatttttaatgattttccttttaagtctcccccacccccaattatattaagttggtgcaaaagcaatggcggtttttgctgtaattaaaagtaatggcaaacccgcaattacttttgcactaacctaatagaagccgcaggccctaccattaaccctggtttgggagggtaacgtgataaagaagtcatatgtaaaaggcacttggaaaaacaa

SEQ ID NO: 547777 - DNA, 601 bp, Homo sapiens
taaacacacattccttttctgaattttgtgatgtttctaatagttgttggctttcctacatttgtaacttgtgatttttcctttcacatgtaagtttgtataacttttttttttgagacagagtttcactcttgttgcccagattggagtgcagtggtgccatcttggctcactgcaaccyctcgaactcccgacctcccgggttcaagcgattctcctgcctcagcctcctcagtagctgggattacaggtgcccgccatcgtacctggctaattttttttgtatttttagtagagacagggtttcaccatgttggccaagctggtctcgaactcctgacctcagatgatctgcctgtcttggcctcccaaagtgtaagtttgtataatttttaatgattttccttttaagtctcccccacccccaattatattaagttggtgcaaaagcaatggcggtttttgctgtaattaaaagtaatggcaaacccgcaattacttttgcactaacctaatagaagccgcaggccctaccattaaccctggtttgggagggtaacgtgataaagaagtcatatgtaaaaggcacttggaaaaacaa

SEQ ID NO: 547778 - DNA, 601 bp, Homo sapiens
taaacacacattccttttctgaattttgtgatgtttctaatagttgttggctttcctacatttgtaacttgtgatttttcctttcacatgtaagtttgtataacttttttttttgagacagagtttcactcttgttgcccagattggagtgcagtggtgccatcttggctcactgcaacctctcgaactcccgacctcccgggttcaagcgattctcctgcctcagcctcctcagtagctgggattacaggtgcccgccatcgtacctggctaattttttttgtatttttagtagagacagggtttcaccatgttggccaagctggtctcgaactcctgacctcagrtgatctgcctgtcttggcctcccaaagtgtaagtttgtataatttttaatgattttccttttaagtctcccccacccccaattatattaagttggtgcaaaagcaatggcggtttttgctgtaattaaaagtaatggcaaacccgcaattacttttgcactaacctaatagaagccgcaggccctaccattaaccctggtttgggagggtaacgtgataaagaagtcatatgtaaaaggcacttggaaaaacaa

SEQ ID NO: 547779 - DNA, 672 bp, Homo sapiens
tgcaaatagttcctatatgttacatagattgatcatcttttgatctacccctttgagaaaagtatatttgtaccaatttacatttgcttttactaaaagaacctatatttacatagaggtacatgattgtgtggcaaagttattaacaggtccaaatcccagttaaacaacataattgtatggatataatattgacttttcatttatttatgtatttatgtatttaattttaattttttaaatttttaaaattttactctaagttctgggagacatgtgcagaacgtgcaggtttgtcacatagttatacatgtgccatggtggtttgctgaacctatcaacccatcatctaggttttacgccccgcatgcattaatatttctcctactgttctccctccccttgccccccactccctgacaggccccagtgtgtgatgttcctctccctctgtccatgtgatctcactgttcaactcccatatatgagcgagaacatgcgatgtttggttttctgttcctgtgtttgctgagaatgttggtttccagctgcatccrtgtccctgaaaaagacatgagttcattattttttatggctgcatagtattccattgtgtatatgtgccacattttctgtatccagtctatcattgatgggcatttgagttggttc

SEQ ID NO: 547780 - DNA, 619 bp, Homo sapiens
cacacacacacatacacgtaacatatttgagcaattgtatctataaggacagttattaaaggtggaactactatgctgaagagtatgcatacttcaaaatttggaaaatatttacatattcaatttagtcacctctgtttgttgtcatgtgtagaaaggcctgctttactcccaaaattcaaagaaataaacaaaaaactctattctaatatttaatgactccaatttatatgtttgattctttgaagcaggttgaatttattagagacaaagcaataagggagtaatacagatttacagtgagaaaatcaaggcttaaatagctacatactactttctcatggtcatgagtctccagatacctwttaaggtaacataaatgctgtgtctgagaatatcttaagcacaaatgacatatttttaaaaataatagccttaatattttccatgaaatttctatgttctagatattttggttgttcatttatcctggccctttaatttaaaaatgtgaaataattcataaaagaaactttatctttttggaattaatgatttttgagacatagataataaagtgatagccaaataataatattccttaaaggagacaaagata

SEQ ID NO: 547781 - DNA, 974 bp, Homo sapiens
tggtagagagatctccttattaacttgagaccaatagaatacactcagtggggcaccacgtgccaggcaaaggcagttgattagagattgatgaaggtgcagattcctgcctttcaaagtataacttgagaactaatgtaaagaaacctggggtcagaggaggccaggtgtgtgacttttgactggcctcttaacttggctgaaactcaggttcctcagaagagaaagagagataagaaaaacacctttcctgcctcgtgagaattttatggcaatccagagataatgtgcctggaagtgctttgtaaattgaaaatcacccatcagatatcaaagactattgctcatattcttccatttgtattatcaggttctgcttgctttgcctgattttctttctcttatatgctttaggtgatgttctttatataaaaggtagaagttgtactggcaagtgcctccattttatagtgttttcacatgtacaggcctgccctgtataccccagttaccaatgtcccagcagaaattttcctcttggatttattacccaaacttagcaaaacgtacatattcctcaatagttttttgtttgtttcttttctcttattatctcttcttcatttctgagtgactcaatagtttttttggctgatgtttacattttaaaaatgtatattatatccccccaaatcaatgaaccaygttaacaaaacagcataaaagagaagtattgaattagcatttctaatactattggttgtcttatcccattttatgttgttataacataataccacagactggagaatttataatgaaaagtaatttatttggctcacagttctggaggatgggagatccaagagcatggtgtcagcatctggcaaggatcttcattctgcatcatcctatggcagaaggtggaagagcaaaagagcatacacatgagtgtgcatgcttattggaagtta

SEQ ID NO: 547782 - DNA, 604 bp, Homo sapiens
aacagcgtgctggggaagcgttccgcaggccatctgcctgcagcatgtagttcacaccctccatggagctgccctttggggaggtgaggggctgaaagcaagcgtgtgctcccttggccaaacccaaggaggggaagcgctgtcagctggccaagatgtgagccaacagggcacgtagaaggatatccctcccaatctactgcccccaagggagcccctcttttaattttgtgcctgctggcttggagtgatacattattcttggagaattgtccagcatagcgggaggaaggatgcagaaacaggggcaagtggttgaacctgaaaattcccagttttccttcattgcagcattgaatgaggggctgtaagtagccacaagagcaggtccccgtgtggttaaaggcccyggcattcacttaacaggcgaatttccaggcaacattctcttactcagcacttttaatcaaaataatcagtccagtgtctgaggaggaatgaatagggcagtgtaggaatcccctgttgctaatgaaacatttaaaaatccaggacagtaatggcctgtgctatttaatacagaggagatgcttaccacagcccc

SEQ ID NO: 547783 - DNA, 984 bp, Homo sapiens
gtaaaattgcctgaagaaaaggagtgggaaaatagatcagattttgatttgctttatttcatgtattattgagtagatacataaaaatatatgtaagttgaatttctataatgtggactttctttctcagttaacttactttggagaattacaagcttaraggaatcaatgttacttcaatagaaaacagatcctaagagttgggtgtgtaattaataattcataaaaatatatacatttttaggtaggtatctatggcttcaacatctatttaagtatcttattattatgtactcttaagttttgaagaaggaattataaaatttataattttaattgtataattttgtggtcaaagaatatgttgtatctaacatattaatcattctttgggatgtgttaagaactttgtggtgttgtatgtgtccaatttgtaaaatattccaaatgtgcttagaaatttgaatattatgtattcttgactttctgaaaacagggtcatttttctctgctaaacttattacttgcataatcaatttgtcagatttattctctaagtcaatgtccctcatgattcccatgatgttttagcatctggtttgtgtatttactgtgttctgtgacttttctatgcttcttattttctcttttcctgacttccattgtattaatattttattcactccctccatccatactatattccaaggacatactcctcctaatcttttataggctatgtttataatttaatcttcatattaagttaaacaagttttaaaattttgtttttctttttaaaggatgttgggagacaacttgcatcatgatatattaaaataaacaatatactcactttttaacaatacaatattgatgcagacatcaaaacatagatatgtgaggcacaaaggaaagttcaggaaaaaaacactgcatatatggaaatgtaatatatcaaaaaattatacttcaattacttca

SEQ ID NO: 547784 - DNA, 984 bp, Homo sapiens
gtaaaattgcctgaagaaaaggagtgggaaaatagatcagattttgatttgctttatttcatgtattattgagtagatacataaaaatatatgtaagttgaatttctataatgtggactttctttctcagttaacttactttggagaattacaagcttaaaggaatcaatgttacttcaatagaaaacagatcctaagagttgggtgtgtaattaataattcataaaaatatatacatttttaggtaggtatctatggcttcaacatctatttaagtatcttattattatgtactcttaagttttgaagaaggaattataaaatttataattttaattgtataattttgtggtcaaagaatatgttgtatctaacatattaatcattctttgggatgtgttaagaactttgtggtgttgtatgtgtccaatttgtaaaatattccaaatgtgcttagaaatttgaatattatgtattcttgactttctgaaaacagggtcatttttctctgctaaacttattacttgcataatcaatttgtcagatttattctctaagtcaatgtccctcatgattcccatgatgttttagcatctggtttgtgtatttactgtgttctgtgacttttctatgcttcttattttctcttttcctgacttccattgtattaatattttattcactccctccatccatactatattccaaggacatactcctcctaatcttttataggctatgtttataatttaatcttcatattaagttaaacaagttttaaaattttgtttttytttttaaaggatgttgggagacaacttgcatcatgatatattaaaataaacaatatactcactttttaacaatacaatattgatgcagacatcaaaacatagatatgtgaggcacaaaggaaagttcaggaaaaaaacactgcatatatggaaatgtaatatatcaaaaaattatacttcaattacttca

SEQ ID NO: 547785 - DNA, 984 bp, Homo sapiens
gtaaaattgcctgaagaaaaggagtgggaaaatagatcagattttgatttgctttatttcatgtattattgagtagatacataaaaatatatgtaagttgaatttctataatgtggactttctttctcagttaacttactttggagaattacaagcttaaaggaatcaatgttacttcaatagaaaacagatcctaagagttgggtgtgtaattaataattcataaaaatatatacatttttaggtaggtatctatggcttcaacatctatttaagtatcttattattatgtactcttaagttttgaagaaggaattataaaatttataattttaattgtataattttgtggtcaaagaatatgttgtatctaacatattaatcattctttgggatgtgttaagaactttgtggtgttgtatgtgtccaatttgtaaaatattccaaatgtgcttagaaatttgaatattatgtattcttgactttctgaaaacagggtcatttttctctgctaaacttattacttgcataatcaatttgtcagatttattctctaagtcaatgtccctcatgattcccatgatgttttagcatctggtttgtgtatttactgtgttctgtgacttttctatgcttcttattttctcttttcctgacttccattgtattaatattttattcactccctccatccatactatattccaaggacatactcctcctaatcttttataggctatgtttataatttaatcttcatattaagttaaacaagttttaaaattttgtttttctttttaaaggatgttgggagacaacttgcatcatgatatattaaaataaacaatatactcactttttaacaatacaatattgatgcagacatcaaaacatagatatgtgaggcacaaaggaaagttcaggaaaaaaacactgcatatatggaaatgtaatayatcaaaaaattatacttcaattacttca

SEQ ID NO: 547786 - DNA, 679 bp, Homo sapiens
tgaagcttggtttccaagtgaccatcaacagagaaagaattctcttgatttaaccatttacctaagccttaactgatctttcatctcctaaatactattcagcctttatgccttttaccttccatcaagcaggtagagtttattggtcagaattactctgttgaaaacatgggcatggacaggctggaaacaaagacaaggggcagccttctgcccttgtctaaggagaatgcccagactctcagccctttgcagacctgactctgaatctgaaaatgtgctcagcttcttttattcttgcctaaggctgtctaagggaagctggcaacaacagctgatgtggaaggtcaataagtgtgtcaataaacccctgcccagactctttttttttttcccacctgcaaaattgctttggtcagcagagaccccgactgaaaggggccctctgtctttgggtcatgcagtttctgttctcacccctggacaagactaactccaaagaaasagaatcaaaacctaatcataagtcacactggaggctttacataaaactggaaaataatcagatggagtcgagcatctctcagtcagacatttgcttggggcccactaacatatcaatgtgatggcctctttcaccctgtgctggatgctgcaggcttctagagagcagcttggg

SEQ ID NO: 547787 - DNA, 549 bp, Homo sapiens
aactaaaataaaattacaacttactttcttctatttgtcctttttgactatttctctgggaattttagattatgtccaaattggacaagaaggcctatgcctcaaaattgacttagaaaacactctttttaaaaaattttaagttttattttgggttcgggggtatttgtgaaagtttgttatatgcatatattatgtgacactgaagtttagggtgcaattgagcctatcacccaggtagtgagcacagtacccaataggtagtttttcagcccttgccctcctttgcctctcgtctagcagtccccaktgcccattgttgcagtctttatgtccacatgtacccaatgttttgctgccatttttaagtgataacatgtggtatttggcttagaatgaacacttaaccaatattatggcggagccaagggataatgggagacagttctctgtgagtctcttgtgtctctgcaagtcttggaagcagaagcactgactatcttcaactacaaactacctttccatgcaagtttatataggaatgtctgt

SEQ ID NO: 547788 - DNA, 831 bp, Homo sapiens
catcttttatgttcaaccccactgcactgaatcaaaaaaatacaaagcaaaactatatactgaacaactgtggctatctttgaacttctttagttaacagaccttacaggcttccagcagcgtaayagtaagttcccttcaagaaatcatagtatcacttcataaaacttaatggcatcccaacttcttttgttatgcaggacttcctagagagataaatgctattagagaaaagcacgcattaatagttcctttctctttttctaaatgtaaacccagcatctatgcctcacttctttttttctcagctatagcaacttccagtggacggctgggtcaagttaaagctttagcatcaatgtactctggcacccacttggctcagagatactttctatgtacttttattattattattaaaaaataaaagagagaaagataaagtgagaatcactgtgattcatgaaccatagctaggtggctgatctgcttttcatttaaaatcactatttgtattaatgtatccacactttggaacataaatcttactgaaggtaacagcatgctgagatatactgtctcatcccaactgaagcctaatacatgatatgaattatctgacagctggttaccctctagttctaatccctgatagtttaaatattcaagctgaataacctactggtggaagtatccttccaatagaataaagaaagaagaaagacaagtgcaaaaactcgagtgtgttacaaaagtttctctcacaaaagtattagagatcttaaattatcatagaaatgaccattactactaaatatactacgttcaaaa

SEQ ID NO: 547789 - DNA, 831 bp, Homo sapiens
catcttttatgttcaaccccactgcactgaatcaaaaaaatacaaagcaaaactatatactgaacaactgtggctatctttgaacttctttagttaacagaccttacaggcttccagcagcgtaatagtaagttcccttcaagaaatcatagtatcacttcataaaacttaatggcatcccaacttcttttgttatgcaggacttcctagagagataaatgctattagagaaaagcacgcattaatagttcctttctctttttctaaatgtaaacccagcatctatgcctcacttctttttttctcagctatagcaacttccagtggacggctgggtcaagttaaagctttagcatcaatgtactctggcacccacttggctcagagatactttctaygtacttttattattattattaaaaaataaaagagagaaagataaagtgagaatcactgtgattcatgaaccatagctaggtggctgatctgcttttcatttaaaatcactatttgtattaatgtatccacactttggaacataaatcttactgaaggtaacagcatgctgagatatactgtctcatcccaactgaagcctaatacatgatatgaattatctgacagctggttaccctctagttctaatccctgatagtttaaatattcaagctgaataacctactggtggaagtatccttccaatagaataaagaaagaagaaagacaagtgcaaaaactcgagtgtgttacaaaagtttctctcacaaaagtattagagatcttaaattatcatagaaatgaccattactactaaatatactacgttcaaaa

SEQ ID NO: 547790 - DNA, 1222 bp, Homo sapiens
gttgattctccatgtccagaactccttctgtaaattggccttcacaaatctactgtaagcaagagttctcccttctcctcattttttgtttgtttaatatccaatatggactcatgggtttctagtttttcattggtctgtgctctcttaatgtctttcattattttggtattcaaatcgtcttatttttggctatttagagctccttcaggctacatcccatgcactgcgacagtctccatcagcctttagagtacttcctcactttctgctatracaagatatcccaggatgatcttttgtctattctgtcccagcctataatcagccatttcaagaaatagctctggttctttttaggggaaagtgacaaattctattatgagaaactaagattggagttccagttatgcccattggtactggattgtctttcttcctaagttcactttgtggacagaaatagaaagtttgtttgtttatacatatgcatatatatgcgcaaaaatacatatacatagtatcaaactgatattaaactcaattccaacacgtcttctcagagacttattcttatgtgtccccttctatattgtgtatcatatattctgtagtgaggactgtggctccccaaatctcattacatttactcattttctcaatctacaatacaaataaatttatttttaagtggattcaaccatatcactaccaaatataagttcactgaaaagaattcaggaaacgttttcattactcccccaccaaatttatcctactcagaaatgagggcatacagtaaaattctgtgttcttggattgccttgcttcttttgtttttgttttttcaaagtggccatgttagtcatttgaaattcatttatttctttcagtttgataactgttttcagttttactttatcttcccattattgttgatatattggaatatgtatacattaacaacttccaaaagccaaaaactacaggaaaatatataattacgaaaaatatagttatacaaatatatagagtctctgacatatccttcccatcccattatctacttgcatgcaactttccattttcctgttttttcttacctacataaaaagtagcattctttatatgcatttttgtccttatatcttttcattgaataatatcacctgaagttattccatattggtccatagactttcttcattctcttacaccttaa

SEQ ID NO: 547791 - DNA, 1222 bp, Homo sapiens
gttgattctccatgtccagaactccttctgtaaattggccttcacaaatctactgtaagcaagagttctcccttctcctcattttttgtttgtttaatatccaatatggactcatgggtttctagtttttcattggtctgtgctctcttaatgtctttcattattttggtattcaaatcgtcttatttttggctatttagagctccttcaggctacatcccatgcactgcgacagtctccatcagcctttagagtacttcctcactttctgctataacaagatrtcccaggatgatcttttgtctattctgtcccagcctataatcagccatttcaagaaatagctctggttctttttaggggaaagtgacaaattctattatgagaaactaagattggagttccagttatgcccattggtactggattgtctttcttcctaagttcactttgtggacagaaatagaaagtttgtttgtttatacatatgcatatatatgcgcaaaaatacatatacatagtatcaaactgatattaaactcaattccaacacgtcttctcagagacttattcttatgtgtccccttctatattgtgtatcatatattctgtagtgaggactgtggctccccaaatctcattacatttactcattttctcaatctacaatacaaataaatttatttttaagtggattcaaccatatcactaccaaatataagttcactgaaaagaattcaggaaacgttttcattactcccccaccaaatttatcctactcagaaatgagggcatacagtaaaattctgtgttcttggattgccttgcttcttttgtttttgttttttcaaagtggccatgttagtcatttgaaattcatttatttctttcagtttgataactgttttcagttttactttatcttcccattattgttgatatattggaatatgtatacattaacaacttccaaaagccaaaaactacaggaaaatatataattacgaaaaatatagttatacaaatatatagagtctctgacatatccttcccatcccattatctacttgcatgcaactttccattttcctgttttttcttacctacataaaaagtagcattctttatatgcatttttgtccttatatcttttcattgaataatatcacctgaagttattccatattggtccatagactttcttcattctcttacaccttaa

SEQ ID NO: 547792 - DNA, 776 bp, Homo sapiens
aaaattgatttttccctaaaaaacactgagaacaaaattttcattggtgaatgatgctctagccaaaatgagggcytataaagtcattggttagggcaaaatatgaaaagaccatcaatctggaacatattcagtaccaaataatacaatccattcattctttcctctttttttcttgtttacataaaactaaaaggatatcaaatttagtgagttgaagaactatgctcacacatttccttttcattgcatggtctatatcagaaaagagattgaggcaaaaaccaatttgagagggtggaaatgttcatacagagcacgcatgtatgaaaatattgaacgtaaagcttgatttttatttttacttatgcctgttttgtttttacagatcagtattgggataagaaaaatcaactcagtataactgtcaaaaccaaagagattgagttggaacaactatttgaaacttaaataaaaaagttaccattttgtagtaaaagaaaaagcaacatatattgtagatcaatctgttttataaatcaggggtctaatgtaccaaaattaaataaccagagaataaatttctggtgctttaaaaattatactctcttttatatttaagaaactaatgttcagcaagcaaataattcaggagatatttatcaaaacaactcggtttaaggtctggagaaagtggtaggagtgatatttaagaaaggagagtaaacacaaaactagcagaacagatggcactatctaaatatctgtccccccag

SEQ ID NO: 547793 - DNA, 673 bp, Homo sapiens
agagacagagagagaatggtctcaagctttttgtttgaacatcaaaatgattattgccttttgaaatactcatggactgaggcagagaaaggagggatatgccatttccaattctaccactactcacagcttaactctcttcttatcttctgtcatttgaatttttgaaatatgaaggtcatttctaacaactgtggccctattcattgaaataaatattcctaactggtttgatgtcaatgagcgaagctttctaagctttgcgttaaagacccttggcattggtgaaaggagatgtaggcttgtattactattttttccaaagccatatgaataagcagctctgcacttggagtaagcaaaagcttgtgatcatgtgttttgatgcaagtgaagaggctacaatcagaagaaaaccaaaggacaaagaaggaccaaaccaaaggacaagcaccagccttgctttttgatcattaatrttactgcctttttttctcccttttaaataatgatttttcaaacaggctgtgatggtagactatattctttgaaactgtatttataccattttgtcattgacactttctattctgcctaagaaaggtaaatgttacccagaggagaattcttttaaattgaggtttttctatttgaggaagaagcctattattga

SEQ ID NO: 547794 - DNA, 551 bp, Homo sapiens
attgaaaaataagatagcaaaggtacaataatggtaagagttctgattatattagaggacaaagtggttcatgaatacatgatttatgacatctgcaattggttatagcagtctctatggacctacaatatctagtattttcacagttgtgtatagtgtaaagtaagggttagtacaagttctctaaaaggtcagatagtaaatattggaggctttgctggccatatattctttatagcaactwctcaactttgccattgtactgtaattgtagccacagacaatatataaacaattgagcagggtgtattccaataaaactttgtattgatacaaaaatttgaattttgtataatttttataaatcacaaaacatttcttttgtttttttttccaaccattttaaaatgtaaaagaaaaaatatcttaataggctgtacaaaaacagatggctggctagattttccctgtggttcagagtttgctgatcccagacctataactttttactcaatcaatgttagaaaagctggagcaaacatgattggggc

SEQ ID NO: 547795 - DNA, 551 bp, Homo sapiens
attgaaaaataagatagcaaaggtacaataatggtaagagttctgattatattagaggacaaagtggttcatgaatacatgatttatgacatctgcaattggttatagcagtctctatggacctacaatatctagtattttcacagttgtgtatagtgtaaagtaagggttagtacaagttctctaaaaggtcagatagtaaatattggaggctttgctggccatatattctttatagcaactactcaactttgccattgtacwgtaattgtagccacagacaatatataaacaattgagcagggtgtattccaataaaactttgtattgatacaaaaatttgaattttgtataatttttataaatcacaaaacatttcttttgtttttttttccaaccattttaaaatgtaaaagaaaaaatatcttaataggctgtacaaaaacagatggctggctagattttccctgtggttcagagtttgctgatcccagacctataactttttactcaatcaatgttagaaaagctggagcaaacatgattggggc

SEQ ID NO: 547796 - DNA, 551 bp, Homo sapiens
attgaaaaataagatagcaaaggtacaataatggtaagagttctgattatattagaggacaaagtggttcatgaatacatgatttatgacatctgcaattggttatagcagtctctatggacctacaatatctagtattttcacagttgtgtatagtgtaaagtaagggttagtacaagttctctaaaaggtcagatagtaaatattggaggctttgctggccatatattctttatagcaactactcaactttgccattgtactgtaattgtagccacagacaatatataaacaattgagcagggtgtattccaataaaactttgtattgatacaaaaatttgaattttgtataatttttataaatcacaaaacatttcttttgtttttttttccaaccattttaaaatgtaaaagaaaaaatatcttaataggctgtacaaaaacagatggctggctagattttccctgtggttcagagtttgctgatcccagacctataactttttactcaatcartgttagaaaagctggagcaaacatgattggggc

SEQ ID NO: 547797 - DNA, 1398 bp, Homo sapiens
ctttccagggatataatccaaaagaaaaaaaatagctatatgtacaagacatccagtacagcactattacagcaagaacctagaaatgaccagcaagactgagggagttacctaaaaaatggaataccaacttaaaaaacattttctaagcagcgaatgtggcaaatttaagctgtacgaaaaatatttacaatgtgaaaagagccaaatttaaaaaagatatagtcattatagtggtataatatatgcatataacatatgcatacaatagaaaaaatatagaccacaaatttttttcatttacaatttccctcaaatgtctttgaggatttattaaaataatacactataaaaataaaataggacaatatatttattacagaatattcagataatgacattaagtaacagtctacaagttgatcttagtgtcctacttccatttttatcagaaagaaaaaataatggctttttatgaattcaaatttatgtcaataagatctttatacataaagaaatgcagttctttttatattcactgaaatataaagtgtaacatgcaaattaccataaaatgtaaattgggataaagtcagaactgctatgatgtcctttattctacttattaactatacttttaaaatcctaaaatataggaagggataaacaccacagaatgtaagtttaacctaaacttttaaggcactgatagtttggatcagagaatttattattggatgatatttggtctttctatagttcctcattgtttcgttcatgttactgtgctctttccaactagactgtaaattccaaaatatcatgaactatgctttttatttcccacgtatccctctgcataacaaaaatctgagcaagaaatacctgctaattaactgatgaaatttattttggtaatactgaagttttggagtattggaccttggaacttgcttgggtgtgcctcttctgataatcacttctttgcattatctttaaattgctcctgtgctttccgccatattcactcagccatgtagtattatgtcctgattctaaactataaaaaygactctgactctgcggtggttctccttatatcatgtgacttgccccatccttacctaattaatcaccagtatgattacgtgttaaatattaataacctatagattacatataattcacaagaatcaatatctcgctaaatatcaaaacagcaatgtatcatgtttttaaaattgatttaagtaaattatctcttaaataggcagagttcacctaaactcaaaacactaccatagatttgtagaaaactcaaactaccacagatttgctatttattaatcaatgtggcatagttaagtttctctaaatgtacaattcagtctaaaagct

SEQ ID NO: 547798 - DNA, 573 bp, Homo sapiens
tacctttgcaaataccaactcacagtaaaagacaaagattctatctagaccttccttctaaccattatacccagagggctgagacttccttgctacacccagtcttctataccttccgcccacacccaggtccttcagwagcatatattaccattttcagcatctacatactagcaggctagaaatagcagaaactgtggcttctgaggctgtggaatttttgtgtatgggatgatggcagttgtcatatccctgttctacagagtaacgagggtatatgtaacgttgggaaatacatcttagacaatgcattctcagattgttgttcctgcgattttgccttgcatgcataggagcatctaatatacaggatcggtgctgttactggagtgttacatcaaaaaattgaagttcaaatattattcatggttggtgttaaaagctgccaaataatactttactttgctgccaaatttctgagttcttttatggaggtaaaatattgaagagtctttctgccagtctcagccctctgagttacatgccccccaacccatcccactcccatatttc

SEQ ID NO: 547799 - DNA, 1130 bp, Homo sapiens
tttggagattttatgaaaagataattgaattagatgggagctgagagaaaaggagaataggggaaggaatagtatttaccgagtattttccaagagccaggcactgttgctttacatgcattattacttcatttaacccttaaaacaaccacactggccgggcgcagtggctcatgcctgtaatcccagcactttgggaggccaaggcgggtagatcacaaggtcaggagatggagaccatcctggccaacatggtgaaactctgtctctactaaaaatacaaaaattagccaggtgtggtggcacgtgcctgtagtcccagctacttgggaggctgaggcaggagaatcacttgaacctgggaggcggaggttgcagtgagccaagatcgcgccactgcactccagcctggtgacagagccagactctgtcaaaaaaaaaaaaaaaaaaaaaaaaaaacaacaaaacacacaaataaccacacaagttaggtactgtttatctcatttgacagataaagaaactgaagctcagaaaccttgagtgatttgcccaaagtcacacaaatagtaaaggacaaggtgacctcataatatacagtcttcaccatttctatctctactctattggaagcttagtttgtcctccaagttgacagtgttttcacgtgttccataaagcaacagaagtttgcatttgaggggaaaatctccaaatgatctgctcttagctactgagtaaatcatcaacgcaatggcattcttggggctgagggttttaaatgcaacaagcagtgggaagaggtcatcaagaggatccctaatgctcaccgacaagaggaaaaggacttccatggggaggctgcaggamtgctgcagggataaggagggcagcaaggtccgatttaaggaagtgacttttatagtaacaagaagagagagttcgtctaatggtttgtatgaaaggtaaacccttggccaggcacagtggttcgcgcctgtaatcccagcactttgggaggccgagatggacagaccacctgaggttgggagttcaagaccagcctgaccaacatggagaaaccctatctctactaaaaatacgaaattagccaggcgtggtggtgcatg

SEQ ID NO: 547800 - DNA, 1130 bp, Homo sapiens
tttggagattttatgaaaagataattgaattagatgggagctgagagaaaaggagaataggggaaggaatagtatttaccgagtattttccaagagccaggcactgttgctttacatgcattattacttcatttaacccttaaaacaaccacactggccgggcgcagtggctcatgcctgtaatcccagcactttgggaggccaaggcgggtagatcacaaggtcaggagatggagaccatcctggccaacatggtgaaactctgtctctactaaaaatacaaaaattagccaggtgtggtggcacgtgcctgtagtcccagctacttgggaggctgaggcaggagaatcacttgaacctgggaggcggaggttgcagtgagccaagatcgcgccactgcactccagcctggtgacagagccagactctgtcaaaaaaaaaaaaaaaaaaaaaaaaaaacaacaaaacacacaaataaccacacaagttaggtactgtttatctcatttgacagataaagaaactgaagctcagaaaccttgagtgatttgcccaaagtcacacaaatagtaaaggacaaggtgacctcataatatacagtcttcaccatttctatctctactctattggaagcttagtttgtcctccaagttgacagtgttttcacgtgttccataaagcaacagaagtttgcatttgaggggaaaatctccaaatgatctgctcttagctactgagtaaatcatcaacgcaatggcattcttggggctgagggttttaaatgcaacaagcagtgggaagaggtcatcaagaggatccctaatgctcaccgacaagaggaaaaggacttccatggggaggctgcaggactgctgcagggataaggagggcagcaaggtccgatttaaggaagtgacttttatagtaacaagaagagagagttcgtctaatggtttgtatgaaaggtaaacccttggccaggcacagtggytcgcgcctgtaatcccagcactttgggaggccgagatggacagaccacctgaggttgggagttcaagaccagcctgaccaacatggagaaaccctatctctactaaaaatacgaaattagccaggcgtggtggtgcatg

SEQ ID NO: 547801 - DNA, 1431 bp, Homo sapiens
gcgttgaaacatattccaacatattgcaacagagaatgtctcaatctaaaggtcatactttactttgcaaagacccagtgtgaaggggttgtgtgtgtgtgtgcgggggtggggggcggtggctgaaaggggaatgttatggaggtgagggtcaggagataaaacattcatagcatttaaaaacaaatttcacaacctcccctggctaattgcattctagtctcagtccagacagggcattacatgtgctgccagtctttgttccaagacttgctggaattccttgggatagggtaacagccccagggggtggggtgagggggaggaaggggagctgagcctatcctgcagaagctagragggtgtgaggtgatggggtgaggccaggatggagttcagaggcttcaactttcctgacttcttgttttctttgcttttagagtccttgggggaggaataaaaaaggacttagagatgtgaatcttgcttaaaataatcgttggcgattgcttgagtgcagaaaaagagtaaaaagattgaagaaacttggatcaaagctggtttcacaagtacaaggaaacagtggctgccaccatggcgtggtttaaaaaaatgcctggagaagggacattctggatccactgctatgggttcactactgaggatccttaacagagtgttctactttgactcagtagatacttactgaacagctattatgtttctagtaatatatggggcatggaaagttcaatacctatctttgagaagcttactccaatttaatagatgggcatataccccacaagccactaaagaaagggtttttgtgctttcaaattataacgtctctttcacattttctcttttgccttccttccctatggccattaaacttgaaccctccagtgcatgcgtgttacatgcagtactaagagtagttcaacagtcatctctgagaagggtgatgaaaacccaaagaaaaacctgcaacttctcaatgtctgttagtgcaaatgccccagaaaacaggatgcatttttggtcttgggaggtggaaggcagggctgagactacatactggtgtttggaatctaccttggcaaacaagtccactgagataggaaccttaattcaatcgggtggcacacaggaagtgctaggatgctgtgggacatccctggtctccccagaacacattgactcaatgtcattaggctgaatcctattaaactgctaatgtttaactgattttgaactacaaaaacggcaattttagaggcttcaacctaatataaagcagaatttgaaagagccataatgaaagcaaacacaatcaaaagaaggagagaaaaaaaatatggtcagatttaggaatttatacttcttaaacctccatttctctttcgtcttccctttgtccttcccaga

SEQ ID NO: 547802 - DNA, 624 bp, Homo sapiens
aaaaatgtgtgtttcatcccattagatggctcgcccgagaattctaacagtgatcaaaacaggaccctacatgccaattaactcatcaaccgacgtaatagtgaagaataagtagggacagctcttcctatggggcaccataacctctagaaagagttctctgtatctattcttacactttcactgggagtgactaatttgaattattaggtaaatagtttttactattgattactatatactcacactcattcactcaacatttcacaaatggtcaactcattctcaaactcagtaacaggactcaytttgtttaaatcggtgcaggaagcactgggaagatactcagaatcctgaaatgtaaggagatgaaaaaattttctatataaacggtgatggtatttatatgataaacgctactctattataggttgcctttacttgtgtgaactatgaatgaccaaaaactattaatgatgaaaatattaaccatttttgtctcctcaaagtttagcagaacttcttgtatattgtaattgttttataaatatttactggatgtatgaataaaaaaaaagaagaaagagtacaagcgggccaggcaaggtggctcacacctgtaat

SEQ ID NO: 547803 - DNA, 969 bp, Homo sapiens
gaattctagttccatcatttagtagttattttattgtgagatatttactctatttctaaatttcttctgtaaaatggggatgctgtcaggatctcatgggatggttggggagattaaataaaataggagatatgaatatgacacatgttctatgtcatttacagttataatacataagttatatttcagataagaggaatatgagttaaaagtgtgacattaattagcttagattagccatggaaggattcatgaaggaagcatattcagattttgattcaaaatatgaaagattaggatagatactgtatcagttagtgtaagtgacaagaatgaagaaaggaaaataaaaagcaaagggggcattatagaatcactataccttgcattgagaatatccacctaagacatatgatattgttctggggtcaccactaaaaaagaaccgttgggtaagaagcacaccccaaactctgatcacatctccagaatcacatagcgtctccaggatcagtaggactcaaacaatttactcacaaattacatccctctaagcattaacatgatccaaatgcgcatttctaacttccaagataccctctcttggaggaagcctaaacagaccttttcccaccctctctagcttaagccagctccttttataagtgtttattatgtgtttctgtagcaacctggtctttcctatgtgatagtgtttatcatggtatgctaaatttttcratgtacattttgttttttccaaaaaactataatctctttgaagtcaagaataatattttgtcaccatagggcaatacttagcacatggttgattatatttgtgttaaaaaaataaatgacatgtctgcttccttgtcatttaaatcgagattatattaccatgtgaatgctaagatccctttgtttcaacattctaatgaggtatcagtcacagagataatacacctt

SEQ ID NO: 547804 - DNA, 561 bp, Homo sapiens
tctttcagcccaaccaacacctacaacccctgaacacctatacaaaacactcagtctcacacatttcttattaaaaaactccaattcctccctggcataagactgctggctctgygtatccctcctctccacaacatacaatacaatccctgcctcagcctataactggacttccacccaagtaaactaccatcctgaaatcctcattaacaaccccctcaaactcgacatacaggcattaacagaaatctcctcccacccccattaggtagctagttcggtccagctgttacaaccttacatccctacttacgcatcctatccccctacagcagccctgataaacccatatcaggagccataacaactcacacaatcttatcctatccagccccactgtgcgtccaacgacatctaccctctggcattccccttggcaactataccctacaactcaaaccttccaccaaacatactagtctcaaagctgccaacaataaaaacaggcttggcttctctagctgcccccctggcccttgacacctgccacctccttaataa

SEQ ID NO: 547805 - DNA, 552 bp, Homo sapiens
tccagaatagtatatcctagaattgttacttttcaagggtttttatagttttaggttttacttttaagttctttagacctgtgcatttgtcttggattgtgagggctggagtcatatttaagaaagacttaatgaattgggcattgagcttggaagggtgsgaatgtgtcttcctctaagaagcacacatttctgcaaagtgatattagtttttttcattcttgggtgtgggagtgattgatatttctagagtgatattttgagacactttacataaataaatagaaattttacctgaggacccatgatcttgtgtacatgtaactaacacttcttaatgccagtggctgtccttcagtggaataacctgaaagaaaatatgcattaaaagcatataatttatatttaggaaaatcttcaaccttattttttctatttgaggtaggggttgatggcaatgtataagaactggactatagcttataggtttttaacagcctaacacctctctcctaatgtgagttgggtaagcactagagagttaagtaattt

SEQ ID NO: 547806 - DNA, 532 bp, Homo sapiens
tcctgttgtctgttccattctgccccttcttaaacctctcagtgtcttcccttcatccttacaataaaggccaaaaccctcaccatggccatgcctcctcactagcgtcaacttgtgcagtatcttcctggattttttcactccagccacactgactggccttcattttttccttcaagagtcttcaccctagcatttcctgctgccttaaactgctccttctgcttaatcttcactcaccctcagaaagcaaaggattggcttttcaaagaagtttttctgactctttcatattaacacaggctcttcctctgcaatggaccraatgtttctgtccccatcccccaaagttcatatgttgagatcctagactccaaagtaatgattttaggaagtgggtcctttgggagcatgtggatctcagacttccagcctccagaaatattaggtttcagctctgagggaaaaaaaagttgaaaacattttacttgttgatttaaaattatattacaaagctatactaaacaaaaaa

SEQ ID NO: 547807 - DNA, 1156 bp, Homo sapiens
cttgacccagacctttgggcctgtgtcatccagcctaggaagggaggttatatcctgtattaacttgacatgtctgataacatccactatactggaaggattaaacrctccctgcctccaggggaaccctagcatcctggtattccttggtcttgttctccacctctgtggaatcccatagaggagaagaacccaggagaagtatcaccttgaagttagggagccttgtctggggtactagggtggcctaaactgcaaaccaccctccaggacatgcactgtaaaggggaagaacaaaaatcatagtttggaacactggaattgggattttgcaggcacagcctaatcaggcagctacttagtccacctccacctccaccaagctctgcatctctgtcaacctccaggcagctacttagtccacctccacctccaccaagctctgtcaacttgagctgcagtaccatgtttcccttggattagagtgcagtgtttagtgaccacattgctctagtcagaaggggttgtcactccattagcaggccatcttgatgtcatttcttcagttgttttgtgagttggctccaccaccattcaacagctccattggcctgaggatgacaaagtgtatggaaagtccattgtattttaggagaatgcacacattgttgtgttatttgggtagtaaccattccttggtcagagtgaagttccgtggggtaatcaaaaacatgacatgtgttccttttaagagaagctatgttagtcccatcctccacatgagtgacatatatactttcccattccagacagcaagttattgtaatagtacttgtcctttaataatccatccacttagttgcctttcttctgacgagatgtctaggttgttggcaacagctgatgagtcagtgaaaatgtagcaagatagggtggtagaggaagtctatgtggctatcaccactgcatgtagtttggcccattgttcaaaatgcccatgtccagtctcagccatgagatacctatccactggctagatggctaccacagcccagggaaccctgcctgcttgccatttggaagagccatcagtaaacaagccatgtcatactgtcagtaggcacgtctcagtcttgggccccaggtatccatagga

SEQ ID NO: 547808 - DNA, 1090 bp, Homo sapiens
aagggtctttctgttgaatggacatgttttacatgacagcttaaggggtcaggtcttgagaagcctttcccacaaacactgcaagtatagggtttggtgatkcctccttcatgagacctcacacggtaagtcatccggtccttcctcttgaagcgctgattacaaataggacactcgaagggcttctcatctgaatgggagagcttgtgccgactgagatggtacacatctcggaaggccttcccacacatttcacaagcctggttcttcttgacaggcttgctgggtttcttgacagattgagtcaccggcagagctgtggtgctggcactgctactggggttggtgcccgaggaagatgtagtgactgttgacaagatgcctgcaatggtcgagaccacgaagtcggctgctgtccccagccatggtagaggttacgggaaaacaccgtgggggggtttttctttggctggaacacccaccttaatccttgtgtggcaggattcatggcccctcaggtgatagtttcccctgaaagctttactgcagtaagtgcaccaaccaaaacgaagttttgggtttttatttttttaatcccaatggcatcctttaatgtttctggtgaaccctgaggtttctgagttatcggtattggaagcaatggtttctgatcagggggctccacggcagagctcaggaggagcagcaagctgttctgtgctgcctgctgttggtgatgggaagctacctgggctgccattttaccaattcagatgtttgtggcaacataaagtatttttacagcattgctgaagctcactctcacacaagggtcacaccaggtccctgattcttgggtgaaatgctgtagaaccactgcaggaatcgctctctgaggattcctaggatccccacacttctacatgaagccttccaagggggaactgggttttcaaaaaatgttctctggaacaggaacgaggtccagttggcctccatggctgcgacggccgaccccccctcctccccactccccccgctcggggagcctcctcagccagaggaggtgacaacaaagcagtggcggcgg

SEQ ID NO: 547809 - DNA, 1090 bp, Homo sapiens
aagggtctttctgttgaatggacatgttttacatgacagcttaaggggtcaggtcttgagaagcctttcccacaaacactgcaagtatagggtttggtgattcctccttcatgagacctcacacggtaagtcatccggtccttcctcttgaagcgctgattacaaataggacactcgaagggcttctcatctgaatgggagagcttgtgccgactgagatggtacacatctcggaaggccttcccacacatttcacaagcctggttcttcttgacaggcttrctgggtttcttgacagattgagtcaccggcagagctgtggtgctggcactgctactggggttggtgcccgaggaagatgtagtgactgttgacaagatgcctgcaatggtcgagaccacgaagtcggctgctgtccccagccatggtagaggttacgggaaaacaccgtgggggggtttttctttggctggaacacccaccttaatccttgtgtggcaggattcatggcccctcaggtgatagtttcccctgaaagctttactgcagtaagtgcaccaaccaaaacgaagttttgggtttttatttttttaatcccaatggcatcctttaatgtttctggtgaaccctgaggtttctgagttatcggtattggaagcaatggtttctgatcagggggctccacggcagagctcaggaggagcagcaagctgttctgtgctgcctgctgttggtgatgggaagctacctgggctgccattttaccaattcagatgtttgtggcaacataaagtatttttacagcattgctgaagctcactctcacacaagggtcacaccaggtccctgattcttgggtgaaatgctgtagaaccactgcaggaatcgctctctgaggattcctaggatccccacacttctacatgaagccttccaagggggaactgggttttcaaaaaatgttctctggaacaggaacgaggtccagttggcctccatggctgcgacggccgaccccccctcctccccactccccccgctcggggagcctcctcagccagaggaggtgacaacaaagcagtggcggcgg

SEQ ID NO: 547810 - DNA, 1090 bp, Homo sapiens
aagggtctttctgttgaatggacatgttttacatgacagcttaaggggtcaggtcttgagaagcctttcccacaaacactgcaagtatagggtttggtgattcctccttcatgagacctcacacggtaagtcatccggtccttcctcttgaagcgctgattacaaataggacactcgaagggcttctcatctgaatgggagagcttgtgccgactgagatggtacacatctcggaaggccttcccacacatttcacaagcctggttcttcttgacaggcttgctgggtttcttgacagattgagtcaccggcagagctgtggtgctggcactgctactggggttggtgcccgaggaagatgtagtgactgttgacaagatgcctgcaatggtcgagaccacgaagtcggctgctgtccccagccatggtagaggttacgggaaaacaccgtgggggggtttttctttggctggaacacccaccttaatccttgtgtggcaggattcatggcccctcaggtgatagtttcccctgaaagctttactgcagtaagtgcaccaaccaaaacgaagttttgggtttttatttttttaatcccaatggcatcctttaatgtttctggtgaaccctgaggtttctgagttatcggtattggaagcaatggtttctgatcagggggctccacggcagagctcaggaggrgcagcaagctgttctgtgctgcctgctgttggtgatgggaagctacctgggctgccattttaccaattcagatgtttgtggcaacataaagtatttttacagcattgctgaagctcactctcacacaagggtcacaccaggtccctgattcttgggtgaaatgctgtagaaccactgcaggaatcgctctctgaggattcctaggatccccacacttctacatgaagccttccaagggggaactgggttttcaaaaaatgttctctggaacaggaacgaggtccagttggcctccatggctgcgacggccgaccccccctcctccccactccccccgctcggggagcctcctcagccagaggaggtgacaacaaagcagtggcggcgg

SEQ ID NO: 547811 - DNA, 1090 bp, Homo sapiens
aagggtctttctgttgaatggacatgttttacatgacagcttaaggggtcaggtcttgagaagcctttcccacaaacactgcaagtatagggtttggtgattcctccttcatgagacctcacacggtaagtcatccggtccttcctcttgaagcgctgattacaaataggacactcgaagggcttctcatctgaatgggagagcttgtgccgactgagatggtacacatctcggaaggccttcccacacatttcacaagcctggttcttcttgacaggcttgctgggtttcttgacagattgagtcaccggcagagctgtggtgctggcactgctactggggttggtgcccgaggaagatgtagtgactgttgacaagatgcctgcaatggtcgagaccacgaagtcggctgctgtccccagccatggtagaggttacgggaaaacaccgtgggggggtttttctttggctggaacacccaccttaatccttgtgtggcaggattcatggcccctcaggtgatagtttcccctgaaagctttactgcagtaagtgcaccaaccaaaacgaagttttgggtttttatttttttaatcccaatggcatcctttaatgtttctggtgaaccctgaggtttctgagttatcggtattggaagcaatggtttctgatcagggggctccacggcagagctcaggaggagcagcaagctgttctgtgctgcctgctgttggtgatgggaagctacctgggctgccattttaccaattcagatgtttgtggcaacataaagtatttttacagcattgctgaagctcactctcacacaagggtcacaccaggtccctgattcttgggtgaaatgctgtagaaccactgcaggaatygctctctgaggattcctaggatccccacacttctacatgaagccttccaagggggaactgggttttcaaaaaatgttctctggaacaggaacgaggtccagttggcctccatggctgcgacggccgaccccccctcctccccactccccccgctcggggagcctcctcagccagaggaggtgacaacaaagcagtggcggcgg

SEQ ID NO: 547812 - DNA, 976 bp, Homo sapiens
atgaataaatgtataaagaatctcacatgtggccattgctcacttattcagctcacaaccgtgatactctgtgtcacattattttatctcctctctcattctaacacctagcttttataatatgcttttcctagcattatagttacatttagacaggtgattttattttaaaaatgcaaaccattctttacaaatgccactcaaagccaataaagaattaatccctttaagatatatacttgcatatattgagactttcaagcagagtcagactttaaagccaccaaatgaaagagctctcatatgtgtcctattatcacagaggctgagtaccaggattttacttttaaaatttttatattctgtctctcccctgctcttctaaatagaagggaaaaagccagtatgttggctatacagtctttatgttgcattttctcagagaaatgttgaacagttatgaatagaaagagtaagaacccaaaagcatggcctgagtcatcccttgcttgtcattttgtggggaagttgagtctcatccttatcagttctgttgctagcctgggaagctgaaaccacagtcccttccaaatgataaccataattttctcccttctactttattttctcattttttcatcttataatgagcagttacaaaaacttttgggtccaaatgttttaccaagtcagttaacttacttcttaacctttttgaatagcccatttgaagccagttaacattgttgactctaaaaagactaaatataaagttttactaagataagtcatcatgttgaataaatacacaaatatgacctttggtatggatgtgcatataagcagtggggtaaaagcatccttgtatttaaaagtaaagaattctgtactacaagtagaaatctacatgcagaaacacacacacagtctggccgtagctacaggtagmatgcatgttccttttacatgtgagtca

SEQ ID NO: 547813 - DNA, 2196 bp, Homo sapiens
cctattgttggattatggtaagattatagactaagtgcaattaaagacacaagcatgtttagaaaaatggttggtcagttgattttgacaatgggatattcaaaactcagtatgaatcctgcctatatgaaaacacaatatgtgaatgatctggaaagcatttccattttgacgttaagacctttattatttacttttcagctacttttgtgagaagttaccaatcacttcgttctgtgatgtatttagtcagaggccaccagattaattttcttggtgacatgagtactatggaagcaaaagctaaaacccaaatcaatgcttctatatgttttaaaattctctggcttttggataataaaagtctgctaatataggcaaaggatctttttccattgtaaagtttgtagaaattgaaaatgatgcaagcaatttaataacatactttagagatgttttttaatactccatttaaaacattttaatagaatcttgcagttgagaattaagattcaagtattaacgtttataacagggaatgatagacatgttaattctgcccattatggcgtttagtaaaattgttactacgtgacaaattcgtattttctaaaaagaaagctaactttaaaaaatttctggttcaggttgtctagctcatattctttttttctaatataaaattatagacttggaggaggggtcagaaaacactgaagggagaaataaaaccaagaatctaaaagttttatgggagttctctgggtatataatattattaaggcaagcgtaactaccagttgacctgaatacctctaatatgtccatcccccgagactgcagagtcacgttctcaaaaggaaaaccgattagatgtcaaagctctctgaagcacctgaagaaaccttgaaaaagactataaattaagtttagggaggctataaagatagtggaaatggatagccaaaagttgcagttggattagaggctgtaaagttgaatagctacctgatgtgctccactttataatatatgatgcttagaaacctttgatattaaaatgaagttggatcattataaaaataattaacttggtaactcagaagggcaaatatttactcaaagcatttctatatggagggcaaagtgaaaatagagtttgagatctgaacacattctaaatagttacttttctccctgtctacaagtcggtaatttctaaagatcaccttagtataacctacagatacagatgtagagatactattgagtctctctaataaagactgttggacctatatgaataaaattcattaaaaaataaaatgtagaattttgtagattgctctttaatccatcaaatttactgaataactgtttaactctgcacttcattacgcctgtctgggtacaaagatgtacagctttatggatactccacaactctaaaaaaaatgtagaattttttaggttgctttttttagttcatcaaatttactggataatggtttaactctgcacttcatttatgcctgtctgggtagagaagtacagctttatccatactccaaaactcagattgggtacttgtctacatagaatatctgatagttatacctgggtcaatttattttaccctgacacattattagggacattgaatgcccccacctttccagattgttgaccaagcgattaatcattgcttgattaatttttattagcaatataaatgagtaaacgaatcaagtaaacaatggttctattttgccttccacatgattaatcaatttataagattatttttacttttgaaaatttctttttatttgctctcataatttctagaagaaagcaaattatgagtgtttwccttttccaaaagtctaccaaaagggctttggtaataagatgatatttattcctggtagacatcaagcatgtaatcattattttaagaagagcattgagaatcctttgcctagaagacctgttgcatctatatttatttccttcttttctttctccctctcttcaaccctgctcttttccttccctctcccttcctttcattactacttgcctttcttttccttcccttcttttcccttcctttttttttttttacattgcattcctctcctcacttttcatacggttgtactaatactctccttacagtctgggcctcacagg

SEQ ID NO: 547814 - DNA, 2036 bp, Homo sapiens
gggtgattcccacctcctggttgcccccagaaccctcacttgtatttggacagagcacggttggagttcctttgactcaccctttcccccaacagagagaagaaagggtgatggtgtgaaccccagcctgagaaacatggcagtgccaactagccccaatgtaccctattcccactttctccactctgcctgctcctcaaaacttcctgatagcaaaagaatagcctccacccattgtggctcaattctgygcctccgggagcagggcagggctgtggatttcttcttcctcccgaaagtaggttggctttcctgtgcactagggccctgctcggttccagtggacatgaagctaccatatgactgatgctctggcagaagtggcacttcttggcctggggtggcatcttgcattccttggcatgatggtctagacctccacagttgtagcacctgtcttttgatctgcgcttcttgcatgttcttcccctttggctacctctcactcccaatacggaacgccccaccaggtccggtgacacggatggattccagacccttggctgacttcttaaaggtgaactccactgcctcaccctccttcaagctccggaagccttccatgggcagcttactctggtgcacaaagacgtccactggtgggtcgagcgcgaccacggcgcgggcagtcacggacagtaagccgaatcccatgcgcaagttgaaccacttacagatgccctcaccgtgcagcagctgagcctcgtccgccgcccgggccgcatcctccggcgcctcctcgggtgcctcttctgccgccttggcgcagccacttgcaaactgctgggtggacacggagcctatggtcgtcggctgagcccgtggccccgggcccctggtcaggcagctgctggccccggagaactccgaagaccaacatctgaatttactagaatcctgattgttaagtatatactgtcaggaacaaattttttattacagagttcatagaacaatgctgaatttaccaaacttagtattttgctgcaactagaagctccaagggttaagaggaggcacggttgatctagctaatctcagatttaaaaggtaagaatgtcctatttaggagacccttccttatacacctatcactcattaattttcccaaataatttttgattaaatagacattttcttacttttatacacaattcccataaagtatacacaaaagtcaaaaaataaattttcttgtcacaaatggttaggtatagtattaatcatatctcatgttacacaaaatctgtgaattttgcttgttccctttacaactgaacctacagacaactgattaagtcctgtgggcatcaagttgtggttagtttctattcttcatttctaatctttttacacctttgagtcaattgtgttatatttataagacatgagctttcatcacttctatcagtacctttaattttcctcactttcattctccttcttgtacttgtccattcttgtccagaaggttcaaagcggttgtttatagccatggcttctttggggccaccagctttaaagatcacacaagcttggatctgtcagggcccaccatcccaacagatagagaatgactaaaagtgaagataatgtggggaaggtcaatggagagagtcaaacaattatgagaaaaagacttcatcctagtgtgatcatttgaaccccggaattcagacaattctatgacctactcctggaatatttggatatatagtacataaaaaaatcccttttttgcttaactcttaaccttttattttaaaatacaacagatacagagagtcacacaaaataccactcttgaaatcaccagcgaagtcaagaaataaaaatttgccaattgtctcagaagccccttgtattagtctgttttcactctaataaaaacacacccgagactggccaatttgtaaagaaaaataggtttaatggactcactgttccacatggctggagaggcctcacaatcatgg

SEQ ID NO: 547815 - DNA, 2036 bp, Homo sapiens
gggtgattcccacctcctggttgcccccagaaccctcacttgtatttggacagagcacggttggagttcctttgactcaccctttcccccaacagagagaagaaagggtgatggtgtgaaccccagcctgagaaacatggcagtgccaactagccccaatgtaccctattcccactttctccactctgcctgctcctcaaaacttcctgatagcaaaagaatagcctccacccattgtggctcaattctgtgcctccgggagcagggcagggctgtggatttcttcttcctcccgaaagtaggttggctttcctgtgcactagggccctgctcggttccagtggacatgaagctaccatatgactgatgctctggcagaagtggcacttcttggcctggggtggcatcttgcattccttggcatgatggtctagacctccacagttgtagcacctgtcttttgatctgcgcttcttgcatgttcttcccctttggctacctctcactcccaatacggaacgccccaccaggtccggtgacacggatggattccagacccttggctgacttcttaaaggtgaactccactgcctcaccctccttcaagctccggaagccttccatgggcagcttactctggtgcacaaagacgtccactggtgggtcgagcgcgaccacggcgcgggcagtcacggacagtaagccgaatcccatgcgcaagttgaaccacttacagatgccctcaccgtgcagcagctgagcctcgtccgccgcccgggccgcatcctccggcgcctcctcgggtgcctcttctgccgccttggcgcagccacttgcaaactgctgggtggacacggagcctatggtcgtcggctgagcccgtggccccgggcccctggtcaggcagctgctggccccggagaactccgaagaccaacatctgaatttactagaatcctgattgttaagtatatactgtcaggaacaaattttttattacagagttcatagaacaatgctgaatttaccaaacttagtattttgctgcaactagaagctccaagggttaagaggaggcacggttgatctagctaatctcagatttaaaaggtaagaatgtcctatttaggagacccttccttatacacctatcactcattaattttcccaaataatttttgattaaatagacattttcttacttttatacacaattcccataaagtatacacaaaagtcaaaaaataaattttcttgtcacaaatggttaggtatagtattaatcatatctcatgttacacaaaatctgtgaattttgcttgttccctttacaactgaacctacagacaactgattaagtcctgtgggcatcaagttgtggttagtttctattcttcatttctaatctttttacacctttgagtcaattgtgttatatttataagacatgagctttcatcacttctatcagtacctttaattttcctcactttcattctccttcttgtacttgtccattcttgtccagaaggttcaaagcggttgtttatagccatggcttctttggggccaccagctttaaagatcacacaagcttggatctgtcagggcccaccatcccaacagatagagaatgactaaaagtgaagataatgtggggaaggtcaatggagagagtcaaacaattatgagaaaaagacttcatcctagtgtgatcatttgaaccccggaattcagacaattctatgacctactcctggaatatttggatatatagtacataaaaaaatcccttttttgcttaactcttaaccttttattttaaaatacaacagatacagagagtcacacaaaataccactcttgaaatcaccagcgaagtcaagaaataaaaatttgccaattgtctcagaagccccttgtattagtctgttttcactctaataaaaacacacccgagactggccaatttrtaaagaaaaataggtttaatggactcactgttccacatggctggagaggcctcacaatcatgg

SEQ ID NO: 547816 - DNA, 587 bp, Homo sapiens
tatcataattttagagggtagtttaaaatagactcaaaattagaccttgtgcctgaactatatggaggaggagattaatttttaaaatatagcatgtttaataaagatcgattggtgtgtacttaccaaataatttcagatatagcaggacataaacagtgtacacaagagtactgsatctcttgccttaagctgtgtaccaactgtaccttcattcattcattcattcaattttgacttttttacttaggagagacagatgagtactgagagaaattgtggggtgtggtagaggggcaagctaaagtgcccaaaccatcctttgatgtttgcttctgttttttactgggaataatcattttcggtcttgatgtttcaaagattattttaatgtaatttcttattacagtttatatttttatggtatgattaatacaattttccatggaaataatttgaggttttttggttatattataaatagaataatatgaaactcaggatgacaaagacatattgcatatcttggcttcaacctgtaataacattgttttataggaaatatgtaaagtgtataccctttatca

SEQ ID NO: 547817 - DNA, 587 bp, Homo sapiens
tatcataattttagagggtagtttaaaatagactcaaaattagaccttgtgcctgaactatatggaggaggagattaatttttaaaatatagcatgtttaataaagatcgattggtgtgtacttaccaaataatttcagatatagcaggacataaacagtgtacacaagagtactgcatctcttgccttaagctgtgtaccaacygtaccttcattcattcattcattcaattttgacttttttacttaggagagacagatgagtactgagagaaattgtggggtgtggtagaggggcaagctaaagtgcccaaaccatcctttgatgtttgcttctgttttttactgggaataatcattttcggtcttgatgtttcaaagattattttaatgtaatttcttattacagtttatatttttatggtatgattaatacaattttccatggaaataatttgaggttttttggttatattataaatagaataatatgaaactcaggatgacaaagacatattgcatatcttggcttcaacctgtaataacattgttttataggaaatatgtaaagtgtataccctttatca

SEQ ID NO: 547818 - DNA, 587 bp, Homo sapiens
tatcataattttagagggtagtttaaaatagactcaaaattagaccttgtgcctgaactatatggaggaggagattaatttttaaaatatagcatgtttaataaagatcgattggtgtgtacttaccaaataatttcagatatagcaggacataaacagtgtacacaagagtactgcatctcttgccttaagctgtgtaccaactrtaccttcattcattcattcattcaattttgacttttttacttaggagagacagatgagtactgagagaaattgtggggtgtggtagaggggcaagctaaagtgcccaaaccatcctttgatgtttgcttctgttttttactgggaataatcattttcggtcttgatgtttcaaagattattttaatgtaatttcttattacagtttatatttttatggtatgattaatacaattttccatggaaataatttgaggttttttggttatattataaatagaataatatgaaactcaggatgacaaagacatattgcatatcttggcttcaacctgtaataacattgttttataggaaatatgtaaagtgtataccctttatca

SEQ ID NO: 547819 - DNA, 602 bp, Homo sapiens
aggtctctttactcaagataactttcaagcaatgctagagtgcctgataaattctggtgcggaggtcctgagaaagcactttgagacaacagcagttaacacattgttatgttygaaaacacagcagaaacagatgctagagatctgtgagggctgtattcagggagaaactctcagagaagtgagagactcacacttcttttctatcatcactgacaatgtagtggacatagcaggagagagcatctaacctgtgttggtgaggttgatgaatctcataaactgagaggaacttgtagacttcctggcttatgaagctgatgcagaaattttggctgtgagattttacactgtgacaactgagaagcagggactaaatatggagtattgtcatagcctggcttacattgtttccagtggattttcttccaaaatgaaagttgtcacttgtagagttttagagaatgctagaagcaacactccgcaagctatctacactctctgaccttattgtgccttaaatatgtgttgggctaaatcagtgcctgttatttgagtatctgttgcattaggaacaattgaggaagtttattctttttacc

SEQ ID NO: 547820 - DNA, 602 bp, Homo sapiens
aggtctctttactcaagataactttcaagcaatgctagagtgcctgataaattctggtgcggaggtcctgagaaagcactttgagacaacagcagttaacacattgttatgttcgaaaacacagcagaaacagatgctagagatctgtgagggctgtattcagggagaaactctcagagaagtgagagactcacacttcttttctatcatcactgacaatgtagtggacatagcaggagagagcatctaacctgtgttggtgaggttgatgaatctcataaactgagaggaacttgtagacttcctggcttatgaagctgatgcagaaattttggctgtgagattttacactgtgacaactgagaagcagggactaaatatggagtattgtcatagcctggcttacattgtttccagtggattttcttccaaaatgaaagttgtcacttgtagagttttagagaatgctagaagcaacactccgcargctatctacactctctgaccttattgtgccttaaatatgtgttgggctaaatcagtgcctgttatttgagtatctgttgcattaggaacaattgaggaagtttattctttttacc

SEQ ID NO: 547821 - DNA, 602 bp, Homo sapiens
aggtctctttactcaagataactttcaagcaatgctagagtgcctgataaattctggtgcggaggtcctgagaaagcactttgagacaacagcagttaacacattgttatgttcgaaaacacagcagaaacagatgctagagatctgtgagggctgtattcagggagaaactctcagagaagtgagagactcacacttcttttctatcatcactgacaatgtagtggacatagcaggagagagcatctaacctgtgttggtgaggttgatgaatctcataaactgagaggaacttgtagacttcctggcttatgaagctgatgcagaaattttggctgtgagattttacactgtgacaactgagaagcagggactaaatatggagtattgtcatagcctggcttacattgtttccagtggattttcttccaaaatgaaagttgtcacttgtagagttttagagaatgctagaagcaacactccgcaagctatctacactytctgaccttattgtgccttaaatatgtgttgggctaaatcagtgcctgttatttgagtatctgttgcattaggaacaattgaggaagtttattctttttacc

SEQ ID NO: 547822 - DNA, 602 bp, Homo sapiens
aggtctctttactcaagataactttcaagcaatgctagagtgcctgataaattctggtgcggaggtcctgagaaagcactttgagacaacagcagttaacacattgttatgttcgaaaacacagcagaaacagatgctagagatctgtgagggctgtattcagggagaaactctcagagaagtgagagactcacacttcttttctatcatcactgacaatgtagtggacatagcaggagagagcatctaacctgtgttggtgaggttgatgaatctcataaactgagaggaacttgtagacttcctggcttatgaagctgatgcagaaattttggctgtgagattttacactgtgacaactgagaagcagggactaaatatggagtattgtcatagcctggcttacattgtttccagtggattttcttccaaaatgaaagttgtcacttgtagagttttagagaatgctagaagcaacactccgcaagctatctacactctctgaccttattgtgccttaaatatgtgttgggctaaatcagtgcctgttatttgagtatctgttgcrttaggaacaattgaggaagtttattctttttacc

SEQ ID NO: 547823 - DNA, 1067 bp, Homo sapiens
aaattattttttaaatttgcacagaaaagtcctgggatttttatgtacattgcattgaatctattgactaacttgaagagaactgaaatctttaaaatattgaatcaaaattgtattagttttaatttacttaaattttaaatttattagttttaaattacttaaattttaaaattatttttaaaatttgcacagaaaggtcctgggatttttatgtacattgcattgactctgttgattaacttaagagaactgaaatcyttacaatattgaactaaactgtattagttttctatagatgtatagcaagttaccacaaatttatcagcttaaaacaacataaatttattatctcatagattttgtgggtccatagtttaggtgcatattgtctggggttcctgctcaaagtcgaactagactgaaatcaaggcattggacagtgtctgattttgggggaagttattactctctttaggattaactctgaaaacctcaactgtatgtaattagaacacactgtgggttgtatttcattagatattcttggatctgtatcttctgtttagactgggaaattaaatttctgtttagatggtgaaacagaatttaatccttagcagtagcagtatagcattgagatagtttattcagtaatactaatttgatcttgtaaaatcagagagtaaggaggaggagtagagagagaatgggggctttgtttgtcagctaattgtgaaactgtcagctttctcattgttggtattcttaaaaatacagctaaagcatacacatgtctgtggataattggataataattgctagtctatttagttttgcatttagcttctctagtaaagagggaggataaaataaagtaactttattaatttaaaatatatacccattcccagatattttattttgttttccctttaccctgaaatgaatgtgctgactaaaaccactaattacattgtataaagctatcttagtgtataatgagggaaaacagcatcaaaatcaggagccaagaagtcaagctccacttggatcaggttacaatc

SEQ ID NO: 547824 - DNA, 1067 bp, Homo sapiens
aaattattttttaaatttgcacagaaaagtcctgggatttttatgtacattgcattgaatctattgactaacttgaagagaactgaaatctttaaaatattgaatcaaaattgtattagttttaatttacttaaattttaaatttattagttttaaattacttaaattttaaaattatttttaaaatttgcacagaaaggtcctgggatttttatgtacattgcattgactctgttgattaacttaagagaactgaaatccttacaatattgaactaaactgtattagttttctatagatgtatagcaagttaccacaaatttatcagcttaaaacaacataaatttattatctcatagattttgtgggtccatagtttaggtgcatattgtctggggttcctgctcaaagtcgaactagactgaaatcaaggcattggacagtgtctgattttgggggaagttattactctctttaggattaactctgaaaacctcaactstatgtaattagaacacactgtgggttgtatttcattagatattcttggatctgtatcttctgtttagactgggaaattaaatttctgtttagatggtgaaacagaatttaatccttagcagtagcagtatagcattgagatagtttattcagtaatactaatttgatcttgtaaaatcagagagtaaggaggaggagtagagagagaatgggggctttgtttgtcagctaattgtgaaactgtcagctttctcattgttggtattcttaaaaatacagctaaagcatacacatgtctgtggataattggataataattgctagtctatttagttttgcatttagcttctctagtaaagagggaggataaaataaagtaactttattaatttaaaatatatacccattcccagatattttattttgttttccctttaccctgaaatgaatgtgctgactaaaaccactaattacattgtataaagctatcttagtgtataatgagggaaaacagcatcaaaatcaggagccaagaagtcaagctccacttggatcaggttacaatc

SEQ ID NO: 547825 - DNA, 625 bp, Homo sapiens
atggataaaacaagcacagcaaaatgttgatcattgttgagttaggtaattattacctggggttcatggtgctagtctttctacttttttgtatgtttgaaaataatcatagtaaaaggtttaaaaaaaagaaaaagaaaaaaataaagtgctcaattctcccccataaaccttatgtggtaggcactattacagtcacaattctggggaaactgggcctaaagaaaaataacttgcttagcatcacagatctattaagcaatagaacaattttttccatgataaaatgttacttatccactcttgcaccaygttgcccttataacctcccccagatagttacaaacaagcctaactggtaacttttgcagatatgtcttcatccaacactatggccagctttagagatttaagaatgagtaaaaatagaggaagatattccatgtaaatggaaaccaaaagagagcaggagtaactatatttatatcaggtaaaataaactttaagtcaaaaacgataaaatgagacaaagacagtccttatgtggccgggcgcagtggctcacacttgtaatcccagcactttgggagcctgaggcgagtggatcacgaggtaaggagttcaa

SEQ ID NO: 547826 - DNA, 1472 bp, Homo sapiens
agataaaatattttgaaatttttcctgtgatgatcaaaagtttttttttttattctttaaaggtatttgatttaarcatataatttattaccttctcttagacctaaatttgctcttctactggtttcatccagcacaaaagtatgcaaaaatattcctctttttgcttatttacaaaatcacctcatcctcatcatcttttgtctctctcacccgtgtctctgcagcattttgtcattaaagacatagcagaaataccagacaaaactagtaaataacattgtaattatctcagcagcgccatgtgaacatatctatatatgcatataaattgcttccaaacagagttcactgttaaatatgactgtgtcaaggcagcataccaatgggaagaagcctggtggggcatgtcttcattacctagcactttttgcctgttctatccaccctgagcattagaatcaagacctgagctgtgtaataacattattgaaatgttccagttttaggaattgtagcatatacaaccagactttcttgtacagaaaaaaaatctggtttaaggatttgaagggttatgtttaagaatattaaagtctctccttaaatattttgtttgatttaaaaataataactagcatctactgactgctttctgccagagactctaagtgtatatatagttgttacaacaaacttgagtatcggtttcaccaacagctcccaattcatggattagatgaagcaatagataacctgttatagtcgtaaagtgaggaagaagtaatttaaaatccgttgtatttgaccaaaatttctactctaaagtattcccctatgctaacttctgttcattatagaatattaaaaaaattaaagtggtaaaaacatgagatagagaacttataatcacactatacaactgtactaaaatttttggtgtattttcttttaattttagttatttggtggtcatggtggtcctaagtatcttcaaagttgtaatactaaataaaaatcaatgcctcaccttcaaaaaactgatgatgcagagaagaaaatagataatctatcaatcgtgtagaaatgaaaactatggactcaagtctgactgctgaggactggatcttagtattaataccttatttgtcagctgcatggccttgaacaaacctgctaatctgtctaatctttgatttgcaaatcactaaaagttcatcattatcatcattattagcagcatcatataatacaaacttgaatcagataataaaggttaaagcaaagtttagtggaaacatgaagggaaagaaaggggattaatttcaactgaatagatcatagaaggttttgaattgccggttgagacttactttatataccccaaggtaatagcaatatttaaagagctatttctattctcaatgtggttatgtaagcattttaataaaaaatgcttatttagagaactt

SEQ ID NO: 547827 - DNA, 512 bp, Homo sapiens
atgtgtgggggaacagttcccccaaataaacattctttgaagagaaagaagctggaatgtctacaatatcatatacttggtatctaatttaattttctcttaaaattgctatgatataggtacttagtatgtcacttatacaataaaaatgttgaaaccaaaaccattgggtaatttgttaaagatcacacatctagtaggaggtaggctaggtctagtgttcattggcagtgttcttaaaaatacaccaatctctcttctttgaaggcaaggcctttgtcttacaccttttgaaatttctattatgccataaaaaatgacccactaaaagataggtttaattatttggggttgaataacatcttcactaataaattattaaaatttcctagggattagtccatctttccaagatttctattctctacctgcattaactttmtaggtttcatcactttaaacacatgatacctattgaatttttgactctagtcataactgaattctggact

SEQ ID NO: 547828 - DNA, 1199 bp, Homo sapiens
tgcctcagcccacagctcagacctgcgggtggccgcgactcaggccgggacccggtcgcacctctgtgacgcaaagccccgccccccgcgcgttgccgggagacggcgcccaaccttcctctgcagcgcccctaccgacccgcgctccgcagctcctgagggctttcgagcccagatggtcatctgagacgagaggtggcggcgaaggagagtctcgcctgtcacgctcccggagcaggggcttcatgaggtggccatggaaacagcctggcagactcccatctctcctggtgccatctccggagcggaaagtggagcgccccgctggcgaccaaggccgcactgwgagccctggtttggtcaacagttgggctccaaggtaccacttcccagacctccagcctccccactgatgatagatacacaaaggtcatcttgtttctttatgaggcaatggattgtgttcacctagccgagttgttaagcataagagaatgtatgaaaagtaattacaaggttcaaaatcctgagctttgataaatgatagatatgatgatgagcacatgttagtgatattactgctctgcgggacgtctgaatcagtaattgctgtcttttaagcatctgttgtgtgccaaatactgcactaggcactttacgggcattgctcttgtttaagtcgtctggtcaaagttgcctagacaataaacagcagagcaaggattttaacccaggtacagctgacactgctgcctctatgcttagcagttaaactggtttttatgtttcttgtttgtacacccctccttcaccagtcacttgtagattcaccttgtgaagagctaattcttccctctaataataatactctttgaccatttactatatgtcaaaccgtattttaaggactttaaaggtattaattcgtttaatcttcacagcaatcctgtgagtaggtattattaataccttcactaagacacaggcttagaaaagtcgattaacttttccaaggtcaaacaaccattaaggagcagagccagattcaaacccaagcagacagaaccctgaacctgtgtttttaattcctgttttaaactgcctcggtagtacggtaagacttcattagcgctaggtccatgcctgtttgtgcaccattatttccctgacagccagcatggtacttgttcaatatttga

SEQ ID NO: 547829 - DNA, 1199 bp, Homo sapiens
tgcctcagcccacagctcagacctgcgggtggccgcgactcaggccgggacccggtcgcacctctgtgacgcaaagccccgccccccgcgcgttgccgggagacggcgcccaaccttcctctgcagcgcccctaccgacccgcgctccgcagctcctgagggctttcgagcccagatggtcatctgagacgagaggtggcggcgaaggagagtctcgcctgtcacgctcccggagcaggggcttcatgaggtggccatggaaacagcctggcagactcccatctctcctggtgccatctccggagcggaaagtggagcgccccgctggcgaccaaggccgcactgagagccctggtttggtcaacagttgggctccaaggtaccacttcccagacctccagcctccccactgatsatagatacacaaaggtcatcttgtttctttatgaggcaatggattgtgttcacctagccgagttgttaagcataagagaatgtatgaaaagtaattacaaggttcaaaatcctgagctttgataaatgatagatatgatgatgagcacatgttagtgatattactgctctgcgggacgtctgaatcagtaattgctgtcttttaagcatctgttgtgtgccaaatactgcactaggcactttacgggcattgctcttgtttaagtcgtctggtcaaagttgcctagacaataaacagcagagcaaggattttaacccaggtacagctgacactgctgcctctatgcttagcagttaaactggtttttatgtttcttgtttgtacacccctccttcaccagtcacttgtagattcaccttgtgaagagctaattcttccctctaataataatactctttgaccatttactatatgtcaaaccgtattttaaggactttaaaggtattaattcgtttaatcttcacagcaatcctgtgagtaggtattattaataccttcactaagacacaggcttagaaaagtcgattaacttttccaaggtcaaacaaccattaaggagcagagccagattcaaacccaagcagacagaaccctgaacctgtgtttttaattcctgttttaaactgcctcggtagtacggtaagacttcattagcgctaggtccatgcctgtttgtgcaccattatttccctgacagccagcatggtacttgttcaatatttga

SEQ ID NO: 547830 - DNA, 540 bp, Homo sapiens
acttacagtggtttactgggatgtgatcccaccgcaagatgaggggcatctgtacttcaatttggaaacaytgacttgaatcataaaatttctgactaaaactattaaacataattgtagcattttatcattacatttatctgtcagttttattttaccatattttatttctaatattatatttactgaataattctatgatataatcgtttctgtgccaaagtacagaaataacagatttttgttattcctaagttttactagaatttaagtgactttaaaatataatcatagccttagaaaatttgtttagggaaaatgaaagtcatttattaactctctatggtaatattttagtgttagttgtgcaaacatgcgtgccaggacatgcacacacaaactcatttaagctttgcttttccatattgtgtcctcattttacttacttcttagccttattaagagtagcagaaagtgacctacattttcctctcctaaaaaattatgcttgtcatgttttctgcaagtcatattcagtct

SEQ ID NO: 547831 - DNA, 636 bp, Homo sapiens
agagacggggtttctccatgttgatcaggctggtctcgaactcccaacctcaggtgatccgcccaccttggcctcccaaagtgctgggattacaggtaggagccaccactcctggccaatcatatttttttaacctttgttaggtcatttgcaaaaatggtgttaatgctaactactttttagggttgttcggacacttacgtgaaataatatggaccaaggcaatgaagtggagtctcacaatcaaatagactttgggttcggtctggaatttgccacttactgtttacaggtgaccttgagtaagtttttaaacctctctaaagtctgtggcctggctggattgaacaaggcctgtgatagtatgatttgcagagggttgtttaatggagcatagacattccgattcactgctctatctgtggttctgcctctggctgcaacatgtagataygctatttgtgactcagccagaaacattcacttcagctcccaatctttccgaagcacttaatagttttatttagtaattttttcaaacagatattaggtcactggccctctcccttcccattttctccttcttttccattcatacctagcacagagctttccaaacaggagaagagatgtcag

SEQ ID NO: 547832 - DNA, 1509 bp, Homo sapiens
acattgtgcacatgtaccctaaaaagaaaagagagagagagagaggaaaaaaagagaaagtactggacttcctgtgaagatggtaacgtggatgaagtcttggaggccataaggaggacagaatggctggccatctggcttaggtagaagagtggatgcagatggacctagagaggaaagttgggactgagatacaaccctctgaagaacaagaaggccccccttccaaggccacagggactgcagagaagcagctgaactcacctgggacaggaaccaacctgcagagccccccttattgttgtggccaacattgatcttcatcagctgccccaaatccggggcatccaggatgaacctgtcttcagctcccttttcaaagttgtccttttcattttctagcctacgctcccctgtatgcacagacatacaaaagaaattacaaaaagaccagaagaaaagaatttccaagccttcatggtccgcccactgaaagatgctcttccaaagttaacaagggcaacttcctcctgagatctaagggctccttacatccctccagtctctgaacaaggcagaggtttgcttcatgtgtggcttgtgcccaggtcttataactgagcttttgatttctgccttactctagagtcccgatcctactaaaccgatttgtacccccatctctagatctaggaccctgccttgcttttgccagttgcttgtcctgaattggaacaatagccacagcagttggtaaaggggctgycggtattcagcctacagacttccttagacctgactccttttctggaaaacagtgctggtaagtattaatactatcagatgctgctggttgtttaacatagttttgggttttactctcatttattcctcaccacaattcaagaaggagatattattaactccgtcttgcaaatgaagaaacagagacttagagaagttaaacaccttgccaaaagtcatgcaggttataagcacttagttaggactcaaattttaacctgttctttctgctctgcaattttccattattgtgtatctacaaatcttatctaggcaccaatttttgctgaaaccatcctgtgttctttctttttaattttttttaaattttagattgtgacagttcaaacatacagaaaataatataagacattcatgtacccaccatccagatttaagagagataacagatactaacattttgtccagttttctccagacctttctcatttcttaaggatgtaaaacatgacagatatgtctaaggcctcactgtccatctcttcccttctactcctttcccaaaataaacactatcttcaacttggtatatatcattcccaagaatttttgtttgcatatatatgtatctataaagacggctcctgaagtgtgatagtcactattatattatcattgctgctgaggtggttgctattgttcctgttatcattgtcacatacccttatgctacttgctttttct

SEQ ID NO: 547833 - DNA, 1401 bp, Homo sapiens
tggcccactgcagcctctacctcccaggctgaatcggtcctcccacctcagcctcctgagttgctgggaccacaggcatgcaccaccatgcctggctcattttttaatttttgtagagacagggtctccttatgttgcccaggctggtctgaaactccagggctcaagcaatccttccacctcagcctcccaaactgctgggattataggcatgagccaccacgcccagcctgaagacttagtagaatgctaatagggaagccagatagaaggggacttgaagagggggactgagatccattcctacatcctttccccagtggacagccctgcaggcaaccccccagaaccatggggaacactgtggaactgaaaacccctagtgctagggccgggtgtggtggctcacgcctgtaatcccagcactttgggaggccgaggcgggcagatcacctgaggtcgggagttcgagaccagcctgaccaacatgaagaaacctcgtctctactaaaaatagaaaattagccaggcatggcgtcacatgcctgtaatcccagctccttgagaggctgaggcaggagaattgcttgaacgtgggaagcagaggttgtggtgagccgagatcgtgccattgcattccagcctgggcaacaagagtgaaactctgtctcaaaaacaaaacaaaacaaaaaaggaaaacccctagtgctgaggcctggagagcctcctggctctgcctgagactgggatctcaccattgagctggtccttgttgggccaaagccgccatatttcatagctccaaagggcgctcttctgcctgtggttctggaactccatgctccttggcattgagtaactcagtgtccctgctgcagccttccaaccccaatattcagccctccttccttgacaccagccctgggtacagacctctacagtacagggactgtatggagagcaaggagagctcagcagaagccccacctggccccagcactggagtcgcttgccatcctgccctctccccaccgggctctctctgtccctgggtgcccagatgtttgagcgtgagacccggcgagagaagatcctggaggccaggcaccgggagatgcggctgaaggagaagggtaaggcggagggcagggatgaggagcagaccgatgaggagctggccgtagacctggaggcgctggtcagcaaggccgaggaggagttcttcgacatcatcttcrcagagctgaagaagaaggaggcagacgccataaagctgacgccagtgcctgtaggggcctggacagggttgggtgggttgggactgggcgggacacatggcacttgggttctgcttctgcttgccgacttcctgggtgaccttgagcaagtagtcttacctgc

SEQ ID NO: 547834 - DNA, 1401 bp, Homo sapiens
tggcccactgcagcctctacctcccaggctgaatcggtcctcccacctcagcctcctgagttgctgggaccacaggcatgcaccaccatgcctggctcattttttaatttttgtagagacagggtctccttatgttgcccaggctggtctgaaactccagggctcaagcaatccttccacctcagcctcccaaactgctgggattataggcatgagccaccacgcccagcctgaagacttagtagaatgctaatagggaagccagatagaaggggacttgaagagggggactgagatccattcctacatcctttccccagtggacagccctgcaggcaaccccccagaaccatggggaacactgtggaactgaaaacccctagtgctagggccgggtgtggtggctcacgcctgtaatcccagcactttgggaggccgaggcgggcagatcacctgaggtcgggagttcgagaccagcctgaccaacatgaagaaacctcgtctctactaaaaatagaaaattagccaggcatggcgtcacatgcctgtaatcccagctccttgagaggctgaggcaggagaattgcttgaacgtgggaagcagaggttgtggtgagccgagatcgtgccattgcattccagcctgggcaacaagagtgaaactctgtctcaaaaacaaaacaaaacaaaaaaggaaaacccctagtgctgaggcctggagagcctcctggctctgcctgagactgggatctcaccattgagctggtccttgttgggccaaagccgccatatttcatagctccaaagggcgctcttctgcctgtggttctggaactccatgctccttggcattgagtaactcagtgtccctgctgcagccttccaaccccaatattcagccctccttccttgacaccagccctgggtacagacctctacagtacagggactgtatggagagcaaggagagctcagcagaagccccacctggccccagcactggagtcgcttgccatcctgccctctccccaccgggctctctctgtccctgggtgcccagatgtttgagcgtgagacccggcgagagaagatcctggaggccaggcaccgggagatgcggctgaaggagaagggtaaggcggagggcagggatgaggagcagaccgatgaggagctggccgtagacctggaggcgctggtcagcaaggccgaggaggagttcttcgacatcatcttcgcagagctgaagaagaaggaggcagacgccataaagctgacgccagtgcctgtaggggcctggacagggttgggtgggttgggactgggcgggacacatggcacttgggttctgcttctgcttgccracttcctgggtgaccttgagcaagtagtcttacctgc

SEQ ID NO: 547835 - DNA, 676 bp, Homo sapiens
ttgtttaatcttctctatctacccccccccaaccccacctataacacagatacacccttcctgcccagggacctgggatattttaagtgactaattcatgtttgaggaatcaaagaaggaaaraaggtctgtgggaaggaagccaaagagagaaaggaaaacagaaggaaggaaggcgatggagagagcacaaagaggccccctatggagactgcataggttatagagattgcaattgaattcaaaacagcacttcaaaactcatcacaggttttttttaactttattaaaaatatttttttgcttcattgaaccttacattttaattgattgaagttaatctttatttctttaacaattttatgcacatattcttgataaaactcgtttgaaacaaaaattcatgctacactctgattttcaaaattcaaagataaatgacatattcctgcttttatacagtagcttgctgtgtacctttgggatgaagagatttccaagatattcaggggcatgtaatgagtatacttagtccagttacagtttgtgcacagtgtatacattttatactcacttcagtgtttaaactccttctccttgactttaaagtaggtaatactgatacacatttgcacatttgtcttcatgcttaacggttaatctcagaaggttctgc

SEQ ID NO: 547836 - DNA, 889 bp, Homo sapiens
aaaaagtgaacctttctttactttgattgagccttgctctgtgacattttatttttattggataattaaataattaaataagatgaaatcaattactttcattagaaattagaggtaatttaggtttaagaaactacttttctgagtattggaatgttttcatcatgtgaaacctactgaactttctaacttatttctttatatatctgacatttgtatcaaacaccttttgttgcttatatatttatactaaataaacttgcatttagattttcctttaaaaaatatgtttaatgtcttaagtcyatctgtctcacttaaaaattgtaaaatagccatcaaatgtgaataataaacctgcacaatatttcattagagtatgccttatgaagaacaaaaatataatttcaaaacaatagtttttatatacattggtgttacataagtagacacatagcattatgcccttcagtcactgaaagagtgtattcctgcaggcacaatctatgaacaaaaaaacaagctctacagggagtctaccataaaatcatggaagtctcttttcctttgatttcctttccatttcctttcccaatttttttttcacttttatttgagattcagggggtacatgtggaggtttgtctcaaagatacattgcatgaggctgaggtttggggtacagttcaacccatcacccaggtagtgagcataggtagtttttcaacacttaatctctctgccacccttcccccttttatagtcctcagtgtctatggctcccatctttatgtccacgtgtatccaacatttagctcccatttataagtgagaacacgcagtatttagttttctgtttctatactggtttgtttaggatagtggcctc

SEQ ID NO: 547837 - DNA, 889 bp, Homo sapiens
aaaaagtgaacctttctttactttgattgagccttgctctgtgacattttatttttattggataattaaataattaaataagatgaaatcaattactttcattagaaattagaggtaatttaggtttaagaaactacttttctgagtattggaatgttttcatcatgtgaaacctactgaactttctaacttatttctttatatatctgacatttgtatcaaacaccttttgttgcttatatatttatactaaataaacttgcatttagattttcctttaaaaaatatgtttaatgtcttaagtccatctgtctcacttaaaaattgtaaaatagccatcaaatgtgaakaataaacctgcacaatatttcattagagtatgccttatgaagaacaaaaatataatttcaaaacaatagtttttatatacattggtgttacataagtagacacatagcattatgcccttcagtcactgaaagagtgtattcctgcaggcacaatctatgaacaaaaaaacaagctctacagggagtctaccataaaatcatggaagtctcttttcctttgatttcctttccatttcctttcccaatttttttttcacttttatttgagattcagggggtacatgtggaggtttgtctcaaagatacattgcatgaggctgaggtttggggtacagttcaacccatcacccaggtagtgagcataggtagtttttcaacacttaatctctctgccacccttcccccttttatagtcctcagtgtctatggctcccatctttatgtccacgtgtatccaacatttagctcccatttataagtgagaacacgcagtatttagttttctgtttctatactggtttgtttaggatagtggcctc

SEQ ID NO: 547838 - DNA, 1911 bp, Homo sapiens
ctgggggaggcagtgctggtgcagttgggatggggcagagatggaagtgcgcgtgtgcctagaggggagagcaaaggcctggagggctccacgctctcaaccgttcagggctgatgcccctaagaaggcagggcactgtattttccagggtgacactgcccctgtgactgggcctggccaaccctgaccgagagggcaaagggctggaattggggagggtggggtgagtgaggacacctggcatgttctgcggcctcttggcctctctcgagcagcgtcccccagatagaagcaagaccttgctttgcagccctggcaggcaggatgcagtcatgtgacagctccagcaacctgaggctgggggaactgcggtctggaggaacaatgtgagttgggagcataagcccctcatggctagactcaggtttctctgtgtgacccgttggaggcgggtgggacgctcacaggagggtgcagctctgggagcccatgccccagcgtaacagctgctggttccagtcggtatagggtgggtagtggatctcctttaatttctccaggccggagggggcgagcaggcaggtgcggtggtgggagaaggtgtcgaaggtgaacttgccgtggtaccggcccatcccactgtggcctgtgtgggcacagagaacaagggcctgagaccaggcagcccatggagccccagcagcagcccactgccccggccagggcacacagctggcagggagctcagagagagccaggccactcacagagccattttacagatagggaaactgaggccttgagaggcccaggrtgtggatcaaggttgaacagtgagtgaagggacttcctgggtctggggtaccaaagccaagcttccctaggggtggaaatgggcagggacccaccgactcccccgaatggcacggacagcagagatatgtaggtgaagccctcattgcctccaaagctgccgctgctggtccgctccagcatctggttcacaacctgccagggagtgagaaggtgggtgttgggctctagtcatgagaagagggcttgagccccgcacattccacagcggaggtgagcctcatcctcacctgcccctccaccctctaacgggcaataatctccgctctaagcatcttctggggacagcaccctctcagtgacggtcggggtgccatgggggtgattaccaccatggcgcaaagaccaggaagccctgcaggatcatggggagccggcagccttgagtcgcgacggtgaggttaggatgctgcagtgtggtatgcgggccccaccgcgacccgctgggctctatcaggcccctgctctgctctgtccctgacctccattccgggcctctgcttgcctgtgcagaacctttgcacagtccaagtgcaggctgctctggccaggacagaggatggacccgctaagtgtctggtgggtttggaccctgtcctctctgccaggcatccttgcgccggatgcagtggtaccaggtggcctagatatagtcacccttgaggcatctgctgctctaaagccttgctgggaagggctgtgaaaggaaaggtgccagtctgtgcccctttcagcccctccattgcccccaacccggccgcacccccacctggctgctgttggagaaggcgtacagggccaggggcttctcctgccggttgatgaacttgatggcctcgtccacgctctgcacgttcacgatgggcaggatgggcccgaagatctcctcctgcatcacaggctccgtctcctgcacgtccaccagcaccgtgggggctgcgggcaccagagacggctcagccctggggccacagtcaggactgcccccaggggtagggtagaggtggggacaggggcatgggccagggctccaggcca

SEQ ID NO: 547839 - DNA, 1911 bp, Homo sapiens
ctgggggaggcagtgctggtgcagttgggatggggcagagatggaagtgcgcgtgtgcctagaggggagagcaaaggcctggagggctccacgctctcaaccgttcagggctgatgcccctaagaaggcagggcactgtattttccagggtgacactgcccctgtgactgggcctggccaaccctgaccgagagggcaaagggctggaattggggagggtggggtgagtgaggacacctggcatgttctgcggcctcttggcctctctcgagcagcgtcccccagatagaagcaagaccttgctttgcagccctggcaggcaggatgcagtcatgtgacagctccagcaacctgaggctgggggaactgcggtctggaggaacaatgtgagttgggagcataagcccctcatggctagactcaggtttctctgtgtgacccgttggaggcgggtgggacgctcacaggagggtgcagctctgggagcccatgccccagcgtaacagctgctggttccagtcggtatagggtgggtagtggatctcctttaatttctccaggccggagggggcgagcaggcaggtgcggtggtgggagaaggtgtcgaaggtgaacttgccgtggtaccggcccatcccactgtggcctgtgtgggcacagagaacaagggcctgagaccaggcagcccatggagccccagcagcagcccactgccccggccagggcacacagctggcagggagctcagagagagccaggccactcacagagccattttacagatagggaaactgaggccttgagaggcccagggtgtggatcaaggttgaacagtgagtgaagggacttcctgggtctggggtaccaaagccaagcttccctaggrgtggaaatgggcagggacccaccgactcccccgaatggcacggacagcagagatatgtaggtgaagccctcattgcctccaaagctgccgctgctggtccgctccagcatctggttcacaacctgccagggagtgagaaggtgggtgttgggctctagtcatgagaagagggcttgagccccgcacattccacagcggaggtgagcctcatcctcacctgcccctccaccctctaacgggcaataatctccgctctaagcatcttctggggacagcaccctctcagtgacggtcggggtgccatgggggtgattaccaccatggcgcaaagaccaggaagccctgcaggatcatggggagccggcagccttgagtcgcgacggtgaggttaggatgctgcagtgtggtatgcgggccccaccgcgacccgctgggctctatcaggcccctgctctgctctgtccctgacctccattccgggcctctgcttgcctgtgcagaacctttgcacagtccaagtgcaggctgctctggccaggacagaggatggacccgctaagtgtctggtgggtttggaccctgtcctctctgccaggcatccttgcgccggatgcagtggtaccaggtggcctagatatagtcacccttgaggcatctgctgctctaaagccttgctgggaagggctgtgaaaggaaaggtgccagtctgtgcccctttcagcccctccattgcccccaacccggccgcacccccacctggctgctgttggagaaggcgtacagggccaggggcttctcctgccggttgatgaacttgatggcctcgtccacgctctgcacgttcacgatgggcaggatgggcccgaagatctcctcctgcatcacaggctccgtctcctgcacgtccaccagcaccgtgggggctgcgggcaccagagacggctcagccctggggccacagtcaggactgcccccaggggtagggtagaggtggggacaggggcatgggccagggctccaggcca

SEQ ID NO: 547840 - DNA, 1183 bp, Homo sapiens
caggcccgcagccctcctccatcagacccaggagtccaggcaccagtccctcctccctcagacccaggggtccagggcccagcccccctccctcagacccaggagttcaggcccccagcccctcctctgtcagacccaggagtccaggccccagccctcctccctcagaccgagcctcacctgccgtaggttgttgtagatgtcgagctcccggcccccctgctggaagaggttgaccagccggtgcacagctggcaggttaccctgcaccacagcaatatggagaggcctgggggtgggggagtgaaggaatcacaggcattaggggttgttcacctctcaccctcatgctgttggcaatgctaactccaatgtgttgaatactttggaaatgtccccagtattcaaacacttctccccacccactccctccatcctgatttaccacccgctccctccatcctgctttagccaccactggctccctgctggtctagtacagttccatcctcatggcttctctgcttccacctatgctctactgtctgtcccccacacaacagccagagggacccttttattttattttattttatttgtttgagacggagtgttgttctatcgcccaggctggagtgcagtggtgctatcttgtgctcactgcaatctctgcctcccaggttcaagcgatcatccaacctcagcctcctgagtagctgggattacagatgtgtgccatcgcgcccagctaacttttgtatttttagtagagacakggtttcaccatgttggccaggctggtctctaactgctgggttcaagtgatcctcctgcctcagcctcagcctcccaaagtgctgggattacaggcgtgagccaccacgcccagtctggaacaaaagttttgactaaaagggaggtgaggacaaactgggatggggccattgttctggaggcggtacagtccagaacccccttctagactgaaggactcactccctcagcttctgggaagattgtcagctttcagaccatttgggaattaccctcaactcaagagagctgcttgtccaaggtcacgccccatgtgaatcaagggcagctgcccttcaatggcatccagtcactggttaatgccagcatagaaggcctagcctcctgaccccaatgctgaaggccattc

SEQ ID NO: 547841 - DNA, 1609 bp, Homo sapiens
aacaaaaagataaataaagactgcaatatcttaaaaccgctcattttatattgttgcaatgaagaaattaggttaaaagtgctagactagaatgctagagaactgggtttgatcctcagctctaccacaaagtagagcattttgaacaattgtgatccttaaccaactttatgccttgttgcctcmtaagtaatctggagctaatagaccttccctgtcataaggttgttgggaagattaagtgagataatgttcattgcagtttctggaaacctgaaaagtgtgatgcaaatataaaggattgttactaccactcaggtcctttgttactggagagtttataaagccttcccatagtgtttcattccacccaaactatgagaatccctattttcatttctgtctgatggctgtcagaaaattcacagaagccattgttgcctgaataagggaatcacagaccaaatatataatagctcactaagatttattttaaatgtctgatcataaaaaggagaagggaaataattcaaagcgttgtgttatatgccaagtggccaaaatggagcagttttttttcagcttagcaacaaactgctattttccttggtttctaggacacaaatacttctgttctaaatgtttagaactccaatttgcacatgtaatttaggggaatgtgaccaactggtttagtaatatttttagttttttccccaaatgaaataatgaaaatgaggatattcattagcatggataaagtatttaatacaaagtaaaaacactttggatttcctttgctttctgacatttttcatagagagccaaaactgggaaaaaattcaagtatgtctttctgcccaatgcccagcttttttggaatcagctaccctgacactatcacagcctcctgtcactcagaagtctgttgcttctcagccccaaagacatttgtatttttatgatgttttttgtgggagttgcaatatatcggaaggttgatatagcactgaatttatttgaaacagatgtttcggggagaaggaagaagacaaaactgcacaaagtgaccccttgagggatcttgaatgcttggctgagaaattcaggtgtgaattgataagttgttgtaacttcactaagttttgatcaatttgaatttagaacgataaaacgttttttcattccttaagagaaacaaaccggattgagaatacctaaatagtttaatgtcaaaattaaaatgaagttgccacataattaataatatgcatacttgttacagagccaaaatctgcctggacatatgagccatttatatacataatgtacataatgataaggtaatttttattctaccacatcaagcatttctaaaatcagttttctatttctgtctccctcttcacctttttttttgaaacagagtctcactctattacccaggctggagtgcagtggtgcaatctcgactcactgcaacctccacctcccaggcctaagtgatcttcccaccttagcctcctgagtagctgggactacaggtgcacagcaccatcgtttggctaatttttttgtatatttgtagagactctaaaaggattagtcc

SEQ ID NO: 547842 - DNA, 1609 bp, Homo sapiens
aacaaaaagataaataaagactgcaatatcttaaaaccgctcattttatattgttgcaatgaagaaattaggttaaaagtgctagactagaatgctagagaactgggtttgatcctcagctctaccacaaagtagagcattttgaacaattgtgatccttaaccaactttatgccttgttgcctcctaagtaatctggagctaatagaccttccctgtcataaggttgttgggaagattaagtgagataatgttcattgcagtttctggaaacctgaaaagtgtgatgcaaatataaaggattgttactaccactcaggtcctttgttactggagagtttataaagccttcccatagtgtttcattccacccaaactatgagaatccctattttcatttctgtctgatggctgtcagaaaattcacagaagccattgttgcctgaataagggaatcacagaccaaatatataatagctcactaagatttattttaaatgtctgatcataaaaaggagaagggaaataattcaaagcgttgtgttatatgccaagtggccaaaatggagcagttttttttcagcttagcaacaaactgctattttccttggtttctaggacacaaatacttctgttctaaatgtttagaactccaatttgcacatgtaatttaggggaatgtgaccaactggtttagtaatatttttagttttttccccaaatgaaataatgaaaatgaggatattcattagcatggataaagtatttaatacaaagtaaaaacactttggatttcctttgctttctgacatttttcatagagagccaaaactgggaaaaaattcaagtatgtctttctgcccaatgcccagcttttttggaatcagctaccctgacactatcacagcctcctgtcactcagaagtctgttgcttctcagccccaaagacatttgtatttttatgatgttttttgtgggagttgcaatatatcggaaggttgatatagcactgaatttatttgaaacagatgtttcggggagaaggaagaagacaaaactgcacaaagtgaccccttgagggatcttgaatgcttggctgagaaattcaggtgtgaattgataagttgttgtaacttcactaagttttgatcaatttgaatttagaacgataaaacgttttttcattccttaagagaaacaaaccggattgagaatacctaaatagtttaatgtcaaaattaaaatgaagttgccacataattaataatatgcatacttgttacagagccaaaatctgcctggacatatgagccatttatatacataatgtacataatgataaggtaatttttattctaccacatcaagcatttctaaaatcagttttctatttctgtctccctcttcacctttttttttgaaacagagtctcactctattacccaggctggagtgcagtggtgyaatctcgactcactgcaacctccacctcccaggcctaagtgatcttcccaccttagcctcctgagtagctgggactacaggtgcacagcaccatcgtttggctaatttttttgtatatttgtagagactctaaaaggattagtcc

SEQ ID NO: 547843 - DNA, 1332 bp, Homo sapiens
ttctagggatgattctatagaaactcttgtacaactgcacaaaagagaatatataacttgcagtaactgtttgtagtggtacaaaaattagaatcaatccaaatatctattattgcacaatataaaaaaatatatattgggttagcatattgtcatttacataagatacagaccttcatataataacataagaaagacttaaaataaattctaaaagatgacttccaggggagtaaagttcccatttttccttaagaatatatttttatatattgtacctgtccattttgaagaaaataktcccagcttcaaatcacatcatctgcaaataagtataattttatttcctccttttcactctgtatgccttatatttcttttccttaccactttgggctgtgtaagactttcagtgtgatgttgaagagcattgagatagaacatccttgccctgttgctgctctttagggggaaagtattcagtctttccttatgaagtgcaatattagctaaagtttcattctttttgatatttttggtgtgttttgttttcttttgttttgggttggtgtcctttagcagacattcttttctatttctagtccgctagaagctttttttttttttctttttaagttgtaaatggatgtggagttttgtccagaactgttgtccctcagtatttttggggtattggtttcagggcctccatggatatcaaaatctgacaatgctcaaatctcacagtcagcaccacagaatctcaaacataaaaagtcaaaaagtcagccttctaggtcctgggttcggcatcccacaggtcatgtattttctgtggagagctctgtgattttctctatcaattgatgtgatcacgtggttgtcttctttagatggttaatatggtaaattacattgattgattttcttcctttttcttttttggttcttttcagtttgattgatttttaaaaatgttaaaccaaccttgcattcctgcaataaacccacttgtttgtggtaatattcttttgatatattactgtatttgattggctaatattttgcatctttttttcatgaagtatactacagtttttttcttataaagagaaattgtcagagtacttctggcctgttaaattgtttccagatttccttattaccagtaatccatctatgaactgtttttgtatggatccttggggcacataggtgtggactctcaaagtaaatttgaaaaattcttcactaaaagaactccatcactgtatggtttgtggtaaactgttggctgcccagctaacatctattctaccctttttcctttgg

SEQ ID NO: 547844 - DNA, 642 bp, Homo sapiens
tttgtatcctcttttatttcgttgagcagcggtttgtagttctccttgaagaggtccttcacatcccttgtaagttggattcctaggtattttattctctttgaagcaattrtgaatgggagttcactcatgatttggctctctgtttgtctgttgttggtgtataagaatgcttgtgatttttgtacgttgattgtatatctagaaaaccccattgtctcagcccaaaatctccttaagctgataagcaacttcagcaaagtctcaggatacaaaatcaatgaatttttttattataaaagataagatggtgaacagaatgggctggaagttatgctatgtggttaactcttaattatctgctttgaatacagaattatggagtagctgctatcctttatacctagtttgagttctttggctacttcttgtccatagacactgccactgtcataaatgtgtcttcactcacttccataagtgtctaggagatacaggatgtagaaaagattctggaatccagacagagaagaggattaagcagcctggtttagctgccctcgatcccatatggtttatagtaataaactttgctgcgaaacccatcatgtaaaggtaacttttgaaaaaaaagaacatagc

SEQ ID NO: 547845 - DNA, 520 bp, Homo sapiens
agggtatataaatgagggtgataggataaagtgacaaactgtgcctcttttaagacatattgtaaaggtgtcccactgctttattttagcactacttaggccgcccccatctccttatatattaataaaaaatataatacaagtttatttcaataaatataatgcacagactaattatttcttaagtgcacaatactgcagaaatcactaagcagatgaataaacattttattaatttgataattatataagtttattcaaaatatgagtatatctctagtgtttgaattttaatattaaagtaattgtgataaaatagaaatgatatattacagagccagttaaaggataaaagtaaaataagttaaacaaagtaagaaaggagtggctttaaattttctcttttagatattttattagaccttatgactacataccttatctgaaattaatgagtctatagcttatatacttaaccaagtrttgtttttaatgaggcttcctttgtgggacgtcggaa

SEQ ID NO: 547846 - DNA, 1200 bp, Homo sapiens
cactgctttcctttatttggaaaatatctgtttttagtccaaaactatgctagatacttttaaataatgtacttttgaggacccatagcttgactgtgatgcctctagtgaggaagtagcattgataacataatcaaacaatccgtgtaggtttggctttatcagctctgtacagtgtttagtagttccaatatataataatcttctttgatacagaaactttatatcttattcatttcaatacatttatcatttagcctaataatgcctgaaatatagtggatgtttaataaagaacttttcaattgattgataattaatactctggattacataagactaaaaatcatttaaatatgacttcaagataaattaatgcttcttggtttctaatttatgtccaggccataagtgtatgagttataaagatgctattgggggtgggaatattttagctcctgctgatatgagatcacagataatctgtacacatttgcccatgtaaaactacactcagatcaaaatcctaaaatcagtacttattcttaaatatactggaatttgttaaatttttaatcattagaatgattttttaagattctttgttactcgtggaataaatttacattatatgaaaatgatgatggttttacctgtaattctgttgtgcataatgcacatagcatcatttacctttcgttttctaatataaaatcgatatttatatattggccttgtattcagagacgttgctaagttcacttcttaactataagtatttctttgtggattctttggawtttttttacatagagagtcatttcatctgtgagtaatttagctttgtttatttctttccaattcttataacatattcaatacttttattccattctagttttattcctctggttaggacctccagaataatgcttaatataacttaacaataggcattgttttctcctttcttagtttacagggaaacctttcaatatttcattattatcaagtgtttaatacgtataggtagattagaggttaagctggcaagcttggtaaacgcttttctcatgggtggtgttaaattttgtgaaacaatttttgtaactatgctgagataatattccgtgttctctttcaaactctcaaggtagttaaaacatttaatgattttctagtataaaccacctttacatt

SEQ ID NO: 547847 - DNA, 604 bp, Homo sapiens
agattcacatcatcccctaccctcccactcctgccacatggctagacacacttgaagcattttataagattgaccaagaatatagactgagctgtattaatgaatatgtatttatctgattaaatttaaaatatatgtatgtatatacgtatgtatatgtatatatgtatcatttcattcaacataatatttatcaaaagtgcaaattcataatttaatttttagagaaaaaatacagtaacagttaacatataatttatcctwtcttttaggtaaaagatttccattgagccatttcccaggaaggtgtgttttaagacagtaaattatgatttatatgtttgtaaatgctcactaaataactactttttgagttgagtaaatattactcttaaaagaaaaaagcctgcacaactgaaaagattctaattataaaatgccttgaaactcagccacaagttagggaaatctatacacaaatgagtccatttctcacctcgtagactagcaaaacgttgaaaaggctctcaggcctaatgtgacaaaatgagaggaaatgggctttcttgtccactgctggagaacatcctccaaagcaactttc

SEQ ID NO: 547848 - DNA, 561 bp, Homo sapiens
tgtaatcccagcactttgggaagcccatgcaggtggatcacctgaggtcaggagtttgagactagcctggccaacatggtgaaaccctgtctccactaaaaatacaaaaattagccgggcgtgatggtgcatgcctrtaatcctagctgcccaggaggctgaagcaggagaatcgcttgaacccgggaggcggaggttacagtgagccgagattgtgccactgcactccagcctgggagacagagcaagactctgtctcaaaaaaaaaaataagataaaataacaaaaactcagagccaggcttgcggatggaaatgtagtgcccgagtcacattctgcttaaagttgtaatgaatacagatgagttaaaagagagaaaaaaaaaagaggtagagaaagaatttaaaatgacaagttttttaaagtaaatgctctgcaggcaggtgttgtggctctggtctgtaacttcagttactcaggaagtggaggtgggaggatcccttcagcccaggagttcaagaccagcttgagcaacatagcaagatctcatctcaatttaaa

SEQ ID NO: 547849 - DNA, 561 bp, Homo sapiens
tgtaatcccagcactttgggaagcccatgcaggtggatcacctgaggtcaggagtttgagactagcctggccaacatggtgaaaccctgtctccactaaaaatacaaaaattagccgggcgtgatggtgcatgcctgtaatcctagctgcccaggaggctgaagcaggagaatcgcttgaacccgggaggcggaggttacagtgagccgagattgtgccactgcactccagcctgggagacagagcaagactctgtctcaaaaaaraaaataagataaaataacaaaaactcagagccaggcttgcggatggaaatgtagtgcccgagtcacattctgcttaaagttgtaatgaatacagatgagttaaaagagagaaaaaaaaaagaggtagagaaagaatttaaaatgacaagttttttaaagtaaatgctctgcaggcaggtgttgtggctctggtctgtaacttcagttactcaggaagtggaggtgggaggatcccttcagcccaggagttcaagaccagcttgagcaacatagcaagatctcatctcaatttaaa

SEQ ID NO: 547850 - DNA, 1480 bp, Homo sapiens
gcattacaattttagtagaataaaatgcattcaaatactataatttagaacttaaaccaatttgagctaaaatttatatttttaagttgttgaacatcatttattttaatactaaatattctttaagtgtttcagttgtaaaaaaattataactacattaactaaacaattcattaaaacaaatttttaaaatttatagtttttttagttatgactttataaacaaaagtaacaaaatcaaattgaagtatctattattgcatatcttcagaaatacattcttgctttattattgttattattattattattattattttgagccactgtcttgctctgtcacccaggctggagtgcagtggctgtcatggctcaytgcagcctcaacctccagggatcaaatgatcctaccacctcagcctcctgtgtagctagctgtaactacaggcctgtgccaccatgcccaactaatacataattttttttttgaagatatggagtctcaggttgctttttgctagctcatactcattggtggtaaaaattatatagcttcaccgctattagaattaaataaaaaatacaaaataaaacctttatgaagtgatgtggtttggctctgtgtctccatccaaatctcacctttaattgtagtaatccctatgtgtcaacggcaggaccaggtggaagtaactggaccttgggggcagttcctctcatgctgttctcatgataatgagtgagtctcataagagctgatggtttttttgtttttgttttgttttgttttgttttgttttgttttgtttgagagggagtctcgctctgtcgcccaggctggagtgcagtggcgtgatctcagctcactgcaagctccgcctccagggttcacgccattctcccgcctcagtctccccagcagctgggactacaggtgcccgccaccacgcccggctaatttttgtattttttagtagagacggggtttcaccgtgttagccaggatggtctcgatctgctgacgtcgtgatctgcccgcctcggccttccaaaatgctgggattacaggcatgagccaccgtgcctggcaggagctgatggttttataagcatctgggattttccctgtttgtactcattctctctcttgccactctgtgaagagatgccttccgccatgattgttccctcgccgcctccccagccatgaggaactgtgagtcaattaaacctcttttctttataaagtacccagtcttgggtatttccttacagcaatgtgaaaacaaactaatacatgaagcaaaagtataaaatacttagtgattatttgctaataaaaatgattcaaacaatcagtaaaggggacatttgaggttatttttatttctaacctgtatgtatcatattttatgggttcagtttacaaatcactttatagatgagtttttcatgatgccctgattgtcttctattgccc

SEQ ID NO: 547851 - DNA, 622 bp, Homo sapiens
tgcttaataaataaggtacatgtataacgttgctcattgcaggcttgtttaaaattgtaccaagattgagaataatcttaatacaggttactccaatggagtaagaatacattcaggtaatttccctgtgttccagaaaaaaacttcctagtaaagtacactgaatccattcaatggaatatgttatagttattaaaaataatcatagacatatgtttaatataaaatatataatttatatatttaactcacaacaaatgctcgagtgaaaatatatcagaaagcaataaagatacaatacataatgtaattcagaagttagaatgaaaagtctaamataatttatattaaatgtatcgattatgacaagaattacagagtgcaaacttgtctgagggattaagaaagtcatggaaagttaaaattaagatgaaatgtacagggtaagaaagaattagtcaatcaggaaaatatggcatgtggcaaagagagcatttcaagcaaatccactgcttgtcttaatccttggggctttgtaaggagacagcccagattctagtttatgaaggaaaagccatacaggaaaaaggctaaagaagaaattggagccaggcaggccttg

SEQ ID NO: 547852 - DNA, 646 bp, Homo sapiens
ggggaaatttatttgacttgttaaaaatatattttattttttaaagtattttataagtcatcagatgtttaacagttattctaagagaatgatttttatttagacaaatttgtaaattcatttttgttaattaacattaatacattgaaattattcatcattaattttgatttttcttatttttgttcaacaattttatacagtttataggcacttttagttgtttataataaaaattatagtaatgttttaaaatatatttttaataatactagtacagtttcttgtacccaggtgctaatgggctaaattgtgtcccctcaaaatatgtatgttgaagccctaaaccccagtatctcagtgtacttggagatgggcctttaacgaggggattaaaataaggtccttagaatgggcttagatccaatctgactggctttcgtataagaagaggaagttagaacacacaaggagataccaaagatgaagaagaacaaggtaatctgcaagctaaggagagaagccccaagagaaacaaaacctggcaacaccctgattyggatgtctagcttccaaacctgtaaggaattaaatttctgttgtttaagccaccagtctgtggtatgttgttaaggcagccctagca

SEQ ID NO: 547853 - DNA, 567 bp, Homo sapiens
cccctcctgacgatacatgctattccattagccagctttctccagggtgccacattcaaattaatatttctcagttgaaatgtctttagaaacatatcacctttatggaaaggtttaccaacttactaaatttgatacataattgttgttatacaaatgtatattctggtcaaagctattatgcatagcttcatgctttcattgacatattttggactgacatattttgtattagatatatttatgacaggacatgtgggtaagttccaaaaaaccttataaaatattctaaagcttcaaaatttctkcatttacatacttgcatgaaactacagtgttacatgtgtgggtggattccaaccagatataagggcaagatcttccataaatttacacaggcatttaagatgatcaaattatcaaagcattcagttatagccatacatctatttttttgtaatttttataattttaagagtatttataaatagtattaaagttattaaagtttaaataaaatatgaatatataccttctttatgttagcttagcaactgattattgtat

SEQ ID NO: 547854 - DNA, 943 bp, Homo sapiens
tatgttagaccccaggagagatggttgtttaaaagagcttggcacctcctccctttctctcttgctgcttctcgtcatgtgactggctggctcgccttcaccttgcaccatgattgtaagcttcctgaggccttcaccaggagcagatgctggcaccatgcttcctgtacagcttgcagaaccatgacccaaataaatttcttttctttataaattagccagtctcaggtatagcagagacaaagtctcaagtccaggtatttagcacagagatattgagaaaggcagaaagaaattgttgttaaactataataggctgcaatatatttaattaccaagtttgtaacttaaaatgtgacactgttatacttcagttttcttttcttttctttctttttttttttttttttgacggagtctcactctgtcgcccaggctggagcacagtggtgagatctcggctcactgcaagctccacctcctgggttcacgccattctcctgcctcagcctcccgagtagctgggactacaggcacccgccaccacgcccggctaattttttgtattttttagtagagactgggtttcaccatgttagctgggatggtctcgatctcctgacctcatgatcctccaacctcagcytcccaaagtgctgggactacaggcgtgagccactgcgcccagccctgttttctttatatactccctctccattaaaatattttgtcctgtcactataatttaagaaatgtataaggtgatttctaaaaatataacacaggttttcataaggcgcttgggtcaaaaactatgtgatttttgtgctaatatatttaaaaccaagtaattaactcttccccttactctaaagatgataatagactgatctatatgccacatgtcgatatcacacttgttgcacaaagtttcacacagtta

SEQ ID NO: 547855 - DNA, 599 bp, Homo sapiens
attttaaggctaaacctgaactattaatatttttccattactttcttgagtccagaaatcaatacacagtaaatcaagccatgatttgtagtatatgcctattttcattctatgaaaactctcactgccaccaaggccattgtcaagctaccaatgcgatgtcactgaattaagagaaaatagtaggaaatagaaggagaaaatagcatgttgggcaaaatacgtgccccccaccaaaaaaaagcgctgggaaaaatagcacattgtgcaaattaattgactatatagaattgacaatatggagtactgtatatatacatttttaatagactttatttttagarcagttttaggttcacagcaaaattgaacagaaagtacagaatatcgatgctcttgtttctgcgtttccagtgtgggcccagaactggctcatacaagtgcacaagagccagtagttaaatgttcagaagctttgtgaaccagttttaaatacagctattgctaaaattaaattatataaattttaaaataagtcaactatattaaatgaaaggtagttctcaaaattcatcacatcctaattatttacttcatat

SEQ ID NO: 547856 - DNA, 610 bp, Homo sapiens
aaacaaatgttgtaaccacctgttacaaactaattaagaacatataaggagaccaaaatatttaaaataatataaatgagaaggccaaaaggtataatcaaaatatacattattccccaaattaatttaaaacttgatttcyaatcaaaacctaaactgttctttggaaacttacaaactaatcctgaaatttgttagggaatttatatagttccttaagtggaaaatctctgacactgactggatggatattcattaaggtcactgataacaaatgggcctgtctcactggggttgagaaagtaggaagcttgtgtcggggagaacatggaatagccagagacagcaaataagaagcataggaaaagatacattgctggtttggtctcttctccttgctttcaaaagtactttatttgttgatgacagtgccctttgcattgagcttgaaaacataggagacacacagagacagtacttatgttctttaaatctaaactatgtcaagttggttgattgtgtttataacttcatctttactaactatttctgtttcatattctaccaaaaactcaaaaaggaatgccaatgtctgcaactatatttgtta

SEQ ID NO: 547857 - DNA, 610 bp, Homo sapiens
aaacaaatgttgtaaccacctgttacaaactaattaagaacatataaggagaccaaaatatttaaaataatataaatgagaaggccaaaaggtataatcaaaatatacattattccccaaattaatttaaaacttgatttccaatcaaaacctaaactgttctttggaaacttacaaactratcctgaaatttgttagggaatttatatagttccttaagtggaaaatctctgacactgactggatggatattcattaaggtcactgataacaaatgggcctgtctcactggggttgagaaagtaggaagcttgtgtcggggagaacatggaatagccagagacagcaaataagaagcataggaaaagatacattgctggtttggtctcttctccttgctttcaaaagtactttatttgttgatgacagtgccctttgcattgagcttgaaaacataggagacacacagagacagtacttatgttctttaaatctaaactatgtcaagttggttgattgtgtttataacttcatctttactaactatttctgtttcatattctaccaaaaactcaaaaaggaatgccaatgtctgcaactatatttgtta

SEQ ID NO: 547858 - DNA, 751 bp, Homo sapiens
tcatcttgaattgtactcccgtaattcccacgtgttatgggaaagtcctggtgggagatagtttgaatcaccgtggggtaggggggttccccgatactgttctcatggtagtgaayaagtctcatgagatctgatggttttatcacgagtttctccttctgtatcttccccattttctcttgctgtagatacgtaagaagtgccttttgcctcctgccataattctgaggcctccccagccatgtggaaatgtaagtccagttgaatctctttttcttcccggtcttgggtatgtctttatcagcagcatgaaaacagatataatacagcatgaatacagacataaaaattacatgtagttttcataaagttaaactatacttaattatatgcaacaaactgaacatttcagtggaattctgatagatgttgtcaattccaccttcttgtacactggtgaaaactcatagccagctagttcttggaaagtacattagtgtgatttggttccagaataactttatctgcatttgtatagaaagattctgcagaacttttataggtaagtactacactaaatgaaaagactagcaagtttggcagcaggaaacctggtcttctctgtattctcctttacagtattcatccccttctgacccatcatttctttgtatgtttaatgctactaaagctaatttatagctagatgaggtttacataaaatggtatgacatgtaaagtaattatggaa

SEQ ID NO: 547859 - DNA, 751 bp, Homo sapiens
tcatcttgaattgtactcccgtaattcccacgtgttatgggaaagtcctggtgggagatagtttgaatcaccgtggggtaggggggttccccgatactgttctcatggtagtgaacaagtctcatgagatctgatggttttatcacgagtttctccttctgtatcttccccattttctcttgctgtagataygtaagaagtgccttttgcctcctgccataattctgaggcctccccagccatgtggaaatgtaagtccagttgaatctctttttcttcccggtcttgggtatgtctttatcagcagcatgaaaacagatataatacagcatgaatacagacataaaaattacatgtagttttcataaagttaaactatacttaattatatgcaacaaactgaacatttcagtggaattctgatagatgttgtcaattccaccttcttgtacactggtgaaaactcatagccagctagttcttggaaagtacattagtgtgatttggttccagaataactttatctgcatttgtatagaaagattctgcagaacttttataggtaagtactacactaaatgaaaagactagcaagtttggcagcaggaaacctggtcttctctgtattctcctttacagtattcatccccttctgacccatcatttctttgtatgtttaatgctactaaagctaatttatagctagatgaggtttacataaaatggtatgacatgtaaagtaattatggaa

SEQ ID NO: 547860 - DNA, 751 bp, Homo sapiens
tcatcttgaattgtactcccgtaattcccacgtgttatgggaaagtcctggtgggagatagtttgaatcaccgtggggtaggggggttccccgatactgttctcatggtagtgaacaagtctcatgagatctgatggttttatcacgagtttctccttctgtatcttccccattttctcttgctgtagatacgtaagaagtgccttttgcctcctgccataattctgaggcctccccagccatgtggaaatgtaagtccarttgaatctctttttcttcccggtcttgggtatgtctttatcagcagcatgaaaacagatataatacagcatgaatacagacataaaaattacatgtagttttcataaagttaaactatacttaattatatgcaacaaactgaacatttcagtggaattctgatagatgttgtcaattccaccttcttgtacactggtgaaaactcatagccagctagttcttggaaagtacattagtgtgatttggttccagaataactttatctgcatttgtatagaaagattctgcagaacttttataggtaagtactacactaaatgaaaagactagcaagtttggcagcaggaaacctggtcttctctgtattctcctttacagtattcatccccttctgacccatcatttctttgtatgtttaatgctactaaagctaatttatagctagatgaggtttacataaaatggtatgacatgtaaagtaattatggaa

SEQ ID NO: 547861 - DNA, 566 bp, Homo sapiens
atttcattaggactctgctactactgacaatacagctcactcagtgagatgccaaaaccaaaacatttaacatactctgcctcctcacactatatatatatatagcctatcaagttacccactgcatatatatatatatatatatatatatatatatatatatatatatawcctattatatactaggtaacttgcctgtgtaagatcacaggatttgggaaatataatttctatgttataactagcttctataatagattgcttagtaaaatgaataggattgggaaaaagataaaaaggaacttactgatggctgggtgtggtgtctcaggcctgtaatcccagcactttgggaggtcgacgcaggtggatcatgaggtcaggagatcgagactattctggccaacatggtgaaaccctgtctctactaaaaaatgcaaaaaattagctgggcgtggtggtgggcgcctgtagtcccagctactcaggaggctgaggcaggggaatcacttgaacccaggaggtggaggttgcagtgagcagagatcgcgccactgcattccagc

SEQ ID NO: 547862 - DNA, 566 bp, Homo sapiens
atttcattaggactctgctactactgacaatacagctcactcagtgagatgccaaaaccaaaacatttaacatactctgcctcctcacactatatatatatatagcctatcaagttacccactgcatatatatatatatatatatatatatatatatatatatatatataacctattatatactaggtaacttgcctgtgtaagatcacaggatttgggaaatataatttctatgttataactagcttctataatagattgcttagtaaaatgaataggattgggaaaaagataaaaaggaacttactgatggctgggtgtggtgtctcaggcctgtaatcccagcactttgggaggtcgasgcaggtggatcatgaggtcaggagatcgagactattctggccaacatggtgaaaccctgtctctactaaaaaatgcaaaaaattagctgggcgtggtggtgggcgcctgtagtcccagctactcaggaggctgaggcaggggaatcacttgaacccaggaggtggaggttgcagtgagcagagatcgcgccactgcattccagc

SEQ ID NO: 547863 - DNA, 566 bp, Homo sapiens
atttcattaggactctgctactactgacaatacagctcactcagtgagatgccaaaaccaaaacatttaacatactctgcctcctcacactatatatatatatagcctatcaagttacccactgcatatatatatatatatatatatatatatatatatatatatatataacctattatatactaggtaacttgcctgtgtaagatcacaggatttgggaaatataatttctatgttataactagcttctataatagattgcttagtaaaatgaataggattgggaaaaagataaaaaggaacttactgatggctgggtgtggtgtctcaggcctgtaatcccagcactttgggaggtcgacgcaggtggatcatgaggtcaggagatcgagacyattctggccaacatggtgaaaccctgtctctactaaaaaatgcaaaaaattagctgggcgtggtggtgggcgcctgtagtcccagctactcaggaggctgaggcaggggaatcacttgaacccaggaggtggaggttgcagtgagcagagatcgcgccactgcattccagc

SEQ ID NO: 547864 - DNA, 908 bp, Homo sapiens
ccaacaaaaataacagcaaaacctgccctaaatcaccttccttctcatcacctctcaatgagaatcaaagtcaaggacagtttactgagtaatgctggcaataatggacattgtagtaaatcatgcatatgatgaagccaaaatccacagtttaaagtagagtggaacggatgaraaaacaacccaaaaccctgattatgttatttctgatcgctagttggtggaccttgctttaaaacacctccatcccattcactttttgtcagagaaccctatttgcttccttcatagtaatggtcacagactatcttatctttgttctttggctttgtcctctaaatccccagcatctagcatatgttcagctcttggtggacatacatacagagcctcagcacttgctgttccctctgccaggaatgcccttctcccggacaccctcccagcgggctgctttgttccttcctgcaagtcatcacccaaatggcaccatcactcaaattcttccctcacttccctgtctctgggccctctccagcccatgccctgctgtatttttctccttgccctgttcttgtcactgcttaacatgttaccagcgcagtagagttacccatagtatgtaatgttattttcctttatgtcttttttgcttaacttatttagttgaatccttttaagctaaatatacttacaatgtaatttcactgaccttcaaatcgacttctatattgtgagtggcaaagaataaaggcatgtctgccaccgtcatgtaatatgtcctatttgagtatcttttagaaaattaacagctctatttatggcaattgattttaatatccttctatgtgggagaaatacatttagaattaaaattaacttagctaaattattgttttttattgggc

SEQ ID NO: 547865 - DNA, 941 bp, Homo sapiens
agccaagctgcactgagccttgagtcagagtagggaggatatctgccttttcttgtttggtggtgcttcaccagataaatagtgctaccttgtgttgtgaaatttcaataaaaatacaggtagcctgcatcagccctgataggaagcagatggaaccctcagcaggtttcgtgggtggtatgagtagggttagaagcagcagcaagagatggcaggcactcagggactgcactagcacctgggaggggcaggcacagagttcctggaggctgtagctgtgaaagaggggatgagcagcatgtaggagaatgtagccattgccaagttcatggccagaaagggaaaaagcaagtggagcagctaccctgacttcactccacttcctccgtgtgatagtctaaaatcttctccattgaccccgttcaaccagaagccagaggggcgggcagatcctgtgattgagaacaaagcagagaaagacagacgaggtctggaggcctaatcaagagtattggcacatctcttctcccctcttctctcctacaacatactaggcatgtgccttaggagctgggttggagtagaaatctkcaaagcagatgcctcactacagttaggacggtccctccctgctggggaacaatggcagattgtaattgtggtccttgattccttatccagaagttatttgaagctacaaataaacttctactgtgttgacccaggcggttcaccagatctcttcagatatgccttgttaggtgttgatttgggggcaaatctcaaagtctcactggcttaatccagtaaaaagttccgtttgctcacattcaagctccgtatgagtcaagtcttcctccctcttgtagatatcccccctggaacttggggcctccaaggtcaccacgagggagaggatcacataagatgttttttatggc

SEQ ID NO: 547866 - DNA, 651 bp, Homo sapiens
gcaccggtcagccttggtcagtgccggtcaatgttggtcagccttggtcagtgccagtcagtgttggtcagccttggtcagtgccggtcagccttggtcagtgtcggtcagtgttggtcagccttggtcagcaccggtcagccttggtcagtgccggtcaatgttggtcagccttggtcagtgccggtcagccttggtcagtgctggtcagtgttggttagccttggtcagcrccggtcagcactggtcagcctcggtcagccttggtcagcctcggtcagtgctggtcagccttggtcagctgtgtgccagctgcagcccctccccagctctccactctgtggggcgcgctgtccccctgggctagcctctgccgggtggggagctgcctggtgtcctacatggattctctggataatgcccccctctgtctgcaggtggccctcatgacactgacgctcttcccggtccggctcctggttgccgctgccatgatgctgctggcctggcccctcgcacttgtcgcatccctgggctctgcggagaaggaacccgagcagcccccggccctgtggaggaagtaagttgcgcgtgtgccgtgctctcctcctgggggggggtcacgcggccaaacagtgggaacccattctc

SEQ ID NO: 547867 - DNA, 651 bp, Homo sapiens
gcaccggtcagccttggtcagtgccggtcaatgttggtcagccttggtcagtgccagtcagtgttggtcagccttggtcagtgccggtcagccttggtcagtgtcggtcagtgttggtcagccttggtcagcaccggtcagccttggtcagtgccggtcaatgttggtcagccttggtcagtgccggtcagccttggtcagtgctggtcagtgttggttagccttggtcagcgccggtcagcactggtcagcctcggtcagccttggtcagcctcggtcagtgctggtcagccttggtcagctgtgtgccagctgcagcccctccccagctctccactctgtggggcgcgctgtccccctgggctrgcctctgccgggtggggagctgcctggtgtcctacatggattctctggataatgcccccctctgtctgcaggtggccctcatgacactgacgctcttcccggtccggctcctggttgccgctgccatgatgctgctggcctggcccctcgcacttgtcgcatccctgggctctgcggagaaggaacccgagcagcccccggccctgtggaggaagtaagttgcgcgtgtgccgtgctctcctcctgggggggggtcacgcggccaaacagtgggaacccattctc

SEQ ID NO: 547868 - DNA, 651 bp, Homo sapiens
gcaccggtcagccttggtcagtgccggtcaatgttggtcagccttggtcagtgccagtcagtgttggtcagccttggtcagtgccggtcagccttggtcagtgtcggtcagtgttggtcagccttggtcagcaccggtcagccttggtcagtgccggtcaatgttggtcagccttggtcagtgccggtcagccttggtcagtgctggtcagtgttggttagccttggtcagcgccggtcagcactggtcagcctcggtcagccttggtcagcctcggtcagtgctggtcagccttggtcagctgtgtgccagctgcagcccctccccagctctccactctgtggggcgcgctgtccccctgggctagcctctgccgggtggggagctgcctggtgtcctacatggattctctggataatgcccccctctgtctgcaggtggccctcatgacactgacgctcttcccggtccggctcctggttgccgctgccatgatgctgctggcctggcccctcgcacttgtcgcatccctgggctctgcggagaaggaacccgagcagcccccggccctgtggaggaagtaagttgcgcgtgtgccgtgctctcctcctggkggggggtcacgcggccaaacagtgggaacccattctc

SEQ ID NO: 547869 - DNA, 620 bp, Homo sapiens
ggtcgtgggagagtctgggcaggactctcgtgggtgacaggcaagcgggaaatgataaaatcgtccaaataatgcacagtcacaccatttgtccaagtagattttaacattctcgagggagaaaactcccattgcgtgtggatggcctgttcacacctacatttccctaattaaacaccctatgarcaccccaggcctgggctgcatgtgctcttgctgtgtgcccagctctcagggttagcatgtgatcaaagagaggggacagcaggagaaagtggggggcacacagagccaggggcagtggccgcagaggtgccaccagggcaagagcctgagagttcccggtacccaacgccctgttaaagctgccaagtgctgccatgtggggactgccttccttttgtttgggcagtgtgggaaatgttgactcattgaagtgatgttcagataacagaattggagaggaaaacttagtgtagtgattagtccagtgattcgttgttaagaatgctagaaggaaagaacacgtgttattattttaaacgatcagactagcgaagtctatttggaagttctcagtctggaaggaaggaaggaaacagaaaggtgcccagcccttc

SEQ ID NO: 547870 - DNA, 1382 bp, Homo sapiens
cctttagcatttatttgcttatgtttctataggcttgctaaccatatagcaggattatttcaacragttgggtattttccagaacccatgcaaagttttaggcctctgagcagctttagttagtcaaaatgacatacatgggggtccttttttgttagtagggctgtctaatgcagggaatggtttaggttgatatgtgccctttctgatatgttcagtttctctgtgtctggtatcaactttaacttcaaggagaactttgaacctggtggacaagaaatgagagtagaaaaggaaacctcgacttctcctatatcctgaaaaccaaactcatattgtcttaaatgtcttctatcattaatttctctctatgggtcctaatttgggaaaagaaaaatgtattttgtcatgtaacttcttctttaatagctccattcacaatcagacaaatattgaacttaaacccagtgatataacatgatcttgtttcccagtgtcttgccagaaatgaggagttgtatgtctggtaccactttatttgggatctataccaagctgagcaacacctgggggatgccagggaactctcccctcactgaaaaaagatattcaccaacagttgggaggacctaaaataaaaaggaccatcaggatatggcttcccagctcttactcactcaacaaatatttgggggatcctcttttgccccaggcattgatcttagtgctgggaataaagtgataaagaaaacacataccttggcctggaagcattcacagcttcacgtgttagccttcctctctgggatctttctgtcccggagacaagtctttttctctctgtcccagttgctttctattttatcaggaaggtggcaggtctttactgcggtgtttatacatctccttattgaaggacacctattaaagctgtaggagcagcaggacttaagaagaataaaaggactagagttttagatgactaaaaatgtaacagtcaacagcagctgcactgtgactgctaaaatctcttaagacatgtagaactgcatgaatgaaagtccagtctgtttctcatagaaatcctgttacattccactctggtcagacaacagctagagtatctggttgttctaagtatcacatactacaaggagaaaatgacaaactaggatgtgccagtaaaatattacacagaaaagtcagctcccgaagcaattccctgctacaagtctcactctctcgaaaacttaaagaaattgaaggttagaaaacaaagtgtgcattgcatgtattttaggtatttggaggattgtgatataaaatataggggttaggcttaaaattcatttcaaattttagcattaaaagagatcctatgg

SEQ ID NO: 547871 - DNA, 724 bp, Homo sapiens
tgtcctcaggatctcacaaggctgccatcagagtgcccgtggcctgtgtttctttctggagtttgggatcgttttccaagctttcatgattatcagctgacttcagttcctttcagctggaggactgaggtccctactcagttgctggctgccagctggggaatgctgtcagcatctggattcctcrcaattcctgggccttctcacaacatagctgctcatttcttcaaggccagtgggagaatctctccctctgtaataagaccatgagagtgacctcccaccaccttcttcatactccctgttggctagaagccagttacagtttctgcctgcgctgaaggggaggggctgatagatggctgtcactcgttggggccatcctagaatgctgcctggcatgggtggttgggaaggatgcccagctgccagggagggctgcatccaaaggcttctactttatctgggattcatctgcttaaataaatttaaatgcagaaatggaattccaaatggaatacagaaagtgtgaatgatcccagctttacactctagttgtgccctaaagctccattaggcagtcaattgttggaagttaagtactttaatgaaggactttctttttctaggtaatatagtatagaaggtagaccttagagccagactgcctgggttcaaatcctggctgatacttgccctgtgcagttttgggcaagtcattcag

SEQ ID NO: 547872 - DNA, 724 bp, Homo sapiens
tgtcctcaggatctcacaaggctgccatcagagtgcccgtggcctgtgtttctttctggagtttgggatcgttttccaagctttcatgattatcagctgacttcagttcctttcagctggaggactgaggtccctactcagttgctggctgccagctggggaatgctgtcagcatctggattcctcgcaattcctgggcctyctcacaacatagctgctcatttcttcaaggccagtgggagaatctctccctctgtaataagaccatgagagtgacctcccaccaccttcttcatactccctgttggctagaagccagttacagtttctgcctgcgctgaaggggaggggctgatagatggctgtcactcgttggggccatcctagaatgctgcctggcatgggtggttgggaaggatgcccagctgccagggagggctgcatccaaaggcttctactttatctgggattcatctgcttaaataaatttaaatgcagaaatggaattccaaatggaatacagaaagtgtgaatgatcccagctttacactctagttgtgccctaaagctccattaggcagtcaattgttggaagttaagtactttaatgaaggactttctttttctaggtaatatagtatagaaggtagaccttagagccagactgcctgggttcaaatcctggctgatacttgccctgtgcagttttgggcaagtcattcag

SEQ ID NO: 547873 - DNA, 724 bp, Homo sapiens
tgtcctcaggatctcacaaggctgccatcagagtgcccgtggcctgtgtttctttctggagtttgggatcgttttccaagctttcatgattatcagctgacttcagttcctttcagctggaggactgaggtccctactcagttgctggctgccagctggggaatgctgtcagcatctggattcctcgcaattcctgggccttctcacaacatagctgctcatttcttcaaggccagtgggagaatctctccctctgtaataagaccatgagagtgacmtcccaccaccttcttcatactccctgttggctagaagccagttacagtttctgcctgcgctgaaggggaggggctgatagatggctgtcactcgttggggccatcctagaatgctgcctggcatgggtggttgggaaggatgcccagctgccagggagggctgcatccaaaggcttctactttatctgggattcatctgcttaaataaatttaaatgcagaaatggaattccaaatggaatacagaaagtgtgaatgatcccagctttacactctagttgtgccctaaagctccattaggcagtcaattgttggaagttaagtactttaatgaaggactttctttttctaggtaatatagtatagaaggtagaccttagagccagactgcctgggttcaaatcctggctgatacttgccctgtgcagttttgggcaagtcattcag

SEQ ID NO: 547874 - DNA, 724 bp, Homo sapiens
tgtcctcaggatctcacaaggctgccatcagagtgcccgtggcctgtgtttctttctggagtttgggatcgttttccaagctttcatgattatcagctgacttcagttcctttcagctggaggactgaggtccctactcagttgctggctgccagctggggaatgctgtcagcatctggattcctcgcaattcctgggccttctcacaacatagctgctcatttcttcaaggccagtgggagaatctctccctctgtaataagaccatgagagtgacctcccaccaccttcttcatactccctgttggctagaagccagttacagtttctgcctgcgctgaaggggaggggctgatagatggctgtsactcgttggggccatcctagaatgctgcctggcatgggtggttgggaaggatgcccagctgccagggagggctgcatccaaaggcttctactttatctgggattcatctgcttaaataaatttaaatgcagaaatggaattccaaatggaatacagaaagtgtgaatgatcccagctttacactctagttgtgccctaaagctccattaggcagtcaattgttggaagttaagtactttaatgaaggactttctttttctaggtaatatagtatagaaggtagaccttagagccagactgcctgggttcaaatcctggctgatacttgccctgtgcagttttgggcaagtcattcag

SEQ ID NO: 547875 - DNA, 1296 bp, Homo sapiens
agaccccacccctgtccgaaggcgccatcgcccaccacctccctcctcgtgccggccctgcttctccccagttccaaccccaggaaaacgtgcttctcctggaggcaaccctctttttccaccctcgccctgttgttcccggaaggcaggcctggaatgtgaagtttccaggtagatggatattaaacatagaattgaagaaaaaaaaaaaaaccccacaaagtaacaaaagaatgaagcggcgaaagcagaaatttactcaaccaagaaagcaccccacagggtgggggtgggcccaagcgagcgtctccagggccccatttacaaagtttttggaggttatttttttttgaggtccctatgggctaccccttatctggatgaagaatttggcccttggccaaggaaataactgaggtaaattggcctgaggccagagcagatgggtgccctatgcagatgaaggggtggccggtgcttggccttggccactcctgggctctttctctttccacctgcgacctggtggaagggggagggtgttagggagagtagcctttgatcctttgttactttgggtgggaagatggggtttttccttttagtctagttttggaaagttcgcgttaattggttttagattccctgcctccctagacccaggacccatgtggttttttttgtttttgtttttgtttttttgatggagatggggtcttactctgctgcgcaggccgaagagcggtgaccggatcacagctcactgcagcttcaacctcctgggctcaagggatcctcccacctcagcctgcagagtagctgggaccacagccgcgcgccaccacaccgcgccaatttttgtgttcttggtagagaccgggttttgccttgttgtctaggttgggctccaactgcagggctaaagcgatccaagagcatcagcctcccaaagtgctgggattacaggcttgagccaccatgcccgccttatttcttaatttaaaaaaaaaaatgtatatgtagactgaacgcrgtggctcatgcctgtcatcccagcactttgtgaggccgattctcctctatccaggagacgggtttcaccattttgccaggtttgtctcaaactcctcggcttaactgatccgcttgctttggccttccaaagtgctaggattacaggagtgagccaccacacgtagccagtcctggcattttgtagaaggatggccaacgcagcctgttgacccttcctggccatcacatgaaaatcagcgactcttccttcttacaaaactc

SEQ ID NO: 547876 - DNA, 1296 bp, Homo sapiens
agaccccacccctgtccgaaggcgccatcgcccaccacctccctcctcgtgccggccctgcttctccccagttccaaccccaggaaaacgtgcttctcctggaggcaaccctctttttccaccctcgccctgttgttcccggaaggcaggcctggaatgtgaagtttccaggtagatggatattaaacatagaattgaagaaaaaaaaaaaaaccccacaaagtaacaaaagaatgaagcggcgaaagcagaaatttactcaaccaagaaagcaccccacagggtgggggtgggcccaagcgagcgtctccagggccccatttacaaagtttttggaggttatttttttttgaggtccctatgggctaccccttatctggatgaagaatttggcccttggccaaggaaataactgaggtaaattggcctgaggccagagcagatgggtgccctatgcagatgaaggggtggccggtgcttggccttggccactcctgggctctttctctttccacctgcgacctggtggaagggggagggtgttagggagagtagcctttgatcctttgttactttgggtgggaagatggggtttttccttttagtctagttttggaaagttcgcgttaattggttttagattccctgcctccctagacccaggacccatgtggttttttttgtttttgtttttgtttttttgatggagatggggtcttactctgctgcgcaggccgaagagcggtgaccggatcacagctcactgcagcttcaacctcctgggctcaagggatcctcccacctcagcctgcagagtagctgggaccacagccgcgcgccaccacaccgcgccaatttttgtgttcttggtagagaccgggttttgccttgttgtctaggttgggctccaactgcagggctaaagcgatccaagagcatcagcctcccaaagtgctgggattacaggcttgagccaccatgcccgccttatttcttaatttaaaaaaaaaaatgtatatgtagactgaacgcggtggctcatgcctgtcatcccagcactttgtgaggccgattctcctctatccaggagacgggtttcaccatkttgccaggtttgtctcaaactcctcggcttaactgatccgcttgctttggccttccaaagtgctaggattacaggagtgagccaccacacgtagccagtcctggcattttgtagaaggatggccaacgcagcctgttgacccttcctggccatcacatgaaaatcagcgactcttccttcttacaaaactc

SEQ ID NO: 547877 - DNA, 533 bp, Homo sapiens
tgagagtacctggaacaaatatgtagtcaaatacaaatgattttttaagtaagtgcttctgtggcttatgaactctatttgtcatgatagrtactccagtgcaggggtcagcaaacttcttctgtagaaggccagatagtaaatattttcacctttgtgagtcatatactctccgctgcaactactcaattctgctatagtggggtgagagcagctttagacggcactttaataataaaggcctggcagtgttcaattaaacttaattgataaaccaggaagcaggctggatgtggcccatgggctgtagtctgcctacccttgccctaatgaattggcaaacctcactattataacttgaaaacaaacaagctacatcacttcagttatacacattacacatttttctacttgccaatgtacaattagctaaagtaaaaaatattgaaagattatttataaagttgcaagtctaaaaatcttgcaatgtctaaaataatattttaggtaaagtctaaaaataatatttattg

SEQ ID NO: 547878 - DNA, 577 bp, Homo sapiens
ataggataagaatgttccacagctgggtgcgatggctcatgcctgtagtcccaatactttgggaggccaaggcaggaggattgcttgaacccaggagttagagaccagccagggcaaccccatctctacaaaaaatacaaaaattagctgggcatggtggcatgtgccagctactcaggaagctgaggtgggaggatctcttgagcccgtgaggtcaaggttgcagtgagctgcactgcattctagcctggacaatagagtgagaccctgtctcaaaaaaacagaaagtttctaaaactgctgttcataacaccaccacaaagcaagagacttgttacataaaatgtgaatcatccaaatgataaagcactatgcatttattaaatgatggtaaaaactagatgtattaatatgtaaaattataataaggcagatatagcataagtggtaaatatagtaggagtytattttttaaaggaaattgtatacatatactcagagaaaagtttggaaacatgtacaaaatattaaccatagttatctctccatagtaggataatggctccatatctttcaa

SEQ ID NO: 547879 - DNA, 814 bp, Homo sapiens
tgcctggtatcaagaacaaaaacatctgatagcctgtttgagggcatcttcctcatggtacttttccccctcatgataactgaaaacaagcagaacaataaaacacatgtcctttcctttctttctttccttattttttttttttttgagacactgtctcactgtcaccaggctagagttcaatgcaacctccgacttcagggttccagcgattctcctgcctcagcctcccaagtagctggaattataggcgcccccctccccccaccaccatcaccatgcctggctaatttttgttttttcagtagagatggggtttcactatttggccaggatggtctcgatctcttgaccttgtgattcacttgccgcagcctcccaaagtgctgggattacagacgtgagccaccttgcccggccaacagatgtcctttcaatccaatacatgtcctccctccctaaaccaaatttttcctggaaggtgggacaggaaggaaagactaaaataaaaggttgcatttatagtttggccacagagtaaatcagatcatgtttatcaaatgaaataaatcaataaacatgaaaaagttcaggagattctgacccatgcctccaggtatgcatttgatagagacattaccagactcaaagttgagttattgcagaatttaaaaaaaaaatgattatgtccaccagtgacacagacggattcataacaggaggaaaggaggatattyagctgctttaatttttctctccagccagattataacattaagagacaagttttgtacaaaatattagaccatgccat

SEQ ID NO: 547880 - DNA, 1118 bp, Homo sapiens
tgatcatctaagagctctgggccagacactacaggtgtaaaggtgaataaaggcctaatcttttgtttttgtttttgtttttcttgagacatggtctccctctgtcacccaggctggagtgcagtggtacgatcttggctcactgcaaccccagcctcctgggctcaagtgatcctcctgcctcagccttccgagtagctggcactacaggtgtgagccaccacacctgactaatttttatattttttgtggagatggggttttgccatgttgcccaggctggtctccaactcctgagcccaagcaatccacccacctcggctttctaaagtgctgggattacagcgtgagccaccacactggccaataaagccraatcttagctcctaagaagttcacagccagagtggggagagtgactaaacaaatgaccatggtgaatttcataacttcagatgagaaaggtataaaggaagagctttggaaggagagagctgccccctcctccaggggctcactcacctgtgggctctgtagaagccctctgaaaagcagtttctcagcacagtgagctcgaagtcgtctccattcacacctggagcaccgccctgtattgcaaatgggagggtaaagttggtgtaaattttatggagggcaatttggcaataactaacaaaattttgccaccattttctcttctaggactgcttctttccttgcatgtgtatgaaattacatttgtataaggtgttgcatggcagcactgttggtaataactaagactggaagtaacctctgtgctcaacataaataacaatgatggtgcaactgcataaagaaatactatgcaactataaaaaaaagaggaacctctttaggtactgatctggatcattccaagatatcctgatatatgaaaaagcatgtatctgaaccctgttatattaataatatgctgccttttgtaggaaaaaaaggaaaaaagtatatatatgcatacacactcatataatttgtatatgtataaactagctctggaaggaaacaaaagaaaccagtagatcctctggggaagggaactgggtgtcccagagtgggaaactccactgtgtattctt

SEQ ID NO: 547881 - DNA, 596 bp, Homo sapiens
gacagggttttatcaccttcaaagatastagataataccatattgccctcctaaattgtggtactaattaactctattaatagaaatggtaaacatttcaaatttcacagattttcactggtacttggtgatcctcagctgtctcctcatttagaattttatgttcttcaataacctttaaaaattatctcaattttacaaacacttatttttaggtatcatgaagtttttcttgctattctaagtatttttattacattttttatttgcttgtcactgacatatagaaatactactgctttttatagattgattcttctggactataatctagtgaaactgtcttatgggttcaatattcttactaaaggacatatattatttaatattctttccatgaagttggactgtgagtggtaaacactcacaataaagatatttgcccccagttttaatatttttctctttgtcttgctggttgacaggttttctactaggggtagacttattttttatcatcctcaaactgaggatttataatagtttttaactcatgatcattcttctctccttcattatttttttgaatattgttt

SEQ ID NO: 547882 - DNA, 641 bp, Homo sapiens
agcccctaagagaaaaattttctagctgcctctgtaggcttgcaggaagaattttctagcccccatttcactgtctgaaagcatttctagtgtccctgcttcagkgagttcagctgcaatttccgtctgtgggtccaaatcctagtgtcaagtcctagtgagggcattaaaactccaaactttagccctgatcttagaactaagacttgtctcccaccctccaccccatgaccccagttgctcagtttagcttgagcttttgcttatgcttaacttagatttccctctttggtctgacatctaggaatttccctttctttcttgaatctaaatgtttataaatctatttgctatgtttatgcagcatatctgtatttttaaaatagcaaaagtgggagaagtgatgtccatatcagctcagtatgtcattttacccacaggaaaaataatacagcctcaactgaaatgggctcatcacagagcagtcatttaaaatttataaaacaaaaaacaattaggcccaagacttcctaatgaagctctttttaaaaatgtcttcacacttcagtaagatatttctttctgataaaaaaaaactatttaaaaactcatatgttatagtataagagaataaaggtaca

SEQ ID NO: 547883 - DNA, 641 bp, Homo sapiens
agcccctaagagaaaaattttctagctgcctctgtaggcttgcaggaagaattttctagcccccatttcactgtctgaaagcatttctagtgtccctgcttcagggagttcagctgcaatttccgtctgtgggtccaaatcctagtgtcaagtcctagtgagggcattaaaactccaaactttagccctgatcttagaactaagacttgtctcccaccctccaccccatgaccccagttgctcagtttagcttgagcttttgcttatgcttaacttagatttccctctttggtctgacatctaggaatttccctttctttcttgaatctaaatgtttataaatctatttgctatgtttatgcagcatatctgtatttttaaaatagcaaaagtgggagaagtgatgtccatatcagctcagtatgtcattttacccacaggaaaartaatacagcctcaactgaaatgggctcatcacagagcagtcatttaaaatttataaaacaaaaaacaattaggcccaagacttcctaatgaagctctttttaaaaatgtcttcacacttcagtaagatatttctttctgataaaaaaaaactatttaaaaactcatatgttatagtataagagaataaaggtaca

SEQ ID NO: 547884 - DNA, 1316 bp, Homo sapiens
taaactttctaaattaaagtttaaattttattaaactttaatttagaaataaactttcaaaataactttctaaattaactaagacctgtctcagatttcctgggtccacaatcagcaagatrttttatcccttgtgtttcaatatgaaatcataatgttgttgtataaggtgcaggcatgtaaatatccagtttatggatagacaatagtagcccaggaacaaccattccagcaggctaggggttgcagagttctctgagttcttgatacagcagcagagagcaaggacaagtgagacaaattctaagacataaataaatctttctgggcaatcttagagacacaagaaagccgatgggagggaatgtaggtaaatatggacttcctgttaacttggcagctatggcttcagagttgtgattacttccagtttaaatggagaagaaactctgtttatatctcaagctaaaaaaaaaataggttatacatgttacagatatatgttttgaggcggtaatcacttatgccatttccagtcatatctgaagagagttactagaaaagtaacctacctgagagtcaggctgcttttattttcttatataatcatagtacacctgttgtttaaacctggaaaagttacttaatctttctattccttagctttcccatctgtaatggagattacagttgctaatggttgtacagagaatcaagtgagttagcctatgacaacacttggatcatgtaattagaaagcattatctttgtgatcaatgttttctggtagtttccagaaagatgccttgcatatattaaaaggacatttggaattgcatttatgtaactagtctaaaatcatatcatgtaaatgcttatttcagtatgtagcactcctactctgcaaaaattctgtagttatttttgctgacattagagcctttaatgtttcaaaattacatgaataatcacagatttcaaaagtgtcactcacaaatagcaatttaatgacaacactgtactgctgcaattccttaaatatttattggagagtgattcatctacattttgtgaaggaaatctgattttccaagaagatactgaccccgtaagaatctatgaaatttagaccaactcacagtgtttataattgattcacctacttgtaaggtctatcgattataaaatgaatgataatgtttcacatctgctttcatttatgacttaaactaatcaggaaacaaataataataacatatgaaaagtgtaacagtaaacaaagttagaattacagaaaataaagaaggcagcatgca

SEQ ID NO: 547885 - DNA, 600 bp, Homo sapiens
gagaagcaagaaagaaggtcctgcaagaaaaaaggggccaattttgtacatgaagagccagatgaatataagcaataagaacaaacatttattgatcacctactgcgtacaagaccttgccatgagtgctatatgtgaagagatattaagtctcatttgtaattagttctcagcacaagtagaaatgatcataggactgggaatatttagttctgaaaatgttctaaggagatgtcagagaaaatgggcaaccatgtctccatggcccaagaaaatatgaacctaatggcatgacaagtttgtatctacagagtcccaaagcaacaggtcaattaagtaagtctctctccctgcctttccacatctggtgccacagtcctctgctaaactgaagattccaaaatgtgtaactctagccttttgcctgagcttcagactcatgtcctactgcccacaggacatacccacctggatgtgacgcacaggtcatgtcagcrtaagtatgagcgtatgttcatgttgaaattgagtgtacttttccccctagagctgctctctgtcctaattttttatcgcaagtactggtactatcaagctaga

SEQ ID NO: 547886 - DNA, 815 bp, Homo sapiens
attttgattaacataatttatatgagaatctttaaagaagtgcttctaatcatgacaatttaacttagaatgtgacaaatgttaacagtgyctcaaatatagttgaccttcaaaatgttagttcaaaatattacagtttactcacattatatgttgtcataaatattaaattgtgtatgataaattttgcaaatgttcagcactctctggaccccttctttttttggggcttatgaaaacactgcactcctattcccttgaagctaggcatggtcatatgacctgcactggctaatgaactacgaataacaggtgttggtgttaggacgtggcatttaaaagcttcatgtgaatctcctactctcctttgtggtctctattccaaatagtggaacctctgtcagtctgatgctggagagtaaataagcccactaccactcttaccctaggcaagcaacaattaacatataagggaatgaagagagaaataaatcttcactgagaactgggagttgtcagtatccccaatttaacctagagcatcctgacttacacttggaggaattcaaactatgctgcctgtgaactagagaggagattgcttttgctgaaaatattgttaaccctctatccccaccactagtttcttgtccttatgttttcaatgacagaaatgagggcaagatttcaaatttttttattgtaatccaaggggaaatagtaaaatcagaacttgtttgctgactcaaaacccagggtacaactaatggaaattgcacctggtttttatcatagcaaaaaatttcccccactgc

SEQ ID NO: 547887 - DNA, 815 bp, Homo sapiens
attttgattaacataatttatatgagaatctttaaagaagtgcttctaatcatgacaatttaacttagaatgtgacaaatgttaacagtgtctcaaatatagttgaccttcaaaatgttagttcaaaatattacagtttactcacattatatgttgtcataaatattaaattgtgtatgataaattttgcaaatgttcagcactctctggaccccttctttttttggggcttatgaaaacactgcactcctattcccttgaagctaggcatggtcatatgacctgcactggctaatgaactacgaataacaggtgttggtgttaggacgtggcatttaaaagcttcatgtgaatctcctactctcctttgtggtctctattccaaatagtggaacctctgtcagtctgatgctggagagtaaataagcccactaccactcttaccctaggcaagcaacaattaacatataagggaatgaagagagaaataaatcttcactgagaactgggagttgtcagtatccccaatttaacctagagcatcctgacttacacttggaggaattcaaactatgctgcctgtgaactagagaggagattgcttttgctgaaaatattgttaaccctctatccccaccactagtttcttgtccttatgttttcaatgacagaaatgagggcaagatttcaaatttttttattgtaatccaaggggaaatagtaaaatcagaacttgtttgctgactcaaaacccagggtacaactaatggaaattgcacctggtttttatcayagcaaaaaatttcccccactgc

SEQ ID NO: 547888 - DNA, 1047 bp, Homo sapiens
ttttatcgaaatcttgaaataggttttaatcaaagtttgactgaccttgacktgatattttgagtcctttttcatttttgtgactaggaagtaaaaacaagttctgccttttatattcttcatgagttatgaatttaattttcttgacatcttacttcaaaatcaagggcaatatgtatttttctttttaattccaaatggaaactggctgaattcacaataaagacaactgaaaattggaattgtttaaaaattaaaaaaaaaaatacaccgttgtagcagattttaaatgaagtaggttatcaagtggactgctaatttttgcctttccaaaatgttggatatttaaccctcagaataattaaatatttgtaataaagcagttaattcaagcagtttattgctgtaatttgcaaaagtacattgagctgctttcttttcagctcattgatggaggaacaaacatttctttaataagactacagcacattctaattttgttgcaaaagcttagataaggatcaggccccctctgaatcactgcattgacctatgacattgaaagtgctgaagctctttggcaaaagaagagttagacattcattattatgcacaggactttccagttctaaaggggctctgtgctttctctcagatagactttgtttgttggaaatgagaactgtattttggcagcaaaggaccagaactgaagctactctgcaggcagaatcattatgacataatccttcattaatcctcattctctattaatagatcatgcagaagttttcctttagttgatcatcttcatcaaggagctatggaaaagcattaccagtgaaatgcccacctctggttttaagactgtttgtttatatccatctttattagttgcaaagattaatggtgaaaataatctcttagactttgcttggtatacaaaccacatatgaggacctaaaaaatctgatataactgaattttcatgttttgggggtaaaactcacctggaaataaaacatagcacttaacaataaaaaagaa

SEQ ID NO: 547889 - DNA, 1047 bp, Homo sapiens
ttttatcgaaatcttgaaataggttttaatcaaagtttgactgaccttgacttgatattttgagtcctttttcatttttgtgactaggaagtaaaaacaagttctgccttttatattcttcatgagttatgaatttaattttcttgacatcttacttcaaaatcaagggcaatatgtatttttctttttaattccaaatggaaactggctgaattcacaataaagacaactgaaaattggaattgtttaaaaattaaaaaaaaaaatacaccgttgtagcagattttaaatgaagtagrttatcaagtggactgctaatttttgcctttccaaaatgttggatatttaaccctcagaataattaaatatttgtaataaagcagttaattcaagcagtttattgctgtaatttgcaaaagtacattgagctgctttcttttcagctcattgatggaggaacaaacatttctttaataagactacagcacattctaattttgttgcaaaagcttagataaggatcaggccccctctgaatcactgcattgacctatgacattgaaagtgctgaagctctttggcaaaagaagagttagacattcattattatgcacaggactttccagttctaaaggggctctgtgctttctctcagatagactttgtttgttggaaatgagaactgtattttggcagcaaaggaccagaactgaagctactctgcaggcagaatcattatgacataatccttcattaatcctcattctctattaatagatcatgcagaagttttcctttagttgatcatcttcatcaaggagctatggaaaagcattaccagtgaaatgcccacctctggttttaagactgtttgtttatatccatctttattagttgcaaagattaatggtgaaaataatctcttagactttgcttggtatacaaaccacatatgaggacctaaaaaatctgatataactgaattttcatgttttgggggtaaaactcacctggaaataaaacatagcacttaacaataaaaaagaa

SEQ ID NO: 547890 - DNA, 1051 bp, Homo sapiens
cacactctcctgatttctcagaaggtcagataaataacttaggtttagtttggtgatatgcaactttggcacgagtgactgcattttggttcagtctgtttggtttgatctgtagagtagaagctcaatccatattagtagtctcccataaattttatttaacacaagtaagcttaagtaaccttgttctaaatagaaagactcacagttgcaaacatcttcrgttttcctgtatctaaaatgtattgcagttcaaatgaagactccaagttcttgtttgtctgtttgctttgagaaggaacagacaaacttaacataagatgagtctaaatttatctggggagtggaacactaaacaaacatgttagaaaaattttgaggaaataaaggaagaatatttgttccaccatatattataacatattgcatagttataataattttatggttctggcccaggaataggcagatggatgaaaccaattagtgtcctgaaataaacccccaagagtacgtagattttagtattaaatctttcaaatctgtcattctttttgggatgactgatcttgccagatatatgtaaagctggatacttagtaagtctagtttgtttcgtagaaatattagaagaaaatacaagtgaatgttgttatagtacagaagaagggaaagcctttggagtaaaaatagtgaaatacagatgctaaaatggagagaacttataaattttaccatatgcaaatgtaaaactttgttacaatagatgccttaagttaaagacagaagaggaaacaaatattggcagcatgtatagcttactgtattagtcagggcccagttaggagccagaaactatactaggcatttgaacagagcaaatttaatataaagaattattaatggccggtcgcggtggctcatgcctgtaatcccagcactttgggaggccgaggcaggtggatcacctgaggtcaggagttcgagaccagcctggccaacatggtgaaaccctgtctctactaaaaatacaaaaattagccggacgtgg

SEQ ID NO: 547891 - DNA, 1051 bp, Homo sapiens
cacactctcctgatttctcagaaggtcagataaataacttaggtttagtttggtgatatgcaactttggcacgagtgactgcattttggttcagtctgtttggtttgatctgtagagtagaagctcaatccatattagtagtctcccataaattttatttaacacaagtaagcttaagtaaccttgttctaaatagaaagactcacagttgcaaacatcttcggttttcctgtatctaaaatgtattgcagttcaaatgaagactccaagttcttgtttgtctgtttgctttgagaaggaacagacaaacttaacataagatgagtctaaatttatctggggagtggaacactaaacaaacatgttagaaaaattttgaggaaataaaggaagaatatttgttccaccatatattataacatattgcatagttataataattttatggttctggcccaggaataggcagatggatgaaaccaattagtgtcctgaaataaacccccaagagtacgtagattttagtattaaatctttcaaatctgtcattctttttgggatgactgatcttgccagatatatgtaaagctggatacttagtaagtctagtttgtttcgtagaaatattagaagaaaatacaagtgaatgttgttatagtacagaagaagggaaagcctttggagtaaaaatagtgaaatacagatgctaaaatggagagaacttataaattttaccatatgcaaaygtaaaactttgttacaatagatgccttaagttaaagacagaagaggaaacaaatattggcagcatgtatagcttactgtattagtcagggcccagttaggagccagaaactatactaggcatttgaacagagcaaatttaatataaagaattattaatggccggtcgcggtggctcatgcctgtaatcccagcactttgggaggccgaggcaggtggatcacctgaggtcaggagttcgagaccagcctggccaacatggtgaaaccctgtctctactaaaaatacaaaaattagccggacgtgg

SEQ ID NO: 547892 - DNA, 674 bp, Homo sapiens
atataaaaaattagctgggcttsgtggtgcacgactataatcccagctattcgggaggctgaggcagaagaattgcctgaaccccagaggcggaggctacagtgagccgagatcgcaccactgcactcctgcctgggcaacagagcaagactgtctcaaaaaaaaagaagagaaaagaaaaagagttgcccaaagatgtcaggcgacctggcactccccacaattaacaactcaaagctgccttgtaggattcattgatttaagaaaataaaggaagtcactaccttacacccaggagcatggctactatcataaaaccagaaaataccaagtgttggcagggatgtgaaggaattagaattcttgtatatagttgggggatcataaaaatggtccaggtgcaatgaaaaaaaaaatatgacaggtccccaagttatgaaacacacaattaccgcatgatccagcaattccacctctacatatatacacaacagaagagactacgggggtctaaaagagatatgcacacactcatgttcacagcagcactatgcacaatagtcaaagcgcagaagcaacccaagacatcaataacaaatgaatggataaacgaaagatggtacagttggttgtccctctctatctgtgtgggattggttccaggacctcccacc

SEQ ID NO: 547893 - DNA, 674 bp, Homo sapiens
atataaaaaattagctgggcttcgtggtgcacgactataatcccagctattcgggaggctgaggcagaagaattgcctgaaccccagaggcggaggctacagtgagccgagatcgcaccactgcactcctgcctgggcaacagagcaagactgtctcaaaaaaaaagaagagaaaagaaaaagagttgcccaaagatgtcaggcgacctggcactccccacaattaacaactcaaagctgccttgtaggattcattgatttaagaaaataaaggaagtcactaccttacacccaggagcatggctactatcataaaaccagaaaataccaagtgttggcagggatgtgaaggaattagaattcttgtatatagttgggggatcataaaaatggtccaggtgcaatgaaaaaaaaaatatgacaggtccccaarttatgaaacacacaattaccgcatgatccagcaattccacctctacatatatacacaacagaagagactacgggggtctaaaagagatatgcacacactcatgttcacagcagcactatgcacaatagtcaaagcgcagaagcaacccaagacatcaataacaaatgaatggataaacgaaagatggtacagttggttgtccctctctatctgtgtgggattggttccaggacctcccacc

SEQ ID NO: 547894 - DNA, 543 bp, Homo sapiens
cagaatcgtaaagggatatgctcagtctcacagccagcctgtggatctcagtcccaacactcacccttgtgctactgagtcagctctaagaaaatctgccaaaagtaggccgagggctggttttttgttttgttttgtttgtttgatacagggtcttcactctgttgcccaggctggagtatatcatggctcactgcarccttgacttgggctcaagcgatccgctcaagtagctggaactactctcaagtagctctcaagagcctctcgagtggctggaactacaggcgtgcaccaccacagctggttaatttttaaaattttttgtagagacggtggaggaggttctcactgtgactcagtgtgtgcccgacagcagagcccacaccactccagttgcagtggttgccatctgggtcatcagacctggctgtcaggggtgcagccacaggagagccaacagcagagggtgctggccgctgagctagctgctaatgctggcctgggtgcagttctcatccaaagtacccggtgggtgggagt

SEQ ID NO: 547895 - DNA, 543 bp, Homo sapiens
cagaatcgtaaagggatatgctcagtctcacagccagcctgtggatctcagtcccaacactcacccttgtgctactgagtcagctctaagaaaatctgccaaaagtaggccgagggctggttttttgttttgttttgtttgtttgatacagggtcttcactctgttgcccaggctggagtatatcatggctcactgcaaccttgacttgggctcaagcgatccgctcaartagctggaactactctcaagtagctctcaagagcctctcgagtggctggaactacaggcgtgcaccaccacagctggttaatttttaaaattttttgtagagacggtggaggaggttctcactgtgactcagtgtgtgcccgacagcagagcccacaccactccagttgcagtggttgccatctgggtcatcagacctggctgtcaggggtgcagccacaggagagccaacagcagagggtgctggccgctgagctagctgctaatgctggcctgggtgcagttctcatccaaagtacccggtgggtgggagt

SEQ ID NO: 547896 - DNA, 543 bp, Homo sapiens
cagaatcgtaaagggatatgctcagtctcacagccagcctgtggatctcagtcccaacactcacccttgtgctactgagtcagctctaagaaaatctgccaaaagtaggccgagggctggttttttgttttgttttgtttgtttgatacagggtcttcactctgttgcccaggctggagtatatcatggctcactgcaaccttgacttgggctcaagcgatccgctcaagtagctggaactactctcaagtagctctcaagagcctctcgagtggctggaactacaggcgtgcaccaccacagctggttaatttttaaaattttttgtagagacggtggaggaggttctcactgtractcagtgtgtgcccgacagcagagcccacaccactccagttgcagtggttgccatctgggtcatcagacctggctgtcaggggtgcagccacaggagagccaacagcagagggtgctggccgctgagctagctgctaatgctggcctgggtgcagttctcatccaaagtacccggtgggtgggagt

SEQ ID NO: 547897 - DNA, 926 bp, Homo sapiens
taactgctttctgagggcatcctgcgtgccaggaacacagcatcccaccgacgttggtgctccctcctgcatcccaccgacgytggtgctccctcctgcatcccactgacgctggagctccctcctgcatcccacccacgctggcattccctcctctccaggccctgctttcgagacacggtgaacatcctgtttcagagaaggaactgggggcagagaggctaacatcctttgcccgagacaagcatgtggaggtggggatttaaactcagggcttcagactccagaggtgctgcctacagggccgcctgggccagcatcctcccatctcagcctggccctcagtgagccaaggcagcctcagctggacttacaggggcacacctgtggttccagggatgggtaactttctccagttggtgttgggaagtgcaggcagtgtttcagcttggggcggaggagtctctcttctctgtgtaactgcagctcctgttagaattaagagcttctctctgatgtttagagtgtctttccttcagagcctttccggaacagtgtccttcctctcatctctgcactcctgcctgattccttattctagagatgccacgacggtactaaccagactccctctgagagccaggagagctcgtctgtgtgctgggacctggctctgccacgctcccaagcctggagggagcaactctgtgacagcacgagtctcagggagaaggggcccctcttggctgctccagtcttcaacgtccctacagtctgggggtcccctgtagacctgggtcccctgtagtctgcagggccccctacagtccctggggttccctaaagtctggaggtcccctatagtcactgggtcccctacagcccacagggtcccctaaagtttctggtgtgcctgactgtcccca

SEQ ID NO: 547898 - DNA, 988 bp, Homo sapiens
tttcattcagtgttccaatctaataaaacaatttgtgtctgctctgacatacttctcttaaaaatgtcaggtattttcagacacattggcaacctggtattgtggaaggagtggtaagtttggaatctggagacttaggttagaagtgatagatcttccaacagatcattgcagagactgggaaattatttaggctcaccaaaccagttatctgtaaaatacaggatatgttccttgaccttatacctctctgttgtgccttcataataatgagacagtagcacttatattgcctgagagtttctgtttacttgagtatctcttcataaagtgtaagttctttaagggcagggaccctgtcttttttactttgtgtcttcagcatcctttaggctactccctgtcgtctcagaagcacatactaaataagtgcagaagcaaactataaaagaagagaaaatatcatgattcccaaaacagttttcatcaggatcaaatgtaaatgaaattccgttcctgggctcttgctaccagctggcctatgactaaaacaccaggctggtgctgcttctagtagcaatagacattgactgaaaggcatggaagcaacctagaaattgcattgattgtaaatattttcaaatgaatatcttgaagaatggattcaaaacattccattatccatctatggggaaaatatttgcagcctctgtatatacctttattttgtgtttctgttatctcttagagtctttcaaaattgttgatcagagacaaagggtggctgttggatcataattgtaaaatgatggacatcagaagaactatttagttaagtaatgagagaaggagcaagtcctgtagaacttakttctaggatatcacacagcacatttcaggactcttctttaaatccttaaggagaggtcttttcatttgcctgacgaagaacatgagggaacaagcactttttccttgaaatgttttt

SEQ ID NO: 547899 - DNA, 1124 bp, Homo sapiens
tatttctaaaatttcttcacaactcatattctaatcttatccacatctttgctagctataattacwtgtaatttagaggtataaataccaatgaattcacagagctgctcatatgtgcattgtatacagctgcattaagacagctaagacctaaaagtcagcctatgtataaaattgccagattgcttgtgaccttttcatacaatgtttgaaatacatagtgttttatattccataaaacccagtaaaaaatgtagtaaaattttgcctaattagtgatacatttcatagcattttcctagattagtaatattgataatatcttttaatgacaaatagaattgccttaccttcacagttcttttcaactgtgagaatctgtggtttttctaaagttttttctctatagctatatagcaatgtctgttaatatataaatacatgtacatatatagagagagtatatttgtgtgtgcatatacatatacacgtgcacatatgtacttcaaatattacatttacttcattttaaatgtatatctattttaataagtttaatgtgccagcttcttttatttgaattacaagatgttatattaaatgatctctgaatccaatttgttagagctcaaatcaataagatctgtttggtcagacatagtatagtagtcttccagtagcaaagaaatgaaaactcaaccattgattaatttagagagacactactgacttttctgatttttcaaatatatcgtactcataagaaattttatatttgatttttcaataaatgtttatatatgttatattttctggcatgatttttggattagtggtagcttaaaccctgatttgtgtaaattttgttccactttttatgtacaaataaaaatattaaactaacattctttctcaagtgaaatttcaagaatctttcagtaatataggattcttttctagataatgtatggttttaaaactcctagtttctggtagattttgtgatgtcactcaaagcaaaaatattaaagaaaatccctcctcagtaaaatatattttgaatatcaatttggaaatatactttgagcattttatgaaactattctggtttagagtaaccattc

SEQ ID NO: 547900 - DNA, 1124 bp, Homo sapiens
tatttctaaaatttcttcacaactcatattctaatcttatccacatctttgctagctataattacttgtaatttagaggtataaataccaatgaattcacagagctgctcatatgtgcattgtatacagctgcattaagacagctaagacctaaaagtcagcctatgtataaaattgccagattgcttgtgaccttttcatacaatgtttgaaatacatagtgttttatattccataaaacccagtaaaaaatgtagtaaaattttgcctaattagtgatacatttcatagcattttcctagattagtaatattgataatatcttttaatgacaaatagaattgccttaccttcacagttcttttcaactgtgagaatctgtggtttttctaaagttttttctctatagctatatagcaatgtctgttaatatataaatacatgtacatatatagagagagtatatttgtgtgtgcatatacatatacacgtgcacatatgtacttcaaatattacatttacttcattttaaatgtatatctattttaataagtttaatgtgccagcttcttttatttgaattacaagatgttatattaaatgatctctgaatccaatttgttagagctcaaatcaataagatctgtttggtcagacatagtatagtagtcttccagtagcaaagaaatgaaaactcaaccattgattaatttagagagacactactgacttttctgatttttcaaatatatcgtactcataagaaattytatatttgatttttcaataaatgtttatatatgttatattttctggcatgatttttggattagtggtagcttaaaccctgatttgtgtaaattttgttccactttttatgtacaaataaaaatattaaactaacattctttctcaagtgaaatttcaagaatctttcagtaatataggattcttttctagataatgtatggttttaaaactcctagtttctggtagattttgtgatgtcactcaaagcaaaaatattaaagaaaatccctcctcagtaaaatatattttgaatatcaatttggaaatatactttgagcattttatgaaactattctggtttagagtaaccattc

SEQ ID NO: 547901 - DNA, 388 bp, Homo sapiens
atgaagctggaaaccatcattctgagccaactatcgcaagcacagaaaaccaaacaccgcatgttctcagtcataggtgggaatttaacaaagaaaacacttggacacagggcggggaacatcacacactggggcctgtcgtggggtaggggttgcggggagggatagcattaggagatacacctaatgtaaatgacaagttaatgggtgyagcacaccaacatggcacatgtatacatatgtaacaaacctgcacgttgtgcacatgtacactagaacttaaagtataataataatttttttttaaaaaagagtcacggcatttttatagggatatttactccaagactttctcaaaaactttagaatttgatgattactaccttaa

SEQ ID NO: 547902 - DNA, 568 bp, Homo sapiens
atccagttccttgctgcatgaaaaataatatatgtggaagacctataagttgatctaaagccagatgtcatgtactcccatcattatcaactaatatgctaaaaggtggacatagtgcttttctcttttatcctttattaccactttgttctgtcttatggtaatatgctataataatggtagaaatatatgtagcatttaattgaaaactaccaacaatgtttggtacttagttttygaaaagaaggaacaaatccattttttcttgccactgcttgtgactttcatcaagcagttaccaccaactcatcatgtgctacgaagcatcaggcaaggtaggtcataggaaaacacttaaagaaattagaagttagactatacataaatatttgttagcctgttggggtgttttcccaattgtaaaaatgttagagaaatatgaagaaaatgtgcaccatttgcttagagaaagaatgctttatatcctgtgccaatgtctctttcttcttttacttgcttactttttttaaggattaggaattaaaaatatttggtgcagccttaggta

SEQ ID NO: 547903 - DNA, 1746 bp, Homo sapiens
cctcctcatggcacccttcaggtcagcctccccatccatgctcctgcatgccttccttctgcttcccaaccctccatgttctcctgtgcctctccaccaaggctccctgccagcctggaggctccttctcacagtcaccctcagcagaacggtaagccacctcttgtgtgaagctttccctgactctcctgatgatcgggatgtatcgcttctttttctgggctgttttaattctctgtgcttcaattctttcagattaaaaaaaaaaaggaataatgatctgtattctctcacttcagagtccttgatcttaaaaagttaaagaataaattaaaatgtgcgcgaaacttaatgttctcattatttactatgctcaaagaagccacatatttggtcggctcatatgacatgttcgttgcataatagcagcatggtagacgctgaaaattatttttggactgtatttcacatttaggcaactacttttaatggtttaaatcaacccaaatattctgaaaatatagtttaactgattatattcaatctgatcktgctaaaaaattgccaaatggagcatcaacactggagccagttacgtggcagctagcctaacaaaatcaaaatagcactgacacttttccttctcttggcaataaaacagtgggcatttttagacatttttcagacactttccaaagtatagacatctgtcgtttatatttcaagtttctccaaatatagaatatagtgtcatccttccagactgggtagcaaagattactcactaaatgactactttcttaacaagattccatgaaggcatctgacaaggtctgtctcgacatttctatacatacaatggagaaatatagttagaagataatacccaaagtagatttatacctgggtgaatgattatacctataaaatcagtttcaacataacaggagccctctggtggcaactacagaattctgtcttgtgttaatccatgattttcaagatgttaacgaaagtaggttgatcacaatttttaaaatgaagcaataccaaagacagtgaatccactgatgacagggtcaaaatctacccaatgactacattataaaaacaggccaaatgtaacaagataaggcatttttaaagtgataaatgtacatttatatgtgtaggttcagacaatcaactctcatgaataaagatctatgctcaagcagtcccctgcaccactatttctaacagcatgcagacaacctaaacatccatccgtaaggggacagctaaataaattaaggggatagagtatactttgtagcaacaaaaagaaaaactacagttgactgaaataataatcggaagaatatacacgataaatcttgggtgataaaagtagtttaagcattgtatacagagactgttcccattcctgttttggttttgaaagaattccgtgtgtgtatgttgattttcatacacacattatgtatgtgtttgtacatataatagcaacatttgagcacttgctgtgtaccagacacaattctacaggtccattatatttattaactcaatcttttcagagacacaggtacacattcgtatctctgtattttatttaggtacagaaagtaagcagtagaccaacaacgtaaaaaggtactctcgtatcacactaccacatggttactggggtggagaaggtttttcttatatatttctgtatagtttaaaggtttttcagaagaa

SEQ ID NO: 547904 - DNA, 458 bp, Homo sapiens
accacctgaaccccgccaaagagccagcaacaccttattcacaacttaacattattttctcaatgatttggaagtcaagaagcacctatacatgtatytgaatttgtaatacaaacataagatactttatttagaagtaaattacaagtcaattactcaaactttaagcttctcatgtcacaagtagaaaggggaaatggagaaatggggatgtgatggttaattctatgtgtcaacatgactggaccacaggatgcccagatatttgacttaacattatttctggttaggtatgtgatgttgtttctggatgagattagcacttgaattggtagactgagtaaagcagatggcccttcccaactgggtatgcaccatgcaatccattgagggcctgaagagaacaaaaagacagagtaaaggagaatttgttctctctgcctgactgttgagctgag

SEQ ID NO: 547905 - DNA, 656 bp, Homo sapiens
tggaaataatttccccagccccccaacaatttattatgtggacatgcaattcttcttactcttactacaaaggcctagctgtggaatacaaagcaaactgagccgctctgaggytgggagcactctgcaaggtgatgggtcatgtttttagcatcaggagcagggtatggaattatgagctggggggacactattattggtaaattgtaaaaacagcagttctcatgttttttggtcttatgacccctttacactcttaaatattattaaagattctcaagagtttttctttatgtgggctacatctgcatgtccaatatttactatatcaaaaattaaaactgagaaactttcaaatgttcattcacttaaaaaataacaataaactcaatacatattaacacaagtaacataatttgacaaaaaaagatatatttttggaaaaaaaaacaaattagtgagaagagtgccattgtttacatttttgcagtccctaatattgagcttaatagaaaacagctaagtcctcatatcttttattgccttcaacctgttgtgatatgttatttaggtagaagtatatgaagaaaatatgacctcacccaggtaggtagttggaaaggaagtggtattttaataatattattgtagataat

SEQ ID NO: 547906 - DNA, 677 bp, Homo sapiens
aagtcattagatcatcgttgaggttccattcagctttgaaaggttctgatctgtgaacctcatcatgtgaccatgggttggcatcttggccagtaagttctgacaaatattcatatgtatgttaacctgaactccaggctctgagttttcattggaatttgaatttccctgatctgggatttgtcattcccataattacatccctaaaccagtctgattttaacttctgcctggatactcttattttcctgcatattgcagctttgtttcatgtatctcccatcctcaaagaccactaaaggccttttgagaatttccctgcccagctttcaaggcctcctgtaatctgctctcatgctacaaaatcaactgtattttccacttgaatccaaatttcataactaatgctacaaattgctaccccagttgatccatatatatcattttaaatataagtaacttaaaaattttcagaattttacaattagtgtaaatttgtgacccattcaaaactgaaggcaacaaatcagtgtgttgcgagtgactgataacctactgaaacactttttttctccccagttggctgaatgtaaatcataatargccaatcagtcaccagtctggcattaagcccaaggaagaggctattctttgtccactccttgggtgttaaaata

SEQ ID NO: 547907 - DNA, 505 bp, Homo sapiens
ctccccccattccaaaagtgatatatattggttacggaatttggagaaaatagagttaagcaaaaaggaaataaaagtcatccatgagagytaactgttcccaatgtgttatagtataccttcctattttcttctatgcaaatgtacttgtaattttttctctaagatgtgatttaattaatacaaaatgttgtggtttcatatacacagtgccatagtctgaatgtgtcccctcaaattcatgtgttggaaacttaatccctgatgcaacagtgttgggaggtgccttctgggaggtgctgaggtcatgaggtttctgcctttgtgttaggctgttcttgcattgctaaatgtctgagcctagctaatttataaagagaagaggtttaattgactcaaagttctgcatgctgtacagaaagcatggcaccagcgtctgcttagcttctggggaggcctcagggagatttaactcatggcagaaggcaaagcgggagaaggcact

SEQ ID NO: 547908 - DNA, 887 bp, Homo sapiens
tgcataatgtccagtgaatttattacagttccaaagtcggtcgcgcatggtggctcgcgcctgtaatctcaacacttcgggaggccgaggcgtgtggatcactaggtcaggagttggagactagcctgaccaacatggtgaaaccccgtctctactaaaaatacaaaaattagccaggcatggtggaacgcggctgtaattcccgctactcaggaggctgaggcaggagaattgcttgaacctgggaggcagaggttgcagtgagccgagatggcgccgctgcactccagcctgggcaaaagagtgagtgagactcctgcgcaaaaaaaaaaaaaaaaaaaaaaaaaaaaaagttgcaaagtcatactcacctttctgctcttgtcagacaattaaggggtctttgaatacttcagccctaataagttgcttcctaacatacatatttccgtgcttatctaattttaaatatctttttgtttcaacacctaattttttatttagatctatctgtatgtttacaatgtattttgctctgtgttcattctttgatttcagaacttcaacctttctgaagcatgttttcagagtttctctttagtttctttagtggaattctgctggtggcgttttgtttcttgtctctaaataagttatttagccataggttgatgaatatttttyttggttgagaatttcagaatggcattattattcttaacaaataatattgtttattttacctttcattctttcagatttcaatatgattaaaggtaatttgatttttctagtgctaattgaaatatttttcccttcctgattgtttactatttctctaggagatacgtaggtgtaggtttatctccattgtagcttgcttagca

SEQ ID NO: 547909 - DNA, 1115 bp, Homo sapiens
tacaaagaatgccctgaggagagttgactattagttgtatcaccacatctgtaattactgtagtaagccaacatatacacaggaaaaaataaacatttaagacaaatgctttacctttctatggtgatttaattacaatgtcttctgtggtttttttttttcattaccatgctgtgcattcacctctgagttctacagtctaatcaaattagggttttcaaatggaaaatttgattgagtttttctctgcttaaaaatcttcaatgacttcccagtgcttttaggataaagaaagctccctatgatgtggcttccatggtttgtattagccygcacactgtctactctactaccatgggccctctgtctcctgtagccatgctagcatttgttccaatgcctgcatgttctccatcctgcctcccaccacaggcttcttgcacattaagtgtcctctctgctcttcccatatttctttgcccaaataattgcaagtcccaccccttacacttcagtttacctgggtaaaatccacactgtttaagtgctcctgctatcaagttccttcatatgattaactgattaacaactatctttccttttaggctgtaggctttatgaggaatggaacagtgactggttttgttcaccaccttattcctagcacctagtgtaatacctatcaaatattacttatgaaacatttattgaataaatacaaatatgattgtagccgaggcatatattccatatatagtcacgggcagcagaatggagtggtcataagtacatttggaaccagactgcctgagtttgaatgctggatttttagttactagttgtgttgacatgaggcatattaacttcatctgtgaaatggcataataatagcaactacatcatgacgttgctatgagggttatataagattaaacagaagttcttgaaataatgactggcatatggtaaaatttaagtgcatgtttgttagaaaactgaagaaaaggacatttaaactaatttaaataaaatttagtccggggtgccaatgaaaatttggggattttaataatcactaaaaaacataaacacaatctcaaaaatatccataatat

SEQ ID NO: 547910 - DNA, 1115 bp, Homo sapiens
tacaaagaatgccctgaggagagttgactattagttgtatcaccacatctgtaattactgtagtaagccaacatatacacaggaaaaaataaacatttaagacaaatgctttacctttctatggtgatttaattacaatgtcttctgtggtttttttttttcattaccatgctgtgcattcacctctgagttctacagtctaatcaaattagggttttcaaatggaaaatttgattgagtttttctctgcttaaaaatcttcaatgacttcccagtgcttttaggataaagaaagctccctatgatgtggcttccatggtttgtattagcctgcacactgtctactctactaccatgggccctctgtctcctgtagccatgctagcatttgttccaatgcctgcatgttctccatcctgcctcccaccacaggcttcttgcacattaagtgtcctctctgctcttcccatatttctttgcccaaataattgcaagtcccaccccttacacttcagtttacctgggtaaaatccacactgtttaagtgctcctgctatcaagttccttcatatgattaactgattaacaactatctttccttttaggctgtaggctttatgaggaatggaacagtgactggttttgttcaccaccttattcctagcacctagtgtaatacctatcaaatattacttatgaaacatttattgaataaatacaaatatgattgtagccgaggcatatattccatatatagtcacgggcagcagaatggagtggtcataagtacatttggaaccagactgcctgagtttgaatgctggatttttagttactagttgtgttgacatgaggcatattaacttcatctgtgaaatggcataataatagcaactacatcatgacgttgctatgagggttatataagwttaaacagaagttcttgaaataatgactggcatatggtaaaatttaagtgcatgtttgttagaaaactgaagaaaaggacatttaaactaatttaaataaaatttagtccggggtgccaatgaaaatttggggattttaataatcactaaaaaacataaacacaatctcaaaaatatccataatat

SEQ ID NO: 547911 - DNA, 1167 bp, Homo sapiens
ggccctttggaacagctttttctcccttaggggttgaaacttctgaacagaatgctttagttagggtcaagtttcactgggaccttaaatataatttcttctctgtggagagatcagtggatgaagaaaaaccagaggcctggaagatgccgtgggggttccactcatccttttcctggtttcactcctttgctaccttgcaggggagggacaaaaacctaaaaacagagtttattaggactctattgtttaggtttacactgaagtaaaacatttgtttcatatctcacctacatttacctagtttcctggaaattcctttcatgatcccacagtctagctayccaaaaaattaaaaactaacctcaggtaaaatttatatgaatgaaacgaatctgggtagtgaaaggtattctgtcccagcctgtgggggttttgtattcctgatacacccagccatgtatacactatccaaatttgtccacgcttttcccatgaacctcacaagcaatgatctgtaacctccacagataaataccattttttcacatcatacctctgatttggcactcatatccacacagacacatggagagaccagagaacattgaaaaaaaaaatgtgtgcctttaagagaatgttgttgctgcttagtattgctgtgcatattcctctctctctccagctggtttttcaagtccctgagggtaggaaccatgccctgtgcatcttagagcccccacagagagtctagtttgttgtggtaggtattcaatgaataggttagaagatacaggccggctcagagagtaggtcagggagacagccaggaggaaggaacgccaaacacaaaggaacatctaaaacttgagaacagaccacttctgcagtgcccatgataatgctgagttggatctgattttgccactgagttccagtggtacaggcataaagcccaaagtggtgtcaggtggctgccatagggagatgaggcagcagctggttggcaacttctgaactggccggagtgaaaggggagatgattcaaagggaatctcacttgtcgctccaagacctgatatgccttggaaacaattggtgaagcttcaacaattaccagaagtcctcagccctttggttgtgggtggcactgatctatgacacagc

SEQ ID NO: 547912 - DNA, 541 bp, Homo sapiens
aagccactgttaattttagaacaattgagagagactgatgagacagagtttaaaaatataacacaattctttaaatctcctaagcagatatggtcagcttggtagaaagaaaagaaggtgaatgcagtctagtaacaaatcaagaaaatttattgggacccaagaaggtacccagaaaggcagccccattggtggtaatttttaaagaccccatttgtggtcctacatttctgaacctctttctggatggggaagtgtattatgagatgcatgggtatgtcctcccaaaaattaatatattgaaactctaacctcccactccaytgggatggtattaggaggttgggcctttgggaggtaattagattaatatgaggtcatgaaggtgaagcccccataatgagtttagtgtcctctgccatgtgaagagacagcaagaaaacaaccatctgtaaaccaggaagagggtcctcagcaataacctaaccatgctggcaccctgatctccatcttctagcctccagaactgtgagaaacaagt

SEQ ID NO: 547913 - DNA, 1454 bp, Homo sapiens
  misc_feature 1354, 1355, 1356, 1357, 1358, 1359, 1360, 1361, 1362, 1363,1364, 1365, 1366, 1367, 1368, 1369, 1370, 1371, 1372, 1373,1374, 1375, 1376, 1377, 1378, 1379, 1380, 1381, 1382, 1383,1384, 1385, 1386, 1387, 1388, 1389, 1390, 1391, 1392: n = A,T,C or G
  misc_feature 1393, 1394, 1395, 1396, 1397, 1398, 1399, 1400, 1401, 1402,1403, 1404, 1405, 1406, 1407, 1408, 1409, 1410, 1411, 1412,1413, 1414, 1415, 1416, 1417, 1418, 1419, 1420, 1421, 1422,1423, 1424, 1425, 1426, 1427, 1428, 1429, 1430, 1431: n = A,T,C or G
  misc_feature 1432, 1433, 1434, 1435, 1436, 1437, 1438, 1439, 1440, 1441,1442, 1443, 1444, 1445, 1446, 1447, 1448, 1449, 1450, 1451,1452, 1453: n = A,T,C or G
tgttctgaagtaatttgttatgcaatcatggatgactagtacaggttttgttaccagaagtagggtgttaccataaaagatatctaaatgtgtggaagaggmtctggaaccaggcagcaaatgaattcccaaacagcaatttaaatagccttgaatggactcttagaagaaatagggcctctgaggacattgagtcctcacaggaggcaagaagcagccataaacagtcttgcgaagaaaccaaggatgtgagtctacagccccttgttaagaactcagaaagatgaggggtggtgcctcccagtattatcagccacaagaaagagatcctttaaatagggaccttttaggctgggcatggtggctcacacctgtaatcccagcactgtgggaggccgaggcgggcagatcacttgaggtcgggagttcaagaccagcctggccaacatggtaaaaacccatcactactaaaaatacaaaaattagctaggcgtggtggcgcatgcctatagtcccagctactcaggaggctgaggcacaagaatcacttgaacccaggagacgggggctgcaatgagccaagattgcaccactgtactccagtgtggatgacagaatgagattaagtctcaaaaaaatttaaaaaaaatttttttgaagagacatttcaaagagatgaaggctgtgcctgtggaccatctcagtcaaactacagggcctctgggaagcttgcagttgtgtctctcagctctctcatcagggtagcggagggattatctggaagaagtgggtgccttttgtcttatggtgtgaaccccagcgagattcacaggaggtccacagatttttaggagagttgccttagcaaaatactggaagctgagactgaacacaggcatgtgatgtgaaaagaagcagttggatccccaaaattctttttttttttaagacggggtctcactgtcacccaggctggagtgtagtggcgtgatctcatctcactgcaacctccacctcccacattcaagcaattctcctgcctcaacctcccaagtagctaggattacaggcacccgcaccatgcccggctaatttttttttttttttttttttttttttttttttttttagtagaggcagtgtttcgccatgttggccaggctggtctcaaacttctgacctcaggtgatctgcccgccttggcctcccaaattgctgggattacaggcatgagccaccgtgcctggctgatccctgaaattctactgagcaagaagcaggctgagaaaaccactcagctgcagacatgtactacctttcacgaaaaaggatggatgactcagaggatggaagnnnnnnnnnnnnnnnnnnnnnnnnnnnnnnnnnnnnnnnnnnnnnnnnnnnnnnnnnnnnnnnnnnnnnnnnnnnnnnnnnnnnnnnnnnnnnnnnnnnnc

SEQ ID NO: 547914 - DNA, 954 bp, Homo sapiens
cgaggagctgaatagccttatcttcctcttatttcaaatgggtctcaaagatagaaaaacctaccctacccctttgtggcaaatgcagaagctccaagtatgggcctggaagaggccctgggtgagggaggcagctggaccagggacctagaggcctgtcctctgttctcgggggaccctccattggcttctcactgcagtggtgccaccaccaccagcttggcccccagggagagcccctggctctattctgggctgagcctggacccagacatggtgccacccaccccttggcagaactgagatgtgctgtaccaagtgttgacggagggcaggcggacccaggcaaacagtgaggctggggctgccccttccttggtctcactgaatcctaacaatgctgtgatataggtgccattatgcccatttcacagatgtggaagctgagggccagagggtaagcaacatgcccaaggtcacccagctatttagtggcagagtcagcacccaaacccaagtgtggctggcctcagcgcccaatgcttaaccagcctgcaagacggttacggacaagctggtcctctcccagccccactgcccattactagtgaaagcaagcagagcgaaaccagagctcggtggtctctctgagaactggcgagtccaggtccttagagcctgcactggggccagctgactccttttccttggagggtgacatcttgctttttgtcctccttcaggtcttcttgtccccttctcaggcaagaccaagggtacctctgaccttggccacctcctggccctgaccactcaaccccacatgcaaggctgggaactcccttccttctcctggacttgcagccgacccacaagggccctgtccctgggtgtgtgagcctgccttactctccgggacaygcttgtcccctctgggccacacattgctccctt

SEQ ID NO: 547915 - DNA, 588 bp, Homo sapiens
tacatgcattatctcatttaatcctgaaactaacctgaggagtaasttgctatcattatctctatttcatagttgaagaggcagagtacagggccagaaggtaagttggcagaactggcattcacacacaggtggtatgacttcagagctcttactcctaagtgctacactatcctattttccaaagtactacttgctctcaaagcactctttttcttctttctttttctttttcttctatcacagcacttgtagtaaacgttagtggggttctagcccatcccccatctcccgcccctttcctaacacctttctatttcaatctggttacacaatctccacccctggccctaagggtgaaacacatgatataggctaagcccatcgacatatttcctcccattgtgcacagtgattggttggggtagggatatgccctaggctgacccaatcagaattcatcttgagactttagtcaggatgccgggaatgggaggcagattccttattccttgctatatgtgaatcacatagctttaggagttgctgcagccatcttgggattatagacaaatgtgatgacaaaag

SEQ ID NO: 547916 - DNA, 588 bp, Homo sapiens
tacatgcattatctcatttaatcctgaaactaacctgaggagtaacttgctatcattatctctatttcatagttgaagaggcagagtacagggccagaaggtaagttggcagaactggcattcacacacaggtggtatgacttcagagctcttactcctaagtgctacactatcctattttccaaagtactacttgctctcaaagcactctttttcttctttctttttctttttcttctatcacagcacttgtagtaaacgttagtggggttctagcccatcccccatctcccgcccctttcctaacacctttctatttcaatctggttacacaatctccacccctggccctaagggtgaaacacatgatataggctaagcccatcracatatttcctcccattgtgcacagtgattggttggggtagggatatgccctaggctgacccaatcagaattcatcttgagactttagtcaggatgccgggaatgggaggcagattccttattccttgctatatgtgaatcacatagctttaggagttgctgcagccatcttgggattatagacaaatgtgatgacaaaag

SEQ ID NO: 547917 - DNA, 1305 bp, Homo sapiens
tgggtttgcatctatgtaatgtgattcaaggttcaagaatctattctgctactgcatttgattttttttttttttttttgagacggagtctcactctgtcgcccaggctggagtgcaatggtgcgatctcggctcactgcaagctcygcctaccgggtttaagcgattctcctgcctcagcctcccgagcagctgggactacaggcacatgacaccacaaccagataatttttgtatttttagtggagatggggtttcaccatattggccaggctggtctcgaactcctgacctcgtgatccacctgtctcggcctcccaaattgctggaattacaggtgtgaggcactgcgcccggcctgatttttaaaatatattattttttactcttccttattccaacaattcaaaataaatattttgtatctttattatggatctatcttcccaggtatctgatgtaaaatttagttggcaaaaattgtcagatggaaaacttgtattaattttgttcacaaatcttagtaatctcaagactgttggttttccatttggctgtaagttgttttcgtataactctatgagtattgaagcattttctaggcatgttttgaacgaactctgttccagatctctagactcaaacatggaagattcttttccttccaagcttcataaaagcagctaattattcaaatgcaggtgtctgtaaatttaatagaaagcataatgtttccattaacaatctgaagacagttggcagtttctctcaattcattaatctgtttacatttatcatatgaaatttttcttggtatttctcatgctaatgaaaaacatattggacaaaaaacataaacccaccagttaccaacagaggaaaatcactttagctgtgccccttcttaagaagatggcccattgggagctgtgactccctcatcttttctggttagttttcaagtattagaatccatatacacaaaagggtatccagtggtcctctgtgtcttggggcttttttccttcctccaagagagtggttctgtaaagtgggagcacatatatttaacaagcttgtaagtgagtcgttttcccagctgggaaatcatgaggtcagttctctcattctctgcctttttggaaatagttaacctcactttgaaaattgaagtcagcattagaatgaaggaaggaagaaaggaaggaaagagggcaggaaggaaggaaagaaggaatagaaagtgtattagagttttttattttctatttataattgcaaacacctagaaagggtgtattctga

SEQ ID NO: 547918 - DNA, 2489 bp, Homo sapiens
  misc_feature 554, 555, 556, 557, 558, 559, 560, 561, 562, 563, 564, 565,566, 567, 568, 569, 570, 571, 572, 573, 574, 575, 576, 577,578, 579, 580, 581, 582, 583, 584, 585, 586, 587, 588, 589,590, 591, 592, 593, 594, 595, 596, 597, 598, 599, 600: n = A,T,C or G
  misc_feature 601, 602, 603, 604, 605, 606, 607, 608, 609, 610, 611, 612,613, 614, 615, 616, 617, 618, 619, 620, 621, 622, 623, 624,625, 626, 627, 628, 629, 630, 631, 632, 633, 634, 635, 636,637, 638, 639, 640, 641, 642, 643, 644, 645, 646, 647: n = A,T,C or G
  misc_feature 648, 649, 650, 651, 652, 653: n = A,T,C or G
tgctgaataaattaatggtttagctgttaattaattagtcattaattagctaaagagacgtccctttaggttgcttatattcctttgcttttaacatcgatatccttatacatgtctctagtgtgtatgtatgtttctctataaagataggaaaaggtggaattactgattacgtgcagtttaaatgtcaatagatactgccaaattgcccttcaatgtatccattcagattcacattcctaccatagtgtgtgaggacttgtttacccgagccaacagcatcactttttaagtggaatataatctaactggagggctgccagagggagcaaacagaacggtagagtctggcactctctaaaagaaacttcgtctgtttaacctagagaagagaaaattctgaagagctctcgtgaaagaagaattctaattattctttgacatcctagtgctgtaaaatcctgccttcccagacctacccacagggcaacttgactcgtacttgtttctgaattccatgacsttccctgttcctaacgatgctaatgaattcnnnnnnnnnnnnnnnnnnnnnnnnnnnnnnnnnnnnnnnnnnnnnnnnnnnnnnnnnnnnnnnnnnnnnnnnnnnnnnnnnnnnnnnnnnnnnnnnnnnngaagtaaacaggccttttgccatgtcccaaatcataccacatctgtacctctactctctaacaaaacttgttttgctagaacaataaatgggtgtaagacaaaagaaaacagcagagactctatttagcataatacctcaaagatttaaagctgacattatttttaatataataatgcactataagaaaaattgagcaagcttaggagacctttcaaaatcaaagaaagatcaagactatcaacataataagacactgggattataccctaagaggtgcccagccttagcaagggagcagcctgctcttattatatgtcacctagaagttagatcaggataccgtctttttcattagtctctcttcctacctgctacatctgaaccaccctcatcccaggtgcttccagggaaaaaaaaaaacaaaaaccaaatttaacaactgatggctcaagccaaagcctgagagaataaagtaggactgtgtgagtgtgtgtttgcaggggcaggggcaggggcaggtggatgaaaacactcacggccagtggtggaggcagggtagagaagacatctgcagttgatgtcgagacggctgtgcaactgtagaaaagaaaaaatgacttcaccactccctacttttctcagatgtgcctcaatgtttaatagtgagttttttttataatagacagtactttttgcccttctaaacattaacagcatcgctaagaggttacataaataagcatttcctttgtagattacataagcaggtcatcattgctttacggcggtacaaaggggaaaattttcatcctactgctttgccttttatgagatgaggctgaaaatgattttctacttattttctctccttgatcttttctaccacctttcagatcaataaaatatgataacagtgactcacaactttcctacaagagtttgtcagaagagctcttaggaatgattccattctaaataagcgaagctttcacctttgtgcctactcattcgattcatgtgtgttcattcaaccattaattaaatagataacagcatccattgaatgcattgtgccgaggctgtgtcctaagtctctgttccatcaatgctcaggaaactgtcatagactgctatttattaaaatgaaccttagaaaaaataaggcaaacttagttctgtgtgctattattgcttctcaatagagatactcttatgatctaaagttgataaataatctatgattttgtaatgtgtattccacatttcatcttttcccttttgcagctctattttttaataaagcctgtgttatttttaaagacaaaaatcctacacatatttcttacattgcaaacaaacaaaaattcattttaccaagatctttcattccagaagcccttacatatccttatgtgaaaagattgctctagggcttctcacctgccttatgaaagcaactcagttgcaacagctaaaacctcattttgaaatttgaaagttgaaccaagagtaacattagacagtaactcaccccaacaaggaaataaagaacaatatttctatgtaactatatagaataaccagggtataaacaaacaaaaactctgactacattaagtaataagtgaatttattatgaggatatggatatgctcaggattaaggcaaaagttaaagaatcagtctcagaaagaaatagaaagtaggcagttcaacacagtagcaggaaagaactgacagtctcttctgctagaatgaactccagtgcccttacaccctttcccctgctcacaaaattccttttcaacagcagggatggaaagggggcatccaa

SEQ ID NO: 547919 - DNA, 551 bp, Homo sapiens
ccagcaagtgatctaattttagaattccattctgagagtctccttcttaatactacttctggtaccgactgacttaagattttccaagaagaccctgagacaaggatataagtaccaatattttatttgaaggagatgtcagctatgccggtaagtagacagtgaatgggaaaaggtcaataaagactgtgttttcaagcaagtttgcacygtaagcatctggaacataatttttctgggcgatctgtttccctgcccaaatctcatgtcaaattgtaatccccagcattggaggtggggcctggcaggaggtgattcgatcatgggggcacatttctcccttggtgctattcttgtgacagtgaatgagttatataaaagtgtatgggacctcccttctccttcccaccctgttgctcctgctctggccttgtaagacatgcctgctccccttttgccttccactatgattggaagtttgctgaggcctccccagaaacaagctgctatgcttcctgtacagcctgcagaactgtgagccaattttacct

SEQ ID NO: 547920 - DNA, 551 bp, Homo sapiens
ccagcaagtgatctaattttagaattccattctgagagtctccttcttaatactacttctggtaccgactgacttaagattttccaagaagaccctgagacaaggatataagtaccaatattttatttgaaggagatgtcagctatgccggtaagtagacagtgaatgggaaaaggtcaataaagactgtgttttcaagcaagtttgcactgtaarcatctggaacataatttttctgggcgatctgtttccctgcccaaatctcatgtcaaattgtaatccccagcattggaggtggggcctggcaggaggtgattcgatcatgggggcacatttctcccttggtgctattcttgtgacagtgaatgagttatataaaagtgtatgggacctcccttctccttcccaccctgttgctcctgctctggccttgtaagacatgcctgctccccttttgccttccactatgattggaagtttgctgaggcctccccagaaacaagctgctatgcttcctgtacagcctgcagaactgtgagccaattttacct

SEQ ID NO: 547921 - DNA, 551 bp, Homo sapiens
ccagcaagtgatctaattttagaattccattctgagagtctccttcttaatactacttctggtaccgactgacttaagattttccaagaagaccctgagacaaggatataagtaccaatattttatttgaaggagatgtcagctatgccggtaagtagacagtgaatgggaaaaggtcaataaagactgtgttttcaagcaagtttgcactgtaagcatctggaacataatttttctgggcgatctgtttccctgcccaaatctcatgtcaaattgtaatccccagcattggaggtggggcctggcaggaggtgattcgatcatgggggcacatttctcccttggtgctattcttgtgacagtgaatgagttatataaaagtgtrtgggacctcccttctccttcccaccctgttgctcctgctctggccttgtaagacatgcctgctccccttttgccttccactatgattggaagtttgctgaggcctccccagaaacaagctgctatgcttcctgtacagcctgcagaactgtgagccaattttacct

SEQ ID NO: 547922 - DNA, 944 bp, Homo sapiens
tcacctgctctgcttcaccacctctgactcaggagtaagttagatgcagattccaatctcctttctgctacctcctcttaccatgggatattggaagctatttaatccctctgaatctctatttccttatgcaatacaacagataattgatgagagcatctaaaacacagcatccaaggctaggcacggtagctcatgcctgtaatcccagcactgggaggccgaggtaagcggatcacctcaagtcaggagttcgagacgagcctggccaacatggtgaaaccctgtctctactaaaaatacaaaaagtagccaagggcagtggtgcatgcctgtagtcccagctactagggaggatgaagcagaataatcacttgaacctgggaggcggaggttgcagtgagccgagatcatgccactgcactccagcctgggtcacagagcaagactccatctcaaaaagaaaacacaacactacaacacaacaacaaacaaaaaccaacgacaaaaaaacatggcatgcaaacagggccaggcacatggcaaccrttattacttaccacatttatatcagcctgtttctataggaaggtaaagattttataataataaatactaatatatacacctaatggaagttattttcctagttctgctgatgtctcaaggttgctagttggtaggggatcaatgaaaaataatatgtaagtgttttgccaactgaaaagctctctggcaacttaagatcaatgtgcttccttatatggagagaaggtaaatcctgggggcccaacccctggtggcatctctgtctccaccaggtacctcccatgggcaataacagctgctcctgcatccttgtgcaatccgttctgggagagcaaccgtgaatccaccatattagggtattagaaccagcctgatccctggatgtggtaggttgt

SEQ ID NO: 547923 - DNA, 944 bp, Homo sapiens
tcacctgctctgcttcaccacctctgactcaggagtaagttagatgcagattccaatctcctttctgctacctcctcttaccatgggatattggaagctatttaatccctctgaatctctatttccttatgcaatacaacagataattgatgagagcatctaaaacacagcatccaaggctaggcacggtagctcatgcctgtaatcccagcactgggaggccgaggtaagcggatcacctcaagtcaggagttcgagacgagcctggccaacatggtgaaaccctgtctctactaaaaatacaaaaagtagccaagggcagtggtgcatgcctgtagtcccagctactagggaggatgaagcagaataatcacttgaacctgggaggcggaggttgcagtgagccgagatcatgccactgcactccagcctgggtcacagagcaagactccatctcaaaaagaaaacacaacactacaacacaacaacaaacaaaaaccaacgacaaaaaaacatggcatgcaaacagggccaggcacatggcaaccgttattacttaccacatttatatyagcctgtttctataggaaggtaaagattttataataataaatactaatatatacacctaatggaagttattttcctagttctgctgatgtctcaaggttgctagttggtaggggatcaatgaaaaataatatgtaagtgttttgccaactgaaaagctctctggcaacttaagatcaatgtgcttccttatatggagagaaggtaaatcctgggggcccaacccctggtggcatctctgtctccaccaggtacctcccatgggcaataacagctgctcctgcatccttgtgcaatccgttctgggagagcaaccgtgaatccaccatattagggtattagaaccagcctgatccctggatgtggtaggttgt

SEQ ID NO: 547924 - DNA, 944 bp, Homo sapiens
tcacctgctctgcttcaccacctctgactcaggagtaagttagatgcagattccaatctcctttctgctacctcctcttaccatgggatattggaagctatttaatccctctgaatctctatttccttatgcaatacaacagataattgatgagagcatctaaaacacagcatccaaggctaggcacggtagctcatgcctgtaatcccagcactgggaggccgaggtaagcggatcacctcaagtcaggagttcgagacgagcctggccaacatggtgaaaccctgtctctactaaaaatacaaaaagtagccaagggcagtggtgcatgcctgtagtcccagctactagggaggatgaagcagaataatcacttgaacctgggaggcggaggttgcagtgagccgagatcatgccactgcactccagcctgggtcacagagcaagactccatctcaaaaagaaaacacaacactacaacacaacaacaaacaaaaaccaacgacaaaaaaacatggcatgcaaacagggccaggcacatggcaaccgttattacttaccacatttatatcagcctgtttctataggaaggtaaagattttataataataaatactaatatatacacctaatggaagttattttcctagttctgctgatgtctcaaggttgctagttggtaggggatcaatgaaaaataatatgtaagtgttttgccaactgaaaagctctctggcaacttaagatcaatgtgcttccttatatggagagaaggtaaatcctgggggcccaacccctggtggcatctctgtctccaccaggtacctcccatgggcaataayagctgctcctgcatccttgtgcaatccgttctgggagagcaaccgtgaatccaccatattagggtattagaaccagcctgatccctggatgtggtaggttgt

SEQ ID NO: 547925 - DNA, 522 bp, Homo sapiens
atctatatccaatcatcattctatgatcggattctgggaaaccagaaaaagcacctaattaacaaagaattacatcatacttactgtaggctaggcactgttctaaatgttttacaacaataaactaacctaacttaattcaatgagaaaatgaaagcaataagaagagaatgttcacaagttcctgccacccatctatacatccatctgcatayacctaccctcccttctctccagtccctgtggatgagccatctgtgcctttcctgtcacctagatcccaacccccttacctattccaaatctttgtccagcaactctcctctcactctcccctatcagcctgggtcatttgacatcatccaaactaacataaaaatctgctgtgtttttctcttactgaaaactaaaacaaacaacgcacacacacaaacaaaccctctcttgactccacttacctccaactttcatttcatttctctcctttgagtaaaatccctggaagagttctttgtacccatt

SEQ ID NO: 547926 - DNA, 537 bp, Homo sapiens
tagaatcctatgtaaaaggagaaagtattttgttaaaaaatgtatctagtgaaaagaatattaagttattcaattctgtattcatccatccacccatccatccatccatgtactctctgtatacatttgctgagaacctattgtatgctgggcaccatgagaggtgttaagatatcgaggtaaacaagatgcatctaagttaatatatgctttcatcttttaaaagtctacttcattcctaccaaatattttttagcaaccctgatgatcaagctgagaaacactggtttcagacacacacacacacacacacacacacacacacasacacacgagacacacacacacacacacacaccacccccccacccccccccgccccgatgtaacccagtgcagactcagctgcccaccgcttgcaaagtcagtaacaaggaggaagtctgtagtgaaaggaaagttactttgtttccaaagctagcagcagggaagcaggctgcttaccttacgcctccagaaacctcttaaaactttagg

SEQ ID NO: 547927 - DNA, 537 bp, Homo sapiens
tagaatcctatgtaaaaggagaaagtattttgttaaaaaatgtatctagtgaaaagaatattaagttattcaattctgtattcatccatccacccatccatccatccatgtactctctgtatacatttgctgagaacctattgtatgctgggcaccatgagaggtgttaagatatcgaggtaaacaagatgcatctaagttaatatatgctttcatcttttaaaagtctacttcattcctaccaaatattttttagcaaccctgatgatcaagctgagaaacactggtttcagacacacacacacacacacacacacacacacacacasacacgagacacacacacacacacacacaccacccccccacccccccccgccccgatgtaacccagtgcagactcagctgcccaccgcttgcaaagtcagtaacaaggaggaagtctgtagtgaaaggaaagttactttgtttccaaagctagcagcagggaagcaggctgcttaccttacgcctccagaaacctcttaaaactttagg

SEQ ID NO: 547928 - DNA, 537 bp, Homo sapiens
tagaatcctatgtaaaaggagaaagtattttgttaaaaaatgtatctagtgaaaagaatattaagttattcaattctgtattcatccatccacccatccatccatccatgtactctctgtatacatttgctgagaacctattgtatgctgggcaccatgagaggtgttaagatatcgaggtaaacaagatgcatctaagttaatatatgctttcatcttttaaaagtctacttcattcctaccaaatattttttagcaaccctgatgatcaagctgagaaacactggtttcagacacacacacacacacacacacacacacacacacacacacgasacacacacacacacacacacaccacccccccacccccccccgccccgatgtaacccagtgcagactcagctgcccaccgcttgcaaagtcagtaacaaggaggaagtctgtagtgaaaggaaagttactttgtttccaaagctagcagcagggaagcaggctgcttaccttacgcctccagaaacctcttaaaactttagg

SEQ ID NO: 547929 - DNA, 644 bp, Homo sapiens
ccacagagttttttgagtcaaaatgtgactggcaaaatgctcttaattgaagaaaaccacagatgaaccatgtacagtctgagactctttcaagyaactgaaacagctcttgtcctcccttataagatctctgacaataaacctaccaatgtcttgcattcacaaaatgtgctttttttttttagaacgttggtatgaattgtatctcagtgaaattagaaccatgtccctcctcaattatgagatttggttggtgaccaccggtttattgtattgataatgaaatctcacaattaacttcttttctgatcaggaacccacccgattggcaaacattgaaaaggtggatggcattaagacttgccaaggatgtggagcaacctagagacacacgttgttgagggagtatccattgccacaaccacctttgaatacaatatttattattttcattcaaataacagaaaatatacatactctaccactcaaatttgcctctcttagttttgtatcttggagtagacttgtagaatcggaaggcaccatacatagatatttactgaaatattgttttaatctgtctaatcaaatgaacaaaaataattcagagtacattatccacagaatggatcaataaatcatgg

SEQ ID NO: 547930 - DNA, 3390 bp, Homo sapiens
aaacctcgtctccactaaaaatacaaaattagccaggcgtggtggcacatgcctgttatcccagctactcgggaggctgaggcgggagaattgcttgaacccaggaggtggaggttgcagtgagccaagatcatgctccatccagcctgggcaacaagagcaaaactccatcaaaaaaaaaaataaatccaaactcttagctactgcccttatactaattgtcaagaaagaagaaaacacaacccaaattcttgaaaggaacagggtgtgggcagccagggagtgctcccaggtgtgtgggcccagcggcaccagactctgcacacaagagtgcctcctttccacccaggcctggtttcatggaatgcctgcttcacctgccagcatttgcctcagacacataaacttcccatggagtatatgagtaagctctgacagctccattgttggtgagctactagatagcaggaattataacccaattaaattcaatactctatggaaaaggaaaaggcaatgcagtccatcttactgatagacaattttagaataggtgtctgtgatagaacacacacattatttaatccccaaataagggtaaagttttaaaagacagtaaaccatagcagtctcagatattatctctaaagattttatttgatatccaggatccaagaatgaaaaacatccaacaattatgaaaccagcttttgcaatggctatcatcacccaggaaaaggcattgtttaaaaatccaaagaaaatggagcaatgttaaaaccaatcaagcattcaagaacagataagggattaaataaataatggtgaatccatgttatgaaatattggagctgtgcaaatgatatttcaagtaatctttatgacatggggaatattttcactatataatgtcatctgaaaaaacatgcataacgccaatctgtttacacaatttcatctcaattattgaaaagaacacatatctataagaaaaaaaaaaaaaggaagaggcagactcccgtggagggcagttgtgccaagcagaggcatggcctgatgggctcattggcaccacagacgttgctctgtggttgggaagaggaggctggggggccaaatctaagatgtgtggctctctgcatatatagctacgtgcgcgcgcacacacacacacacacacacacacacacaaaggattttcaacagagatgcaatctacaaacttcctagtgacaggtatcatgtagtgagtaaacccccaaaaggatcttatgcctatgaggcagaaaattacagatttatcaaactttcccaattatccatatctgtccctgtccctttcctccccttggcagaggatgtctcatgcttgtcttctcaaaaaatgacagttttggaaaggcccaatggcttcatccgtgagtcgctaaggtgccagaaaccttgcaggatttcccgtggtcttctgctttttcagtctctttgagttcatatttaggggcagaaaagcaggagagcctgaacttgaggccctggagctgctgtcagtaaacctggagagaagggctgtgtgtctacactccgaggtgctagatcattatccccttcagtctgggtgtctgagaagcttggtctatcagtctagcagaacagactgaagattccataggaactcaaggggaactgactcccgccctccctccagcctccaagcatgagagggcatcactaagtcctcctggggctctggctagagttcatctgggaggtcttagaaggcttaatttttccaaattctccttctgcttttacagaataatcccaaagttgattttttattgaagaaaaaagatctatattataagggttcttatgtaattattacaaaggtagcctacatagtgcagaaattggaacttgattagtataaatgcatttttatctgaatttttgcaaagtaagttcaataagtcatttgatttgttaatattcagtgtttataattttgtagagacgtgttttaacttttactctgtatttctgtgctcagagagttgtttgataagcctgtgcaacttgacttcggagttttatttcaagcatatgtagtttgtatcaggaaatcatatttttttagaattatgtattcatcatagaaaaatccttaattagcagtagtgaaggaaagctcttagactgaagactgattagcccagcctccagaggagatgtacgttagtgggacaacgtcctctaataaaggaacattcaagtcagaaatcacagtgaaacaccttaaattgttaaccacgaaggaaacagcgcctccaaattgataaggcatttagatctgcctaggcgttaaagaaagtttcataactgcccacacatgtattgcaaatattgaatcattagcaattactttaaatatgttctttgtatttaaagtgacaagaatgttttctccctgtggcatgctcaccctgggttcttggagaactttagaccaatgatgtggccagcgagtcccagcccaaatcatgaaattcaaagacgtgagaatatgctggcacttactgcrtgccgggagggtctctcaaaaggagaaggaactcagtggtcacctgaggcaggatctttcacacagcagctcttgtatgcaaagagaacatggcgcaactctttattaactacactgatttttttatttttatttatttttaattttttcagagctgcccctgctgattataagggaaaattatctattaagattgaaaacattaaactcataatttacactggtttctcagttaacgctcagtatcctgtaggaaaaaggccagtctgccaatgttctaggttacccagcctcgctgtgactagtcaagatggcatcagaaaggcatcatagctcgccaatagcaaatgtgtgtgtgtgtatgtgtgtgtgtgtgtgtgtgtgtgtgcactctgttcctaggcactggggacactattgggaagaaaatgtcaaactctttgtctttacacagctcatattttagtagggagttgaagaaagaaaataaacaaatacatgtgtcatatggtgataggtgttaaaaagaaacatgggaccaggggctatagtgaaagtagtgcagggagaatcattctagaagaggtggtcggggaagccacactgatgtggtggtgactgggagcagagatgtgaatgcagtaagctggccatctgggctatgtggggaacacattcctacagggcagaagacataataggtgcaaaggccctgaggtgtgagggcacccccaccctgggtgtttcacatacaatcttcatgaaaagcagtggggctcatgggaccttcaagccaagggagagagtca

SEQ ID NO: 547931 - DNA, 326 bp, Homo sapiens
aattctgtgcatttgagtcaaaggatgaggcagagttcacatttgcatcacaggctgtgaactatagattaatcactttatgtggtttgttaatattgattcagcccytgtgcttagtgtcatagggaagatgagtcaaacaaagaaaaacagtcactgcatctgagaaatgtatttatatgtatatgcctgtgtcctatccagtggtatgctggaaccagcccttgtgagcaaatagtgaacatctcttctgaattctgtgttcagtgatgtcaagtaggtagcttgaaatccactatggtgggagtatttacaccatggaaagt

SEQ ID NO: 547932 - DNA, 2166 bp, Homo sapiens
  misc_feature 1305: n = A,T,C or G
tggtattaggatacaaacaaaaactttcttattttaacataaatagtaaatgttattaaaaattttaagtccactgtcactagtggaacttagaatatattagaactggatataagcagataatctatctagatacataacactatcatattacagtatagcatttgaagtagaatctaaaaattttcttctctttctaattggtgttcattttggcttctaataatttggcrtttgcctaccctacagttaatctttagaagtataaattcactgtaggggttcactatttatggtatgctgaggtaaaagtcttttaaagagagaaagcttttataatactacatatcttctgtgaacctatttctggtagatttaactcataatgaattaaatttagtcccaagaaacaacgagagttaagcttgatggttcatgtttttctcctgtgttagaccaaggcaaattagtttttacttcttagttataatccagtagcttaggggtagcaaaacatagaataagcttcacagttaaattttaattatgttataatttttctttgctcatacttgattacttcagaataaagttaattttaaaacatgcactctgacagagaaggcatctgagaaacaaaacaagcaaatgaattttccacctgcaaaaaaatgtctcgagaacaagaactgagtaagaattgtgataaagaggatatgtctattcagggcttcctttaaaattcattttaaaaacgttcaactgaagattggtgaaagttttgaaatattcaaaattactgtttgtcctgaggaagcgttcgtacatagtaactctaaagagggacaaacttaaagggagtgccctctaatctgatgaatcatatccctgatcatgaggaagcagatgcatctggagtgtctaactgtagtattccaggcattgcctgaacagaaggaatgtctgttcattcttcaaacatgtcttgtcattgcatttataccttgggttcctcaaacaaacttgccagtcatcttctaagctttattcaaatgaaaacaaatcagactataaaaattataacaaacagttataaacagaccatagcctgtttctaacagcgatgaagaaaatggttgaaatgatacagaaaatgaaaaattaaggagctcagtagttacggttgaaataaaagaaaacccagagtttgataatgcaagtgataaaaaatataaaccaaaataccactgattggaaattacacattagacattggcctcagtctagagatccaaaaagtctttntgatttgtggtttggccactccaaagaaatgtatcatgtgatacagatagaaagccacagtatttccgctgaaagcagacacttataaaaatagaaaaccaatacagcacttgttccacaattcatgtggatcttagaggctcttctaaagcttaaagatgactggcaagtgtgtttcagggacctacatatgacagtcccactgttaataactataaaagcataaaacatgaattagaagttattctccaccctgtagtgacagaacatcaaaagcatatctagaagaagacttacagcaagatatccaaaggtttaagaatgaggtgggcatgttacaagtagagtccctggctttgaagaaagagaaagtttaactacaaaatgacagaggttcacttgctgttctctttttataagttatctgattcattctgattttctactcaagaaaatctcatgtgtatggttacactgtggttatctaaatgtgtaattatgtgtcaaagtaaattagtgctgctatctaaatgacacttctggaaatattcttgtaatctttgttgattactcaacccaagtctcactattagtctttcaagtggcttatgggctgggaaactaatttagccatataccatgtgatcttctgaaccagataagcataaagaaaattgctaaagaaataagctctagattcttttttctgtattcatttaaagacgaattacatttatttaaatgataaaatggtaatacagtgggagggaagcaatgactgagaagagacataaaaatatatcttgccttgagagttgcaacaaatattcccatccaaagaagtctgtttaatgtgctttc

SEQ ID NO: 547933 - DNA, 516 bp, Homo sapiens
agagagagagagagagagagagagatggagtctcgctctgttgcccaggctggagtgcagtggtacgatcttggctcactgaaagctctgcctcctgggttcacgactttctccygcctcaacctcccgagtagctgggactacaggtgcccgccaccatgcccagctaatttttttgtatttttagtagaaatggggtttcaccatgttagccaggatggtcgagatctcctgacctcgtgatccacccgtcttggcctcccaaagtgctgagattatgggcgtgagccaccgcacctggccatactgactatatattaagctttgtttcttaccacaggatgatccttggtaactcatacatactaaaacttttaaggcctatgattttcatgttattctccacttggtatctttaaggtgaaacaattttttaaaacatattttcgaatgataacaggtttggcagataaacactgcaagtttaaagtacagtattgataccaagaaaaggca

SEQ ID NO: 547934 - DNA, 516 bp, Homo sapiens
agagagagagagagagagagagagatggagtctcgctctgttgcccaggctggagtgcagtggtacgatcttggctcactgaaagctctgcctcctgggttcacgactttctcccgcctcaacctcccgagtagctgggactacaggtgcccgccaccatgcccagctaatttttttgtatttttagtagaaatggggtttcaccatgttagccaggatggtcgagatctcctgacctcgtgatccacccgtcttggcctcccaaagtgctgagattatgggcgtgagccaccgcacctggccatactgactatatattaagctttgtttcttaccacaggatgatccttggtaactcatacatactaaaacttttaaggcctrtgattttcatgttattctccacttggtatctttaaggtgaaacaattttttaaaacatattttcgaatgataacaggtttggcagataaacactgcaagtttaaagtacagtattgataccaagaaaaggca

SEQ ID NO: 547935 - DNA, 667 bp, Homo sapiens
tgaggccccttagccatccagcccccatccagttattgagaaacaagtattacctgtttgaaatcataaacgggtggtttatgatgcagcaaaaactaacttacatacaacatgacctcatgtgggtttcttaatttctctcagtctcagctttctcatctataggatggagataaggcaatcaacctygctatttagaggattaaatgagaaaatatatgcaaagtgcttggcatagcataaatactcaacacatatggtaattttttaaaaaccctctatattagtcccttttaattaaaattttaattaaaacaaaagaaaaacaaaacaaaacaaaaacctctgctgggtggacgaggggcagccctcaggctagatgcactgatttagtacttttaatagtggcaggagtcagacaagcccgtaggcagatagtggcatgtccccaatgaaatccaactttcaaaccaaaggcagtttaaagcccgaaagctaagctacaagtcttggataaatccatggaccgagctgagaacatctcttcctgttggtgcactttcctctgactgatccccacccttcacttactttacatatatctacccttccctaggtggttttctacactgtcatgccacctttgaatggttcctttgttttagcc

SEQ ID NO: 547936 - DNA, 1003 bp, Homo sapiens
cccaaatcatactgcctgttcactgttatttattttctctgcatgaagtcatttgggctgggagagttccaattgagcgtactttgtacagtcagtgcttgctgcttgcatgagatgtgtgccatgcacaatatttttgatgttgatgttaattggtgttgaatacaacttatttataattctaaagaattatacatgtgttatggatgcctgaggcttcaagggcctaagttgcatgttaaagactaaaaggggctgggcacggtggctcacgcctgtaatctcagcactttgggagaccaaggcaggcagatcacctgaggtcaggagtttgagaccagcctggccaacatggtgagaccctgtctctactgaaaaaaaaacccaaaaattagctggttgtggtggcaggcgcctgtaatcccagctacctgggaggctgaggctggagaatcacttgaacccagcaggcagaggctgcagtgagctgagatagtaccactgcactccagcctgggtgacaagagcaaaactccatctcaaaaaaaaaaagtaaataaataaaagggacagatttatcaacaggacaatccagtaaggtgacactaactagtcactggcaagtataatagccaaagtgtctgacaaacagtgttagtacaatctttaaatgattgcccatttatgagaataagcacagtaatccagagccccttaaatatatttcaagakagcatttctcagtgtcacatgttgccctagggaagatcctgtccactcagggctaaccaaggactcttcagccctgattgatatagctgtcctacaaaatccttagaaatgctttcatgccaagctcctgtccagtcctccagcagcttctgctgtgatgtcccctacctgaaggagattatcctgtcaataaagtttctagctctaggcatgcttgatctagtttgatttttctgtaatgatctgtttggatctcttgctcccatagtct

SEQ ID NO: 547937 - DNA, 1676 bp, Homo sapiens
tcctatagtaatggtatttcaactcatcagtgtttcaatgtactttcctgagtggtaagaaaaagcaaatttatcccctatatttctaagcaatcagcctgcacaaactcctgggatgagctctcacatagtgaatgctagttgtgtgcattgaaaagtgggatggattaagaacactgggttttatgataggaaataatactcaatgtgctctgaggtattttggggtatgtttgggaatttgtacaagtaactcaagttctttttctcattgtaattggggataagaatattactcatagacaccgttgaagaaattaaaggagattgtgtgtgcccatcttggatcaatacatattagtgtccatttctcatctcttctatccttatctggtcagagtggggggaattcggggaaatatcatagaggatgttgccttagaggacaggaaggatttgggatgtgctaatgtatttatttccaaagtgtagctagcatggctgagaaaatgaatttttagttaaatttgaatgtaaataactccatggggccagtagctatggtattgaggactgcaggtatagaatttaagtaagtcagataggtctagattcaaatcctggcttctctagctctaggatcttatgcaaattacttcctgagtgcaacctaccccctcccccatatggttgccatgatgaagaaataaggttattaatgaaaaaatggaagtactgagtacataccaactgttattctagcactaaatgcaaatgtgaatattgataaactttcttcttgaaactgttccatgaaagaaagttgatgaattatgtggaaatattccccaataaactctataaattataggcagctggttgtgtgtgaagatttgagagagccatctcagaactttgtcctctggatakttaacacagttggaatgtctctaagcaactggatcctgcattttgtgatggttttgaaaaaatacctgtttcatgtagatttatgacaagggttaatgcatgcaataaaactggttttgcattaagctcatttaagcacatgcgcattcaatcataactgctgagccagggccctgctaggaaactcacaaatttattatgtagtatgaacccacgttctctactgtttgattccaggaacatgagattgcatttgacattgaaatggatggaacaactgtcctgacagcaagaagctcctttagggttttgcctcagatcactggaatcatgttgagagaggtaattgttagtctgtatgtctcagtttccttatctatctgactaagaggacaaaatacaccacagtgctgtctgctttttcaggactatggaggccattcaacaaatcatgagttatatggagacttaatgaaaataaagtgcataataggaaaagaaggtgcaatagattttattcagctctcccgtgtggccacgtggatggattcttcccaagggagcataatagtagagcattttagttgcaaatgtggaatgaatgtagcttctagttgaatattttctctggctttgtctatgtgaagcacagatgttttaaaaatcatctctatattaaggctgagataacccaactaggtttgaaaataatcacatttttcaaattgtgttgtttcccatgctct

SEQ ID NO: 547938 - DNA, 923 bp, Homo sapiens
tctgtgacagagtgaattgagtgatataatctggctacttggccaatgtgaggacaagggtgatgatgtcttcataaattaggatattgggagaaaggtgagacagtaatgatgagggacatcagkaatcctcctatctgtgaaaacatctttctgacaattttgattcctttataataagaaaatgaaatggggaactgccactgtagataaattccagctggaataattggttgttgatacagaagtgaccaaaatttctagatttgataaacacattccttttgagcttataatgacaaaaagaataagacccattaagtcagtgaattttagagaaattaagaaaaagggattttttttttgtattcagaaatcttaaaatggaaagatggcttagatagtagttttcaaagatggaatcctaatgtgatcacagatcattccggtgaggaagcaaagggaaactttcacagaaattctttgataagctctattttaaaaagatggaaagacaggcactttaacaaagttaaaaagttctggaagggttaatcttgggaggcaagatcaagttgtgttctagaatgtttgagaaatctgagtttgattaatctaaaaaatataggagttagggagggctatgatgattctcatatttgaagaggaaggagaaatttgtctttacattttatttctttgaaacagagtctctctctattgccttcaaactcctcggctcaagcagtcgtcccacctcagcctcctaagtagttaggactataggtgtgcaccaccatgcccagctaattaaaaaaaaaaaaaacaactgtagagagaggtgtcttactatgttacccaggctagttttgaactcctgtcttcagctaattaaaaaataataataattgtagagagagggg

SEQ ID NO: 547939 - DNA, 923 bp, Homo sapiens
tctgtgacagagtgaattgagtgatataatctggctacttggccaatgtgaggacaagggtgatgatgtcttcataaattaggatattgggagaaaggtgagacagtaatgatgagggacatcaggaatcctcctatctgtgaaaacatctttctgacaattttgattcctttataataagaaaatgaaatggggaactgccactgtagataaattccagctggaataattggttgttgatacagaagtgaccaaaatttytagatttgataaacacattccttttgagcttataatgacaaaaagaataagacccattaagtcagtgaattttagagaaattaagaaaaagggattttttttttgtattcagaaatcttaaaatggaaagatggcttagatagtagttttcaaagatggaatcctaatgtgatcacagatcattccggtgaggaagcaaagggaaactttcacagaaattctttgataagctctattttaaaaagatggaaagacaggcactttaacaaagttaaaaagttctggaagggttaatcttgggaggcaagatcaagttgtgttctagaatgtttgagaaatctgagtttgattaatctaaaaaatataggagttagggagggctatgatgattctcatatttgaagaggaaggagaaatttgtctttacattttatttctttgaaacagagtctctctctattgccttcaaactcctcggctcaagcagtcgtcccacctcagcctcctaagtagttaggactataggtgtgcaccaccatgcccagctaattaaaaaaaaaaaaaacaactgtagagagaggtgtcttactatgttacccaggctagttttgaactcctgtcttcagctaattaaaaaataataataattgtagagagagggg

SEQ ID NO: 547940 - DNA, 2147 bp, Homo sapiens
  misc_feature 487, 488, 489, 490, 491, 492, 493, 494, 495, 496, 497, 498,499, 500, 501, 502, 503, 504, 505, 506, 507, 508, 509, 510,511, 512, 513, 514, 515, 516, 517, 518, 519, 520, 521, 522,523, 524, 525, 526, 527, 528, 529, 530, 531, 532, 533: n = A,T,C or G
  misc_feature 534, 535, 536, 537, 538, 539, 540, 541, 542, 543, 544, 545,546, 547, 548, 549, 550, 551, 552, 553, 554, 555, 556, 557,558, 559, 560, 561, 562, 563, 564, 565, 566, 567, 568, 569,570, 571, 572, 573, 574, 575, 576, 577, 578, 579, 580: n = A,T,C or G
  misc_feature 581, 582, 583, 584, 585, 586: n = A,T,C or G
tattgctaatttattaaagcactgttttttgttgagtcaggatgcagccacagaattctcctgaagacaatcctccaagcataatatgtataacataactaacatttctgacaagcatgaataggggatatttgagcatctgcatgtaatagaagactttgaggtagtgatagaagaaaccataagaaaatgagataaaacccttattttctaaatgaatcaaaaaatacatttttatttattttattagcaagaatttcatcaagaggaatacattcaggaaatcctctttgtccagcatatagctaagagcagtgggggtataggagggtaggaaactgtctaacatggtggttgggatcatgggctatggaatcaaaatgtctgtatccaaatcctagctatgctactcactgtatgtgatgctgggcaagttttacttaccacatgttttttagtttttctcttccagtaaaatggaacaaannnnnnnnnnnnnnnnnnnnnnnnnnnnnnnnnnnnnnnnnnnnnnnnnnnnnnnnnnnnnnnnnnnnnnnnnnnnnnnnnnnnnnnnnnnnnnnnnnnnttatcatcatctcttggcatcagaaagactttatatttatctagttcaatgggcctcaaactctaatgtgcatcagagtcatctgaggagtcaattaaagatgcaggtttctggggccatccagacattctggtgcgggatggtggaatgttttgataaacaagctgtgtaatctgatacagacagcctgcaactacactgtaagaaatacaagtcgagctccattatcctcccaaagggttgccttttctcccagtggacatgtactgtcataagctgagtgaccacatagcagaatgtttatggagaggattcaaagataagaagtaaagctaactagaacattttgatcttttctacaacatgaatgactagcgattatctagcctttcttggagtatttcagatgaaatgatgtttgctacattacaaaataatatactataaggtaactctagttattcattatttactaaacagatttctccatccaaatgcacactgaccctcattcaactctctctatgtcatcagagcaaattgacggctctgtctgtaatgcggcttttcagatactgaaagacatccatcacattccactaagcgatttccccaccctccaccgagatgattttcactaagtattttagtcattcctcatagaacgtggtttccagatttggacccctaggttcatcctctagattttttctaattgctaagatatgcatttacctaaacagaattgtattagtaaatttttgcatcactaccaagaaatacccgcggctgggtaatttataaagaaaaggggtttaattgggatacagttctataggctgtataggaaatgtggtgccagcttctgctcctggtgaggctgcaggaagcttacagtcatgatagaaggcaaagggggttcaggaacctcatatggtgagaaagggagcaaaagagggatgggggaggtcccagtcttttaaacaaccagatctcatgtgaagtaataagaatgaactcattaccaaggggatggtgcaaaccattcaatagagatccttccctaagatccaatcacctaacacctggccccacctctgacattgggagtcacatttcacatgagatttggaggggacaaacatccaaaccatgtcaagaataacctagatatagtctgactcctgggggaactgaggaggtgggttttgtggggtggagtgtatgtatgggcaaggggattsggacagataatggacattgcccctctaaagctgggaatggtgaggctatacttctactgactccatataaaagggtatttgccttaaggagaaaaagtcatagtttggttcatataaagtcaggggtgaacaaaaatttctaggtcacttttactaggaattgccatcaaggttttctctccattcgacttgtgtatttgtttttctgaacaaaataaagtaagacgaatgaaagaatggccatattgtgaccagtaggtatcttttaaactattcctttcttccttggcaataatgtttttagtgtgacccagtaa

SEQ ID NO: 547941 - DNA, 1596 bp, Homo sapiens
tttgacaagaggtgagcaatttctcttctggcagataatgagaggagggttgaaaggacatcagcgcaatgtagtatgcaagtaagtaagtgtttgcaactgggaacacttgaggagagacaaaatcagggacctggaggaaatgtttgataactggcatgcccctgtcatggaagcagtaaagtaacacaaggaaatgacaaactaatgggagccctggtgggaagcagctggcacatgttctttcctgaattgtagcttaaatgatcattgccattcttgtcagatggtctggtgtatttggacagcagcaatccccagatttctactgccctgagcaggggtggagtatgtcccaagcaaagtggaatcaatgaagacagctgagagaggagctttgaaggaacagaatacattctgacatagattccaaatggggataaaaaccactgtgtggatgtcacaggaaaacaggtatcagctcatcacagacaagaatattctaacagctaaaatgtgcatcaccaggagctgctttgaagaagagcagaatgacctcccagtcacttaaagcatttaagcagaggctgaatatcaggaatgtggtgaagaaaatttcaatatcaaataagttgttggactacataattttcaaactcttttcaaattcacagattctaatattataaattagcttatattacaaagtgtatttcaaagttaaacaggggaattctacctcactgtcttgaatctgaagcaaagctctaatctggattcaccctagaccataggctaaaggtaccaatacttcacatttccatatagtacttgatagtctacgcagcattttttcctcctaggatataatatgattcccacaaaaccctgaggacagcaaggcagaggcattatttcccattagatacaagaaatggggtccttaatttagctaatggttatgaacctcccatgagattgagaggtgacagcgtgctggcagccctcgcagccctcgcccggtctcagtgcctccttggccttggcgcccactctggccacacttgaggagcccttcagcccgccgctgcactatgggagcccctctctgggctggccgaggccggagccagctccctctgcttgcggggtgtggagggagaggcgcgggcgggaaccagggctgcgcgaggcactcgcgggccagcgcgagttccrggtgggcatgggctcggcgggccccacactcggagcagccagctggctggcaccaccagccccaggcagtgaggggctcagcacctgggccagaagctgtggagggtgtgccgggtcacccagcagtgccagcctgctggcactacgctcgaattctcactgggcctcagctgcctccccacagagcagggctcctgacctacagcccaccatgcccgagcctcctccccactctgtgggctcctgcactgcctgagcctccccgacgagcgctgctccctgcttcacggcgcctggtcccaccaaccgcccaagcgctgaggagtgtgggtgcacggcactggactggtgggcagctccgcctgtggccccagtgca

SEQ ID NO: 547942 - DNA, 1596 bp, Homo sapiens
tttgacaagaggtgagcaatttctcttctggcagataatgagaggagggttgaaaggacatcagcgcaatgtagtatgcaagtaagtaagtgtttgcaactgggaacacttgaggagagacaaaatcagggacctggaggaaatgtttgataactggcatgcccctgtcatggaagcagtaaagtaacacaaggaaatgacaaactaatgggagccctggtgggaagcagctggcacatgttctttcctgaattgtagcttaaatgatcattgccattcttgtcagatggtctggtgtatttggacagcagcaatccccagatttctactgccctgagcaggggtggagtatgtcccaagcaaagtggaatcaatgaagacagctgagagaggagctttgaaggaacagaatacattctgacatagattccaaatggggataaaaaccactgtgtggatgtcacaggaaaacaggtatcagctcatcacagacaagaatattctaacagctaaaatgtgcatcaccaggagctgctttgaagaagagcagaatgacctcccagtcacttaaagcatttaagcagaggctgaatatcaggaatgtggtgaagaaaatttcaatatcaaataagttgttggactacataattttcaaactcttttcaaattcacagattctaatattataaattagcttatattacaaagtgtatttcaaagttaaacaggggaattctacctcactgtcttgaatctgaagcaaagctctaatctggattcaccctagaccataggctaaaggtaccaatacttcacatttccatatagtacttgatagtctacgcagcattttttcctcctaggatataatatgattcccacaaaaccctgaggacagcaaggcagaggcattatttcccattagatacaagaaatggggtccttaatttagctaatggttatgaacctcccatgagattgagaggtgacagcgtgctggcagccctcgcagccctcgcccggtctcagtgcctccttggccttggcgcccactctggccacacttgaggagcccttcagcccgccgctgcactatgggagcccctctctgggctggccgaggccggagccagctccctctgcttgcggggtgtggagggagaggcgcgggcgggaaccagggctgcgcgaggcactcgcgggccagcgcgagttccgggtgggcatgggctcggcgggccccacactcggagcagccagctggctggcaccaccagccccaggcagtgaggggctcagcacctgggccagaagctgtggagggtgtgccgggtcacccagcagtgccagcctgctggcactacgctcgaattctcactgggcctcagctgcctccccacagagcagggctcctgacctacagcccaccatgcccgagcctcctccccactctgtgggctcctgcactgcctgagcctccccgacgagcgctgctccctgctycacggcgcctggtcccaccaaccgcccaagcgctgaggagtgtgggtgcacggcactggactggtgggcagctccgcctgtggccccagtgca

SEQ ID NO: 547943 - DNA, 1596 bp, Homo sapiens
tttgacaagaggtgagcaatttctcttctggcagataatgagaggagggttgaaaggacatcagcgcaatgtagtatgcaagtaagtaagtgtttgcaactgggaacacttgaggagagacaaaatcagggacctggaggaaatgtttgataactggcatgcccctgtcatggaagcagtaaagtaacacaaggaaatgacaaactaatgggagccctggtgggaagcagctggcacatgttctttcctgaattgtagcttaaatgatcattgccattcttgtcagatggtctggtgtatttggacagcagcaatccccagatttctactgccctgagcaggggtggagtatgtcccaagcaaagtggaatcaatgaagacagctgagagaggagctttgaaggaacagaatacattctgacatagattccaaatggggataaaaaccactgtgtggatgtcacaggaaaacaggtatcagctcatcacagacaagaatattctaacagctaaaatgtgcatcaccaggagctgctttgaagaagagcagaatgacctcccagtcacttaaagcatttaagcagaggctgaatatcaggaatgtggtgaagaaaatttcaatatcaaataagttgttggactacataattttcaaactcttttcaaattcacagattctaatattataaattagcttatattacaaagtgtatttcaaagttaaacaggggaattctacctcactgtcttgaatctgaagcaaagctctaatctggattcaccctagaccataggctaaaggtaccaatacttcacatttccatatagtacttgatagtctacgcagcattttttcctcctaggatataatatgattcccacaaaaccctgaggacagcaaggcagaggcattatttcccattagatacaagaaatggggtccttaatttagctaatggttatgaacctcccatgagattgagaggtgacagcgtgctggcagccctcgcagccctcgcccggtctcagtgcctccttggccttggcgcccactctggccacacttgaggagcccttcagcccgccgctgcactatgggagcccctctctgggctggccgaggccggagccagctccctctgcttgcggggtgtggagggagaggcgcgggcgggaaccagggctgcgcgaggcactcgcgggccagcgcgagttccgggtgggcatgggctcggcgggccccacactcggagcagccagctggctggcaccaccagccccaggcagtgaggggctcagcacctgggccagaagctgtggagggtgtgccgggtcacccagcagtgccagcctgctggcactacgctcgaattctcactgggcctcagctgcctccccacagagcagggctcctgacctacagcccaccatgcccgagcctcctccccactctgtgggctcctgcactgcctgagcctccccgacgagcgctgctccctgcttcacggcgcctggtcccaccaaccgcccaagcgctgaggagtgygggtgcacggcactggactggtgggcagctccgcctgtggccccagtgca

SEQ ID NO: 547944 - DNA, 934 bp, Homo sapiens
tctctaaaaaaataagattgagatgtttgccgtgggcctctcaagccatcactttaaggagagtatttccatgaggtcacttttggcctttcttggggcaacctgaggggagagaggggtgggctcgcagtttcccaaggcagtaggcccactgatcgtccactgatcgtcagctcaagaggcaggagaaatgggtggaaagaggggatctttagagaaggtggacaaatgcctgtaaggtgcacccctggggccggcaagcccagggaagccatgactgtggtgcccagagggtgcctgtgcccgtgaggcacgtacagagggaaacgtggtgctaaggggagagagcggcttctcctcgcggtggcctctgcatttagggaggtcccgtgtgaagccgtggggtgccacgcatccccttcccgtggcctcaatgtggcttctctggcaccttcgttaccgacacagcactgcacccttcactcggtcatcagccaacctgcacctgcagcctgaagacgacatctcccctcagcttcccagggaatagagctgggctgggacagcagacaggtgccagccactccccttggtttcccgggaaacaaagctgggccgggatagcaggtgggtgctggccactttcctcggcttcccagggagacagagctgggttgggacagcaggcgggtgccagccactcccctcagcttcctgggaaacagagctgggctgggatagcagtagcaggcgmgtgccagcgaactctccttggcttcctgggagacaaagctgggccaggatagcagtagcaggcgggtgccagccactcccctcagcttccggggaaacaaagctgggccgggatagcagtagcaggcgggtgccgggccactctcctgggcttcccaggggaacagagctgggttgggtt

SEQ ID NO: 547945 - DNA, 1110 bp, Homo sapiens
tggttctgagtgacttttccagttttgttttgaatcattgtgcagccacaatggactcactcctgttcttaagccagaacctttggacttcctttgtgttcctcggtttttgcctggctgactcctttccaggctccaggtctcagctcaaagcccctggactctaacttcatgagtgccacaagggtaaaggccttgtctgcctcattcgctattgtcttctagtccctggaaaagcctctggcacctgaccaagctaagcaaccatttatggaatgagcaactatttccaagcactggtgccgccatctgcaggctggctctctgatgggaagcctgtctctccctggaaagctttatttcttctcttaaggcctcgctcaaaggtgagtggagccctgtctgattccccatgatccagaaaactgtggcttctgcttttgctcctgttgatctttctgcatgtctccgtgacagcatccagcccggtagatgctaacaatagtgagcctgcaaacatacctctcttcctcacggggcaaactcccctagggtgcaaaccttgacttgcccatccagcgctgctgttcaaggaactcagtaratgtttgtcaagcgaatattgggactcctcatttggattatttcagccatcttcagtctaacccttgctaggaaagggtgagctggccactaagggagctgtctccagccctcagaaagggcatggaagaccgtgacaaatgttgcctcccatttgctttttccttctttccttcttttggtagaaagaatcagagggtggaaacttcacttctagcaaagctgtctgatatttccccaggtataaaggaggtcccttcatccctagtcttatcttaaaatctccttgatgtctgtgtctttaaaaaaaatttccacctctgaagatcaataatattgcagaagttagagatcaaagtttttcaagtggtgggtgagctgaggtgggaggtgggggtggaggctggaaagagggtttctattaaactcatccctggatgatgcttccagatgcacggaagctcattctgtcacctgcttgtagtgccctctttttctttctctccc

SEQ ID NO: 547946 - DNA, 2157 bp, Homo sapiens
ccacaccatgaaatgtacattttacaagatcatttgctatgtgactctaaggtgaaagcattgccaaattattttgttctgcaatatttgtgtaacatgtcctttgtaagctttagttttttaattttaatgagggaaggagtgaagaaaactaacatgtattatgtgcccaccatgtaccaaatattctactacatgctttaatttagattatctcatattgtcctcacactgacacttcatattagactcagaggaataaagaatgcgtcttagattccaactcagctctgtccaactcccacaaccatagtattgctattatggcatgctgtctcttaccatgaggccatgtgctgacacactgtggaaggtgcaataataaatgatatgtattcctaagtttggggaaacttaggaatgctaagtttggggaaacttaggaatggagcaggcagatagctttagtgaaaacaggacatagaagatactaaggagctgtgtaagccatgagatctgagcatataggaagaaagatctattgtttaaaatgaatttttccctccttgaattttctaaaattaacttaatttataaatagatatttctcagtatgtggtttatagtctgtcttatgtactgcatattcttgaaaactgagatataggttttttttctagaaaagaaaatttgtagagaaagaagaggaagatgtgttgtagactacagctaggcataatcagcctcaattcctatatagtggtcttagcttcaatacagaattctgacactaaatggatatttttataggcatattgtttattcagaagttggggagacttaaaatgcatgtctttcctgatatatatgagctacattttactaagacaaccttaatttttataatgtaaatttttataatgctataacatactgtctggaagtaggaattggttgattgggggaggggagagccaatgtaaatcagagaagcaataattactaggtcaagaaatagggcaattaaaaaaataattcatggcaagtaggagtgagayatttacattctgaaattaattatggtactttttatttaaattaaaatcaggaagaaaagttcaggaaaaagaggttcagggaaattttatatatattcatctcaactacaaattagtaaagatcttatattcaacaaatgtgtcagagtccattaaagacattagaaaaccctatttcattgtaactaaactgcttgacattttaacctccaaacttttttataatcaaatgtagagattgtgtctgtcttgataagtctacatatagtatccatgctgcaagaataccaaaaaaaaaaaaaaatggatccttagttttacaggattgacaaagatgtctgttggccaaatcaagtgtaagagttcctgtaaagtcctcagatcaacaaatttttaaaaagaaaatcttttatgttcacttagacagcaaccagctcgaacggacaatccatttcttgtgtagtgcatccttagaagctggcttttaactctgaaggtctatggtcttggtctttggccttctagggtactgataattactgctcctactgcacctcccgtttagtccttcgctttctattctttggttcactcttccttccttgtcacttccccattaaacttttctgtcctgggccctattatctcaacttgctctcagccccaaacttccttattactcactctgataagaccagcttggttcataagtgctggtgtaaagagggccctggcctgtcctgtctcattagcaactagggtatttagcatgctttcagtgtgtttttggtgatcacataactcacaggaagaagctaatatatggtaattttagatccactgataggtgagtggaagagatcattggcctttcaatttgcaagtctgatctttcctcagcttatattagaaatctcatttgaattttggaatggtgatataaaagacgaggttttagatttgaggacttaattgctgagaacatgtttgctggaaccagataaaacttcttccagtggatggtaagcctgtcttggggtagcaaacttaaggaatgaagtaaattccattatcagatattcaatttcaatatttaaaa

SEQ ID NO: 547947 - DNA, 454 bp, Homo sapiens
ttatctaatttaaagttgatattatttttggccgttagttatctattactagtgatcagttatactgttttctatagctactttatttaacagcacagatttctatgcacctttactctttcctcaacccttgtctctatctgtacataattgctttgtcttgatgtttctatcaactatatcatgactatstattggttccataactctgtatcatgtgtattttcttattctggtataccacaaatgattcatgcaaatgaatttttggtgattgaaaaatattaaattcccaatttaaagtattatatgataaataattatttctgtaatccattaatgcaaccaacatactttccaagtttaaatcttagtatgtaaatagtcatcagcttatacatgaattaggtaccaaaagtttacatttaaattaaaggattataagatagggcat

SEQ ID NO: 547948 - DNA, 842 bp, Homo sapiens
cccattctccacaacctcagtctattactattagatcgtaccatttttgtccaatcacatctctacacgctcttcttgcttcatcagatctaaagcacccatgcataaaatcagactgctttccctctatctatgggtcactcaatctgaaggctcccatgtcatgtaaaactttgattaaataaatgttatgcttttgtcagtctgtctttattgtaggggtgtcagccatgacctttatgacggagaggacaggtatcaccatctctctgtccccacactataacaaacttgacaaacaatctgacatatttaaatggtaagagttttataaaataaataatatatgccaatgagattagaattttacccaatctagaggagctatggaaatcattcccagtaatggttatataattaaagggcaagtaatamttaaagtttcatgcattacagtttttcttgcttgctataataacatctctaataaaaatatgtttaaagtatcagcataacaatgaataaacatggagagattgcaggactagaggaaaccgcagaattatattacagatttccagaccttcggaatgttttataattacctgaagaaaaagtagtccatacaaagacaaatgttaatatagcggctggacacattaggaaagcattccctttactgaacaacaagatggctacatactttcagggatgaaagttcctgacatggccctggagaaagcatcctcttgtgaacctcctctattcctgtagataaaatttctctaacacctgaagaaatcctgtcatataccagaaaaacaggaaaggcttgagattag

SEQ ID NO: 547949 - DNA, 529 bp, Homo sapiens
ccacgtgaaagtattcacgttaataaaaaggttagtatcattaattccatgatctcttgttttgacagccaagatgaatctatctgttttctcaaacattctatcctcttccagaatggagatcacatctacaatcatggcagtgagtcaattaatacattttcttgaaaggatatataaaataatgaccatcggacaaatagcgaatggattccaagcattaataawaacataaatctttataattgttttacaaatgtgtgcaaaaatttcctcccagtctttgtctatatctatacttactttgaatgtcacaagcaaatgagctgacaccatcattgcaaagtgtcatgcaaagtaagagagctacagtgaaaagggagctgtatactcttcatgacccagtataaatagtgaaaattccttctgaattgattgcaaccttgaatcagcatgttttcattctagtgtcctccaggtatggagagccaatgaacttttacattgtctagctaacccagctctataa

SEQ ID NO: 547950 - DNA, 1810 bp, Homo sapiens
  misc_feature 1152, 1153, 1154, 1155, 1156, 1157, 1158, 1159, 1160, 1161,1162, 1163, 1164, 1165, 1166, 1167, 1168, 1169, 1170, 1171,1172, 1173, 1174, 1175, 1176, 1177, 1178, 1179, 1180, 1181,1182, 1183, 1184, 1185, 1186, 1187, 1188, 1189, 1190: n = A,T,C or G
  misc_feature 1191, 1192, 1193, 1194, 1195, 1196, 1197, 1198, 1199, 1200,1201, 1202, 1203, 1204, 1205, 1206, 1207, 1208, 1209, 1210,1211, 1212, 1213, 1214, 1215, 1216, 1217, 1218, 1219, 1220,1221, 1222, 1223, 1224, 1225, 1226, 1227, 1228, 1229: n = A,T,C or G
  misc_feature 1230, 1231, 1232, 1233, 1234, 1235, 1236, 1237, 1238, 1239,1240, 1241, 1242, 1243, 1244, 1245, 1246, 1247, 1248, 1249,1250, 1251: n = A,T,C or G
caagtctttcccttcccagggagtagctgagagctgggattttaaaattttctcactctgggctaagcatgggggaggatctttggcctctaccagttcaaactatgatctctgttctccttcaggtagctagattatgccagatctgtcagagctccaamgctggcaagggagaagccagtgctcttggagccccctcagaaaagttggggctctagacatgtgaaccaagccctgcctttcctcaaaaaagctgagagctaaaggatctcttcctgatagtatggcacagtgccaggggtaggaattctggtgagagggtgccttgagtctacctgtcaactttgatgagtctggtttcacatttatctgggttgcaagagcctttcaattcatttctgaatttctcaaaacgggaatttgtctgtgaattattgctcaatatgtgtgtttgtgaggagaaggagggtctagggctttctattttgctatcttgctgatgtccaagcacaatccattcttgacaaagaaaatgccactgcatgttaccatcatcatcaccattaaagagttgagttaacattttgttgtcaaggttaataaagagctttgataaatgtcttttcaaagttaggaagagaaggagcaaggcagtaagtgtgcctctgttctacctctttttttcttcctctcagtcttcatgaacatcttagtgagtatggtaactatgatgaagcagattcaacaaaggcaagatagtttcttatttgcattttgaaaccacagatcctatcagataattggaatagggagttggggctgcctccattttcctttcttatttttagagatatgtgatcctgaaagtggtaacttggaaaatttaaaaaaaggagtcatttaattactttaacattatttctatttttcttttaatttatcatattattttagataaagtcttaatagaaattcttaaagctttaaaatactccaaaaattccaagaaaaattttgtccatttgtgttctcttctgtccagccctattgcagaacatgattcaatggggttggaaacgctaacagtaaactcttctgatttttctatccttggctatttttgaatatttgaatataattttattttttctnnnnnnnnnnnnnnnnnnnnnnnnnnnnnnnnnnnnnnnnnnnnnnnnnnnnnnnnnnnnnnnnnnnnnnnnnnnnnnnnnnnnnnnnnnnnnnnnnnnngcacataatatacatgcatgtatgcatatgtgtgtgtatatatgcatacacagaggtgtacacatataagaagagtctcttccatcacaggatgatcttctttgatattaagatttttcagggcaatggtcatgaatatgacagatcttttctcatacacgtccacttttatttagggttaagttagaataatttattattgttaagaaaatgattctctttagaaaatcctctgttggttttgacatactgttgaatatttttcataggcactttttcatccttatcacagagcttatactttttgtcctctcttaaaccagtggttctcaacagggggtgattttgcttccccagcccccaccctcacctctggcaatgtctccaacctccgcctcccaagttcaagtgattctcctgcctcagcctcctgagtagctgggattactggtgcccaccccaacacctggctaatttttgtacttttagtagagacagggtttcgtcatgttgggcaggctggtctcgaactcctgacctcaggtgatccacccacctt

SEQ ID NO: 547951 - DNA, 1810 bp, Homo sapiens
  misc_feature 1152, 1153, 1154, 1155, 1156, 1157, 1158, 1159, 1160, 1161,1162, 1163, 1164, 1165, 1166, 1167, 1168, 1169, 1170, 1171,1172, 1173, 1174, 1175, 1176, 1177, 1178, 1179, 1180, 1181,1182, 1183, 1184, 1185, 1186, 1187, 1188, 1189, 1190: n = A,T,C or G
  misc_feature 1191, 1192, 1193, 1194, 1195, 1196, 1197, 1198, 1199, 1200,1201, 1202, 1203, 1204, 1205, 1206, 1207, 1208, 1209, 1210,1211, 1212, 1213, 1214, 1215, 1216, 1217, 1218, 1219, 1220,1221, 1222, 1223, 1224, 1225, 1226, 1227, 1228, 1229: n = A,T,C or G
  misc_feature 1230, 1231, 1232, 1233, 1234, 1235, 1236, 1237, 1238, 1239,1240, 1241, 1242, 1243, 1244, 1245, 1246, 1247, 1248, 1249,1250, 1251: n = A,T,C or G
caagtctttcccttcccagggagtagctgagagctgggattttaaaattttctcactctgggctaagcatgggggaggatctttggcctctaccagttcaaactatgatctctgttctccttcaggtagctagattatgccagatctgtcagagctccaaagctggcaagggagaagccagtgctcttggagccccctcagaaaagttggggctctagacatgtgaaccaagccctgcctttcctcaaaaaagctgagagctaaaggatctcttcctgatagtatggcacagtgccaggggtaggaattctggtgagagggtgccttgagtctacctgtcaactttgatgagtctggtttcacatttatctgggttgcaagagcctttcaattcatttctgaatttctcaaaacgggaatttgtctgtgaattattgctcaataygtgtgtttgtgaggagaaggagggtctagggctttctattttgctatcttgctgatgtccaagcacaatccattcttgacaaagaaaatgccactgcatgttaccatcatcatcaccattaaagagttgagttaacattttgttgtcaaggttaataaagagctttgataaatgtcttttcaaagttaggaagagaaggagcaaggcagtaagtgtgcctctgttctacctctttttttcttcctctcagtcttcatgaacatcttagtgagtatggtaactatgatgaagcagattcaacaaaggcaagatagtttcttatttgcattttgaaaccacagatcctatcagataattggaatagggagttggggctgcctccattttcctttcttatttttagagatatgtgatcctgaaagtggtaacttggaaaatttaaaaaaaggagtcatttaattactttaacattatttctatttttcttttaatttatcatattattttagataaagtcttaatagaaattcttaaagctttaaaatactccaaaaattccaagaaaaattttgtccatttgtgttctcttctgtccagccctattgcagaacatgattcaatggggttggaaacgctaacagtaaactcttctgatttttctatccttggctatttttgaatatttgaatataattttattttttctnnnnnnnnnnnnnnnnnnnnnnnnnnnnnnnnnnnnnnnnnnnnnnnnnnnnnnnnnnnnnnnnnnnnnnnnnnnnnnnnnnnnnnnnnnnnnnnnnnnngcacataatatacatgcatgtatgcatatgtgtgtgtatatatgcatacacagaggtgtacacatataagaagagtctcttccatcacaggatgatcttctttgatattaagatttttcagggcaatggtcatgaatatgacagatcttttctcatacacgtccacttttatttagggttaagttagaataatttattattgttaagaaaatgattctctttagaaaatcctctgttggttttgacatactgttgaatatttttcataggcactttttcatccttatcacagagcttatactttttgtcctctcttaaaccagtggttctcaacagggggtgattttgcttccccagcccccaccctcacctctggcaatgtctccaacctccgcctcccaagttcaagtgattctcctgcctcagcctcctgagtagctgggattactggtgcccaccccaacacctggctaatttttgtacttttagtagagacagggtttcgtcatgttgggcaggctggtctcgaactcctgacctcaggtgatccacccacctt

SEQ ID NO: 547952 - DNA, 1157 bp, Homo sapiens
gggttaacaacaggggctctgggggaagaccaggtttgtgacatttgctgatttcastgatctaagtataatcaccttacctgattttaagtacggttgtttgtttgcaacaaccggctggcaaaattcctgaaaatttcacagttgcctctggggagcctgtgccagtgggctccagtacactaccccattttcactctaagtacggtatttgattgtgaaaccatcccgacatccccccccgcacctctccccaccgactccccaagtctatcttttcttctaaactttaagctccataagggaagaaaccatgctgccttattcgccatggtaattccagtgccttcctgacacccagcatataccccataaatactgattggctattacgcgcataacgtgagatcaaaaggagttcctacaaagacccttaaatcctccagacttcttaagcttaggaaagatttttgcttggttttcggttttctttttcttattttgagcagcagaccagcgtgactccacagtttcaaagagcaagcgtctatatttgtgtgacccggggccgagctggggaaggggaagcagagcagcgctgacgcagtcaggtccctggtgcaggtgccagctccccacagcgcgccgaactccccagtatgagcgaacctcaagtcactgccctcgcgcttgtcgagcgaactctcaaggcttgcaggtcgtctccaggagtcagagaggtccggactccggggattcctgctccgcggagaactggggagcccccgttcctgtgccactctcaggtggggtgactttgggctctgggaaggagagctgtgtccgtgtcacgagggggccccggcaggtggcgagcagcaccgaagcgcgggccaggacgctcgtttctcggcgccctctcctgggtcagtggcgcatccacctccccagccaccagtgaccagcgggggcgtgcgcagcttcagaggtgcagtttggaactgccctccccctttcagtgtaggactggcgacactcctttcttcctgcaggtagcaatctccagggacctccctcaaccctgtggagggcagttttttcagtggctcaaagaaaacacgtctttcgtgtccctggtcagactgctctgcctgtaa

SEQ ID NO: 547953 - DNA, 1157 bp, Homo sapiens
gggttaacaacaggggctctgggggaagaccaggtttgtgacatttgctgatttcagtgatctaagtataatcaccttacctgattttaagtacggttgtttgtttgcaacaaccggctggcaaaattcctgaaaatttcacagttgcctctggggagcctgtgccagtgggctccagtacactaccccattttcactctaagtacggtatttgattgtgaaaccatcccgacatccccccccgcacctctccccaccgactccccaagtctatcttttcttctaaactttaagctccataagggaagaaaccatgctgccttattcgccatggtaattccagtgccttcctgacacccagcatataccccataaatactgattggctattacgcgcataacgtgagatcaaaaggagttcctacaaagacccttaaatcctccagacttcttaagcttaggaaagatttttgcttggttttcggttttctttttcttattttgagcagcagaccagcgtgactccacagtttcaaagagcaagcgtctatatttgtgtgacccggggccgagctggggaaggggaagcagagcagcgctgacgcagtcaggtccctggtgcaggtgccagctccccacagcgcgccgaactccccagtatgagcgaacctcaagtcactgccctcgcgcttgtcgagcgaactctcaaggcttgcaggtcgtctccaggagtcagagaggtccggactccggggattcctgctccgcggagaactggggagcccccgttcctgtgccactctcaggtggggtgactttgggctctgggaaggagagctgtgtccgtgtcacgagggggccccggcaggtggcgagcagcaccgaagcgcgggccaggacgctcgtttctcggcgccctctcctgggtcagtggcgcatccacctccccagccaccagtgaccagcgggggcgtgcgcagcttcagaggtgcagtttggaactgccctccccctttcagtgtaggactggcgacactcctttcttcctgcaggyagcaatctccagggacctccctcaaccctgtggagggcagttttttcagtggctcaaagaaaacacgtctttcgtgtccctggtcagactgctctgcctgtaa

SEQ ID NO: 547954 - DNA, 536 bp, Homo sapiens
cctttgaaggttatgatagctgctcagtgactaagtggttatttttttaaatcagtgatacattcgttgtttagaaggtatctaatacttcttgtcttaataaaaatgttaataacagatgaaactctgtatattagcatatctcaagtgtataatcctagtttgctatttacccatctgatttgtgtaacattatactgtcatttaaaatatacttttaaagccagattttacatttcaagttatctttagtaataactctcagtacactcacttgtaaatagttgctataaactattcacttgtaaatagttgcttttcagactgtaaaaatatatttactcatccctgtaagcttaaattttgcagctaattactattttctgatactttatgtatatatacatatatttkttcttgaaaattatttccaaaaataattatttaaatgcaaatcataacaataaatgaaaacatttaaaacacgtacttatttttgtaattgccattctaaataatttaatcaaaataccccc

SEQ ID NO: 547955 - DNA, 630 bp, Homo sapiens
tgcctcctgggcttaagtgatttttctgcctcagcttcccaagtagctgttggaattataggcacacaccmccatgccctgctaattgctttttttttttttttttttagtcaagatggggtttcaccatgttggccaggctggtcttgaactcttgacctcaagtgatccacctgccttggcctcacaaagtgctgggattacaggcgtgaaccaccacacccggccctgttcttagtattttcatggaagaaagttggattggaggaatgtagaagaatttagaatctactcttggctataggtagataataagaactcaaaaacaatgcccagggctacaatctaataacaggtgtattatagtttttcttttagaaatatttcctctctacattgatcacatagaaatgtcagatttaaaaacttcttggggctaagaagccaaaaccaaggaagactttagattttcctccagtgtgaaggttcctgggcctgccaggaagtgataagagtttactcatgtcactgtaaggctgagaactcttgaaaccaggtattctattcacgcttttaaatacgatattttagtcaaggcattggtaatataacccatatttccaatggtat

SEQ ID NO: 547956 - DNA, 630 bp, Homo sapiens
tgcctcctgggcttaagtgatttttctgcctcagcttcccaagtagctgttggaattataggcacacacccccatgccctgctaattgctttttttttttttttttttagtcaagatggggtttcaccatgttggccaggctggtcttgaactcttgacctcaagtgatccacctgccttggcctcacaaagtgctgggattacaggcgtgaaccaccacacccggccctgttcttagtattttcatggaaraaagttggattggaggaatgtagaagaatttagaatctactcttggctataggtagataataagaactcaaaaacaatgcccagggctacaatctaataacaggtgtattatagtttttcttttagaaatatttcctctctacattgatcacatagaaatgtcagatttaaaaacttcttggggctaagaagccaaaaccaaggaagactttagattttcctccagtgtgaaggttcctgggcctgccaggaagtgataagagtttactcatgtcactgtaaggctgagaactcttgaaaccaggtattctattcacgcttttaaatacgatattttagtcaaggcattggtaatataacccatatttccaatggtat

SEQ ID NO: 547957 - DNA, 630 bp, Homo sapiens
tgcctcctgggcttaagtgatttttctgcctcagcttcccaagtagctgttggaattataggcacacacccccatgccctgctaattgctttttttttttttttttttagtcaagatggggtttcaccatgttggccaggctggtcttgaactcttgacctcaagtgatccacctgccttggcctcacaaagtgctgggattacaggcgtgaaccaccacacccggccctgttcttagtattttcatggaagaaagttggattggaggaatgtagaagaatttagaatctactcttggctataggtagataataagaactcaaaaacaatgcccagggctacaatctaataacaggtgtattatagtttttcttttaraaatatttcctctctacattgatcacatagaaatgtcagatttaaaaacttcttggggctaagaagccaaaaccaaggaagactttagattttcctccagtgtgaaggttcctgggcctgccaggaagtgataagagtttactcatgtcactgtaaggctgagaactcttgaaaccaggtattctattcacgcttttaaatacgatattttagtcaaggcattggtaatataacccatatttccaatggtat

SEQ ID NO: 547958 - DNA, 517 bp, Homo sapiens
tttattttgcatagtccctctggtgtttttttcatagtgaaaaacaatttaaactcaaactttatttccaaggtctttttctccatagtatcttaaaagtggaagtgggggaattattttaggcttcaatgctaatttgttttcacataagggtaacctataaattattctaattgattcttgaccagtatgaaaaattacttttcatgaatatacataccgtgaagctgtgataattcaaaagtgccaataaaagtaaaacaaaaactttctaattagcacaaatgccctttttacatgtgtgttgttttacatggctttttttttgatcaatagtgcttacaaatattttcccatgtcaggaaatacagatttacagtaactttatgagctgtggagtaytcagttgtgtaaatgaagcatactttatataaataattctatataattgcatatctataatttttcattattttttgaagtatattgttataaacaacatagatttgtttgataa

SEQ ID NO: 547959 - DNA, 1331 bp, Homo sapiens
tttgactagctgattatcagattagctgttgaaaggcgtgattgtttagtgataacttcttcaatttacaatttgaatggagtctgactagaactcactgggtgttttttcctcaactggtccccttcagctgactgcyaaaccaagtgcagtggagtttaaggcctaagcattctttctccaagcaatccatcaaggggggattactggtaataatgagaacagagtatgtttatcgaggtatcttttgagtaagaaatgatgttaagcttggttatacttctctttttgaaacattcaacctttgtacctattgacttttcgtattgtacaaataatatagtattttattagtttagttacttttattatgaaaaatatttcaaattcactttattttttaaaagcctgttttctgtgtataatattacatgatttatggtattagattccctctccattgccaaatatggctgcctattctctggatatataaatccaatttagggaattagaatgagactaaaatatgccctacaaacctctttgaattagtatgagactgtttaacttttaaaatgattctgctatgagatttttccaaagattgttctgttgtatctcattcctaattatacagtaaaatgcagtaatagaactttagttcattttaatgtgttacttaatttgcctctatattattatgtactttgttttttaaaagcaaacttatttaaatttgaacattatgccctaactctagaggtgatctctgaataaatgttacacaaccaccaccctaaagcctggaaactctttattgctaatatttatggcactcatctcccattcactttatttcctaagtactcactttaaataacactgatctggggctttggtctttacttgaatgtgctctcttctatttttcactggtagctgatttctatcctattttcctaagaagtgataatgaggtacagagtcttcagctttgttttcaaatttataagtacagaagtgctgctgggctttcctgctctatggtgcttttcttcatgttttcattattgacacacttgttggaattcctacaagtgtggttaattgcaggatttgtgaaagaattgtttaagtaaattgttctgggtatatttctctttggggttccatcagtgttgccaactatatgttaattatatttgagacctgataaaaataagtccttttaaaaaataaatcatacaaattgcttttgaatttttgcttgtattgagaaatttctagtatggtgttaactaacaatactttgagtactgaaaaggaca

SEQ ID NO: 547960 - DNA, 1193 bp, Homo sapiens
aaaaaaaaaaaaaaaaaaaagaacaggaccaagcacataacacatgctatgtgacatggtttggctgtgttcccattcaaatctcaacttgaattgtatctcccagaattcccatgtggtgtgggaggaacccaggggggaggtaattgaatcatgggggccggtcttttccagactattctcgtgatagtgaataagtgtcaccagatctgaggggtttatgaggggtttctgctttcacttcttcctcattctctcttgctgctgccatgtaagaagtgcctttcaccctcccccatgattatgagagaactccccagccatggggaactgttaagtccaattaaacctttttcttcccagtctcgggtatgtttttatcagcagcatgaaaacagactaatacactatgtaaatattaagtatgttaaaagtcttatctttatgaggagtcccctaaacgtttccctcatcccctgctgtgcctcctcaggttaaactgatgctaccgattcctatcatagcatctagaaaatttcatgggactcatttttaatgcttcagtctctctaggtaaatgtaggcacaaaataaatggttttcaatgaatcaatggatggataaatgaatatctctattctagaaagcacaaaagagtattttattttatttttgcttacgtgtctgatttagtctgtgagcttctcaacaacccagaatacttctgatacattttgtatctccaatgcctgacacagaacctgtatccactcaatgaataaatggctggagttgttgctactcaaaagaaaacaacaacaaaaaacccacataggccgggcacggtggctcacgcctgtaatcccaacactttggaaggccacaaggcaggcagatcacctgaggtcagtagttcgaggctaacatggagaaaccctgcctctactaaaaatacaaaaaaaaaaaaattagctgggtatcgtggcgcatgcctgtaatcccagctaccaggaggctgaggcaggagaatcgcttgaacccgggaggcagaggttgcggtgagccragatcgcaccattgcactccagcctgggcaacaagagcaaaactctgtctcaaaaaaaacaaaaacaaaacaaaacaaaaaaaaccacccacatagaatcatcaaaatgagttttggaagcaaactt

SEQ ID NO: 547961 - DNA, 555 bp, Homo sapiens
atattattcagtaattgtaaatggaaatattaaggcaaaattatggtcaaacatgggatattgataataaaaataagaactaatatttactgagtactccttcatgggctggttactgggactaacactttccatatataatagcttcttttaagcctcacaatacatctttaagatggaaccattattatacccatatgagagtgaaacygaggcttagtgaggttaataaaagccaaatatctttaaaacaagattttagttgtttcttttgcaggaaggagagaagtgtcagcatagaatttggtttattagatgttttgaagctgtctgcttgaaaaggttatcagaaaattaagccagctaattctttctgagttagtgcagaaagttaaacttggaaaaataaacctgctttattctgtaaagattacgaggaacgtaagataatgcctgtgcaaaggaaaataaatatagcacatccagttcaaggtgggtttttgggtgataattttttaaagtgatagtgttctaaatagactaatcaagatcagt

SEQ ID NO: 547962 - DNA, 555 bp, Homo sapiens
atattattcagtaattgtaaatggaaatattaaggcaaaattatggtcaaacatgggatattgataataaaaataagaactaatatttactgagtactccttcatgggctggttactgggactaacactttccatatataatagcttcttttaagcctcacaatacatctttaagatggaaccattattatacccatatgagagtgaaaccgaggcttagtgaggttaataaaagccamatatctttaaaacaagattttagttgtttcttttgcaggaaggagagaagtgtcagcatagaatttggtttattagatgttttgaagctgtctgcttgaaaaggttatcagaaaattaagccagctaattctttctgagttagtgcagaaagttaaacttggaaaaataaacctgctttattctgtaaagattacgaggaacgtaagataatgcctgtgcaaaggaaaataaatatagcacatccagttcaaggtgggtttttgggtgataattttttaaagtgatagtgttctaaatagactaatcaagatcagt

SEQ ID NO: 547963 - DNA, 650 bp, Homo sapiens
  misc_feature 9, 10, 11, 12, 13, 14, 15, 16, 17, 18, 19, 20, 21, 22, 23,24, 25, 26, 27, 28, 29, 30, 31, 32, 33, 34, 35, 36, 37,38, 39, 40, 41, 42, 43, 44, 45, 46, 47, 48, 49, 50, 51,52, 53, 54, 55, 56, 57, 58, 59, 60, 61, 62, 63, 64, 65,66: n = A,T,C or G
  misc_feature 67, 68, 69, 70, 71, 72, 73, 74, 75, 76, 77, 78, 79, 80, 81,82, 83, 84, 85, 86, 87, 88, 89, 90, 91, 92, 93, 94, 95,96, 97, 98, 99, 100, 101, 102, 103, 104, 105, 106, 107,108: n = A,T,C or G
ctaattttnnnnnnnnnnnnnnnnnnnnnnnnnnnnnnnnnnnnnnnnnnnnnnnnnnnnnnnnnnnnnnnnnnnnnnnnnnnnnnnnnnnnnnnnnnnnnnnnnnnnacacttggcagtgtctgaagactttttggttgtcacagcttggggatgggaaaattgctgctagcatctatgggaagaagtcagaaatgmtgctaaagattctataatgcacagcaaagaatcttctagtccaaatgccagtggcaaagataatcccaagtgccagtggcaaagataatgccaaatgccagtgctgagatggcaaaaccttgccacctaccctgcacctggcttcccataatgttaacatgttacacagccatagcagttactgaaattagcattgaacagtagtattaattaatctgtagactttttgagtcaattttcccaaacatccttatgcttcttactgatttttcttgtctaattgtattgcctaataatctaatacaggtgaataatggcagagatagtaggtgtttttgtcttgttcctgatcttattagaaaagtatctagtgttttgctattaaataagatactgactttaggactaaggtatctatatttttatcatgttaagaaaatagtcctcaattt

SEQ ID NO: 547964 - DNA, 533 bp, Homo sapiens
aaattattttctttaagaatgttgaatattggcctcccatctcttctggcttgtagggtttcctctgagaagtttgctttcagtctgatgggcttccccattgtaggtgacctggcatttctctcaggctgcccttaacattttttccttcatttcaaccttggagaatctgacrgttatgtgtcttgggatagatcttttcatggagtatcttaatggggttctctggattctctggatttgaatgttggtctgtcttgctagattagggaagttctcttggatgatatcctgaagtgtgttttccatcttggcccctcctcacctactcaatagtttaaaaaattgtttttatgttcagctaataaagtgagaaaaatattgaacctgataattttcctagtatcctaattggttaagttgcccctaatattaaaaagcaatctactctatgaaagttcacataaatacatgtgcatacatatgcacacacatacacacacacacatctgatttctatttagaaattgctt

SEQ ID NO: 547965 - DNA, 2336 bp, Homo sapiens
tacttttaggattcaaatggtccgttttaggccaactcagtttggctgcaagaaaatatgattgtttttatgaaattcacctgaatgacctctttatgatagtctataatgtatgctgtgtccacatctcagatgatgagaacgtcaccacttctatctggtataatttcagcagcaaaggcaaagaccatgaaaatttttccttcagatactccagataagtatggctgtctctttaggaaggcctggttctcgttcagtttcctctgcatgtctactatgccaactccctatctccctattaataatgcttagctgtaatattaatattgacttcaatttacttttattttattctaactaataacagtttctgtatacagaaaattgatgaaagtatttaaagaaagtgtcagatttattcagtgaccattaatctacctcttttgaaagtatacactgattaaactctgtaacacctaaatgtgtctgcctgtggcttgtggtttgtgtgtatgtgttaatctagaagagagaaaggaagaatagggtggctcagctcactcgggctacaataataaaataccttaggctgggtaatttataagtaacagaaatttattgctcacagttttgaaggctggggaattccaggatcaaagaaccagcagatttggtggttgacgtcttgttctctgtttcaaaggtggtgtctctttgctgtttcctgacatagcagaaggggcaaacagctctctcacactacttttgtaaggtcactaattccactcatgagggcttcatcctcatgataaaatcacatcctaaagacgctatcacattggtgatcaagtttcaacgtataaattttgaggggaacattcaggccttagcagaggggctaaaaaaccttgtgagtaataaatgagaatggaaaaagagctgtaattgatgcattctgataggacagtagcttttctaatagcttatttctgtacgaattaacatgaatactttaatgaatataggtttgtatggaaggggagagacataaaaggtggataaatcagtgtctgttaacactatagtcttaaaatttgatttaggcaaccctccaagtaaaaatttgaccacctaaaaagggaattatattttaattcaaaatatttctattgtatgtgatatttaaccatctgttacagataataaatgaggaaaatacaaacaatggataatcaaaaatattgtatatagatagtatcatgtggcattgtggctttggtttctaaacacttaatccttttcttcttgtagtcaaggtaaaattaaaataagcccctaactatgagaactcagtgaagatttagaatgattataaagtaaaggccccttggtcttttatcattttgggtaatttgctttatccctaactgcatacaaatatttgagtattggcagaatgtgtttaatgagaaaatattctaacaaaaattgtaggcatgaactagactttgaaagtaactaaaatatgctctttagctcagatttttaggcaaaaaaatcacagaaatgaagggatccttttcctgctaattacattcgctaaagccttctttacttccttattcctgaggctgtagatcagaggattcaatatggggatcaccactgtgtagaacacagaaaccactttgtcctgatcagggagtagctggaactaggtctcaggtaggtatagatggaggtggtgtagaagaggattatggctgtcaggtgagaggcacacgtggagaaagctctgtgcctcccctcccctgaatgcatagaaaaaatggagaagagaacgtaggaataggaggagaggatgacaagcagagccccgaccktattcacaccagcaaaagtggaaaatatgctttccttcaagtgtgtgtcagaacaagaaagcttaaaaagtgggggactgttgcagaagaagtgatggatgacattggagccacagaatgacaagctgctgacatagctagtgttgaccatggagttcagcaaccctgcagcaaaagccccggctgccatttttaggcagactgtcctggacatgatcaaggagtaaagcagcgggcgacatatggtcacataccggtcataggccattaacccaaagaggatgcattcggttgtcgccagggcgataaagaagtacatctgtaggaagcagccagcaaaagagatggttttcttctctgataataaatctgccagcatctttggggtgatggtggttgagtaacaaatgtccacaaaggacaggttaaccaggaagaaatacatgggtg

SEQ ID NO: 547966 - DNA, 648 bp, Homo sapiens
tgaagtgaataacagcaaaaaatctttataacttctgtcccatgcagagttttaccaaagtagtctattattttctttttaaactgggattctcacttgcaggttaaaaaatataaaaaagaaactttatttttaaaaagcagtgtaaagttgaactatgcactggaaaaattttaagattgaaccttctgattaaatacatgaagctgcatttttattttgttttccttcaagcagattgggtgatcttggcgactagatagtaagtattaactgaggagtcaattctctaaaggcaggaacttaagtctcaaaagaaagttaaacccaggctgggggttgtggctcacacctgtaatcctaaccttttgggaggccaaggtaggcggatcagttgatgtyaggggtttgagaccagcctggccaacatggcaaaaccctgtctctattaaaaatacaaaaaaattagtcgtgcctggtggcggcgcatgcctgcaatcccagctactcgggaggctgaggcaccggaatcgcttcaacccccgaggaagaggtttcagtgagccatgatcacgccgctgcactccagcctggatgacagagtgagattatttagcgcttgtatcataaggtgatttctgacgtcta

SEQ ID NO: 547967 - DNA, 1067 bp, Homo sapiens
aaatactgctacagtatttctcattacatactgtttatggaaaacagtttgaaaggcatttacttttcttctttaatggaataagtttataaaaggagggctctttaattctgatgaggaaggaagaaatatctttaacagaccaatgcagcaaaagaaaactgtccaagtagacatgggctattgccgtaagtttttttttttaaaaacctcaatacaaaataaaattaagtctgtcacttatcttctaaaacaagtattttaacaaaaggccaacaacggaaagctaaaaaataaaaccaggcccttgtgatatccacagaattcttttttggcataggaaatggtgatagatattatcactgattatgtggtcgatatcctatatttcgttttgaatagaagagaaacaactgttttcctcatatatatctgtaaataacacctcatttggaatggctgctggaagaactatagggaaagatcagttatatgtataagacagagacttctggtttccaatctaacatgtgaagagcttggaaatcatcactacagtccccagaagaaaaaagctgttgaacaaactgaaactcagtaactcttcttagatayatcaaagaacaaatgtcacagggcaaactgctgtcctgaaaactaaagagagagagaggcagattgagaaaatcacaagaattactggggacagaaaggccaggagcagaagctcacagctggagccaatactggtaggagcaattaactgtgactgaggaactgatggaggatccgtgtggataagcttcagagttaaaaactccaagggcccagtttcagagggactcacaaacttttgtgagttttatctccaggagcccccccaggtctcagggtaaagattacacaaaaattccttcctgcttctgacaggcggagggaaaaagtagccattttgaaatactccccaattagaaatactccccatttcaaaataaatgaggaaagcgttctggtcttcttaacaaaatcctttcctcaagagaaactaattttgccagaacctaacc

SEQ ID NO: 547968 - DNA, 508 bp, Homo sapiens
cacctgtactaagtcacatatgtgaagtaatagacatggggttaggttgaaatgtttaaaataaaaggaagaaagaaagaaggraaggagggagggtgggagggaggaaaaaagcaaaccctttatatagatgggtgagtatgggaaagctgctgtttatctcttacaattgattagactgccgtttgtattaaaaggattctggtgtaattggctaatataagtctttaaaatatttattgaatatgagccagatgccctgagaaagaaaaggtgagcctgataccttcactgggggcagaggagaaaaccagggaactgcttaaggtcttcttctgcccctaaacactatgatactttccagaatgagttgcaatgataaattaataaatagccctctcctcaaaattaccaagtataaaataaagggagtcactcaagctgatcctgacaccaagtgaaacatggaaaacaattactggaaaatgaaactagtcaattcaacttg

SEQ ID NO: 547969 - DNA, 508 bp, Homo sapiens
cacctgtactaagtcacatatgtgaagtaatagacatggggttaggttgaaatgtttaaaataaaaggaagaaagaaagaaggaaaggagggagggtgggagggaggaaaaaagcaaaccctttatatagatgggtgagtatgggaaagctgctgtttatctcttacaattgattagactgccgtttgtattaaaaggattctggtgtaattggctaatataagtctttaaaatatttattgaatatgagccagatgccctgagaaagaaaaggtgagcctgataccttcactgggggcagaggagaaaaccagggaactgcttaaggtcttcttctgcccctaaacactatgatactttccagaatgagttgcaatgataaattaataaatagccctctcctcaaaattaccaagtataaaataaagggagtcactcaagctgatcctgrcaccaagtgaaacatggaaaacaattactggaaaatgaaactagtcaattcaacttg

SEQ ID NO: 547970 - DNA, 869 bp, Homo sapiens
aaaatcagaatctttctaccactaacatatgattacaaaatatagtggacagactcactcartcataatgtaacaaaaatgatacaaataattgatcacagccagttgcagagttctttgttccttctccattcccactgattcacttgactagccttaaaaatatctatatctatatatagagagagaaatggccaggatccagatgaagaaaagcaaaattttccatgataaaaaataatatattaactacatgatagactattttacaaattaaattatgaatttaataaacatgggatttgttttggaaactgacaaacttaaaaaaagatttatatttttctcactattaataccataatgtatttaatcattcctttcttgctggataacatactaggtttttggctgggcgctgtggctcatgcctgtaatcccagcactttgggaggccgaggtgggtggatcacgaggtcaggagttcaagaccagcctgaccaacatggtgaaaccccgtctctactaaaaatataaaaattagccgggcttggtggcacgtgcctgtaatcccagctattcgggaggctgaggcaggagaatcacctgaacccgggaggcagaggttgcaatgagccgagatcatgccactgcaccccaccctggacgtcacagtgagactgtcccccctcaaaaaaaaaaagataaaaagatattagattttttatatttactattttaaacattgttttaatgagcatccttgataaatatcttttacatattaaaagtatgaaatttatggggaagagttgtagattgtaggtgatttgtttagttctaaagtatattgttaatcaataattgtt

SEQ ID NO: 547971 - DNA, 1354 bp, Homo sapiens
ttcacaatagcaagacatggaatcaacctaggtggcaattaacagtggactggataaagaaaaggtggcatatgtatgctgtggaatactacacagccataaaaagaataaaatcatgtcttttgcagcaatatggatgcagctggaggccattgtcccaaaagaattaatataagaacagaaaaccaaatgccacatattctcacttataagtgggagctaaacattgagcacacatgggcataaagaagaaaacaatagacactggggactgctagactggggagagtgaaaggcggaccagggttgaaaactccctgttggctattatggtcactactrgggtgacggaatcattcatacctcaaacctgaggatcacaccatacttccatgtaacaaatctgcacctgtacccctgagcctaaaataaaagttgaaaacaaaagaatttcaagtggatattttaatatctgacaatttataaggctgattgattttctaatgatggatttaacctctagattacatgatgttaatggacaataaccagggcatgtttatttttaatttgctgtggtatctagcagggaatagactatattgtaatatccaaagcctctcagactaatatttcactgtatttctatagcattttaacaaatgactctttagctttaaaaaagttataaagatatttaagtgactttaaaatgcaatgtaaaaaatgaaaacaaagcagtttaaagtatgaaatacacaccaaaaaatatacagcaggaagcttctatgactgaacatgatttccttggaataagccagctttgttttagtaagtcagagcatatctatataacagtactaaaacacacatcttttgtatgtttctattttgtgaagtttcttttccggcctttattattctatatataactctgtaagcctgccacagaaattttcttttgaatttctcagaaccctatagaaaatacattatttaagcacatttacatgagactacagaattatcaaaattataatgttatttaaacaacttcagcacttttgtttctcttcatggcttatggtgaggacactgtaatcttgaatatgaaaatggagtattatccatacaattttcaaacaagaaatcagagttcatgttatagaatggagtaaatattaacctttttagatatgaatccttacatgcgtatcaaaatatatccccagtaattcttctaagtaggatttttttctcaccaacacattagaaattatatcacaacatgcattatactcataattacactgtttcttggtccaaattttaaatgtactgtggcaaaattaac

SEQ ID NO: 547972 - DNA, 2512 bp, Homo sapiens
taacaactaagcattaagcatttgccatgggccagatgtagataagaaattgaacagaaaaaaatatttcctttttttatgaatgtaccagcaatttgagaaaattgkatataaacaggtatgataaagtgtgatgaatgttatcaaatagtctaggtattatggtggtgtgtagcttttccccactcccttgtttccatgtaacctagaaatagttctaaaaatgtgatgtttttatatactaaatgtggataaaatagctcctaagtgctaagcattgcaagtattttgaagttcaaattgcattaacatcatgacacacaaatatctgattgaacatttataattgattctgaattacatcattatattatgatcatgacattctaacttctccattacagttttatttgtcaacttgtaactaaaaagtaacttgcctaatattattttgatatcttatgaatgtctccttttcttttgaccacacaccacatgctttcaacaacagttggtaacctttgcctggatcagtcagtgttatggaataatttttaaatgtgaatctatttaatcatcaagtcggaccattttctaatagaaaaactggatatatgttaaagctttcacaattttaaaaaccgcctattcaactggcttcccaaatgcttacgaaagattttttcccctagcattctgttttaaaaatatatttactcatgattttcatagagtccctgtgtgtcaattataaaaacaattcctttgctcattttcacaatggcatgaattcagacagtctcttatgatattttttatgttcctgttttttttaaggcttttgctattgttttaatgtttgtgtcctctccaaattcatgttgaaacatcagttaatgcaataatatcaaaaggtatgtcctttaggagtgattagaccacaggaaataggcctgtttggtaagagccttaggccaccaggctccccctcacaaggggattcccacttgtgaatgagattaaggttcttataaaataggcttttttttggggtgggggggtgggcattttccttccatcatctgaggacacagagttcatcccttccagaggatgaagcaacaggcatcaccccagaaggaaaaaggacaacccttttgccagaaactaaatgctggcaccatgcttttgaacttattagacttcagaactgttagaaaataaaattatgttctttataaattacccagtctcggatattttgttagagcaatacaaactaagatagcattcctctttctgttatcctgccttacatcaggatcactttgaactttccctggtcaggacctgtaattaggcatttatctgagaatcttagattctatttagtaattgttttacagacttaatactagtagtgtttattgttactgagaatatacttattttagactatattttagagtaaatatatatcaatattttattttcagtgtaattttatcatttagtattttcacttactccatttgattttatagttgcatctttttcatattgaataaacttattcctaatgtaactaacatggttgcttaatttgctttaccttataaaaagttccacaataaaaatgctgatattacaataaacaaaaacactactgaatgaagtattgatttttttctattatttaaattcttagaataaatcctgctcaatgaaattccatggaaagtatggtaaaagtggtgtgatctgggtgtagggggtaaaggaatacattttctgtacaaaaattgtaagcaataattacatttactaactcatggtctacattttattctcaccatgtgctcacaattttcatattgccagcaagaaattacccttccaaatcttttcttagtctaattttgaaatattctacacaattactgtagttattgttgagttttaattagacatgtaaacatacacatgcctcatattagcatttatattatgtatcattagtagtattttataattgaaagttagagaattctgttacacaactgggctgaaaacatgcagactcagctacacatgttgcttgtaagaattttatggtttggctgtgtccccacacatatctcatcttgaattgtagttcctataatccccacatggattcatatattttaaaagtattaatccatttacttttgttatatttttatttttactggactagttatgcttcaaacttcaataaaatactgtctaaatgtattttctgatcattagtgttactcattaaatatatatttgtcatgtaaataaaggagatgttaacaaatgagctgttctagacctctggccatttaatctctgaattcctctattttagtttcttgttatttttccataggtgcaatggatatatattagatatatataaatatcaatgttgatatgtctatatattaacttgaatttataggtgttgctgttttcttttgcttca

SEQ ID NO: 547973 - DNA, 335 bp, Homo sapiens
atatatctccattttttgtcttttttcagacgtattttggaagcaaaggagagaattgctatatagctgacttcctcttctcatcaacagtgttttaacagtttttaagcaaaagtcagctttgtttatctaagattttttttgctggcatttaacctacccctgcctcccctttcccaagtccacttcagccracctctcattcgacaggtaccaccctataacataactgaaataatgtctaccattactggatcttgctagcaaagaatctcaaattttcccacttggttgtaaatattttgtatgtatagtgtttaaggtgcgcttgtcct

SEQ ID NO: 547974 - DNA, 587 bp, Homo sapiens
tagccctgcctactggctgcttgcagtctaacacagggctgagaagacacatacctagttgctatgacagatagcaaatgagtgtatacagagtacgtagccctgtatgttccaaaatgatgaactgaattaatgaaactatcaagtgacttactgaacaaagtggcaagggctcgctctcttatacacaaccaaaagtttcacttgtacttgcaatyggttcagtttacctccaaacaaatattagtccattctctcttagagggtcactagatttctgcttcacacctgcctcctttatcacatggcctatcctgaaataatccaacttgtatatatatatatatatttttactttcaattttttttattattctactttaagttttagggtacatgtgcacaacgtgcaggtttgttacatatgtatacatgtgccatgttggtgtgctgcacccattaacttgtcatttagcattaggtatatctcctaatgctatccctccccccctccccccaccccacaacagtccccggtgtgtgatgttccccttcctgtgtccatgtgttctcattgttcagttccc

SEQ ID NO: 547975 - DNA, 1363 bp, Homo sapiens
cagtcctgccggtgggactctgcccgccgcctgcgagacgacgtgagtgtgttcacttttatacacacccagaagtggccctagtgtttgggaaacggcagttaagaatggaaaagcctgtcaggcgcggtggctcacacttggaatcccagcactttgggaggccaagacgggcagatcacgaggtcaagagatggagatcagccaggcgcagtggctcacgcctggaatcccagcactttgggaggctgaggcaagcggatcacaaggtcaggagttaagagaccagcctggccaacatggtggaaccccatctctactaaaaatacaaaaattagtcaggcgtggtgatgcgtgcctgtactcccagcttcttgggaggctgaggcaggagaattgcttgaacccgggaggcagaggttgcagtgagcggagaatcgtgccactgcactccagcctgggcgacagagggagactctgttcgggaaaaaaaaaaaaaaaaaaaagtaaaaaccacagcctcgcccatgtcgccactgcacccagcgttggtgtcagatcaccacctctccaagcctcagaaccccctcaaccgctgcccaggctacaacrcaaatgccttcagacacagcctggctggcaggaaggcctctgggtcagcagtgtgccctgctctctgccacccctttggtttggatgcaggagctgcctcacctcgcttgttcttacttggctgtcctcattttggggtgtccagccaaacccctaaagagaagcgaagacatgatgccctgtgtttggtggataccgtggggtggagaaagcttacttccaagttgctaaagggagatgcggggagccacacacatcaggtaacagctgcagagcagcattctcaacaggagccgctgcacggcaacccgcctgcgccccggggttcattcagcctcttggtcacctattcactagggctgctctcataacctcctggtcactgagctccctgcagggacctacctgcccctcctagcccagcctcaacttccaggacaggtggaatcagcgagactgtggttgggatgtactttaaaaaaaaaaaatcaaatgaaaccaacaaagacacagaactcacaaaaccggagtattttattgcaccaagatcttggcaacacgtggggctccccaggcccccggaaaggaggtgcagaggatgggacacagacctctgcacacacacaggtgcggccatgcaaccaggacgcggggcaggcaagtgagaggacctgggagaggtagctgctgtacacaggccccactccctccagctccattcccaagcacaaaattcaacagacccagatcc

SEQ ID NO: 547976 - DNA, 582 bp, Homo sapiens
ataataatggcaacatttatgacatgcctactctctatattatttttgaaaatactttaaaatatcacctgtattttatgcatatgataactgaggcctaagaaagttaaaatagtgtattgtatagaatacagttgaattcagaacaagccaactctatgtcgtttttttttacaacagccatgatatactttatatttgtagatttgaagatttasaaggcatgattctcttaataatttattttcaccttgtgaagtaggtgaatcaatttgctaactaaatgagatgtagcctgaatattaagagtggaaattatgaacaatagaaacataaactttctaagtacacataatcatcctactgagagtttggtgattatcaatttataatgggatattattttctctagaagcagaagtagataaaagcatagagagagcaataggttagaatcatcatactttttatccacagattgaatgagaaaaaaattaagactattggcaatacagcagttgaaaatatagaacatgtgatccaggtttacagaatcatgtgttcaggtagcttagggaaagg

SEQ ID NO: 547977 - DNA, 582 bp, Homo sapiens
ataataatggcaacatttatgacatgcctactctctatattatttttgaaaatactttaaaatatcacctgtattttatgcatatgataactgaggcctaagaaagttaaaatagtgtattgtatagaatacagttgaattcagaacaagccaactctatgtcgtttttttttacaacagccatgatatactttatatttgtagatttgaagatttagaaggcatgattctcttaataatttattttcaccttgtgaagtaggtgaatcaatttgctaactaaatgagatgtagcctgaatattaagagtggaaattatgaacaatrgaaacataaactttctaagtacacataatcatcctactgagagtttggtgattatcaatttataatgggatattattttctctagaagcagaagtagataaaagcatagagagagcaataggttagaatcatcatactttttatccacagattgaatgagaaaaaaattaagactattggcaatacagcagttgaaaatatagaacatgtgatccaggtttacagaatcatgtgttcaggtagcttagggaaagg

SEQ ID NO: 547978 - DNA, 582 bp, Homo sapiens
ataataatggcaacatttatgacatgcctactctctatattatttttgaaaatactttaaaatatcacctgtattttatgcatatgataactgaggcctaagaaagttaaaatagtgtattgtatagaatacagttgaattcagaacaagccaactctatgtcgtttttttttacaacagccatgatatactttatatttgtagatttgaagatttagaaggcatgattctcttaataatttattttcaccttgtgaagtaggtgaatcaatttgctaactaaatgagatgtagcctgaatattaagagtggaaattatgaacaatagaaacataaactttctaagtacacataatcatcctactgagagtttggtgattatcaatttataatgggatattattttctctagaagcagaagtagataaaagcatagagagagcaataggttagaatcatcataytttttatccacagattgaatgagaaaaaaattaagactattggcaatacagcagttgaaaatatagaacatgtgatccaggtttacagaatcatgtgttcaggtagcttagggaaagg

SEQ ID NO: 547979 - DNA, 1078 bp, Homo sapiens
tgccaccttgtggttagatggggccactgacagcggaaattaacctgtcatttttgagctggagcatttagttgatggtgggtgaccatccagagatctcttgctctctgccagggtgacaagcatgttctagaaaggcgctgctgcattagcctgagggcggaataaatggatggtacatagcaaacctaccagttgacagacgttcatgtgaaaagaaagaaaccattgtcgttttaagctgctaggatttggtggtcctttgttatcaaagcataacagtgtatgctgatagattccgagggtgagatgtaaaatttgagtaggaatcacaggaagtgatgaactcattatttttaactgtggtggtgtagatgtcaggaaaagcttcacagagtttctggtttttaagctaaatcttgaggttgtgagcagttttgtacatttttttttaaggaaaacaagcattaagtttgacatgtgctttaatattagcaatataacacatttaagtttccaaaaattttcttatattgagtaagataatagactatttttcaaagaaaacatccatgagaactcctagctttgacttaaattatttttattgtaataatgctaaaatatatattaattttttatatctattatggttatagctcacatattgctttaaatttgaagcaaatttaacatgtcatactttaataaaaagttttcaaaaatttctaacaaacttggggggttctaatgagagttccttaagatataataaataataattttttttttgagacagagtctcacacggtggcccaggctgtagtgcagtggcacgatctctgctcactgcaacttccgcctcctgggttcaagcaattctcctgcctcagcctcccragcagctgagattagtagccaccatgcccggctaattttttgtatttttattagagacggagtttcaccatgttggccaggctggtctcgaactcctgacctcgtgatctgcctgcctcagcctcccaaagtgctgggattataggcgtgagccaccatgcccagccataaataataa

SEQ ID NO: 547980 - DNA, 670 bp, Homo sapiens
tgttggtctggaaacccaggggagtcagggtggctttcctatgcccagaattgtaaagttttatggcagaagggcgaatacactggggaatcattcccgcattagggagcttcccccagctctacccccgttccagttgggcagccacctagcttcattcctctctgttgttcatggatcccattgcttccttggtgaatcccagcatgatctcttagatggttcacttaaagagctaaaatttagttgccacttagttttctctccataaaagaggaacacactaactgcttatagtcagctatctggagcaaaatattcttcttcatttttgaaagacacttttgccagatatagcattatttgttggcagtgtttttttcttccaggactttgactatatcatcccactcatttctggcctccaatattcctgttaatgaatccactgattatcctgtcgtggtttccttgtacatgatgatttgcttttgtcttgctgctttaaaaattctgtctctatctttgacttttgacaatttttaaatttttttcacaagaaaattcagaagaggcctctgacaacttgagataatgtttctcagtgtatatttatttagattcttctacttgatggtatctcaraagtcccttgggctctctcattttt

SEQ ID NO: 547981 - DNA, 664 bp, Homo sapiens
acttgaacccaggaggcggaggttgcagtgagtcgagattgcactgttgcactccagcctgggcaacaagagcaaaactccgtgtcaaaaaaaaatgagatcctgtcattcgcaacaacatagaggggactagaggtcattaagtgaaataagccaggcacagaaagacaaactttacaatgttctcacttatttatgaaagctaaaaattaagacaattgaagttatggagatagagtaaaatgatggttaccagaggctgggaaagatattagggggtgggagggaggtggggatggtaaatgagcacaaaaaaaatagttagactgaataagatctagtatttctgaataagatctagtattygatagcacaacagggtgactatagtcaataattgtacagttagaaataactaaaacagtataattgtattgttacaattaagagtataattgtattgttacaattataacaaataggaataggacttcctaactacatggaattcagtttttgaactttctaaatatgttcaataatgaagagagacagaattttcaacagttcatgtaaaattcctgatgtgaccatttcaattctctgatatgggccatgtaagaggtcactggacaagcagagaataatgagaatataagatgct

SEQ ID NO: 547982 - DNA, 664 bp, Homo sapiens
acttgaacccaggaggcggaggttgcagtgagtcgagattgcactgttgcactccagcctgggcaacaagagcaaaactccgtgtcaaaaaaaaatgagatcctgtcattcgcaacaacatagaggggactagaggtcattaagtgaaataagccaggcacagaaagacaaactttacaatgttctcacttatttatgaaagctaaaaattaagacaattgaagttatggagatagagtaaaatgatggttaccagaggctgggaaagatattagggggtgggagggaggtggggatggtaaatgagcacaaaaaaaatagttagactgaataagatctagtatttctgaataagatctagtattcgatagcacaacagggtgactatagtcaataattgtacagttaraaataactaaaacagtataattgtattgttacaattaagagtataattgtattgttacaattataacaaataggaataggacttcctaactacatggaattcagtttttgaactttctaaatatgttcaataatgaagagagacagaattttcaacagttcatgtaaaattcctgatgtgaccatttcaattctctgatatgggccatgtaagaggtcactggacaagcagagaataatgagaatataagatgct

SEQ ID NO: 547983 - DNA, 635 bp, Homo sapiens
atgagttggtatgtaaagactaaaagtggtattttggcagagtttttaatgatgtgaaaatattgctcatgatgtgaatgataaaaagcagtacaaatacaaagaaagggtgttaaattgtataaaaatatacataaaagaaattagaagagaataaattgttaaagctttggttgtgggattataggtagtggtacttgtttctttccactttctttatgtattttgtgtagtgagcatgttttacccttataataaaggggaaaattaagattgtaaaaactttttagactctacaaaaatcaagtcatgttctgaaagcctggcattacctaggcaactgttactgcaatttactttttcctggaggtaattaaaaaaaaactttagagataattagaaatgttggtatttcaaatcttctggagcatgggtttacaatagagattaagaatttcttggtcaggcatggtggctcatgcctgtgatcccagcactttgctaggctgagatggggggattgcttkaggctaggagttcaagaccagcctggtcaacatagcaagactccatctctattttatttaaaaacatttttttaaaatctttataaaaaaagaatgtattgatattgt

SEQ ID NO: 547984 - DNA, 953 bp, Homo sapiens
taaaatagcatatttaatttcttttaccaaatatcctaaatatgaaatctgttagcccctctactcatttcctccttacagtcttcgattttagtacagaataggagcaaggcaagggattcatgaaattttagattcttatcagatctatcattctagaatagttttttacaactgcaagtgtattttaagttagtttgtgagttgaacactagatatttaaaattcaacttttcatatgccaacctatggtgtattgaataaagacataaagtttcaaattttgttgtataattgttataattttaaacagatagtttcaataatgattttcatacattgcattttagccaatgttttaataggtagccaaaatctttgactatctactaataagtagactaaagttgacaaggatcagtttccttttctagatactaaattattctcarattggaatgtaagcattaatataacttggtcagcaaacaggataatgttaagaaagcattctctcttaaaatttatagaagtatcataatttcaatttccaacttgaatatcatagtaatgtattgaatagtacacattttttgaaggagagctttggcaagattagtaaccaattatcattgaaaaaaatgaactaaacttagcctaggctttgaggattgtgtgacaattgttattctatattttgaaattagttgaatatactttcctttaaagtatagggatttttaagttaaatacttggctacatttaagaggttcaacactctaattttaatggtaaggaaacatttttaaagctatcagcttatttctcaagggtaatattcagtctttttacctagtgctagttaataccagtgttgttatttttaaactattgctacttaggcagaacataataaaaatcgagtgggagtagttaatccaaaattatctaa

SEQ ID NO: 547985 - DNA, 1215 bp, Homo sapiens
ggcttttgttttgtgtttgtttcatgctgaacctcaggttgtaaagtttgtgtatttagatatgtgcaataagctgaatgcattaaactccatgtccaatgtaaaccaacaaacaaactgaggcacataaagatgacatgacttacccaacatcacaatcccagtttgttgcaaatacagttgataagaccaatcgttaaagtttctttcacagagaaaagaaggaccacttcccttggttttactaatcaaacattttaaatcatttatttacacacacagagaactgtaagtatagaaaaccttgggaaatatattacaaatagtggaatgcagagagcagacaaattcacagagcaaaaagcaattctactgcttggaatatctttccttaataaaaatgattatctgtacaagaaaagaaacccctgaacatgtccagaatcctccatatgcatgagaaatacaatggcttataaatgagcacatgcmctggccgcccttcaccatgaggattgctgaagacaataaacaaacgaacaaacacatatctgcatgtgtatacattctgtgtattaaatcatgtttcattaggattataagtgctgattaagaatataaatttaattttttttctagttcagaaattagaaacctcaatccttggatttgatgactttatcaccttcctctatcgaccacacttgggtctcagtcaaatcttgacctcaccagggaataattcataattatatgctggtctagaaagaaagaaaacagtttttaaaatctgaatgtgatagttttaaaatgtgtccacaaattattggatgtgtatttcatcaagaatggaatcttatttcactcccattgaacgtggctcacttctgacaaagagaaggcagaggaagtggtggtgtgtgactactgaggctagatccataaaaggcgccgggctgtctctcctcttgggacataggcctctggagccctgagccaccatgtaagaagtctggccacctataaccaccatactggaaagaccatatagggagaccacagagagaggaagagagagagaaaggaattacagttgtttgagtgatcctagtccaggcaccaaatacatgagtgaggatgccttcaaggtgacaccagctcagctaccatttcattgcaactgttttaatgaccccatgtgagaatcatctagtt

SEQ ID NO: 547986 - DNA, 948 bp, Homo sapiens
aatttcaacttatatccttcttgaatatcttgactatttaagtgctctttaacttattagtggcacaaacaactcagaaattcaaaaccgatcaggtggtataaaactaaagtttaagggaaatgggattatttatgcagaagaaaaaatgatttattttaacaaatggttctcaaaaatttaagtagaagagactcggtagggatcatcaattttccattgatggattccatttccaatgaaaaccttgatgtgctatgatttattcctcctagaagatgtactcagggaacaaagatgaatgtggcatacattcattcacacattcataccctggccatgaagaattcaaatttagagaattgtatatgaaacattacattatactgtatgaaatattacatatagtgaagatgaatttcagtcttggatatgtctattttgatatgtttagaattggctggccgggcgtggtggctcacgcctgtaatcccagcactttgggaggccgaggtaggcggatcacgaggtcaggagattgagaccatcctggctaacacggtgaaaccccgtctctactaaaaatacaaaaaattagccgggcgtggtggcgggcgcctgtagtcccagctactcgggaggctgaggcaggagaatggcgtgaacccgggaggcggagcttgcagtgagccgagatcgcaccactgcactccagcctgggcgacagagcaagactccgtctcaaaaaaaaaaaagaattggctacagatgaaatattttaaccaaatctccaatagtatagaaacattctatatacactgctacttgttgcattctacttaraaaaagaagtcattcttggtacgtctaaactgaaaattctcagtaattttttggatttttcagagtgactgtattcctaggttcatcagaaaaagtattaatcct

SEQ ID NO: 547987 - DNA, 563 bp, Homo sapiens
ccctgccctgcactttttttttttaattacagtgccttttttcttttgattatatgaaagggtgagataaggatgtaaaaatgctttcgggttcacattgtttactgcatatgatacagcagccaattcaatcagaagggaaataggaaaataactactctatttttgccttgtaagcggtttgtaaagtcccctccagtccctacgattaaatgttggcttctctcttgcagctctctaaaaggaaattaaaagtggagcaaacagcatttcaaaaccaaacacaaatactgtgtagggrcgaacccagcaaatggaagaattacagcattgcaggcagtcctttaattcagtgctgtaagaaatgcaacagaagaggaaagggggtggaaaggggatcctgagaaagttgcaggtcatcgcaagcctctgattatttgaccgtttcaggggtgagctggggtggggattggtggtcatagcagagctttccctgtgatgtgtgatgaatgcatccgtaagacgtattgttactcagttactgtttaccatagcctaagccc

SEQ ID NO: 547988 - DNA, 563 bp, Homo sapiens
ccctgccctgcactttttttttttaattacagtgccttttttcttttgattatatgaaagggtgagataaggatgtaaaaatgctttcgggttcacattgtttactgcatatgatacagcagccaattcaatcagaagggaaataggaaaataactactctatttttgccttgtaagcggtttgtaaagtcccctccagtccctacgattaaatgttggcttctctcttgcagctctctaaaaggaaattaaaagtggagcaaacagcatttcaaaaccaaacacaaatactgtgtaggggcgaacccagcaaatggaagaattacagcattgcaggcagtcctttaattcagtgctgtaagaaatgcaacagaagaggaaagggggtggaaaggggatcctgagaaagttgcaggtcatcgcaagcctctgattatttgaccgtttcaggggtgagctggggtggggattggtrgtcatagcagagctttccctgtgatgtgtgatgaatgcatccgtaagacgtattgttactcagttactgtttaccatagcctaagccc

SEQ ID NO: 547989 - DNA, 944 bp, Homo sapiens
aaaactgcttccttgttctagttctaatcattggcactgcatttgttccacattactgttgagcagttactgtaattagatgagagagtctcacaaggatggaagttggagatagaactgggttttatttggtgttaatcaagacagtctttagtgtttttgtctcacctggatagagactattgaaagaaatgtgtaaggcactaagcatttcctaatgaatggtggtaagagggtctttgaatgtgaacatttcctaaattttatctctcaaaaaataaccttacaaaacaagtcaaaatttcttagggaaattacagagcctttgtatcaacaaaatagcaacaggatgcattgtagaatgttatgcatctgttcattgctcagatgcataaggaataccagtaaagaacatatcacctactttttctttgcttttgagagactgctctattttttatcttgcctagtgttctgatccccttggttgtaaccataagaaaatctgatgagaattatgtaggccatctgccctaacttcacaaatgagagaaaaggagactttacctggggaacctcatctcttttctgatgaaaaatgatgagtaacccgtgattgcttgaaatacaatgttgaatgggtgaataacaaagggcatgtgagatttgtggggttgmttgcatgcttcctaaaactcagcatatatggcacatcctttaaacagaaaaaggtcctctgctggttatctgccagggacatgcaagggaagaatgaccaaaatccatatgtttaggacagttcttgagaaagtcatctcctatagacttttaagatgctaataagaaaacaaataaatttaagagctatagcgggtgaagttacttagggtataaatgatttcgacaagcttgggaatttacaaaatataggaagcaggatgttt

SEQ ID NO: 547990 - DNA, 633 bp, Homo sapiens
gctgggattacagatgtgagctaccatgcccagcccagttcctttatataagatagcattcagaggttccaaggattatgacctgaatatattcacagattttactccttccagggattatgacctgaatatattcacagattttactcaatctactataaactgtgtatcartgtggggagaattgacattttaattattttagctcttccaattcataaacatggtatatctctccatttatttaggtcttctttgacttcttttgttagcattttgtagttttcagcatgcaagttctatatattttgttgtatttaccctaaagtgtttcctgcttgttagtgattataactgtattgtatttttaattgaggtgtccacattttcatggctagaatatataaatacacttgattttcatacattggtttgtcttctatcctgtaaccttgctgagcttgcttattagctaaatagtttattaatatgattagtttaggagtttttgtggattttggggggattttctacatagatcatcatattatctacaaataggaacagttttatttcatcacctctactctgtacgcctttcattttattttctcgccttattgcattgaatac

SEQ ID NO: 547991 - DNA, 633 bp, Homo sapiens
gctgggattacagatgtgagctaccatgcccagcccagttcctttatataagatagcattcagaggttccaaggattatgacctgaatatattcacagattttactccttccagggattatgacctgaatatattcacagattttactcaatctactataaactgtgtatcaatgtggggagaattgacattttaattattttagctcttccaattcataaacatggtatatctctccatttatttaggtcttctttgacttcttttgttagcattttgtagttttcagcatgcaagttctatatattttgttgtatttaccctaaagtgtttcctgcttgttagtgattataactgtattgtatttttaattgaggtgtccacattttcatggctagaatatataaatacacttgattttcatacattggtttgtcttctatcctgtaaccttgcwgagcttgcttattagctaaatagtttattaatatgattagtttaggagtttttgtggattttggggggattttctacatagatcatcatattatctacaaataggaacagttttatttcatcacctctactctgtacgcctttcattttattttctcgccttattgcattgaatac

SEQ ID NO: 547992 - DNA, 633 bp, Homo sapiens
gctgggattacagatgtgagctaccatgcccagcccagttcctttatataagatagcattcagaggttccaaggattatgacctgaatatattcacagattttactccttccagggattatgacctgaatatattcacagattttactcaatctactataaactgtgtatcaatgtggggagaattgacattttaattattttagctcttccaattcataaacatggtatatctctccatttatttaggtcttctttgacttcttttgttagcattttgtagttttcagcatgcaagttctatatattttgttgtatttaccctaaagtgtttcctgcttgttagtgattataactgtattgtatttttaattgaggtgtccacattttcatggctagaatatataaatacacttgattttcatacattggtttgtcttctatcctgtaaccttgctgagcttgcttattagctaaatagtttattaatatgattagtttaggagtttttgtggattttggggggattttctacatagatcatcatattatctacaaataggaacagttttatttcrtcacctctactctgtacgcctttcattttattttctcgccttattgcattgaatac

SEQ ID NO: 547993 - DNA, 629 bp, Homo sapiens
aagtgtaaaatgaagagaacaaagagacagtttggcgtttacagagaaaattcctacctgggttcccaatcaggtccatttatgcaaatgaacaattcaaactggcttggttctgattgatcaatgcagctgagtcctgattggttgatggggagcacagcctattccgttgcttcaggccacatgagcggtaacagtcagctgtcaaagccccagtgttaagccgactgtgggttttccaggaactcagagtagtgtgtaatctctagtcagtaaatggccgtttggctctatattaaatttatgtagccactcaggattcatcttgagggactggctctttcagattcactcatgtttcaactctgctgtttataagtcctctatctgtgtatacaggcctagaggtcccagggccggatataaaatttctctggacagggcctgctccataaccaccttcacatgctgttcttcaaacatatagaattgggttgatagtggaaacaatttcaggtactttaacccaattctaaatattctaaattttaggtattttaaccttggaataatataattttttcttcttttttctgtgtataaaaagacrtacatagttgatatgacac

SEQ ID NO: 547994 - DNA, 589 bp, Homo sapiens
tctacatcatgatccagtacacatatgtacccgtatcactgaaaaaaaagtttgccgaaagaattctctttttagtacttaaatgaattctgatgttttctcttctcattctcttttcttccttctttcaattctggttacaactctctaatgggtagcagcccatagtgcgaaaaacttyggtataaaccttttaataggtgtgagtgagttcttatcatttattgatgtacttcctcttctctcttccccactctttcttcacccctcaaaaaagtaccaatgaggaaagacggacactactgtttcctggaggtctgccatgtgccagacaccaggctacggcctatcctagtgttgttttgttacttctcatacagccctgtgggtttagtattactgtgcccatttgacagatggagaaactgatgcttggcaatcgagagacttgctcagtaggccaggatggagctaggattcaactccagctccatctagctccaaaactccaattagaacatgttgtactttgtgacacattgttttgtaatcaaagctaacttcatagcaggaatttcatcaatctcct

SEQ ID NO: 547995 - DNA, 637 bp, Homo sapiens
gttccttggtggcaccccagacctaatataacttgacatttggtgagaacacattagctggtcagtcttggcaatgctacttctaagtggtaatacctctcaagaaattttaagaaccgacgtatattttaaaaagacatagtaaatgcaattttgacttatacacacaacaaattaaataatttatttgacaaatggtcttagggtttatactcattgtgtggcttgctgggtagcaaaatgtttatagtttagcttggcatataaattcacatagaaatattagctatgttttttgtctaatcatcaagtgttattttctcggcacctcttagtgataacaattttgcctagtcctcatttctttgcaagttccatggtgaaaaaaatcccaaatgtgctaaagaatccattgcctgcttatgaaacataaaagcttwtgaaaacatggcacgcactcaagtacaccagtttgtttttaaatattttaatagtgtgcactgctgcgttaggagcaaaatgggtattacgcccaatcttacatctagtgtgtactatactttgatcgttctatcaaaagatcaaaatttaaatatcatgtaaattatattttatacatgttctcctttgcatgaaa

SEQ ID NO: 547996 - DNA, 534 bp, Homo sapiens
gctgagataaagacctctaggctctgcctcctgcactcgtctctgaacctgcctccctccttgagcctatgagcgctccctctgcccttcctgacagggcacatccaggagtgtgctcagacccccactgctttcatgtgtaagcctcctgaggacatgagcccttatcctagacccctccccaggctctcattgctgaccaggcccaggccttgtccctgcctgtctcagagtggagcccacaccatgcaggcagggagaggyaggatttggtggaagcagggagccacatgcctcactgtctacagaggacgtgagcctccctccagagtcagactcaggcccacgaactgggcagcaagaacgacagtgtgtgcccttcctgggcccccacctaggtctgaacagatgaaaccaaaccagctgcatggctgctggtggcagatgtagtctcttctaatggaccagcatccttggggaattcagtgcaggatgcacttaataaagtcattattctgccacccagctgtgcag

SEQ ID NO: 547997 - DNA, 530 bp, Homo sapiens
tgtagtcactgtatgcctagaagcactgacattgattaaagtcctttgctcaaagaatcttcgtaaatcctataagggacagaaayccactccctgatacatagtggtaactgcagccacctttaagagtgaagtgtggagtcaaaggtcttagtgtatagtaattgtgcctgcatctgcccagtctttaactcttctctatctcaagaaagctcgagaccataccggcagattctcaccctcagtcctggacagcctttagcattgacacctgtttgttgaactgatttgctttacatttttttaccatatgagcttaattgaatatttgtgttaagcaaaaataccataattgagcttatatacaaaagtaatgtattaggatagtgatagctgctgtaacaaacaaacctcacaatgtcaatatctgttatgtagcatctggtcaatgtagctgtttctggacagtgagtgattttcctctacataatgattcaggggcccaggctcttttcaattgtagctctgcc

SEQ ID NO: 547998 - DNA, 987 bp, Homo sapiens
atgtttgtaacagttttgaaatgacaaaattatagaggtgaagaatagattagtggttagaagggtttgggaagagacatggggtgggtgtgataatatgggtcacccaagggaattcttttgtggtgaagaaacactcccatatcttcaatgtggtggtggttaaatgaatctatatgtgtgacaaaatgttatagaattacttgcaaagacatatcccactcgtaaaaaaatgagtgcatgcaatcactggtgaaatcccataagatgtatattatagawaattgttttgtaccaacatcaatttcctggttttgataataaactctatctatgtagcacgtcaccattggtatatattaggtgatgggtacacaggaactctcagtactatttttgtaactttttgttagattacaaataattcagaatgggaagataaagaactaaaagttcagttagttgggttgactacgtggatattgaagtcatcaagaatgaggaccagagttatgctcgagagaaacttgtaaactagacacacaagccataagataatataataaacattcacacacccaccactaaaatgatgtatatatcaacattttgtcatatttgcttccaatctctcctaaaaatgaatacataaaaatgtactgatacaactaaaggctcaaacctgcatctctcactgatcttttcgaaacttctgaagctaatatgcattattctctcacgtgtaataacatgttaaaacaggaattttaattgaaatatcaagatacaataaatatgtattataatggaggtgcaatgtgacatgttgaatttcggtacaaattttctgataataggttaccaacttgtaagcaatcatccatatcaaggctatgaaaaagtttagagttgaatttttatgtgacaaataaaatattgaacttaatttaaaggtgacctatcttccacactgtcaatttggacctt

SEQ ID NO: 547999 - DNA, 651 bp, Homo sapiens
ttgaatttccattataattgttacattactcattcacactttgtcaacaataaaggtaatgaaagtttttttctaaacactaagaaaactgaaaatataaaaagtatgtctttgatgtgtgtgctaatattacaaataaaaattcaacagattttttaagtaaatcaacaacttaaactttcttcacctaaatatatcattattatatacattttcctaaccttagccatttatttttcttttactttttcatattttccccctgcagaattacaagcactatgacaaaagtaacaatttaccacaaccttgaaataaccttgaaaatcaaacaaaagcaaaaataaagatgcaaaattaatagcatcactttaagcttaaggctctaggaagccttttgaacttgccaggartttaggtgaactttatacattaccaatctcacatccaaatgcacacaaaaatagacttaacactattttacagagaattagtaaattctttcatgtcacacttggtaatctaaagtaaagcagggaaaggtatgaaaatgtgattaaaactcggaagagacggtaagaaaacattaagctagggcttatgggccatatgaggtagaagtggtctctacacaaatataaacagataaaa

SEQ ID NO: 548000 - DNA, 888 bp, Homo sapiens
ggatgggaagtttttgttaaaactctggtcagtaggccggacgcagcagctcacacctgtaatccgagcactttgggaggccaagactggtggattgcttgagctcacgagttcgagaccagcctgagcaacatggggagaccctgtgtatacaaagaatacaaaaattagctgggtgtggtggtgcacacctgtagaccgagcttactcggggtgaccctgtgtatacaaagaatacaaaaattagctgggtgtggtggtscacacctgtagacccagcttactcagggctgaggtgggaggttcacttgagccctggagccgaggctgcagtgagccaagatcacaccacagcactccagcctgagccacaaagtgagaccctgtctcaaacaaacaaacaaaacaaaaactctctggttggttgtcccttcctcctgtgaaaacatgtgaaaaacatacgtatagaatgttcagatctgaaatcactaaaaacataaaaacataccatgtacaacttgctgtactaattaagactacctgaggtactttgatgaagacttgaggcagaaacccacatttgccagtgttggaaactttgttgttgttgggaggtgagacccagatcaaggagggggattggggttttctcctgccctggacctggacgtgtgtggaggggtgctcagtggcctgctgatgggtttctgctttttttttttttttttttttttgagacagagtctcgctctgtcgcccaggctggagtgcagtgatgccatcttggttcactgcaacctccacctcccaggttcaagtgattcttgtgcctcagcctcctgagtagctgggattacaggtgcacaccaccatgcctggctaattttt

SEQ ID NO: 548001 - DNA, 888 bp, Homo sapiens
ggatgggaagtttttgttaaaactctggtcagtaggccggacgcagcagctcacacctgtaatccgagcactttgggaggccaagactggtggattgcttgagctcacgagttcgagaccagcctgagcaacatggggagaccctgtgtatacaaagaatacaaaaattagctgggtgtggtggtgcacacctgtagaccgagcttactcggggtgaccctgtgtatacaaagaatacaaaaattagctgggtgtggtggtgcacacctgtagacccagcttactcagggctgaggtgggaggttcacttgagccctggagccgaggctgcagtgagccaagatcacaccacagcactccagcctgagccacaaagtgagaccctgtctcaaacaaacaaacaaaacaaaaactctctggttggttgtcccttcctcctgtgaaaacatgtgaaaaacatacgtatagaatgttcagatctgaaatcactaaaaacataaaaacataccaygtacaacttgctgtactaattaagactacctgaggtactttgatgaagacttgaggcagaaacccacatttgccagtgttggaaactttgttgttgttgggaggtgagacccagatcaaggagggggattggggttttctcctgccctggacctggacgtgtgtggaggggtgctcagtggcctgctgatgggtttctgctttttttttttttttttttttttgagacagagtctcgctctgtcgcccaggctggagtgcagtgatgccatcttggttcactgcaacctccacctcccaggttcaagtgattcttgtgcctcagcctcctgagtagctgggattacaggtgcacaccaccatgcctggctaattttt

SEQ ID NO: 548002 - DNA, 888 bp, Homo sapiens
ggatgggaagtttttgttaaaactctggtcagtaggccggacgcagcagctcacacctgtaatccgagcactttgggaggccaagactggtggattgcttgagctcacgagttcgagaccagcctgagcaacatggggagaccctgtgtatacaaagaatacaaaaattagctgggtgtggtggtgcacacctgtagaccgagcttactcggggtgaccctgtgtatacaaagaatacaaaaattagctgggtgtggtggtgcacacctgtagacccagcttactcagggctgaggtgggaggttcacttgagccctggagccgaggctgcagtgagccaagatcacaccacagcactccagcctgagccacaaagtgagaccctgtctcaaacaaacaaacaaaacaaaaactctctggttggttgtcccttcctcctgtgaaaacatgtgaaaaacatacgtatagaatgttcagatctgaaatcactaaaaacataaaaacataccatgtacaacttgctgtactaattaagactacctgaggtactttgatgaagacttgaggcagaaacccacatttgccagtgttggaaactttgttgttgttgggaggtgagacccagatcaaggagggggattggggttttctcctgccctggacctggacgtgtgtggaggggtgctcagtggcctgctgatgggtttctgctttttttttttttttttttttttgagacagagtctcgctctgtcgcccaggctggagtgcagtgatgccatcttrgttcactgcaacctccacctcccaggttcaagtgattcttgtgcctcagcctcctgagtagctgggattacaggtgcacaccaccatgcctggctaattttt

SEQ ID NO: 548003 - DNA, 678 bp, Homo sapiens
tggttgcctccatccatttccccaactctctgcaacattaacaccaacaaatgtttacaaggtgtcctcaatttgtaagatgacaagaagataagcaaaatcagctattttcttagcattaaaaatattttagactaaattttataatctgtttagataggcaacaaagtcataaggcacaaaaacagaacgtggaaaatctctgtgcaacttaattattccagcaacttctaatctggcatactcaatattataggaataatatctatgacttattttaaatcctatcatcttactgtactcttgaaatgtttaaagatgagtatgttatgttatgacattktatagatttttaaaacagatgtatacattataagaaatagatattgtacaactagacaaaggggaacatattggaaaggagagggaaaaattattatttgcttatatgatagtctatttgggaaccctcaattgatgaaatgtcactagaaataaaaagggatgtcagtaaagttaccaaacacaaaatgaatagaccccaaactaatggtgctcccagtaagccatatagtgtagccatacagcctgtgccctcagaatgcaaatccgagtactaccaccgactagctgtgacatcccaggcaggttacttgagctcttccagaactgggatcc

SEQ ID NO: 548004 - DNA, 1644 bp, Homo sapiens
tagctttacgttatatagttttaaaatagtttctcaatttgtttgaatgttaagaagattaataaaatgtaatttcttcctactgacttattctccaaaacattcagcttaattttccactaattttatctctgttttgctctgctgtaatcctggaattaaggaaaataaagtgttagctagtcatttcatgcatatctagttttctgttccttttcttttttatcaagtaactggattcagcctagattattaggcatttcttgtgggaaagaggcggcaaattatagtctgcctttcagttgcttctaatttcattaatactctccattggtataacaatctgcaaattttgctcaagaakgtgagctataatttcatgtctgcacttatatttttctatttttgtcttttaatattaaaattaatgtcatctactaaaaccgaaagatcaacaaaagaaaataaattgaggagtctgcgtcccatcttttatctgtgggcttacctacattgcaatattttatcaactgtcttccttggtaatcatgatgggtagtcttatgtgtcaacttgcctgagctattgtacccagttatttaatcaaacatgaatctaggtgctgcagttaaggtgctctgttgtcattgttatatcttcattcagctgattttaagtaaagattaaatgcaataatgtgggcaggcctcattcagtcagttgaaggccttaaaagcaaaaactcaggtttccctaagaagaaattctgctctgagaccagagcatcaaattctgtcaagttttcaggctgccctaatgatttcagacttggcaggccccaaaatcatatgagtcagtttcttaaaataagtatctctccctctctgtatgtatgtatatattcctgcttatttatctacccatctatctattgctctatcatctgtctatctatcatctatctaatttcctatttgttctgtttctctagagaactctaataatacagtaatctaaccatagtgacttctatacaaatgtttctgtaccaggtagctatttataaattaatgtgcattaaaaccatttcaaaattaagtggtataaaacaaaaggcatttaatgccatgatcacacatctgtcattttgctgaggttggtttatttatcttggcagagatcagctggtgtgtctccaagctttgtattgggtccatgtatcatctaattgtgtctacttggagaaaataactactttggcttcttttcttctcattttaatggcagaaacataacagatagctgaacagaaaataagatggttcttatatccttggcttgaaaatgtgataccataacttccacctcattctcttagccaaagtaagtcacagagtgaagcaagacacctagagaatggaaaggtcactctatgtctaatggaaggaacttcagtcccaaggcaaatatgcagaaacagagagaggtaaaaacttggaacaatagtgcagtctattacaggtatcacagcaaaatgcatttggataatgttaagctctgtaactgcctttttagaaagagtgacaatttatttagcatagtaagacacaaatcctgtaagaaacataaatactattaacttta

SEQ ID NO: 548005 - DNA, 1009 bp, Homo sapiens
cagcaacattgcccaggtctctgcaaaaaatactgttagtggggcctgttggcacatgcctgaaatctcagctactcgggaggctgaggcaggagaatcacttgaaccagggaggtgaagtttgcagtgagctgaggtccagccacttcactctagcctgggcgacagagcaaaagtctgtctcaaaaagggraaaaaaaaaaaaaaaaaaaaaaaagaggtccctggggccaaaaggggtggggcaaactcaagcccaagaattaataaacacagcttcaattgagcccctcccttcctccctctacaatattccccagtcccattcttgggcttccatctccaatccttccccagccataatcataggaagactatggaggctactaggggtggataaggagttttctaaggggctagttgttggattataactggggaggctcagatgagtaaatacaaaggcacacaacttcactgtcttcagagtcagactctgccaatcccagttttgttgttgttgttgttttttagacggagtcttgctctgtcacccaggctgtggagtatagtggcgtgatcttggctcactgcaacctctgcctcctgagttcaagtgattctcctgcctcagcctccctagtagctgggattacaggtgtgtgccaccatgcccggctaattttttttgtatttttggtagagacggagtttcgccatgttggccaggctggtcttgaactcctgacctcaagtggtccacccacctcagcctcccaaagtgctgggattacaggcatgagccagtgtgcccagattaatctgttttcattcttccccggggtagggtggacacaggatgctaccccaaatgaggagagggataggcatggaagagggacatcctggcaatttccctttggccacgtccccaccttctgtctcccttgccacccctccctcttgctaccacttaagatatcatacactaaaatgcacagagaaatca

SEQ ID NO: 548006 - DNA, 1259 bp, Homo sapiens
aacatttggatgcctaatgttaaatatatatatatatatgtttgtatcacccccagcttcctactacagcttttcatcaaggcattatctcatttgagcattactctttagatttccaaacgcccacattcttttctaaaatgtccttgtttcggccgggcgcggtggctcacgcctgtaatcccagcactttgggaggccgaggcaggcagatcacgaggtcaggagatcaagatcatcctggccaacatggtaaaaccctgtctctactaaaatacaaaaaattagccaggcatggtgacgcggcactggtagtcccagctactcggggggctgagaggcaggagaatcacttgaacctgggaggcaaaggttgcggtgagcagagatcgcaccactgcattccagcctgggtgacaaagcaagactctgcctcaaaaaaaaaaaaaaaaaaaagtccttgtttccttcattacattctacttggggtttcttgcctctgacctccagctgcatcttggcctctcaagttcaggaaaatcatgcgaccattctccaaccctgtcgtgaaatatccctgtatgaaaatatcaccctcagccgggttcagtggctcacatacctgtaataccaacgctttgggaagctgagacaggttctcttgagtccagaagtttgagaccagcctgggcaacatggtgaaatcccatgtcttaaaaaaaaaaaattaaaaaaaaaaaaagagaagaacaaaaatgtcaccctcagtcctgaagctttgacgcctttggaacaacaatctttgtgcatgttcacatacagttgtgtgtgtgtttaactcagtgcggttgatccaggcaaaccctgttttccagctgacagactgactttctctgcctaatgtacctgccccctgacatttcatcctcccataaatcctcctttttccatagtatgcaacctagtaggatatcccactcaaatccaaatcttcaagtgcttccctgctcctgggaaagttggaagcaggctgggactttgccttaatgcttttgctctgttcccagcaytgaggaatggagctagcctgtggccaaagaaacgacacagcctcagaaacctactgaatcagccattcagtgaagcaacattaacgggctgaattaagcacctgggatttaagggctaattatgtttaactgtaagtaccaactttccgcactgtaagcagacacaaaagacagggccatcatttcccc

SEQ ID NO: 548007 - DNA, 284 bp, Homo sapiens
gcttggccaacatggggaaagactgtctctactaaaaatacaaacattagccgggcatggtggcatatgcctgtaatctcagttacttgggaggctgaggcatgagaatcacataaacctgggaagcagaggttgcagtgagttgagatcgcaccactgcactccagcctgggcgagagagygaggctctgtctcaaaaacaaaatgaaataaaggcagttacaattttctactctaattaaaatggcatataattctgaaaaccataatacagtttatagtct

SEQ ID NO: 548008 - DNA, 2198 bp, Homo sapiens
caggcgtgggtcaccgtgcccagctgagaatgtcatcattaatagaggctttaccctgttcctttgggatttcttttcattaaggcctactgagagattaaaaacaatggaggagaacctgtttattaacggccamatgtgtgactaaagtttacatacagtgcctgacctaaaacgcagcttttcactactgcaaggtaaattcagccatcaggattctttctgtaaagctgggctgtagaatcacacttgaacttttcatttgtcctaaaggacaggggagaccgcaggaggcaatcacgtgcctgtgtgagggcccctctctgccctgcttgtggcagaagacacactgcaaatgtgtgaaataaaggtgagctgtggaacaaatgagcaggggcagcttctgactctgataaaattacattcttcctagaatcactgcttcaatggtcattttttattaaaagaaaaaattcaaaacacatgataagaaattagacttttatcaatacacaaataattttacttaaaatcaacccagttacatatttttaaaaaattgcagaacctctccacaccaatgtccacagcctagaacaggttcatgtgaaacctgcagtcctaccccggagcatcagttaagtgatggtccaggtactcactgacacgtttctcttgacactgagatggtcgcaaacaaaacaccgttcttgcctggatgaagcaagagttcacataaaagagctttataaaatgtctatgaaggagaattgataatatcagaagagctccagcacttcaattgaatataatcctctattattcttttcttgatttaatttctgtagctcccgaaaacttacttcaatcttgttgagctcagaataaacagatatctaaagaaaagagtttcagagtaacttttaccataatgtctacatagaaacaaatcttccatgagtaagttatttaaggacaaattttaagaataattgtaattcaggtgatacttgggtacaaataaaatcagtatatatcaaataatcacaaacctgagattttacaagcttgtaaagatttatcagtagcctctttgcttctggcatcattacaacaacagtaaaatttgcatccagaagtagacatatccaatccataatctgaagatgaataggaaaaggaagttaagattttaaatttaacttcaggttaattcactttacaaagtccataaataaacagttatgagaaaaataagtctttataaataaaatctgaacatttttgtttagagatggagcaatttctacgaaatataaaaaggctcatttctggcttttaaaaaatttattctaattaaaaaaaattttagagatgggatcttgctatgtcacccaggctggagtaggaatgcaatggcacaattcatagctcactggagcctccaaacacctgggctgaagtgatcctcctgcctcaacctcccagagtagctgcaatcatccagagttgctgggattacagatgcaccatcatacccagctactttttagcaatttttgtagagatggggtttcgccttattgccaagctggtcttgaattcctggcctcaagcaatcctccaacctcagcctcccaaagtgctaagactacaggcttgagacaccgcgccagtagttgtctttttatttttaaaaattttagttttcagtttcaataattttcagtcacacacacaaaaaaataaccactcatcttctattctgcaagataaattttccccaaggacaaggtgttgtgtattatagatgagttgccataaaccagaattattactaagcatttatagaagtttcttatgtagtcctacatcttccagtggtgtagttaacatgcaaatatcaaagcaaccgggaaactggctatccatttgggagggggagctgatccctaaggaactccttatatcagattaaattctatatgtatcaaagagttaaacacaagaaataaaaccatgtagtagggaaagctggtgactattttcataatcttagagtgggaagggccttaaacataacataagccataaagaagttatagaggaaaactttaattttaatagcatgaaaaagtatctgtcaaaaattatactaaagagagtaaaaagacaaataacttacaatgcatttgata

SEQ ID NO: 548009 - DNA, 1439 bp, Homo sapiens
gcattttgggaggctaaggcgggcagatcttgaggtcaagagatcgagaccatcctggccaacatggtgaaaccctgtctctactaaaaaatacaaaaattagctgagcgtgttggtgtgcgcctgtaggcccagctactggggaggctgaggcaggagaatcgcttgaaatcaggaggcagaggttgcagtgagccgagattgcaccactraactccagcctggagacagagtgagacttcgttccccccacctcccacacaaaataaataaataaatataaaattgacataatatattagaaaaatgcatataatatataattaaatatgttatattattttgggcttgtgtgttaatgataggtgtatgattaaaggatggtgatcactgatctaaggggacagaagggacattggacactatatgacaaagaaccgctggccacactgttatttatctctaagataaaatccaaaagggtctctgaggtagagaaggggagagttaagatttctgatgtgcttacaagtactgagtcagagtgagcagagacggagataaacccagaccttgagaacagaattgaaaggggaagaactggggtggggggtcgttatggccagcagacatgctccgaggcttccccatagggcacatggggaagaggacagaggcaggcagctgggcatattattcttcctttcaagtagcagcaggaaggagggcttcactctggggagggagtgcttctcagggtgcgtctgccaggatttgcaatggtatttgatgagtgtaaacacccctccaggacaccttcctcctccttcctggaacttgaattctgtgataatttgtcttatggttgccctatctcccaggcctgtcgttttctttttctatttagctcattctttattttgtttttcctgtctgtctcttaagcattgcacacactgagattagaaaaactctgttttgtaaaattatttttaacataatttaatttttagaataattttagattcatagaaaaaattgagatgatggtacagagagtttccatataccccatacccagtttcttctcattaacatcttaaaatagtatggcacatttgttataattaatgaatcgatattaacatattgttattaattaaagtccatactgtgttatttccttggttcttaagggatagaaaggagatttttgcaaggaagaaggagaaagagtgaaaatggtaaaaaagagcacaaagaattgtcacaaagtgaatgggacaaggtaacaacagtaaatgccatggcgaattaggaaacagctgaaaaaatatccattggacttagctattagaatagcttttggtgacctgatggggaaggaaataagaccgaagtgggatgaggaaataagtgagaaaatagagaagtataga

SEQ ID NO: 548010 - DNA, 1439 bp, Homo sapiens
gcattttgggaggctaaggcgggcagatcttgaggtcaagagatcgagaccatcctggccaacatggtgaaaccctgtctctactaaaaaatacaaaaattagctgagcgtgttggtgtgcgcctgtaggcccagctactggggaggctgaggcaggagaatcgcttgaaatcaggaggcagaggttgcagtgagccgagattgcaccactgaactccagcctggagacagagtgagacttcgttccccccacctcccacacaaaataaataaataaatataaaattgacataatatattagaaaaatgcatataatatataattaaatatgttatattattttgggcttgtgtgttaatgataggtrtatgattaaaggatggtgatcactgatctaaggggacagaagggacattggacactatatgacaaagaaccgctggccacactgttatttatctctaagataaaatccaaaagggtctctgaggtagagaaggggagagttaagatttctgatgtgcttacaagtactgagtcagagtgagcagagacggagataaacccagaccttgagaacagaattgaaaggggaagaactggggtggggggtcgttatggccagcagacatgctccgaggcttccccatagggcacatggggaagaggacagaggcaggcagctgggcatattattcttcctttcaagtagcagcaggaaggagggcttcactctggggagggagtgcttctcagggtgcgtctgccaggatttgcaatggtatttgatgagtgtaaacacccctccaggacaccttcctcctccttcctggaacttgaattctgtgataatttgtcttatggttgccctatctcccaggcctgtcgttttctttttctatttagctcattctttattttgtttttcctgtctgtctcttaagcattgcacacactgagattagaaaaactctgttttgtaaaattatttttaacataatttaatttttagaataattttagattcatagaaaaaattgagatgatggtacagagagtttccatataccccatacccagtttcttctcattaacatcttaaaatagtatggcacatttgttataattaatgaatcgatattaacatattgttattaattaaagtccatactgtgttatttccttggttcttaagggatagaaaggagatttttgcaaggaagaaggagaaagagtgaaaatggtaaaaaagagcacaaagaattgtcacaaagtgaatgggacaaggtaacaacagtaaatgccatggcgaattaggaaacagctgaaaaaatatccattggacttagctattagaatagcttttggtgacctgatggggaaggaaataagaccgaagtgggatgaggaaataagtgagaaaatagagaagtataga

SEQ ID NO: 548011 - DNA, 528 bp, Homo sapiens
agtaatgttttgcattcagaaatttaggagattttttttaaaaaaggaagaaacaggacaagagaccttagcaattaaatgaatggtagccaaatttasagccaatagacaggctgaaaaataaaggtgaggaaaccccccagaatgcagaattaaaataaatggaaaaaagaaattttaaaaattagaatatccatccagattattcaattccatgaactctgagaaaagaaaatgggggttgggtagttattgagatagaagaacccctccaagatctgaaagctctaggtctctaaattaatagtctttgtatacaaaaagagaacgtaatattgtacctcttgttcagcaacaatgcaatcatctcatattggtttaaccaaaattgaaacataattatatgggagtatgggggaaggtgaaattgggtgaaaagtaatacggaagagttaatcttcatctattacagtaggaaagcaatgcataatatctaaataaataagtataaatatatatgtatatata

SEQ ID NO: 548012 - DNA, 528 bp, Homo sapiens
agtaatgttttgcattcagaaatttaggagattttttttaaaaaaggaagaaacaggacaagagaccttagcaattaaatgaatggtagccaaatttacagccaatagacaggctgaaaaataaaggtkaggaaaccccccagaatgcagaattaaaataaatggaaaaaagaaattttaaaaattagaatatccatccagattattcaattccatgaactctgagaaaagaaaatgggggttgggtagttattgagatagaagaacccctccaagatctgaaagctctaggtctctaaattaatagtctttgtatacaaaaagagaacgtaatattgtacctcttgttcagcaacaatgcaatcatctcatattggtttaaccaaaattgaaacataattatatgggagtatgggggaaggtgaaattgggtgaaaagtaatacggaagagttaatcttcatctattacagtaggaaagcaatgcataatatctaaataaataagtataaatatatatgtatatata

SEQ ID NO: 548013 - DNA, 528 bp, Homo sapiens
agtaatgttttgcattcagaaatttaggagattttttttaaaaaaggaagaaacaggacaagagaccttagcaattaaatgaatggtagccaaatttacagccaatagacaggctgaaaaataaaggtgaggaaaccccccagaatgcagaattaaaataaatggaaaaaagaaattttaaaaattagaatatccatccarattattcaattccatgaactctgagaaaagaaaatgggggttgggtagttattgagatagaagaacccctccaagatctgaaagctctaggtctctaaattaatagtctttgtatacaaaaagagaacgtaatattgtacctcttgttcagcaacaatgcaatcatctcatattggtttaaccaaaattgaaacataattatatgggagtatgggggaaggtgaaattgggtgaaaagtaatacggaagagttaatcttcatctattacagtaggaaagcaatgcataatatctaaataaataagtataaatatatatgtatatata

SEQ ID NO: 548014 - DNA, 528 bp, Homo sapiens
agtaatgttttgcattcagaaatttaggagattttttttaaaaaaggaagaaacaggacaagagaccttagcaattaaatgaatggtagccaaatttacagccaatagacaggctgaaaaataaaggtgaggaaaccccccagaatgcagaattaaaataaatggaaaaaagaaattttaaaaattagaatatccatccagattattcaattccatgaactctgagaaaagaamatgggggttgggtagttattgagatagaagaacccctccaagatctgaaagctctaggtctctaaattaatagtctttgtatacaaaaagagaacgtaatattgtacctcttgttcagcaacaatgcaatcatctcatattggtttaaccaaaattgaaacataattatatgggagtatgggggaaggtgaaattgggtgaaaagtaatacggaagagttaatcttcatctattacagtaggaaagcaatgcataatatctaaataaataagtataaatatatatgtatatata

SEQ ID NO: 548015 - DNA, 528 bp, Homo sapiens
agtaatgttttgcattcagaaatttaggagattttttttaaaaaaggaagaaacaggacaagagaccttagcaattaaatgaatggtagccaaatttacagccaatagacaggctgaaaaataaaggtgaggaaaccccccagaatgcagaattaaaataaatggaaaaaagaaattttaaaaattagaatatccatccagattattcaattccatgaactctgagaaaagaaaatgggggttgggtagttattgagatagaagaacccctccaagatctgaaagctctaggtctctaaattaatagtctttgtatacaaaaagagaacgtaatattgtacctcttgttcagcaacaatgcaatcatctcatattggtttaaccaaaattgaaacataattatatgggagtatgggggaaggtgaaattgggtgaaaagtaatacggaagagttaatcttcatctattacagtaggaaagcaatgcataatatctaaataaatwagtataaatatatatgtatatata

SEQ ID NO: 548016 - DNA, 1511 bp, Homo sapiens
tctaacaacggactaactggatcccacacctgcccggtcactggaacacagaacggtcttaactagtctctcagctcagctcccagggcccgactctcttgctgttcaccaccatggtccccgtgaatgtgcccgtcgatttcctaagaggacgctgcccacccactctagttctttccaaggtatctgaggctgatttcttaggaattcggtctggggcatgctgagaatgtggattcgtatgtcctatgggacaagcctgcaggaaggcacacacctggccacatcracctgtgtcacactcatgggcaaaaccccaagtactgcaggctgccatcgccaccaccagctagtctgtaaacagtcctcaacgcacagatctgagaaagcacttgagctttggccccagcccctcatagaacctggcaaacacggtggttggggaggcagcctcgccaccggccaatgagccccagcctacagccatcattggcgtagccacaccttagcagtgagcttgggtcacaggcgcttggctgtgggtctctgcgtgcgccccatgctttccctgcaccctccatgctgcccgggggccggccctccccaggcttgcttctcatagccacctctaaacaacagaagcaggcctgcggctgcctccctctaggaaagaggcgacgaagctgctggagaaaccccagctccgccaccgatagccctcaagtcctcctctctccaggaggggcccacactcaccgagcagctggtctgcccacagtcgcctggagaagcagctgagaacctctgcagggccctgatccccaagacctagccacgcacattcagaggcctgctccctccgtcacccagagcaggggggttaatgttttggagacacgaagccccctgagaacacgaggaaagcagaatccccgagatacacagactttgcaaagctgcacacagcacaggagactcctgggagcagacggcatctccttattccattgaccatcagaagtgaaaagcgagtgggccccacttctgtgctgcatgtggccactaggggtggacacagggaggagctggggcagagttggggttgcggagggaggagctggggcagagttggggttgcggagggaggagctggggcagagttgtggctgcggagggaggagctggggcagagttggggctgcagagcgaggaggcggggtggtgttggggctgcggagggaggagctggggcggtattggggctgcggagggaggagctggggcagagttggggctgcggagggaggagctggggcggtgttggggctgcggaggggaggaggcggggtggtattggggctgcagagggaggagctggggcagagttggggctgcggagggaggagctggggcagaggtggggctgcggagggaggagctggggcggtgttgggaggagctggggcggtgttggggctgcagtatgtttacatcccgaagtgcaggcgttg

SEQ ID NO: 548017 - DNA, 1511 bp, Homo sapiens
tctaacaacggactaactggatcccacacctgcccggtcactggaacacagaacggtcttaactagtctctcagctcagctcccagggcccgactctcttgctgttcaccaccatggtccccgtgaatgtgcccgtcgatttcctaagaggacgctgcccacccactctagttctttccaaggtatctgaggctgatttcttaggaattcggtctggggcatgctgagaatgtggattcgtatgtcctatgggacaagcctgcaggaaggcacacacctggccacatcaacctgygtcacactcatgggcaaaaccccaagtactgcaggctgccatcgccaccaccagctagtctgtaaacagtcctcaacgcacagatctgagaaagcacttgagctttggccccagcccctcatagaacctggcaaacacggtggttggggaggcagcctcgccaccggccaatgagccccagcctacagccatcattggcgtagccacaccttagcagtgagcttgggtcacaggcgcttggctgtgggtctctgcgtgcgccccatgctttccctgcaccctccatgctgcccgggggccggccctccccaggcttgcttctcatagccacctctaaacaacagaagcaggcctgcggctgcctccctctaggaaagaggcgacgaagctgctggagaaaccccagctccgccaccgatagccctcaagtcctcctctctccaggaggggcccacactcaccgagcagctggtctgcccacagtcgcctggagaagcagctgagaacctctgcagggccctgatccccaagacctagccacgcacattcagaggcctgctccctccgtcacccagagcaggggggttaatgttttggagacacgaagccccctgagaacacgaggaaagcagaatccccgagatacacagactttgcaaagctgcacacagcacaggagactcctgggagcagacggcatctccttattccattgaccatcagaagtgaaaagcgagtgggccccacttctgtgctgcatgtggccactaggggtggacacagggaggagctggggcagagttggggttgcggagggaggagctggggcagagttggggttgcggagggaggagctggggcagagttgtggctgcggagggaggagctggggcagagttggggctgcagagcgaggaggcggggtggtgttggggctgcggagggaggagctggggcggtattggggctgcggagggaggagctggggcagagttggggctgcggagggaggagctggggcggtgttggggctgcggaggggaggaggcggggtggtattggggctgcagagggaggagctggggcagagttggggctgcggagggaggagctggggcagaggtggggctgcggagggaggagctggggcggtgttgggaggagctggggcggtgttggggctgcagtatgtttacatcccgaagtgcaggcgttg

SEQ ID NO: 548018 - DNA, 631 bp, Homo sapiens
tgcccatcctcactgggccttgtgtagttctgtgcatcctctatgcatttcctttacaagttttagatattgacatagatcctcagtagcaatcagaaccctcctgtggcaattttggagattgttggtaaaccttgtgccccagcagaacttagtggtcagagggaaaataaatgtattctggctyattctgggtaatatgtttagacatgacattttgacccaacaagcaggatttgattcaagggggttaaaatctttttttcattcctgttccatatatgaacaggtattgccaaacagtcctatgcagctgactcaagcaaatatatcaaaaactttcattcgctattaaagatcttagcacatcatcctcagatggattccccctagcaatttgctttagctctctaaaacgatattctgtctcctgcacagatgctgtgaatttaaagtagaaacagcctattaatgctaaatgaattctgagaggcactttatgtgcttcactggattgttttcttctgtgtgattagcatgccttcatttaccttctcactggcttgtgctctctgggaaaatatacaacccttgacataagacccaatacatttagttccattaataaagc

SEQ ID NO: 548019 - DNA, 631 bp, Homo sapiens
tgcccatcctcactgggccttgtgtagttctgtgcatcctctatgcatttcctttacaagttttagatattgacatagatcctcagtagcaatcagaaccctcctgtggcaattttggagattgttggtaaaccttgtgccccagcagaacttagtggtcagagggaaaataaatgtattctggctcattctgggtaatatgtttagacatgacattttgacccaacaagcaggatttgattcaagggggttaaaatctttttttcattcctgttccatatatgaacaggtattgccaaacagtcctrtgcagctgactcaagcaaatatatcaaaaactttcattcgctattaaagatcttagcacatcatcctcagatggattccccctagcaatttgctttagctctctaaaacgatattctgtctcctgcacagatgctgtgaatttaaagtagaaacagcctattaatgctaaatgaattctgagaggcactttatgtgcttcactggattgttttcttctgtgtgattagcatgccttcatttaccttctcactggcttgtgctctctgggaaaatatacaacccttgacataagacccaatacatttagttccattaataaagc

SEQ ID NO: 548020 - DNA, 551 bp, Homo sapiens
cctcatggcccctcaaagcttgaaggggtgtgtgctggggaaggcgtcttggccttgggtgcagatggtgggggcggggcctgtccagtgtccctcacaccctggctgctgggcagtttcggctccagctggcagggctgtctcctagctgctggcctggagccccatgacagtctagggtccctgaagtcacaggggcaggatgctctgaacagctaaatgtcaggagaacagggctcacccacttttcctgaccagcctgmatcatctcttccttccaagcaagctccaggtgcaccccaggaagccggcactgctgatcttgagtaaaacacacgtaggcctgagtccaagctgccactcacctgctggcgtgactaggagaaaccaagcgagccacaactgctctggctctcagctgatgtctccggaaagtgggctagtaacccctgccttacttgtcccgagtacctactatgtgccaggtgccagctgagcacctgccatcggcagcccatttaatcatcccagcaaccccacctgaattctca

SEQ ID NO: 548021 - DNA, 551 bp, Homo sapiens
cctcatggcccctcaaagcttgaaggggtgtgtgctggggaaggcgtcttggccttgggtgcagatggtgggggcggggcctgtccagtgtccctcacaccctggctgctgggcagtttcggctccagctggcagggctgtctcctagctgctggcctggagccccatgacagtctagggtccctgaagtcacaggggcaggatgctctgaacagctaaatgtcaggagaacagggctcacccacttttcctgaccagcctgaatcatctcttccttccaagcaagctccaggtgcaccccaggaagccggcactgctgatcttgagtaaaacacaygtaggcctgagtccaagctgccactcacctgctggcgtgactaggagaaaccaagcgagccacaactgctctggctctcagctgatgtctccggaaagtgggctagtaacccctgccttacttgtcccgagtacctactatgtgccaggtgccagctgagcacctgccatcggcagcccatttaatcatcccagcaaccccacctgaattctca

SEQ ID NO: 548022 - DNA, 1421 bp, Homo sapiens
tagttactaaaaagacatatgtagaggccaggtgcggtggctcatgcctataatcccggcacttttgaaggacggatcacttgtgtccaggagttcaagaccagcctgggcaacatggcaaaactctgtctctagtaaaaaatacaaaaaatcagctgtgtgtggtggcatggcttgtagtcccagctgcttgggaggctaaagtgacaggawcacttgagcctgagaggttgaggcttcagtgggtggtttttgcaccactgccctccagcctgggtgacaaagtgagaccctgcctcaaaaataaccaaacaaacaaaaaagaaaaccacatatataaaacacaaaactatttgctaacaagaacatactgattaaaaactggccaggtacagtggcttacgcctgtaatcctaggattttgggaggctgaggcaggtggattgcctgagctcaggagtttgagaccagcctgggcaacatggtgaaaccctgtcgctgctaaaaacacaaaaattagctgggtttggtggtgcctgcccgtaatcccagctactcggaggctgaggcaggagaatcatttgagctcaggaggtggaggttgcagtgagccgagatcacgccactgtactccagcccaggtgagagagcaatactctgtctcgaacaaacaaacaaacaaaaaacaccacaaaaaaaaacagaaaaacatatttatcaaaaataaaagacagccgggtacagcggctcatgcctgtaatcccagcactttgggaggctgaggcagttgaatcacggagtcaggagttcaagaccagcctggccaacatggtgaaaccccgtctctactaaaaatccaaaaaaattagctggtcatggtggcgggcccctgtaatcccagctactcaggaggttgaggcaggaaaattgcttgaacctgggaggtggaggttgcagtgagccgaggccgtgccactgcactccagcccaggggacagcacgagactttgtttccaaaaaaaaaaaaaaaaaaaaaaaaggccaggtgcggtggctcacgcctgtaacccttgcactttgggaggccgaggcgggcgggtcatgaggtcaggagatcgagaccatcctggctaacatggtgaaaccccgtctctactaaaaatacaaaaaattagttgggcttggtggcgggcacttgtagtcccagctactcgggaggctgaggcaggagaatggcgtgagcgggggaggcggagcttgcagcaagctgagattgcgccagtgcactccagcctgggcgacagagcgagactccgtctaaaaaaaaaataaaaataaaaataaaaataaagacaaagataaaaaatagtcaactgaaattgaaaacgctaatcaacatattttttctcagtttctgtgaa

SEQ ID NO: 548023 - DNA, 1086 bp, Homo sapiens
aaatgtttactcaacaactaaaaaggaagtggatgaaacaatattttggtacccttaatattttctggttatcagtttatttctgtgaatttccttattttactctcgcaacaactctacagttccttaaagcaaccttatacttacacctattttgtggatgtggaaattaagactttagaattgctgaagatatagaagaaacaagaaggtactggaagaaaaatgcagaaaagaaagcttcaggggttcaaatacaacaatgctcgtttacttagcaccttaattcccgcacttgcttatagacagaaaatgcctcyttcctttcttttgaaagctgtggctcaagatggcaggacaccccacagagtcccagtttagatcttgaaacaggtagagtaagaatggttttggttaggtaggtttaacctaccaactggaggtttatttgaattacatctaaatattatttataggagcaagtctgccagttattaataatttatgaaagttgcttattaccagctataatgtaggttttattgaccgatagatttaactatgggaagaagtagcagaaagagaaaaggaagtgaaaaggtgatatgggagtgtggcttattttgaaagaattctagttttggccagggtgtataatgtaagctagaaaataataatactgagcaccagggatgagtgaagaattcatttatgtctttggcttagtccagcgctatttgacttaagacagtgtgtatggtgtcctggaaaggtttataatttataaagctttgaattctcagggataagccatgaattacagggtgatttcaaaagctttacattctaagataagccactattatgctttttcctcattaaagacaggagcttctgttttttagcaaaactgacccaaatgtcttttaataagaattgtactggcatgcaaaaatttaaactataaatacagtctgttttcattattcagggtacccaattattataacaactactttacattatgaaaataaaattcaagtcagtaataaaaaatactttttttcttgaacaaacagaggatcc

SEQ ID NO: 548024 - DNA, 1086 bp, Homo sapiens
aaatgtttactcaacaactaaaaaggaagtggatgaaacaatattttggtacccttaatattttctggttatcagtttatttctgtgaatttccttattttactctcgcaacaactctacagttccttaaagcaaccttatacttacacctattttgtggatgtggaaattaagactttagaattgctgaagatatagaagaaacaagaaggtactggaagaaaaatgcagaaaagaaagcttcaggggttcaaatacaacaatgctcgtttacttagcaccttaattcccgcacttgcttatagacagaaaatgcctccttcctttcttttgaaagytgtggctcaagatggcaggacaccccacagagtcccagtttagatcttgaaacaggtagagtaagaatggttttggttaggtaggtttaacctaccaactggaggtttatttgaattacatctaaatattatttataggagcaagtctgccagttattaataatttatgaaagttgcttattaccagctataatgtaggttttattgaccgatagatttaactatgggaagaagtagcagaaagagaaaaggaagtgaaaaggtgatatgggagtgtggcttattttgaaagaattctagttttggccagggtgtataatgtaagctagaaaataataatactgagcaccagggatgagtgaagaattcatttatgtctttggcttagtccagcgctatttgacttaagacagtgtgtatggtgtcctggaaaggtttataatttataaagctttgaattctcagggataagccatgaattacagggtgatttcaaaagctttacattctaagataagccactattatgctttttcctcattaaagacaggagcttctgttttttagcaaaactgacccaaatgtcttttaataagaattgtactggcatgcaaaaatttaaactataaatacagtctgttttcattattcagggtacccaattattataacaactactttacattatgaaaataaaattcaagtcagtaataaaaaatactttttttcttgaacaaacagaggatcc

SEQ ID NO: 548025 - DNA, 1032 bp, Homo sapiens
ggctccatgtctgaactgtttacattaacaacttatgctgtgaaaatgcctcattgatatgagcttcctcatttggaggaaaaaagtcgcaaccctctttataaggctctccattataccacatggaacgaccaatgttttcatttctgcctaccaaatgccgaaggcaagtttgaatgaaacagggtgtgataacaccaaaggttttctttttaagggaagtaatgttatttcattaacaaaccattgttgtgaaataaacagaattccatgtaagcttggtgttttaaataattgaaacattaacttggtcgtggactaacggattcagaaatttaaatgttgaaaatagtttcactgtgcagagtagagaacaaatcacttyattggattgaaatctagaactgttctggtatacaaacctggagttttagtaactgtttcattaacttctctcactcctttacctacaagtaaaaagacaaattatcattttaaaaaaaacatttatttttgagtaagtttgaaaaaatgtcaaattgaagcaattttcctttctccagatttttttaatgtacaaaatatgaataccttatacatatacattttaaactcatgtctttacagcagaatattcttggtgtttgtgggaaagcggagtttaaggatgaaaaatcaatgtacatctatctacgtatatttccatttaaagtgctacaacagagagccttgcaaaggagggtgccttctatgacatttcttgtatcctgtttggaataccctgccacatactaaaaggtaacaccccacccaaataaccatgatgttacagtccctcttcattgaccaataccccacccaaatcaatcaatttatacgttactactgaaaaattcaaaattatttccattgcagaatgttcattttggtctatcaagttagatttacgtcataatttcttagctttcacagttttagatcaaactacgaattaccattttaaaagttttcattcttctatttctaacaggg

SEQ ID NO: 548026 - DNA, 1032 bp, Homo sapiens
ggctccatgtctgaactgtttacattaacaacttatgctgtgaaaatgcctcattgatatgagcttcctcatttggaggaaaaaagtcgcaaccctctttataaggctctccattataccacatggaacgaccaatgttttcatttctgcctaccaaatgccgaaggcaagtttgaatgaaacagggtgtgataacaccaaaggttttctttttaagggaagtaatgttatttcattaacaaaccattgttgtgaaataaacagaattccatgtaagcttggtgttttaaataattgaaacattaacttggtcgtggactaacggattcagaaatttaaatgttgaaaatagtttcactgtgcagagtagagaacaaatcactttattggattgaaatctagaactgttctggtatacaaacctggagttttagtaactgtttcattaacttctctcactcctttacctacaagtaaaaagacaaattatcattttaaaaaaaacatttatttttgagtaagtttgaaaaaatgtcaaattgaagcaattttcctttctccagatttttttaatgtacaaaatatgaataccttatacatatacattttaaactcatgtctttacagcagaatattcttggtgtttgtgggaaagcggagtttaaggatgaaaaatcaatgtacatctatctacgtatatttccatttaaagtgctacaacagagagccttgcaaaggagggtgccttctatgacatttcttgtatcctgtttggaataccctgccacatactaaaaggtaacaccccacccaaataaccatgatgttacagtccctcttcattgaccaataccccacccaaatcaatcaatttatacgttactactgaaaaattcaaaattatttccattgcagaatgttcattttggtctatcaagttagatttamgtcataatttcttagctttcacagttttagatcaaactacgaattaccattttaaaagttttcattcttctatttctaacaggg

SEQ ID NO: 548027 - DNA, 525 bp, Homo sapiens
tgtgtattaactcattccacacttgaatcttatgaatgtacaatgttattactattccaaatattaaattagagactgaggtttgaagaaatatagataagttacccataaatrtgaaataaataaatgaaaaagaaaggattcaaacacaatctgtaattgcaaagttcaggaaataatgcctggaatatactgcctctatttttgtgaattaaatattagctgcaagaaatagaatgttcactagttcacttaaggagaatagcaactgagaaaagaatattgagaagctcacataatctacaggagggagagttatgcttaggggttactcatcaagaacacactcaccacactgttgggggttccagtgaggactcactgcaacctcagttgggcaaaaaaaactgagggtcacaccaccacttctctactgccactgcctttccaaagtcagcaaatgctgtatcttctgctttgtcacattgttctattctgattaaatccacactcagctgactgaaa

SEQ ID NO: 548028 - DNA, 525 bp, Homo sapiens
tgtgtattaactcattccacacttgaatcttatgaatgtacaatgttattactattccaaatattaaattagagactgaggtttgaagaaatatagataagttacccataaatatgaaataaataaatgaaaaagaaaggattcaaacacaatctgtaattgcaaagttcaggaaataatgcctggaatatactgcctctatttttgtgaattaaatattagctgcaagaaatagaatgttcactagttcacttaaggagaatagcaactgagaaaagaatattgagaagctcacataatctacaggagggagagttatgcttrggggttactcatcaagaacacactcaccacactgttgggggttccagtgaggactcactgcaacctcagttgggcaaaaaaaactgagggtcacaccaccacttctctactgccactgcctttccaaagtcagcaaatgctgtatcttctgctttgtcacattgttctattctgattaaatccacactcagctgactgaaa

SEQ ID NO: 548029 - DNA, 827 bp, Homo sapiens
tgtatttgtctgagtgatttataacgttaagatcgaccacatgatttcctagctctaaatttcccaaactccggtttgcagggaaaggaagcatttcttttctaaggaagtcagcacacctagatctagccaacrgcagttgatttttaagtttcttcaaccttcacatttccctttctcaaaagttggatcccacctgcattaaaaactactgtcctagcacattacaaagttattcaatctaaaatgtcttgtttatactaaaattataaaaatgcatttaagccaggtgtagtggtgcgcgcctgtagtcccagctacttgggaggctgaggtaagaggattgcttgaccccaggagtttaaggctgcagtgagctgtgatggcaccactgtactccagcctgggtgacagatagagaccctgtctcaaaaaaaaaaaaaaaaagaaaagaaaagaaaagaaaagaaaaaaaagaaaaaaaaatccatttacaacacgaaccagaatagtcttatactggattctttgtcaaaggtgaagaaacaggccaggtgcggtggctcacacctgtaatctcagcactttgggaggctgaggcgggtggattacctgaggtcaggagttcaagaccatctggctaacatggagaaaccccgtttctactaaaaatacaaaaaaatagccgggtgtggtggcgcacgcctgtaatcccagctactcggaaggctgaggcagaagaatcacttgaacccaggaggtggaggatgcagtgagctgaaatcatgccattgcaccccagcttgagcaacaagagcaaaactccg

SEQ ID NO: 548030 - DNA, 827 bp, Homo sapiens
tgtatttgtctgagtgatttataacgttaagatcgaccacatgatttcctagctctaaatttcccaaactccggtttgcagggaaaggaagcatttcttttctaaggaagtcagcacacctagatctagccaacggcagttgatttttaagtttcttcaaccttcacatttccctttctcaaaagttggatcccacctgcattaaaaactactgtcctagcacattacaaagttattcaatctaaaatgtcttgtttatactaaaattataaaaatgcatttaagccaggtgtagtggtgcgcgcctgtagtcccagctacttgggaggctgaggtaagaggattgcttgaccccaggagtttaaggctgcagtgagctgtgatggcaccactgtactccagcctgggtgacagatagagaccctgtctcaaaaaaaaaaaaaaaaagaaaagaaaagaaaagaaaagaaaaaaaagaaaaaaaaatccatttacaacacgaaccagaatagtcttatactggattctttgtcaaaggtgaagaaacaggccaggtgcggtggctcacacctgtaatctcagcactttgggaggctgaggcgggtggattacctgaggtcaggagttcaagaccatctggctaacayggagaaaccccgtttctactaaaaatacaaaaaaatagccgggtgtggtggcgcacgcctgtaatcccagctactcggaaggctgaggcagaagaatcacttgaacccaggaggtggaggatgcagtgagctgaaatcatgccattgcaccccagcttgagcaacaagagcaaaactccg

SEQ ID NO: 548031 - DNA, 1549 bp, Homo sapiens
tgatatagttatttaaaaatactttttacaaagggtttgcaataacattttaatgtaagcattttccctcactaactgaagaaaaggatgcaaaacctgacctcaactacataaatagagaatccaaaatgctgacagcagttgcttctgcatgacatgattaggggtaattttttctttgttgtcctctcacccccgacractctgcaactttttacatgagcatatattacctttacaataaggaaaaattatttaaataacatgaggcttaaaattgcaccaaattatattaaaactcacaggatttgcagagatttaagaagtcaggtttttactggtggtggtaaaaaacagcagttgggccccaattgctgtttcctgactctcattcaacaaggtatacacaacagtgcctggcacatgtcaaaatgccgtcaactcatgatcactcagaaactgatgagtcaggctgtggctgatccaagccctctttcttctcctcctcctactgtctgcgttgggttgagttttgttttttgccgctcattagttcccccacgctgtggcttaaggagccaagcttgtgtctatcagtgttcatcctttctaacagttctggtgacaagccttggcaagggagaagctgaaagcttctgaataaagggatttgaggattatcggtagtttccaaatcatccacacgatcctgggtcttcaggattctgggtaaattcaggggctacatccaagaatctgtacacaggatacaggggagaggcttgggcattactgagctgccctagggagcctggtggggcaagtcagctcaagttcatccctcacacccttctcctgagtgagagaacttctctcttattgggggcttggggggtgggtgttaattcccaagaagttaccacgccagtgaggtatttcctcagtcagatggtccgccttattctcaagctgggactctttcctgagcctctaggaaggctgactcaccccaggagcatgtgtccccagccacggcatggaaccctatctgcatgtctcccatgtgcccccggaatcctcagagagtagtaccaatgtgtgcggcagaggttgcaaagtcagtgcagcataggggatcttagtgcagtctctgaagtcattccaggttcaaatccctgctctgcccctgtgtgaccttgaacaacaatcatcccatttctctgggcctcgattccctcatctgtaaaatgggaatagtaggcctgccccattgtgtcatggagaggactgaattcggtagaagatatagagtcccttggcatctaggaagcactgtgtaaatgttagcagtcacaaaacaaacaacaaaaagctgcctttgttattcaaaccttgaaaaaaacaacgaggccacacaggtggcttctgaatgggtaccccatacagatcctgaggagagcgagacttcggtcggctgcggcctcctcagcagcatgaagctgcagcttggtccactccctggttgccacaacatcgctaaaagctggcc

SEQ ID NO: 548032 - DNA, 1549 bp, Homo sapiens
tgatatagttatttaaaaatactttttacaaagggtttgcaataacattttaatgtaagcattttccctcactaactgaagaaaaggatgcaaaacctgacctcaactacataaatagagaatccaaaatgctgacagcagttgcttctgcatgacatgattaggggtaattttttctttgttgtcctctcacccccgacgactctgcaactttttacatgagcatatattacctttacaataaggaaaaattatttaaataacatgaggcttaaaattgcaccaaattatattaaaactcacaggatttgcagagatttaagaagtcaggtttttactggtggtggtaaaaaacagcagttgggccccaattgctgtttcctgactctcattcaacaaggtatacacaacagtgcctggcacatgtcaaaatgccgtcaactcatgatcactcagaaactgatgagtcaggctgtggctgatccaagccctctttcttctcctcctcctactgtctgcgttgggttgagttttgttttttgccgctcattagttcccccacgctgtggcttaaggagccaagcttgtgtctatcagtgttcatcctttctaacagttctggtgacaagccttggcaagggagaagctgaaagcttctgaataaagggatttgaggattatcggtagtttccaaatcatccacacgatcctgggtcttcaggattctgggtaaattcaggggctacatccaagaatctgtacacaggatacaggggagaggcttgggcattactgagctgccctagggagcctggtggggcaagtcagctcaagttcatccctcacacccttctcctgagtgagagaacttctctcttattgggggcttggggggtgggtgttaattcccaagaagttaccacgccagtgaggtatttcctcagtcagatggtccgccttattctcaagctgggactctttcctgagcctctaggaaggctgactcaccccaggagcatgtgtccccagccacggcatggaaccctatctgcatgtctcccatgtgcccccggaatcctcagagagtagtaccaatgtgtgcggcagaggttgcaaagtcagtgyagcataggggatcttagtgcagtctctgaagtcattccaggttcaaatccctgctctgcccctgtgtgaccttgaacaacaatcatcccatttctctgggcctcgattccctcatctgtaaaatgggaatagtaggcctgccccattgtgtcatggagaggactgaattcggtagaagatatagagtcccttggcatctaggaagcactgtgtaaatgttagcagtcacaaaacaaacaacaaaaagctgcctttgttattcaaaccttgaaaaaaacaacgaggccacacaggtggcttctgaatgggtaccccatacagatcctgaggagagcgagacttcggtcggctgcggcctcctcagcagcatgaagctgcagcttggtccactccctggttgccacaacatcgctaaaagctggcc

SEQ ID NO: 548033 - DNA, 1549 bp, Homo sapiens
tgatatagttatttaaaaatactttttacaaagggtttgcaataacattttaatgtaagcattttccctcactaactgaagaaaaggatgcaaaacctgacctcaactacataaatagagaatccaaaatgctgacagcagttgcttctgcatgacatgattaggggtaattttttctttgttgtcctctcacccccgacgactctgcaactttttacatgagcatatattacctttacaataaggaaaaattatttaaataacatgaggcttaaaattgcaccaaattatattaaaactcacaggatttgcagagatttaagaagtcaggtttttactggtggtggtaaaaaacagcagttgggccccaattgctgtttcctgactctcattcaacaaggtatacacaacagtgcctggcacatgtcaaaatgccgtcaactcatgatcactcagaaactgatgagtcaggctgtggctgatccaagccctctttcttctcctcctcctactgtctgcgttgggttgagttttgttttttgccgctcattagttcccccacgctgtggcttaaggagccaagcttgtgtctatcagtgttcatcctttctaacagttctggtgacaagccttggcaagggagaagctgaaagcttctgaataaagggatttgaggattatcggtagtttccaaatcatccacacgatcctgggtcttcaggattctgggtaaattcaggggctacatccaagaatctgtacacaggatacaggggagaggcttgggcattactgagctgccctagggagcctggtggggcaagtcagctcaagttcatccctcacacccttctcctgagtgagagaacttctctcttattgggggcttggggggtgggtgttaattcccaagaagttaccacgccagtgaggtatttcctcagtcagatggtccgccttattctcaagctgggactctttcctgagcctctaggaaggctgactcaccccaggagcatgtgtccccagccacggcatggaaccctatctgcatgtctcccatgtgcccccggaatcctcagagagtagtaccaatgtgtgcggcagaggttgcaaagtcagtgcagcataggggatcttrgtgcagtctctgaagtcattccaggttcaaatccctgctctgcccctgtgtgaccttgaacaacaatcatcccatttctctgggcctcgattccctcatctgtaaaatgggaatagtaggcctgccccattgtgtcatggagaggactgaattcggtagaagatatagagtcccttggcatctaggaagcactgtgtaaatgttagcagtcacaaaacaaacaacaaaaagctgcctttgttattcaaaccttgaaaaaaacaacgaggccacacaggtggcttctgaatgggtaccccatacagatcctgaggagagcgagacttcggtcggctgcggcctcctcagcagcatgaagctgcagcttggtccactccctggttgccacaacatcgctaaaagctggcc

SEQ ID NO: 548034 - DNA, 550 bp, Homo sapiens
agagggactcccagtgaaaatacactccagtggaatctataagtgtccggtgatgaagactgcaaaagtcatactttttttcaagcaccaaataggcacaaaactctatttggaaatatcacaaggaaatgaatattcatgatttcttctaggaaagcatttacagttattttggaagaggtaaaataatttaggtgatgacagcacagtcaaggaaacaaccatatgagtggtttcagttccctctggtaacctgggtgccaagataggggtgtgcatggaggaccaaaggggtgttagaatggctgagaaagtcagagcagaatctggcaagggcatgtggaagaggtgacttttctccaatgtttcaaagcagaaagggagacaggattttgtgaaagggggaagccattctaggtttaaagaaggccatggataaaggcttggcaatggtcaccggctggctgagtacaagaggctgggaagcaaatttgtttgcccgttcagaatatgtaagatattcagaaaacrgcaggtgaagggttgggtg

SEQ ID NO: 548035 - DNA, 1486 bp, Homo sapiens
ctcccaaagtgctaggattacaggcgtgagccaccgcgcccggccgacacttttaatccttacaaaaaccctattagattcatattactatctgtttttatggggaaactgagactcagagagctagagtcacacaactggtaattaacagagacaagattggaaccagctgggactaactccaagtctatgctctaaactattaggcaatactgcccaaatgaaaatgattacatagtaattaagtatattaacaaaaagatgattttgtattcttactctataaatcaaaagtcatgttcaattgtggcaagtaggttttctgagagatttatcttcatgagagatttcaatagattggtctggaaaactctgtggcaactcaaggtaaagtaaaagggaggagacgcaaaaactgctttaacactaaaaatctgtaaacaaagttaatggtaatccctctattggaatggaaatcccaaatcagtaataatagctcatgaaagcaaggtgtcagaaaactgctttgccagcaaatcatttgtctgtttagagctcatcattcttttttcttttttaaatcatcacggatcaacatttttaattttttttttttttttttttttttttagatggagtctcggtctggagtgcagtggcgcgatctcggctcactgcaacctccgcctcctggattcaagcgattctcatgcctcagcctctggagtagctgggattacaggcacgcgccaccacaccgagctaatttttgtatttttagtagagacgcggtttcagcatgttggccaggatgccctgggtctcttgacctcgtgatccacccgcctctgcctcccagcgtgctgggattacaggcatgagccactgcgcccggacttttttttttttttttttttttttttttttttttttgagaccgagtttcactcttgttgcaatgacgcgatctcggctcactgcaacctccgcctcccgggttcaagcgattcccctgcctcagcctcccgagtagstgggattacaggcataagccaccatgcccggctagttttgtatttttagtagagacggggtttctctgtgttggtcaggctggtctcgaactcaggtgatccgcccgcctcggcctcccaaagtgctgggattacaggcgtgagccacagcgtccagccaacgtttttaattcttaaaactgtgtttgaatgagtgttgggtttttgttgtttggttttctttggggtaaggcggttatcaccttacacaaaaaatttacatcataatatgaaaatgcccattggttcattcaaggaaaaacataaagaatttctaacagaatggattaatggggtggaagaaatttatccattctctaaaaatttttcaaatcccaaaaacttttttttttcattttacaaaatatttacttcaaacagtagctggcattttgcatttaagagttcgacca

SEQ ID NO: 548036 - DNA, 1078 bp, Homo sapiens
  misc_feature 12: n = A,T,C or G
gactacatgatncgcacgctcctgcatctggttgttgtccctcacgttacaaatttgacctgggaaattgtcttctatgtgtgttcttatattcttttcaaccacttttcaagctctcttacttgctaattttccccaattctagtcagacccaggattccttaccctgaatccttcccctgtgggtagcaaatctgcttatctttgacctttatgaagaaattaacaggtctgtagtttcccttcaaaagggtctctgcaatttttctgcattcatgaaggtcatgggcagacactgagcccatgtaggctgctctcttcctgcatacactggagaatatccaaggaggggaggcttgctgattgtcagcagagtcagcacagcaagttcttcagggactgtcttcttccctaaccccctaaggaatcataagggatgaatctcccacttccaaataccagatattcacttgtgtgttagcagagttttgcctacatcagtgctctcctatagtacttagtgtcataatggaaatattctattctgctctgtcccatacggtagcctctaggttctggactacggacaacagattgatatgtggtaagtgtgactgatggactaatattttaattttgtgtagttttaattgatttaaatttaaataattacatgtggctagagactactggattggacagtgtaagcctgcagaattaaattgcctaaaggaactgaagttactttatttaggagaggtaatgaatccctacagctctggacaaggtctaggmcagagattttcaaccagggctgattttaccccaggggacatctggcaatgtctggagatgttttcaggtatcgcaactgggggtagcagtccactggcatctagagggtagaggtcagggaagctgctaaacatcctacatgcataggataacattccacaaaaataattatccagctgatctagatttgaatccgtgctatacctcttaacctgggcaaattattaatctttcttgagctacagcttccttataaaatggtgttaataatacctagagtaca

SEQ ID NO: 548037 - DNA, 849 bp, Homo sapiens
tccctccacacctccctgcaagctgagggagccggctctggccttggccagcccagaaaggggctcccacagtgcagcggtgggctaaagcgctcctcaagtactgccaaagtgggagcccaggtagaggaggcgccgagagtgagcgagggctgtgaggactgccagcaagctgtcacctctcaatagcacctacctcaacaaggcccttgttaagatttgatgaaattaaaaataatcagcccaaggaagctacaaaacacatattctttattgtaattatgtcttctaccaattttctgctgttattagtgattcatattgargtagaatacagttaggtaaagaaaatcaacagataacttattaaaactcaatataactttaattttcaaactcttccaccaaacatttatcagagctgataaattgctacaatacaaaggtaaatttgaatttgtctttcttctttcggaacaagtttcctctgtggaactgattgatggcaggtatgtacagacaagagacaaaggatgtagagagaattcacaaactggattctcagtcccagatatttacaaattgagtggatttgactttcctattttcatttattcactacaaatccagaaaaatcaaataagcatttgcagcaatctatcgtgggataattatagcacagatctgtccaggaatcagagggtacaccctctggggaaagcagttcagcatactgcgtcatccatcaaacctcctttcagtaaatactcatctctcaaaacccctttcagattgttgatgaaatattttaagattctagttaacttggatcaccctgaattatagatg

SEQ ID NO: 548038 - DNA, 849 bp, Homo sapiens
tccctccacacctccctgcaagctgagggagccggctctggccttggccagcccagaaaggggctcccacagtgcagcggtgggctaaagcgctcctcaagtactgccaaagtgggagcccaggtagaggaggcgccgagagtgagcgagggctgtgaggactgccagcaagctgtcacctctcaatagcacctacctcaacaaggcccttgttaagatttgatgaaattaaaaataatcagcccaaggaagctacaaaacacatattctttattgtaattatgtcttctaccaattttctgctgttattagtgattcatattgaggtagaatacagttaggtaaagaaaatcaacagataacttattaaaactcaatataactttaattttcaaactcttccaccaaacatttatcagagctgataaattgctacaatacaaaggtaaatttgaatttgtctttcttctttcggaacaagtttcctctktggaactgattgatggcaggtatgtacagacaagagacaaaggatgtagagagaattcacaaactggattctcagtcccagatatttacaaattgagtggatttgactttcctattttcatttattcactacaaatccagaaaaatcaaataagcatttgcagcaatctatcgtgggataattatagcacagatctgtccaggaatcagagggtacaccctctggggaaagcagttcagcatactgcgtcatccatcaaacctcctttcagtaaatactcatctctcaaaacccctttcagattgttgatgaaatattttaagattctagttaacttggatcaccctgaattatagatg

SEQ ID NO: 548039 - DNA, 552 bp, Homo sapiens
aatttttgtgtttcttttagagatggggtttcaccatgttgcccaggttcatctccaactcctgggttcaacgcttccacctgccttggcctcccaaagtactgggattacagrcatgagccaccgtgcctggcctttgctttctttcactcagtgtaccatcctctaggctcattcgtgttgccaatgagatgatttctttcttttttaaggctgaattgtgttctattgggcatatgtaccgcttttctttttatgtttaattttttttggttttttgagacagagtttcgctcgcgtcgcccaggctggagtgcagtggcgtgatttcgagtcactacaacctctgcctcccaggttgaagtgattctcctgcctcacctgagattagaggcatgtaccggcatgtccggctaattttgtgtttctagtagagatggggtttcaccatgttggccaggctggtcttgaactccaacaattctaattcaactaatttattttatagaaatatttatgtgtgagaaacaatatttccaagagtcaaagatt

SEQ ID NO: 548040 - DNA, 552 bp, Homo sapiens
aatttttgtgtttcttttagagatggggtttcaccatgttgcccaggttcatctccaactcctgggttcaacgcttccacctgccttggcctcccaaagtactgggattacaggcatgagccaccgtgcctggcctttgctttctttcactcagtgtaccatcctctaggctcattcgtgttgccaatgagatgatttctttcttttttaaggctgaattgtgttctattgggyatatgtaccgcttttctttttatgtttaattttttttggttttttgagacagagtttcgctcgcgtcgcccaggctggagtgcagtggcgtgatttcgagtcactacaacctctgcctcccaggttgaagtgattctcctgcctcacctgagattagaggcatgtaccggcatgtccggctaattttgtgtttctagtagagatggggtttcaccatgttggccaggctggtcttgaactccaacaattctaattcaactaatttattttatagaaatatttatgtgtgagaaacaatatttccaagagtcaaagatt

SEQ ID NO: 548041 - DNA, 1326 bp, Homo sapiens
aggaggatctcatctctcatctgtccaaacaaggcaaggagactttctctcatctttccaagcaaggcaaggagactttttatcattaggaaacaaaaagaatttagaaggaatgaaagcagcccgtaaggtgaattcctaaggactgcccattgaaactgacaaaattgcccttgtttgatgagaggaatgagcagagcattgatgtggtgaacaaggatctagtgagactttcccagcatgtttctaccaaagctttatctaagcttctcagaacactctcctaataagcagatgtttggcctttcagaaagtcaacaagcaaaatgccttgagtgtcccaaaacactgatgccatgatgtgggctcctgactggcctccttttcctttgactggaccactgccacctcttggtagccatcgctttcatgatgctttgccttsgcgatcatattggtgaagccatgttccaactgccgcttacaatttgtcagagggatgcgtcaggatcgtgatccctcctgtttaaaatttccactgatagctctcgtcgtaactgcagctgatctgggcacagtggttttcgcagccactgcaggattcatcttccacatcttctcacctcttcttgaaacaagctatacattcgtaaagagttcatttctttggggtagtgtccttacaagcttttcttaaaacgtcaatgatgtcttcaatcttccacccaagcttcaccataaatttgatgtttcctcttgctgcaattttcgtggaattcatgttgctctgacgggagtccttttcagtggatgtctcatccttcttagtgcctcaaactagatctagttcagaaaggttatcagaagttaggacaagtttattttagtgcaaaccagtggaaatccatgcatcgtttcttcaccatgtgcattttctatgaacctttggaagaccacctgtgttgaacattgcccaagtcctgggagagaagtgggtgcggtccgcttcctgtcctcaatttgcccgcagcggcggagtgcacagagcagggaaaggcagccccagagggatcccgccctccagcatgcagcagactgctggcccagtcctggctccaaggggtgctgtgtgggcccaagcaagttgaccaacctccctgaaccttaatttcatcctaggtagcccaattccagtagccattataggactgccctgcagggacagttacttaactcaggaaaagcaacctagctccaagtttagcaaccgggagttccagttgattccattagcgcaccccctgaggcattcccaagctggagtct

SEQ ID NO: 548042 - DNA, 1326 bp, Homo sapiens
aggaggatctcatctctcatctgtccaaacaaggcaaggagactttctctcatctttccaagcaaggcaaggagactttttatcattaggaaacaaaaagaatttagaaggaatgaaagcagcccgtaaggtgaattcctaaggactgcccattgaaactgacaaaattgcccttgtttgatgagaggaatgagcagagcattgatgtggtgaacaaggatctagtgagactttcccagcatgtttctaccaaagctttatctaagcttctcagaacactctcctaataagcagatgtttggcctttcagaaagtcaacaagcaaaatgccttgagtgtcccaaaacactgatgccatgatgtgggctcctgactggcctccttttcctttgactggaccactgccacctcttggtagccatcgctttcatgatgctttgccttggcgatcatattggtgaagccatgttccaactkccgcttacaatttgtcagagggatgcgtcaggatcgtgatccctcctgtttaaaatttccactgatagctctcgtcgtaactgcagctgatctgggcacagtggttttcgcagccactgcaggattcatcttccacatcttctcacctcttcttgaaacaagctatacattcgtaaagagttcatttctttggggtagtgtccttacaagcttttcttaaaacgtcaatgatgtcttcaatcttccacccaagcttcaccataaatttgatgtttcctcttgctgcaattttcgtggaattcatgttgctctgacgggagtccttttcagtggatgtctcatccttcttagtgcctcaaactagatctagttcagaaaggttatcagaagttaggacaagtttattttagtgcaaaccagtggaaatccatgcatcgtttcttcaccatgtgcattttctatgaacctttggaagaccacctgtgttgaacattgcccaagtcctgggagagaagtgggtgcggtccgcttcctgtcctcaatttgcccgcagcggcggagtgcacagagcagggaaaggcagccccagagggatcccgccctccagcatgcagcagactgctggcccagtcctggctccaaggggtgctgtgtgggcccaagcaagttgaccaacctccctgaaccttaatttcatcctaggtagcccaattccagtagccattataggactgccctgcagggacagttacttaactcaggaaaagcaacctagctccaagtttagcaaccgggagttccagttgattccattagcgcaccccctgaggcattcccaagctggagtct

SEQ ID NO: 548043 - DNA, 640 bp, Homo sapiens
taatagagatgacgaagtgtttaaagtctataatcatgaagatatgtggaggaaacaacagcatataactgagtgaaagaagccagtttgcaatagatacatatgattctaactacatacattctggaaaaggcaaaactacagagatcaatgattgccaggggctcacagggagggaaagaaggataaatcgatggagagcagggcaggggatttttagggcaatgaaacaattctgtataatctgtaatattagatacatgtcattatatatatgtcaaaatccataaaatgtacaataccaaaattkaaccctaatgaggttcaaatttgagtcctaaactatggactttagttaataataatgtatcaatattggctcatcagttataaataacatatgtaccgcacgaatgcaagatattaataatgagggcagctgtggtaggggaagaaggtatatgggaactccccgtactttcctgttcatttttctgtaaacctaaaactgttctaaaaagtaaagtctattaattttttttaaaaagtctatgaagctttattgtgtccctgactttttttattttttttctgagatgtagtctcgctctgtcgtccaggctggagtgcagtggtgtga

SEQ ID NO: 548044 - DNA, 524 bp, Homo sapiens
gagacaagaggcggagtgaagggttaagtctcagggcccttggcctggcctgtccgctgccatcacctcttgttatggggctgagcatcagattcctaccaaagcctcacaatacccccgaggtctccgtgttactcccttcattttgcatgtgagaaaacaggctcaagaacctgcacgaggtcacaaagctgatgcatgaacagtggtctttgaacccagacctgccttgctccgaacttgtgtgtctaacatccaggacagcttcaggggacgacctaaatccaaattcattaaaatccaaaaccttaaacttatagcgtggcacaggccacatttctagtgcttcaatagtcatatatggctcgtggctactgcactggaatgtgcagatacaaagttctacyggacggcatggcttattctgccttaatcctgacaccgtctccttgccaaccacccccacccgtccccggcctcagcccagaagcaaagttctgagcgctcaaggttagtagaattcc

SEQ ID NO: 548045 - DNA, 539 bp, Homo sapiens
tcatagcaacactggctctaatttgaagagcaaaattttcctgatgccaaaggaacttacttagcggacactcgtgctaacaatttaaagatgagttctcccctttattttttaataagaagataaatggttatttccaaaatatgtatagattgttctgccttctttcctttgtaaagcattgttacctaaatatggagaggaagaagtttgggcagctgacctatgttccattttatccccatttatggaggtaaagggagagttcacaggctaaaagaaaaaagaaggaacgtgacctggacccatgggcaaatagactaacagcatctactagaaaaaaaatccttacctattaarcgctttgagtagggtgttcctggttgagggctgtgtaggctgcgtatggcaaaaacaacagcagtaaccatcagcctaaatctacgtaattatggctccctaaatgtcgtataagctatataatattaaggtatacaacagaattaagatgaagatgtttcataacttaaatattccct

SEQ ID NO: 548046 - DNA, 627 bp, Homo sapiens
atgttgtaaatttggaatcaagcagtaaaacaccatagactaatataaacagccttttgttattactttgttagggaagaatgtactgtttttttccccttcaggcacagagctcatttgacttaaaaaaaatctatttattatctattttcccactataatcttcagtgtgctttttacagatttggaaggaggtaaggtagtttctaggggttggagaggttgtcctggctagagcttgctagtaagaaatgaagaagacagacatttgaaatggaggggacaggaaatgtcaacttgaatgtaatacagcaatacagggccattgcatatagaagcaaatagctttgtattaatatatgaagctgagggcagttctggaaaggcagctacagaagcacaaattagtatagcagaatgggcgtgaggagtcgtgtgggggatcacstaagccacatagctacattattgtttgagggcatcttttctaagtcagttatagggtaactgatattgtggtgatgactctgagtcatggaaaagattgtggtgtgtttagaatattctttaattatgtagggagatatgtaatacattttaatttctcttaagtatgtcaaatattaa

SEQ ID NO: 548047 - DNA, 566 bp, Homo sapiens
aaaagttatttaaattcaagaagctaatgagctaagcgttgatctgaagatgttatatatttgaaaaaacagactatgttcaaagaaatgaatgagtagaacttaatattttttaaaaattaagatagtatcaacaaaggcaaaagtcagttctttcaaaacttaagaatgtgcatatatattgtatctttagcacgtatgaatattactttttaaaaattagaaataagwgaaatcaaatgggagtgtctctatttctgtggtaaattattctgtacaaacacacatatacattacccagccaccaaccacaatcaaatgtgcaccagcacctggaacccacacttaggcaaatacctttggcgatgtgcctacttttattgtgtgatgtgtgcatttctgcatggtgatcaaggccagggaggcactcctaatgcagtagccccagctctgtcacctctgagaagcctccacctggaatctcttgcttaccttgacaggtgagctgtccagggaaactgtccagcagcaaataattcctgaagtcaagcctaaaacaggcctgt

SEQ ID NO: 548048 - DNA, 566 bp, Homo sapiens
aaaagttatttaaattcaagaagctaatgagctaagcgttgatctgaagatgttatatatttgaaaaaacagactatgttcaaagaaatgaatgagtagaacttaatattttttaaaaattaagatagtatcaacaaaggcaaaagtcagttctttcaaaacttaagaatgtgcatatatattgtatctttagcacgtatgaatattactttttaaaaattagaaataagtkaaatcaaatgggagtgtctctatttctgtggtaaattattctgtacaaacacacatatacattacccagccaccaaccacaatcaaatgtgcaccagcacctggaacccacacttaggcaaatacctttggcgatgtgcctacttttattgtgtgatgtgtgcatttctgcatggtgatcaaggccagggaggcactcctaatgcagtagccccagctctgtcacctctgagaagcctccacctggaatctcttgcttaccttgacaggtgagctgtccagggaaactgtccagcagcaaataattcctgaagtcaagcctaaaacaggcctgt

SEQ ID NO: 548049 - DNA, 575 bp, Homo sapiens
agggcgatctcaaaaaactgtaacatcaacctcccaggctcaagcaatcctctcacttcaacctcccacgttgctgggattacaggcacactccactacacccagctaatttttttgtattatttgtagacatggggtttcgccaygttgcccaggctagtctggaattcctgaggtcaagctgtctgcccatctcagcctcccaaagtgctgggattgcaggagtgcaccaccacacctggcctgaaacccagattttatttatttatttattcattttttgagatggagtcttgctctattgcctaagcttgagtgcagtggcgcgatcttggctcactgcaacctccacctccctggttcaagcgattctcctgcctcagcctcccaaagtgctgggattacaggcatgcaacaccacacccagcctgaaacccagatttttaatatgaaatcaaagtcttcagaccttgtaggtgtcataaaaagcacgctgaggaccactagtttgcaactgccaatctaaaatatcatagacattatatcacttcaaccacgaaaaaaaaagtatgtga

SEQ ID NO: 548050 - DNA, 562 bp, Homo sapiens
tgagccaytgcgcccggcctgtgccacattttcttaatccagtctatcattgatggacatttgggttggttccaagtctttgcggaaacacatcttttgttcgcttatttttagtgcaaaaatatttgaaacctacagaagttacaaaaccattacaatgtattcccctgtatttttcatccaggtcaggagccggcaaactgctacccacaggccaaatactacttcaattgcttttgtaaagttttattgaaacacggtcatgtccattcatgtacctgtgtctacgcaggctgttcctgcatccatggaattgagtaactgccactgatactgtctggccccaaaagccaaaaatatttactatttggcctttttgttttgttttgtttgttttttactccccttaaagacaaggtcttgctccgtcacccaggctggtgtgcagtggtgcaacctcagctcactgctgcctccaactcctgggctgaagggttcctcctgcctcagcctccccggggattccaggcataagcccctgtgtccggccaggtgtgagttt

SEQ ID NO: 548051 - DNA, 562 bp, Homo sapiens
tgagccacygcgcccggcctgtgccacattttcttaatccagtctatcattgatggacatttgggttggttccaagtctttgcggaaacacatcttttgttcgcttatttttagtgcaaaaatatttgaaacctacagaagttacaaaaccattacaatgtattcccctgtatttttcatccaggtcaggagccggcaaactgctacccacaggccaaatactacttcaattgcttttgtaaagttttattgaaacacggtcatgtccattcatgtacctgtgtctacgcaggctgttcctgcatccatggaattgagtaactgccactgatactgtctggccccaaaagccaaaaatatttactatttggcctttttgttttgttttgtttgttttttactccccttaaagacaaggtcttgctccgtcacccaggctggtgtgcagtggtgcaacctcagctcactgctgcctccaactcctgggctgaagggttcctcctgcctcagcctccccggggattccaggcataagcccctgtgtccggccaggtgtgagttt

SEQ ID NO: 548052 - DNA, 562 bp, Homo sapiens
tgagccactrcgcccggcctgtgccacattttcttaatccagtctatcattgatggacatttgggttggttccaagtctttgcggaaacacatcttttgttcgcttatttttagtgcaaaaatatttgaaacctacagaagttacaaaaccattacaatgtattcccctgtatttttcatccaggtcaggagccggcaaactgctacccacaggccaaatactacttcaattgcttttgtaaagttttattgaaacacggtcatgtccattcatgtacctgtgtctacgcaggctgttcctgcatccatggaattgagtaactgccactgatactgtctggccccaaaagccaaaaatatttactatttggcctttttgttttgttttgtttgttttttactccccttaaagacaaggtcttgctccgtcacccaggctggtgtgcagtggtgcaacctcagctcactgctgcctccaactcctgggctgaagggttcctcctgcctcagcctccccggggattccaggcataagcccctgtgtccggccaggtgtgagttt

SEQ ID NO: 548053 - DNA, 624 bp, Homo sapiens
tcaaccagcagttacattaaccagcaggtctgcttataagaggagggggscttgagggacctgagctagagtgagtgtgggcagattgccacactgggcttgccctttgcggggccagtgatggttctagaggttagcctggaaccatgagcaagactgcatcagagcaaggaggaggtggagctcctggatacttcttcactccctctgttccttcctcctttcctttccatcttccttccacatatatttctggattccctactatgtgccagacatgagaggcttgaccctaagaacctggaaagagcctgactgcagggatgaagagactgggaaacaaggccctgctgactccaggggaaaagcaagcatcttcttacttctgaaagacctcataaaaaaatcccataaggacacttagctgctttatgatcaatatgcttgaaaatctacttaagcatttgtcatcaagtctcattctgtgccatcaactggcacaaaataatagctggcatttatcgagcacttatcgtaagccagacactgaacttaaaagtttccatgggttgtttgttttaaccctttcaacctaggagtttcagtagcatcattatccccatt

SEQ ID NO: 548054 - DNA, 575 bp, Homo sapiens
gccttaaaaagaaggcaatccgctcacatgctataatatggataagccttgaagacattatgctaagtgaaataagccagttacaaaagacaagtactgtatgaatccacttatgcaaagtccctaaagttgtcaaattcatagagtcagtaggataatggttaccaggggatggggtaaggaggaaaagggaaattaacaggtacagagtttcaagatctgttttgcaacaatgtaaataaacttacattgaactgtgcacttgaagatgttcaagatgataaattttatgttacatattttatcacggtaaaaaataacgtgattcttttccatggtttctcaattttaatgtccttcatccaaaactaagcctactaattttccagctcatctctaaatgtatggtaacttcaccatatggaaggataatagtagttgttacactcctctgcacccccattcttctctcagtaccctacagcargcttgcccatcatctgcaagactgaatcagttaccattctctttcctcagttaatcataaatggaaatagactcgattctcttctttg

SEQ ID NO: 548055 - DNA, 512 bp, Homo sapiens
caaagtgcagcagccaaagtgagaraaatcatctataccatagatagttattaagcagcacttcatttctcttatgtatctttttagtagtcctcatgctaaataacattttgtataaattgtgatattatttaattacctgacttcatccaaacaaatgagagaaagataatttagaagtaaaattgatattagattttgatagttttattgtgtcttattccagcagttgtttgcacaagaagcaagctatctctgtagccgtgtaggttaaaattgttatctagtttaaaacatttttcttttaaggacttaatatttactccctgatattttgccattatgctgttgttgttgttgttgatgtgtgtgtttaaatatatatctgctttgctaaacatttaggcttctattcacaccattgctgtgcttgctgaattaaatcttttagtagaaactacagttcactgatcaagtattgaaaacatcaggccaggcaaggtggctcatgc

SEQ ID NO: 548056 - DNA, 652 bp, Homo sapiens
caaagaaaaagagagtgcccaaaacaaaaattacatttccctagcttttcatctggcaacayttagcacatcatacagttagttgctcactttgcagtctttacaaaagagcagcattgggtattgagcacttcgttatatattggctacactttcctgtcatgttgcctttattctagaagggagtaagagaggagtaggaattctccataagagaagatctgaccaaataatagtcgattcaatgggttttcccctttgggtttgcaagtaagggtttgcagggccttcatgttattttaccctctcttctccattcaccctgactaaaaaacatgtccttgtattaaactctgagagaaagaaatcaaacatgatttaatgctctgtgtttgacaacaatattcaatgaagtaatttgtatgatttacagagatataatttcctctgaaagaaattacacatgcttaaaaataattttatgatatagcatagttgtttaaaatttggcatagatacatgcttaaacaaattatctttgctttcagaaaggaacagaatagtttaaagatcataaatattaaaagaacaaaatgattttttttaaatcaggggcaaatttacttaggcctgagtacaaatagagaccgtc

SEQ ID NO: 548057 - DNA, 2257 bp, Homo sapiens
catatcactgaacttaacacctaggagattgggggctcctgcctgaactctgcccacagggaggcagagcatatttctgccttgtagcatatttctgcctccatcaccagatgatgtgactctcctttctgcctgcaccttgcccacaggaaagattctgacatatcactgggcctagtaatcagtaatcaggtgatgtgtctctcctgccayggctttacccacagggagtgtggtgacatatcactgagctcaatattcaggtgatttgactctgctgcttgtactctgatttcaggaggggattgtaacatatcccgggtgagcacacaagtgatgggactcccttcctagcctccgacctcataaaagattgttacatatccctggcccagccttaggtatgtgactctcctacctggtccctgccatcaggggagatattgacagatctctggccaagcatccaggtgatgcgactctcctgctcactccctacccacaggagagattgaaacatatatcttggccagctcacaggtgtaataatgactctcatacctcaaacctgccactaagagaaatgctgtttttcctagtgaggctttggaaaatcggtaggtcctaaatcttctctttgtatgagggtcttagaggaataccactctctcttatattatataaagcccttaaatggtacaaagagtgttatcacagggatatgttgcataacctaggggaggggcccagttatatgttacaattagcccagggggcagggcacaggcatgagaagaatctcaccacatatgtgctggcctaagtgatacatcatcatccccactgtggacaggtcgcagtaagaacaggagagtcacatcattcttataatggtctcagatatacatcacaatgactcccctgggcagaaagaagggataagagtcacatcacctgtgggctaggcccagagatgtcactcttacttctgtgggcatgtctcaggctggagaggagaatcacattacctaagcactggaccaagaaatacgtcacagtctttctcatgggcaaagtccaggtaagagaatagagccacatcaaatagttcatgggctcagagatatgtcactatgctccctgtgggcagggttcaagtaggacccttacattaccttggtgctggttcagcaatatgtcccaatgccttctaaggacagaacaaagacaaaagagtaaaatcattttgatgttttacccatcgatatgtcacaatcatccccgtgggcagaacctgaaaaaagggaagagtcatattagctaaatgctgtgcctagcgataagtcacaattcaccctgtaagcagggactagacagaagatagagttacatcatctggtggctggtgcagggatacgccaccatgccctctctaggcaggatccagacaggagagctatgtcgcctgtgttttcgacccagaaatatgtcacaaacgcccatggacagagcacaggaaagacaggcacataacctgaatatcaggttcagtggtatgtcccaatgcctcctgtgagcattccaagtcaggagaggagactcacattacctgtgtgcaagacccagtgatacgtcacacggaggagtaccactgtcttgcatattgtgtaaactatggtagagaaattgtcaccacagggctcgccacactggtgagattatacttctcagatgcacaccacaccaatattcaggatggtctctatcacacgtggagagagcccactcttgaggtcctgaattacacatgcagacatagtccacaactgggattctgactttcatatgtgaacatccagccacaggtgggatggtgactcatttttaaacgcagctcataggcagttaagaactcttatttggacccatccaagtagaaagatgttgactgtcataccacggcttaaagctaaaggtacaaggaggagtccgtgcctgcttaaggtttcagagagaattgttacactcatgcatactctataaaggcttcatatggtgaagagagtgtcctgctagggcccagaacaaatgtgagattgtgatactcatatgtacactgagccaagagcaaaaattgtcatcttttcacatgaacacagcccaatgttaaggttccgaatctcacacctgttgatctacctgctgatggaatagtctgtcaagagaaagcagagatgcatgagcatcaatctggaaa

SEQ ID NO: 548058 - DNA, 2257 bp, Homo sapiens
catatcactgaacttaacacctaggagattgggggctcctgcctgaactctgcccacagggaggcagagcatatttctgccttgtagcatatttctgcctccatcaccagatgatgtgactctcctttctgcctgcaccttgcccacaggaaagattctgacatatcactgggcctagtaatcagtaatcaggtgatgtgtctctcctgccatggctttacccacagggagtgtggtgacatatcactgagctcaatattcaggtgatttgactctgctgcttgtactctgatttcaggargggattgtaacatatcccgggtgagcacacaagtgatgggactcccttcctagcctccgacctcataaaagattgttacatatccctggcccagccttaggtatgtgactctcctacctggtccctgccatcaggggagatattgacagatctctggccaagcatccaggtgatgcgactctcctgctcactccctacccacaggagagattgaaacatatatcttggccagctcacaggtgtaataatgactctcatacctcaaacctgccactaagagaaatgctgtttttcctagtgaggctttggaaaatcggtaggtcctaaatcttctctttgtatgagggtcttagaggaataccactctctcttatattatataaagcccttaaatggtacaaagagtgttatcacagggatatgttgcataacctaggggaggggcccagttatatgttacaattagcccagggggcagggcacaggcatgagaagaatctcaccacatatgtgctggcctaagtgatacatcatcatccccactgtggacaggtcgcagtaagaacaggagagtcacatcattcttataatggtctcagatatacatcacaatgactcccctgggcagaaagaagggataagagtcacatcacctgtgggctaggcccagagatgtcactcttacttctgtgggcatgtctcaggctggagaggagaatcacattacctaagcactggaccaagaaatacgtcacagtctttctcatgggcaaagtccaggtaagagaatagagccacatcaaatagttcatgggctcagagatatgtcactatgctccctgtgggcagggttcaagtaggacccttacattaccttggtgctggttcagcaatatgtcccaatgccttctaaggacagaacaaagacaaaagagtaaaatcattttgatgttttacccatcgatatgtcacaatcatccccgtgggcagaacctgaaaaaagggaagagtcatattagctaaatgctgtgcctagcgataagtcacaattcaccctgtaagcagggactagacagaagatagagttacatcatctggtggctggtgcagggatacgccaccatgccctctctaggcaggatccagacaggagagctatgtcgcctgtgttttcgacccagaaatatgtcacaaacgcccatggacagagcacaggaaagacaggcacataacctgaatatcaggttcagtggtatgtcccaatgcctcctgtgagcattccaagtcaggagaggagactcacattacctgtgtgcaagacccagtgatacgtcacacggaggagtaccactgtcttgcatattgtgtaaactatggtagagaaattgtcaccacagggctcgccacactggtgagattatacttctcagatgcacaccacaccaatattcaggatggtctctatcacacgtggagagagcccactcttgaggtcctgaattacacatgcagacatagtccacaactgggattctgactttcatatgtgaacatccagccacaggtgggatggtgactcatttttaaacgcagctcataggcagttaagaactcttatttggacccatccaagtagaaagatgttgactgtcataccacggcttaaagctaaaggtacaaggaggagtccgtgcctgcttaaggtttcagagagaattgttacactcatgcatactctataaaggcttcatatggtgaagagagtgtcctgctagggcccagaacaaatgtgagattgtgatactcatatgtacactgagccaagagcaaaaattgtcatcttttcacatgaacacagcccaatgttaaggttccgaatctcacacctgttgatctacctgctgatggaatagtctgtcaagagaaagcagagatgcatgagcatcaatctggaaa

SEQ ID NO: 548059 - DNA, 643 bp, Homo sapiens
accttctgggtgtggggcaggaccctctggaatgggggtcttatgacctatagtcaaacaaggtggatcagattattactttatggccagtttttacacagatacggcagagggaaagtgagagtcctgtttttaggttttatggctggctttggggaaagggggctctggtttctagggcccgcctaggggaagagggattctagtttctgtggctagcctcgggatgatgagactgagagaagggggcaaaagttcagagagaagctcctgcttctgaggttgttgcttgggtcttcattttggggtatttgagccccaagggggtttctcacgatgagctgcagrcctgtggaccgcccccccaccaggcctctgccttctaacctggttaaactcagtgtcgtgtcatggccctgggggaggaaaggaaggctggttctttcacagggcttctaatatcgggtgtctccaccctccctgcagttatttcacagctgttcatgctttttttttttttttttcttttcagacggattctcgctctgtcgcccaggctggagtgcagtggtgcgatcttgcttggctcactgcaacctccacctcccgagttcaagcaattctgctcagcctcctgagtagc

SEQ ID NO: 548060 - DNA, 643 bp, Homo sapiens
accttctgggtgtggggcaggaccctctggaatgggggtcttatgacctatagtcaaacaaggtggatcagattattactttatggccagtttttacacagatacggcagagggaaagtgagagtcctgtttttaggttttatggctggctttggggaaagggggctctggtttctagggcccgcctaggggaagagggattctagtttctgtggctagcctcgggatgatgagactgagagaagggggcaaaagttcagagagaagctcctgcttctgaggttgttgcttgggtcttcattttggggtatttgagccccaagggggtttctcacgatgagctgcaggmctgtggaccgcccccccaccaggcctctgccttctaacctggttaaactcagtgtcgtgtcatggccctgggggaggaaaggaaggctggttctttcacagggcttctaatatcgggtgtctccaccctccctgcagttatttcacagctgttcatgctttttttttttttttttcttttcagacggattctcgctctgtcgcccaggctggagtgcagtggtgcgatcttgcttggctcactgcaacctccacctcccgagttcaagcaattctgctcagcctcctgagtagc

SEQ ID NO: 548061 - DNA, 1126 bp, Homo sapiens
tgttgctgtttgttaaggagtctgtttctgcctctgtctccctctgtttcctttcctcctcctcaccaccctcccgccttttttcatttctttgtagaattaacaaataaatgttgtgtgtatttacatctacaacatgatgttttkatatatgtataccttaagaaatgattaaaccctttctttcttgaagaaatgcagttgtctggcggtggagcctgagctgtctgacaactttgggtgttctttcccccgcccccgcctccacctggccatccatgtcccttgggaaaatccttgctctggggaaagtgggctgagccctgtcctctattcactcatgcttggttggcttctgcagagccaaggaccctgcatgtctggcctgaggtctgactggcagctggagcttgatggacaaagacagagctgaggtgggtcacataggggtttggttttctccaaagtccatctttctgtcctcaggtctggattactaatggaggactggccaatatttttactgtgtttgcaaagactgaggtcgttgattctgatggatcagtgaaagacaaaatcacagcattcatagtagaaagagactttggtggagtcactaatgggaaacccgaagataaattaggcattcggggctccaacagtaagtagctcctgtgcgcgcgtgcgcgtgtgtgtgtgtaagggggagactggcctttgacggtgtgtgtgtgtgtgtgtgtgtgtgtgtgtgtgtgtgtgtgtgtgtaagggggagactggcccttgactctgtccaaatagcaagataaaatgagatttaaacactttcagtttttgttaagcattttaaaaagatcaaattaagaatgccacttgggctttgtctttgttcctgcagctgagtgctgctcacttgaaggcctgctggtcatcccctgctgtagctgccctagcagacacaccaccttagagctcagcttacagtccccagcctttagttgtctcagtctgcagtgcctggcagcctgcttcaggctgtgagttgggttcaggtccatctgggttcaggtccatctggaggcttgttcttagagcagatcataagcacctaaggggccaagcc

SEQ ID NO: 548062 - DNA, 1126 bp, Homo sapiens
tgttgctgtttgttaaggagtctgtttctgcctctgtctccctctgtttcctttcctcctcctcaccaccctcccgccttttttcatttctttgtagaattaacaaataaatgttgtgtgtatttacatctacaacatgatgtttttatatatgtataccttaagaaatgattaaaccctttctttcttgaagaaatgcagttgtctggcggtggagcctgagctgtctgacaactttgggtgttctttcccccgcccccgcctccacctggccatccatgtcccttgggaaaatccttgctctggggaaagtgggctgagccctgtcctctattcactcatgcttggttggcttctgcagagccaaggaccctgcatgtctggcctgaggtctgactggcagctggagcttgatggacaaagacagagctgaggtgggtcacataggggtttggttttctccaaagtccatctttctgtcctcaggtctggattactaatggaggactggccaatatttttactgtgtttgcaaagactgaggtcgttgattctgatggatcagtgaaagacaaaatcacagcattcatagtagaaagagactttggtggagtcactaatgggaaacccgaagataaaytaggcattcggggctccaacagtaagtagctcctgtgcgcgcgtgcgcgtgtgtgtgtgtaagggggagactggcctttgacggtgtgtgtgtgtgtgtgtgtgtgtgtgtgtgtgtgtgtgtgtgtgtaagggggagactggcccttgactctgtccaaatagcaagataaaatgagatttaaacactttcagtttttgttaagcattttaaaaagatcaaattaagaatgccacttgggctttgtctttgttcctgcagctgagtgctgctcacttgaaggcctgctggtcatcccctgctgtagctgccctagcagacacaccaccttagagctcagcttacagtccccagcctttagttgtctcagtctgcagtgcctggcagcctgcttcaggctgtgagttgggttcaggtccatctgggttcaggtccatctggaggcttgttcttagagcagatcataagcacctaaggggccaagcc

SEQ ID NO: 548063 - DNA, 1126 bp, Homo sapiens
tgttgctgtttgttaaggagtctgtttctgcctctgtctccctctgtttcctttcctcctcctcaccaccctcccgccttttttcatttctttgtagaattaacaaataaatgttgtgtgtatttacatctacaacatgatgtttttatatatgtataccttaagaaatgattaaaccctttctttcttgaagaaatgcagttgtctggcggtggagcctgagctgtctgacaactttgggtgttctttcccccgcccccgcctccacctggccatccatgtcccttgggaaaatccttgctctggggaaagtgggctgagccctgtcctctattcactcatgcttggttggcttctgcagagccaaggaccctgcatgtctggcctgaggtctgactggcagctggagcttgatggacaaagacagagctgaggtgggtcacataggggtttggttttctccaaagtccatctttctgtcctcaggtctggattactaatggaggactggccaatatttttactgtgtttgcaaagactgaggtcgttgattctgatggatcagtgaaagacaaaatcacagcattcatagtagaaagagactttggtggagtcactaatgggaaacccgaagataaattaggcattcggggctccaacagtaagtagctcctgtgcgcgcgtgcgcgtgtgtgtgtgtaagggggagactggcctttgacgktgtgtgtgtgtgtgtgtgtgtgtgtgtgtgtgtgtgtgtgtgtgtaagggggagactggcccttgactctgtccaaatagcaagataaaatgagatttaaacactttcagtttttgttaagcattttaaaaagatcaaattaagaatgccacttgggctttgtctttgttcctgcagctgagtgctgctcacttgaaggcctgctggtcatcccctgctgtagctgccctagcagacacaccaccttagagctcagcttacagtccccagcctttagttgtctcagtctgcagtgcctggcagcctgcttcaggctgtgagttgggttcaggtccatctgggttcaggtccatctggaggcttgttcttagagcagatcataagcacctaaggggccaagcc

SEQ ID NO: 548064 - DNA, 1126 bp, Homo sapiens
tgttgctgtttgttaaggagtctgtttctgcctctgtctccctctgtttcctttcctcctcctcaccaccctcccgccttttttcatttctttgtagaattaacaaataaatgttgtgtgtatttacatctacaacatgatgtttttatatatgtataccttaagaaatgattaaaccctttctttcttgaagaaatgcagttgtctggcggtggagcctgagctgtctgacaactttgggtgttctttcccccgcccccgcctccacctggccatccatgtcccttgggaaaatccttgctctggggaaagtgggctgagccctgtcctctattcactcatgcttggttggcttctgcagagccaaggaccctgcatgtctggcctgaggtctgactggcagctggagcttgatggacaaagacagagctgaggtgggtcacataggggtttggttttctccaaagtccatctttctgtcctcaggtctggattactaatggaggactggccaatatttttactgtgtttgcaaagactgaggtcgttgattctgatggatcagtgaaagacaaaatcacagcattcatagtagaaagagactttggtggagtcactaatgggaaacccgaagataaattaggcattcggggctccaacagtaagtagctcctgtgcgcgcgtgcgcgtgtgtgtgtgtaagggggagactggcctttgacggtgwgtgtgtgtgtgtgtgtgtgtgtgtgtgtgtgtgtgtgtgtgtaagggggagactggcccttgactctgtccaaatagcaagataaaatgagatttaaacactttcagtttttgttaagcattttaaaaagatcaaattaagaatgccacttgggctttgtctttgttcctgcagctgagtgctgctcacttgaaggcctgctggtcatcccctgctgtagctgccctagcagacacaccaccttagagctcagcttacagtccccagcctttagttgtctcagtctgcagtgcctggcagcctgcttcaggctgtgagttgggttcaggtccatctgggttcaggtccatctggaggcttgttcttagagcagatcataagcacctaaggggccaagcc

SEQ ID NO: 548065 - DNA, 1126 bp, Homo sapiens
tgttgctgtttgttaaggagtctgtttctgcctctgtctccctctgtttcctttcctcctcctcaccaccctcccgccttttttcatttctttgtagaattaacaaataaatgttgtgtgtatttacatctacaacatgatgtttttatatatgtataccttaagaaatgattaaaccctttctttcttgaagaaatgcagttgtctggcggtggagcctgagctgtctgacaactttgggtgttctttcccccgcccccgcctccacctggccatccatgtcccttgggaaaatccttgctctggggaaagtgggctgagccctgtcctctattcactcatgcttggttggcttctgcagagccaaggaccctgcatgtctggcctgaggtctgactggcagctggagcttgatggacaaagacagagctgaggtgggtcacataggggtttggttttctccaaagtccatctttctgtcctcaggtctggattactaatggaggactggccaatatttttactgtgtttgcaaagactgaggtcgttgattctgatggatcagtgaaagacaaaatcacagcattcatagtagaaagagactttggtggagtcactaatgggaaacccgaagataaattaggcattcggggctccaacagtaagtagctcctgtgcgcgcgtgcgcgtgtgtgtgtgtaagggggagactggcctttgacggtgtstgtgtgtgtgtgtgtgtgtgtgtgtgtgtgtgtgtgtgtgtaagggggagactggcccttgactctgtccaaatagcaagataaaatgagatttaaacactttcagtttttgttaagcattttaaaaagatcaaattaagaatgccacttgggctttgtctttgttcctgcagctgagtgctgctcacttgaaggcctgctggtcatcccctgctgtagctgccctagcagacacaccaccttagagctcagcttacagtccccagcctttagttgtctcagtctgcagtgcctggcagcctgcttcaggctgtgagttgggttcaggtccatctgggttcaggtccatctggaggcttgttcttagagcagatcataagcacctaaggggccaagcc

SEQ ID NO: 548066 - DNA, 1449 bp, Homo sapiens
ttgtgaaagggagaaaaaaaaaaaagcaactccccatcaaaaccaatacctagtctagagcctgatataagygccactcaaaacatgtttccttccattattcttctatagccaggtaactattcctaaaatagaagcccctgagaccactgagaagcattgcagtgtggagtgacaagggtctgagagccggtcttactgtcccttgtcccccaatcacagttaacatgaagccgaactccagagaagagccaggcccatagggcatttagattttactccaagtctaattcccagtccagtgctcctgcctccagcatctgcatttcctctgtccgcctggccgaggaaggggtgcgtggcagagtgcagagcatggggaaagaaagcgaggcccacgggtagccccaggagggcggtgcgatgcattcagctctcgccccctgcctgggtgcaggcctccaagtgggtcttcctgtttctccatcttctgaggcccaaagcttcctcagagcctccgtgggtcccacccccgcacccatcacacggtgtctgggccctgcctgcctggctcacatccccacccccacccgctgccctagttccatcctgggacagcccactgggcactgcggttccccctcttagaagactttcacaggccctgcctgtcccttttgccaatcaagtgaatgtcatctcctcagagaagccctcccttagcaccccatctgcagtagggtcacccccatcttccatcatcacttttcctggtgtttccttcctagcccctgtccctactgggagttctctgtactgatagaccagtctctctcgcgcaccagggggccagcgtgtctgtcttctctgtcccagcacactgaatgattatttgtgggcataaacgaaacgaaggcccccgaggagctgtggccctggtgcagccacgtcccggcgggcggcactgaggaaggacaagctccaaaacccagggctccaaaggacccatggaaggtcgggaggctcagaggagtgaccccgcggctgggccagcgctttgaggcccgtagggacccagctgatagggcttgggtgagacctccggaggcgctgagcgggccgggagccgcgggacctgcagagggcgccagtccgtgtgggggcagcagcgccagagggcccttggccttggcctttggcggttgagtgtgggtttttggcggttgagggcgggcagttggctgttgggcaccccgcccctgccgcctggccccgcccctgtctccatggagacccgaggctacccaaacggcatctcagccctgccaggcaatccaggactcccagctgagcctgcagcagggctcctcccgaggggctgtgcatgtttccccggggtggggctgaagccagagcccggaggtttgcccgtggggcacggatccccct

SEQ ID NO: 548067 - DNA, 1347 bp, Homo sapiens
ttatttctgaatttcttaatctaccaaataatagtacccacctcctaaacattcatgagtataaaactaaatgagataatatacatattaaaaataacaatctatcacatagtaggcactcagtgtaatttatcattaatattattctacaagtttccattggtccaaaataaaatatatatgtatgtatgtatatatatatatacgtgtgtgtgtgtggagatatatatatacatatatagatatttatactactacccctgctatttgaaataactaccatttgttatgtatttaatatcttgcaagcattttagaaggtgattcttatatattactaattttaacaatggcactctgaggctcagaggggtctgccaatttacccatgatcatactgctagaatgtgcaagaggcagaacataaacttaaatctatgtgattctaaatccagtgctatttccactaaaatgaagaacataatctgaaccaggttctctttgtctgctcctctcaaaatgtgaagttcagattttcaccacacatacatagtattccaggtaggaattctgcttgtctctcattccacaggcatgcccttacatcctatcctgaggtagaacattgttttcagaggagaaattccacctttttcatgaggctattgatactgccatgctgtcatttcaaagaagacggacttggagaaggcagtcaccacaaccctgttggacattagaattcctcactgatgtgaggaatctaaaatcaaaactagaaaaggtaatctactctcattgacctacagctgagaagatagagcagacttgcctcttaaaaaggtcggaaatgctgacccagcatctctcaggacagttatggaaaggagaaagtccattcaggccacagctacctgtcttctgtggcagtaaacatcgtttctattgcaacaaagggcacctagtatcaccccctactgagtaatcactaagaaagcaattctattaacaaaggccacaatgtcagtttcttacaagctagcctaagcattatgtataattaataactcctcctttatcttaaatcagattaataaagcaagtgtgtttttaaaacataaccaaccttgggatctgaataggacaggggtaggggaagtgtaatgtttaccaaccacactgctttcagagtctttgcatttacgtttatgctacttttctacaaagcgagtggaaaatagacacccttatttgaatactgattatatttacatggagtattcttaatttgttgtcagyagtggaaggttatatgcaagagaatataagttaccaataatttttaat

SEQ ID NO: 548068 - DNA, 2527 bp, Homo sapiens
tgaattcatttgggagaaagaagaataaaccaaacttgtaaaacaaatgcatatgctcttgttgcctgtcctaagatgaattccatctctatcaacatcctagaagatgtatttaaatttatatctgaaccagaaagcaaggaatgacatcatctgaggagcagagactagaaggatttcttggaggagagtaaacaaatggaatctaattaatgaagaaacctgatgatgccagttaaatgatgcccactcacactggtgagggtggatcatgtattttactcattctatggattcaaacgtttcttcattaattagattcttcactaatcaattagagtttcatcaatttcagctaatggttcactgagagagccactaaagaagtaaaagtcatatcttagaaaaaatagagcaattggttaaacacacacactggaaatgatgagattttgaggttctccccttctcactcattaatggaatgggcagctgcagaaagttctggaaatgtgctggtgttcagaagcaaggcagagactctgaatgcccagcatccagaggaaatgaggccaggccacctgcagcccgtcctgagtgctgggtcccacaggggctgagaaactcatacccatcaagaactgtgagatccagatatttggttacagaagtgacacacacgcaagtcaccacatgtatatcagaaaccaacacaaataagtaggaatatatttgaaatttaaattaagattagtatcttcaaagagatttgagaagatgggcaggtattaaaaaggtatttttaaaaaatcaatagataggctgaaaaacagcttttaaaaaaagaacaaagcaatgcaaaaaaacaaattagtaaattgaaagaagggaaagagtttttccaagaatcaagacaaaagggcaaagaagtagaaactacagcaacaacagcaaaacaaacaaacagcaacaaaacacaaaaatgaaattagctgcagaagtcccaattgccaaaaacatcccagagggcaagaatatgacagcctaatttatcttgtccaaaggaaacctgcactcataacaatatctatttctcttcagtcagtgattgtccctcccatattaagaatcctttaggcctaaaattaagatgaggggctaaaagccttcagaaagagggccaactataaaagtttctacgtgatctcacccctgcagattgaggtctccaggactgaatcactgtcaatgcatgggcatgcagcttctgttctttccaactgtgtctttccttgcttaagagtgcccacatgacccgcagtttatctgattgaattaaggcctatgaaacccaatatagtgtaactggctattctctgcttcatgctgaacttaccasctttgtggtaaataaaagaccactggaatctctgaaagaacaaactagaaatatccattttttataaaatattctgagacaaaaggaattctgggataagatggacatgataattatgaaatcagctttaacaattttcacgaaattttttctctctcagccaggcttggactggagtaattcttgacaccttggaatattaggtgaggtgtatttagggctgttcacatcccctgtgttacttttaaagttgccttcagtctccaacatagtcatggcttcttaaaggaggaagtgaagaggtgacggatgggcgctctgtcaacaatattccaaagctgctgtattagtcaggcctctctcagaaacagaaccatctgtctcctaatatctcctgttggtctgtttcctggaggtccctgactaacttgactaacgcagcaagtttggaagatagatagatagatagatagatagatagatagatagatagatagttaaaattagttcacaaggctgtggaggctgacagggccaagatctacaattagtaggcttgaaaccaaggaagagtcaatgtttcagttcaagcctgaatacaggaaaagatacccatctcaacagtcaggcaggagttgtccctcctactcagcctttttgttccatttggaccctcaatgtgttggatgatggccactcaaatcggtgacagtggatcatgtactttactcattctatggattcaaatacttatcttagccagaaacacactcacagacatatgcggaataatatttgaccaaatatctgggcacctggagcccagtcaagctgacataaaattaaccatcatatgtactgtcttcatccatttcgtgctgctatagcagaatacataaaactgggtaatttataaagaatataaaattattctttcacaattctggaggctgggaagttcaatatgaaggtattgcagattatgacccagtttctctgcttccaaggtggcaccttgatccctgactcctttggagaggaggatcattgtgttttcacatagtagaagagtgggagagagagaactcactcctgaaagcccttgttatggcaatgctatggtttgaa

SEQ ID NO: 548069 - DNA, 2328 bp, Homo sapiens
ctcctgccacttattcttcaccatgatgtgttcatgtttttctgcctccctagactttaagggtgtgtgagcagagaccattttgcattcactgcagaagaggaagacgatgtaaagatggatgagcccagtcaccagggtaccatgggtctcaggctggcagctatgagccagagtgcttcactagctcagcaaatatttacacagttcctacaatgtgccagctgcctttatcctaagtgctgggagtacaacagtgaacacagcaaagtctgcaccccagttgggaggaactcatgatcacatgtgaaagaaagcatgtcagcagataggacacagagaggaagtggatggaatggggccttgatggatgctcagacatgaagacagacacctccttgactgacacagaaagaaggccgagctcatctgcaataaaaacaccaacaaagaaaatgcgaaggtcacggaaggattataagtttgcatctgtccgtccgaggtggcagcagagccactgagtccaggaccaggacttggtgtccttgagctggagagtgagcagtgagggacagagtcagcctgctgccaccatcccaccctgacagagagtgcccctccatggaaacaaagggtgtgtgcttgaccccaggtgggaagaggcagaatcaagcagattaaaaagtccttgggagcagaattcctgcacttggcttctgtcccagacttacttctaagttgggccactttcaaccaggcgcatgaatccacatcaagagaccagggaattccccttaaagagcatgctaaacatatttttctacctgacacccagagccttctccaaatagccagcatctctacgtcaggaactgctgggcttcagcatgagtggggattcaagctctgggctcactgcagtctggcatcacatccaagccccacccacacccagctcatctcagctgcccagcgctcactacctcagctgactcaagccctcttccagagacaatgcatcccttaaatgagacagccaggtgggaaggggcccccagagaaactccaaccagtctgtgcactagagtggagccacagaagttctgtgctgtttgcagcagggagaagcctggcccctcctcttcctgggtggaacctgggattcaatctgtgaggtgggaagcgcacaggcaaaaagcacactctcttgcttcactaagagtctctgttaccccttttttccctttttgcccaataaatcccatttttctcactcttcaaatcatctacgagcctaaattttcctggctgtgtgacaaggaccctgtctttaattgagctaaggaaaagtctcgcaacattaacattccttccaaatgtgcctgtggctttgtacacttctgtttctcttgccatgatatctcttgtgcctaactctgtctrgcaggtagtaagtgtttaataaatagctaagaaaaaaaaattaaaaggaagggagaggagaaggagggatgacaagctcactagcattcaaataaagtcacaacaaggacttggtggggtggtgtaaggatccaagcccattggataaatggatacaagatacgaatgttcccttccagcctcatttgttacatctttgacttaagccctaagtgttgagcatttttctggcactcccctggagaatcgcctgcagattcggttacatggtggattcagcagactccacacactgagctctgtgccagggcctggctgttttctggctcaatcctctcagcagccctagaagtggagtttggtactcctgctgtggagatgaggaaacaagactctgaaaatttaggagatggccccaacctggcagctagtggcacctagcactgagctccatcttgccctctgggcccagaactcctttggtgcctgtggtgtgcctgcgattgccttgtgaggtggggcttactgtgtagaaagagccaaaagtattcagcaagagatctatggtccagcatggtgactatacttaataacaacatactgtgcactccaacattactgacagagtagatttgaaaagctttcaccacaaataaatgacaactatgtaagctaacgtatatgctaattagctgaatttagcacttccacagtgtgtacatatttcaaaacatggttttgtacaccataaatatatacaattttacttgtcaaataaaaaataagtagtaagaacaaaagttttaagaactgtcgtaaaatgaaatcaagccatttctgctaccggacagactcgccttccaggctccatgcctcttctttcct

SEQ ID NO: 548070 - DNA, 1323 bp, Homo sapiens
gagttgtgggattcaattcaaacgagacacaaaggataaagaaacactaagaaaatatgcataaaaaagacatatattaaaatgaaaatctgttgagtcataactgtaacacatctttagaggtggcagctttacaatcaaataaataatattttgacactttccataacwttatgtttaatctcctttcaattacatccatctgaccgtctttccaggtactttgaatcacaattcacgtgtcagaactttattttgttctaaagaatgaatttcaagaaaaaaaatccttatgtttcattcgtatatcatgaaatgggcattcaacacttttcttgatttgtatggttagctgaaatggataaatcagacacatatgatactggtccaattaaagtgaatgtgcacaaactaccttttaaagttttgggtagtcattataaattgatctggatgttaaaattcactcaaaaatttcaaagaatttcttgtgaatcaaaaatatcttgaaagtcaaaagattaggagaaatacatttactgtgatttaaaagaacactcgatccatttttaaaatatttagtaatatataatttattatttcactcatctgtctcagtataaggaatttggtgacatttctatttatgcttttagaggaaacatctgattctaaggttcaaagcgtgagactgtaaggcttttacaaacacagaaattaatgaggaaggtcaccatgcagtctataactatcacagacattttttaatgcaacaatttactggattagctatcagaaagtcaaggaggtgattcactaccatacatgaaaataaagtataaaatactggttttgacagtgcaactacacttttatagctgttttgtcagtttctcacaaatttcctcaaatggacatatcattacttgaatagtaatcagcaatttattttcaggggtttttttgcaataaaaagaaatgccttcactcataaaacataatgaagagaaaggcactttatttaagaatagaggaatgcattatgcctcttgaatatatagtacattatttataatctactgctgcagttactgttgtatatcctgctatggaactgtatgaagagagatgagcattgcttgcattttgttttccttgcacttggattgatctcttactttttaaaccttattttggttcatagagtaattaagactaaataattaaatagaataaaacagttaaaattataatacatacacatacatatgttgcttgtatatatattttactacagttaaggacaactttaattatcatagc

SEQ ID NO: 548071 - DNA, 1323 bp, Homo sapiens
gagttgtgggattcaattcaaacgagacacaaaggataaagaaacactaagaaaatatgcataaaaaagacatatattaaaatgaaaatctgttgagtcataactgtaacacatctttagaggtggcagctttacaatcaaataaataatattttgacactttccataacattatgtttaatctcctttcaattacatccatctgaccgtctttccaggtactttgaatcacaattcacgtgtcagaactttattttgttctaaagaatgaatttcaagaaaaaaaatccttatgtttcattcgtatatcatgaaatgggcattcaacacttttcttgatttgtatggttagctgaaatggataaatcagacacatatgatactggtccaattaaagtgaatgtgcacaaactaccttttaaagttttgggtagtcattataaattgatctggatgttaaaattcactcaaaaatttcaaagaatttcttgtgaatcaaaaatatcttgaaagtcaaaagattaggagaaatacatttactgtgatttaaaagaacactcgatccatttttaaaatatttagtaatatataatttattatttcactcatctgtctcagtataaggaatttggtgacatttctatttatgcttttagaggaaacatctgattctaaggttcaaagcgtgagactgtaaggcttttacaaacacagaaattaatgaggaaggtcaccatgcagtctataactatcacagacattttttaatgcaacaatttactggattagctatcagaaagtcaaggaggtgattcactaccatacatgaaaataaagtataaaatactggttttgacagtgcaactacacttttatagctgttttgtcagtttctcacaaatttcctcaaatggacatatcattacttgaatagtaatcagcaatttattttcaggggtttttttgcaataaaaagaratgccttcactcataaaacataatgaagagaaaggcactttatttaagaatagaggaatgcattatgcctcttgaatatatagtacattatttataatctactgctgcagttactgttgtatatcctgctatggaactgtatgaagagagatgagcattgcttgcattttgttttccttgcacttggattgatctcttactttttaaaccttattttggttcatagagtaattaagactaaataattaaatagaataaaacagttaaaattataatacatacacatacatatgttgcttgtatatatattttactacagttaaggacaactttaattatcatagc

SEQ ID NO: 548072 - DNA, 1323 bp, Homo sapiens
gagttgtgggattcaattcaaacgagacacaaaggataaagaaacactaagaaaatatgcataaaaaagacatatattaaaatgaaaatctgttgagtcataactgtaacacatctttagaggtggcagctttacaatcaaataaataatattttgacactttccataacattatgtttaatctcctttcaattacatccatctgaccgtctttccaggtactttgaatcacaattcacgtgtcagaactttattttgttctaaagaatgaatttcaagaaaaaaaatccttatgtttcattcgtatatcatgaaatgggcattcaacacttttcttgatttgtatggttagctgaaatggataaatcagacacatatgatactggtccaattaaagtgaatgtgcacaaactaccttttaaagttttgggtagtcattataaattgatctggatgttaaaattcactcaaaaatttcaaagaatttcttgtgaatcaaaaatatcttgaaagtcaaaagattaggagaaatacatttactgtgatttaaaagaacactcgatccatttttaaaatatttagtaatatataatttattatttcactcatctgtctcagtataaggaatttggtgacatttctatttatgcttttagaggaaacatctgattctaaggttcaaagcgtgagactgtaaggcttttacaaacacagaaattaatgaggaaggtcaccatgcagtctataactatcacagacattttttaatgcaacaatttactggattagctatcagaaagtcaaggaggtgattcactaccatacatgaaaataaagtataaaatactggttttgacagtgcaactacacttttatagctgttttgtcagtttctcacaaatttcctcaaatggacatatcattacttgaatagtaatcagcaatttattttcaggggtttttttgcaataaaaagaaatgccttcactcataaaacataatgaagagaaaggcactttatttaagaatagaggaatgcattatgcctcttgaatatatagtacattatttataatctactgctgcagttactgttgtatatcctgctatggaactgtatgaagagagatgagcattgcttgcattttgttttccttgcacttggattgatctcttactttttaaamcttattttggttcatagagtaattaagactaaataattaaatagaataaaacagttaaaattataatacatacacatacatatgttgcttgtatatatattttactacagttaaggacaactttaattatcatagc

SEQ ID NO: 548073 - DNA, 686 bp, Homo sapiens
atggtcagaattagagaggagaggaatacatccatttctacaccattttattcctttcataaactctgagaacagattaaataatccatgtaggtatacattgttccctgtcagcatcatgttgtctttctttcatctcttaaaaggtcttgacaaagttatcctggcacacaatattakacctacagcatttaattatcttttatcacctgccaggctcctacactgttttgcagcattcattcattcattcaacagttaatagcatattatgtgtcaaacactgctcagtagtgggaataaacagcagttcacaaaacataatataatctttgtcctcatgaagcttactgaagagttcctatgaaagataaatattaaatgaatacacatgtaggcaattcattaattacaaataaggttagccaacagtcatcattaaaagagaatagctggagacctgccctatggaagtctagtgaaccatcaactctatacctaatggacggcaactggagacgactttcttgtctccacattccctgtcactgacatcatcccctcagtaaaacacaacaataggatatagctgatgatgcttggctagggcaataagtgttcgtgtagagttaatgaaataatcatattgctacctgacaacttttctgactccataacactgtact

SEQ ID NO: 548074 - DNA, 658 bp, Homo sapiens
tcttttatgccattattacataagaagatcaagaaaactttatggattaaagatttgcttagtcataccattctcctcagaaataccttgcatattttccctgacctcaggagaagggtgacaaagaattggaagactcagaaagaagttgcgtatgaaagaaatgaaagataccttgtgttattgtagttaataaagaagcaatttaaaagttatctatctgcaaatcatcttccagttcatgcacattgactggcttggggtaaggctactcaatgttagagtttgtaaatgcttttgcaaatagataagagagatttttaattaagatattaagtagtcacaaaagaagaaagaaattatggyattcactgaattattgcttccatgattttaatttgatttctatatcctctttcacagatattaaaaaggttaatttcaccagattcctttagcaggttaagctgttaaaaatttagaattattgtacttcaggtaaatgaggttttggtatagcaagtttaaactcttttgtacatgtataaagcgcaattgccacttgcaattttaaaagcctactttttttgtcatgatttatttttcattcctcttcagtaagtggttttttggggctttaatttaacttatgcttaaa

SEQ ID NO: 548075 - DNA, 406 bp, Homo sapiens
cccaggctgaagtgcagtggcatgttcatagatcactgtgatatcaaactcctgggctcaagctatcctcccagtttagtataccgagtagctaggagtataggcatatgccaccctgcctggctaacctttttaaattttttgtaaagatggggtcttactatgttgtctcaagcaatcctcctgccttggcctcccaaattgmtaggattacaggtgtgaaccaccccacctggccaggccaatagtcttgatgtgggtctatcaattatcaactttcctaaaatgatgtcagcattttttggttgtccaaacgatttcttttcattcagaaacttttttgcaaattaactatacagacacaatctaaattgtaatctgagtcatcaccacccaccagcgaact

SEQ ID NO: 548076 - DNA, 531 bp, Homo sapiens
aacaagaattgatcacgtaaggcatgaataacagggcatgtgaattgtacttaggttttaacattggctaaatgttcttagagttacagccatagtttcttccccccataagtgaacaactttagagatcatttagttcaattcccttgttttacagactgttttrgtttcattgcttgagcagaaacttataatatatgcttccatgtggttactacccatatattttaaaaagacatgtttgtttagttctccttcactatattgtggctatttttgaaaggtacataaatagagaaaccattagaactattatggagtggtccagcttgcttatgaatacatttcatcatgtaatcaatcacaagatttaaaaatagttggcatttacatggaaaggttcataaaatgcttcatgaatgaaggcctcatttatttctaaaatgcattcatggttattgagttccatcataagtaatagtgggaatggaaattgtggaatctcaaatctattgtttttcaattttcaac

SEQ ID NO: 548077 - DNA, 587 bp, Homo sapiens
aatctacacctgggcaaatccaccctttataaaagctgaatatcaacccaaatgaatggcttcctttactgccaacaaacttttgggtgaggttctatggcttatttccctacctgcaaattgccactttttctagaaaagagccaccgctgccctctgagtcaggctgtgagtctaggtccccaacatcacatcacagaggaggggtgctgcccgcatccctgatatagtcagatgtggttcccacagcacctgcctgcactccaccgtgacggtgcctgtgtgcgcctttgtcctgatgccccatcacagctcttctgtgatcaaagcacaaatcattctctccacagttccaggtcccagctaccaattacactggcacamcatacattgcaaatacttttgaaaaagaaaataaacttttaatctaagaaacacaagcctcctttaaagtatcaggcctagagagacaccgaaatgagcccgcaatcacgtcccccaacttgggctaatcatttcaaagccacttgctctacggactctagattgagtgtcaccaccaatagccataaattatcctaacaatg

SEQ ID NO: 548078 - DNA, 555 bp, Homo sapiens
agacaaatgcatctatctgtggctggtgcactgacggcttctcttgagttaatgcgtcacctctggtatccatcagtgttcttagtctcatgcaactgaagacggttctgtctgatttaagtagcttacgcatttagtaagagaatattagtaagctctggactctcgggaaggctgaggaacaggcttggaaaatgggcaggaacagaagatgctgtgtagcaattgggaccagctggtctcgaactcctgacctcagcccaaaccatgccatgagcagtaactgtgggagcatggctgcagccacccctgccaccttctgctgaaataaatgctccccaaattctgctgcatcgccagctcctgaccgtggtcatgtgcccctgccctgagtacaagaaggactggcacggcaatgctgtaccccttggcgaggtgtctatggcagaagataggctccgtgtcctccaaattcttatgagggggcagagttcttgaaacctaagaaaggaagtgagacrttgagcaaacaaaatgaatgaaaagtaagtcccg

SEQ ID NO: 548079 - DNA, 1179 bp, Homo sapiens
tgtcctactgagtccctgtcccaacctttctaattaactattttctgtattccattcttctcttcacaattgattgaatagacagcactggctgtctctttcttagagctcagagtaatctactccttagagctccagccctcaaccctcctcccacctgcaggccacttgccccttttcccccttggccaggagaagtggggttgagggtgaggggaagcagaaagagctacagataatctaattattactattactgccatggtagccacaactgactttgtgggtttttttgttcatttgttttttgttttgttttgtttgtttgtttgttttaccagcatacaagttattttgcatgaaactttccaatagttggccaagaaactatggataccagaaagcagcctcagttaaaggctttctcaattttttaggaagtatattaccaagctgaattcaaggaatatggtaatattccttatgactatggttatggtgggcacctccattttcacacttatctggcagttgtaaacaatgcatcttgttcaccagaaagaatcctctagttatatacaaggcagttagtgctggtggtcaaatgaacaatgcaaccagtagagcctacaagtgttcagaggaagactgcactgtgaattcaagaaatctaamattcttaatggagaaggtatagattaaaagtcttattttcacaaattagaatagaattataagtctgtcctgtaactcaacagcagagaacctttaaatctcaaggaatatttttctatatggaaccatatctttttttaattgccttccaaaacccagattttattatgtgtttctatctttataaactttttaaaggtcatttagaataatttccactatgcccaatgcttgtacttttatgtctgtttgtttgtttttttaactcatcgctcttttatttttcctaaatcttttaattggctccctggtttcttaacagttaattaattcattgcaaaataacagatatatgctttgataccaggatggtttggctacacatatgatcgcctagctggaaatctgctgcccagtctctgaatccctttgcctctttctctgtattttgtttggcaattagtactttccccctgggtttcagggctataattagtattctca

SEQ ID NO: 548080 - DNA, 659 bp, Homo sapiens
tctcctgcctcagctccccaagtggctgggattactggtgcgtaccaccacgcccaggtaatttttgtatgtttagtagagatggggtttcgctatgttgcccatgctggtctcaaactcctggcctcaagtgatctgcccaccttgacctcccaaagtgctgagattacaggcatgacccactgtacccggccagctattggcttttaaacttcttttgactgcttgtctaccaaaggccttattataatatcatcatatatttactcctaagggcatgagagtggtcttttcttgtttggttttccaatttaatttaataggaaaacttatctcggtttaattatgtaaatgttaaatatgtgtgattttctctctaaatatatttgaatacatcagtgacaagtacatttttatrtatcttacaaatgaataaaaggaaaaagaaaatcttccaagcaactccaatagttctctataagtgctaatatatgaatgttagttgatagaaaaagcagtattaacaggaagaaagtaatttattagttaatttgctttccaaaactaaaactgtaataagagggctcttgcttagaaaaggaatgttgaaaacaacctcatatgctacacattgcactaagtattcctccagagaaaaa

SEQ ID NO: 548081 - DNA, 1235 bp, Homo sapiens
aaaaacaacccaattaaatcagatgaagaataaacagacttctcagcagagatacttcaactgagctagtataatatgctgcccattataaagtagtctcttacagatattgattacattattcttttctactgttgtaactgagttagaaaaatataattcagcatcttatactctctgtaaagaaatattttttcattccatttgtgtcctccagataatgcaatagtatgtctattataagagtattttattatttttgttatttcttttttaaaaagacctcatcaattaatagttaatcataattgatttatacatctgagaaaacagaatagtttaattggaatgttggcatatggcacaacaaagttttactatcatttatgtagccattataaagtgatttttggattgttagacttacaaatttaaaaaatgcaatcaatgagtgtgagaatggtaaaataagggtttcattaaaaaattaatgtaagttattttaatgaattatccttttcttgagaaagattttcataaaccttattaagtagttgaatcaggaaatatgattactgagcagctgcaattcagaaaattaggtgagtgctcaggttcttgaaccagtgtgtgatgggttagggcagatgaattgaaaacttctcagaatcagggtcctgactcaggagaaggggaaagcaggaagcagaaagaaggggcaggccctgagcatcctatacccttggctgagacatgttttcatctcattccttccaggcctgctaaactgttaacctaccacccaacagagctcttttgtagactagtaattctatctaagctctcactggtaattaaatgcagaattagaatagagaagaaaaagtcaatatttacaaagaatagmagtgatatgctaattaatattgggtcatatctgaggatatttatgggaatgagttttgaggtggctcaactaaggaaatgtgaacatattttagatgagaataagtgcttccataagtgttttaatcatagaggctacattcaatgtgttagttctaatgagcatgaattataacaatggtctaggttgttgtgcaaacttaaacctattattgaaccatgtgaaagcagattatccatcagaaatctactggtatgatatagaagcaggaattcaaaggcttcagggcatggaaagacagaacaggtctcattttgagtatggcatg

SEQ ID NO: 548082 - DNA, 924 bp, Homo sapiens
ttatctgtattattgggcaaaaccattcaacaagtctatatggagtttcaaactttcccacatttttccaccttcttctgagccctccaaactgtkccaacctttgcctgtgacccacttccaaagtcacttccacatctctgggtatctttttagcaatgccccactctactgggaccaatctactgtattagttcgttttcacactgctaataaagacatacctgagattgggaagaaaaagggacttacagtttcacatggctggggaggcctcacaatcgtggaggacataatgaggagcaagtcacatcttacatggatggtggcaggcaaagagagagacagcttgtacagagaaactctctttttttaaaaccatcaagtctcttgagactcattcactatcatgagaacagtacaggaaacacccgcccccataattcaatcacctctcaccaggcacctcccatgatatgtgggaattgtgtgagttacaattcaagatgagatttgggtggggacacagccaaaccatatcactcttctttgttgtccatagatgtataagctagcaaatattattcttcatcttgttttgagattgtgtgtctatacatttttaatatgccactgtggttaatattattttatttcaacatgcttgatagatgtggtttataatccattataactttaaaatgttgctagattttgctcacattattttgtttacaatttttacaacattaatgggaaagattggcctatcattttcacttctattactgtcatatttttcatattaacttcaggctaaaattgttgcaccaaaaaatcacccaatatttattttctgaggaattgtataaaattaagaaaatttgttataataagttttggtaaaacatacgtctaaaatca

SEQ ID NO: 548083 - DNA, 924 bp, Homo sapiens
ttatctgtattattgggcaaaaccattcaacaagtctatatggagtttcaaactttcccacatttttccaccttcttctgagccctccaaactgtgccaacctttgcctgtgacccacttccaaagtcacttccacatctctgggtatctttttagcaatgccccactctactgggaccaatctactgtattagttcgttttcacactgctaataaagacatacctgagattgggaagaaaaagggacttacagtttcacatggctggggaggcctcacaatcgtggaggacataatgaggagcaagtcacatcttacatggatggtggcaggcaaagagagagacagcttgtacagagaaactctctttttttaaaaccatcaagtctcttgagactcattcactatcatgagaacagtacaggaaacacccgcccccataattcaatcacctctcaccaggcacctcccatgatatgtgggaattgtgtgagttacaattcaagatgagatttgggtggggacacagccaaaccatatcactcttctttrttgtccatagatgtataagctagcaaatattattcttcatcttgttttgagattgtgtgtctatacatttttaatatgccactgtggttaatattattttatttcaacatgcttgatagatgtggtttataatccattataactttaaaatgttgctagattttgctcacattattttgtttacaatttttacaacattaatgggaaagattggcctatcattttcacttctattactgtcatatttttcatattaacttcaggctaaaattgttgcaccaaaaaatcacccaatatttattttctgaggaattgtataaaattaagaaaatttgttataataagttttggtaaaacatacgtctaaaatca

SEQ ID NO: 548084 - DNA, 542 bp, Homo sapiens
atagtgaagagcgaggtaccttattttataaatgccataagcaacataaaatcacccatgtacaaatataagacctttcacatgaatttgatggtgattatatgttgaaaccataataactctagatctcagtgactgtacttatcttcaaacacttagctaaatctggaacagatgaatatctgaagtttgaagctgtacgccccaggttattatttttatatcaacaagaatataagaaaatgtacattaacttttaaaaatagcttttaaatattctaagctttagtgcactttttttccaaagcccgcataagagataycataatctaacattaacatcttgcatttttaactgtccttgtaaatttattataagaacactacttggaaaacagtattttcaaaaggtattatatttactaaaataatgcctttgcccctttggtctctgaacagcagtgcacatctttgtattcttcttaactggactgatagtagtagatacataagacaagttataatttttgagattgtagcca

SEQ ID NO: 548085 - DNA, 1384 bp, Homo sapiens
ttttgtctctaatacatttctccccaagttgatagatgcagcagtaaccaatagtaaaatagtcatccatacaattcatcttcttacagagaatcatgactttacaaacacagacttacaatctatcgggaaagaagaaggctgtttttagagagcaagccccttgtaaacctgactttgttgtaaagtactgttctttttatataatgttaaatttgatgtgcttaaattttattaaacatttttatatctgggttttttgttttgttttgtttgagacagagccttgctctatcacccaggctggagtgcaatggcatgatcatgactgactgcagcctatgactgcagcctagagaacttctgagctcaagtgattctcctgcctcagcctcctaaataactaggactacaggtgtacatcaccacacccagctcattttttaaaaatttgttttgtagagacaaggtcttactatgttgcccaggctggtctcaaactcctaggctcaaatgatccttctccttcagcttcccaaagtcctggtattacagacataagcctctgagcctggcccattgttctctttttgtaaataaagaaactaagcctctgaactaagtaatgatgaccttaggggatgcaccaggcctctgattccctttttgctgagtgctgctctgagttatcagggtgaaaactatctgataaggaatctatttagccaaggtattggtgattcaaaagtgttaaatatgcttctcccaagggtttttgtattttttaaaaagatcagtagagcaataactaagccagtgaaataactaaacctttaactgtgtaatttcagtcatagtcaatggagactgttgggacagggtgggcagaagatgggaaaggagagggcaattggccagttgccaatcacaccctgtaaggaatgagcttctccattcacatgcaaagctagcattgtcaaaaaaaaaacccatcagctgaggatttttttgtattgtggtaaatcctttaaattgcaagcacaagttattaattttatttacattttaaaatgtatatttatgacagaaaatccacctttaaattaawggtattgatatccattaggtctgatgcagatttccaaattttatttatcagtaaataatatagcatcagctttttgagaacagatacagaagacgaagtgcccatatttattaaatgaaagtaaattatcattctaaaagcaaggtttgagcaacgttctcgctggtttggttttgcagatatttatggactctaagtgggaattgaggtcttataagcaaagcaggaaaagtcaattgacctgagcttccataacttttttaactcaggcttgtt

SEQ ID NO: 548086 - DNA, 1628 bp, Homo sapiens
gttgaatgtgtggtgttttgttatgtaggattagaaaaagtatgcattttggttatataatttttgaagcatctgcactgcttgttatgtaccctgcctttgtcaataattgcattactggtactaggagttgtttacttgtatcttcttaagtacctgctgttgaaagttagcagaaattgcaagctaatttttggaaaggtgtggtaaattagagaagttataatatgtatttaacatctgaagtagaaagagaaaagataaactgaaattggccattagaacccaaaaatatgttaagaattattatcggccaggcacagtggctcatgcctgtaatcccagcactttgggaggccgagacgggtggatcatgaagtcaggagttcgagaccagcctgaccaacatggtgaaacccggactctactaaaattacaaaaagtagcygggtgtggtggcatgcacctgtaatcccaactactcaggaagctgaggcaggataatcacttgaccagggaggaggaggttgcagtgagccaagattgcaccactgcactccagcctgggtgacagagcgagactctgtctcaaaagaaaagcaaacaaaacacacacacacacacacacacacacacacacacacacacacgagaattattatcaaaatctttcagtcagtcttctaataaaaaaaaagaaaaaattgtgggagctatttgtgggaaagacaaaaatgacagtcactagccttcatgtgtcatccaggagaaaataatatgaattacaaaaataaggcactttacaataagaaatttaaaactcgaaagatgtttcaaaccttagagaatgagatcgattttaagcacactttgaaagagaggtttaacttatttgttgaggaatagacaaagcatgggtatatattagcatcatctaatagatagatgatggctcatgaagtagttgtcagtggctgtggtctcaggaagggacatttgaagctataaaaaaagaaggcttgtacaaagcagtagttttgaataattatgaccagagcatcaaattttttgtttttcacagactgtatatgtatttttttttcatggacctctcacttcattccattttctgccatatgtttttcaatattatgtgctttaatatttacttatttctttttttaattcatccagtgatacatagaactcgttctatgaattactatgtgaccttattaagccacaattttttgtctgtaaaaactagcaatagtgcttagatttttaagtaagaattaaaggaaaaataaatgcatgttacaaaaggaacagaattaacaatgactggtatacatactacattagagaaaaatgacacagataatccataaaataagcagttggcacctaaataaaccagaagttactgtattattttatcagatcctgttgtaataataatagtgcatcttatataagtgaggtagtgtttttattcaattattatactgtccaaggtaaatataaatcaaaatagtagaagacacaatgaaaactttctttagatatcaggtgtatcttctgaaactttttatttatttagttgttttgtgccccaccataagaaa

SEQ ID NO: 548087 - DNA, 1628 bp, Homo sapiens
gttgaatgtgtggtgttttgttatgtaggattagaaaaagtatgcattttggttatataatttttgaagcatctgcactgcttgttatgtaccctgcctttgtcaataattgcattactggtactaggagttgtttacttgtatcttcttaagtacctgctgttgaaagttagcagaaattgcaagctaatttttggaaaggtgtggtaaattagagaagttataatatgtatttaacatctgaagtagaaagagaaaagataaactgaaattggccattagaacccaaaaatatgttaagaattattatcggccaggcacagtggctcatgcctgtaatcccagcactttgggaggccgagacgggtggatcatgaagtcaggagttcgagaccagcctgaccaacatggtgaaacccggactctactaaaattacaaaaagtagccgggtgtggtggcatgcacctgtaatcccaactactcaggaagctgaggcaggataatcacttgaccagggaggaggaggttgcagtgagccaagattgcaccactgcactccagcctgggtgacagagcgagactctgtctcaaaagaaaagcaaacaaaacacacacacacacacacacacacacacacacacacacacacgagaattattatcaaaatctttcagtcagtcttctaataaaaaaaaagaaaaaattgtgggagctatttgtgggaaagacaaaaatgacagtcactagccttcatgtgtcatccaggagaaaataatatgaattacaaaaataaggcactttacaataagaaatttaaaactcgaaagatgtttcaaaccttagagaatgagatcgattttaagcacactttgaaagagaggtttaacttatttgttgaggaatagacaaagcatgggtatatattagcatcatctaatagatagatgatggctcatgaagtagttgtcagtggctgtggtctcaggaagggacatttgaagctataaaaaaagaaggcttgtacaaagcagyagttttgaataattatgaccagagcatcaaattttttgtttttcacagactgtatatgtatttttttttcatggacctctcacttcattccattttctgccatatgtttttcaatattatgtgctttaatatttacttatttctttttttaattcatccagtgatacatagaactcgttctatgaattactatgtgaccttattaagccacaattttttgtctgtaaaaactagcaatagtgcttagatttttaagtaagaattaaaggaaaaataaatgcatgttacaaaaggaacagaattaacaatgactggtatacatactacattagagaaaaatgacacagataatccataaaataagcagttggcacctaaataaaccagaagttactgtattattttatcagatcctgttgtaataataatagtgcatcttatataagtgaggtagtgtttttattcaattattatactgtccaaggtaaatataaatcaaaatagtagaagacacaatgaaaactttctttagatatcaggtgtatcttctgaaactttttatttatttagttgttttgtgccccaccataagaaa

SEQ ID NO: 548088 - DNA, 600 bp, Homo sapiens
ttacagttcaaggtgagatttgagtggggacacagagccaagccatattaattacattaattttccaatgttaaacacagcttgctttcttgtgataaatactgtgtcataatatattctctttattataaacgccagattatatttgctcatattttgttactgttggttaaatctatatttaggggaaaattgagttttgtttcctgtccctataccaaatttctttcggattttatattatgatttttctaatattagaatataggttaaaaactgttcaattttctggattttctgaaattgtttgtataaaattatcacttaattcttgaaaagcttaacatttagtataaaattgttctggctgctagtgtcataccagaggcgtggtaaaaatagatacacgcaaaagtttttcactgggatacacttgaaaagcagttgaaagtaatactaaagactaagtgtctcaacatatacggaacttatgaatgagagtataagcaagaaattacgccatcagaaatacattttccartatataatcgggaagtattgtaaccagcaaaaatgaaacatagattgaaaaaataaaga

SEQ ID NO: 548089 - DNA, 962 bp, Homo sapiens
gtaataggaagtgagttctcagggagacacagaagcattgcagaagtgtatatcattcataacttcagatttagtaattgataagatcctgtgtataagrggagaaatatctccaaagagattaaaataatagcattctgcttgtgcttgagtggtgaggatacatgtgatttaaatatttgtctttccttctttagttttccagatatttgtaatgtttatgtgtttttttataatgaccagtgaaagcatgatgtagtcttattaatttcagactaattaagtaagatggatgcttttgtatcttttccctttatttcagactgtaatgcaaatgtgcacaaaggttgtaaagatgctgcgcctgcatgcaccaaggtaattgctcagtgatctgtgaatatatatgtagcatggttgcttcatagtatctatttgagcttttactcttttttgttaccatctagatttatttctaaagcgatcatgatagcgataacataacatatgctcaaagtgtatagttatttgcttaactgtacactgttagaaatagaaggaaagctcaagtccagatatttgtgttatatgctgtggctaggttaggctttctgttgagacctgcttggtttaccagtgcaagccctgggtacctgcaaatgaagatcagagtagtaagtcacaaatgtctgcaagcctcacagtcactggaagacctgtgactacacagatttctgggccccaattccagaatttctgattccatagatctgaggtagggcctgagaatgtgcatttctaacaagtttgcaggtgatgatattgctgctggtcctgagacctcagtttgagaaccactggactagaagaatgttctctgtagttgggaatgggcttgagtagatgaaggtgtctgtgattctattcctttcttttccactcagtagtcatgtcacagatgc

SEQ ID NO: 548090 - DNA, 962 bp, Homo sapiens
gtaataggaagtgagttctcagggagacacagaagcattgcagaagtgtatatcattcataacttcagatttagtaattgataagatcctgtgtataagaggagaaatatctccaaagagattaaaataatagcattctgcttgtgcttgagtggtgaggatacatgtgatttaaatatttgtctttccttctttagttttccagatatttgtaatgtttatgtgtttttttataatgaccagtgaaagcatgatgtagtcttattaatttcagactaattaagtaagatggatgcttttgtatcttttccctttatttcagactgtaatgcaaatgtgcacaaaggttgtaaagatgctgcgcctgcatgcaccaaggtaattgctcagtgatctgtgaatatatatgtagcatggttgcttcatagtatctatttgagcttttactcttttttrttaccatctagatttatttctaaagcgatcatgatagcgataacataacatatgctcaaagtgtatagttatttgcttaactgtacactgttagaaatagaaggaaagctcaagtccagatatttgtgttatatgctgtggctaggttaggctttctgttgagacctgcttggtttaccagtgcaagccctgggtacctgcaaatgaagatcagagtagtaagtcacaaatgtctgcaagcctcacagtcactggaagacctgtgactacacagatttctgggccccaattccagaatttctgattccatagatctgaggtagggcctgagaatgtgcatttctaacaagtttgcaggtgatgatattgctgctggtcctgagacctcagtttgagaaccactggactagaagaatgttctctgtagttgggaatgggcttgagtagatgaaggtgtctgtgattctattcctttcttttccactcagtagtcatgtcacagatgc

SEQ ID NO: 548091 - DNA, 545 bp, Homo sapiens
actgtggttattatcctctgctccgctggtccttggtgaatcctgagattggtgaatcctgagacaggaagtctatattttcttggaactgaaagtagggcagccctccttccacagcagcacaagcccagctcctgcagaaactggaaaattctgtttagaggctgcatgcagaagtgccgcgccaaacaacagcaacagcctccacccactcacttgatctgacttcctaataatayactctttggatcaaggtggggaataagtggagaagcattgaatcgctcattcgattctcacagagactgtagcaaggcaggacaaggtctaactgaatacactcagattctcctatttcccattgttttccattaaaagaaaaaaaggtataggtcattttatagtgagaataaacaacatgccacagtaagcgtttcacatattcgttcatgaatcagagaagctgcttcccgtgtgtgtcattgtctaaactgagggtccctggaataacaagaaaagtgttgttcagggattggggcttgggg

SEQ ID NO: 548092 - DNA, 1490 bp, Homo sapiens
tgaattttcaaattattgaatactaattttctctttctctgctgtttctgtatcacaacctgttattgttttaaatttctgttttcagtatcgagaatgctaggagaaaaagagaacatgacaagttaatgaaagaagtgggagaaataaaggcacggaagagagagcaaatcaaagctttgaggagtgaattttgtaatctattagaaatgaatgaaaaattaccaaagcatatgcagtttaaacgaacagtaagcctaatataaacttgatttttattttaacatatgctatttctggatagagatgactattttcccaacaagtagaaacacttaaaatcatctttcttttttgtttgtttctttcaaaatttcaatagccatttattttgggcatcttttaatttgtatgtggggtttatccccttttaatcagttaagattcctggtgacacaaattgttttacatcaactgttgttatagaacacatgaaaggaatacatggggaagaaataaagtagaacccaagagttcttttaagttttcttttatagagacatgaataacagatacactgaagtataaacaaaaattggcctgaagcgtccggtggctggcttcgttgggaactatggctaaacgtcatcccgatttgatcttttgctgcaagcagactggtattgctatcggaagactgtgtgaaaaatgtgatggcaagtgtgtgatttgtgattcctatgtgcatccctgcactctgatgcacatatgtgatgagcgttaactatggatcttaccagaggtgctgtgtgatctgtggaggccctggggtttctgatgcctattattgtaaggaagtgcaccatccaggagaaggatagggatggctgcccaaagattgtcagtttgggtaactctaagacagaccttttctatgaatgcaaaaaatacggcttcaagaagaggtgattggtggtggccccttcctcccctccacatcaagctgctgcagctgccagaaaagatgcctgctactaccagcagaaagggagtggagcccagagcatcacgaggagtgccttctagtgtactgtcaccttgccaccccctcctgtcccttcacccagacacatggaagggatggaaaaggattcttcacagagcactccggtacactgtatcagacaaaaattgatagattagctaatggtttttcttgaatttgagaagcaaagccctgttctccatattgatatgttctccctcaaccaagatcttctaaaaagaaataatattttagtcttctgcttgaggatttgactgtgaagctatgcctagtgaaaaacatattcttgcagcagctctggtggcagttatcsttgaggaaccttcagtgtgtggtgggaagctatcagaacaagaaatgtaggcatttaatcttataacacttgtgctggtttcatgccttctgagaaattagaaaccctttc

SEQ ID NO: 548093 - DNA, 1490 bp, Homo sapiens
tgaattttcaaattattgaatactaattttctctttctctgctgtttctgtatcacaacctgttattgttttaaatttctgttttcagtatcgagaatgctaggagaaaaagagaacatgacaagttaatgaaagaagtgggagaaataaaggcacggaagagagagcaaatcaaagctttgaggagtgaattttgtaatctattagaaatgaatgaaaaattaccaaagcatatgcagtttaaacgaacagtaagcctaatataaacttgatttttattttaacatatgctatttctggatagagatgactattttcccaacaagtagaaacacttaaaatcatctttcttttttgtttgtttctttcaaaatttcaatagccatttattttgggcatcttttaatttgtatgtggggtttatccccttttaatcagttaagattcctggtgacacaaattgttttacatcaactgttgttatagaacacatgaaaggaatacatggggaagaaataaagtagaacccaagagttcttttaagttttcttttatagagacatgaataacagatacactgaagtataaacaaaaattggcctgaagcgtccggtggctggcttcgttgggaactatggctaaacgtcatcccgatttgatcttttgctgcaagcagactggtattgctatcggaagactgtgtgaaaaatgtgatggcaagtgtgtgatttgtgattcctatgtgcatccctgcactctgatgcacatatgtgatgagcgttaactatggatcttaccagaggtgctgtgtgatctgtggaggccctggggtttctgatgcctattattgtaaggaagtgcaccatccaggagaaggatagggatggctgcccaaagattgtcagtttgggtaactctaagacagaccttttctatgaatgcaaaaaatacggcttcaagaagaggtgattggtggtggccccttcctcccctccacatcaagctgctgcagctgccagaaaagatgcctgctactaccagcagaaagggagtggagcccagagcatcacgaggagtgccttctagtgtactgtcaccttgccaccccctcctgtcccttcacccagacacatggaagggatggaaaaggattcttcacagagcactccggtacactgtatcagacaaaaattgatagattagctaatggtttttcttgaatttgagaagcaaagccctgttctccatattgatatgttctccctcaaccaagatcttctaaaaagaaataatattttagtcttctgcttgaggatttgactgtgaagctatgcctagtgaaaaacatattcttgcagcagctctggtggcagttatccttgaggaaccttcrgtgtgtggtgggaagctatcagaacaagaaatgtaggcatttaatcttataacacttgtgctggtttcatgccttctgagaaattagaaaccctttc

SEQ ID NO: 548094 - DNA, 570 bp, Homo sapiens
tttctccatttaaacatttaaaagtattaaaatttataaacatttaaaatcaattaccttcaccctacagcgaacttgaaggtagaatgaggaaagagatatgtcacaggcaggatgagaaattttagatattctctaaagtcagatgtggttgagataactacatttcagaaataggacaggtaagtagcagcaagagggcactaggttacagtgagcaggaagcatgtcaacaatgatgtaggatgtgtaaaggaaagaaaaataaagacacaggccgggcacagtggctcacgcctgtaatcctagcactttgggaggctgaggcggkcagattgcctcagcttaggaatttgaaaccagcatggggaacatggtgaaaagccatctctactaaaatagaaaagaaattagccgggcatggcagtgtgtgcctttagtcccagctactcaggaggttgagccaggagaattgcttgaacccaggaggcggaggttgcagtgagccaagatcacaccactgcaatgcagcctgggcaacagagtgagaccctatctctacaaataagt

SEQ ID NO: 548095 - DNA, 570 bp, Homo sapiens
tttctccatttaaacatttaaaagtattaaaatttataaacatttaaaatcaattaccttcaccctacagcgaacttgaaggtagaatgaggaaagagatatgtcacaggcaggatgagaaattttagatattctctaaagtcagatgtggttgagataactacatttcagaaataggacaggtaagtagcagcaagagggcactaggttacagtgagcaggaagcatgtcaacaatgatgtaggatgtgtaaaggaaagaaaaataaagacacaggccgggcacagtggctcacgcctgtaatcctagcactttgggaggctgaggcggtcagattgcctcagcttaggaatttgaaaccagcatggggaacayggtgaaaagccatctctactaaaatagaaaagaaattagccgggcatggcagtgtgtgcctttagtcccagctactcaggaggttgagccaggagaattgcttgaacccaggaggcggaggttgcagtgagccaagatcacaccactgcaatgcagcctgggcaacagagtgagaccctatctctacaaataagt

SEQ ID NO: 548096 - DNA, 697 bp, Homo sapiens
gttctgcagcctttttccccccattcagctcaatcctgggggaatagtatccttattaaaaatgtacacattttgctgcgtttgagaagattggcttaaatacaatgataaacgtgagaaaaatagatacattctattatgataacctgactgctctattttcttttcactacggsgagttttcatgggtgcgtggcaaaacaaattgcaatcacctgggtattttccactctggttctgtcattctgaatgataaatgtatttattctttagctgagaattaatatatctgtacatctctatatatatacatatatatctttccatatgcataggcagatgataagcaacaactaaggagaacaagttgaaaattttttttataagatcaatgaaaaaaatgttttatgttcacattgaaacgtttaaggcctggggtaagacagcttttaaggtcaaccagaaaggaagattttcttgttgtaagcatctatcaacagtccttggaggcgcagtcagcactagcataatttaatatgccttctccgtgaaaagaatgcctctttgacatcatgccacaacttgtacttcaactgaagattttcaggtggtctatgttttgctgcattgatttccttttatcattttagtcagtttcaaatccctttttttcttatgtgttctagaaacaaggaaa

SEQ ID NO: 548097 - DNA, 697 bp, Homo sapiens
gttctgcagcctttttccccccattcagctcaatcctgggggaatagtatccttattaaaaatgtacacattttgctgcgtttgagaagattggcttaaatacaatgataaacgtgagaaaaatagatacattctattatgataacctgactgctctattttcttttcactacggggagttttcatgggtgcrtggcaaaacaaattgcaatcacctgggtattttccactctggttctgtcattctgaatgataaatgtatttattctttagctgagaattaatatatctgtacatctctatatatatacatatatatctttccatatgcataggcagatgataagcaacaactaaggagaacaagttgaaaattttttttataagatcaatgaaaaaaatgttttatgttcacattgaaacgtttaaggcctggggtaagacagcttttaaggtcaaccagaaaggaagattttcttgttgtaagcatctatcaacagtccttggaggcgcagtcagcactagcataatttaatatgccttctccgtgaaaagaatgcctctttgacatcatgccacaacttgtacttcaactgaagattttcaggtggtctatgttttgctgcattgatttccttttatcattttagtcagtttcaaatccctttttttcttatgtgttctagaaacaaggaaa

SEQ ID NO: 548098 - DNA, 576 bp, Homo sapiens
ctgtaattattccacaacactcccattatacagaggtaccatattcaagcacatgtttttgattatttacatcactataaatattaggacataatatataagtgggcaataaatgttcttgaggctaaaattgagatcaattacaattgtgtattttgaattcatcccacatagaagaattcctcagttcaatgctgtgcacacgataagattttactatttattgtcaaattattctccaggagtgctgtgcatttccaccagcatggataggagtttctgcctctcagtaaaatgcatgttttaatgttatttgtaatagattatttcagtctaactaatataagcttattttaaatgatattataraggaaagctacataataatatgaaccattcaaataattaagaatgtatatgaaaatatagaaagagggaatatatctgatccataaagctcacttatataagccattattttaacagtcactttcatattctatgtaaaagaagtaggaacagtacttaactactctccttgtggtaaaaaacaatagttgaatacatatctacaca

SEQ ID NO: 548099 - DNA, 556 bp, Homo sapiens
aggaaaaaaagacaaaaataattagttctccacccttgtctagctatgcccaatagttatgcctctctcaaaagctttccttttgtccttttaaaaatttttgctcaactgaaattttagtcatgtgtagaaaataaataatttaagaatgtggtttcaatagccctttaattaaaaatttcggaaactgtttttctttattgtgttattcttggttcttatgggttaacataaatattttctttgatttttttcttttttgaattttggtaaatggcacagccaggatggataaaaacaaggttggacattttaaataaatatattaaaaccatccctgcactgtagaagtacaagtgtacttatttaacstacgagtttctgaaagtcatgtgtccctataagcaggtaaaaactgtataaaaaaataccaacttattgccaaaatttgtttaaattaatcctccagaaaggagaactaaaaacaatgcctgaatattaccaggaggtagatgaaaagaaaagttatgaaatgtaaatcacttttacaactgtg

SEQ ID NO: 548100 - DNA, 615 bp, Homo sapiens
aaaatatattggtaaaatacagaaattaaaataattactgaaaaacagatgcttgagatttgaatcagtaggtcttgctaagggctttaaattttagcatttatttctttgttaatataaaatttgcttatttttatcctgtgcaagaataattaaaatagtgactgatctttcagaaataacatctttcataagtttgtgcttatcacatttctgacaagcacattactgttatcaatggyttctcatccgaaactgctgattaagggacatccattcctcaattatgccaactgattttaatgattgttcatatgagatcactgaatgtgggcacctctgcactgaggcacaagttgcattgcccctgattgtgttcatttacctatcattgggatatattttcatggttatgggaagagcaattgcaaatgatattgccatgtgaagaaaaacataaccaaaagaaataatgttcacttctctaactgtggcaggagttaagctcagtttacttaatctttgactttactatgctatttcactgatttattgaaggtcatcactactcatgtttgtgggtctgaaattacaaagttttagaaattttataat

SEQ ID NO: 548101 - DNA, 418 bp, Homo sapiens
ctgtctagatcttctatccttaacctcctttatctagttataggataattattaaaacaaggtcttagttcaaatagtacattcttgaaggtcaggtctcattttatatgctcttcaatctaacttstgattaattttttcctaacacctatcaaaatacttttgactgatttttttccataattcttttatttttttttttgagatagagtttcaatcttgtcacccaggctgtaatgcaatggtgcaatctctgctcactgcaacctctgtctcctgggttcaagtgattctcctgcctcaatctcctgagtagctgggattacagatgcccgccaccatgcctggctaatttttgcatttttagtagagatagagtttcaccatgttggccaggctggtctcgaactcctgacgt

SEQ ID NO: 548102 - DNA, 434 bp, Homo sapiens
gataaccatcaaataaartaaacgattttatttgataaccatcaaataaagtaaacgattttatttgataaccatcaaataaagtaaaagattttatttgataaccatcaaataaagtaaacgattttatttgataaccatcaaataaagtaaacgattttatttgataaccatcaaataaagtaaacgattttatttgataaccatcaaataaaatgaacatttatgaatgtatatgaatacaaataaatagagaaggattctatcttctttttaaatgtaaaatgcaagagggaaatagaaaaatcaccatttagaaagtaccactttaataagtaatgaagacagcattcactggccaacattaaaattagtaaaattttaaggagaaatagaatttcagactcacaaagcatgtacccaatatattcatt

SEQ ID NO: 548103 - DNA, 434 bp, Homo sapiens
gataaccatcaaataaagtaaacgattttatttgataaccatcaaataaagtaaacgattttatttgataaccatcaaataaagtaaamgattttatttgataaccatcaaataaagtaaacgattttatttgataaccatcaaataaagtaaacgattttatttgataaccatcaaataaagtaaacgattttatttgataaccatcaaataaaatgaacatttatgaatgtatatgaatacaaataaatagagaaggattctatcttctttttaaatgtaaaatgcaagagggaaatagaaaaatcaccatttagaaagtaccactttaataagtaatgaagacagcattcactggccaacattaaaattagtaaaattttaaggagaaatagaatttcagactcacaaagcatgtacccaatatattcatt

SEQ ID NO: 548104 - DNA, 489 bp, Homo sapiens
ccagtccagcaaattccaaaaggtgggtggggaaaatctttcagttacacagtaccrttcgttgagtttcttgaagctaggatgtcaatgttcttgatgatgttcagtctcggttagctttcctctaagagaatgaaggacctgagcttttcaccagaatttgttaggggctcagacagtggtttgtgcagggaaaagtctggcctgcgtgtaatctgctgcagtggtgagttcttcaaagtttgaatcaagtagttggacttcagctggcagaatttcttcaactcctggagaaaagagctagctgctagacaacctagagttccaacaggaatctgggcaatcagatgttatttttcagtgacatcaagttagggaaagagagaaaaattggaaacattaatttgtagggttgtagccagatattgaagcaaactggaaggcttcacagtttggtacaaattaacaatttgggcaagataacaggat

SEQ ID NO: 548105 - DNA, 564 bp, Homo sapiens
atcataggggcttgaaagtgttttcttgcactgagtcagttctcgggtgcaggttatgggtctgagtggtgccagttggttcatacggaatacaaggtctgaaaaatatctcaaataccattcttaggttttacaataatgatgttatccataggggcaattggaaaagttataaatcttgttaccattcgctacatgactcctgagtagtaagtagtttttaaaggcaagttataaaacaatgactgattagagtttaattatgtgtrtatcttagcagaattcagacctctgtcacaattctaaccttgtggacttacgttagttatatgaaagtggttttggtccctgagcaagtagagggggttagttcaggaaagaagtatcatcgtctttgttttgaagttaaactatgaactaaattcctcccataattagcttggaatgagcaagttagcctgtgaggttaaaacaagatgtagttagttatgctacatttccttcactgtcgtaatttttgtataggtggttcccagtggataaataaaatgtggtatgtgcata

SEQ ID NO: 548106 - DNA, 564 bp, Homo sapiens
atcataggggcttgaaagtgttttcttgcactgagtcagttctcgggtgcaggttatgggtctgagtggtgccagttggttcatacggaatacaaggtctgaaaaatatctcaaataccattcttaggttttacaataatgatgttatccataggggcaattggaaaagttataaatcttgttaccattcgctacatgactcctgagtagtaagtagtttttaaaggcaagttataaaacaatgactgattagagtttaattatgtgtatatcttagcagaattcagacctctgtcacaattctaaccttgtggacttacgttagttatatgaaagtggttytggtccctgagcaagtagagggggttagttcaggaaagaagtatcatcgtctttgttttgaagttaaactatgaactaaattcctcccataattagcttggaatgagcaagttagcctgtgaggttaaaacaagatgtagttagttatgctacatttccttcactgtcgtaatttttgtataggtggttcccagtggataaataaaatgtggtatgtgcata

SEQ ID NO: 548107 - DNA, 960 bp, Homo sapiens
gacaccaatacatagctgaaaatatatttttctgagtttcaataaagtgcaggatgtctcttgacaaaaatattttcaatcatctctgtattaagcaatagactagtcaatcaatyggaagatgacattgtgtcatagaaatgtagtctagggaactgtgatatagaaccttatatctattttaatcatacatatttttaaatgtgaattttgttaccattatgttttggaaaacatacaagcaaataatgtggggttatcttataacacagaatatcacagaaagaaataacaaagaaagagaaaaatatatatgtgtgatgagaagtatctccaaatgggccaccaataatatatatactaacttgagtcaaataaaatatttcatttagcaagattttgacctataatagcagttagtagtttaaaatacattggctataatgtgaaatcttgacagttcagaaaatattgagttggatacaatggatttaatgaacaaacattgctctttctatttgtatttgcatatatatatatatatgtgttcatatttagtattacatgcatacatttatcgatatactacattatatgtacatattggaaatgcatatatattaatttatacaataaaacattcaaatctacaaaatgagatttttgacatttgatgtatcttttcaaaattgttatgatagtcatgtcagaggttatgaataaaaataaacctaatatcaatctatacaccagcttcaagtacacataatggagcctaacacaaataatttatattatgataattcattgtgtggtttcctcaagctgatagatgtcaacactactttcctataactatgcagataaaactgggtatcagatgtcttattgtgtaattacagtagcaaaagaaaacagcacacttgtaattataattgtggtgtcatatacacatttcat

SEQ ID NO: 548108 - DNA, 1754 bp, Homo sapiens
actcctctacatactactctgggtggcttgaagtgaatttgatacaagaactggagcgagcacaaagcagagctagatctaggattaatgtgcttgggcccagctcctcactactcacctatgagtctagttccagaacccaagtagagggtggggaaacaaggctcctgactttttttccctaatgtctgcatctctttcacatttcttatctccttgcaaagaaactaaacaggctcaactgaaataactaaatgattaaaccctatacagagaatctccaaagactgacaaaatatcattcaagactgttacacagacaaccttgaggatgacttgatgtaccagtgatctacaatatttgggatcattccaaattcccatcaaggatctgcctatatcaacaaaggagccaaggaccaaccattcaaatgggccctgctgccaagctttttttttttttacaatgccatctcttcatattgttccatttaacaaaactgcagcccttcatctatccttaagtcccttggccaattatacagagccagagtatgctaatccctagcaggaaatcaacaggatgacccactaaacaccattcagaagatgctaagacccatgaattgcaacaggaaagaaaagacagggaattagtcagacaggtacatgctgtgccaaaaatgcactacagcccccacccaattctgcctaatcctagctgggctgacaccaacctgatgagacaggcctataagatctcaaactaaaacagaaactcctgaactgggttctttcaaacccaggaagcagcagtaaatcattaaagaacagataagttcttaaggtgagggagagtttcagataaatggaatgctggtagaacacagggcccaaaggagcaaaagttaacctaagcccaggtagaaccttgtttactagagtattaggcatgggtttgggcaactattctaaccagagaaactggcttcagtgagggcaagttggcaatccaaggtatagcatgcatagggctggcaaaattcagggtgactggagcaaaagcttcagaaccagaaagaccacatctgggggtagagcacaaaactctcaagagatgaatctttgtaagagtgaggcagaactatatagcagttttaggagatctgttggtgcccagcaagagctccaaatgggctatatgcagggatgcaggctgtagtctcaggagaggaggttcacaaaagtcattcagtccaagacctcaaactgtgttctctactaaaaggaatcaaggttccctagagaaatggctgactccatgtatggtgcagtatattgatcctggaacatcttttttgccagaaagcaaggaagccatcaaagtccaacaggatcacrtcaaaaagacatgaaagtcaacttgaagagataattattaacctagatgagacaatgtaagcatccaaaacaataaagactgcaatggcctgaaatacatcaaatgcaaacaataatctatgagttcataatggtattcagaaaaaaaactactggtcattagagggaaggttactaggtcactaacttactactctgaaaagtgacttaagatgagaggtagggtggagaattagctatttattcagtctttcctgtacaaacataaatttttagggagattgaagcagacgaaacaaatctggaaaaatggaggtaactgcttaatctgcgggttgggtgcatggaggttc

SEQ ID NO: 548109 - DNA, 1754 bp, Homo sapiens
actcctctacatactactctgggtggcttgaagtgaatttgatacaagaactggagcgagcacaaagcagagctagatctaggattaatgtgcttgggcccagctcctcactactcacctatgagtctagttccagaacccaagtagagggtggggaaacaaggctcctgactttttttccctaatgtctgcatctctttcacatttcttatctccttgcaaagaaactaaacaggctcaactgaaataactaaatgattaaaccctatacagagaatctccaaagactgacaaaatatcattcaagactgttacacagacaaccttgaggatgacttgatgtaccagtgatctacaatatttgggatcattccaaattcccatcaaggatctgcctatatcaacaaaggagccaaggaccaaccattcaaatgggccctgctgccaagctttttttttttttacaatgccatctcttcatattgttccatttaacaaaactgcagcccttcatctatccttaagtcccttggccaattatacagagccagagtatgctaatccctagcaggaaatcaacaggatgacccactaaacaccattcagaagatgctaagacccatgaattgcaacaggaaagaaaagacagggaattagtcagacaggtacatgctgtgccaaaaatgcactacagcccccacccaattctgcctaatcctagctgggctgacaccaacctgatgagacaggcctataagatctcaaactaaaacagaaactcctgaactgggttctttcaaacccaggaagcagcagtaaatcattaaagaacagataagttcttaaggtgagggagagtttcagataaatggaatgctggtagaacacagggcccaaaggagcaaaagttaacctaagcccaggtagaaccttgtttactagagtattaggcatgggtttgggcaactattctaaccagagaaactggcttcagtgagggcaagttggcaatccaaggtatagcatgcatagggctggcaaaattcagggtgactggagcaaaagcttcagaaccagaaagaccacatctgggggtagagcacaaaactctcaagagatgaatctttgtaagagtgaggcagaactatatagcagttttaggagatctgttggtgcccagcaagagctccaaatgggctatatgcagggatgcaggctgtagtctcaggagaggaggttcacaaaagtcattcagtccaagacctcaaactgtgttctctactaaaaggaatcaaggttccctagagaaatggctgactccatgtatggtgcagtatattgatcctggaacatcttttttgccagaaagcaaggaagccatcaaagtccaacaggatcacgtcaaaaagacatgaaagtcaacttgaagagataattattaacctagatgagacaatgtaagcatccaaaacaatawagactgcaatggcctgaaatacatcaaatgcaaacaataatctatgagttcataatggtattcagaaaaaaaactactggtcattagagggaaggttactaggtcactaacttactactctgaaaagtgacttaagatgagaggtagggtggagaattagctatttattcagtctttcctgtacaaacataaatttttagggagattgaagcagacgaaacaaatctggaaaaatggaggtaactgcttaatctgcgggttgggtgcatggaggttc

SEQ ID NO: 548110 - DNA, 1754 bp, Homo sapiens
actcctctacatactactctgggtggcttgaagtgaatttgatacaagaactggagcgagcacaaagcagagctagatctaggattaatgtgcttgggcccagctcctcactactcacctatgagtctagttccagaacccaagtagagggtggggaaacaaggctcctgactttttttccctaatgtctgcatctctttcacatttcttatctccttgcaaagaaactaaacaggctcaactgaaataactaaatgattaaaccctatacagagaatctccaaagactgacaaaatatcattcaagactgttacacagacaaccttgaggatgacttgatgtaccagtgatctacaatatttgggatcattccaaattcccatcaaggatctgcctatatcaacaaaggagccaaggaccaaccattcaaatgggccctgctgccaagctttttttttttttacaatgccatctcttcatattgttccatttaacaaaactgcagcccttcatctatccttaagtcccttggccaattatacagagccagagtatgctaatccctagcaggaaatcaacaggatgacccactaaacaccattcagaagatgctaagacccatgaattgcaacaggaaagaaaagacagggaattagtcagacaggtacatgctgtgccaaaaatgcactacagcccccacccaattctgcctaatcctagctgggctgacaccaacctgatgagacaggcctataagatctcaaactaaaacagaaactcctgaactgggttctttcaaacccaggaagcagcagtaaatcattaaagaacagataagttcttaaggtgagggagagtttcagataaatggaatgctggtagaacacagggcccaaaggagcaaaagttaacctaagcccaggtagaaccttgtttactagagtattaggcatgggtttgggcaactattctaaccagagaaactggcttcagtgagggcaagttggcaatccaaggtatagcatgcatagggctggcaaaattcagggtgactggagcaaaagcttcagaaccagaaagaccacatctgggggtagagcacaaaactctcaagagatgaatctttgtaagagtgaggcagaactatatagcagttttaggagatctgttggtgcccagcaagagctccaaatgggctatatgcagggatgcaggctgtagtctcaggagaggaggttcacaaaagtcattcagtccaagacctcaaactgtgttctctactaaaaggaatcaaggttccctagagaaatggctgactccatgtatggtgcagtatattgatcctggaacatcttttttgccagaaagcaaggaagccatcaaagtccaacaggatcacgtcaaaaagacatgaaagtcaacttgaagagataattattaacctagatgagacaatgtaagcatccaaaacaataaagactgcaatggcctgaaatacatcaaatgcaaacaataatctatgagttcataatggtattcagaaaaaaaactactggtcaktagagggaaggttactaggtcactaacttactactctgaaaagtgacttaagatgagaggtagggtggagaattagctatttattcagtctttcctgtacaaacataaatttttagggagattgaagcagacgaaacaaatctggaaaaatggaggtaactgcttaatctgcgggttgggtgcatggaggttc

SEQ ID NO: 548111 - DNA, 950 bp, Homo sapiens
gcgtggtggctcctgcctgtaatgccagctacttgggaggctgaggcaggagaatcacttgaacccaggagatgaaggttgcagtgagctgaggtcacatcattgcactccagtccgggtgacagagcgagattccttttccaaaaaaaaaaacagggctgggcacagtggctcacacctgtaatcccaacactttgggagggctgagatgggcagatgacctgaggtcaggagttccagaccagcctggccaacatagtgaaaccccttctctactaaaaacacaaaaattagctgagcatggtggcgggtgcctgtaatcccagctacttgggaggctgaggcaagagaattgcttgaaccggggaggtgggaggttgcagtgagctgagatcaggccactgcactccagcctgggtgacagagtgaggctccatctcaaaaacaaaaacagacagatacctgtaatccacagtcaaccaaagttggcctccaaagatacagaaatggccttctttattaaaacagccagtaatgggccctgaagagggaagcctgaatccaaatgttatttttcttgtcacartgccattcctattaactcccatctgtaaagcctggaacatagcctactgggatatctaggaccgaccccatgccctttgtgatgtcctccaatacattaacccttatggcatttatgccacttagcctaagctggagctggagagctacctccattccagatccccgaacgctacggaaaagccataaaagcaagcttcatcacagatatgaccccactccatggtaatcataccatagtatgaaagtaagtaaccatttcagtaaaaacagggtataagaaaataatatacctgcatttccttgtgtatggctagaatctggagtgatccctagaaactagtattctggttgccaatatttta

SEQ ID NO: 548112 - DNA, 551 bp, Homo sapiens
aatatatatggggaaattagcaattgcatacaaattctttctctaaggtcacgagaaaggtcacttgaaagagaactaaaacraagtttctaagtagatgatgtgtgttacatatataaagagctaataggtactgcttacttcctgtcagagacattgccaagtgctttgtatctactgcctaccaggaatcaaatagtggcctacgtgctgaggacacagagatgaatcattatgaacaggtatactgtagaaatgaacccactatatttggggaacatgatttaatgttagcattaagcctcagcagacagtaacatcctgctttctttctatatatcctaacgtgtttaccaacttattataattagctgggtcactgccctgatcaatatccctgaataatagttccttaagtcatttcatcttttggttattttttcagtcttggaagaaaataacctccacaaaaatgctatgaggaaaacttaaaaatgttaacttctgcaatccctgttacatatgacaagttgaacataagtctttatatc

SEQ ID NO: 548113 - DNA, 566 bp, Homo sapiens
gggctactacagtttccagtaacctattgtccattttgaaataggtagagaagattgggaatggttctagcataaagaaaaaaacaaagatttaaggtgatggatatttcaagaacactgatttgatctttactaactatatgattatattaaattatcatgtgtaccctcaaattatgtacatctatcatgcattgataaaaatgcatcaataaaaaatacaaattattcttaaaaaatctaggtggagaagagtttctggagggatatatgtcacagcattattgtttattcttctcttttctggatttcccactcttcagctttgggcaagtgtatatttagaaaaaataaagaccaaaacatcatttttatttggaagtaaacttgcaattatggctgaatctgattccttcaatcctattaacttacaaaagtatacttcgtctttgtaagcatcagaaagttcctcagctagtggaggaaagttcccactgatttgractaagaatactggatgtcacaatgatgacctaaaaatcagaagatcttttccccatttttta

SEQ ID NO: 548114 - DNA, 616 bp, Homo sapiens
tagaaataaggtgatcttagcattgagaattcataaagctggagttagcatctgtcaatttattttacttataatagtgtccccagtaatttaagaaatgttggaataaatattttttgaattcagatctttgtattatattttggaaaaactctttgaagtcttyttttcatcaaaaataatgaataattgtataggagactactgagatttaactttcctttaataaggagtatggtctaagtaagctttgtcccaaaggttaaaaatacttatttttgactttgttttagtaatttatcctctcattctgtcaccagtacctgatccatagtaggcactcagtggttttttttttaacctgaatttgaccgtagcttcaattttcctatctgaaatggtataaattaattatgattgtgaaatgtttggcatacttagcatagatcctatagtagaattatctttttagtcatctacttgtaagtgatgtttacagaattttgtttcaatggaattttgtttatatgcaattaggtaataatgttccagctgtacatttttcttatctgacctgactagtagaattggtatattggacagagcactggactca

SEQ ID NO: 548115 - DNA, 985 bp, Homo sapiens
tgtgcctatgagaatccctttctttccggtaatcacggtcagtgtaatggttctcttggtctctggattgcttctgytggtgctgatcttcccttttctcatgtcctctcgacgttcgtgatcctttcgtgtggtgcctggtactgtgccctctttcttcactaggtgaccgagagtggttttgactcctgtggtgcttgaagtcattctcaggggtctctatgaccttttcccttctgcagttcactctagtttcttctatttcatcatccgcactgctcttagcatcgaagtcactgtctgcatctgggttttcctctactttcacatcagtttgaagaatgcatttctcttgtggtattctgttttttgaacttacttcattggagaagccccttgatttttcttcctttataccagatcttagaaacaaaaaacaaaaaagggcagaaaaaaatgccacattatcagttgtaataagcaaatgaagggttcatataatttttatcaatactcaaatcaatacacctatagtgatatatactgtctgattatccaaatgcaaaaaggtcctgatgtctatgcaaactagtattttcaaattcataccattcagaatattttcaatatttgtagaagtgaaaagagaaaattagcccttgtctactatactactagaacctacaggcaagggtctgtacaggtcttcattttttggtaagcctaagacaaagaataattgggaaaagtaataaatgttctgaatctaagttctattttcacaacatgaagcttaagttgtgactgttggatttgttgtttcctttcttatttatttattttgagacattctgttacccaggctggagtgcagtggcacaatctcggttcactgcaacctctgcctcccaggctcaagtgatcctctcaccttagcttcccgagtagttgggattacaggcctgcaccaccatgcccagctaat

SEQ ID NO: 548116 - DNA, 1045 bp, Homo sapiens
tgcctacttctggaatacttcctaaaggacctgcctaaggctgttttacagttaaccatttttataagtagaaggaatactgataaaataataataaaaagtatagtatattaaattcgtaaaccagtaacatagtcttttattattatcaagtattaggcactgtacacaattgtatatgtgatactcttatatgactagcagtgcagtaggtttgtttgtgccaatgtcctcttaatcacatgagtattgtacttgtgctatgacatcaataggtgatagaaatttttcagatccataataatcttatggaatcaccactgtatacacagtccctcattgactgaaacaccgttttgcagtgcatgactgtatacacataaacatacatatgtatataggtatatatgattttgttatacatacatatgtatagcaaatatatgtatatataattttttcttcaaattgtcctccatgaggtttccagtgatttgtactcttaataacaacatgtagaagtacccagtttcctgaataattttcaaactggatattatcacttaaaaacagtttctttatttcatatgaaaatatgaaatttatctttttattactagggaatttagatagtcctgtacacatttggcattaatttttacctttgattttattgctatcttagtaaatccatattttatttataacatctttacattctttcaaaatgtaagtccatctattataagtgactttattgtacagaggaattggcttccaggattggcctgagtacagtccttggaaaaaaatgtttaaaacaggataagaatratcaatatgttataataagtgcttgtaacagtccagagtaagagttgtatacttacttatggttgattgaaaactcttataaatttaatcaccactataataatttataagtgacagatttattcattcccattgttcttaaacttactgcgaagtcttttaacttcacttgtaacaaactggatattagtggcctgttcgaaatttgttt

SEQ ID NO: 548117 - DNA, 856 bp, Homo sapiens
ctctgtcacccaggttggagtgcagtagcaccatcttggctcattacaatctccaactcccaggttcaagggattcttgtgcctcagcctctggagtagctgggattacaggtgcccgctaccacacccagcttatttatttatttatttatttgtatttttagtagagagagggtttcaccacattggccagactggtctcgaattcctgacctcaagtgatctgtctgcctctgtctcctaaagtgccgggattacagacgtgagccaccatgcctggccacccattctaacagacttttaaattaagtatctattatatgttaagcattatgccaagcactggagacataatgtgcccacacagaactctttaatagaagagatgaacaggaaggcaaatgaacttttgtatgatgtgtgcaatagtaggctatacatggtacagaagtattagaaagtcgggggatccgatggaagtggagtcaggaaaaacttcatgtaagaggagrgtagggttgtaaagactggttgccaggtagctagagaaggagaaaaaggatggggcattctcatagccaacagcatatgcaaaggcatagaagtataaaattgcgtgatgggttctgggagctacaagtaggttgagatcgctgaaatgaaagaggaagaaaagggagttggggaagttcagggttttgtgtgccgtggtaaggagtttaggtttaatccagaggattctaaaagccatcggggggttttcagcaggacggtgagggaattgaggcattgtgtttagctaaaacatagcagcagtgtggatggagtgatgagggactgcagtagagacatccca

SEQ ID NO: 548118 - DNA, 759 bp, Homo sapiens
gtagaaagtttgtgtgagatccttagtccaggtttgagctcctccagtcttgtacatgggcagagagccccattctcagcaaggcaatcacaacgtataggagagagtgaggcccatgaactgttcaaatcctctacagtactgttacagcaaatattgatttgttccatttgttttatttgtattttaatcaaatattcaggaaaattttctcattaccttgtggaagtcttaatgatgaagaccactcgttgattctcaagagattaggggagccagcatactgatttagtgctaacctcattagaacaggaactgtagaggagaggattaacagcaggatgagctgcaccattaaatatcaaattgttatccaattagatgctcttgttatgaacagcatattatttccagatatcagataccaaatctcaagtagttgcarcatctttctaattctaaaatgtgtgattaccctgactgtactctcgttcattatttatcttctgcactaagctggaaaaatcaatcctgaacttgaaactggttcttagcacacagaagatgttgcacacacccgtgaagacagatgtttggtaaagagctcatgggcgttctgtcagtctcactgagttaagttggcaccagaatatagggcaggcaaggctgtttgccggtgatctttagaagggatcatctgattgaatagcacatgctctcctttgacaattctccttgtcattcattcattcatttatt

SEQ ID NO: 548119 - DNA, 619 bp, Homo sapiens
gtgaccttccccgcatcccatctgatcatcaaactcccccatacctgatcaaagacccccatagccaggactggcagggaggtgtacacgatgttatacagggtgatgaaatactggtcatagacggtctggaagagaacagggagcaagggagcatgcaacctttctttgctacacatcaggcacaggaagacagctgatgtcacatacagagaaccctaagaaattttcygaggctccttctctcctcctttaataagcattttttaagagtatgtaccagaaaatagctaggccctgggggactgagtgataaacaagacagaacctctgccctcaggtttacagatttgcacaacagtggactgggaacatttattacctgggctgagaagccacagaagaagccaaaccagaagtggaccatggtgaaagcaaagtttttgtagaagaaatagcaaagaaacttgcacattcgcaggtaggaccagcgcccatgcaccagcaggaggcgctgcaggaacttgaactgggagaaggagtaatcggaggccaagacagcctggatcccttcctgcccactgatccccacaccaatgtgagccgctgcagagacaag

SEQ ID NO: 548120 - DNA, 668 bp, Homo sapiens
tccaggctactggctgcctctgggaaagtaacttggcctttagaaacaagaatagcatttatattatttgaaagataaaattaggttataaaaaaagaagatacacagggactctgccaaacaacctgggacatcagatgaaggcctggagaaataaagaccyctcaggccacttctaattttggaattcatagactactgtcagtctgctttctaattctgtgaacactatggatttttttcctgtctcacttcattactggggcacatcacctttaagacagaaatattttctagcttcatctattgatagcactgtggtgttcacagtagccttaggtggagaaaacagacacacagcttgatattttagtatcactatggtttggtgaaagaggagtcactgccttatgcctcagagaggtgaattttggggtcatggatgttcctgcctccaacttctccctcacgtaaagcagaagacagcctccacagtttcactcacaatgaagcctatcagaaccaggggtcctcgggcacaaggaaggcatcgattttactggcctttatagcctctatcttactctaattcaactcccaggagataaatccaaggaatgacaatgtaaacgtggtttgacaaaccacttggtttgtcaaagtttgtt

SEQ ID NO: 548121 - DNA, 640 bp, Homo sapiens
tctagaacacaaaatactagaagctaactatgaaaatatcacttctttagacaggcgaaaaaggatcatgttcatattgtaataatcattcacatggaagtttacaaagtactttctcatatgatatctcatattaatattttcacacccatacccagcagcccttgcaatttaaatgtattacatgaaaaatattataaccacagaagtgacttttttagaaaattaatggagtcttatgacactgcaaattcttttttaaaagaggcagaatatgaaaaattttaaaagaacccaccatcttaacaaatctgctgtttaatttttctatttccctttcctacttttatctgtttataaacacaatttttatatagttgaagtcacaaaatagatacaatttttaccctgttctttttatgttttcacattctacttagtaattatcattttaagtaattataattatcaagagctgaataatattctaccacaacttagggtgccaatgacaactcataggcctttacctttaaccgtctctcctcatagtctcaactgtgtastgggctgttctacctggattcctcatagaagactcacactcaagatatattatgactaagtccattgttatccc

SEQ ID NO: 548122 - DNA, 640 bp, Homo sapiens
tctagaacacaaaatactagaagctaactatgaaaatatcacttctttagacaggcgaaaaaggatcatgttcatattgtaataatcattcacatggaagtttacaaagtactttctcatatgatatctcatattaatattttcacacccatacccagcagcccttgcaatttaaatgtattacatgaaaaatattataaccacagaagtgacttttttagaaaattaatggagtcttatgacactgcaaattcttttttaaaagaggcagaatatgaaaaattttaaaagaacccaccatcttaacaaatctgctgtttaatttttctatttccctttcctacttttatctgtttataaacacaatttttatatagttgaagtcacaaaatagatacaatttttaccctgttctttttatgttttcacattctacttagtaattatcattttaagtaattataattatcaagagctgaataatattctaccacaacttagggtgccaatgacaactcataggcctttacctttaaccgtctctcctcatagtctcaactgtgtactgggctgttctacctggattcctcatagaagactcacactcaagatrtattatgactaagtccattgttatccc

SEQ ID NO: 548123 - DNA, 541 bp, Homo sapiens
gtcaacctccctatccttttctggttcatgacctcgagatgcctcccaaggcatcttgtctgaattcttgtgttcygaaccttggcttgttatatgtggcgcactttatgcaagttacacaaaactggactccaggcgtggtgctgcatgcctgtaatcccagacactcaggaggctgaggtgggaggattacaagcccagaagtttgagttcagcctgggcaacatagtgagaccccatctcttaaaaaaaaaaaaaaaagggaaagaaataacttaattctttttttctggcatagagaggttccaaagaccaatcctgaagcttggtaaaggactacagctgttacccccacattctatcaggctattaagactcactcagccgcaacatggccaggcccccacaccaagttaggcaagctacagataccaaggagtaggaactgcaaacacaaatacagggcaaactgcaggtacctaatcctgacacgtcacctggctgaactttggtagcagaagcccaaggaacacagacttat

SEQ ID NO: 548124 - DNA, 629 bp, Homo sapiens
cttactaaagttcccctacaaagtgctttcttggtaagtgttttgtaaacaagaatggccgtctcgatggtctttgtgtacatgaccatccttggttctaagcatcacgaatggcttctctctgctttaattcccaacacctctgagccaaggacagtttcttggcctaaagaattctcatatgtagaatcatgcgcacttttaaaamtgaaactcctttaaaatttcatcagtggacatccaaccatatcataaaacacaggctctgtgatttcatccccaactggcgatttcctttcatttgggcctgaaatagtttcaccaccttcgatgataattttaaaatttccaaaacaccatttattcttgagttatatgacgtggcttttcatttctattctccaaaccctgtggagtttttcagttcccgtgtctttgcctgctcttggtccagtccacctggaatccagtgtgttgaggtcaagcactctgtagagtccacttggacctggaggacaacactttgtgccaaacgtgcctccttgtttgtgggtaagtgaatctgacagaggttggcatgttcttgaaggtggtgagtggcttcagtggcatgatgaagaaggcatctg

SEQ ID NO: 548125 - DNA, 1292 bp, Homo sapiens
tcttggccttttcctagtttgcttccttcccttgcttttgggaatccttattctgtttttagacttttctcctgtgatatttccatttactgattcctaattctattacttctgtaaaattcaatttccaaaaaatactcaacctctagagatagtaaaagttgatagttcacttctttcctcataaaatggactttgtgtagtttcatttagagttgacttgcttcccaactccatacatattacataacgaagtggattattcaaaattaaaaactgagttcctgctaaaattccataaatttgtattgtgagcctatttaatgtagagaggattgttttaactctgtatttaaagaataaaaataggataaggaaaccttttaatttttcaaaacaaataatttttattgcacaggcaggcattctatatacctatatatttatgtgctatgccatcaatacattatataccatatcattttataatttcctactttatgattatttttgcagtatagacacattttaaagtataattagtgcttatagtttcccaacgcattaaaacaatcccttgattcacatatttgtattaggtttttcctgtttttatggtattccacatgagatttaaatagtcagactgtaattacagcaaattgcccagcgtaagtatatgcctatattaatggagcatcagaacactttgtatcagaaaagtgttattcattgttcttattggatgctaaggctgggggcaaatcctttctgtgaaaataaaacaaatattaaagttacttcggaagagaataaaaataatagtataacttgtttaagtaatggtcaaaatgcagaactagatagaatgtgttcctaatacttatgaaataatttaacctgtggatttgacatgggtacttttggaaaaaaaattaggatatgcagttactttaagatataaaatgaaatattattaggagcttccagttttagatgactctgatgtggctggcattgaactaagctctattccaaagctattctatttgttattttaacattattccaattrttagtacttttctttttacattttgcacaagatctcacagttgggaaccaatggagatttatttgattgaagtatttttgaatctaaagtctatgtacttttcaagatgttacactttttctctccatatcacattagaaggaaaatgttatttcagtccactattgtactcctagaatatttcaattcttcatttactcattagttcagaacactt

SEQ ID NO: 548126 - DNA, 588 bp, Homo sapiens
tgaagctcattaaataaaaccatgaattgtttaaaatagctacacacttagtttacaagttccttaaatattatttacttttctctttggcttaaaatatcaagcagaaaaactatagatatatcatgactgaattttacacatatgaggaagaaaccatcttagttggaaatagcaacctmgtctatgcttgggaaaagaagatggcataattgcttcagaaattggaaatagaacaagagtagccactaaatctactattgatgaaccaggaacatttagataaaattcattgaggcactacctaactaggcaaaaggaagaaacaaggtgattaactggttttagagctgtaagcagctgcaaacgcctcgctgttattcatctccaacatctgttattcaaaaatcctgtcgactttcccatattgtactaggtcattccttatcaacttaccatcgcttcaacacttcctgagcatcctctgaatttcagaagagaagctgaaaactacacttccccataatccctttccccataagtttcctgattagactttgtcaatgaaaggcgcttgtgtgagatttg

SEQ ID NO: 548127 - DNA, 588 bp, Homo sapiens
tgaagctcattaaataaaaccatgaattgtttaaaatagctacacacttagtttacaagttccttaaatattatttacttttctctttggcttaaaatatcaagcagaaaaactatagatatatcatgactgaattttacacatatgaggaagaaaccatcttagttggaaatagcaacctcgtctatgcttgggaaaagaagatggcataattgcttcagaaattggaaatagaacaagagtagccactaaatctactattgatgaaccaggaacatttagataaaattcattgaggcactacctaactaggcaaaaggaagaaacaaggtgattaactggttttagagctgtaagcagctgcaaacgcctcgctgttattcatctccaacatctgttattcaaaaatcctgtcgactttcccatattgtactaggtcattccttatcaacttaccatcgyttcaacacttcctgagcatcctctgaatttcagaagagaagctgaaaactacacttccccataatccctttccccataagtttcctgattagactttgtcaatgaaaggcgcttgtgtgagatttg

SEQ ID NO: 548128 - DNA, 653 bp, Homo sapiens
agctaaatttcaacacccctccctcaccattcctgccttccttccctgccttaccatttttttctctttatcacatctgactaggacacatgccctgggatactatgatctcctcactagccaaataggaaacaatcccagtatggtctgtttgttagtatcaccgtcaccggcatcaccatccctgttcagatgtggttcataacctgggcacgccacactgcagttattctcatgtctgtcttcttcacaacaccaggtcctcctcccggggctggcgaagagctgttccagctccgtgtccccctgcccaggacagagattaacaaaacaaaggccctcagagtgtttgcttaatgaagccaggaggcccttttctggcgccataatgagacaggactcagataaccagaccaaagatgaaaccggaaggagaaagctttcttgggacatctgggattgacctggctgccctcaggcagcaggaggaaggctccgattccccaggcttagctggtgaartcctgagcacatacgtcaggactgctgggtgccaaggcagacacagggccagggactcgaggagctgggtttaaacccagatctgagcccggtggtgcgactgtgaacaagtttccgtagcatcgttgcct

SEQ ID NO: 548129 - DNA, 631 bp, Homo sapiens
taaataaaatgatagacttggacaaatgatgtctaagctctcttagttccaactttctaaaatcttagcattttaggaaatcttgcagccccaaaacctctagacaccatgaaatcaaatactaaattgtgtaatctagattcctatattggtagttcagaggaagagagaatggatggggaattttgcagaaataaaaagaaaacatcaaatgcggctcttcyatgacctgctaggatctgcttctaccaaatcatggatatagaaataggcccagctgcacaccactctttctaattatcctgttcttccaattcctcttttatgcattttttttgcccactctctctcgaaacacagtagctctgggagttgaaaattaagttttaatgaagagattaaaagaagtaagtttattcctaaagaaataaaattgagagacagcaaataaccgtactgatgtaagaatagatggcagacttctgcactgcacattttcagtaaatcctatttttcacaaaaatgatttgcaaagctggcatcttgaaacacgagagatgcccaaaatgagagttctgtatttaaaacccccattttagtagctgcattcttaggattatgggctctggag

SEQ ID NO: 548130 - DNA, 1220 bp, Homo sapiens
gtagaatatgtctgctacatagcaggtactcaggttacgcttgatccataaatagaatgaaagaatggataaatacagttggggagttcaatatttttaaataaactcctataaagcaatatttttgcaatagtaattatttatatgttattttatttttaaagaatacaattaaaatgaaatgatcaatccagctttgtttgcataaatggaatgagtatataagaaaaacatatgtacataataaaatatatagataataaaatctggaaacagataaaaatattccctttttacttctgargaggctaaaagctcaaagaagataacaacacacacaataatgataaacaatagaaagtgagaaattattttcatcagcacaagattcatattcctctcttcccaaggattattccattaataataaacttttactagaagttttgtacatgctcactgcagcaatcacagataagaaaaaggaaaaaaactttacttaaaatacaaatgctcagaaattacaaattttatattttgtacatatttttgctaaaacaagaccatagtatgtgtatgtataatttaactaattttttttcctcgctagctataacaaaatacatctttgcacatcaacgtacttctgtatctattgccaccttcagtggtcacatattattccatcctatggatgcaactgaaatttatttataggatccattctatgggttctttttaaagtaagtactgtgaaaaataaagtgcatgtctctttatttcctaagggtattttagtataatggaattggtgggtaaagggcttacacactttttaaatgtagtacttaccattttcaaatgagtactttgaaaagtaatcagcaacttaaactttaagcagcagtataaaacatcctcacaaatattgtggatagaaaactgtttcattcctcttttaaattcttataccagaaatgcaaaggattttttcctatgtatataaataacttgtagatctggaaaaaggtactttgcccacttttagagtgtttgatgatttgatttgaaagaattctctgtaaaatgaagatgtacttttcatctcatgtgtatatataactgatatatataacatatctgttatatatgtatacatatcagtaatatatatatatatatatcttacgatatataataaacaacataggccaggcgcg

SEQ ID NO: 548131 - DNA, 1220 bp, Homo sapiens
gtagaatatgtctgctacatagcaggtactcaggttacgcttgatccataaatagaatgaaagaatggataaatacagttggggagttcaatatttttaaataaactcctataaagcaatatttttgcaatagtaattatttatatgttattttatttttaaagaatacaattaaaatgaaatgatcaatccagctttgtttgcataaatggaatgagtatataagaaaaacatatgtacataataaaatatatagataataaaatctggaaacagataaaaatattccctttttacttctgaggaggctaaaagctcaaagaagataacaacacacacaataatgataaacaatagaaagtgagaaattattttcatcagcrcaagattcatattcctctcttcccaaggattattccattaataataaacttttactagaagttttgtacatgctcactgcagcaatcacagataagaaaaaggaaaaaaactttacttaaaatacaaatgctcagaaattacaaattttatattttgtacatatttttgctaaaacaagaccatagtatgtgtatgtataatttaactaattttttttcctcgctagctataacaaaatacatctttgcacatcaacgtacttctgtatctattgccaccttcagtggtcacatattattccatcctatggatgcaactgaaatttatttataggatccattctatgggttctttttaaagtaagtactgtgaaaaataaagtgcatgtctctttatttcctaagggtattttagtataatggaattggtgggtaaagggcttacacactttttaaatgtagtacttaccattttcaaatgagtactttgaaaagtaatcagcaacttaaactttaagcagcagtataaaacatcctcacaaatattgtggatagaaaactgtttcattcctcttttaaattcttataccagaaatgcaaaggattttttcctatgtatataaataacttgtagatctggaaaaaggtactttgcccacttttagagtgtttgatgatttgatttgaaagaattctctgtaaaatgaagatgtacttttcatctcatgtgtatatataactgatatatataacatatctgttatatatgtatacatatcagtaatatatatatatatatatcttacgatatataataaacaacataggccaggcgcg

SEQ ID NO: 548132 - DNA, 577 bp, Homo sapiens
ctcttatttatttattttcttctcagaaactattgtttctcacatgaaatttaaaaaattaacttaatacatataaatgaatgttaatttgccaatcttttggtatagggccaaggcttctttgagtatgagccctgctgattggatttcatgtattttctttayaaaccatccaatgttatgttatcaataatttccagtttcagtttctttaaaggagagtgacttttgaaacaattcaaaacagaaacagaaatagctattgatttttataatcttaaaaatgcaatcttttgtaatgctatctagtacactggcaattttttaaaaaataactcttttattgagtctttaaagcagttaagctggttttcatagatgcaataaatctcttttactcacactcaaatcctgctgatttgcacaatatttgattaattatgtaattataacaacaaaactgccataaacaagctggggacaaacccgccttcatcttggtaagcttgttctttcactggttgaagcggaacttcaggcactcattgttttatgggagcatcactcatgctttaca

SEQ ID NO: 548133 - DNA, 630 bp, Homo sapiens
gggtgaagaaagttgccttctggaccactggggaaaagaccccagggagacacgaccttcaccaagtttttccagagggagatacaagttgctggcagaagttaaactctggggccagacacctcttgaattggatccttccctctgytggctcttagctgagtgatatggggcaagctttttagtctctcaaaatctcagttctctctgtggtcatgggcagataataagttcacttttaagattgcagtgagggtcaaatgaggaatcacactcagagtgtcttttgcttctgaacatggtggaattaatttaacggtctttttgtggggaaaacccatctcctggttactccacgtcatgaactgcccgaggcttgccacatctcctcacctctccggtacaaaaaataactgcagcacaaaaggccggggttcctctctgtagaaggtaggcccctgactttcatcaggatctttgaggtgggtgcaaatatcatggcactgtcagatccgatgttgcatcctggcccttccgtgatccttggaagatactgtggtggaggcttatatgttgtcatgtgaacctcgagggctacacctggctgttatgccattgactttttattta

SEQ ID NO: 548134 - DNA, 871 bp, Homo sapiens
  misc_feature 822: n = A,T,C or G
attcatcactaggaagctgtaagtggcaactgtgatgatcaggaactttttcaaagctggatggggaaggtgacaaatccgcaaattcaattctgaattgtccatttgaattacagccaccattcatttctgggctgtctgtgggcctgtgcttctgtgcaraaataaaaggtggcatttggtgtattaaggcatctttgagctcctcttctaaaacgcttgcctttaaaacaaccccaccctggttcttggctttttcaccatacaaatcacatttactcctagtttttatagtcaaagtctcatcaattttactgttttctaaattttcattcatttccaggggctctaaaacaagctgctttacacacaaattctctctatggcccagcttatggatacactcagaactgcaggaacacattggtgaaatataatcattgctctgattgccttcatatttacaattaaagttgtcagtgctttcagctaattcctgtttatgccttccaggttcaacatgattttccttgatggcgactgcccaatctctcgaacaggtgaggtcttcaggacttttggttttggggctattgctggtttcattttctttgtcgactgtggaacactagaaatcacaatgtcgggtttaggtgcaataggaggtggggctggcttattatttgccacaacaaacttgggcttgggggccactggtggcttctttatctctagaaaggaaaaaataataatttgatgtcaaaacaaccaaagcacaaaatgatacatgattaaatctgatagcattttttatttttaacnaatatgaccttgccttttactgagtatgttacattatatagtatcaata

SEQ ID NO: 548135 - DNA, 569 bp, Homo sapiens
agaagaagggggaagtgaaggaaggagacagaggagaaaaaaacaacagtgagagaacatataaactaggttcyaagaatgtgaagtatttaattcaaggacattaattaaagagtgttactccaacagagaaagggcctgctgaggcaagggagttactgatgaagtaaattagagctgacaagacaatggctatatttggtctgcttacatatcctccctccctttcctgttttctttctttctttttgccattcttctttacttttgtctttccttttccctccctccctcccttccaccctgcttcttctttttctttcttccttcctttcattcaacaaataaacatctattcagcaatcgctaaggctttagaacatcataaaagaatatttataaaaatgtcaatatctaaaagccaaaagatgagatattaggtcgagagaatattgtacagcagaacaagacagagagaacttggtgctaatgagcatatagtagcatacacgttagaggagttccctgtcctagggagcttacattctagtagtgggaggtagtccatt

SEQ ID NO: 548136 - DNA, 569 bp, Homo sapiens
agaagaagggggaagtgaaggaaggagacagaggagaaaaaaacaacagtgagagaacatataaactaggttccaagaatgtgaagtatttaattcaaggacattaattaaagagtgttactccaacagagaaagggcctgctgaggcaagggagttactgatgaagtaaattagagctgacaagacaatggctatatttggtctrcttacatatcctccctccctttcctgttttctttctttctttttgccattcttctttacttttgtctttccttttccctccctccctcccttccaccctgcttcttctttttctttcttccttcctttcattcaacaaataaacatctattcagcaatcgctaaggctttagaacatcataaaagaatatttataaaaatgtcaatatctaaaagccaaaagatgagatattaggtcgagagaatattgtacagcagaacaagacagagagaacttggtgctaatgagcatatagtagcatacacgttagaggagttccctgtcctagggagcttacattctagtagtgggaggtagtccatt

SEQ ID NO: 548137 - DNA, 569 bp, Homo sapiens
agaagaagggggaagtgaaggaaggagacagaggagaaaaaaacaacagtgagagaacatataaactaggttccaagaatgtgaagtatttaattcaaggacattaattaaagagtgttactccaacagagaaagggcctgctgaggcaagggagttactgatgaagtaaattagagctgacaagacaatggctatatttggtctgcttacatatcctccctccctttcctgttttctttctttctttttgccattcttcyttacttttgtctttccttttccctccctccctcccttccaccctgcttcttctttttctttcttccttcctttcattcaacaaataaacatctattcagcaatcgctaaggctttagaacatcataaaagaatatttataaaaatgtcaatatctaaaagccaaaagatgagatattaggtcgagagaatattgtacagcagaacaagacagagagaacttggtgctaatgagcatatagtagcatacacgttagaggagttccctgtcctagggagcttacattctagtagtgggaggtagtccatt

SEQ ID NO: 548138 - DNA, 569 bp, Homo sapiens
agaagaagggggaagtgaaggaaggagacagaggagaaaaaaacaacagtgagagaacatataaactaggttccaagaatgtgaagtatttaattcaaggacattaattaaagagtgttactccaacagagaaagggcctgctgaggcaagggagttactgatgaagtaaattagagctgacaagacaatggctatatttggtctgcttacatatcctccctccctttcctgttttctttctttctttttgccattcttctytacttttgtctttccttttccctccctccctcccttccaccctgcttcttctttttctttcttccttcctttcattcaacaaataaacatctattcagcaatcgctaaggctttagaacatcataaaagaatatttataaaaatgtcaatatctaaaagccaaaagatgagatattaggtcgagagaatattgtacagcagaacaagacagagagaacttggtgctaatgagcatatagtagcatacacgttagaggagttccctgtcctagggagcttacattctagtagtgggaggtagtccatt

SEQ ID NO: 548139 - DNA, 569 bp, Homo sapiens
agaagaagggggaagtgaaggaaggagacagaggagaaaaaaacaacagtgagagaacatataaactaggttccaagaatgtgaagtatttaattcaaggacattaattaaagagtgttactccaacagagaaagggcctgctgaggcaagggagttactgatgaagtaaattagagctgacaagacaatggctatatttggtctgcttacatatcctccctccctttcctgttttctttctttctttttgccattcttctttacttttgtctttccttttccctycctccctcccttccaccctgcttcttctttttctttcttccttcctttcattcaacaaataaacatctattcagcaatcgctaaggctttagaacatcataaaagaatatttataaaaatgtcaatatctaaaagccaaaagatgagatattaggtcgagagaatattgtacagcagaacaagacagagagaacttggtgctaatgagcatatagtagcatacacgttagaggagttccctgtcctagggagcttacattctagtagtgggaggtagtccatt

SEQ ID NO: 548140 - DNA, 659 bp, Homo sapiens
tcaaaacttacagagccaaaaaatgcatcacggagggtgggaaatgagtcccaggaaggtgaattggactgaaaaccagatttctggcctctctttatctgggtctrccaaatgcacaactgatatttcgacaggtgcgactggcagctgcaaattattcacttatttaacaatagattttgtgtgtgtgtcaaccaagtgctagtcgatatgcaaacccttgggatagatatgaagatcagcatgacaggacccttaaccacaataagctcaaagctaggggcaaaggggcctacaatttttaagatggccctaacatggcaggaacttgacaaattcaatatgtgatctcatctgagatcattccatacatgtggaaactaaagcttgatttagaacaaagcttggctaaggttttacagccggaaagggtgaagttaggttctgaaccaggtccaatacatgccagagccctattatcttttcacagaatcatagctgtgagacaatgcaatgcaacagaatatagatttattatatataataaataatagatttcagcatgctatcagaacacagaagatggtatgcaatgacacttcccataaatggtgaccccaccccaggtgtcatcttgttttaagtatacattttattac

SEQ ID NO: 548141 - DNA, 659 bp, Homo sapiens
tcaaaacttacagagccaaaaaatgcatcacggagggtgggaaatgagtcccaggaaggtgaattggactgaaaaccagatttctggcctctctttatctgggtctaccaaatgcacaactgatatttcgacaggtgcgactggcarctgcaaattattcacttatttaacaatagattttgtgtgtgtgtcaaccaagtgctagtcgatatgcaaacccttgggatagatatgaagatcagcatgacaggacccttaaccacaataagctcaaagctaggggcaaaggggcctacaatttttaagatggccctaacatggcaggaacttgacaaattcaatatgtgatctcatctgagatcattccatacatgtggaaactaaagcttgatttagaacaaagcttggctaaggttttacagccggaaagggtgaagttaggttctgaaccaggtccaatacatgccagagccctattatcttttcacagaatcatagctgtgagacaatgcaatgcaacagaatatagatttattatatataataaataatagatttcagcatgctatcagaacacagaagatggtatgcaatgacacttcccataaatggtgaccccaccccaggtgtcatcttgttttaagtatacattttattac

SEQ ID NO: 548142 - DNA, 686 bp, Homo sapiens
aaaatacaaaaattagctgggcgtggtkgtgggtaactataatcccagctactcgggaggctgaggttgcctgaacccaggaggcggaggttgcagtgagccaagatcatgccattgcacttcagcctgggcaacaagagagaaactctgtctcaaaaaaaaaaaaaaaatttatagatgcttcctcacaggggccaggtaaggaaggggggtggtatagagtggaccccagaatcactttctggaaggggtgacctgggtagtaattggccgtctgctggtctgaggaactggatggcagtggataagctgggcttgttggtgtgagcctgtagtcctagctaattgggaggctaaggcaggaggatcgtttgagcccaagagtttgaggctgtggtgagctatgatggcaccactgcactccagcctgggcaacagagcaagaccctatctcaaaaacaaaaacaacagatggcactgggggtgactccaattgtagacatatccaagtttggaaccaatggccctggaagcaagacccactggagggctgagctgagttacagcgagatgatggcctgatccacctgtgccccacccacctcgctgccactcactcctcctatttgtcctctgagccctgtggaccacttcaagtccagttgagctggtcttgcctcagttgg

SEQ ID NO: 548143 - DNA, 686 bp, Homo sapiens
aaaatacaaaaattagctgggcgtggtggtgggtaactataatcccagctactcgggaggctgaggttgcctgaacccaggaggcggaggttgcagtgagccaagatcatgccattgcacttcagcctgggcaacaagagagaaactctgtctcaaaaaaaaaaaaaaaatttatagatgcttcctcacaggggccaggtaaggaaggggggtggtatagagtggaccccagaatcactttctggaaggggtgacctgggtagtaattggccgtctgctggtctgaggaactggatggcagtggataagctgggcttgttggtgtgagcctgtagtcctagctaattgggaggctaaggcaggaggatcgtktgagcccaagagtttgaggctgtggtgagctatgatggcaccactgcactccagcctgggcaacagagcaagaccctatctcaaaaacaaaaacaacagatggcactgggggtgactccaattgtagacatatccaagtttggaaccaatggccctggaagcaagacccactggagggctgagctgagttacagcgagatgatggcctgatccacctgtgccccacccacctcgctgccactcactcctcctatttgtcctctgagccctgtggaccacttcaagtccagttgagctggtcttgcctcagttgg

SEQ ID NO: 548144 - DNA, 670 bp, Homo sapiens
  misc_feature 310: n = A,T,C or G
agtccagctcttagctaaaaactcattcctctttcatctgcacatttctgtaccccactcaagtaagtctttgcctgtaccagttatctaaaatcgcaaaaccagtaacttaccaaaataagtttcacaagtctatgggctggtgaggtgtttattgctgggctaggcatggctgctttcggcggggctggttcagcaatctgctgtcagctgcatgatcgaaggtggcctcagatgggctgtgtcggcctgctcctcatggtccttctccagcaggctggcctggccttgttcatatggggactgcggngcttcaagaagaagtacagaagttgtagcctcttgaggtctgggctcagaactgcctggctccctgttacttcttcacataccactgacctacccaagttgcagggccagtgcaaattcaagagatgggccatagatgctaccccttgatggtaggagaaagttacattgcagagggtgtgattcagggaaggataaaaattgggcccttttttgccttccagcctccacgtgtccccatatacagggaaactgccttaaaagccaagtcattacaatgatattagcccagaatatcrttattctgataatcagaattcgcctgttctagctgaggaaactcctgagctgctcataggca

SEQ ID NO: 548145 - DNA, 600 bp, Homo sapiens
tgtcttagagaagatggagatccagagagttcaagtaattgctccagttcagacaaaaggacagagtggcagaagccacattctcccaacttctatcatgaagtcaccttggaacagccttctgaaatccaaagggctgtcaacaacatagcttcagcacattgtcttacttgacagatcaatcctgaactcagctttcagagctcttggtaaactccactgctgccgggtctcctctgmtatagctctcaaacgtgcaggctggactcagggttactcaccttgctccaaattccactcaaaacctctgttacaggctgggcctggtgactcacacctgtaatcctagcactttaagaggctgagatgggcggatcactgaaggtcaagagttcgagaccagcctggccaacatggtgaaaccccgtttctactaaaaatacaaaaattagccgggtgtggtgcatgcgcctttaattccaattgcactggaggccgaggcaggggaattgcttgaacctgggaggcggaggttgcagggagccgagatcatgccactgcactccagcctgcgcgacagagtgagactctgtctagata

SEQ ID NO: 548146 - DNA, 600 bp, Homo sapiens
tgtcttagagaagatggagatccagagagttcaagtaattgctccagttcagacaaaaggacagagtggcagaagccacattctcccaacttctatcatgaagtcaccttggaacagccttctgaaatccaaagggctgtcaacaacatagcttcagcacattgtcttacttgacagatcaatcctgaactcagctttcagagctcttggtaaactccactgctgccgggtctcctctgctatagctctcaaacrtgcaggctggactcagggttactcaccttgctccaaattccactcaaaacctctgttacaggctgggcctggtgactcacacctgtaatcctagcactttaagaggctgagatgggcggatcactgaaggtcaagagttcgagaccagcctggccaacatggtgaaaccccgtttctactaaaaatacaaaaattagccgggtgtggtgcatgcgcctttaattccaattgcactggaggccgaggcaggggaattgcttgaacctgggaggcggaggttgcagggagccgagatcatgccactgcactccagcctgcgcgacagagtgagactctgtctagata

SEQ ID NO: 548147 - DNA, 600 bp, Homo sapiens
tgtcttagagaagatggagatccagagagttcaagtaattgctccagttcagacaaaaggacagagtggcagaagccacattctcccaacttctatcatgaagtcaccttggaacagccttctgaaatccaaagggctgtcaacaacatagcttcagcacattgtcttacttgacagatcaatcctgaactcagctttcagagctcttggtaaactccactgctgccgggtctcctctgctatagctctcaaacgtgcaggctggactcagggttactcaccttgctccaaattccactcaaaacctctgttacaggctgggcctggtgactcayacctgtaatcctagcactttaagaggctgagatgggcggatcactgaaggtcaagagttcgagaccagcctggccaacatggtgaaaccccgtttctactaaaaatacaaaaattagccgggtgtggtgcatgcgcctttaattccaattgcactggaggccgaggcaggggaattgcttgaacctgggaggcggaggttgcagggagccgagatcatgccactgcactccagcctgcgcgacagagtgagactctgtctagata

SEQ ID NO: 548148 - DNA, 1228 bp, Homo sapiens
agacaaataagactctgacaatatttgcaatgaattaattggctaatttctcatcaatggccttatgacaaagaggaagaattgagcaggttgagcaacgccgcttcaggggcgctgtgttcagtgacatggtgacagggtgggacactgactttggcacccccagaggttgttttccaataaatgtacttgctacatctttcaatcctataagaaccctaggaagagaaagtagtatgtcactaaaaaatctcatctttatagctatcacgtttgttctctgcattgtgacctttgaattaatcccaattgttgtttttgtttttgtttgacagagtctcactctgtcacctaggctggagtgcagtggtgcaatctcagctcactgcaacctctagcctcccaggttcaagcgattctcctgcctcagcctcctgagtagctgggactagaggtgtgcaccaccatgcctggctaatttttgtatttttagtagagatggggtttcaccatgttggctaggctggtctcaaactcctgacctcaagtgatctgcccaccttggcctcccggagtgttgggattacaggtgtgagccacgagtttttttactagcatgggatttcgagtcagcctgacttacgctgagactcaagcatacagtagctaggaggtgaggggaaggtgatgacctcttggagctctcacttaaaatggaaataaggatgcttttcttgcagrttgttgaacagggataaaggtatatgaaagctaaccaataaaccaggggcattattcttgctctgattccattaaagacaccagaagcagctccctccgtgttggggtcatctataaggcagatcatcaccaggctccaggtatctaagtgcagaagccgagccttcaacacagactatcatggcctgagctttgctagcttgttcagcaaactcctgtgccaagttcctagaatctgtttcctccaaatgctgactgatgcagtaaaatattaacacaatacgttaggcatcaactgcttttagagtttcgagttttacaaattgatataagatggaacgaaatatctatcatctacaacaaattctattgttcccagaaggggcagataaatctcaaggcataattatagtcctgcctgccatgacctctgaagatatatatctgcttgggaaagaatgggataattcctctttactgaagaata

SEQ ID NO: 548149 - DNA, 1228 bp, Homo sapiens
agacaaataagactctgacaatatttgcaatgaattaattggctaatttctcatcaatggccttatgacaaagaggaagaattgagcaggttgagcaacgccgcttcaggggcgctgtgttcagtgacatggtgacagggtgggacactgactttggcacccccagaggttgttttccaataaatgtacttgctacatctttcaatcctataagaaccctaggaagagaaagtagtatgtcactaaaaaatctcatctttatagctatcacgtttgttctctgcattgtgacctttgaattaatcccaattgttgtttttgtttttgtttgacagagtctcactctgtcacctaggctggagtgcagtggtgcaatctcagctcactgcaacctctagcctcccaggttcaagcgattctcctgcctcagcctcctgagtagctgggactagaggtgtgcaccaccatgcctggctaatttttgtatttttagtagagatggggtttcaccatgttggctaggctggtctcaaactcctgacctcaagtgatctgcccaccttggcctcccggagtgttgggattacaggtgtgagccacgagtttttttactagcatgggatttcgagtcagcctgacttacgctgagactcaagcatacagtagctaggaggtgaggggaaggtgatgacctcttggagctctcacttaaaatggaaataaggatgcttttcttgcaggttgttgaacagggataaaggtatatgaaagctaaccaataaaccaggggcattattcttgctctgattccattaaagacaccagaagcagctccctccgtgttggggtcatctataaggcagatcatcaccaggctccaggtatctaagtgcagaagccgagccttcaacacagactatcatggcctgagctttgctagcttgttcagcaaactcctgtgccaagttcctagaatctgtttcctccaaatgctgactgatgcagtaaaatattaacacaatacgttaggcatcaactgcttttagagtttcgagttttacaaattgatataagatggaacgaaatatctatcatctacaacaaattctaytgttcccagaaggggcagataaatctcaaggcataattatagtcctgcctgccatgacctctgaagatatatatctgcttgggaaagaatgggataattcctctttactgaagaata

SEQ ID NO: 548150 - DNA, 468 bp, Homo sapiens
  misc_feature 221: n = A,T,C or G
cactccagcctgggcagcagagcaagactccatctcaaaaaaaaagaaaggtttataatattctaaggacaataatcctacttccttttagcaatcttaccaaacaaatttaaaaaataaataaataaaaagaacaatatattagaarcatagtaggaggaatcctgaagcatatatcccatggattataaaaatgtagtgagaataaataagttatggcntggcacggtggcccatgcctgtaatctcagcactttgggaggccgaggcaggtggatcacctgaggtcaggagttcaagaccagcctagccaacatggcgaaaccctgtctctacaaaaatacaaaaattagctgggcatgatgatgggtgcctgtaaacccagctggtcatgagcctgaggcagaagaatcgcttgaacctgggaggcggaggttgcacagccgagatcacatcattgtactacag

SEQ ID NO: 548151 - DNA, 468 bp, Homo sapiens
  misc_feature 221: n = A,T,C or G
cactccagcctgggcagcagagcaagactccatctcaaaaaaaaagaaaggtttataatattctaaggacaataatcctacttccttttagcaatcttaccaaacaaatttaaaaaataaataaataaaaagaacaatatattagaaacatagtaggaggaatcctgaagcatatatcccatggattataaaaatgtagtgagaataaataagttatggcntggcacggtggcccatgcctgtaatctcagcactttgggaggccgaggcaggtggatcacctgaggtcaggagttcaagaccagcctagccaacatggcgaaaccctgtctctacaaaaatacaaaaattagctgggcatgatgatgggtgccygtaaacccagctggtcatgagcctgaggcagaagaatcgcttgaacctgggaggcggaggttgcacagccgagatcacatcattgtactacag

SEQ ID NO: 548152 - DNA, 1953 bp, Homo sapiens
taaaatagggtacaagtgcatgaagtacctcamcttctaaacagctgccaacatttggggtcagatacccactccttcacccaaggataaaagttggacaaaaagggatctaccatagccaaaacctccaactctctaccctcagaccacataagttcaacacttggcaagaggaaaaacacctgacagaatcactgaagccaggttcctggggtgtactatggtttttcctttcctttttatgcctcaccctatcccaagtgaacaagactccaacagaatcagctaggtgactatgagggagggagagtggcatctcattcactatcaaacttgctgatattgccttgtacctacatgaaacaggaaaagagttggagaaatagctggccagggagtgggctgaaataaagcaatctgcaacatctaccatgtggtatagcaaggataccgaggatgtgtaagtttctcatgggtcaatcgatgctgcgtagaaaatgctgtccaggtttgaactatcttgatcctgaagggggaaagaaattctagcagcaagaggctggatttacttctgggagaggaaactaagagagttagcagagatagagctaagactgctccatcgcctgtgttgatcgagggactgtgcagttgggaagctgtttcagagtttctaggagaactcaatgtgccccattaaagagtgaacatttggatgcagtattcattgtacagttaaggaaaatttatccctttcatccctattctctctcccagtccccaacactagagggataggccctgaaagtgttactgatagagggtcttgactgcaaggtgtccaagttctttgcgttttgaactaagaattggacaaaacgccccgcaaagaaagaataaagcaactaaagaacgaaagcagggatttattgaaaatgaaagtacacttcacagtgtgggagccggcgtgagtagtggctcagaatcttctccggtccaaatacccgctagaggcttcccattggccacttcatttcatgaagtggtggcttgcaattggtctgagtggttgccaaaagcaagcaatcagaggctaaggtgaagttacaaagttgcaaacgaactctcagccagcaagcagtgtgattggttgcagacagccaatttcccatctgccacgcacagaaggtgggggtttgcaaagtagcctctggtccttttgttacttaggcatggcaagttagggttttcctttaaatctggctctaagaagttggagtgaaacagccttaggttccctgcctccagaccttattctcctgcctcaaaaggagagggaaaaactggttaaaaaccccacctttcatcttcagagttgcttaagtcacgagttcagccagagaatgtttgcttggaactgacactggagtgttcaactagacagacttaataacccacactgtgggatgggtaaaagaagttgctcaggttgtctttaaaggatttgctgtgtagtgcttctcgaattttaatgtgcgtgtcacctggagatctcattaaaatgaaaattatgattcagttagtctgggatggggccagagattctgcatttctaacaagctccttaggaatgctgctgattctaggaccacatttaccacattttgacaaaaaaggcactatagagaagggagattcaatagagcacacttggcaaaaatagacaaaaatattaggataaaatatcaatttttatagatcaaaaaatgactgaatattggcaattaaaaaaactaactttgtaccccattgaatattcattcagtaaaatggggaacaatattacatattaaataatttctgcatatcctgacaaatatttttaccctagtcaaatgagaatgtatacatgaagcactgtatggaagtagtagtgacctgtgttggtaggca

SEQ ID NO: 548153 - DNA, 1953 bp, Homo sapiens
taaaatagggtacaagtgcatgaagtacctcaacttctaaacagctgccaacatttggggtcagatacccactccttcacccaaggataaaagttggacaaaaagggatctaccatagccaaaacctccaactctctaccctcagaccacrtaagttcaacacttggcaagaggaaaaacacctgacagaatcactgaagccaggttcctggggtgtactatggtttttcctttcctttttatgcctcaccctatcccaagtgaacaagactccaacagaatcagctaggtgactatgagggagggagagtggcatctcattcactatcaaacttgctgatattgccttgtacctacatgaaacaggaaaagagttggagaaatagctggccagggagtgggctgaaataaagcaatctgcaacatctaccatgtggtatagcaaggataccgaggatgtgtaagtttctcatgggtcaatcgatgctgcgtagaaaatgctgtccaggtttgaactatcttgatcctgaagggggaaagaaattctagcagcaagaggctggatttacttctgggagaggaaactaagagagttagcagagatagagctaagactgctccatcgcctgtgttgatcgagggactgtgcagttgggaagctgtttcagagtttctaggagaactcaatgtgccccattaaagagtgaacatttggatgcagtattcattgtacagttaaggaaaatttatccctttcatccctattctctctcccagtccccaacactagagggataggccctgaaagtgttactgatagagggtcttgactgcaaggtgtccaagttctttgcgttttgaactaagaattggacaaaacgccccgcaaagaaagaataaagcaactaaagaacgaaagcagggatttattgaaaatgaaagtacacttcacagtgtgggagccggcgtgagtagtggctcagaatcttctccggtccaaatacccgctagaggcttcccattggccacttcatttcatgaagtggtggcttgcaattggtctgagtggttgccaaaagcaagcaatcagaggctaaggtgaagttacaaagttgcaaacgaactctcagccagcaagcagtgtgattggttgcagacagccaatttcccatctgccacgcacagaaggtgggggtttgcaaagtagcctctggtccttttgttacttaggcatggcaagttagggttttcctttaaatctggctctaagaagttggagtgaaacagccttaggttccctgcctccagaccttattctcctgcctcaaaaggagagggaaaaactggttaaaaaccccacctttcatcttcagagttgcttaagtcacgagttcagccagagaatgtttgcttggaactgacactggagtgttcaactagacagacttaataacccacactgtgggatgggtaaaagaagttgctcaggttgtctttaaaggatttgctgtgtagtgcttctcgaattttaatgtgcgtgtcacctggagatctcattaaaatgaaaattatgattcagttagtctgggatggggccagagattctgcatttctaacaagctccttaggaatgctgctgattctaggaccacatttaccacattttgacaaaaaaggcactatagagaagggagattcaatagagcacacttggcaaaaatagacaaaaatattaggataaaatatcaatttttatagatcaaaaaatgactgaatattggcaattaaaaaaactaactttgtaccccattgaatattcattcagtaaaatggggaacaatattacatattaaataatttctgcatatcctgacaaatatttttaccctagtcaaatgagaatgtatacatgaagcactgtatggaagtagtagtgacctgtgttggtaggca

SEQ ID NO: 548154 - DNA, 835 bp, Homo sapiens
taccatggattgtgaaactaatatgaggaaaattcaaagttcagtaaggcattaaaagatattcgaaattatgccttttagtggccttctgtgcttacttgtgggccctttattttatatcagaaaactgtctttgcaggataagaaatcactgtgataattaacaaatatattaattttttaaaattagccttcaacattatattaaacataaaatttccatcatttaattacaattgttatgtccttgcatctccttaatttctaaaatatacatggataaattactgatctacaatcaactgacataattaagttttgcaaatatattttcatgctacaaaaactataatgatgtacaagtatttctctctctcatacatacgaacttagaaagtagcagagcagatttatagctacaatgcacgtcgtctagtcaatgatttctttcattgtctttcataacccacaggattttgaaagttggtaatttgactgttttttactacatggctcttaccttactcgtgctttgaaatgagccatcagctgactgctcccacctcccattcaaaccctaaattctgagattctcaggcagagttggaccagcatcttctgggaatatgtagaacagttcatttgaagggaagagacagagagtagctatgaccaagaccaacaccagagcagcttttcctctttgcctttaccactgcccatctctttggtccgcttaagagtgcctcagcatttggtacagctttacagttcagagatccaaggacctgaaagtggtttgtttgtktggtccattcctccctgaagccttgac

SEQ ID NO: 548155 - DNA, 1838 bp, Homo sapiens
aaagagaaaaagagacattttatagttttattacacttatgggagtaagccaaattatttccttagtctcactagttaaatacagcacatttttattgcaaagagaatgttaatatttttatggagcaaatttagaaacaaataccaatgggacatgaaatactctgtggcttttcttacaagattctacactgaattggacaaagatatctcctttaggtagtaaacatagttccagagactgttttttatcttcatttttcagaataatttgatttatcaccagtcacatttagagaaccatttaagaagactttataacttgattaaatctgattgtatcctcatttatccttgtacttgtaccaaggcaattccaaatttatcagacaggaggttaatcacagtgactcatggcagtttgtggggcagggcagggggcaatatcatacagccactttagtttaaattttccataagttaattcaatcatgaaagagttataaaacttcaggaatccacaagaaaacattgagaacatttgtatgttcactagcaatttgattcagcaagaaattgccagagagggagagagagggagcgaggaagtgagggactagggacggagggagggagggagagagagagagaatgaaaaaggggaaaataaaccaaagaagccacagatgctaaatgaatgctcataataaaaatgttagagttagagacacccccaaccccccaccccacacacaaaaagccagaagagaattctttaggttgacaagtttgagagtgaaggagggtaattagggaatttctgagaaattgagaaaggaatggataatgaaaggtttctagaacttttactaatagtggttaattaaatctcctctgatattctacaggcgacttttactacagctttccactactattcaattatttgtatttgcttgacttgtatttactgaagtataggtgcgagcagaaagtaaaccatgaggctgtttgattttaaaccagttattgtatgcatattattacatttttatcttcttacatgattttcttattgttttatggaaacaaaccattctgcagcaacaccaatgttgtaaacttcttgagcaaaggaattgtaatctctttagtgtctggtataaaatcaagaacaaataatatctccctaaaatatactatattaaattgaaccagccgctgattcaaaattctgggatatcaggtagcctcccaggccatgttttaggatcttaaattgttacagattcgtttaactttgtttcctgaaaatataaccaaaattatttgaaccaaacaagggtcttctatgttttatctttattatataattatggggttatttatttwaaaaaaaacccatgcaaacatgtgtttattacacgtgactgcatttggttgttaccacatgttgtgaaacaggctgaagtttggaaggtattatttccattttacagtaagacaaataaggttctaaaagcaacgttacttgttactagtgacagggcatagctgggttaacacccaggtatttgcacgcaagcctatttattcctaaagcagcatactgcttaagtttttaataataaattataatcactctagcttttttgaaattaagaatctaatatagaataaaatgttttattaatgcatatattggaaaacagttttagataatttgaaacaataggctaacaatatattagacattaaattaacttcattttcaacatcatacatataaaaattattatgtaacttatttaattagcccattgaatgttagaatttag

SEQ ID NO: 548156 - DNA, 1838 bp, Homo sapiens
aaagagaaaaagagacattttatagttttattacacttatgggagtaagccaaattatttccttagtctcactagttaaatacagcacatttttattgcaaagagaatgttaatatttttatggagcaaatttagaaacaaataccaatgggacatgaaatactctgtggcttttcttacaagattctacactgaattggacaaagatatctcctttaggtagtaaacatagttccagagactgttttttatcttcatttttcagaataatttgatttatcaccagtcacatttagagaaccatttaagaagactttataacttgattaaatctgattgtatcctcatttatccttgtacttgtaccaaggcaattccaaatttatcagacaggaggttaatcacagtgactcatggcagtttgtggggcagggcagggggcaatatcatacagccactttagtttaaattttccataagttaattcaatcatgaaagagttataaaacttcaggaatccacaagaaaacattgagaacatttgtatgttcactagcaatttgattcagcaagaaattgccagagagggagagagagggagcgaggaagtgagggactagggacggagggagggagggagagagagagagaatgaaaaaggggaaaataaaccaaagaagccacagatgctaaatgaatgctcataataaaaatgttagagttagagacacccccaaccccccaccccacacacaaaaagccagaagagaattctttaggttgacaagtttgagagtgaaggagggtaattagggaatttctgagaaattgagaaaggaatggataatgaaaggtttctagaacttttactaatagtggttaattaaatctcctctgatattctacaggcgacttttactacagctttccactactattcaattatttgtatttgcttgacttgtatttactgaagtataggtgcgagcagaaagtaaaccatgaggctgtttgattttaaaccagttattgtatgcatattattacatttttatcttcttacatgattttcttattgttttatggaaacaaaccattctgcagcaacaccaatgttgtaaacttcttgagcaaaggaattgtaatctctttagtgtctggtataaaatcaagaacaaataatatctccctaaaatatactatattaaattgaaccagccgctgattcaaaattctgggatatcaggtagcctcccaggccatgttttaggatcttaaattgttacagattcgtttaactttgtttcctgaaaatataaccaaaattatttgaaccaaacaagggtcttctatgttttatctttattatataattatggggttatttattttaaaaaaaacccatgcaaacatgtgtttattacacgtgactgcatttggttgttaccacatgttgtgaaacaggctgaagtttggaaggtattatttccattttacagtaagacaaataaggttctaaaagcaacgttacttgttactagtgacagggcatagctgggttaacacccaggtatttgcacgcaagcctatttattcctaaagcagcatactgcttaagtttttaataataaattataatcactctagcttttttgaaattaagaatctaatatagaataaaatgttttattaatgcatatattggaaaacagttttagataatttgaaacaataggctaacaatatattagayattaaattaacttcattttcaacatcatacatataaaaattattatgtaacttatttaattagcccattgaatgttagaatttag

SEQ ID NO: 548157 - DNA, 1299 bp, Homo sapiens
attgttctacaagctaaattgattttcttaaaagaacctctgattcatggaagtcctctgctcaagaaactccaatgatttctattatatattgaacaaaggtaaagagggagattagatttattgaacttctagatacaacataatcccacttaaccttcagcaaaactctatgaagtagataagattgtctctctggaggagaaacctgagctttcataaaagcaagcaatttagagggttatatctccctgccagagggaacctctgtgaagacagatcatgtctgtcttgttcacattgtatgttcagcaactattatgtctggcagattttctggacatatttgttgaatgaatgaattacacaaaactgaacttataccctttctattagtccatactatgtttcttgagtttcatattcccacttagcaatagtttacttatctctgtatacaaaattatataagcaagattggaataatgtttgactgtttgtttcctgaagagcctctgagatctggccccatctattgtttttactcaaaccatagagatgcactttgttcacaaatgtttttacatagatcaacaagttctacgctgtgttttctgcaacatctagcatgtcctattttgatatatttaaattaacgtggagacttaaagccacatatgaagcgatccaaattcggaatcactctggatttttacaatttccaccctttttaaatattaatagttgttctgcctaactaattcaatgtccattatagccatgatttacttttacggaatcttggcaaagtatgtaacttagcacgcgaaaatgataaaaatgataactacctttctttctggattcatgtcatcattttttcattacaacaacacacaggctattttaaagagttgtgcatataggaacaaatgcaactgacacgtggtaagcatatatcccaggtagaaagaacagaagtgattgggtatactagagtattgcttctcaaattttaacgtgcataagagataaaattcacattctgatttagtaggcctagatttgtggcctgaacgtcggcatttttaacaagctttcagttgtggctgctgctgcagatccttggatcacaatttgaagagcamgatttctgttaataaccacatcttttcactatgttacaaacatcaatagttatgttttcagagaaaagagacttagcttgttaagtgtaggtcaggttaagggaattttacttctataattataagctcgatcctagggtatgaatgtttg

SEQ ID NO: 548158 - DNA, 1097 bp, Homo sapiens
agaatccagggtcacataaaaccaacaagaagttatctaacaacctttgaatcttgttaatctgagtctttaaagaatagctacatgattagaagcctgtgtatggggtcaactaatttttccacgataacgaaaagtacaccctgatagtcaatccaaaactatggatggttaacagtaataggaaggtaatccgaacaaaacaaaagaaataaaaatcatgyatttcagtagtgactcatttaaagaatacctataaatatgctaagaatgctttaaaataaaatgctacaacaaattctataatgtaaaacagtaaattactcaaaacaagaaaaaaggtgaaatgaaatgacaatgtatttgatcaaatttccaggtattgaaaagaaacaatgttaaaaacagtaatttctccaactgcaaacaagataaaaagttgcagctgggcatggtggctcacgcctgtaatcccagcactttgggaggctcacatgggcagattacctgaggtcaggggttcgagaccagcctggtcaacatggcaaaaccctgtctctaccaaaaatacaaaaataagctgggcatggtggcgggtgcctgtaatcccagctacttgggaggctgaggcaggagaattgcttgaacctgggaggcagaggtgagctgagatcgtgccactgcactccagcctaggtgacagagcaggactcagtctcaaaaaaaaaaaaaaaaaaaagttgcaacagtctgtagtacacagacctgcagatcatgagcatttaaattaaactccaaaatcgacaatattactgtatttccctggtgatggcagacctacaggaatcaactgaacaagacattactcaatgacatgaaagtcaattccatctgaatcctttttaaaaagctggattagaccagcaagctccacgtatgattcataattgctataaaaaagacaactacaatgtattgtctttgtgtgttctaagtactgtgctaggcatttttttctctgaggcagggtctccctctgtcacccaggctggagtgcagtggagtgatcaaagctataacctcaaactcttgggctc

SEQ ID NO: 548159 - DNA, 1097 bp, Homo sapiens
agaatccagggtcacataaaaccaacaagaagttatctaacaacctttgaatcttgttaatctgagtctttaaagaatagctacatgattagaagcctgtgtatggggtcaactaatttttccacgataacgaaaagtacaccctgatagtcaatccaaaactatggatggttaacagtaataggaaggtaatccgaacaaaacaaaagaaataaaaatcatgtatttcagtagtgactcatttaaagaatacctataaatatrctaagaatgctttaaaataaaatgctacaacaaattctataatgtaaaacagtaaattactcaaaacaagaaaaaaggtgaaatgaaatgacaatgtatttgatcaaatttccaggtattgaaaagaaacaatgttaaaaacagtaatttctccaactgcaaacaagataaaaagttgcagctgggcatggtggctcacgcctgtaatcccagcactttgggaggctcacatgggcagattacctgaggtcaggggttcgagaccagcctggtcaacatggcaaaaccctgtctctaccaaaaatacaaaaataagctgggcatggtggcgggtgcctgtaatcccagctacttgggaggctgaggcaggagaattgcttgaacctgggaggcagaggtgagctgagatcgtgccactgcactccagcctaggtgacagagcaggactcagtctcaaaaaaaaaaaaaaaaaaaagttgcaacagtctgtagtacacagacctgcagatcatgagcatttaaattaaactccaaaatcgacaatattactgtatttccctggtgatggcagacctacaggaatcaactgaacaagacattactcaatgacatgaaagtcaattccatctgaatcctttttaaaaagctggattagaccagcaagctccacgtatgattcataattgctataaaaaagacaactacaatgtattgtctttgtgtgttctaagtactgtgctaggcatttttttctctgaggcagggtctccctctgtcacccaggctggagtgcagtggagtgatcaaagctataacctcaaactcttgggctc

SEQ ID NO: 548160 - DNA, 541 bp, Homo sapiens
ttacttggtggtgaaacattggtagaaagagctcagtgacctgagttcaccattgccattcacctcatgatctagctttctgtgccttctcattatacggtgataaaaagcacatagcgtaaaatttaccatcttaactattttgaagtttatatttaatatctgtgcctttctgacttcscatttttaaaatatctgctcaatcatgcccttctgtttgtgcatcatgacatttataaagtaaaacataagcacttgctatagtctaaagctttgtgtcctcccaaaattcacatgttgaaatcctaacctggaaggtgatggtattaggagatgattagatcatgaggatggagacttcatgaatgggattagggcccttgtaaaagaggtcccagagaactgtcttgcttcttccaccacgtgaggatacagagaataggcttctatgaatcaggaagcaggccctcaccagacatggaatttcccagcaccttgatcttggacttcccagcctccagaattgtaaggaataaattat

SEQ ID NO: 548161 - DNA, 512 bp, Homo sapiens
aacaaaaaaatctgcatctgcttatcataattcgctgcataaaagatctaaatgtgtaactggcaatcagctttagctttgattgtctttcatagcagcatggatcaattatgtttacccagttggctatttctccatgctaaactcatattgcatacatgcctctgaaattccagtcatgtatagtctataatatatacctatattacacaatttgtatacttttccactttaaaggggggatttatacctgcaaagggacttgacctacaagtatcatccaattctgttccaaattttggatactatgactctatcctggaaatgattcagtagttttgtttcatttgactcttcctacagacataatgtgttgaagtaaacctrttttttatgtttggaaagtagccttttgatgggtgttttctagcttttggaaaacatgtactcgaagcagaagtaactagttgttgagggaatagaaccacaacatttctgacctaggcaaattg

SEQ ID NO: 548162 - DNA, 614 bp, Homo sapiens
tcacagctacaaagcaagcaaagtggctgtaacaaaacagccaaaaatargagtataatttgttctggctagagccacaatactgacttcccacttggaggaaatccccaaggtttaaaaggttatcaaacactgtcttaaccaaataacattttctagcttaaataaatatagtaagttaaatagaattttaaatattctacttttagactcttaatttccaaccgatagtgtttacaacagattaaaagatgatcataaagtataatcaaatcactacaactaaaatagggaattgtgaaataaaaaatatttttgagaacccagtagtactaaactttttagttttggggaaatttctctgtgatgtctttctaagtaatgaagtgagatgtatttcaaaacttctggttttcaattataagatctattttgatgagacaagttacatattttaaaacaaatattcacaatgtagtattttaccaaataataaagggcttaagtgaaaaaacaaagtaaattggctgtattagctaaaatatactgctcttagttgtgtttttcagctctgtcaaatccattaggctcgtttttataccagctctttcatc

SEQ ID NO: 548163 - DNA, 614 bp, Homo sapiens
tcacagctacaaagcaagcaaagtggctgtaacaaaacagccaaaaataagagtataatttgttctggctagagccacaatactgacttcccacttggaggaaatccccaaggtttaaaaggttatcaaacactgtcttaaccaaataacattttctagcttaaataaatatagtaagttaaatagaattttaaatattytacttttagactcttaatttccaaccgatagtgtttacaacagattaaaagatgatcataaagtataatcaaatcactacaactaaaatagggaattgtgaaataaaaaatatttttgagaacccagtagtactaaactttttagttttggggaaatttctctgtgatgtctttctaagtaatgaagtgagatgtatttcaaaacttctggttttcaattataagatctattttgatgagacaagttacatattttaaaacaaatattcacaatgtagtattttaccaaataataaagggcttaagtgaaaaaacaaagtaaattggctgtattagctaaaatatactgctcttagttgtgtttttcagctctgtcaaatccattaggctcgtttttataccagctctttcatc

SEQ ID NO: 548164 - DNA, 614 bp, Homo sapiens
tcacagctacaaagcaagcaaagtggctgtaacaaaacagccaaaaataagagtataatttgttctggctagagccacaatactgacttcccacttggaggaaatccccaaggtttaaaaggttatcaaacactgtcttaaccaaataacattttctagcttaaataaatatagtaagttaaatagaattttaaatattctacttttagactcttaatttccaaccratagtgtttacaacagattaaaagatgatcataaagtataatcaaatcactacaactaaaatagggaattgtgaaataaaaaatatttttgagaacccagtagtactaaactttttagttttggggaaatttctctgtgatgtctttctaagtaatgaagtgagatgtatttcaaaacttctggttttcaattataagatctattttgatgagacaagttacatattttaaaacaaatattcacaatgtagtattttaccaaataataaagggcttaagtgaaaaaacaaagtaaattggctgtattagctaaaatatactgctcttagttgtgtttttcagctctgtcaaatccattaggctcgtttttataccagctctttcatc

SEQ ID NO: 548165 - DNA, 614 bp, Homo sapiens
tcacagctacaaagcaagcaaagtggctgtaacaaaacagccaaaaataagagtataatttgttctggctagagccacaatactgacttcccacttggaggaaatccccaaggtttaaaaggttatcaaacactgtcttaaccaaataacattttctagcttaaataaatatagtaagttaaatagaattttaaatattctacttttagactcttaatttccaaccgatagtgtttacaacagattaaaagatgatcataaagtataatcaaatcactacaactaaaatagggaattgtgaaataaaawatatttttgagaacccagtagtactaaactttttagttttggggaaatttctctgtgatgtctttctaagtaatgaagtgagatgtatttcaaaacttctggttttcaattataagatctattttgatgagacaagttacatattttaaaacaaatattcacaatgtagtattttaccaaataataaagggcttaagtgaaaaaacaaagtaaattggctgtattagctaaaatatactgctcttagttgtgtttttcagctctgtcaaatccattaggctcgtttttataccagctctttcatc

SEQ ID NO: 548166 - DNA, 2221 bp, Homo sapiens
attttctaaaaataagatgctgttaatacaagcagaaaagtggggcttagaaaaatatccactgtcaaaagacaaagaaaggtgaaaaagcaaatcgcaagcttttggtacacataccttatcatagcagagacagggtgttttttctagagaaatcacccacagtgagtatctgcaaataatagaaatctgtaatagcatcattgctgaagctagaagagagttaatgtagaaaaggtcacagggagctggaatgaatattctgtggcgtcaggtaccaagtcagagaggcgtgcgtggcagagtaggatcaacttgatgcctggagtcccagagacctgggctggcgtctggctaggtcacaagtcatgtgatgataataagtcggttaacctttgtggttccctgataatggcagataagcacatttcaaattgagagaggtttaaatgagacagtgcttgttgatagtgcatagtggagtgtgaagaaatataatctacttttaccaaatgccagttccccaggatccctcacccttgctggagtatttggaacagggatccttggacacgtgggttggaaatgaggcaccctgagcaatggtaacaggccagcaggggatctctttacagataaaattccagtggctggggtatcctgccctgggaatagaaggtgtgtggtttgcagtttaacagttttatcacactgtataatgtggctgggcatccatagcaagctcagccctgggcttggtatgatgggcttcgaaggtgagaaagcacccagtgtggccttgagcacacctgcaatgaccaatctttgcattgtgtacccttctctgagcacctgcagtgtccctgttccctgcatccgccaaggttgcttacagcaaaggttattttgcacccataggcatggatgtaagtcatggacttccttctataagggcaagtgtgtgaatgggaaaggtgttttaggaattaagaaacaggctggaaagtaattcttttcgaatgggattttcttgacttctctggatggctctgacaggcaaaggtatctcttgtcaccgtcaattgatttgaaggtactgtgatcacaacatagagtggggcagggaggagggcaacactgacttccactgctgaaagtgcttcttttttttttttttttttttagacagagtcttgctctgtcgcccaggctggagtgcagtggtgtgatcttggtttgctgaaaactccgcctcctgggttcaagagattctcctgcttcagcctcctgagtagctgggattataggcgcacgtcatcatgcccaactaatttttgtatttttagtagagacggggtttcaccatgttggtcaggctggtctcgaactcctgacctcctgatccacctgtgtcggcctcccaaaggtgcttyttgaagggttgcgtattcacccacgatttgagagagggaggattattcccagtagaaggaatcagggaacacagggtacacaggcttaaaagcaagtcaggctggatctgagggggctggaggagtagcatctgaggatttgtaggaggcccaagcaaacaggtgtgtgcagggagaatggtgggcattggtcatgagcaaaaattattctacagagctttagcatgacaatattaaactactgaatcttggagtggtatgagagagtctgcctttcaaaaggatatcatttggagacgaagcagagggtcgaacctggagccagagaaaccaggagagaggctgctgcaaagtgatgagggtgtatggagggtgatgagtggtgggaccactggccaggagagggcaagtgaaggcaaaagtgctgtgactccatgactaatgtcatgtgatagcaaatcaaaccggagagctgagactagctgtcagattcctgacttactagatggtggcaccatagtctcagctaagaagaacccattaagattttgggggagacaatgaattcagatttgggtagtgcatttgagacctcaggaggaagagacacggagaagagtcagggttggggatatcaacttgagaagtgtccttcagtagctcacagtggtggctaaccaaaggttgagggccattgtccacgaggactgtgtgtcctgagaagagaggggaggcacaaaaacacacagaacctctaggcgggctgctggcatatgcaacagctgcag

SEQ ID NO: 548167 - DNA, 965 bp, Homo sapiens
caaacaatctgtggtattttgttatggcagccctaacaaactaatacactatttaactttacttcatatttaagtattttagctaggattaaaccattcatttatttaaaatatttatttgaattataaatgctggtttattactaaaacaaaagtcagaattttatttttaagtaggttcccatcagcttaactaatgccacttgactggcaacatttaccaaatrctaattattttaaggcactgtcattgactcctgaaataacaagattaattaagcacaacccctctcctcaagtcgtctttgatctgtctaagaataattgacaaatattccattatttttgtccaatacagcagccaggaaacagggtagagaaccacagtttgagcccaagtctttttttttttcttctttgagactgagtttcactctgtcacccaggctgaagtgcagtggcatgatcttgactcattgcaacttctgcctcctgggctcaagtgattctcctgcctcagcctcctgagtagctgggattacaggcatgcaccaccacgctcagcttatttttttttatttttatttttttcagtagagacaaggtttcaccatgttggccaggctggtcttgaactcctgacctcaagtgatccacccacctcggcctcccaaagtgctgggactaccagcgtgagccagcatgcccagcgaacccatgtcttattcatagatcaccttgagaaatatctggtaaactggtaggcaggctacgttatctgcctcctctaaaaccatcaaatcataacaaaaacttatcctaactaagagagagagagagagagagagagagagagagagatgctctccaaaggtttttgtcagaactcaggatactccggtaaggccagtttcatgtgcttagtatgtatttattgcagaagctagatatctgctgatgtggca

SEQ ID NO: 548168 - DNA, 965 bp, Homo sapiens
caaacaatctgtggtattttgttatggcagccctaacaaactaatacactatttaactttacttcatatttaagtattttagctaggattaaaccattcatttatttaaaatatttatttgaattataaatgctggtttattactaaaacaaaagtcagaattttatttttaagtaggttcccatcagcttaactaatgccacttgactggcaacatttaccaaatactaattattttaaggcactgtcattgactcctgaaataacaagattaattaagcacaacccctctcctcaagtcgtctttgatctgtctaagaataattgacaaatattccattatttttgtccaatacagcagccaggaaacagggtagagaascacagtttgagcccaagtctttttttttttcttctttgagactgagtttcactctgtcacccaggctgaagtgcagtggcatgatcttgactcattgcaacttctgcctcctgggctcaagtgattctcctgcctcagcctcctgagtagctgggattacaggcatgcaccaccacgctcagcttatttttttttatttttatttttttcagtagagacaaggtttcaccatgttggccaggctggtcttgaactcctgacctcaagtgatccacccacctcggcctcccaaagtgctgggactaccagcgtgagccagcatgcccagcgaacccatgtcttattcatagatcaccttgagaaatatctggtaaactggtaggcaggctacgttatctgcctcctctaaaaccatcaaatcataacaaaaacttatcctaactaagagagagagagagagagagagagagagagagagatgctctccaaaggtttttgtcagaactcaggatactccggtaaggccagtttcatgtgcttagtatgtatttattgcagaagctagatatctgctgatgtggca

SEQ ID NO: 548169 - DNA, 965 bp, Homo sapiens
caaacaatctgtggtattttgttatggcagccctaacaaactaatacactatttaactttacttcatatttaagtattttagctaggattaaaccattcatttatttaaaatatttatttgaattataaatgctggtttattactaaaacaaaagtcagaattttatttttaagtaggttcccatcagcttaactaatgccacttgactggcaacatttaccaaatactaattattttaaggcactgtcattgactcctgaaataacaagattaattaagcacaacccctctcctcaagtcgtctttgatctgtctaagaataattgacaaatattccattatttttgtccaatacagcagccaggaaacagggtagagaaccacagtttgagcccaagtctttttttttttcttctttgagactgagtttcactctgtcacccaggctgaagtgcagtggcatgatcttgactcattgcaacttctgcctcctgggctcaagtgattctcctgcctcagcctcctgagtagctgggattacaggcatgcaccaccacgctcagcttatttttttttatttttatwtttttcagtagagacaaggtttcaccatgttggccaggctggtcttgaactcctgacctcaagtgatccacccacctcggcctcccaaagtgctgggactaccagcgtgagccagcatgcccagcgaacccatgtcttattcatagatcaccttgagaaatatctggtaaactggtaggcaggctacgttatctgcctcctctaaaaccatcaaatcataacaaaaacttatcctaactaagagagagagagagagagagagagagagagagagatgctctccaaaggtttttgtcagaactcaggatactccggtaaggccagtttcatgtgcttagtatgtatttattgcagaagctagatatctgctgatgtggca

SEQ ID NO: 548170 - DNA, 965 bp, Homo sapiens
caaacaatctgtggtattttgttatggcagccctaacaaactaatacactatttaactttacttcatatttaagtattttagctaggattaaaccattcatttatttaaaatatttatttgaattataaatgctggtttattactaaaacaaaagtcagaattttatttttaagtaggttcccatcagcttaactaatgccacttgactggcaacatttaccaaatactaattattttaaggcactgtcattgactcctgaaataacaagattaattaagcacaacccctctcctcaagtcgtctttgatctgtctaagaataattgacaaatattccattatttttgtccaatacagcagccaggaaacagggtagagaaccacagtttgagcccaagtctttttttttttcttctttgagactgagtttcactctgtcacccaggctgaagtgcagtggcatgatcttgactcattgcaacttctgcctcctgggctcaagtgattctcctgcctcagcctcctgagtagctgggattacaggcatgcaccaccacgctcagcttatttttttttatttttatttttttcagtagagacaaggtttcaccatgttggccaggctggtcttgaactcctgacctcaagtgatccacccacctcggcctcccaaagtgctgggactaccagcgtgagccagcatgcccagcgaacccatgtcttattcatagatcaccttgagaaatatctggtaaactggtaggcaggctacgttatctgcctcctctaaaaccatcaaatyataacaaaaacttatcctaactaagagagagagagagagagagagagagagagagagatgctctccaaaggtttttgtcagaactcaggatactccggtaaggccagtttcatgtgcttagtatgtatttattgcagaagctagatatctgctgatgtggca

SEQ ID NO: 548171 - DNA, 1856 bp, Homo sapiens
tgactcaccacttcctagaatggaagtcacgaccttgaaatcctgagacttggaggaaatagaggatatgtttgatgtactgaactgtctttaaaaataatgtaaatttagcactttgggaggccgaggcgggtggatcacgaggtcaggagatcgagagcatcctggctaacacggtgaaaccccatctctactaaaaacacaaaaaattagccaggtgtggtcgcgcgcgcctgtagtcccagccactcaggaggctgagacaggagagtggcgtgaacctgggaggcagagcttgcagtgacccgagatggcacaattgcagtccactctgggcgacagagcgagactccgtctcaaaaataataataataataataataatgtaaatgtagaaacctttgggggagtgagcagtccccagtggaagtataatttccaggctatctcacacaagcctgcttggccccaggacatcctgttgtgatggagaacatcataaagctcctccaccaacatggaatccatagagaatattcttacctagatacaaaaagttcagtattctatcatgactttaatataagggaaaaataaaaggaaggtgatttacaataaaagaatgcacacttgaaatgttcgggcatgactacacaagaagatataatgacacagccaaatgtttgcacctatgtgtaataaatcaacttgaatttaggagaagtaagatgattcagaaatgcatttctttttttccagtgtctcttctrcagaatattttctgaatcataatcattgcagattaaaaatcccacaaaaaatgttcatacaaggagtcaggctcttggctcagaaaattctgaagaagtttctcgcctccatgaatgcttaaagagtcaaatacaaaatgagataatcctttgttgggggaactgttcacgtttcagaacttttggcatcctttgctccacctgcagagagccaacaaaatccttcactaattttaggaaccaaaaaacaaatttccccacttctcagtacagccttcaatactggtctgtcatttctgcctgaccttgtttcttctcccaacacatctatccatttgttgattcattcactggttatgcttataacgttgtcattatatccttgtctcagttttcttatcagtaagggtaagcagcttcgcagaattttaggaaggattaagtgatgcgtgcaaaatacttagagcccacaagaagaacttgattaatgttgttcttattattgctgtattgaatgtatcctttagtactttctttttgtatagtaccatatggcatagatgtgtgtgcacaccacccccctcacacacaaatacacacaccaaatatttcaaaggaatatatagtgaaaattcctcctatgtgcctaaatcttcctcggtacccttccccagaacagccactgtgtcttcccagaaattgtgttaagaaacaaacatgtatatccttttgtgctgtgttttgtagaagtggaagctttctgtgcagccagttttgcattgtgttcctcaccaacaggatctgtcggacgccgtgtatatagttcttcctcattctctttaatggctatgtgatgttgcattttatggatgaaccataatcctcaaaaacattcgttaggttgtgttgataacatagaaatgtctaaagcagtgaacaaagtagcccattatctcaggacccagataaccaagttaacatttttttagcaaaataaaagtagaagatgcagatgataaaagtaaaagcaggtcagtaacagtacagtaagaaaagtagaaatctcctgtcattttctgaagtccc

SEQ ID NO: 548172 - DNA, 1856 bp, Homo sapiens
tgactcaccacttcctagaatggaagtcacgaccttgaaatcctgagacttggaggaaatagaggatatgtttgatgtactgaactgtctttaaaaataatgtaaatttagcactttgggaggccgaggcgggtggatcacgaggtcaggagatcgagagcatcctggctaacacggtgaaaccccatctctactaaaaacacaaaaaattagccaggtgtggtcgcgcgcgcctgtagtcccagccactcaggaggctgagacaggagagtggcgtgaacctgggaggcagagcttgcagtgacccgagatggcacaattgcagtccactctgggcgacagagcgagactccgtctcaaaaataataataataataataataatgtaaatgtagaaacctttgggggagtgagcagtccccagtggaagtataatttccaggctatctcacacaagcctgcttggccccaggacatcctgttgtgatggagaacatcataaagctcctccaccaacatggaatccatagagaatattcttacctagatacaaaaagttcagtattctatcatgactttaatataagggaaaaataaaaggaaggtgatttacaataaaagaatgcacacttgaaatgttcgggcatgactacacaagaagatataatgacacagccaaatgtttgcacctatgtgtaataaatcaacttgaatttaggagaagtaagatgattcagaaatgcatttctttttttccagtgtctcttctacagaatattttctgaatcataatcattgcagattaaaaatcccacaaaaaatgttcatacaaggagtcaggctcttggctcagaaaattctgaagaagtttctcgcctccatgaatgcttaaagagtcaaatacaaaatgagataatcctttgttgggggaactgttcacgtttcagaacttttggcatcctttgctccacctgcagagagccaacaaaatccttcactaattttaggaaccaaaaaacaaatttccccacttctcagtacagccttcaatactggtctgtcatttctgcctgaccttgtttcttctcccaacacatctatccatttgttgattcattcactggttatgcttataacgttgtcattatatccttgtctcagttttcttatcagtaagggtaagcagcttcgcagaattttaggaaggattaagtgatgcgtgcaaaatacttagagcccacaagaagaacttgattaatgttgttcttattattgctgtattgaatgtatcctttagtactttctttttgtatagtaccatatggcatagatgtgtgtgcacaccacccccctcacacacaaatacacacaccaaatatttcaaaggaatatatagtgaaaattcctcctatgtgcctaaatcttcctcggtacccttccccagaacagccactgtgtcttcccagaaaktgtgttaagaaacaaacatgtatatccttttgtgctgtgttttgtagaagtggaagctttctgtgcagccagttttgcattgtgttcctcaccaacaggatctgtcggacgccgtgtatatagttcttcctcattctctttaatggctatgtgatgttgcattttatggatgaaccataatcctcaaaaacattcgttaggttgtgttgataacatagaaatgtctaaagcagtgaacaaagtagcccattatctcaggacccagataaccaagttaacatttttttagcaaaataaaagtagaagatgcagatgataaaagtaaaagcaggtcagtaacagtacagtaagaaaagtagaaatctcctgtcattttctgaagtccc

SEQ ID NO: 548173 - DNA, 650 bp, Homo sapiens
tatctctctataccacagcctcatctctggagtctttaagtagcatgtgaatatgccatgcctttgtccatgccactcctttccccacgatgcccttccttctgcttccgcactccaggtttccacacagccatcaaggttcggtttgaacagcacatctttgcatgcgtgtgctgtcgacatatctgctttacctccaatgcaggcagctcaatctttgcgtcctgatatccagcaccatgagttcagcagacatttgtggtgctcaatacttatttactagcttttattgctgaattttgtaggctggattagctctgtctttcattcaatttaaagaaacttgccatagtctctgccgtgtgggcaaagtgtaaatgtacgtcctgtaggagaaactccaacttctttctgcttcttcagtctcattgtcaatcatggaaacatctaataccaactaatatttacagagtgcttatagataagtatcacgctagtacttggcacatcttatttgaattttttcaataagccaatgagattgggattgtgattattctcactgtggcrgatgaagaaatcgaggtttagagaggtctcacaactgacaaacaaacaaaaaaccaaaaacaacaacaacaacaacaaaa

SEQ ID NO: 548174 - DNA, 1085 bp, Homo sapiens
ggagccaatatatcataattattttgctttaagcatgtatttcattatgcaactaataactttctgaaaacaagagactaatatgacttctgctcctgtcatttaactcaaagtgtttcaacccattcccattatttataactacatgggtcctgattaaaatacacctatggggtaagatgcaactgggatacagtgagaagactggtactcctaactgtcaaaggtaattattttaaactgttctgagaattaggagaatagagttaacacagagctgttgctaggatataaacatttctcagaaattttccatatacaaacttcatcaagatcaatagctttggttactctcctctcaaatagtaattaattgagaagggcttagggcaaattaattacttctttttgtttgagcttactcattaaaaataactttcacatagatcataataaacagggtttgccacaaagtaagtgcttaataagtgttgtttaataagattctagcaatgaatacaatgctttataatattattatattaaatgtagagtgaggagggagctggatgtaaggacagttttaacttacaatacaggaaaataaacccttatttcttactctgtctgagaagtaatggggaggttgggtgggggtggaagagagagagagagagcgagaagaaaggagactaatttttatggccaaaacaaaggtatttccatggaaccttttgttaaagcctctgaaaaagaaaagaaaatgcctaacatattctagccagaaaaaaaaaaaaaaggtttttggaaagattaactgaatatttgttagtgtctgtggtttgtttaattaagtctaaaaaggtatgtctgaaaaaagtaatttgagtgtgaattttgatacatagaccagactggaaccatatgaagaaaaycacaagctttttgagaattgtgttggcaaaaatgatgacagtctggatcaaaagggaataagatggtttaatatgaaaaatacttctgttcctccactttttaaattgagaaagcaagctgataaagcaactgagctacaaagaaaggca

SEQ ID NO: 548175 - DNA, 1971 bp, Homo sapiens
tcttaatgttctcggaggacttactttttcattgtctacacaatccattgagatccatttcaggatctcaacacatctaactcagctacaggggaaattattaggttgtgatgtttaccttttgtggtgatttccctaaatgaaataggctaacttaatagaagggagggtctgtttatgttttatccmcaataaacctcaaatatagacttttttaaaaaggctcttaaatctgattggctgttattatctcctgggaaagttttaaaaacacatatttccaggctcaccccctatccactgaatcataatttatattggtagggtgaaaaaaataaggatttaaaaaaaaatctgaagcattttatttgcaatcacggacaaggaaatgacacttacaatcagacaaattttggaaccactgatccagaatattctaaggtatttaatgaataggtaatatttgatttagaataattgatatataattataccaaaaattggaagatagattctataaaaatagtagtttaaaccttaaaactttcaactaacttgactctgaaaattacattattggattaatgacttctaaatctaaaatttaactttagttttacaaattacttcattcactcaataagtattgagctagcctgtggaagatagaatgacaaataaacaaaatcctcacccttaggcgccttgaatgattgttacaccaatccatcaggagtttaaacagccctgtgcaatattggatatcattagtcttaattcataaagatgaaactgacgcatttcttcctactttcttcattcacatcattgtctcaacaaaggtgccactaatttaaaagggaaaaggatccaaaagtacagctggatataaagaacaagttctaatgttctataacactgtaggatgaccataatatatattttcaaatagctagaagaaaggatattggatgttcccaacacagagaaatgataaatgtttgagatgatggatttgtaattagcccaatctgatatacatacatatgttatatgcattggaacatcactatgtaccccataaatatgtacaattattatgtgtcactttaaagaaaaaagctaagaaaaggtaaaaaatatgatcaggtttttctttcccaaaattgtctatatgcccatgtggttatttttaccttccttgtaaaatttgtgtaactatatttataatagctatgtactctattataggaaaaatccttacctctaatggtatggaagaaatcacttgtcttctaacaaaattcactgaaagctagaattttttcaactcatctttttgcaggctctggttttcagctcaccactaagtatatgcacaggactctcattctatactcaataatctgtgaaccagctgcaaatgatactgggatgggcattccataactctcctacactgaatgtggaaccatctaaaaagcattattcagcaccttttatgaacacaagctcaaacaggaagcaaaacgagtgtgtagcagaaagtgaaatcagtttctgctttggggtatctgagaagccgtcttattgggtcttaaatacgtgcagggatttcagctggtgagcgtagaggtgggcctggggagagagcaaggatgacacaccatgtcccaagcaggagagacagctcgagccagagcactgaagcaagggggtcggtgttatcaagagaatgtggaggacgattctggatcatagagcaatggagctaatggtgtctggagaattaataagagtttcctataggaagcaatatctgagctgagacctcaaacaagctgtgggagttatccaggcaaaaaaggagtggaggtggggtggggagtgaagggtgacagaaaaatgagttattaagaatgaaaagagatataaagtgaataggagatagaaccagtgagatctagaata

SEQ ID NO: 548176 - DNA, 655 bp, Homo sapiens
tactgaaaggactggcactgtcctgtcatttttaattatgtctctatcratattttgggtgaaaacctgaagcctgctttcccaggaaggaaattcaattgtggggcaaaaaaaaaaaaaaaaccatttttccccccatttaatcactatgtctttgcttgagttcctggatctgatcatcactagatttccatcttatacttctgcctgtttcttcaaagtgtccttggctagttcctcctcatatccttgatatctaaaaattggagtggcccagagcttaattcctggacacttttctctcttttaggtacattaatacctttgatggtataatccaattgcttggagtatcgcccttaagctaataaatgcagatgtgtactttaagcccattcttcctccctggattctacacatgctatacaactacctagttttcgtgattttgtactgtgtcaacttggctaagctgggatatgatttcccatgattctcttccccgtgcactgccaagttatggttgatcacacaaaaaaattgagattcggaaacaaagcaggggtcgttaagcagggaatgttgatgcagggtgccagaggctgctgcagttcacacacattttcactaatctgctggctcaccttgctaatga

SEQ ID NO: 548177 - DNA, 655 bp, Homo sapiens
tactgaaaggactggcactgtcctgtcatttttaattatgtctctatcgatattttgggtgaaaacctgaagcctgctttcccaggaaggaaattcaattgtggggcaaaaaaaaaaaaaaaaccatttttccccccatttaatcactatgtctttgcttgagttcctggatctgatcatcactagatttccatcttatacttctgcctgtttcttcaaagtgtccttggctagttcctcctcatatccttgatatctaaaaattggagtggcccagagcttaattcctggacacttttctctcttttaggtacattaatacctttgatggtataatccaattgcttggagtatcrcccttaagctaataaatgcagatgtgtactttaagcccattcttcctccctggattctacacatgctatacaactacctagttttcgtgattttgtactgtgtcaacttggctaagctgggatatgatttcccatgattctcttccccgtgcactgccaagttatggttgatcacacaaaaaaattgagattcggaaacaaagcaggggtcgttaagcagggaatgttgatgcagggtgccagaggctgctgcagttcacacacattttcactaatctgctggctcaccttgctaatga

SEQ ID NO: 548178 - DNA, 655 bp, Homo sapiens
tactgaaaggactggcactgtcctgtcatttttaattatgtctctatcgatattttgggtgaaaacctgaagcctgctttcccaggaaggaaattcaattgtggggcaaaaaaaaaaaaaaaaccatttttccccccatttaatcactatgtctttgcttgagttcctggatctgatcatcactagatttccatcttatacttctgcctgtttcttcaaagtgtccttggctagttcctcctcatatccttgatatctaaaaattggagtggcccagagcttaattcctggacacttttctctcttttaggtacattaatacctttgatggtataatccaattgcttggagtatcgcccttaagctaataaatgcagatgtgtactttaagcccattcttcctccctggattctacacatgctatacaactacctagttttcgtgattttgtactgtgtcaacttggctaagctgggatatgatttcccatrattctcttccccgtgcactgccaagttatggttgatcacacaaaaaaattgagattcggaaacaaagcaggggtcgttaagcagggaatgttgatgcagggtgccagaggctgctgcagttcacacacattttcactaatctgctggctcaccttgctaatga

SEQ ID NO: 548179 - DNA, 484 bp, Homo sapiens
ccaagttgagaaagactatgggaagatttgggtggaagcatgggggccaagctgtggcaacatcccgctgggagatgatagtgatcctgaccgggttcacggtggtggtgagagatggtcagagcctggatacatgttgaagtcagtcagtaggatttcctgacagactggatgtgagctgtgagagaaggcagtggtcaaggttgagtttgattctgattgaattattaagtaattwtaaaaaacactactgcctttcccaatcctaccaagtaaaggatgctagataaaagaaatctcaagttaggccaggtgcagtggctcacacctatagttccaacagtttgagaggcagagatgggagtatgttttaaggccatgagtttgagagcagcctgggcaaaacagcaagacctcctctctacaaaaataaaaaaaataaatttaataaaataaatatagccaggcatgacggtatgtacct

SEQ ID NO: 548180 - DNA, 653 bp, Homo sapiens
tggaatcacacatggactgggaggatgggtgcaaggttttttatggagtagtgaaagtggctctcagaagatgtatagggaggcagaaagaggatgcagtgagaaggtggttttcccttggagttaggccgctcagcagccaggttctccccgaccaccctcagctaaatgtcccttagtgtccacgtgattccaccatcaatggcctgcctgtgtctgtcagtgtgttcttctaccagtgtgttcctcttgatgtccagccacctgtgtctgtgcccactaaggtctcagggtttttataggcacaggatgcagtagtggtgggtaagagtagtcttggaaaattcaacatttgggtgcaaaaacaggagtgcctttcctcacttaggtccatgggcacaagcccaagggtggagccctcaccagggaccccacctttctctacccagcagtttcctgccccgctcccrtatcagcattggttagtgacaatagagggaagaagaaatttttctaaatgaaactgggtgtggtatgtaagtagattttagacattgaaaaaatataaaatattcactacataaaatgtgtactcctatttttaatattgcactctgcttagacaaaggaagattatatttgtctttgtgagt

SEQ ID NO: 548181 - DNA, 1322 bp, Homo sapiens
tgtgccattgtggtttgctgcacctatcaatccatcatctacgttttaagccccgcatgcattaggtatttgtcctaatgctctccctcccctaacccccaacccccaacaggccccagtgtgtgttgttcccctagctgtgtccatgtgttctcattgttcaactcccgcttatgagtaagaacatayggtgtttggttttctgttcctgtgttagtttgctgaaaatgatggcttccaacttcatcttctttcctgcctttcaagacagcggtaggacaagatatttggaattgcagcagccatctcgagactgcggcgataagccagggagggaaagtcaatacgctaagcatggtagaatggaaaagatggaaagagcttagaaacttgatgtttctgagacactgaaccaaccttgggactctcctccagacttgttggtaataataaagatcttattatttaaaccacagttaggttttctcctgtaagttttcccttttgcatagagtcaacacggtccctgagattactcctggagccagtagcccagtcctccccattcacataaattgtctgggaccacaggaatgaaagacgggaaagtggaggaggagagcatagtctgatactcagcctggattcagaaaagaggtatgactgccattgtaatgagaggtggcaatcagaagcagaaggggctttttttttcccccataaaggtctttgtgaaccttggggtttaagcacctttggtgcttttgtagcacccagaaaagcaccctggacagtggcttgagggcatcagacatcccgaggcaggcagagtagaagacaatgagccagtttctttttaagcatacatgtattacttcctgaggactcctggaatgtgaagagactctgaagaggggcctggggtcttgtgccaacaaatggggctaactatccagtgacaggtaattgacatcaatatgacctcgtttgttcccaaagacagtgaggcctgtgacatgtgtgatacacacaacacacatcatgatttttgtttattctaagtaaattcctgtcaacaaacagttgaatttattctgcagacatggcatgttaaaagcagtctctttctaaaacaacagtggaaagtatttttcactgcagatggtacagtttatacaagccaccctcatgtgaataaagtaaagatatgtttcagtgtacccttgaagggtgtttcaattttgagttaggctggcaggttgtttttaatgcgttccacaaccttgccatgtgataccactagtcagtggttttcaaatgca

SEQ ID NO: 548182 - DNA, 963 bp, Homo sapiens
tttctgcagtcaacatcgcccagattccatgcagaaccctttgcagactcctgaggaggtacagacaaggagtgtccctgtcctcatggtgctacatgaaaaggtacagacaaggagtgtccctgtcctcatggtgctacatgaaaaggcaagtgacccaacaggcagcattggagaaagtgcctaactgtggaaaggccagtgggagaggctcggtggaggaggarcttgctggactagagaggtcagggaaagcttcttggaggaagtgaggtatgagctggaagtagaaataccaggaagcccagggcaggcttgggaatgggccaggcatgctcaggtcccagggcatagagtaacaatctggctggaagaaggaatggaggaacaagctgataggagggtgatttcatgtggactggaccccatgttcaggaggtgaccacataagccaggatgggtggatagagttagctaatcctggaagaaatcatggaataaaattaaatatatgcattgctggctacagatccagttcctccttcccgggtctctgtgtccacccttcttgggggccatcccacacctccctgctactgccacaacctttgccctttctaagcaggtgctgggtagagaaagaggtacagtggaacttgccaaatgtcctcgccgtgcaacctcttgcagagggccatgtgtgatcttcagatcccaagattttcttgatatttataaaagcacctttgcctccattcccaaactgaattctccatccctgggctccatcttgaagggaaatgatcacagctgtggcgattgtgtgtctcctactggtgagagctggtaactacagcatctaattggccgttttccagacctctgcagggtaagagcctgtggggagctggtgttgaggtggaattccagctaatatttactgggtgtttcctacatgctagg

SEQ ID NO: 548183 - DNA, 2244 bp, Homo sapiens
aatagtgtatgtgtacatataattatactgcatagttatgcttaaatttgcagtcaggtctagaatttcggtttatcattaacgagtcctacttctgtcttcatacaaattgaagaaccattccaggaagtgttagaggtggcttgggttgaactgacctgaatattacgcacagtaatcaaaatgacttaagcagcctcccatacaaaacagtaccctgacaaggctgtctctgcatgctacccttgcatatttctatggtagatgatgaagaaaaaatggtgcaattaggagacgaatttcaaaaatgaaagagaaagtatctttcagtaaaatctataaaaatcaagccataatattcttcttcctcaccattatgcaccaagtcataattttctctttgttttccaaaacacaacaacttaaagacatgcactttaagaaggtctagacgctgcaacccagaaatccccacctctaggaatctagtcctgggaaatcagcaaagatatgcatggagatttaggagcaaaactactaatcatagaatttacaatattagggagatggtaaaatttttcaaacttataaatattaataagtaaaaacattaaattaaattgccttttttaaaattaggaaagaaatggcatataggatctaagtagtaatcccctcattgatgaatgcaaagctatgatcagctcagctcaaattcccagtaaacctctgacctctggctagttcttaatagaatgcactgtgctgaaaccatttaatcctggacctcaaagtgtaagcctagattaccttatagttcaccttttaccctgctcccccttctaaaagtgaacacctctcaaaagctgagaatttcagtagttgagtcattatcatgattcttttcccttatgcctgcctctaaagaggagacacaagatatattttgcaaaatcagactttgaaccagagcttggttatcacactggcaactaatctttgttggtgatttccctgtcagcaaccaaatcatcaggtaagtattttattaagtgagaattatgtgattaacaatatactggggctacaaggatacagaggttgtgtacgtaaaatatgggccttgtttttacagtgcttgctctccagctgactaatcaacatcagcataaatgaaccaggaggaaatggttcagagcgaaatggaaggaatggctaagtcagtgtgtagcagtgaggtgccattgacagtgggggaaactcagtaatgaccacagtgaccaggaaggatttcatagaagcagcaaactcgaaccagtttttgaaggataaatgggatttgtataaggaaatcgtaaggcattccaggagaatataacaatatgaatgaaagaatggcactaggaataagcttgtttcaggttcaggggacctgacagaggggaatgatgaaaaatgaaggcaggagagtgcttgggaagaaaatagaaatggtccttctggacaaaaaaataaatgtttctttttggagcgtgtgtgacatttttcctgaaactgtccagggaaagctaaccaatcatgtcagtaaatctatatttaaaaattttatttgtgaataatctgtatatttgactctgtatatcaaaaagcaacaaaaatagggccttctccatcaaaagaggggtattgccaaagctcaagtgctcaaatcttaactgctagatgcattctgaatcctcctcagtcctccccaataataacggtgaccatgctgggtactcacatcctctccctccactcagcattccgaatgcccagaccaaatctcatcaacaaaagtcctttcacctctgcttccgaaacaccctgcctctcccctgctcagctcctccatgccattccttttcttcgtaccaatgaatattaatgaatatccagtatatttgttcaattattccatacagttgttccttggtatcygcagggaattgtttccaacatccctgtgggtaccaaaaccctcagatgctcagtcccttgtataagatggcataatgttggcataaaaatggcatataacctacactcatcctgccttaaacttgaaatcatctctggattacttataatacggagtacaatgtaagtaaatggttgttatactgtattgtttattatttgtattattttgtcttgtttttttttccaaatatttttcatctgtggttggttgaaaaactgcag

SEQ ID NO: 548184 - DNA, 538 bp, Homo sapiens
tgtaaatggaaaaggaatttttccatttcttctaggttatctaattctttggcatctaattgtgcatagtagtctcctatgaccaattttatatttctgtggcacaagctgtaacatctcctctttcatttctgattttatttgtttgagtcttctctatttttttagtctagctaaaggtttgtcaatgttgttgatcttttaaaaatcaactcctcatttcattgatttttttctattgttttccattctatttcttttgtaactaatcaaattgaattatatatattttttcaaggcctctaataatgttacaggcattgattcattaatyatttttgctctaaactgtattatttcctttcttatgcttactctggactttgttctttctgagatgtaatgttaagtttttttttgagatcattcttattttatttttatttttgagagagggtctcactctttctctgaggctagagtgcactggcatgatcattgctgatcattgctcactacagccttgacctactgggct

SEQ ID NO: 548185 - DNA, 471 bp, Homo sapiens
tgcgacattttctgctcctggcattctaaaataatagctgaaaagacaatgtatgtatgaaacagataatggcttattggaaacaataatggcttatatggatttctgaaaacaaaaatcatgtcacttcaaccaaataatgacatttttggagattttttcacctacctgcatgacacttctcattatatctctccatgtcttatccacagctgtaaatcgtctgccttcctcaggcatttgagacataatgtctggagagctgaaaatgggctccagatacagccacttggcttggactttgagccattcatccagaatctcctgaagcagtaggagcttgccctcccattctctgaggagcaaaacacagtggctcttactgacagcaaaccaagyaaatgtttcaaatgacaaaattcaaaccacaactaggttgtcaatgttgtatataatgttatacaattgtta

SEQ ID NO: 548186 - DNA, 825 bp, Homo sapiens
ctggagtgcagttgcacgatctcggcttactgcaacctctatctcccaggttcaagcgattttcctgcctcagcctcccaagtagctgggaatacaggcgcccaccaccatgcccagctaatttttgtatttttagtacaaatggggtttcaccatgttggccaggctggtctcaaagatgtttcttctgtttgtgatttcagaggttattttgtgaattcacaggtaccactcccaagaaagttcagcttgctctcaccctcgcccagcaggtggcactgtgaaatagagggacatgacagtgcagggagctgccgttctgctccacaaacccagatagaacgttagcaagtacccacgtgatttgggcacttcataatagatcagttgatatacttgaaagtctcatacaagtctggtgcctcaaactagttttgttccatttagtttcatgtcttctgtaaagctcctactcctttaaggtcagtggcatcaagtgctcacatactgagcrgatcactgaggtcctttaaaaaggtgcaattctatttctgcacatggatgttagttgcattctttctatcatttgtagggaaagccacactctcttcatcctgttgtaggcattattacccctcctgcttgggaaaagatctattaatttcttgaataaattacctaatttttgcaacagccttaactgagccagccattagctgcccacataatgctcacctgctctgttctaagcaggcaagtggttaagagaaaggagatggctggttgtgtgttccagacctttctttttggaaagacactttttct

SEQ ID NO: 548187 - DNA, 554 bp, Homo sapiens
ctgcttcatagatgactgtctcttcactttagtctctcatggcagagtagggcaagagaactccctggagcctcttttatatgggcactaatcccattcattagagtggagccctcataacctaaccacttyccacatgtgccacctccatataacatcacattgggcattaggtttcaatgcataaattttggaggaatacacatattcagtctgtagcaaccactgttcatctatggttggtacctttaggtttatatcagcagaaagggcatggaagggaactggaatgtactaaacacctaattcttaccttatggcttcatatctattttatcttcctaagaaaaatcttgtgaaagcagcattattatttccattttgaacattaaaacaaacagagtgcaagaatgcgtgaataatttgtccaagtttacccagatagcacagtggtacagggcatgacttgaatccagatctgtctagctttaaaaaatcattgctttttatttatggcctattactctctgttgacaccaaggctaccacatcca

SEQ ID NO: 548188 - DNA, 646 bp, Homo sapiens
atgctaaatttattaaattgtaaaaattgctagttttttttttttttttttgagacggaatcttgctctgtggccaggttggagtgcggtggcgcgatctcggctcactgcaacctccgacccccaggtttaagtgattctcctgcctcagcctctcgagtagctgggactacaggcacacagaactatgcccaacttatttttgtatctttagtagagatggrgtttcaccatgttggccaggatggtctccatctcctgacctggtggtgatcccccggcctcagcctcccggaatgctgaaatgacatgcgtgagccagcccactgggccaaaattgctcgtattttcagtttgttttctaagattccctacagaaaatgttattttgtatgcaaaaggcaacttgttcatctttttatattaatctactagctaatatttttgtttcctatttcattgtatttttaccacctccagaaaaagtaacaagaatggtaaaaataaacatgtattttatttttgattttatagggaatgtttctatgttatcttcagtttattaggatttttaacagtaaaaaatgagtatattttaaaatatttaacaaatattttaaattactccttttctttgtttttaatc

SEQ ID NO: 548189 - DNA, 646 bp, Homo sapiens
atgctaaatttattaaattgtaaaaattgctagttttttttttttttttttgagacggaatcttgctctgtggccaggttggagtgcggtggcgcgatctcggctcactgcaacctccgacccccaggtttaagtgattctcctgcctcagcctctcgagtagctgggactacaggcacacagaactatgcccaacttatttttgtatctttagtagagatggagtttcaccatgttggccaggatggtctccatctcctgacctggtggtgatcccccggcctcagcctcccrgaatgctgaaatgacatgcgtgagccagcccactgggccaaaattgctcgtattttcagtttgttttctaagattccctacagaaaatgttattttgtatgcaaaaggcaacttgttcatctttttatattaatctactagctaatatttttgtttcctatttcattgtatttttaccacctccagaaaaagtaacaagaatggtaaaaataaacatgtattttatttttgattttatagggaatgtttctatgttatcttcagtttattaggatttttaacagtaaaaaatgagtatattttaaaatatttaacaaatattttaaattactccttttctttgtttttaatc

SEQ ID NO: 548190 - DNA, 646 bp, Homo sapiens
atgctaaatttattaaattgtaaaaattgctagttttttttttttttttttgagacggaatcttgctctgtggccaggttggagtgcggtggcgcgatctcggctcactgcaacctccgacccccaggtttaagtgattctcctgcctcagcctctcgagtagctgggactacaggcacacagaactatgcccaacttatttttgtatctttagtagagatggagtttcaccatgttggccaggatggtctccatctcctgacctggtggtgatcccccggcctcagcctcccggartgctgaaatgacatgcgtgagccagcccactgggccaaaattgctcgtattttcagtttgttttctaagattccctacagaaaatgttattttgtatgcaaaaggcaacttgttcatctttttatattaatctactagctaatatttttgtttcctatttcattgtatttttaccacctccagaaaaagtaacaagaatggtaaaaataaacatgtattttatttttgattttatagggaatgtttctatgttatcttcagtttattaggatttttaacagtaaaaaatgagtatattttaaaatatttaacaaatattttaaattactccttttctttgtttttaatc

SEQ ID NO: 548191 - DNA, 646 bp, Homo sapiens
atgctaaatttattaaattgtaaaaattgctagttttttttttttttttttgagacggaatcttgctctgtggccaggttggagtgcggtggcgcgatctcggctcactgcaacctccgacccccaggtttaagtgattctcctgcctcagcctctcgagtagctgggactacaggcacacagaactatgcccaacttatttttgtatctttagtagagatggagtttcaccatgttggccaggatggtctccatctcctgacctggtggtgatcccccggcctcagcctcccggaatgctgaaatgacatgcgtgagccagcccactgggccaaaattgctcgtattttcagtttgttttctaagattccctacagaaaatgttattttgtatgcaaaaggcaacttgttcatctttttatattaatctactagctaatatttttgtttmctatttcattgtatttttaccacctccagaaaaagtaacaagaatggtaaaaataaacatgtattttatttttgattttatagggaatgtttctatgttatcttcagtttattaggatttttaacagtaaaaaatgagtatattttaaaatatttaacaaatattttaaattactccttttctttgtttttaatc

SEQ ID NO: 548192 - DNA, 646 bp, Homo sapiens
atgctaaatttattaaattgtaaaaattgctagttttttttttttttttttgagacggaatcttgctctgtggccaggttggagtgcggtggcgcgatctcggctcactgcaacctccgacccccaggtttaagtgattctcctgcctcagcctctcgagtagctgggactacaggcacacagaactatgcccaacttatttttgtatctttagtagagatggagtttcaccatgttggccaggatggtctccatctcctgacctggtggtgatcccccggcctcagcctcccggaatgctgaaatgacatgcgtgagccagcccactgggccaaaattgctcgtattttcagtttgttttctaagattccctacagaaaatgttattttgtatgcaaaaggcaacttgttcatctttttatattaatctactagctaatatttttgtttcctatttcattgtatttttaccacctccrgaaaaagtaacaagaatggtaaaaataaacatgtattttatttttgattttatagggaatgtttctatgttatcttcagtttattaggatttttaacagtaaaaaatgagtatattttaaaatatttaacaaatattttaaattactccttttctttgtttttaatc

SEQ ID NO: 548193 - DNA, 629 bp, Homo sapiens
cagaaacaccagaaccaattcagaaaactcattctctagtaccactgcatttctgctactaaaatctatgttaaggttctctagagaaatagaaccaatatgatggatatgtgtgtatgtgtgaaatataatatacaaatatatatttatatacatatattacatatatttatatgtattcaaaattggattatgtgattttagaggctgaaaagtttcacaatgtgtaaatttcagcctgggtccaaaagccagagtgtccaaaccaagagtgtcrgtggtgtgagttctagtccaaggacaggagaagactaatgttgaagatcaaacagtcaggaagagagacagaattcaaccttcctctgcctttttgttgtattcaggccttcaatgggttggatgatgctcactcacattgaagagggccatgtgcctgacttagtttaccaattcaaatgctaatctcttctgggaattcccttacagacacactcagaaataatgtttaaccagatatctgagcatcatgtggcccagtcaaattaacacataaaactaagcatcacagcatctttcggatggaccctctaggcactatcaccaaccatttcttctgaaaccataagcag

SEQ ID NO: 548194 - DNA, 672 bp, Homo sapiens
aaccaattttaagagtcagaattcatcagtggtgcagtgtccttttaagaattctgctactttagaaaattttgagcccttggcttttggccccactgtgtgcaccagctctgggcgtttggcaatgcaggtggaccctcaaatgcaaattgccagaaagataaatgagaattggtggctgtatttaattatgcagccttctgcaatgtgtctacaacagacattttttcttatggagagtaattattcttagcgtgcccatctgagtgagattatgctttggtaattggttttgaatccttgatccatttttatttgagccaccttgctagaatcctttctatcaatatttgtgaattgagcctgaggtacacgtgcccctgagacacaacttaaaggtgatcttgtttttgcccttcccagaaacctgtcgaggtgagggcagggagttcctggggtgatgggcagatcctggattgtgagatgcgcttgcttagtactctcarttcctgctgagaggactcagttttacccctttgcgtcttatttctggtggtagtcttaactgattggaacacatctgtactgtaggcaaggaggtgacttctgctctctcacaccctgagactactctgctcacactgacccattgattcacaaatgtagcccaat

SEQ ID NO: 548195 - DNA, 672 bp, Homo sapiens
aaccaattttaagagtcagaattcatcagtggtgcagtgtccttttaagaattctgctactttagaaaattttgagcccttggcttttggccccactgtgtgcaccagctctgggcgtttggcaatgcaggtggaccctcaaatgcaaattgccagaaagataaatgagaattggtggctgtatttaattatgcagccttctgcaatgtgtctacaacagacattttttcttatggagagtaattattcttagcgtgcccatctgagtgagattatgctttggtaattggttttgaatccttgatccatttttatttgagccaccttgctagaatcctttctatcaatatttgtgaattgagcctgaggtacacgtgcccctgagacacaacttaaaggtgatcttgtttttgcccttcccagaaacctgtcgaggtgagggcagggagttcctggggtgatgggcagatcctggattgtgagatgcgcttgcttagtactctcagttcctgctgagaggactcagttttacccctttgcgtcttatttctggtggtagtcttaactgattggaacacakctgtactgtaggcaaggaggtgacttctgctctctcacaccctgagactactctgctcacactgacccattgattcacaaatgtagcccaat

SEQ ID NO: 548196 - DNA, 624 bp, Homo sapiens
gagttacaagaaatttctctttatgtttctgaactgctgtttgttctctgccggctgggggcgcaatttcttgttgatttctccagtgttcatctctgtcttctcacactggatgaagggctggcagacaccacmatgctgatgtttgtggcagaagaggtggagccagggactggggagaagaaacccaaacacatgatgggttaaaaactggtgaaatcaaataggtttaatcaggactgagggatgtcagtaaaattcttagcttactgttgagaaaaacgtgatcactccccacagcacttgagagtccttaatcgcaaaaacaaggtttgagacgcctgagctcagagctgaaggcactgcctgtagctcagactctgacaagagtgagggaggtggcagccagcatgccaggtaacggtctgcagttgcaataacagaattagaaggtgggggtgtcatggaatcttaggagccctgcgttccaattgcccaggctttgctgaaacacaggcgccctggtcacacgagaggtcaccaccgatgggggccttcccttcagcattcactctcagtatatgtgtacccttgtacccttgtgacaatgccacagacccatct

SEQ ID NO: 548197 - DNA, 624 bp, Homo sapiens
gagttacaagaaatttctctttatgtttctgaactgctgtttgttctctgccggctgggggcgcaatttcttgttgatttctccagtgttcatctctgtcttctcacactggatgaagggctggcagacaccaccatgctgatgtttgtggcagaagaggtggagccagggactggggagaagaaacccaaacacatgatgggttaaaaactggtgaaatcaaataggtttaatcaggactgagggatgtcagtaaaattcttagcttactgttgagaaaaacgtgatcactcyccacagcacttgagagtccttaatcgcaaaaacaaggtttgagacgcctgagctcagagctgaaggcactgcctgtagctcagactctgacaagagtgagggaggtggcagccagcatgccaggtaacggtctgcagttgcaataacagaattagaaggtgggggtgtcatggaatcttaggagccctgcgttccaattgcccaggctttgctgaaacacaggcgccctggtcacacgagaggtcaccaccgatgggggccttcccttcagcattcactctcagtatatgtgtacccttgtacccttgtgacaatgccacagacccatct

SEQ ID NO: 548198 - DNA, 1243 bp, Homo sapiens
gatgaaataatctgtacaacaattccctgtgacatgagtttacctatatcgcaaacctgcacatgtacccctgaacctaaaataaaagttaaaaacaacaacaactcttctgtactttataatacattattcaatgctgattttcagatacaaaaatataattaggaaaagcaagcatttctgatagacagtgcagacaatagatattggaccctaatggatcttaccaagcagatagttattctctcttccctgagggaagtaaacagaggggtggagtgggggcagtgttcactccatgctctgttccytctgtgagagaagaatttccttcctctagggaagtggcccccaacctctttggcaccaggggctggttttgtggaagacaatttttttccacggaccagatggtggagggggatgatttggggatgattcaagtacattacattcattgtgcactttattcctcttattattccattgtaatatataataaaataattatacaactcaccataatgtagaaccagtgggagccctgagcttgttttcctgcaactagatggtcccatctggagctgatggaagacagtgacagacaattaggcactggattctcataaggagcctgcaacctagatcccgtgcgtgcacagttcacaatagggtttgtgctcccatgagaatctaatgctggtgctgatctgatgggaggcagagcttaggtggcaatgcgagtgatggggagcagctgtaaatacagatgaagctttgcttgctcacctgctgctcacctccctctgtgcagcccggttcctgctgtaccatccgtggcttgggggttagggatccctgctctagggaatctagaggaaaagggacaagcagatcccccacagcagcatgatgtagcaagttaactaaagaattgaatgaagtttcttctgaatgtgtgagaggcatattttatttttcataaaacaacaaaagaaattgggcaaaaaatactttcttatttaataatttggagtttatgcaaacaaaaaataatgcaagttttaaaaatgctaataaaatttgtatttctgaaaattgattcaaaaatatatatcattgtttaataaagaatagttgtaataataaactgtagttttactaaaatgataaaattcactggaggatataaaaaacaggcagcaatattacacaatctttagataggaaactgaaaaaaaaa

SEQ ID NO: 548199 - DNA, 1243 bp, Homo sapiens
gatgaaataatctgtacaacaattccctgtgacatgagtttacctatatcgcaaacctgcacatgtacccctgaacctaaaataaaagttaaaaacaacaacaactcttctgtactttataatacattattcaatgctgattttcagatacaaaaatataattaggaaaagcaagcatttctgatagacagtgcagacaatagatattggaccctaatggatcttaccaagcagatagttattctctcttccctgagggaagtaaacagaggggtggagtgggggcagtgttcactccatgctctgttccctctgtgagagaagaatttccttcctctagggaagtggcccccaacctctttggcaccaggggctggttttgtggaagacaatttttttccacggaccagatggtggagggggatgatttggggatgattcaagtacattacattcattgtgcactttattcctcttattattccattgtaatatataataaaataattatacaactcaccataatgtagaaccagtgggagccctgagcttgttttcctgcaactagatggtcccatctggagctgatggaagacagtgacagacaattaggcactggattctcataaggagcctgcaacctagatcccgtgcgtgcacagttcacaatagggtttgtgctcccatgagaatctaatgctggtgctgatctgatgggaggcagagcttaggtggcaatgcgagtgatggggagcagctgtaaatacagatgaagctttgcttgctcacctgctgctcacctccctctgtgcagcccggttcctgctgtaccatccgtggcttgggggttagggatccctgctctagggaatctagaggaaaagggacaagcagatcccccacagcagcatgatgtagcaagttaactaaagaattgaatgawgtttcttctgaatgtgtgagaggcatattttatttttcataaaacaacaaaagaaattgggcaaaaaatactttcttatttaataatttggagtttatgcaaacaaaaaataatgcaagttttaaaaatgctaataaaatttgtatttctgaaaattgattcaaaaatatatatcattgtttaataaagaatagttgtaataataaactgtagttttactaaaatgataaaattcactggaggatataaaaaacaggcagcaatattacacaatctttagataggaaactgaaaaaaaaa

SEQ ID NO: 548200 - DNA, 529 bp, Homo sapiens
atataagtatttctacatgtaactctctgtatttatactaggctaaacatacattcatactgatgctgctgagtctaattgattaccacgtggatcattctagccccctctccttgtttatttgtaacctcccactctaattaatagtaagaaaccaacaaaatcatcagaacctctggaaatagggtcaatatctcaacatgtttcaaagctcccagttattctaatatgctgtcagaattgagagccactgaccttgtcagattattccagtcctcattcctacttctcccattcctaggctttgtcctcaagaagtgtttgaaaatatctgttgcttaaatgaagttgaggctgaggtttgaggtgatgtggacatgctgtggacatggaaaggaaggaagagaagaatttgaggattaggagcagaagatgctgctagaaaaagaagagacmatcaaaaaagtcggacaaaagaagagaggtgaagccactgtcttcatgtacatgaactagatgtatataaagg

SEQ ID NO: 548201 - DNA, 624 bp, Homo sapiens
gacacttgggaattagatccctagaaaatggcccttgccttatgccttgtgcaagtcccggaggtgccattcacatygtagtccatatgacctgccagttgcttatggtgatctttctgcttctaaatcctgcttcccaaagtatgagatacacagggcaagcaatacattcaagaacccagcttgctaaatgtctttgcctccaacatcctttcaaatgatcataagtggcataaccttagtgaatttgggtccccatagatacaaaacaaagaccagtggcttttgactcagaagaccaagtttcaatcctgactcgccacatgctagttttgtgctcttggtcatgttacttaaattttttgcagttacaatgttctccccagtcaaacaacaatgacagattcatagagttgctaaagaggattaattaggatagcacaggtaaagttcctggcacacagaaagcacttaatcaatgtgagcctctctgaagtgaaagtaacgcatcctaatactcaggagatttagaccagagagctatactgtccaatatggcagccactagcaatgtgtggctgtcaattaattagcattagactttaaaattcagttcccaggatg

SEQ ID NO: 548202 - DNA, 624 bp, Homo sapiens
gacacttgggaattagatccctagaaaatggcccttgccttatgccttgtgcaagtcccggaggtgccattcacattgtagtccatatgacctgccagttgcttatggtgatctttctgcttctaaatcctgcttcccaaagtatgagatacacagggcaagcaatacattcaagaacccagcttsctaaatgtctttgcctccaacatcctttcaaatgatcataagtggcataaccttagtgaatttgggtccccatagatacaaaacaaagaccagtggcttttgactcagaagaccaagtttcaatcctgactcgccacatgctagttttgtgctcttggtcatgttacttaaattttttgcagttacaatgttctccccagtcaaacaacaatgacagattcatagagttgctaaagaggattaattaggatagcacaggtaaagttcctggcacacagaaagcacttaatcaatgtgagcctctctgaagtgaaagtaacgcatcctaatactcaggagatttagaccagagagctatactgtccaatatggcagccactagcaatgtgtggctgtcaattaattagcattagactttaaaattcagttcccaggatg

SEQ ID NO: 548203 - DNA, 999 bp, Homo sapiens
tcaaaacagttatatttgtgaataattttattttggtttatttcttagcagaaggaggagttaatagtaacatttgtaggccgggcacggtggctcacrcctgtaatcccaacactttgggaggccgaggcttgtggatcatgaggtcaggagatcgagaccatcctggctaacacggtgaaactctgtctctactaaaatacaaaaaaattagccgggcgtggtggcgggcacctgtagtcccagctactcgggaggctgaggcaagagaatggcgtgaacccaggaggtggagcttgcagtgagccgagatcgcgccactgggctccagcctgggagacagagcgagactccatctcaaaaaaaaaaaaaaaaaaaaaaaggaacatttgtaatctcccagagattgccaaggaaaacattctcctggctgaatttatgtagagttcatcatctaagcataaaatattttataaaggaatgggccaatcaaataactgctatgcggttgacagcataaaccaagttagcttagtaccactctaaatagttgctgggaatataatgattttcaaagacatgatctctagaaataaataactaaaagagaagcacggtgtcatgcatttatgcatacacataagcagggactagagatcaagaatagaaataaaagaggtttttacacttggggtgctaaggtcgcaatgatttatttggagagaaaacggaagcccttctttagtaaatgcaaagcaccatgtgtttaatgaagatacatgacctaagctttgaagatcgtttaactaattcaataaccttgccaagtatccattactacatctcaacaatcaaatttacagtgacatctttgagttaaatctctccatagatgtctggaaacagcttaattctgttaactgctgcccattgaattatgctttatttggtcgtagaatttcatgtcatctgttagtctccctcacaacttgggagatg

SEQ ID NO: 548204 - DNA, 999 bp, Homo sapiens
tcaaaacagttatatttgtgaataattttattttggtttatttcttagcagaaggaggagttaatagtaacatttgtaggccgggcacggtggctcacgcctgtaatcccaacactttgggaggccgaggcttgyggatcatgaggtcaggagatcgagaccatcctggctaacacggtgaaactctgtctctactaaaatacaaaaaaattagccgggcgtggtggcgggcacctgtagtcccagctactcgggaggctgaggcaagagaatggcgtgaacccaggaggtggagcttgcagtgagccgagatcgcgccactgggctccagcctgggagacagagcgagactccatctcaaaaaaaaaaaaaaaaaaaaaaaggaacatttgtaatctcccagagattgccaaggaaaacattctcctggctgaatttatgtagagttcatcatctaagcataaaatattttataaaggaatgggccaatcaaataactgctatgcggttgacagcataaaccaagttagcttagtaccactctaaatagttgctgggaatataatgattttcaaagacatgatctctagaaataaataactaaaagagaagcacggtgtcatgcatttatgcatacacataagcagggactagagatcaagaatagaaataaaagaggtttttacacttggggtgctaaggtcgcaatgatttatttggagagaaaacggaagcccttctttagtaaatgcaaagcaccatgtgtttaatgaagatacatgacctaagctttgaagatcgtttaactaattcaataaccttgccaagtatccattactacatctcaacaatcaaatttacagtgacatctttgagttaaatctctccatagatgtctggaaacagcttaattctgttaactgctgcccattgaattatgctttatttggtcgtagaatttcatgtcatctgttagtctccctcacaacttgggagatg

SEQ ID NO: 548205 - DNA, 999 bp, Homo sapiens
tcaaaacagttatatttgtgaataattttattttggtttatttcttagcagaaggaggagttaatagtaacatttgtaggccgggcacggtggctcacgcctgtaatcccaacactttgggaggccgaggcttgtggatcatgaggtcaggagatcgagaccatcctggctaacacggtgaaactctgtctctactaaaatacaaaaaaattagccgggcgtggtggcgggcacctgtagtcccagctactygggaggctgaggcaagagaatggcgtgaacccaggaggtggagcttgcagtgagccgagatcgcgccactgggctccagcctgggagacagagcgagactccatctcaaaaaaaaaaaaaaaaaaaaaaaggaacatttgtaatctcccagagattgccaaggaaaacattctcctggctgaatttatgtagagttcatcatctaagcataaaatattttataaaggaatgggccaatcaaataactgctatgcggttgacagcataaaccaagttagcttagtaccactctaaatagttgctgggaatataatgattttcaaagacatgatctctagaaataaataactaaaagagaagcacggtgtcatgcatttatgcatacacataagcagggactagagatcaagaatagaaataaaagaggtttttacacttggggtgctaaggtcgcaatgatttatttggagagaaaacggaagcccttctttagtaaatgcaaagcaccatgtgtttaatgaagatacatgacctaagctttgaagatcgtttaactaattcaataaccttgccaagtatccattactacatctcaacaatcaaatttacagtgacatctttgagttaaatctctccatagatgtctggaaacagcttaattctgttaactgctgcccattgaattatgctttatttggtcgtagaatttcatgtcatctgttagtctccctcacaacttgggagatg

SEQ ID NO: 548206 - DNA, 999 bp, Homo sapiens
tcaaaacagttatatttgtgaataattttattttggtttatttcttagcagaaggaggagttaatagtaacatttgtaggccgggcacggtggctcacgcctgtaatcccaacactttgggaggccgaggcttgtggatcatgaggtcaggagatcgagaccatcctggctaacacggtgaaactctgtctctactaaaatacaaaaaaattagccgggcgtggtggcgggcacctgtagtcccagctactcgggaggctgaggcaasagaatggcgtgaacccaggaggtggagcttgcagtgagccgagatcgcgccactgggctccagcctgggagacagagcgagactccatctcaaaaaaaaaaaaaaaaaaaaaaaggaacatttgtaatctcccagagattgccaaggaaaacattctcctggctgaatttatgtagagttcatcatctaagcataaaatattttataaaggaatgggccaatcaaataactgctatgcggttgacagcataaaccaagttagcttagtaccactctaaatagttgctgggaatataatgattttcaaagacatgatctctagaaataaataactaaaagagaagcacggtgtcatgcatttatgcatacacataagcagggactagagatcaagaatagaaataaaagaggtttttacacttggggtgctaaggtcgcaatgatttatttggagagaaaacggaagcccttctttagtaaatgcaaagcaccatgtgtttaatgaagatacatgacctaagctttgaagatcgtttaactaattcaataaccttgccaagtatccattactacatctcaacaatcaaatttacagtgacatctttgagttaaatctctccatagatgtctggaaacagcttaattctgttaactgctgcccattgaattatgctttatttggtcgtagaatttcatgtcatctgttagtctccctcacaacttgggagatg

SEQ ID NO: 548207 - DNA, 1346 bp, Homo sapiens
  misc_feature 542, 543, 544, 545, 546, 547, 548, 549, 550, 551, 552, 553,554, 555, 556, 557, 558, 559, 560, 561, 562, 563, 564, 565,566, 567, 568, 569, 570, 571, 572, 573, 574, 575, 576, 577,578, 579, 580, 581, 582, 583, 584, 585, 586, 587, 588: n = A,T,C or G
  misc_feature 589, 590, 591, 592, 593, 594, 595, 596, 597, 598, 599, 600,601, 602, 603, 604, 605, 606, 607, 608, 609, 610, 611, 612,613, 614, 615, 616, 617, 618, 619, 620, 621, 622, 623, 624,625, 626, 627, 628, 629, 630, 631, 632, 633, 634, 635: n = A,T,C or G
  misc_feature 636, 637, 638, 639, 640, 641: n = A,T,C or G
gtggatcatttgaggtcaggagttaagagaccagcctgaccaatatggtgaaaccccrtctctactaaaaatacagaaattagctgggcatggtggtggacaactgtaatcccagctacttgggaggctgagtaagggagaacagcttgaaccaggaggcagaggttgcaacgagccgagatcgcgccattacactccagcctggtcaacaagagtgaaactcctctcgaaacaaaataaaggtatagtgaacaggcgaaattaattttaatgccttccattttgaccgatatatctaaaatattaccatttcaacatgtaatatgtaattatgtgctgtattttatgtttgcaggacatctcagttcagactaactacattgcagatcccaagtgtgtgtcattaaaatagtgatagatttgtggtgtacatacctataatattatcatttatagtttcttgattagaattctgcataatcaagtcttactaagacaggtttattatattttctcattacttcttggtctaaaggaattcnnnnnnnnnnnnnnnnnnnnnnnnnnnnnnnnnnnnnnnnnnnnnnnnnnnnnnnnnnnnnnnnnnnnnnnnnnnnnnnnnnnnnnnnnnnnnnnnnnnngtacatcctgtgctaaatttcacctgtattcctcctgattgcactcacgatgcaactcagggtcatatcaagcaaaacctgtttatctaatctgtctgactcaccctaaccttcctgctgcacgtctcagtttaacccatcgtaatcgtattgtcaaaataattgcctgtaatcccagcactttgggaggccaaggcagaaggatcacttgagcacaggggtttgagactagcctgggcaaaatggtgaaacactggctctataaaatatatacaaattagctgggtgtggtggtgcccacctgtagtcccagctactcaggagcatgaggtgagaggatgacttgagctaaggagttcaaacctgcagcgaaccctgatgacgccactgcactccagcctgggcaacagaatgagaccctgtctcaaaaaataaataaataagctgcgtgtggtggtgtgtgcctgtagtcccagctgcttgggaggatgagccattgagccttggaggtcaagaggtcaaggctgtactgagctgtgatcttgtcactgaattccagcctgggagacagagtccttgtcttaaaaagtaattataataaaaataaaaagtacaaaaccaaccaaacaaaaaattgtttcttcactctgaaataacagtggttaacaccatgatgccactggaaagttaaaagaaaaacactcc

SEQ ID NO: 548208 - DNA, 1643 bp, Homo sapiens
ttgtaagtattctgtatgaacatgaaaataacatgaattataatattcaagttccttatataatatttgcccgttttaaaatccactagcttcttttaaaacttactcttttaattttttcttttatctattactgaaagacgtgtgtttgaaatgtctataatatttgggggcttatccatttctacttactttctgatatttttgctttatataatttgactctctctctaaatacgtgtgtgtctgtgtgtgtgagagagagtgtgtggtttgtgtgtatatatatgtatgtatcaggctaatacacattgaagtcatcacatcttcttaataacttaaaacttttatcacactggttacactaacttattttaataaatgtttctaacttacattctatttggtctacatagcaactttttaaaaaattatattcatgtagtatgtttgtatgtatatcatatatacacagtatctgtattgtttgaacttcaaagtttctgtaaatttatatattagttgtgtctcttgtaactatgatagagacggatgttttaaattttgccaatctttgtattttaacaaaaacattgtctacttaggtttaagttaatctttgatcatttatacttaattttgtattagtaatttgttgtgtatatatatatatatataaaatgtctcattttctcctatcactttctgtcttcttgttttaaaattatgacttttatttttattgttttcatagatacaacagagaaatgcataatgtccagtcaatttattaaagttccaaagtcggtcgcgcgcagtggctcacgcctgtaatctcaacacttcgggaggccgaggcgtgtggatcacgaggtcaggagttggagactagcctgatcaacatggtgaaaccccgtctctactaaaaatacaaaaattagccaggcagggtggcacgcggctgtaatccccgctactcaggaggctgaggcaggagaattgcttgaacctgggaggcagaggttgcagtgagcgragatgacgccaccatactccagcctgggagaaagggtgaatgagactccttctcaaaaaaaaaaaaaaaaaagagttgcaaagtcatacctttctgctcttgtcagacaattaaggggtctttgaatacttcagccctaataatttgcttcctaacatacatattgcagtgcttatctaattttaaatattcttttgtttcaacacctaattttctattttgatctatctttatgtttacaatatattttgctctgtgttcattctttgatttcagaacttcaatctttctgaagcgtgttttcagagtttcctttgagtttctttagtggaattctgctggtggtgttttgttttttgtctctaaatatgtgatttagccataggttgatgaatatttttcttggttgagaatttcagaatggcattattattcttaacaaataatattgtttattttacctttcatgctttcagatttcaatatgattaaaggtaatttgatttttctagtgctaattgaaatatttttcccttcctgattgtttactatttctctaggagatatgtagatgtaggtttatctccatcgtagcttgcttagcatg

SEQ ID NO: 548209 - DNA, 1094 bp, Homo sapiens
ttgctgtattttaccaaagcatcttcctttaattggttgttattgttttccttccttctgtaaccaaatgtattgccctttttctccacatacccatgtttttgttctctcaaaaacattaatgaaaatattttttcctgaattcttgcttgataaaaaccgcaacaaattgtaatatatcatgtctgcatagtaagactagcttggctgcacataaaaatccttggttggcattgagaatcttgttggtcttccctcatgaccatccagcttcagtacagctaggggagccaggacagccttcttcatttctcctgtgagtgacttattctttttttctggctgcccaatagataccttattttttttaagtccaataccttcattaagatgtggttcactttttgcctgtcatgaatggatataccttgcttctgatrtgcccttttgaaaggtagattcaagtcttcatgcattgcatggaagtgttcttgaattataattttgaagtatttgttctgtctcttttggtttgttctttggatgttccagtaatgtatgtgttcaatccatttgtcggtcttccatagttctcattttctctgtaatacttgagttttgcttttcagatgtttgcttagataatttttgtataaatgggtatctatttccttttatttttgtaatatactactaaatggtttgggttttcctagataactacagaggttcagagagagaattaagacaaccttctgggcctcacaccagaatggctctttcctactgggctgtcacagagacagactgcttcctgcaagtatggctcctctggtgattctctgtgtggttgaatctcccttgttcctcccttgaacaaaactgggtccaggaggggactttttctggtagactgtgtaccctggttcccactcctgtggttaaaaaaaaggggtataagttttgaacatggaagtgaactcccaaattttcagggagtacattttgttggtgttttctgagattatcagccattggcctcactacctccatacttcatttactcccatgtggcttgtgcctgattccaacta

SEQ ID NO: 548210 - DNA, 1094 bp, Homo sapiens
ttgctgtattttaccaaagcatcttcctttaattggttgttattgttttccttccttctgtaaccaaatgtattgccctttttctccacatacccatgtttttgttctctcaaaaacattaatgaaaatattttttcctgaattcttgcttgataaaaaccgcaacaaattgtaatatatcatgtctgcatagtaagactagcttggctgcacataaaaatccttggttggcattgagaatcttgttggtcttccctcatgaccatccagcttcagtacagctaggggagccaggacagccttcttcatttctcctgtgagtgacttattctttttttctggctgcccaatagataccttattttttttaagtccaataccttcattaagatgtggttcactttttgcctgtcatgaatggatataccttgcttctgatgtgcccttttgaaaggtagattcaagtcttcatgcattgcatggaagtgttcttgaattataattttgaagtatttgttctgtctcttttggtttsttctttggatgttccagtaatgtatgtgttcaatccatttgtcggtcttccatagttctcattttctctgtaatacttgagttttgcttttcagatgtttgcttagataatttttgtataaatgggtatctatttccttttatttttgtaatatactactaaatggtttgggttttcctagataactacagaggttcagagagagaattaagacaaccttctgggcctcacaccagaatggctctttcctactgggctgtcacagagacagactgcttcctgcaagtatggctcctctggtgattctctgtgtggttgaatctcccttgttcctcccttgaacaaaactgggtccaggaggggactttttctggtagactgtgtaccctggttcccactcctgtggttaaaaaaaaggggtataagttttgaacatggaagtgaactcccaaattttcagggagtacattttgttggtgttttctgagattatcagccattggcctcactacctccatacttcatttactcccatgtggcttgtgcctgattccaacta

SEQ ID NO: 548211 - DNA, 1094 bp, Homo sapiens
ttgctgtattttaccaaagcatcttcctttaattggttgttattgttttccttccttctgtaaccaaatgtattgccctttttctccacatacccatgtttttgttctctcaaaaacattaatgaaaatattttttcctgaattcttgcttgataaaaaccgcaacaaattgtaatatatcatgtctgcatagtaagactagcttggctgcacataaaaatccttggttggcattgagaatcttgttggtcttccctcatgaccatccagcttcagtacagctaggggagccaggacagccttcttcatttctcctgtgagtgacttattctttttttctggctgcccaatagataccttattttttttaagtccaataccttcattaagatgtggttcactttttgcctgtcatgaatggatataccttgcttctgatgtgcccttttgaaaggtagattcaagtcttcatgcattgcatggaagtgttcttgaattataattttgaagtatttgttctgtctcttttggtttgttctttggatgttccagtaatgtatgtgttcaatccatttgtcggtcttccatagttctcattttctctgtaatacttgagttttgcttttcagatgtttgcttagataatttttgtataaatgggtatctatttccttttatttttgtaatatactactaaatggtttgggttttcctagataactacagaggttcagagagagaattaagacaaccttctgggcctcacaccagaatggctctttcctactgggctgtcacagagacagactgcttcctgcaagtatggctcctctggtgattctctgtgtggttgaatctcccttgttcctcccttgaacaaaactgggtccaggaggggactttttctggtagactgtgtaccctggttcccactcctgtggttaaaaaaaaggggtataagttttgaacatggaartgaactcccaaattttcagggagtacattttgttggtgttttctgagattatcagccattggcctcactacctccatacttcatttactcccatgtggcttgtgcctgattccaacta

SEQ ID NO: 548212 - DNA, 682 bp, Homo sapiens
gttggtcagggagatggatttgagactgagttctcatctcctccgctgcagcaccctattaaagcctcttccttgrcaataaccgtctcagtgatcggttttctgtgtggcaagcagcgggaaccccaggtctctgaactttggcaaaggaatctcctgataaaggcgggatcgattttactgaccaagctgaaaacgatcagacgtttgaaagccttaatctcggagcctgtcggagtttggtctgcccttgaggcttttctttgggcctaccagtcaaaatcagcctggccaaacctgtcttcaaggaccaggggcagggccggcttctcccgccgggtcggcagccaccttccccttccctgtgacttgaagagaagcttcagggggcgtttattcaatttgcgaggagcccgcgaggcgcaggtgcgcggtgactctgtggttcccaccgcacccgctgccctctttggtcctctcgctgtcaccggcgggcagtaacgttccgggtgagctagggctccgaagacaccaggcagggagggaccagtgggtaagggcaccgcccgtttaggtcctgcgcaggagggatccgaaaaaggtcttgaagaaatagaaagggagggccagatgcggtggctcacgcctgtaatcccagcactttgggaggccgaggtgggtg

SEQ ID NO: 548213 - DNA, 682 bp, Homo sapiens
gttggtcagggagatggatttgagactgagttctcatctcctccgctgcagcaccctattaaagcctcttccttggcaataaccgtctcagtgatyggttttctgtgtggcaagcagcgggaaccccaggtctctgaactttggcaaaggaatctcctgataaaggcgggatcgattttactgaccaagctgaaaacgatcagacgtttgaaagccttaatctcggagcctgtcggagtttggtctgcccttgaggcttttctttgggcctaccagtcaaaatcagcctggccaaacctgtcttcaaggaccaggggcagggccggcttctcccgccgggtcggcagccaccttccccttccctgtgacttgaagagaagcttcagggggcgtttattcaatttgcgaggagcccgcgaggcgcaggtgcgcggtgactctgtggttcccaccgcacccgctgccctctttggtcctctcgctgtcaccggcgggcagtaacgttccgggtgagctagggctccgaagacaccaggcagggagggaccagtgggtaagggcaccgcccgtttaggtcctgcgcaggagggatccgaaaaaggtcttgaagaaatagaaagggagggccagatgcggtggctcacgcctgtaatcccagcactttgggaggccgaggtgggtg

SEQ ID NO: 548214 - DNA, 682 bp, Homo sapiens
gttggtcagggagatggatttgagactgagttctcatctcctccgctgcagcaccctattaaagcctcttccttggcaataaccgtctcagtgatcggttttctgtgtggcaagcagcgggaaccccaggtctctgaactttggcaaaggaatctcctgataaaggcgggatcgattttactgaccaagctgaaaacgatcagacgtttgaaagccttaatctcggagcctgtcggagtttggtctgcccttgaggctttyctttgggcctaccagtcaaaatcagcctggccaaacctgtcttcaaggaccaggggcagggccggcttctcccgccgggtcggcagccaccttccccttccctgtgacttgaagagaagcttcagggggcgtttattcaatttgcgaggagcccgcgaggcgcaggtgcgcggtgactctgtggttcccaccgcacccgctgccctctttggtcctctcgctgtcaccggcgggcagtaacgttccgggtgagctagggctccgaagacaccaggcagggagggaccagtgggtaagggcaccgcccgtttaggtcctgcgcaggagggatccgaaaaaggtcttgaagaaatagaaagggagggccagatgcggtggctcacgcctgtaatcccagcactttgggaggccgaggtgggtg

SEQ ID NO: 548215 - DNA, 569 bp, Homo sapiens
aggagactactgaaaataagattgaaaggagagatttggtgaaacattatcccagtttccagctccctctcctctttattctctaggttcctttcattcccacagagtgccaaaccaggagcaaaaatactcacttcatgatttctatccctcaggcaaattgctgatcactgtttgcctttctcccgctccaatccgagtctccactttcttccttatcacagaaagcgtaggtggcaggactgcttccccatcagtacttgtctgtggttcctctgagggcatggtgcaatgagtgtgagctccatgaaggccagcaagagtgwttgtctgtttatgacattttggaacatttgaaatagttccttatgtttatgaactatgcctataaatatcaccaccaaaataaagatagcaccaatcaaagttttaaaagcacaggtcaactcatgatactttatctcacaaaggaaattagaaagcataatttaaatggttaagagatcaacttatcactaatgagtgttagaaaccaatgcacagaggcagacttcctttttgaagcagtt

SEQ ID NO: 548216 - DNA, 541 bp, Homo sapiens
gtcaatgtaatgtgcttatatgtcaatgtgtaacttattttgaacattgttgatctgtgttcgcaaattcctgtctaattaaataattttttttcaaacccatggctgccaaatgtattaaacaatatgagtgctaataaatatttttgagggtgaaaacaggaaagcaaggaaaggcatatagtctcaggttcactgccaaggttatcatctaaatctaatttagagagcctcattaaagataagcctcagggcaaattcaatggaactcaggagaggcaaccatttaaaagttttaggagagcagaatgcctgtttttaattgatagtttatttcatttcagaaactgtttttaaatgaacatgtaaggcattatcaakaattactttattccatgtaatctgtgttttagctgggtacatcttttgcacctgtcattgagaaaatacagtgtttgaaaaaaattagattttgaaaaataacaattttagtaggatgatttttatataaaattatatgataaatctttcctatgttatt

SEQ ID NO: 548217 - DNA, 966 bp, Homo sapiens
cgtctcccaggtgagacaggtcactcccaatgcagctcctcagaagccatgccaggagccagccttgctgcagccggattcaggacgtcatggcgttttctgcctggataacaggccgctgcgtgtgcatcacacttggctcatctgttcccctgttggacgctcgggtcgctcccacctttcggctgctgtgaatggtgctgctgtgaacacggggtgcaagcatctgtctgcacctccatttggatgctcggctcgctcccacctgtcggctgttgtgaatggtgctgctgtgaacacggggtgcaagcctctgcacctctattttccattgtttggggtgcacacctaggaggggaattactggatcatatggtaactgtatacttaattctgaggtgttgccaagctgtttgacagtggcagctccattttctgctcccatcaacaatgtgtgaggtcaccaacttctccacatcctcctcaactctcgctgttttccatgtttttgataaaagccattctatgctgaatgaaacaagccagacacaaaagaacaaacactgtgtagttccactcacacaggcacctggaagagtcagattcctagagatggaaaatagaacagaagttcccagggctgcaggaggggcaggagtcagatccatggggatggagctcctattaaggctgacgaaaacgtcctggaaagagatggcggtgagggccacgccacactgtgaatgtacttaatgccactgagccgcacacataaaacggtcgacatggcaaagcgatgtacatttcrccacacgagcagaaagttaaaagaaaagtcatgccaagaattctccactggcgaattccctccctttcctcctgagccaagcccactactcatcgtgagttcagagctgcgtccttcctagaggggcctcccagggccaggattgagctgcagacaca

SEQ ID NO: 548218 - DNA, 645 bp, Homo sapiens
gaaatacacaaagcttcagcttactctggactcaatattctaggggaagacaacagttttcattttcttttcttgctggagaacaaaagcatcaggtaggaaaatctgtccccttggaaaaggaccagccatttgttctctggaaggcccctgaaagtaagcagataagggaaagtggatatctggacttgcctgagaaaagccttttaggtccaattgtagcaacttatttgagagctgcaactcattaagtgtgtctctgatatcacttcagatatgaaggttagtgaaacataccaatagattgaatcatcaaaaaattctcctaggaatttgaacacagaagatttgatggagaattactccattggctcaagcctggatgggcccctagtggagataagatacagacaccttttagacaagggtttcattcttcagaaatagaagctcaaattgagaaygttccctcaatccctcaacattatcatcacagtgtttattagacatctacatatactccataggcactaaccaaacacataaaatctaaagtctctgccttcacagagcagacaaattaagaaaacaaccccacctcctgctcccattctggggactacacatcagaaaatagatctcttt

SEQ ID NO: 548219 - DNA, 645 bp, Homo sapiens
gaaatacacaaagcttcagcttactctggactcaatattctaggggaagacaacagttttcattttcttttcttgctggagaacaaaagcatcaggtaggaaaatctgtccccttggaaaaggaccagccatttgttctctggaaggcccctgaaagtaagcagataagggaaagtggatatctggacttgcctgagaaaagccttttaggtccaattgtagcaacttatttgagagctgcaactcattaagtgtgtctctgatatcacttcagatatgaaggttagtgaaacataccaatagattgaatcatcaaaaaattctcctaggaatttgaacacagaagatttgatggagaattactccattggctcaagcctggatgggcccctagtggagataagatacagacaccttttagacaagggtttcattcttcagaaatagaagctcaaattgagaatgttccctcaatccctcaacattatcatcacagtgtttattagacatctacatatactccrtaggcactaaccaaacacataaaatctaaagtctctgccttcacagagcagacaaattaagaaaacaaccccacctcctgctcccattctggggactacacatcagaaaatagatctcttt

SEQ ID NO: 548220 - DNA, 827 bp, Homo sapiens
caatatgctcttaaattttacattacaattaaaggaaggattacatttatcttactgaaataaaagtggtctgaaaatcmcaattcaattgttttcagaggaaaaggcatcaaatatccacaagactcttttgaaattatatattctgcagtgggataattatgttacctaaccagaatagtaatgacacatgcatttaaagctgataaaaatgaaagtcttgtcaaaaggaagtgacagcccaacttgtcaggccaaacatgctttggcatagaactttatatgctctttaaaatgattttaataaaaataataagctaatcaatgcaatcaaactttgaaggtaataacaatatcaattatcaattttgtcctctcgatactccttggctagttttgcatttctgctaacatcattggtcctggatgattctgaaacttcagcctacaataccgtaaagtctttactgtatatgttcaacttcaagcataagagaagttacaattaaaagtataatcagaggctgggcacagtggctcagtcctgtaattacagcactttgggaggccgaggtgggaggataacttgagctcaggagtttgagcctagcctgtgcaacatagcgagaccacttccctacaaataatttaaaaaatcagccaggcatggtggcatgtgtctgtggtcccagctacttgggaggctgagacaggagaatcacctcagcccaggaggccaaggctgcagtgagcagtgatcacaccaccacactctaacatgggtgacagagtgagaccttgtctcaaaaaaaaaaaaaaaaaaaaaa

SEQ ID NO: 548221 - DNA, 634 bp, Homo sapiens
cgaatttggggtttgtttttcttaattacaaggaatcaagttgaatcattagtgcatatataaatatacattttatttttagtacacattatatacctcaggaatgtacaatgctcagcgcctgggtgacgggattattcataccccaaacctcagcatcgtacaatatccccaggacacaaagctgcccrtggatcccctgaatctataataataataattaataataataataataaataaaaagtgactttgtcattcgcagggaaatgtgaatgacattcactctgcctctcaggcccttggattcccaaagtttgttttcatcacgcccaggggacactcagaatgtcgtttgcagaacacgggttgtttttcttagaaacgccttgcaaaacaaaataggaagcaaaatctttctcactccttccactccataatagacaaaataaaatgagggggcaggaatccagagactttgaccacagttggcagatttattgtggtacagacatgaaggcaagcagtgttctctctgattctatgaaccgtacagcccgggccagctgccttctgctttctggatggtgcaggcgtgagctccaagcccaaatttcactggagctccaagaat

SEQ ID NO: 548222 - DNA, 634 bp, Homo sapiens
cgaatttggggtttgtttttcttaattacaaggaatcaagttgaatcattagtgcatatataaatatacattttatttttagtacacattatatacctcaggaatgtacaatgctcagcgcctgggtgacgggattattcataccccaaacctcagcatcgtacaatatccccaggacacaaagctgcccgtggatcccctgaatctataataataataattaataataataataataaataaaaagtgactttgtcattcgcagggaaatgtgaatgacattcactctgcctctcaggcccttggattcccaaagtttgttttcatcacgcccaggggacactcagaatstcgtttgcagaacacgggttgtttttcttagaaacgccttgcaaaacaaaataggaagcaaaatctttctcactccttccactccataatagacaaaataaaatgagggggcaggaatccagagactttgaccacagttggcagatttattgtggtacagacatgaaggcaagcagtgttctctctgattctatgaaccgtacagcccgggccagctgccttctgctttctggatggtgcaggcgtgagctccaagcccaaatttcactggagctccaagaat

SEQ ID NO: 548223 - DNA, 1964 bp, Homo sapiens
ccagggaagactgtggcctgtaagctcgtacatcctctagtgaatactcttctgttcttcccatgacaccctcatgcaaggttctcaaaactccttcagagttagcattcaaaggcagatacagaacaaattggtggctgttctcttccttgaagagtctctgtttttcagtgggcccagcttttgcaaaggttagggtcacaggcctcacaagcagcagctgactgtctcaagccgttggccgtcagagcctctggctcaccctctgaggtgggggtgtgtggtctgaggatgactctcctcctctgctatgcagaacccacctgctaacgtcacccatctggggagggcaggcacaccaccagccactgaggatcatgacctagattaggacttcagaggtcaaagtcctctttatagtttgcaactgcattgtcataaagatgtatgtaatctttgaccctaagagtttgtgcttttttggctgttctcattttgaaagaaatttaaacatttttgcaggactctaagagggctgtaggacccagacactgtgctcactgtgattaatgatggagaagtcacctgcagccctgacaaatcacatctcggggatctgatttttaaaaaagagagagaaaaaatagagagtttacaatttagaaccaaaatcaaaatcaagtcttacatactttacccagaaaaataagacactgggtctctgtcttgttgacagagagatcctttaaaagagaagcacggccgggcgcggtggctcacgcctgtaatcccagcactttgggaggccgaggcgggcggatcacgaggtcaggagatcgagaccatcccggctaaaacggtgaaaccccgtctctactaaaaatacaaaaaattggccgggcgtagtggcgggcgcctgtagtcccagctacttgggaggctgaggcaggagaatggcgtgaacccaggaggcggagcttgcagtgagccgagatcccgccacagcactccagcctgggcgacagagcgagactccgtctcaaaaaaaaaaaagagaagcacgggaaagctcttacaggtcattccgtttcttctctgcttcctggaaggactatatcagcatcttcttgttccctggttccctgctctactaattgtcactttacagtcatgcatatttttgcatggtttttcagtctttctggagatctaagagccagtaaagtcaatgattgtttcacccctgctgggataatgaaatgactggaaaaaaaagtcatactaggaaataggtttcctgattatttactggttagttttctgtccacagctcagtgaggctcatttggggaggtttaagttaaatcagttttcatggcaccatgtgtgcagtggtcataatctcagatttgatgtcctcagataacacgctgtcatgtcccacgtgtccgtttgttcgtggtgtctgagtgccggggagtgctcgcagcctggcagacacctaatacccttttgcagcaattgtaaactgtgtctgagggtaagagtaataacttaggcacttaatcgtggctaaaaatagcagtggagggagagaaaaagaacatctcatttgatcyacttgttttctgccagttctggaaacacacattctttcggccacggcaacaactagccccattcggttgagttcactgtctgctgcaggaccacagacccacaggctatgcctggctggaggcctgtctcacccaccagctggacaatccatggcagcccttctctgtgcctcagtttcgtcagctgtagaatggaactaacactagtgccccccatcctgcctgcccctaccaggatggtggttgtaaagattaaagaggttaatatatgtaagcctgcttagcacaagtagcacttactagcatttaccattcttgttgttcctcttgcctctttcccaggca

SEQ ID NO: 548224 - DNA, 341 bp, Homo sapiens
cagtggctcacacctgtaatccctgcactttgggaggccaaggcaggcagaayatgaggtcaggagatagagaccatcctggccgacatggtgaaaccctgtctctactaaaataaaaattaaaaaaattagccaggcgtggtggcatgcgcctgtagtcccagctactcgggaggctgaggcacgagaatcacttgaacccgggaggcagtgagccaagatcgtgccactgcattcccgcctggcgacagagcaagattctgtctcaaaaaaaaaaaaaaaaaaaaaagatgaaaccctctctaatctaccttaaggctagtaaaataaaacacgagaca

SEQ ID NO: 548225 - DNA, 694 bp, Homo sapiens
aaactgagacagatggatagtttgcaaatattttctcccatgctgtaggyggtcttttcacttcattaattgttctctttgctgtgcagaagtttttggcttgatacaatcacatttgtctgttttcgcttttgttactgatgcttttgaagtctaacccccaaaaatctttccccagatcaaagtttttttttttttttttctagtagtttcatagtatcaggtcttacctctaagtccttaatccatttggagttgacttttgtatagggtgaaagatggggatttatctcactttttcacatccactatacttatcttccctcctatcttttttgtatacatggttataggattttcaccagtgttttattatgtttttagaaaacatgttttgcagaagagaaactcttatgaattttctgttgtgcttcaaatcgtaatcattcaaggaatatatcccaaatagctctgataggaaacactattgaacaattagtaagatatgttcataagaatcattatgaggaataaaaacaactaaggttcttaaaaagaaaaaaatacttccaactgtaaaaatatcattttttattagaatgatcttcatttacttcaacacaaataaatttaaagcagcattagaaaatgtagcatttaataaagtctttatacatcctgttctcaactgaca

SEQ ID NO: 548226 - DNA, 694 bp, Homo sapiens
aaactgagacagatggatagtttgcaaatattttctcccatgctgtaggtggtcttttcacttcattaattgttctctttgctgtgcagaagtttttggcttgatacaatcacatttgtctgttttygcttttgttactgatgcttttgaagtctaacccccaaaaatctttccccagatcaaagtttttttttttttttttctagtagtttcatagtatcaggtcttacctctaagtccttaatccatttggagttgacttttgtatagggtgaaagatggggatttatctcactttttcacatccactatacttatcttccctcctatcttttttgtatacatggttataggattttcaccagtgttttattatgtttttagaaaacatgttttgcagaagagaaactcttatgaattttctgttgtgcttcaaatcgtaatcattcaaggaatatatcccaaatagctctgataggaaacactattgaacaattagtaagatatgttcataagaatcattatgaggaataaaaacaactaaggttcttaaaaagaaaaaaatacttccaactgtaaaaatatcattttttattagaatgatcttcatttacttcaacacaaataaatttaaagcagcattagaaaatgtagcatttaataaagtctttatacatcctgttctcaactgaca

SEQ ID NO: 548227 - DNA, 694 bp, Homo sapiens
aaactgagacagatggatagtttgcaaatattttctcccatgctgtaggtggtcttttcacttcattaattgttctctttgctgtgcagaagtttttggcttgatacaatcacatttgtctgttttcgcttttgttactgatgcttttgaagtctaacccccaaaaatctttccccagatmaaagtttttttttttttttttctagtagtttcatagtatcaggtcttacctctaagtccttaatccatttggagttgacttttgtatagggtgaaagatggggatttatctcactttttcacatccactatacttatcttccctcctatcttttttgtatacatggttataggattttcaccagtgttttattatgtttttagaaaacatgttttgcagaagagaaactcttatgaattttctgttgtgcttcaaatcgtaatcattcaaggaatatatcccaaatagctctgataggaaacactattgaacaattagtaagatatgttcataagaatcattatgaggaataaaaacaactaaggttcttaaaaagaaaaaaatacttccaactgtaaaaatatcattttttattagaatgatcttcatttacttcaacacaaataaatttaaagcagcattagaaaatgtagcatttaataaagtctttatacatcctgttctcaactgaca

SEQ ID NO: 548228 - DNA, 694 bp, Homo sapiens
aaactgagacagatggatagtttgcaaatattttctcccatgctgtaggtggtcttttcacttcattaattgttctctttgctgtgcagaagtttttggcttgatacaatcacatttgtctgttttcgcttttgttactgatgcttttgaagtctaacccccaaaaatctttccccagatcaaagtttttttttttttttttctagtagtttcatagtatcaggtcttacctctaagtccttaatccatttggagttgacttttgtatagggtgaaagatggggatttawctcactttttcacatccactatacttatcttccctcctatcttttttgtatacatggttataggattttcaccagtgttttattatgtttttagaaaacatgttttgcagaagagaaactcttatgaattttctgttgtgcttcaaatcgtaatcattcaaggaatatatcccaaatagctctgataggaaacactattgaacaattagtaagatatgttcataagaatcattatgaggaataaaaacaactaaggttcttaaaaagaaaaaaatacttccaactgtaaaaatatcattttttattagaatgatcttcatttacttcaacacaaataaatttaaagcagcattagaaaatgtagcatttaataaagtctttatacatcctgttctcaactgaca

SEQ ID NO: 548229 - DNA, 694 bp, Homo sapiens
aaactgagacagatggatagtttgcaaatattttctcccatgctgtaggtggtcttttcacttcattaattgttctctttgctgtgcagaagtttttggcttgatacaatcacatttgtctgttttcgcttttgttactgatgcttttgaagtctaacccccaaaaatctttccccagatcaaagtttttttttttttttttctagtagtttcatagtatcaggtcttacctctaagtccttaatccatttggagttgacttttgtatagggtgaaagatggggatttatctcactttttcacatccactatacttatcttccctcctatcttttttgtatacatggttataggattttcaccagtgwtttattatgtttttagaaaacatgttttgcagaagagaaactcttatgaattttctgttgtgcttcaaatcgtaatcattcaaggaatatatcccaaatagctctgataggaaacactattgaacaattagtaagatatgttcataagaatcattatgaggaataaaaacaactaaggttcttaaaaagaaaaaaatacttccaactgtaaaaatatcattttttattagaatgatcttcatttacttcaacacaaataaatttaaagcagcattagaaaatgtagcatttaataaagtctttatacatcctgttctcaactgaca

SEQ ID NO: 548230 - DNA, 507 bp, Homo sapiens
  misc_feature 77: n = A,T,C or G
cttcctggaaagagatggacacctgttggatatagtggagagaatggcagctccagaaagatacctccatgtcctanacctagaacccgtgaagctgaccttatttggataaagagtcttgcagatgtaatgaaattagaatctcagatgagatcatcccaggttatccagcagccactaaacccgaagatcagagacacacagagmgaagaccaggagagcatgccaggaagacagagcccagactggagcgatgcaccacgtgccaaggggcgccagcagccaacagatgctggaagagggaaaaggcgtccagagggagcacagctctgcccacaccctgatttgagacttctgctctccagaaccgggagagaatacatttctatcgtttggagctcccttggtttttggtggttacagcagccacaggagactcatacctaataacgagacccataaggccgttcttgtacttatttgtgtttctctgaacaaggttgttcc

SEQ ID NO: 548231 - DNA, 1374 bp, Homo sapiens
aaagatcctacttatgaccatcgtgagtttgccctcagtcctccttctcctccttggaagttagttttcttccctgcaggagcaaaaaagaagccagcagccttgaggactttctggataccctcagaggaagcaaacatctggtgctctataaatgcttccctaatggtttgagctgaagaagtaaaaaccactcttctgaatggcttagaggagccagttggattgatgagcaagcagccgtgtccagttatgtttttactgagcgtgtcaggatgaaaaccttctgcaaacggggattttcccaaaaaaaaggtkgtgggtggggtggggtgggggtggacatgtggcacccatagagccctgttgttaaaagtatatttagccaatttgtttggataatggtggaagataaaatttgccagagacccagctgacctctttacaactgaaatcagatccattaatctgagtacaaaatacagagggttacagcttactgatcacgttgttctttcttttatccaggcaacaaacaatgaaggtaggtatcacgtataatcccgctaaagaaaaatgcctattaaatgttgaatacaactcccttttagtactttttttctgttttgtatattgtgtgtacttaaaatctgtattctacatggctatttgtaacccttcatcccactcaatatgctgtgaacattttaacatgcattaagtattttatggcctcattgtaaatgaatagttttccatcatagaaaggtatccaaattcatttaacgagtccctgttgtggcatatttgctataataatctgattaagcactgggtttttgttctaggggttgagcaagaggtagattctgtttcctataaattctttttctctgagtacacaggccacgttggatgccagttttcgtcttcctgctgggattacatgtggtagacagggaatgtttcctcaccagcgtggtgagttaaaggctgtcatttcagacccttccaggcaggggctggagcatgctgatgacagagagagacatggaattcttccaacagcctgtgggtccctaggaagctggaacattctttgtctgattagaggaagaatggcatttctgaaagtgggttttgtgggtgcataaaaagcccaaaaaagggtctgttctggaaagttggccatcagaaccttcccttgatgtgatggagtatatcaaagaatcacatttgggtgccactaacagaaccccccgacctcaccccacccccaccagttggtggcttgaacacagttggtacgagttttttttttctcaagtgctgagaaatcctaaggctgcagtaaatagcattggttcaatacaa

SEQ ID NO: 548232 - DNA, 1374 bp, Homo sapiens
aaagatcctacttatgaccatcgtgagtttgccctcagtcctccttctcctccttggaagttagttttcttccctgcaggagcaaaaaagaagccagcagccttgaggactttctggataccctcagaggaagcaaacatctggtgctctataaatgcttccctaatggtttgagctgaagaagtaaaaaccactcttctgaatggcttagaggagccagttggattgatgagcaagcagccgtgtccagttatgtttttactgagcgtgtcaggatgaaaaccttctgcaaacggggattttcccaaaaaaaaggttgtgggtggggtggggtgggggtggacatgtggcacccatagagccctgttgttaaaagtatatttagccaatttgtttggataatggtggaagataaaatttgccagagacccagctgacctctttacaactgaaatcagatccattaatctgagtacaaaatacagagggttacagcttactgatcacgttgttctttcttttatccaggcaacaaacaatgaaggtaggtatcacgtataatcccgctaaagaaaaatgcctattaaatgttgaatacaactcccttttagtactttttttctgttttgtatattgtgtgtacttaaaatctgtattctacatggctatttgtaacccttcatcccactcaatatgctgtgaacattttaacatgcattaagtattttatggcctcattgtaaatgaatagttttccatcatagaaaggtatccaaattcatttaacgagtccctgttgtggcatatttgctataataatctgattaagcactgggtttttgttctaggggttgagcaagaggtagattctgtttcctataaattctttttctctgagtacacaggccacgttggatgccagttttcgtcttcctgctgggattasatgtggtagacagggaatgtttcctcaccagcgtggtgagttaaaggctgtcatttcagacccttccaggcaggggctggagcatgctgatgacagagagagacatggaattcttccaacagcctgtgggtccctaggaagctggaacattctttgtctgattagaggaagaatggcatttctgaaagtgggttttgtgggtgcataaaaagcccaaaaaagggtctgttctggaaagttggccatcagaaccttcccttgatgtgatggagtatatcaaagaatcacatttgggtgccactaacagaaccccccgacctcaccccacccccaccagttggtggcttgaacacagttggtacgagttttttttttctcaagtgctgagaaatcctaaggctgcagtaaatagcattggttcaatacaa

SEQ ID NO: 548233 - DNA, 1374 bp, Homo sapiens
aaagatcctacttatgaccatcgtgagtttgccctcagtcctccttctcctccttggaagttagttttcttccctgcaggagcaaaaaagaagccagcagccttgaggactttctggataccctcagaggaagcaaacatctggtgctctataaatgcttccctaatggtttgagctgaagaagtaaaaaccactcttctgaatggcttagaggagccagttggattgatgagcaagcagccgtgtccagttatgtttttactgagcgtgtcaggatgaaaaccttctgcaaacggggattttcccaaaaaaaaggttgtgggtggggtggggtgggggtggacatgtggcacccatagagccctgttgttaaaagtatatttagccaatttgtttggataatggtggaagataaaatttgccagagacccagctgacctctttacaactgaaatcagatccattaatctgagtacaaaatacagagggttacagcttactgatcacgttgttctttcttttatccaggcaacaaacaatgaaggtaggtatcacgtataatcccgctaaagaaaaatgcctattaaatgttgaatacaactcccttttagtactttttttctgttttgtatattgtgtgtacttaaaatctgtattctacatggctatttgtaacccttcatcccactcaatatgctgtgaacattttaacatgcattaagtattttatggcctcattgtaaatgaatagttttccatcatagaaaggtatccaaattcatttaacgagtccctgttgtggcatatttgctataataatctgattaagcactgggtttttgttctaggggttgagcaagaggtagattctgtttcctataaattctttttctctgagtacacaggccacgttggatgccagttttcgtcttcctgctgggattacatgtggtagacagggaatgtttcctcaccagcgtggtgagttaaaggctgtcatttcagacccttccaggcaggggctggagcatgctgatgacagagagagacatggaattcttccaacagcctgtgggtccctaggaagctggaacattctttgtctgattagaggaagaatggcatttctgaaagtgggttttgtgggtgcataaaaagcccaaaaaagggtctgttctggaaagttggccatcagaaccttcccttgatgtgatggagtatatcaaagaatcacatttgggtgccactaacagaaccccccgacctcaccccacccccaccagttggtggcttgaacacagttggtacgwgttttttttttctcaagtgctgagaaatcctaaggctgcagtaaatagcattggttcaatacaa

SEQ ID NO: 548234 - DNA, 1186 bp, Homo sapiens
  misc_feature 238, 239, 240, 241, 242, 243, 244, 245, 246, 247, 248, 249,250, 251, 252, 253, 254, 255, 256, 257, 258, 259, 260, 261,262, 263, 264, 265, 266, 267, 268, 269, 270, 271, 272, 273,274, 275, 276, 277, 278, 279, 280, 281, 282, 283, 284: n = A,T,C or G
  misc_feature 285, 286, 287, 288, 289, 290, 291, 292, 293, 294, 295, 296,297, 298, 299, 300, 301, 302, 303, 304, 305, 306, 307, 308,309, 310, 311, 312, 313, 314, 315, 316, 317, 318, 319, 320,321, 322, 323, 324, 325, 326, 327, 328, 329, 330, 331: n = A,T,C or G
  misc_feature 332, 333, 334, 335, 336, 337: n = A,T,C or G
cacagcagtagatgaacatcaggaacaccacccttgaacgcagggccagcagaacgccagggctgggaacgaggctggggagcagtcgggcaaggatgcctggggtgtcggcgggaggtgcctgcatgcaggctgtgctggcagtgggcatagaggagtcagagttagcatgggctgagggatgacgtgggtagaccagcaggcttcagtcatctgagcactccccaggtgccaggannnnnnnnnnnnnnnnnnnnnnnnnnnnnnnnnnnnnnnnnnnnnnnnnnnnnnnnnnnnnnnnnnnnnnnnnnnnnnnnnnnnnnnnnnnnnnnnnnnnatcctgcttttctctgtctctccctcacccattttcttctctcatttcagacctgccagaagcttctcgtcatccctgctgatcagggaaccaacccaagcagctcccagctcctgtcctcaggatgttcctcctgctggctggaggccacctaaataggccaccgtgcccggcctatttagattaaaataactaaattttatttatggaaatgtttcaatatccagccctgcagggatgcccaccgcctcctgcattggccctttctcacagtctgttgctgtctccccttggagggaaccaggggggacttcctcccagagcccaccctttggtgcaggtgaaaacatggtgcccagtgggatgasttcccggtgaaatgtagagcctcagtggagctgacaccagtctcttgaccacttgtccctctttacatgtaggaagcactttacagcttcacccctttgagctgtggactttatgtacattagctgatctcacccagccagcctcaatgtccttttctgcaaaatgggcatcataataggagtgttcaagtaagtgcttgaagtctgggaagaatcaggcaacatttcagagctctctggaatcgaggtggacttgaatagactaggccattttgttttccttaagcatcatggtgaggattgttgagtttggtagatattgttatgtccattctccagactcacctctgaatattcccagatgtacttccaggaagctctgggctgcagggaacacaacatccaaaaatgtggcttaagtaggaggattattatctcacttaaaaagaaacctgaggtaggttgtcccaggcttggttca

SEQ ID NO: 548235 - DNA, 527 bp, Homo sapiens
attgtcaattaagtcacctgagagttacaattaagctytattaaaatgctggtgaaaacttcctagctttcatttctcctctgaacatagactgactgaagaacatcaagtccccctaagaattactatcttaaacacaaaagttcaaaacacaggaggtcagatctaacacatatataagtcagaagattatgtctaaagccatgagggattaaatatggggattaaatacgtgggtccatgtttggtggtaatggtggaggggagttgatttcaggacttaactttggcaaggagttgtccttgataaagaaccagctctcttatgctgactgcctagaaaacattacgccatacccaacactttagcgttcatcaggttcacttaaaaaaattattgcattctagctgggctccctggttctgcatttggaaattatcacatcttcattatccaaataaacacctgccactactcaccctagagtatgagatgtaaagttgcccacatgagaagcagctcccac

SEQ ID NO: 548236 - DNA, 592 bp, Homo sapiens
ggtcaaatgtataagagaggaagagtgcaaaaaacaagaagaggtccaagggaatgataggctgggaggaaaatggggagggacacctccttyaggcctgggtcctggagatgggtagaggagcttggctgttctaaaagcatttgactcaagcccatgggaattccccctggtcctagggtcagcacttcttgaaaccattccaagtcctatgtgccagcaggacagaatagccctcttccaaagatgcacaccttattgcatgaaaatgaagtttccagctcagcataccagacagtaattaatctaattaacaattattcgttttattcccccacaccattagacaagcccacccaccccccaccaactcaacagcaatgccaatgaatagcttcaaaagaagtcaatataccaagttgatgagaaaggccttcaaggcaacctcagtgctattgctcgtccctctgagccagctctgaattgatgccggataagaaggctggaaaagccaagcctgcttccttttagcctaacaccctctcttctttcagtctcttctttctggcaaacctaggtcctcaccctaggt

SEQ ID NO: 548237 - DNA, 620 bp, Homo sapiens
attcttttatataggaagcagggggttaattgtatgcttattcattaattcaacaaactttttttagtacctccccagtattaataactgctctaagggctaggaacattacaatgagcaaaagaaaagtccatgcctttttgaagattattttcaggaagaaagaagataattagaaaaaatcaacacaaatgtaataaacaaattgatacaaacaggaagcagggaatactgggtagaagagatcagggtccctggtgagggctccaccctcaaccctagacccatggccctaaatgagaacatgcatttctgttttcctgtccaaatgttgcctttcccaaaacctcctgtcctgcccaacaagatcgccatcctataaccataaaaaacccaagctccactagcagaagagctgagcggcatggcagagaaggagagaagagaagaagcgtctgaacattgagaggggaagaggcagctggacattggagactatggttggagaggagtctggccrggaatggctggactctaggggaagattatgttcctactccaccccctttgcagcttcccatcccactgagagccacttccatcactcactgaagtcctcc

SEQ ID NO: 548238 - DNA, 620 bp, Homo sapiens
attcttttatataggaagcagggggttaattgtatgcttattcattaattcaacaaactttttttagtacctccccagtattaataactgctctaagggctaggaacattacaatgagcaaaagaaaagtccatgcctttttgaagattattttcaggaagaaagaagataattagaaaaaatcaacacaaatgtaataaacaaattgatacaaacaggaagcagggaatactgggtagaagagatcagggtccctggtgagggctccaccctcaaccctagacccatggccctaaatgagaacatgcatttctgttttcctgtccaaatgttgcctttcccaaaacctcctgtcctgcccaacaagatcgccatcctataaccataaaaaacccaagctccactagcagaagagctgagcggcatggcagagaaggagagaagagaagaagcgtctgaacattgagaggggaagaggcagctggacattggagactatggttggagaggagtctggccaggaatggctggactctaggggaagattatgttcctactccaccccctttgcagcttcccatcccastgagagccacttccatcactcactgaagtcctcc

SEQ ID NO: 548239 - DNA, 638 bp, Homo sapiens
aaacaaaccaaatgtccattaactaatgaatggataaacacatggcataactgtatagtgcaatattatttgaccataaaaaagaataaagtgctcatacatgctacaacgtgtaccgaaacttggaaaacacaatgctaagtgaaagaagccagtcacaaaagactacatagtatatatgagtgcatttatatgaattgtccacaatgaatctaggcacagaaagtaggctagtgatttcctagggctgggagatgggtacattggaagtgatagctaaagtgtacaggtttctttttggaatgatggatgcgttctacaattgattatggtgggcttctgattccatyagaggaggagactgaacgaccacagagaaagggcaacaagtccgccgggcgcagtggcttacaccagtaatcccagcactttgggaggccaaggcaggcagatcacgaggtcaggagatcaagaccatcctggctaacacggtgagaccctgtctctactaaaaacacaaaaaattagccaggcatgatggcgggcgcctgcagtccctgctactcgggaggctgaggcgggagaatggcatgaacctgggaggaagaggttgcagtgagctgagattgcgccgctgc

SEQ ID NO: 548240 - DNA, 547 bp, Homo sapiens
tgatctaacatgcaaagtcaacctgtatgttataaatgtataaagctcaaatcatatatatgagatacaaatgtatatatcagattgtcttccagtatctttcttttggagcttgcttgtattgtttttggggagtggacaccacagtttggagagttctgcttttgtatttgttacataggttttcacaagatttaactaaaattcacattaactttcaaatttgaaaatatctgcatgagtttaattgcacagacttgatttttcagtttctcacaggaagcatttgtttttctctctagaacctttagcagaaatgagctttatttttccctgatctataattgaagactttttttttttttttttttgaggcagagtctcactctctcacccaggctggagtgcgatggcaagatctcggctcactgcaacctccgcctcctgggttcaagcaattcttccgcctcaccctcccgaatagctgggwttacaggcacacgccaccaggcctggctaatttttgtatttttgtagagacggagtt

SEQ ID NO: 548241 - DNA, 483 bp, Homo sapiens
agaaataaagaagaaaagcgaaaaaccagagaaatgtatacctattatgtgacagcattgccaaaacaatgtccttcctaacattttactagtatctttgctaggacttaccaaaattataagaattttcttttatttctttaagtataaactacagcataaaattatttagtcaaattttgcggtgttgctacagataaaaatttattgtgaattattttccttttaataagaattttcaaacggtgagtattgttagaatacgtattttatctcctttttgtttttaggtgacttcaaaataactattgtaaaaattggctaaagaaaaatgataattaacaraagtatgaaattagcatttgtgaaaagcaaagtaagttttacatgagtgatgaaagttaaatagaggcttgaatgagaaaattgagacgtttttagaaagatttcgtgttacctgttaggaagaaacttgggagaaaa

SEQ ID NO: 548242 - DNA, 875 bp, Homo sapiens
gtttgggaccaaagtgttttagatttcagatttttatggatttttgaatatttacagaacacatactggttgagcatccttaatctgaaaactagaaatccgaaatgctccactgagcatttcccttgagcacatgtcagtgttcaaaaagttttggatttggggacatttcagattctgatttgggatttgggatgctcaacctgtagtgcctaattcatatggtgctccaatgagttaatgtatataattgaggatccaatgaattaatttatataatttcagaacagttcctaacatataataaaaactcaatatattgtatagttatyatgaaagttgaagagtctgactcttcttgccctctaacctagacccaagaaaaaaattccaagaatgcaactatttaacaaaatacagtatacttcagtgactttaggtaacaaagtgtcaattgcttttgtaagtcacatttatatgaataaatactgtttatatagtggttttactttaacacacactttcctacatattatcataatttttttcataacaattccattaagtaggtattattaatatccttattttccagattaagacagtcagagaagttaagtcataccaatatcacagacagaaaatgccaaagccagaatttgaaccaaattcttcttactctaaatgccatattttgccgctatcaaattcttaatcattttgtttcattttcaactcaagttgaatttttacttcaaataactatcatattttaacgtgtttaccttgattccgtcaggcatttttcatactttaaattgcatatttaattgcccaattcttcaacataaaattgcatgagagaaaaaactatg

SEQ ID NO: 548243 - DNA, 1534 bp, Homo sapiens
aagtaagctcagaaaaacaatattgtattttttaatatttggaaaggaatagagatacaaaagtaatgaagtgatatgaataatgctattatgtctcactttatgaatatggacatagaycagctgttttagataataaaaaatgcacttccatttcaaaaatgtaattctaaaagtaatatttatatgtaatattcagaaaactaatatggttgttaaatatgattgaaatttccaagtagcaaccatagatcatgcataaccagtacatgactggctcaggaccacacaagctgttgaggtccctggcaatcccaatcagaaatcagtttcaccaagtttttgcttttagacttaattccatttcacaatatattttgtctctatcttatctcgtagcccatgaggttcaaacctatcctttccctttaatgacaagaggacatttgccctacactatgtcctgttcactgatgcaaacaataatccaaaatcttccttgatcttcatccttaaatttccttctgcaaccacctgttatgagatcagatacttggttttgaaagtagtcaaatggtgatgacatctgtaggcagactacctctgtttatgggatcacacctgaaaatatgggagatggaggtaggaggtaatttaatatgtgagaagatattagaagaaagggcatctggggtaagagtcagagacctgttgggaagaaagaagagaggaaaaaggaaaaaaaaaatgacttttgagcatctggctcactcaacacacttcgtagtgtaaatgatggctaaatgttgtcccataacttgaataattttggggggtctgaagcattcaaatgtttgcaacatttaaaaatatgatatgtaatttagtaatttgtgtctttcttgagaaatcagatgaactaacaacactggtctgacattcctacagggaatctgtacaactcggtcaggggctgagttgtgtctgttttaagcaagttatgcactttcaacttaactcacttcctgcaatgctctgttaacatacatttagcctgattcactcattttcttgttgttaactgcttggttccataggaatttgagtctggacaaaacacaagctcagaaatattgcttattcatccattcaccaatatttgttaataatgtaaattgtctagaatattgtacaaactgataatgattaatgcaaagatactttaaatcatgggtcttgctttagggagatttagttgtcgaaagggaaataaatgagcccaatatcagctgtaatcaaggtggaaaaagactagtatctcaaagtatgctatcactatataaaagagaaaaaatccagctaggaaatcaaggaaagatattaatggaaagaatagaatcaagacagtgacttggtagccagttcaagggtaggtaagtgagtatttatggagaatgttgtggagataaatctcattatctctatatgaacttgtaatattaggcatttcgttaaatttagtaaggtttatata

SEQ ID NO: 548244 - DNA, 1038 bp, Homo sapiens
agtactcatttatgattggagatattttggaatgtaccttgcaggaagcgaactttgtcctgaatcttgaaataaaaatattccatgggtggaaaggatgatgtatatagttaagtctaagggagagataacacaagcatctagttatacctataaagaatttgcatatggtggggataaaactatcatggacattaaaagtgctgtgaagaaaaattatatttttatatttattttttttgagacagagtttcgctcttgttgcccaggctggagtgcagtggcacaatttcggctcgcggcaacctccgcctcccgggttcaagccattctcctgcctcaacttcccaggtagctgggattataggcgcatgagccaccacgaccgactaattttgtatttttagtagagacggggtttcaccatgttggtctggctggtctcaacctcccgaccttggcctcccaaagtgctgggattccaggcgtgagccaccatgcccggccaagaaattttattttattctgcggataatagaggccgtctgggtgcagtatgaaggatgatcaaaatcaaggagatatatctcaacaactcatattcagcatatgagaaaaataaaaattaaatatgttgttaaaatagcctcaaaaatactggttctctacaagattgattttatatagaactgtctgtttactgtgaaagattcagaatcaaaatgaagtcactgatgttatgaaamccttggcagatagagccagggacggccatgaagggagagttctcatgcttctatacctgataacaaaaattatcacaaaagactgcaaaaaccacaactttgtgtaaaggccatcacaagtttatttaaaaaaatacttctgcaaggacatatgcccatctaatctcggactggtggtacccttgttattgatctttgtagcgaagtataattatttcaaaacaattatgtaaacctcctcattgttttctttaaaaacttttgtcctccttttcatccctaaaaacacgca

SEQ ID NO: 548245 - DNA, 1038 bp, Homo sapiens
agtactcatttatgattggagatattttggaatgtaccttgcaggaagcgaactttgtcctgaatcttgaaataaaaatattccatgggtggaaaggatgatgtatatagttaagtctaagggagagataacacaagcatctagttatacctataaagaatttgcatatggtggggataaaactatcatggacattaaaagtgctgtgaagaaaaattatatttttatatttattttttttgagacagagtttcgctcttgttgcccaggctggagtgcagtggcacaatttcggctcgcggcaacctccgcctcccgggttcaagccattctcctgcctcaacttcccaggtagctgggattataggcgcatgagccaccacgaccgactaattttgtatttttagtagagacggggtttcaccatgttggtctggctggtctcaacctcccgaccttggcctcccaaagtgctgggattccaggcgtgagccaccatgcccggccaagaaattttattttattctgcggataatagaggccgtctgggtgcagtatgaaggatgatcaaaatcaaggagatatatctcaacaactcatattcagcatatgagaaaaataaaaattaaatatgttgttaaaatagcctcaaaaatactggttctctacaagattgattttatatagaactgtctgtttactgtgaaagattcagaatcaaaatgaagtcactgatgttatgaaaaccttggcagatagagccagggacggccatgaagggagagttctcatgcttctatacctgataacaaaaattatcacaaaagactrcaaaaaccacaactttgtgtaaaggccatcacaagtttatttaaaaaaatacttctgcaaggacatatgcccatctaatctcggactggtggtacccttgttattgatctttgtagcgaagtataattatttcaaaacaattatgtaaacctcctcattgttttctttaaaaacttttgtcctccttttcatccctaaaaacacgca

SEQ ID NO: 548246 - DNA, 1038 bp, Homo sapiens
agtactcatttatgattggagatattttggaatgtaccttgcaggaagcgaactttgtcctgaatcttgaaataaaaatattccatgggtggaaaggatgatgtatatagttaagtctaagggagagataacacaagcatctagttatacctataaagaatttgcatatggtggggataaaactatcatggacattaaaagtgctgtgaagaaaaattatatttttatatttattttttttgagacagagtttcgctcttgttgcccaggctggagtgcagtggcacaatttcggctcgcggcaacctccgcctcccgggttcaagccattctcctgcctcaacttcccaggtagctgggattataggcgcatgagccaccacgaccgactaattttgtatttttagtagagacggggtttcaccatgttggtctggctggtctcaacctcccgaccttggcctcccaaagtgctgggattccaggcgtgagccaccatgcccggccaagaaattttattttattctgcggataatagaggccgtctgggtgcagtatgaaggatgatcaaaatcaaggagatatatctcaacaactcatattcagcatatgagaaaaataaaaattaaatatgttgttaaaatagcctcaaaaatactggttctctacaagattgattttatatagaactgtctgtttactgtgaaagattcagaatcaaaatgaagtcactgatgttatgaaaaccttggcagatagagccagggacggccatgaagggagagttctcatgcttctatacctgataacaaaaattatcacaaaagactgcaaaaaccacaactttgtgtaaaggccatcacaagtttattwaaaaaaatacttctgcaaggacatatgcccatctaatctcggactggtggtacccttgttattgatctttgtagcgaagtataattatttcaaaacaattatgtaaacctcctcattgttttctttaaaaacttttgtcctccttttcatccctaaaaacacgca

SEQ ID NO: 548247 - DNA, 596 bp, Homo sapiens
aactggctcagtggccaatggccatgtgacctccaacttccttaacctctctgtgcctcagctcactcacccataaaatgggataatcacaatattgacttcacagagtgctatgagttcatctatttaagtacttcaaggtggatttgacataagacaagcaatagtatttttattgttattatatttgaaaaatatattagttaaaaacttaggttaaaaaccaaggtctatagttaaggtgattataagcctaaatacacccctgttgttctgaaaatcttaattataacaaggctgggtgaggtggctcatgcccataatcccagcactttgggaggccgaggtgggtggatcacctgaggtcaggagttcaagaccagcctggccaacatggcgaaaccccatctctactaaaaatacaaaaagtaaccaggtgtgtcagcaagcacctgtaatcccaggtacttgggaggctaagacaggagaatcacttgaacccgggaggtggaggttgcagtgagtggagattgcaygcacattgcactccagcagcctggtgacagagcgagactccatctccacacacacacaaa

SEQ ID NO: 548248 - DNA, 680 bp, Homo sapiens
aaacatacctctgatgcatacaaaagtatttagcataaaaaaaaatgcttcttatgctccttaacatttttgaaaattgttataatgagaaaatcactaacaaaatttgctggtagtattaaattgaaagcaagaaggaaagttacagagacaattacaaagtgaatcattggttaagtacttacacagtgccagggttactgagggaagaataacacacgcaaaaaaagatgcgatagagtagagaagacattgatgttccccggaagatgaacaacagacaaagaggggagaaaagaagaaaaagtaaagacaatgaaataaaattcaaagcaatgattttcagtgaagatgttacacaaacatcatgcttcaaaataattatgtaaacacagaccaaaaaatgaacaaatgttagtaaaaattctactacactgttataatcaagacaacagttttgttcccccatcccacaaaacactgaaaactrttttatgtattaatgctaattcaagtatcaagtgactgaaagatccactattttttaaaaggacaaggttttataaaaatcatttaaacatgaatccaaattcttattatgttcttaacaaaggacagaaagcaatcagatgtaaaatgtagaaatagatcattttagaatcacttaaaatcagaagaga

SEQ ID NO: 548249 - DNA, 644 bp, Homo sapiens
cctgtatggtctttcgtcccagccattttagtgaggtgtgagaaggaagcagaggtaagtagttgactacgatccagaaatatttacaccagagactccagggttttttttttaagtaattttctgcagatttcagtattttatagaaaataattttcatcatgatacaaaaaacaaatattttcaaatttggtagaagttggcccatatattgtttacagaaatagtttgctcttctttgaacttaatctctaatttcatttagcccaggaaaattacctactttatcataaagtatcagtttctatatctattaatgattcaatgaggacagcacacctagtttcaactatcgagcctgtcaaaataattagaatatgtttttggtacttaaaaatgctacagatcttatttcaaaaaaataaataaagtttacatgacaatttctttgaaccgtatcttgaatgtaaatgttaatttgatagttattcatgtaaaactaccaactaaaagtgtacgaaaggggtagtatattattctgtaactgaaaatagggatgggaccaaaagtatgctaggtccyttccaataaaatgtttttccttacatcttaaatgaattgagatatacaatacacctagaaca

SEQ ID NO: 548250 - DNA, 560 bp, Homo sapiens
tgaggatgagaggagtagaagagaaagccttacttatttatgatcatggttctgatttacaagttaaaygttaacacatgcaatgccacccatttttagaagaacaaaaccaagcctaaaaacagttgatgtagtttgtcttgccctttagcgcaaacttcatctgatgtcattgccgttaggttattgttcctttcacaagatgaattttatgccagacaggaaagcactatattgtccttcctatttcctcctctgatatatctttatttgcagagttaaaagtaaggaaataagaattggtcttttacctgcttgtctctgacattttctgagttgtatgaagagtgagaccatttttcttcatatatccccctcctcttgccttcagggttactagcttagttatgtttctacttggcaggtattcaatatctatttgatcaataaatttggttgaattaacttctcaagtttatttgtacaggatctttattccatctcaatgtggcagattaaacatattttctaatggaggatcatcaaccatacttcttaat

SEQ ID NO: 548251 - DNA, 1137 bp, Homo sapiens
aaatgtactagccaatatcagttcaaaattaaataaaaatctaaacacagaattgaacgtaagaaatgtccacaacacagaatgtgattttattacaagctccttaagaacatagtattttacagatagaagataattagtaaaagtcttcaatttaataaaaaaattaattcaaagacaagtagactatctgaaggatgacagaacatgaagacccaaaccaggtaccatttgcgtactaagtatctgtccaaggtactaaaggggacacaaagaaatgtgaaatatggcttctatactaaagaacatgcagtacattgatccatttatttgaaatttagattcttatttctgagagtaacttaccttctagccccatttagtttttatcctctctccatacactaaatatcttctagctatactagctaccaaataggcatcattttcctaatggaaaactatgaactcacccgagcctctgaatgttacagtttggatatctcaaagcatcacacagaattttcactccatcatcctgcaaatcgttgttcccaaggtccaggctcctcaggtttgggttattcaaaataacagaagccagatccagacaacatgcattagtgagaacacagcccatcaatctgtaagaattacaataggaaaagtgaatccttccattgtgaggttaaataagtttcttcctaggagatatacccaggtatttgaacctcttttctcactcttttctatctacaatccaggacatacatgggagggtctaatttatcagtaaaaatgatgggatttcttaatgagcagaataaaccagcaggtaaaactgttttcttccacaaacaggttatctacagagctttaaaaatcaagggtataaacatttatttttaccaatacttaaaaaaatgaatataaactttcccaaggaactaatagatctctgtgctttcagtttttaatatatctttaagtgaaaaaagtttcctggaatctayctcaaagtattatcttcaaagaagaaagctacatataaaaagatatttattccaggtcctttgcatggcattcaagagcactcacaatctggcctcaagctttctctttccatattttgtcccc

SEQ ID NO: 548252 - DNA, 529 bp, Homo sapiens
cttggagataaagcatcaaaattgggtacaccagtcaatcaatataatcagtctaggggctggctgtgccctgcagaaggatgccaaccaggagggccacagggagtgaaacccaggccatattttgttctttgtgccagtgccctgaagtggggctgtacctgctggaaggaaggggtacctttcctttattttcattaagttgctatatggactatctcagtcctgtggccaatgcaagaaatttggctcagctttctgaggggctggtactgtatcctctatttcttcrgatcactttgtgaggtcattattctccagtgggggcttgtgggagaggcagtggaggcagaaagcgcatgcccagaccatattctcccagctcagtcaggcttctctacctctgattgaacctgtactcacggtgaagcttcctgggccacctgtatccagcagctgacatggatgatttctctcatacttgtgaagattctctgatggtaaaatagactaccatatattaagacct

SEQ ID NO: 548253 - DNA, 529 bp, Homo sapiens
cttggagataaagcatcaaaattgggtacaccagtcaatcaatataatcagtctaggggctggctgtgccctgcagaaggatgccaaccaggagggccacagggagtgaaacccaggccatattttgttctttgtgccagtgccctgaagtggggctgtacctgctggaaggaaggggtacctttcctttattttcattaagttgctatatggactatctcagtcctgtggccaatgcaagaaatttggctcagctttctgaggggctggtactgtatcctctatttcttcggatcactttgtgaggtcattattctccagtgggggcttgtgggagaggcagtggaggcagaaagcgcatgcccagaccatattctcccagctcagtcaggcttctctacctctgattgaacctgtactcackgtgaagcttcctgggccacctgtatccagcagctgacatggatgatttctctcatacttgtgaagattctctgatggtaaaatagactaccatatattaagacct

SEQ ID NO: 548254 - DNA, 598 bp, Homo sapiens
ggaaaggagataataactaacatggcgttaaatgagtcttatttttattttctactagtaatagcaaacatttattcaactaattatataacttttcttctttcattaccacaaatttgagtatcatcttctttacattcagcaagaatccttctgagtaggcacttttcacatcatagaaatattttgcttatcatactttgctcgtgctrttaacacctttagaagtgactgtgtattttttagatatccagaaatttataagtttttatctgcctttggtctttggaatcttgtattatttttcttaattgaattatgtctaaattaaagagttttccttgaaagcatcctggtgtggtataggagagaatacttcttgtttgaactcaacttcaacagttttttctagttgtgttctagcgtctagcatgcatagcatttattttttatgtccttggaactgtcttggcttttagtcactagttctattcagtctgcatttttcttaagcaaatcacaagttccttgagcctaacatcattatctttcccttttcttttgaagcggtgtgggattggtgaatcctgacagcttc

SEQ ID NO: 548255 - DNA, 646 bp, Homo sapiens
ggcctttcttttttgtgcacaccaagagaaagatattcctggcctcttatttctttctacaaggacattaatcctattgaagtagggctgtacccttataccttcatttagccttaattactttcatagaggtcctatctcaaaataacagtctgactgagaattggggcttcaaggtaggaattttgtgggaacacaagcatcccatctataaaaacctggaaaaacaaatttattatagcatttttcaatacaaaatataagttttggacaaccattatttcaaatgtgctattggaaatattcagagggtcaaagatcagatcaccaggtataccaatacctataggatttttgcaccatctctgtgtctcatctggattaatgcaacgtcctccaaactggtccctgcaatacttaaaacttcacaagagtttcccatttaacttccaaagatattgtaactatttcatattcagcatagtcttgctcstccctgcccgtctctgcagctccacttcttgtctgcccatggtggacttcttctattgtgtttatgccttcagtcacaaattgatgccataactcaatttttgcatgttcttttctctttattgaaagtaccattttctttgtgtaacagatt

SEQ ID NO: 548256 - DNA, 403 bp, Homo sapiens
gagcagagattgcgccactgatcccagcctgggcaacagagcaagacttcatctagaaaaacacaaaaaaggattattcccctgcatagatagcctattctacaaaagagacaggagtgagaacgtggaagctgtgctattggcgggaggtggtgggccactgtgatttcaagataacaggtraacaagagtctagcattgatctgggccttgatatttaccatcagtgcaacatcacatccagaatggcaccaaggatggggcaaaccaccggtgcagccatgaacatgcccctcccactccagaaagcctaagacccctctgcaggctctgaaatcaatgttgtgcttccaatgactgagcacacagggatactgaggcaggcccaatccctagagatgca

SEQ ID NO: 548257 - DNA, 403 bp, Homo sapiens
gagcagagattgcgccactgatcccagcctgggcaacagagcaagacttcatctagaaaaacacaaaaaaggattattcccctgcatagatagcctattctacaaaagagacaggagtgagaacgtggaagctgtgctattggcgggaggtggtgggccactgtgatttcaagataacaggtgaacaagagtctagcattgatctgggccttgatatttaccatcagtgcaacatcacatccagaatggcaccaaggatggggcaaaccaccggtgcagccatgaacaygcccctcccactccagaaagcctaagacccctctgcaggctctgaaatcaatgttgtgcttccaatgactgagcacacagggatactgaggcaggcccaatccctagagatgca

SEQ ID NO: 548258 - DNA, 1254 bp, Homo sapiens
  misc_feature 965, 966, 967, 968, 969, 970, 971, 972, 973, 974, 975, 976,977, 978, 979, 980, 981, 982, 983, 984, 985, 986, 987, 988,989, 990, 991, 992, 993, 994, 995, 996, 997, 998, 999, 1000,1001, 1002, 1003, 1004, 1005, 1006, 1007, 1008, 1009: n = A,T,C or G
  misc_feature 1010, 1011, 1012, 1013, 1014, 1015, 1016, 1017, 1018, 1019,1020, 1021, 1022, 1023, 1024, 1025, 1026, 1027, 1028, 1029,1030, 1031, 1032, 1033, 1034, 1035, 1036, 1037, 1038, 1039,1040, 1041, 1042, 1043, 1044, 1045, 1046, 1047, 1048: n = A,T,C or G
  misc_feature 1049, 1050, 1051, 1052, 1053, 1054, 1055, 1056, 1057, 1058,1059, 1060, 1061, 1062, 1063, 1064: n = A,T,C or G
ctttttgagaaaatcaggatgtttgtcatgtagagtttcccacagtctatattttgctgacagcatccgtgtggtgttggcgattttaaagactcacttcttaggatgctgtccttctttccaccaccccttttgaacattcctttgggaataaaactttgccgtttaggccccctggcctgtggactcctggagaacagggggtctgtcttgttcagctttggtccttgcagtcacattcatcacctgggtccttgcagtcacattcatcaccaagttatgcttggtttgttgatgaatcaaatgactcaaagaattttgctctcttttctttatatttctggcatgtgcacccttgcactcagcttrtagcagtgtattttgtacagctgtttttttccccacatgcatgttcagtgtcgaaggacaggacaaacttcatgttagtttaaatacatagaccttttccccacagtcctgtagacaatgctcagtgcaaatcaaaatttttagtcactgttggtggctaacaggctgactgactttccattttcttcggttccagaatgtgtatgctggtgctttcattctccttactaatattttttttttatttttatttttttcctttttcttttttgagatggagtctcgctcggctgcccaggctggaatacagtggtgcgactagctgggactacaggtgcccgccaccatgcccggctgatttttgtatttttagtagggatggggtttcaccatgttggccaggctggtctttgacctcaagtgatccacctgcctcggcctcccaaagtgctgggattacaggtgtgagctaccgcgcctggcccttactaatattttaagaggtgcctagtttttaaccgaagagaaggaagtcttcccagactgtcccttgaatattaagaaaatatctattttatttccataataaagaattnnnnnnnnnnnnnnnnnnnnnnnnnnnnnnnnnnnnnnnnnnnnnnnnnnnnnnnnnnnnnnnnnnnnnnnnnnnnnnnnnnnnnnnnnnnnnnnnnnnnagagtagggctaagggttgagaaaaagtctaaatattttaggaagctgcaaatttcaagtttttatgagaatttgtaaaaacattccaacacactcatgatttcttcagattaatgttcatagccacactgagtatatccatgatgtttgtaggacagttgttgtagttccaggatgtactcaatagagg

SEQ ID NO: 548259 - DNA, 829 bp, Homo sapiens
accaaaagaaaaacaacaacaacaacaaaaaaaaacagaagaaacactcaaaactctcacatttttaaatggtatatattttggcaccaatgataattatttaattgaaaactatgaacacaactttaaataaaatgttagtttaagactgttaattcacaatgtctaaattattcaaaattgtactatgtccctaaaatgatgttaatgtacagcaattggttcattgatttttattttttaaattttatttatttatttatttttgagacagggccttgcactgtcccataggcttgagtgcagttgtatgatcatggcttattgcatccttgacctcctgggcttaagtgagtctcctgcctcagcctcccaagtagctgggactacaggcatgcaaccagctaatttttaaattttttgtggagatggggtctcactaagttgcccaggctggtctaaaactcctagattcaagcaatcctcctacctcggcctcccaaagtgccrggattacaagcacaagccactgtgcccagctaattggctcactttaaattgcacaatgcctggtggatttgctttcctaaaagtaagagaaacatggtctctttgacacctgtattgcgaagtcaattagtccgttgatgttcagtgctggctccatgagatcaaagatgagctgaatgtggtgagccaaagggagatgataggatgttcctgacgcaaagcttgtgatttgttctagcacattgttagaaatctgtgcaaataaaaacaaaaatattgtaagaccaatattctaaataatcttttactaagataaatc

SEQ ID NO: 548260 - DNA, 638 bp, Homo sapiens
ttcgctctttgtaataaatcttgctgctgctcactctttgggtccgcactacctttatgagctgcaacactcactgcgagggtctgcagcttcattcctgaagtcagtgagaccaccaacccacagggaggaacaaacagctcctgacgctccacctttatgagctgtaacgctcactacaaaggtctgcagcttcactcctgaagtcagccagaccaggaacccaccagaaggaagaaactctggacatatctgaacatctgaaagaacaaactccggacacaccrtctttaagagctgtaagagtcacctcgagggtccgcggcttcattcttgaagtcagagagaccaagaacctaccagaaggaataaattccggacacataatcattatctctctaatttgtttcttaccactcctagcctcatactttataatggtcttattaaatgttttataagtttccatgctgtttcttgcctgggtttttatgtagcgtactttttcttcttggagccctatttaccatcctctttaacctgatcatttctccatatttaggtctcacttcctctggaagtgagcctttcttcccacctctgggttgtgggcacagcatcacagcagtgtccgaaac

SEQ ID NO: 548261 - DNA, 638 bp, Homo sapiens
ttcgctctttgtaataaatcttgctgctgctcactctttgggtccgcactacctttatgagctgcaacactcactgcgagggtctgcagcttcattcctgaagtcagtgagaccaccaacccacagggaggaacaaacagctcctgacgctccacctttatgagctgtaacgctcactacaaaggtctgcagcttcactcctgaagtcagccagaccaggaacccaccagaaggaagaaactctggacatatctgaacatctgaaagaacaaactccggacacaccatctttaagagctgtaagagtcacctcgagggtccgcggcttcattcttgaagtcagagagaccaagaacctaccagaaggaataaattccggacacataatcattatctctctaatttgtttcttaccactcctagcctcatactttataatggtctyattaaatgttttataagtttccatgctgtttcttgcctgggtttttatgtagcgtactttttcttcttggagccctatttaccatcctctttaacctgatcatttctccatatttaggtctcacttcctctggaagtgagcctttcttcccacctctgggttgtgggcacagcatcacagcagtgtccgaaac

SEQ ID NO: 548262 - DNA, 638 bp, Homo sapiens
ttcgctctttgtaataaatcttgctgctgctcactctttgggtccgcactacctttatgagctgcaacactcactgcgagggtctgcagcttcattcctgaagtcagtgagaccaccaacccacagggaggaacaaacagctcctgacgctccacctttatgagctgtaacgctcactacaaaggtctgcagcttcactcctgaagtcagccagaccaggaacccaccagaaggaagaaactctggacatatctgaacatctgaaagaacaaactccggacacaccatctttaagagctgtaagagtcacctcgagggtccgcggcttcattcttgaagtcagagagaccaagaacctaccagaaggaataaattccggacacataatcattatctctctaatttgtttcttaccactcctagcctcatactttataatggtcttattaaatgttttataagtttccatgctgtttcttgcctgggtttttatgtagcgtactttttcttcttggagccctatttaccatcctctttaacctgatcatttctccatatttaggtctcmcttcctctggaagtgagcctttcttcccacctctgggttgtgggcacagcatcacagcagtgtccgaaac

SEQ ID NO: 548263 - DNA, 457 bp, Homo sapiens
taaaaacagaggtggcttttttttttttttttttttaatgtgtgacagttgcttgttgtattggcttccatgatgatgggacctcttttatcccctgtaagttaccttcatatggtccatgactacttaaattttttgaaaatgttttcattttgggcttgacttccttcttaggccttggattaagatagggtttgcagctgggcagtggctctcttgcctgtaatcccagcacttttggaggccgaggcaggaggatcacttgagcctaggagttcaagatcagcctggaaaacatagtaagaccccgtccctacaaaaagaaaaaattagccaggtgtggtggcatgcgcctatagtcccagctatgaggaggctgaggcagaaggatcacttgagcccaggaggtcgaggctgcagtgagctatgatcatmccactgcactctagcctggaca

SEQ ID NO: 548264 - DNA, 530 bp, Homo sapiens
cacattgacccagattcaaccattcaaccattttaacacactggcatagttgcttctaatttcccccacctctctattgctatctctstgtgtgtgtgtgtgtgtgtgtgtgtgtgtgtgtgtgtgtgtgtgtgtgtgtgagagagagagagactttcattcttgcctcgttatttaaagtttaacatgagtctctaccatttcaggaatatctcaatacatttctaacttacctacctcagtgttacactttattcctaacagaaaattatgctacaatgtatgctccatgatgaaaataatataatgtgataaagagaaaattagattgtcaaaatatatggtaaaagaataagttgaaaactactggcttggtgcagcagtgcatgcctgtaatccgagcacttggaagtcaaggcaggttaatcgcttgagctcaggagtttgagaccagcctgggcaacatggtgaaaccctgtctcgagacaaaaaacacaaaaaaaatagacaggcatggtggcttgcacctg

SEQ ID NO: 548265 - DNA, 558 bp, Homo sapiens
ggagaatggcgagaacccgggaggcggagctttcagtgagccgagatccagccactgcactccagcctgggcgacagagcaagactccgtctcagaaaaaaaaaaaaaaaaaattctcttaagcccatccagtttaaaccttcccttccctaataggttaaaatgcaccctaacagtgagctcttcaggataggtactgcgttctccaccaggactgaaggtgctgaataccactccttgtccgcaagattgtactgcctccagccgagctccactgaaagggacaagataattcttagtgccaatttggccaagggaggaactactggagccagtagggtccccttgttcatatcagataataagaacaagtaagcagacccatggtcgcctgaggcaatgccacaaggaacccagcgaaraaaagatgatgaaccaaacaagggaagtgggcaagctgtaacttgggatcccctgacaaaactatttcagggcaaaaatgacattctgggtctagaaagcggggcccggctgtccgtgaccagccaataaaagatg

SEQ ID NO: 548266 - DNA, 558 bp, Homo sapiens
ggagaatggcgagaacccgggaggcggagctttcagtgagccgagatccagccactgcactccagcctgggcgacagagcaagactccgtctcagaaaaaaaaaaaaaaaaaattctcttaagcccatccagtttaaaccttcccttccctaataggttaaaatgcaccctaacagtgagctcttcaggataggtactgcgttctccaccaggactgaaggtgctgaataccactccttgtccgcaagattgtactgcctccagccgagctccactgaaagggacaagataattcttagtgccaatttggccaagggaggaactactggagccagtagggtccccttgttcatatcagataataagaacaagtaagcagacccatggtcgcctgaggcaatgccacaaggaacccagcgaagaaaagatgwtgaaccaaacaagggaagtgggcaagctgtaacttgggatcccctgacaaaactatttcagggcaaaaatgacattctgggtctagaaagcggggcccggctgtccgtgaccagccaataaaagatg

SEQ ID NO: 548267 - DNA, 558 bp, Homo sapiens
ggagaatggcgagaacccgggaggcggagctttcagtgagccgagatccagccactgcactccagcctgggcgacagagcaagactccgtctcagaaaaaaaaaaaaaaaaaattctcttaagcccatccagtttaaaccttcccttccctaataggttaaaatgcaccctaacagtgagctcttcaggataggtactgcgttctccaccaggactgaaggtgctgaataccactccttgtccgcaagattgtactgcctccagccgagctccactgaaagggacaagataattcttagtgccaatttggccaagggaggaactactggagccagtagggtccccttgttcatatcagataataagaacaagtaagcagacccatggtcgcctgaggcaatgccacaaggaacccagcgaagaaaagatgatgaaccaaacaagggaagtgggcaagctgtaacttgggatcccctgacaaaactatttcagggcaaaaatgacattctgggtctagaaagcggggcccggctgtccgtgaccagccaatraaagatg

SEQ ID NO: 548268 - DNA, 433 bp, Homo sapiens
gaggctcagtgttctccactctagaatgcagataatgcttattttatagtttctgtaagaattaaaagctttaccaccttaaggaaactgctaggccatgggggaatagctgaacccatgcccagctctgggagatccggccacagctggggatgcacaatcagaggctccaggctggagggctggagggagaagcctgggaggaatagtccatctgggagggcttcctgaaggaagtccttgggggtagagccaggctagagggacacaaagagagaggaaggaggggccctgggcctgtgcactgcataagtgaagagggagtttgtgcaggagctggcagtcaagtaggatagggtcaggccatgggggyctgggggtggaggtttagtgtggtgacatgtgggagccatcgaagccatagaactgtggg

SEQ ID NO: 548269 - DNA, 555 bp, Homo sapiens
cagaggagggcagagtgtaagaaaagcattcaaatacaaataacataagatgtaaaagagtctcaaaagagaagaaaaaatttccaaagtaagaagaaagattttcagaagatgatatatctggttggaagcatcattaaatgcctaaggtagaaggagacatttgagaaagatttcaacagatctgacagaaaatgtcaaatggcacatcaaaacacacattttattcatctttacggaaaggtatccctgtaagaatacaaagatttcttttgattattggcttctgcataaaaattaggtcaaagagaatgtgaaatgagaaaactacaagaaatttcaaagcaaatacaaggaaaatgagtcactggaaaaatgagaatcacacttatgaatacrtaagagaatcctcaaaaggctcagcaatgggaggtactgaaagtcaagtaaaaccgaaactcaaaattaagagtcataggtatatgctaagaccactgccagaatctgcacaactgggtaacctacaatttatcaccacagcagaagactggaggt

SEQ ID NO: 548270 - DNA, 877 bp, Homo sapiens
gagtgactctattttggttggatctgttgaagcctagagcaggagctcagtctaaatcaatggcctcctataaatcttaatagtttaatacatagaaaattctcagcatctttctcatagaatttttaagcagaagccagaatcttttatagtcgtgtgtatcagttatttattgctgtgtagcaaacctcttcaaaacagtggctcaaaacaacagttattgagttcggaaataggcaacttgggcatggctaggcatggaaggtttgggttccatgcagtgtcagctgggaccgttcagggggctggagaatcctctttcaagatggctgctcaaaaggctgttgaccagagctcagttggggtccagggccggggtcctggttcctctccaaatggccctcttcatgtagaacacgccatgggctgcctggaccttgtcataccatggtagctgggttataagagtgattgttccaggagaaccaggtggagaactataatacagtcttttatgacatmgtcttggaaggcacatggcatcgctactgctgtgctgtactccttggcccagattgcagaggacggggcaataggagatggattaagaggagaatcaaagattttggtatgttttaaaactgccatactccattagaagcctctcattaacatttaccctagccaaactgtggcttctaaatgaaagactgatcacttgttgctaaggtgacactgcactgttatccataattacgtggacatgcatggctgcacgtccagataggaatcaattttgtcccagttaggcgagtcctgagcagtgttcattatcttcggaccatggtgcatgtggaggaggttggcgagggcagtt

SEQ ID NO: 548271 - DNA, 564 bp, Homo sapiens
tataaagagaaggattttcagggctgggctctcttaggctctgcccgcattggcattgtgcctagcactgtgttaagcccaaactaggtgctcgccaagtaggctgatgctccaagggcagggytgtgggcacacacactggctgactccggccaggtgagcactgggccacaacctgccaagtgtcctctcatataaggctggctctcttctctacctccccttcccccagatgcaaaccagaaacaggatctgctaataaattattaggcatgatcgcctctagcatggggaaagcaactaagaatggtaattagaagtttaatgtttacgtacacacacaaatgtgtgtatatatatatcaaatatacacatatgtgtatatatatctcaaatatacatatatgtatatatatatatatataaaggagactgtatccctctgctccttgtatgccttttaagtattcacagagaaataataaaaaaggctggaagcaaacatgccaaaatgttaactgctgtaaattctgggtggttggcataaagtgctgttatattatt

SEQ ID NO: 548272 - DNA, 441 bp, Homo sapiens
atccaaaagctggctctcaagagaaaataatcaaccaaaacaaaccactaggtatctgattagaaaaaaaaaaataagaaagttacaagtgctaacagaagaaaatttaaacattgtaaaagataaggaaaagaaagggatagagagaaaaacgtgtagattaaaagagactttaaaaacagtctccaccacaactcatatgtacaggyattagtaaaaagttacagacaagtcccagactgtccaagtgagacctcatgtaggtctgccctagtctcaactctgcaggacactgatgtctacagcaggaccccgttccatcctcagctcacccttcgaagttgttgtgcctctgttagctccctggctgtgcttttgcttcttctatgaggctgcctgctccaggaacacatcctattgccttctggctcaaccaggatg

SEQ ID NO: 548273 - DNA, 520 bp, Homo sapiens
gaaaaactgctaataaagaggatttacccattcttcaatgggattagaatttaaaggctgagaactgaaaataaatacataaaaatgtcctaaatcttaccaagctttttttggctgcctgaaatgaaataggttctgatgacaatttacacaatattccaccattattgrtaacaaaataaatcttggttgatttttttaatacaattcatattaaaacacactgttacttgaaacatcttgaatttcaacaaaacatgacaaattcgtgttggacttaaacaagatttaatcataatattaagcttttaaactaaggtgttagaatttcatttagaatacttaaaaataatctttagtaaactaatctgatctatctgtagctgaaatataacacatctatttaatcaaaagcatttttgtgtgtgttatacacacaaatgttatacagatgtgttacagtgtataaagttatatttgatactactttttaaaattaccctaagaaaaaaaatctcta

SEQ ID NO: 548274 - DNA, 696 bp, Homo sapiens
tccttcttaatttctggtaccttaaaaaggtctcgttccttttggttgaatgccttgagaaacgtaaggctataaaggaattttaacaaacttgattctctaatcaactgctcataaatccattttattgcttcaattatgcaaaataaatgtttaaaatttgtctgtcgggtcagccagttacccggtcaactaacctcctagccaacctgctaacctcaatgaatatgttgctctgaaactctttttttttcccccaaatcttcccaaagctattaaaaaataccaaggaaggatggttaaggcatgttttattagccgtagtagttaaacttgttaatttatcagtaaggggaaaaacactctttgtaattttaacttgtcttcatgctaaattccttccagactgtggttagaacttaactgcagaatttttgcccaacaatataaacattttctataaaactatggaaagttgcccattctggaaaaaatctaaagtacaaaggataaagcgtttctcaagatagaatttcatttctggtgtttttgcatgtaattttaaattttattttatattttattttgagacagagtcttcctctgtcacccaggctagagtacagtagcaggatcaaagctcacggcagcttcgaaatcccrggctccagaaatcttcccattttagcgtcccaa

SEQ ID NO: 548275 - DNA, 1180 bp, Homo sapiens
ggagaaactgtggtaccaaaaggcaggaggaactgatggttaagagtgtagtctctggagcacactgcctagaaccttgtttatctctacctcaccttagtaatagcaccttgggcattttccttaacctctctgagctgtattttcctcctctgtaaaatgatgataaaaaagaatatttatgtgccttgaatgagttaatgtatactgcttttaagcattcaatgaagattagtaactactgttaaccaatctgaagccagtcactgatgagggtactgaagaaaaaaaaatcaagtgtgtgaatattgacagtaaaatgtagtaaggtagcagaaaacaacagccccattcatccaaaaacctttcaatttatcactggattgcagagagtgtctgggcacataaaaaaaaaatgattctggtcctcccatttgctctccccttccccatcatttattactatatgaccttggagtcctatagcatatatgttttgatatatttttcccatttaaaattaggaggtatatagtttcatgtcattgaccttttctttcttgtggattcaagatcaacagatgcacagaaattagttataagccttgatatattactccctcttcattggtccattcaaggccgtctttactccattctttattaataataaacactattagacttaataccctatgtaaaaacttaaatccctttctgtgatcctctttcatcgtcttttcctcttttcctgacccagaataactgctattctgaattgtgtgttcatcatgcccttgctttgaattttaaattatttcrtcacatccatatgtactgtattcaaaaaagtatatttgagtatttggttgtctttctaacattatttttgaaagatctcatactgtatgcaatgttttaggtactcccatcttattaaaattatgtttttatggtaggtagccaggcagacatgagtggggcaggagagggccccctcacctcctaccaggaatgtcaggaagccatcaggtggttgttaaattgcctccctaaaatagtaattggtcacagccagcgcaagggaaaaacagtctcccaatagataaaaacatcttaagttagtgttcagcagcttcccagtaagatcttaggggttaggtgactgcgtattcaagca

SEQ ID NO: 548276 - DNA, 1180 bp, Homo sapiens
ggagaaactgtggtaccaaaaggcaggaggaactgatggttaagagtgtagtctctggagcacactgcctagaaccttgtttatctctacctcaccttagtaatagcaccttgggcattttccttaacctctctgagctgtattttcctcctctgtaaaatgatgataaaaaagaatatttatgtgccttgaatgagttaatgtatactgcttttaagcattcaatgaagattagtaactactgttaaccaatctgaagccagtcactgatgagggtactgaagaaaaaaaaatcaagtgtgtgaatattgacagtaaaatgtagtaaggtagcagaaaacaacagccccattcatccaaaaacctttcaatttatcactggattgcagagagtgtctgggcacataaaaaaaaaatgattctggtcctcccatttgctctccccttccccatcatttattactatatgaccttggagtcctatagcatatatgttttgatatatttttcccatttaaaattaggaggtatatagtttcatgtcattgaccttttctttcttgtggattcaagatcaacagatgcacagaaattagttataagccttgatatattactccctcttcattggtccattcaaggccgtctttactccattctttattaataataaacactattagacttaataccctatgtaaaaacttaaatccctttctgtgatcctctttcatcgtcttttcctcttttcctgacccagaataactgctattctgaattgtgtgttcatcatgcccttgctttgaattttaaattatttcatcacatccatatgtactgtattcaaaaaagtatatttgagtatttggttgtctttctaacattatttttgaaagatctcatactgtatgcaatgttttaggtactcccatcttattaaaattatgtttttatggtaggtagccaggcagacatgagtrgggcaggagagggccccctcacctcctaccaggaatgtcaggaagccatcaggtggttgttaaattgcctccctaaaatagtaattggtcacagccagcgcaagggaaaaacagtctcccaatagataaaaacatcttaagttagtgttcagcagcttcccagtaagatcttaggggttaggtgactgcgtattcaagca

SEQ ID NO: 548277 - DNA, 524 bp, Homo sapiens
ataaaattagaaaatactgttagcaaatgtggctctgccatttgaatataatcaccgagaattccatgtcttaaaagtctcctggaatccacaatgaaaaaaaaaatcttttctaaggtatttttctggctaatttttatttgaagaaagctatagcatttagcgaaatttgactgaagtaatgttctgagtttgcattagtgggattggtgatgttctcagaagaaaattggaaacacttgtgatgaattgtctttcagatcacttagattttctgatgtaagaggacagctrtttggttctgatacaggcctgcttacttgggatgtagggttagtaaatggggtttctgctttaaaggactgacttgctatcacacaaaagaggcagacttgtaaacacaatgggctttggagtttggtctgattgggtttggtttagtattcctatgagcgtaaatggtaaaattcttctgatacccactctttagactgtgccttctgctctgttctttgttttatgtt

SEQ ID NO: 548278 - DNA, 524 bp, Homo sapiens
ataaaattagaaaatactgttagcaaatgtggctctgccatttgaatataatcaccgagaattccatgtcttaaaagtctcctggaatccacaatgaaaaaaaaaatcttttctaaggtatttttctggctaatttttatttgaagaaagctatagcatttagcgaaatttgactgaagtaatgttctgagtttgcattagtgggattggtgatgttctcagaagaaaattggaaacacttgtgatgaattgtctttcagatcacttagattttctgatgtaagaggacagctgtttggttctgatacaggcctgcttacttgggatgtagggttagtaaatggggtttctgctttaaaggactgacttgctatcrcacaaaagaggcagacttgtaaacacaatgggctttggagtttggtctgattgggtttggtttagtattcctatgagcgtaaatggtaaaattcttctgatacccactctttagactgtgccttctgctctgttctttgttttatgtt

SEQ ID NO: 548279 - DNA, 2317 bp, Homo sapiens
tgagcatgacaccttgagcagctgcacagatattacacacataaagctggcttgtctgcttcatagagctgttgaaatagtttcatgagttaatacatgtgaattatctggaagaggtccttcttagtcaacatttaacaaatgttgaccaattattaagtaggcagaggtaacctcttatcccactatatcaaggatatcttagtaaagttaatgaatttatggtatctggaggatctaagatgagatgagtgaccccagattgcatacacaataaaaaataacaagccttgtggaaaaggtacataagctactgaatcaagaatccagccaacgactggccacacwtgtttagcggcactaaaagaaaagcagaacctcttttaaaagatattttagattgaagagtcaagcatggtggttgacctgacatgtttgagacagaaaagcctacgttcttaaactgtataatctttgagatagcctgttatgatcttgaaaattggttttattgcctgtaaaagccaataataattacatatacctaacatttgttttgagaattaattcagggcattcatgttaaccatttattcagttactctttttttttttttgagacagagtctctctgtgtagcccaggctggagtgcagtggcgcaatctcggctaactgcaagctccgcctcccgggttcatgccattctcctgcctcagcctccgcagaagctgggattacaggctcccgccaccacgcccggctaactttttgtatttctagtagagacagggtttcaccatgttagccaggacggtctcgatctcctgaccccgtgatccacccgcctcagtctcccaaagtgttgggattacaggtgtgagccactgcgcccggcacagttactcttaatattgttatgattatcattattatttaaagtctgataacaatttaattagcacattgtaaaaaacattaggaaggaggagagcaaataaaagttaatttaaaaaaatacaaggatacacatgtctaattaagttaatctctggttgttgaaaaaatttactagctatacagagttaagcaataaatgcaacctgtattgttctcaaaattctaagcctagtacattctctttctgaacagggctccatgtgcccacactgtggtggtttaatccctacagtgcagccaattcagtgccattgtaatgcaaaactttatcctgctttaaataattcacaaatgaagtgataaaagaaaaaagtaattcatgcatcagagattatatcaagttctaggaaaaggacataaacaataaaacatgaaaactttgatttcccatatctcttttggaatacatatcacctaatctaaagttattgacaatattttatctgttcctccaaaagagagagaaaatagcactaaattgttcaaatgatttttttctttaatcttacaattcttagatttttgtgtgcaatgccatgttcttattttcttttaattcaccagtgatatgtttcctcacttcacacctgaatctgccttttggtattctattcagggatcttccatttgatctgatttctttcaacctttcactcaatcaagtaatgttctcattttgaaatgctaatgttcaactttatacagcagttagttgagaacctgtgacaattgcacttagcctatggtaaatattttaattttttaaaggtcccttgccttagcatttaataaactatctcagctaatacagaataacacaatactttaaaattattgtattttttattttatattgttcatgggttatttagaactcctttctccctaaatatcacagttttatataatcacattaatatctccaaataagtacaaattcaataaagcgattgataaacatttttagtagctaatagtttaacaaataatttttaaatttataaacctatggaatgttgttctctctctttttttttctcaagaagtcagaaagtttagaggacttaattgttttactaggccatgagagaattcaaaacattttaataaaattgcagtactcaacagtctattagaagttacatcgtttacttattcaagtcttgtttatagataatctatgtataaatgatgcagaatatgggtatttagtggtgaacaagtcagaaatgtttgtctttgtagtgcttctttagaattgacttatttgctcatttcataatcatccttaagttatttgaattaatgcattataaagtctctcatttaacattatcattaacatatatgtcacctga

SEQ ID NO: 548280 - DNA, 2317 bp, Homo sapiens
tgagcatgacaccttgagcagctgcacagatattacacacataaagctggcttgtctgcttcatagagctgttgaaatagtttcatgagttaatacatgtgaattatctggaagaggtccttcttagtcaacatttaacaaatgttgaccaattattaagtaggcagaggtaacctcttatcccactatatcaaggatatcttagtaaagttaatgaatttatggtatctggaggatctaagatgagatgagtgaccccagattgcatacacaataaaaaataacaagccttgtggaaaaggtacataagctactgaatcaagaatccagccaacgactggccacacttgtttagcggcactaaaagaaaagcagaacctcttttaaaagatattttagattgaagagtcaagcatggtggttgacctgacatgtttgagacagaaaagcctacgttcttaaactgtataatctttgagatagcctgttatgatcttgaaaattggttttattgcctgtaaaagccaataataattacatatacctaacatttgttttgagaattaattcagggcattcatgttaaccatttattcagttactctttttttttttttgagacagagtctctctgtgtagcccaggctggagtgcagtggcgcaatctcggctaactgcaagctccgcctcccgggttcatgccattctcctgcctcagcctccgcagaagctgggattacaggctcccgccaccacgcccggctaactttttgtatttctagtagagacagggtttcaccatgttagccaggacggtctcgatctcctgaccccgtgatccacccgcctcagtctcccaaagtgttgggattacaggtgtgagccactgcgcccggcacagttactcttaatattgttatgattatcattattatttaaagtctgataacaatttaattagcacattgtaaaaaacattaggaaggaggagagcaaataaaagttaatttaaaaaaatacaaggatacacatgtctaattaagttaatctctggttgttgaaaaaatttactagctatacagagttaagcaataaatgcaacctgtattgttctcaaaattctaagcctagtacattctctttctgaacagggctccatgtgcccacactgtggtggtttaatccctacagtgcagccaattcagtgccattgtaatgcaaaactttatcctgctttaaataattcacaaatgaagtgataaaagaaaaaagtaattcatgcatcagagattatatcaagttctaggaaaaggacataaacaataaaacatgaaaactttgatttcccatatctcttttggaatacatatcacctaatctaaagttattgacaatattttatctgttcctccaaaagagagagaaaatagcactaaattgttcaaatgatttttttctttaatcttacaattcttagatttttgtgtgcaatgccatgttcttattttcttttaattcaccagtgatatgtttcctcacttcacacctgaatctgccttttggtattctattcagggatcttccatttgatctgatttctttcaacctttcactcaatcaagtaatgttctcattttgaaatgctaatgttcaactttatacagcagttagttgagaacctgtgacaattgcacttagcctatggtaaatattttaattttttaaaggtcccttgccttagcatttaataaactatctcagctaatacagaataacacaatactttaaaattattgtattttttattttatattgttcatgggttatttagaactcctttctccctaaatatcacagttttatataatcacattaatatctccaaataagtacaaattcaataaagcgattgataaacatttttagtagctaatagtttaacaaataatttttaaatttataaacctatggaatgttgttctctctctttttttttctcaagaagtcagaaagtttagaggacttaattgttttactaggccatgagagaattcaaaacattttaataaaattgcagtactcaacagtctattagaagttacatcgtttacttattcaagtcttgtttatagataatctatgtataaatgatgcagaatatgggtatttagtggtgaacaagtcagaaatgtttgtctttgtagtgcttctttagaattgacttatttgctcatttcataatcatccttargttatttgaattaatgcattataaagtctctcatttaacattatcattaacatatatgtcacctga

SEQ ID NO: 548281 - DNA, 2317 bp, Homo sapiens
tgagcatgacaccttgagcagctgcacagatattacacacataaagctggcttgtctgcttcatagagctgttgaaatagtttcatgagttaatacatgtgaattatctggaagaggtccttcttagtcaacatttaacaaatgttgaccaattattaagtaggcagaggtaacctcttatcccactatatcaaggatatcttagtaaagttaatgaatttatggtatctggaggatctaagatgagatgagtgaccccagattgcatacacaataaaaaataacaagccttgtggaaaaggtacataagctactgaatcaagaatccagccaacgactggccacacttgtttagcggcactaaaagaaaagcagaacctcttttaaaagatattttagattgaagagtcaagcatggtggttgacctgacatgtttgagacagaaaagcctacgttcttaaactgtataatctttgagatagcctgttatgatcttgaaaattggttttattgcctgtaaaagccaataataattacatatacctaacatttgttttgagaattaattcagggcattcatgttaaccatttattcagttactctttttttttttttgagacagagtctctctgtgtagcccaggctggagtgcagtggcgcaatctcggctaactgcaagctccgcctcccgggttcatgccattctcctgcctcagcctccgcagaagctgggattacaggctcccgccaccacgcccggctaactttttgtatttctagtagagacagggtttcaccatgttagccaggacggtctcgatctcctgaccccgtgatccacccgcctcagtctcccaaagtgttgggattacaggtgtgagccactgcgcccggcacagttactcttaatattgttatgattatcattattatttaaagtctgataacaatttaattagcacattgtaaaaaacattaggaaggaggagagcaaataaaagttaatttaaaaaaatacaaggatacacatgtctaattaagttaatctctggttgttgaaaaaatttactagctatacagagttaagcaataaatgcaacctgtattgttctcaaaattctaagcctagtacattctctttctgaacagggctccatgtgcccacactgtggtggtttaatccctacagtgcagccaattcagtgccattgtaatgcaaaactttatcctgctttaaataattcacaaatgaagtgataaaagaaaaaagtaattcatgcatcagagattatatcaagttctaggaaaaggacataaacaataaaacatgaaaactttgatttcccatatctcttttggaatacatatcacctaatctaaagttattgacaatattttatctgttcctccaaaagagagagaaaatagcactaaattgttcaaatgatttttttctttaatcttacaattcttagatttttgtgtgcaatgccatgttcttattttcttttaattcaccagtgatatgtttcctcacttcacacctgaatctgccttttggtattctattcagggatcttccatttgatctgatttctttcaacctttcactcaatcaagtaatgttctcattttgaaatgctaatgttcaactttatacagcagttagttgagaacctgtgacaattgcacttagcctatggtaaatattttaattttttaaaggtcccttgccttagcatttaataaactatctcagctaatacagaataacacaatactttaaaattattgtattttttattttatattgttcatgggttatttagaactcctttctccctaaatatcacagttttatataatcacattaatatctccaaataagtacaaattcaataaagcgattgataaacatttttagtagctaatagtttaacaaataatttttaaatttataaacctatggaatgttgttctctctctttttttttctcaagaagtcagaaagtttagaggacttaattgttttactaggccatgagagaattcaaaacattttaataaaattgcagtactcaacagtctattagaagttacatcgtttacttattcaagtcttgtttatagataatctatgtataaatgatgcagaatatgggtatttagtggtgaacaagtcagaaatgtttgtctttgtagtgcttctttagaattgacttatttgctcatttcataatcatccttaagttatttgaattaatgcrttataaagtctctcatttaacattatcattaacatatatgtcacctga

SEQ ID NO: 548282 - DNA, 1226 bp, Homo sapiens
tgatatgatgaaatgaaaatagtactttacctgcgtgatctaataagccctgtctaaatatgaaataaaatccaaacatcaaatacattccacaggggcatcctacaatatatttgacttctcaaaactgtcaaggtcatccaaaagaagaaacacttgagaaaatgtcacaggcaaagtaacttaaggatatatgaaagttaaatgtaatatgttttcctggatagtatcctggaaaagaaaagggtgttagataaaatcttagaaaatctgaataaacaatgaatgatagttaatagtacggtatcaatattggtttattaattgtaacaaatgtaccrtgttaatatgtggtgttaataaaataggaactgtaaatctaaaactgttttttaaattaaaatctgttaacaatgtatttttttttttttttttttttttttgagacagagtctcgctctgtttcccaggctggagtgcagtggcgcagtcggctcactgcaagctccgcctcccgggttcacaccattctcctgcctcagcctccccagcagctaggactacaggtgcacgccgccacaccctgttaatttttgtatttttagtagagatggggtttcactgtgttagccaggatggtctcgatctcctgtccttgtgatctgcccgcctcagcctcccaaagtgctagaattacaggtgtgagccaccgtgcccggcctgttaacaatatttttaaacctcaatagatagatcagcagatttaatgtagctgaaagagaatatataaactggaagacagagctgatgaaaatatgcagaataaagcatagattgacaaaggggtggaaaatacagaggagaaggtgagaaacacagaggatggagagaaatatctgaacttaaatgaaattaggtttctaggagaaaagcagaaaaagaaaaggaatataagcaatgaatgatgagaaataattaagatttttcaggactgatattaagacacagatttgttctctattaacccaaatcaatttaaatataaagaaggctatacaacaaaaattaccatgaaattgctgaagaacaaaaacaaagtgaaaatattagcagtcagaaaggagtacaatgcatataccatttggaaaggagtgacaaactgagcagaattctcagaggaaataacagaaaccagaagacaatgtattgatattttctatgtgtta

SEQ ID NO: 548283 - DNA, 1226 bp, Homo sapiens
tgatatgatgaaatgaaaatagtactttacctgcgtgatctaataagccctgtctaaatatgaaataaaatccaaacatcaaatacattccacaggggcatcctacaatatatttgacttctcaaaactgtcaaggtcatccaaaagaagaaacacttgagaaaatgtcacaggcaaagtaacttaaggatatatgaaagttaaatgtaatatgttttcctggatagtatcctggaaaagaaaagggtgttagataaaatcttagaaaatctgaataaacaatgaatgatagttaatagtacggtatcaatattggtttattaattgtaacaaatgtaccatgttaatatgtggtgttaataaaataggaactgtaaatctaaaactgttttttaaattaaaatctgttaacaatgtatttttttttttttttttttttttttgagacagagtctcgctctgtttcccaggctggagtgcagtggcgcagtcggctcactgcaagctccgcctcccgggttcacaccattctcctgcctcagcctccccagcagctaggactacaggtgcacgccgccacaccctgttaatttttgtattkttagtagagatggggtttcactgtgttagccaggatggtctcgatctcctgtccttgtgatctgcccgcctcagcctcccaaagtgctagaattacaggtgtgagccaccgtgcccggcctgttaacaatatttttaaacctcaatagatagatcagcagatttaatgtagctgaaagagaatatataaactggaagacagagctgatgaaaatatgcagaataaagcatagattgacaaaggggtggaaaatacagaggagaaggtgagaaacacagaggatggagagaaatatctgaacttaaatgaaattaggtttctaggagaaaagcagaaaaagaaaaggaatataagcaatgaatgatgagaaataattaagatttttcaggactgatattaagacacagatttgttctctattaacccaaatcaatttaaatataaagaaggctatacaacaaaaattaccatgaaattgctgaagaacaaaaacaaagtgaaaatattagcagtcagaaaggagtacaatgcatataccatttggaaaggagtgacaaactgagcagaattctcagaggaaataacagaaaccagaagacaatgtattgatattttctatgtgtta

SEQ ID NO: 548284 - DNA, 1430 bp, Homo sapiens
cctgtcaattttatcattttggttaagattagtgctttctgtgtctttaaaagaagtttttgcgtaccccactgctttcttctaaaaccttagaattttacattttatgctcaactctatgatttctctcaaattaaatgtgtacagtatgaggtagtagttaatagtttttttccaatatggatatacagtttttccaacataatattttgaagagattttccaatagctttgatgtctttcttgacaatattttgatcataaatgtatcagcctctttctggatgctctatgctgtttcattgatctttcaagaaaatgtttttaattaggcaagcttatgtgaaaagttgatattaccttctgttactccagaagttcacatataagttacccacctcttaagcctggttaagaaaaatttaaaaagtattaagtacagtcaaacccagtttgcttgttttcctttctaaaaggattaggtagaaattatgtaagcatacatttcttttcaccataaatcaattttctgtctcctcctaacagatttcctaaaccctgtgtattttctgcctttaaaacttctgttgctgtctatcattacacacctcctttgctgtgtttttttaaaatctttgtgtcaattttattactcaatcgcaaacacatgcagacatgaaggtatttatttactttgttgtttgtccacattttcccccacaacatgcacaacattttatacatcatggatgacatttttgcattccttatactttttttcaatcatagtgctagatttctaaataagagagatcatttcgttttatcaagtttcccaaaatgcatactagaatttaatccttatggaatagaaacaatttcaataagtcttcagggaatatgagggcaaactgcataatccatgaagttagtttgcattttattcaaattctaactccatcagtttactctgtaaataatgtttcaatgctttctttttttttacatgtcatatgattctattaaatatttkcataacgttcttaaaatgacaattataaaaataaagtacaggttagttgttgcaggggtagggaatggaagacggaagagaagtggaaggtaaggaggtgtagttaaaaatgggctatatgagggatcctttggtgatggaaatgttctgttttttgtgtgtgttttttggtttatttgttttttgagacagtgtcttgctccattgcccaggctggagtggagtggtctgatttcggctcactgcaacctctgcctcctgggttcaagcgattctcctgcctcagccaccgagtagctgagactacatgtgcgtaccaccgcgcctggctaatttttgtaattttagtagagatggggtttcactatgttggccaggctggtctcgaactcctgac

SEQ ID NO: 548285 - DNA, 794 bp, Homo sapiens
aattattttctagatctcttataaagtccattagtaatcccttcatatttgcatatctctttatgtagttgtccctttgaatttgatatttgtaattttaaatatttcaactttatataactgacttcaattcttaaccaagatgtctgaccatgcttccatgcctgattgccacttatagcttcctaattttactgagtctctaattacatgctttacacttttacatgtaaatatctctaccatatttgaacattggccatttagatacttgtgtaacttggaatcaaatttatgatctttttttttaaatgaaactcagacatggtagtccgcctctttgagtgtgcagtgatctttgaatgtaaatatagatatttacaaagctggttatttataaagttactgctagtgacattagaacacctcagccatctttacggctgaaatggtgcagtaaaggagtaaagcaaaaaggagaaagagatcgggggaagtgctggcgggcggaagtgctggccggsggaagtgctggcgggcggaagtgctggcgggcggaagtgctggcgggcagagatgaaagcttcaatcagattatgcaaccaacctgagagactttcacaaaaacagaaccgaagattaaattccctaaacagaacttaattctatctgctctgcaaattctcctcattggcctgatctaaccagaagccaaggacagtgactttgctgatacagtccagaaaacttagactacaggccacagtgcaggctggaggagagttaacaatgga

SEQ ID NO: 548286 - DNA, 618 bp, Homo sapiens
tacttttgtgtatgtttgaacttttttcttcaaagagttgttgcaaaaggccatatgaacaagtatgtttcctttaacctcatttctcttcagggttcattttcatctctctccctctcattctcttgacatttttggaaatagctgtctagctaaacacttttatttccttgtttacctacagcaacttgatttttatgcacacaattttcttgaaactgctctatcaaaaggcatcttacatctatgtcatcttctaattcacttcccccctccaccactgtccaggcaaaagaggctgttttacccatggaggggagagagacaggaagcagcgtggggaggatgggctcatgtgacactttaaactgcttgctttgttcacaagtaaagttggttttcacagagcagagaatggttcctggactaatgctaaaatccttggatgctsacatcccttaaataaaatggtgtagtattttcacataacctatggatatccttccatattctttaaatgatctctagattagattatttataatatctaatccaatgtatatgctatgtaaatagtggttatattgtattgtattttatttctattattttttattg

SEQ ID NO: 548287 - DNA, 589 bp, Homo sapiens
tcaatagttgtattactagtgcctcttcaaagcaaatctcaagtcgctgagcagaaatttttatagtatctgacatgatttaggcacttcttatgtgcaaaatactgctctgaatgctttacatttatgatattatttttttctcacaacgaacccatatctaggaactatcatcctcatttgacaaatgaggaaactgaggcagaaagagtaacttgccaaagttaatcagttagttgaagagctaggatgtgacaacagaccgttgagaggtgcagaataaaaccagaaacaacaggataaatagcaataatataagctaaaatattgtaatttttagttcaaatgtttgaggctttgatgtgatatcttagatatatttccacagaaggtctgtcttaaaaatgtaaaatttaggccttttttgaagycttatttattcttgaaaattctgtttcattacaaaaaggatttgacaagagaaatgctgttctccacttactcactacactgaatgatggggcctcagaaatttgtggtgcagttttccttacactttctgcagtctctcacattcagtgtgtggggt

SEQ ID NO: 548288 - DNA, 637 bp, Homo sapiens
gaaccacttatgctgttacataaatgtgttaatggggaaatccattcaaacatctgcactaagcactctgtatttatacatatgaatgagattgagagacactgccattcctactgttttagcttccactatagtggaaaagggaaaatatatacaatatactctgatccaaggagaaagaagaaaacttcacwaaatacaaacttgttaaaaaataaagacaaaaagaccaagtttccctggggctgaagctgggttatgggcacagacaaacatagggcctctaagagagtcctgcatgctaggcaatatttagagttcttcctcaccagtagctcaggatgcattcagatgtaagctcgaggagtcacgcagcatctcttggcattattggttgtttgcacatccatgtctgtagctggactgcaaaccattctcaaggtggtaaatattcttccctggggctttgtgcatggtacaccctcagtaaatattaaatgaatggatgtatatctgacactgggcgtgtcaaggcttcggaaaatttacttccactcccataaaacttcttctttaaaaaatgcttgcaaaaataatagataggaggattcaatttgtgtttgcaaccttgagacag

SEQ ID NO: 548289 - DNA, 637 bp, Homo sapiens
gaaccacttatgctgttacataaatgtgttaatggggaaatccattcaaacatctgcactaagcactctgtatttatacatatgaatgagattgagagacactgccattcctactgttttagcttccactatagtggaaaagggaaaatatatacaatatactctgatccaaggagaaagaagaaaacttcacaaaatacaaacttgttaaaaaataaagacaaaaagaccaagtttccctggggctgaagctgggttatgggcacagacaaacatagggcctctaagagagtcctgcatgctaggcaatatttagagttcttcctcaccagtagctcargatgcattcagatgtaagctcgaggagtcacgcagcatctcttggcattattggttgtttgcacatccatgtctgtagctggactgcaaaccattctcaaggtggtaaatattcttccctggggctttgtgcatggtacaccctcagtaaatattaaatgaatggatgtatatctgacactgggcgtgtcaaggcttcggaaaatttacttccactcccataaaacttcttctttaaaaaatgcttgcaaaaataatagataggaggattcaatttgtgtttgcaaccttgagacag

SEQ ID NO: 548290 - DNA, 637 bp, Homo sapiens
gaaccacttatgctgttacataaatgtgttaatggggaaatccattcaaacatctgcactaagcactctgtatttatacatatgaatgagattgagagacactgccattcctactgttttagcttccactatagtggaaaagggaaaatatatacaatatactctgatccaaggagaaagaagaaaacttcacaaaatacaaacttgttaaaaaataaagacaaaaagaccaagtttccctggggctgaagctgggttatgggcacagacaaacatagggcctctaagagagtcctgcatgctaggcaatatttagagttcttcctcaccagtagctcaggatgcattcagatgtaagctcgaggagtcacgcagcatctcttggcattattggttgtttgcacatccatgtctgtagctggactgcaaaccattctcaaggtggtaaatattcttccctggggctttgtgcatggtacaccctcagtaaatattaaatgaatggaygtatatctgacactgggcgtgtcaaggcttcggaaaatttacttccactcccataaaacttcttctttaaaaaatgcttgcaaaaataatagataggaggattcaatttgtgtttgcaaccttgagacag

SEQ ID NO: 548291 - DNA, 534 bp, Homo sapiens
caaaccatctctgctcccaaaraaatgttgaggtctttcatggacaattatattacagtcgagtaagaagggctttttccaggtgccatgcaactcagtgagggttagaaagggcctatgacactgagatataaagagtgaataaaatccagcaggcaaagaaaaatatagtccaagggcatttaacctggaggaatatccagtgtctaggtaagaagtggagaaatattataaatacctgtaatttaaattcagagaagattttttaaaggaacaatctgtttcttttaaattggactgggtgtgaactgttactattaataacctactgcccagcagtaattcctaagaggaaccgtagtacaagactctgcttatactatgggatggaaagtcaagccttgtcttgggaatggtgaggggctctggtaccacaaatacactaaaaatacttccatgagtttccttatagttggaaatgaagcaggagcagcaggaataagaaatgaggaactccctgccagctctcctggc

SEQ ID NO: 548292 - DNA, 654 bp, Homo sapiens
attatatataatgtattatatattatatagtatatatagtatatataatgtattatatattatatagtatatatagtatatataatgtaktatatatagtatatataatgtattatatagtatatatactatataatgtattacatattatgtatagtatatgtaatgtattatatattatatagtatatgtaatgtattatatgtattatatagtatatattatatatgatgtattatttagtatatataatatatatgatgtattatataacatatataatatatatgatgtattatatagcatgtatagtatatatgatgtattatatagcatgtatagtatatatgatgtattatatatagcatgtatagtatatatgatgtattatatatagcatgtatagtatatatgatgtattatatatagcatgtatagtatatatgatgtattatatatagcatgtatagtatatatgatgtattatatatagcatgtatagtatatatgatgtattatatatagcatgtatagtatatatgatgtattatatatagcatgtatagtatatatgatgtattatatatagcatgtatagtatatatgatgtattatatatagcatgtatagtatatatgatgtattatatatagc

SEQ ID NO: 548293 - DNA, 654 bp, Homo sapiens
attatatataatgtattatatattatatagtatatatagtatatataatgtattatatattatatagtatatatagtatatataatgtattatatatagtatatataatgtattatatagtatatatactatataatgtattayatattatgtatagtatatgtaatgtattatatattatatagtatatgtaatgtattatatgtattatatagtatatattatatatgatgtattatttagtatatataatatatatgatgtattatataacatatataatatatatgatgtattatatagcatgtatagtatatatgatgtattatatagcatgtatagtatatatgatgtattatatatagcatgtatagtatatatgatgtattatatatagcatgtatagtatatatgatgtattatatatagcatgtatagtatatatgatgtattatatatagcatgtatagtatatatgatgtattatatatagcatgtatagtatatatgatgtattatatatagcatgtatagtatatatgatgtattatatatagcatgtatagtatatatgatgtattatatatagcatgtatagtatatatgatgtattatatatagcatgtatagtatatatgatgtattatatatagc

SEQ ID NO: 548294 - DNA, 654 bp, Homo sapiens
attatatataatgtattatatattatatagtatatatagtatatataatgtattatatattatatagtatatatagtatatataatgtattatatatagtatatataatgtattatatagtatatatactatataatgtattacatattatgtatagtatatgtaatgtattatatattatatagtatatgtaatgtattatatgtattatatagtatatattatatatgatgtattatttagyatatataatatatatgatgtattatataacatatataatatatatgatgtattatatagcatgtatagtatatatgatgtattatatagcatgtatagtatatatgatgtattatatatagcatgtatagtatatatgatgtattatatatagcatgtatagtatatatgatgtattatatatagcatgtatagtatatatgatgtattatatatagcatgtatagtatatatgatgtattatatatagcatgtatagtatatatgatgtattatatatagcatgtatagtatatatgatgtattatatatagcatgtatagtatatatgatgtattatatatagcatgtatagtatatatgatgtattatatatagcatgtatagtatatatgatgtattatatatagc

SEQ ID NO: 548295 - DNA, 654 bp, Homo sapiens
attatatataatgtattatatattatatagtatatatagtatatataatgtattatatattatatagtatatatagtatatataatgtattatatatagtatatataatgtattatatagtatatatactatataatgtattacatattatgtatagtatatgtaatgtattatatattatatagtatatgtaatgtattatatgtattatatagtatatattatatatgatgtattatttagtatatataatatatatgatgtattatatarcatatataatatatatgatgtattatatagcatgtatagtatatatgatgtattatatagcatgtatagtatatatgatgtattatatatagcatgtatagtatatatgatgtattatatatagcatgtatagtatatatgatgtattatatatagcatgtatagtatatatgatgtattatatatagcatgtatagtatatatgatgtattatatatagcatgtatagtatatatgatgtattatatatagcatgtatagtatatatgatgtattatatatagcatgtatagtatatatgatgtattatatatagcatgtatagtatatatgatgtattatatatagcatgtatagtatatatgatgtattatatatagc

SEQ ID NO: 548296 - DNA, 654 bp, Homo sapiens
attatatataatgtattatatattatatagtatatatagtatatataatgtattatatattatatagtatatatagtatatataatgtattatatatagtatatataatgtattatatagtatatatactatataatgtattacatattatgtatagtatatgtaatgtattatatattatatagtatatgtaatgtattatatgtattatatagtatatattatatatgatgtattatttagtatatataatatatatgatgtattatataacatatatartatatatgatgtattatatagcatgtatagtatatatgatgtattatatagcatgtatagtatatatgatgtattatatatagcatgtatagtatatatgatgtattatatatagcatgtatagtatatatgatgtattatatatagcatgtatagtatatatgatgtattatatatagcatgtatagtatatatgatgtattatatatagcatgtatagtatatatgatgtattatatatagcatgtatagtatatatgatgtattatatatagcatgtatagtatatatgatgtattatatatagcatgtatagtatatatgatgtattatatatagcatgtatagtatatatgatgtattatatatagc

SEQ ID NO: 548297 - DNA, 628 bp, Homo sapiens
atgcatttccaaaaccagtagttcccaaactttcatatccattggggattgtctggaatgatgatcttggggccattggtggggaccttaaaaatcactcgctgattggggatcatttggtgatttggtggtaattggggatcactaacagccactaaactcaggctctcaccccaagacattctgatttaatttatccaaaatgtgacctcagcactagaattttaaakcttccccaggcaattctaatatgcagccaacatttgggagccattcttgaagatcctcagggatctagcctgggacatgaatgatatcaaatgcaaatttgaggagaacacatcaggtcttgctgccaagaaagaggtaaaaccaggcatggtgcagcaccaccatgattcccaggggaatcagctctgctgagctctaaagcaatctacaggattatgaagctgtgtccatgtattcaataaacaatcatttagtatctacttttagcacaagtcagtccatctctgctctgaaggatctggttgggggagagaggcctaaaatgtacagacgaattctgtgggattggtgataatgtgtgggaagtctagagtgtcaaagaagcactgcagtgggg

SEQ ID NO: 548298 - DNA, 618 bp, Homo sapiens
tgcctcataaacatctccactctaccccctgttccggcccatcccaccacygcatgtctctttgggccacggcaatggctcctcgacaggccttccagcagcccttctatatccttcactctgcagccagagtggtcttttcaaatcaaagctctgatcacttgaacgccttccatggggagtctttcattgtccctcagccagaatcctcaccgtggcctttaaggccctgagtgacctgggtcctccctgcctttacccacctctccagccacacttgccccttctcatctctctccttccaggcctttgcatacactcagttctctctctggaatatcctccctcctccacagcggtaagcgctagtgcgcacgtgcacacacacaaatatatacacacacacaccattacctaattactcctctttatttattttttattttatttatttatttatttatttatttatttatttattatttaatttatttttttgagacagaatctcgttctattgcctgggctggagtgcagtggtgcaatcttagctcactgcaacttccacatccttggttcaagcaagtctcatgcctcagcctcccaagtagctgagat

SEQ ID NO: 548299 - DNA, 618 bp, Homo sapiens
tgcctcataaacatctccactctaccccctgttccggcccatcccaccactgcatgtctctttgggccacggcaatggctcctcgacaggccttccagcagcccttctatatccttcactctgcagccagagtggtcttttcaaatcaaagctctgatcacttgaacgccttccatggggagtctttcattgtccctcagccagaatcctcaccgtggcctttaaggccctgagtgacctgggtcctccctgcctttacccacctctccagccacacttgccccttctcatctctctccttccaggcctttgcatacactcwgttctctctctggaatatcctccctcctccacagcggtaagcgctagtgcgcacgtgcacacacacaaatatatacacacacacaccattacctaattactcctctttatttattttttattttatttatttatttatttatttatttatttatttattatttaatttatttttttgagacagaatctcgttctattgcctgggctggagtgcagtggtgcaatcttagctcactgcaacttccacatccttggttcaagcaagtctcatgcctcagcctcccaagtagctgagat

SEQ ID NO: 548300 - DNA, 662 bp, Homo sapiens
agctatttttgcctacttgggattcaaagatgcartggggaccatatacatgaggctgatcattttagaaaatgaatcataaaatagttgcacatgaaataaagtagggagtgaagagtcctacaagtcctgtagtaattattaaagagcaattagtctctttataaatcagttcatcaaggaagtcttttaaaagtcaagctgcttgaatataatgatcacttatttaattgacgtaaataaaggaaggaatgaaatttaaatttaaaatgtagataccttaggtggtgaagagtaagagagggggaagattattgattgtcagaatttcaattcatatacattgtccccttccaaccaccacaactgaattctgagacattttggggaatatattagaaattagtggggcaagttcaccagaaaccttttggcatagggtcttaggattgtacttggaaggcacttaccctgaaaataaaagatacctgaaccaatatattaaatgattaagaaattattttaaaatagaacacagtaactgactctcagctttaacttttgtttcaggcatccttactcctgaaccataggtgaatcctatatagatctgagcatctataagagagacctgttgacctggaagctttgtaaatcattgg

SEQ ID NO: 548301 - DNA, 2018 bp, Homo sapiens
caatctgcatccataaataggggagagaagtgttgagttacaactcccacatggggaataagaagtagttgcatctgtcacaggagctaggaagggtagaaggttgttgattactgtrgcaatgtagcactttatttattaagggtcagctatcatgccccatccttagcaaatattccttaagtgcctactgtgtccagggtattgaactatgtggttaaaagagagagaaataggagacatttctatagcctagatcaggggtgtctcaaagcctagacattgagacaggctagatcaggggtgtccaatcttttggcttctctgggctgcattgaaagaagaagcattgtcttggaccacacatcacatacactaacactaacaatagctgatgagctaaaaaaaaaatcacacaaaaagtctcataatgttttaagaaactttacaaatttgtattgggcctcattcaaagccgtgttgggctgcatgcggcctgaggcccacgggttaagcttggcctaggtggttatgagatttttgatattaaaaagaaaaaataattccaaataatgttcacatactgatgcatttattcaaatatttatcagacacaactaagtgctagggataacatggtgaaaaaattaaaaaacagagaaggacattgctttcatggagattacattctggtctgtctctacttacacattttggtgatttagctctctgcccttcaactacaataaaatcttggtttcaaaggatccttataaggcactggtccaagtgctggttcttcacattaacatacccactaatgaaagaatgctgcagttgtgcaataggacaatgtgttggttaggagtgtcagctgtgggagcagagctgagtttgaggcctgactttggcacttataataaactgtgtttccttgggccaattatcaaacctgactctcaatttcttcatctgtaagacgttccccatacctgcttcccatgactgttggaacaacttgagatgatgcttgtggagccctgggcacagtgcctcagtgaatggctgctgctgtgctaatgaccattacattataataagcataaattatcatcatcggtaataattattgaattccttcattcatggagaacctatgggaatgactttagcatcttctgataagtaaggtaacaaagcacttccaaaaaattttataaaatgtaaagctccaggtgcataatctgtgttacaactagccataacagagctccctgtgacttccagccatttaactttgctccatctcttccctgatgtttgcacaatgatgattcctctagattgaagggacttcttcaactcttccttcttggagaaagtgaaaacctgcctctaccttagtaagtctcctttcaacataggtcaatcatacgaacatctaatgttcccctacaaattcatcctcaaacatcaatgaacaagttaagtacctaagatgtttgttatattggaatgcatttccagtgacacacgcctcagtaattatattctttggaccacctactggaaaagaattgttggccctcactttgttcccaatagggaggagttacacataaaattgaacatgtttcaggacactgatgaggacatatttgctaataggcagggccatcatgccttaaacaggggttggccgactatggtgtgtgggccaaattcagctatctgtttgtaaataaagttttattggaatacagctatggccttcatttaaatattatcattcaggagaatgccatctcaggagcttcaattataagagggaccaatcagttgctgccttcactctccagcagcaaagttgagtaattgtgacagagaccgtatggctcacaaaatctaaaacatttactatctgggtttttacagaaaaggtttgccaatccctgcatgccaagcttagcatgcagttagctcccacattgctgtagtggtgaactaacccgggaccc

SEQ ID NO: 548302 - DNA, 546 bp, Homo sapiens
ggggcttcccactgtaagaagccaccagggggcagccccacctgcagctcaaggacgtcgctgcctggtagacactttccgcagtctaacaacactgctgggcgtgggcgcccagatgccccaactctgttctgcagttcagattattttctgaaactggcacctttgaggaagaaaaattcttcctaagtgtgtttgttcaccatggcactccctggcttgagcacctgtcgggccgccctcctcccatgtatccctccattagagagttatcaacactgctcagtggaagggctgcgctgagccagaggaagaagaggacccagcttcagactgtggggctgatggcctaatcacagcagggtaatcagagggatgcaggcctatccctgagggaaggagatgttctgataaagggccatgccagacgsggggagtgtggggaagaagagaagcagggctagaggaggaggagggagaggggaaacgggggtggtggctaggcttccatagaaggtgctatctgagcttggcttgaaggggagg

SEQ ID NO: 548303 - DNA, 681 bp, Homo sapiens
gttaacttccgaataaacctgtgtttagtaatcacatctatcacaaacacacaaatgtaataagaaaaaaagtttcatttctgtggtcaggaacctgatgcaaaattattccattgcatttggagattataaaggcataagtggaataggggtggcttctgctggtcaccagcaaaggaagctgtttcccttctgcctcctctgctgtgttgcaaagtgtctgctttgtcatccaggagatggacaacagtggtgtctgttttttggatrgcatttgttagagagcataaggtatgtcctgtgactctgcttctcactgggcagttccaaaacttgccttagcattggaataatgaaactgctttaataagaacagtgagatcctttgtcaaacccagaccggttgaaaagaaacacataagaataaggcctgtccatctataattttacacaggttattcatactataattaaccagggagtcactactcttgtcttgcctcattgggctggataaattaatcaatcaaattagcaacttttgccacgcattcattaggatgtgtagacatgactccagggcaggccagtcttcaactaggagcagtgggtagggaatggaaggtgacaattagaaggatatgccaaggctgagccaatgtaaggagcattgaggcatca

SEQ ID NO: 548304 - DNA, 545 bp, Homo sapiens
atattatacaagtagaagtaatgtatgccacttctaggcctggtccacaaaacttctgatgtgcaacccaccgtgctctgctcttttctttctgcagctttagatgctaacattgaagatgcacaaccatgaggatgtaggagactggatccctgaatcactgcttggatgatagcagcaagcttctttggcgttaaacaacttagatattctgataaagcatctactgttgccttaattaaggagagatggataatattttcttggatgaaagtgatagaggtgaggatgaagagaagtggtcagattctacatacaattatcagagaaacaggarttcctgagaatatggatatgatgagaaggtaagagaagagcaccagatgatctgaacgctttcgccttgcacatttggaggaaggagctgccatttattgtgctggaaagattggaggaggaatagttccacaagcagaaaacacatagtataattttggatatgctactattaagatgcctggtgttatgttatcttcataatttta

SEQ ID NO: 548305 - DNA, 2583 bp, Homo sapiens
caagaaagcattctttttttgactagtttagaagctgccctggttcattttccctagctccaagtgccagcagaacagtggctaygaaagaattgaagacttagaagtgagattcataggcttcttaggaaaaactcattatgagaactccgactttttgctctataaaactccagtagcactcattattattgtggcacaaatatggaattattttcttttaaactttttttattatacaagcaatgtacattcactataaaaataacattttagctatcagataagtcaaagaaggaaataaaagcccaaatttttaccatcctgtagcacaccttaatttaaatacaagaatcatttcatttgtttccctgagtccctgtagatttgtcttgatgattttgaccagagtttcatttgtccttgggccactgctagacagaaagtttttcatagactctctctatcgtgttgtacctgaggaaagcacataatcctcatgaggctttctaagagattttgctgctagcaacagtgggcaagagcaatattaaatgcaaagggagagtttaaaagtggcaaaatatctagttttccaaaagtggtttctgctattttaactagctgtatgaatttgagtatactattcattcaaaaaatttttaaaggattctaccagataacagaaaagtgtttccaaactcataattctactcattggaaaattaataaattagttaacaaatgttgtttatttaaaaaaacaaaacctgtattgatttcttacctggcacctctgaggagcttttattgccaagataatagtgccctttctcttaatcttctccaggatgtacaaaacaggcgatatttttcatttcatttgttgaaaagtttatgtgatttctatagctagctgaatgaatacctgttttggccttttgtctgtctatgtattccaactcaaggattttttttttttctgtagaaagagaaaaccccgttcttttgttactcatgaatgaacatttttatttctgaaagccattaaatacgctttaagtttcaagaaaggggctctttcctagtccctgacacctttcttctttcacttatagcctcttaggggagaaaaaaagcgaagtgagacaacatcctgcaaaagcactaatgctatgtcattaactacgaaaatgaccaaagtcagtgaaagaaaaagactgggaaataatgcccaacttctagtatcaggaacaaaaaggaacatgtccacagtcacagtaaatcatttgtaaataaaatagggcatgcgaacggtgtgaattgcctattatttgcaaccgtatgccatttagaagtcccttattcaagaactgtgcaataaaaataacaaattgatcacaaagaaaagatgatatttcataggtttcataaactttttgttctattttgaaatgctagaaggataaaacaatttatagataaggaatctgtgccctactttcagagactttctcccgtttttgaggaatgtgcttgtcttacagatagatgatgtaggtcttctgcctctcactggcagaagcttatattctattagtaaaatcaataacttctagaaatggagaccaccaaaatatttcttgactaaaatatttttactactggcttgcctaaaatatcaacctaaacactatgttgtcataattattttgttataagtaaaaggtcaacataatttattaaaatgatcaagtcttagttttaccatttacttcttctgagtttgtggaaaagttacttggagggttgttttctttattgtaaagtagaaataaaaattacttatcttagattatttaaaatattacatttaatacaagtaaaatcctcattacagcatctagagtctgtcaattagtattgtacataattacttatctattttcctgtatgtcacattgtttccatgtcaaaatgcaaaagttaattgcatgctatttgatctatttatttcttatcataaatttttctgtaaaattacttatctaaagatctttactcttgaagtcttgaaagtataggatgcatacatgttaactcttgagaatgatgctagaaatattgaggaaaagcatctgccatgatatactgattgggttatattcacaagcagagaaacattgaggtgctgattccaggatatagtgttgagtgactacaatagtgatgaaaacaccttctatgggaaaaaagaactaatgcaataactttcatccttgtgaacaagaaatgaatctgtttctatagcactgatggaagaagaaaaagtgactgggactaccctgaaaattgcaataaacaaattactggttatgatatggtaagaattcaatgaaatgaatcttatgtatctcgaagttaaatcatgagtgttttaaccgaatgaactttgccaagcttgtttgtgaatgcacatttatagaaaggcacatgtgcttctgtctgttcttaatatgttttatttaagatcacaaatgagaatatcttagcattctatcgagatttattttattcatcatc

SEQ ID NO: 548306 - DNA, 2583 bp, Homo sapiens
caagaaagcattctttttttgactagtttagaagctgccctggttcattttccctagctccaagtgccagcagaacagtggctacgaaagaattgaagacttagaagtgagattcataggcttcttaggaaaaactcattatgagaactccgactttttgctctataaaactccagtagcactcattattattgtggcacaaatatggaattattttcttttaaactttttttattatacaagcaatgtacattcactataaaaataacattttagctatcagataagtcaaagaaggaaataaaagcccaaatttttaccatcctgtagcacaccttaatttaaatacaagaatcatttcatttgtttccctgagtccctgtagatttgtcttgatgattttgaccagagtttcatttgtccttgggccactgctagacagaaagtttttcatagactctctctatcgtgttgtacctgaggaaagcacataatcctcatgaggctttctaagagattttgctgctagcaacagtgggcaagagcaatattaaatgcaaagggagagtttaaaagtggcaaaatatctagttttccaaaagtggtttctgctattttaactagctgtatgaatttgagtatactattcattcaaaaaatttttaaaggattctaccagataacagaaaagtgtttccaaactcataattctactcattggaaaattaataaattagttaacaaatgttgtttatttaaaaaaacaaaacctgtattgatttcttacctggcacctctgaggagcttttattgccaagataatagtgccctttctcttaatcttctccaggatgtacaaaacaggcgatatttttcatttcatttgttgaaaagtttatgtgatttctatagctagctgaatgaatacctgttttggccttttgtctgtctatgtattccaactcaaggattttttttttttctgtagaaagagaaaaccccgttcttttgttactcatgaatgaacatttttatttctgaaagccattaaatacgctttaagtttcaagaaaggggctctttcctagtccctgacacctttcttctttcacttatagcctcttaggggagaaaaaaagcgaagtgagacaacatcctgcaaaagcactaatgctatgtcattaactacgaaaatgaccaaagtcagtgaaagaaaaagactgggaaataatgcccaacttctagtatcaggaacaaaaaggaacatgtccacagtcacagtaaatcatttgtaaataaaatagggcatgcgaacggtgtgaattgcctattatttgcaaccgtatgccatttagaagtcccttattcaagaactgtgcaataaaaataacaaattgatcacaaagaaaagatgatatttcataggtttcataaactttttgttctattttgaaatgctagaaggataaaacaatttatagataaggaatctgtgccctactttcagagactttctcccgtttttgaggaatgtgcttgtcttacagatagatgatgtaggtcttctgcctctcactggcagaagcttatattctattagtaaaatcaataacttctagaaatggagaccaccaaaatatttcttgactaaaatatttttactactggcttgcctaaaatatcaacctaaacactatgttgtcataattattttgttataagtaaaaggtcaacataatttattaaaatgatcaagtcttagttttaccatttacttcttctgagtttgtggaaaagttacttggagggttgttttctttattgtaaagtagaaataaaaattacttatcttagattatttaaaatattacatttaatacaagtaaaatcctcattacagcatctagagtctgtcaattagtattgtacataattacttatctatttycctgtatgtcacattgtttccatgtcaaaatgcaaaagttaattgcatgctatttgatctatttatttcttatcataaatttttctgtaaaattacttatctaaagatctttactcttgaagtcttgaaagtataggatgcatacatgttaactcttgagaatgatgctagaaatattgaggaaaagcatctgccatgatatactgattgggttatattcacaagcagagaaacattgaggtgctgattccaggatatagtgttgagtgactacaatagtgatgaaaacaccttctatgggaaaaaagaactaatgcaataactttcatccttgtgaacaagaaatgaatctgtttctatagcactgatggaagaagaaaaagtgactgggactaccctgaaaattgcaataaacaaattactggttatgatatggtaagaattcaatgaaatgaatcttatgtatctcgaagttaaatcatgagtgttttaaccgaatgaactttgccaagcttgtttgtgaatgcacatttatagaaaggcacatgtgcttctgtctgttcttaatatgttttatttaagatcacaaatgagaatatcttagcattctatcgagatttattttattcatcatc

SEQ ID NO: 548307 - DNA, 587 bp, Homo sapiens
gtaatagaaaaactagattatagactctgtattagataaaccctcatcttgtttcttctattatccaaaactaaaatcttcaaccaaagaaaaaaatccctagcatttgtttttccctaaacactacaagtgatctgtctataggtttagtcagtaccacagggggccacagataaaagtttatctggagaggcagataaggagaaaacacatcatggttgagagtagctatttgcagaagtctttcaccttaaaggacattttataatgtggttaatggaaagtggctgtttcagagagaatctaagcataaagaagagggctttactgaaatcctatcaagtttacgctggcgtagccttgggattgaacagtttctaaagtcgtatttaagctatagggtgaacaaagagtattttgctttgaacttggaaatacagggacatgaataagaatgcttcagtttttaatccagcaggacccaggtaaagacatgttctctgtcagacataaaattgtcrttgctggaaagatagagacatcaggcatttctgtagtaaatgacctaattcttaaaaccatccaac

SEQ ID NO: 548308 - DNA, 476 bp, Homo sapiens
ccctcacgccccagggaagtccttccatgcttggtctacctggcaaacaccactgatctttgaaagcacagctttacggtcacttttccatgaaatgttttctggctgccttggcagttgatcacagaaactgtaatacttgagtgcattacttgtctcgctctggcaggagctgatgcttattccacttcatgtgcccagtactcagcatgggcctggcatatactacataaataacacrgaatgaatggacctactgtgcaccaaccaagacaagcagacctaagtcatggtgtctgctctcaaggaacctaatattgaattaaggttagagaataatcccaatcaatagttcagaagggatgcagttaaatgtctcatgagggtgcaaagagagtctcaccttcaaaatgatggcataatttggggagaatttataacattaaacagcggtcagtatgtatcaacacatttat

SEQ ID NO: 548309 - DNA, 751 bp, Homo sapiens
ctgtggtcccactactcaggaggctgaggcagaaggatggcttcagcccaggaggtcaaggctgcagtaaaccatgaccacatcaccgcactccagcctgaacaacagagcaagaccctatcttaaaaaaaaaaaaaaaaatcacacaacaagtaaagagatgagggaagaagctgggggtccgcgagagctgaccctcttgttaagagtcgcagagttaacaagtaacaaagcaaatgcacagacccatgtaactccatcccgctcccttccttggctgtctctcacacgcccagccccgccactggagttctgtgtaagatctttttcttggaatacagaattggctctgttgctaaatatacaacaaacaaacaaatatttgtaaaacctctgataggttttagacacttctagattccagcccctaaatggatggcaggcatcatatagggattctataatgtattgctgaaatgtatgggcagaagcattctttgacaagaactgcagtaacagaaaatgactttagcaagtattttatgctacagtggcagggggatggaatctgtatttggttmaatgtccatgttaattccttacaatttgcctgttgctacagtatatgactcactgagcatattttcgttttcaatcctaagcatagtaacgtattatatagtttaaagttgaagtttttaaagacagagtcaaaattaaaaccattttcataaaaggcagaaaattatta

SEQ ID NO: 548310 - DNA, 1657 bp, Homo sapiens
taatcccagctacttstgaggctgaggcaagagaattgcttgaacccaggaggcggaagttgcagtgagccaagatcgcaccattgcactccagcctgggtgacacagcgagactccaactcaaattaaaaaaaaaaaaaaagaaagaaacaaaagcaaagaattgcttatattccttgtattagtctgctctagctgccataacaaaaatactatagactgggtggctaaaacaacaggaatttgtttctcacaatgctgaagtctgagaagtccaagatgaaggtgttaatttggtttctgaggtttctctctcctggcttgcagatggccaccatcttgctgtgtcttcatatggcctttcctcagtgtgtgccctaggagagatctttctctctttctcttcttaaaaggccgctaatcccatcgtgaggacccacacttatggccaaatctaactctaattgcctcccaaaatccccatttccaaataacatcacagagaaggttagggcttcaacatatgaaagtgggggagacacaaacatttggcccataacattccaccactggccccccaaaatgcatgtccttatttgaaggggtggcctgcccctccacacctgtgggtatttctcgtcaggtgggatgagagactgagaaaagaaataagacacagagacaaagtatagagaaagaacagtgggcccaggagaccggcgctcagcatacggaggacctgcaccggcaccagtctctgagttccctcaatatttattgattgctatttccactatctcagcaaggggaatgcggcaggagaacggggtgatagtggggagaaggtcagcaagaaaacatgtgagcaaaggaatctgtgtcacaaataagttcaagggaaggtactatgcctggatgtgcaggtagaccagattcatgcttctctccacccaaacatctcagtgtagtaaagagtaacagagcagcattgccaccagcatatctcacctccagccacagggcagttttctcctatcttagaatagaacgaatgtacgatcgggttttataacaagacattacgttcccaggggcatgcaggagacagaggccttcctcttatatcaaccgcaagaggccttcctcttttactaatcctcctcagcacagaccctttacgggtgtcgggctgggggatggtcaggtctttcccttcccacgaggccatatctcaggctgtctcagtggggagaacccttggacaatacccaggctttcttgggcagaggtccctgcggctttccacagtgcattgtgcccctggttaatcgagaatggagaacggtgatgacttttaccaagcatactgcctgtaaacatattgttaacaaggtacatcctgcacagccctagatcccttaaaccttgattccatacaatgcatgtttctgtgagcacaaggttggggctaaagttacagattaacagcatctcaaggcaaaacaattgttcagggtacagatcaaaatggagtttcttatgtcttccttttctacatagacacagtaacagtctgatctctctttcttttccctacacttattgtatgcaaaataagccattctgatagcccctaaagtatttttttattattatt

SEQ ID NO: 548311 - DNA, 646 bp, Homo sapiens
ttgccacagaagctgacaaatagtttaggagcaatgttaccaataatggaagtgtgtgagggagggacaaagtggttctatgtagagaaaactggacttacctgctgtgtggctttagcaagtcattcttcatctctaggccctattttccttatctgtgacacagtaagtttgaatataaaacaaacatatatggagtacatacttaaggtaaggcaatatacttgatatgtgagatacggaaatgaatgtgacatggtatgccatgtagtaggttatcaatacatattggttgaacgaataaatgaatmgtttcatcctctcattactcacagtctgctaaaacaaatggatagaagaacagaggggttaaataatgatgggctagccaaaatggcctaatactgaagagaaatacagttatataaacacataaactgcaatagaatctgtcaataagtcaagtcagagatgactgtggcctgaatcattgtagggactgtgtggatgaagaaaagttgttccatttactgagatgtggaggaaatatatacttgtttatccaatccactgctgatgggcacccatctcatgtgaccactctgttggaattactagtaaatttggtggaggtgcgtgtttcttt

SEQ ID NO: 548312 - DNA, 646 bp, Homo sapiens
ttgccacagaagctgacaaatagtttaggagcaatgttaccaataatggaagtgtgtgagggagggacaaagtggttctatgtagagaaaactggacttacctgctgtgtggctttagcaagtcattcttcatctctaggccctattttccttatctgtgacacagtaagtttgaatataaaacaaacatatatggagtacatacttaaggtaaggcaatatacttgatatgtgagatacggaaatgaatgtgacatggtatgccatgtagtaggttatcaatacatattggttgaacgaataaatgaatcgtttyatcctctcattactcacagtctgctaaaacaaatggatagaagaacagaggggttaaataatgatgggctagccaaaatggcctaatactgaagagaaatacagttatataaacacataaactgcaatagaatctgtcaataagtcaagtcagagatgactgtggcctgaatcattgtagggactgtgtggatgaagaaaagttgttccatttactgagatgtggaggaaatatatacttgtttatccaatccactgctgatgggcacccatctcatgtgaccactctgttggaattactagtaaatttggtggaggtgcgtgtttcttt

SEQ ID NO: 548313 - DNA, 788 bp, Homo sapiens
ggcttagattaaactagaaagagagccacactgttasccttttggaatacaggtagtatcatttactcgactcagactcgctcattttctcaacggatttctccagaagcagcagcaagtgtggcttcacgtggccgctccccaccaggctgcctgtggtcacatcgctctccccaaactatggtcacaagcaacctcttactctgattttggctagctctgtgtgatcactgatcggtggttttaccaggcgggtatatgaatttaacattagtaaaatctgacccatcaatatatttgagtaatttctaggtgggtgagtgactggtattagacacctatgtcccatttattaaactgcatctggctagcttccctcctgctcctttactaatcttcatttcaattaacggcaattcttttcttcctgatcctcaggccaaaagctcagttattcttgatttacttcactctcacctcatatcccagctactcttcttgccttagggcttacgccttctgatatgttcacatactataactagctaatttactaaagcacgaatctgttctcccattcctctgtcaaaggttttgacacctcaccaatgtccctacaataaattattggatatattccaatcttactgaacattcttcatctcctaaaaccaaaagtgctccttctttccttcaacccgtcacacgcaggccccctgagttggagtaattccacacccccatccttccagcctccatccttgcctcacctttccagatttccactc

SEQ ID NO: 548314 - DNA, 788 bp, Homo sapiens
ggcttagattaaactagaaagagagccacactgttacccttttggaatacaggtagtatcatttactygactcagactcgctcattttctcaacggatttctccagaagcagcagcaagtgtggcttcacgtggccgctccccaccaggctgcctgtggtcacatcgctctccccaaactatggtcacaagcaacctcttactctgattttggctagctctgtgtgatcactgatcggtggttttaccaggcgggtatatgaatttaacattagtaaaatctgacccatcaatatatttgagtaatttctaggtgggtgagtgactggtattagacacctatgtcccatttattaaactgcatctggctagcttccctcctgctcctttactaatcttcatttcaattaacggcaattcttttcttcctgatcctcaggccaaaagctcagttattcttgatttacttcactctcacctcatatcccagctactcttcttgccttagggcttacgccttctgatatgttcacatactataactagctaatttactaaagcacgaatctgttctcccattcctctgtcaaaggttttgacacctcaccaatgtccctacaataaattattggatatattccaatcttactgaacattcttcatctcctaaaaccaaaagtgctccttctttccttcaacccgtcacacgcaggccccctgagttggagtaattccacacccccatccttccagcctccatccttgcctcacctttccagatttccactc

SEQ ID NO: 548315 - DNA, 537 bp, Homo sapiens
atgatcatcaggcattagattctctcaaggagcatgcaacttagatccctcacatacaccgttcacaatagggcctgtgctcctatgagaacctaatgacgttgctgatctgacaggaggtagaactcaggcagtaatgtgagtgatggggagtggctgtaaatacggatgaagcttcacttgtccacctaccactcacttcctgctgtgcagcctggttcccaacaggccacagactggtaccaatccatagcccaggggttggggaaccctggtctaagatcaacatgaaggaaataatgctaaaattagcagaagaaaagcatgtacatctataatattaagagtaccctatcagaattactgacactccttatgtgcagagtctctctggaatacactgtgttatgtcaaggggaaagtrgacatctttcagatgtccaagagaatcagaggcagacacttcatgttgacactcaggaaaataaattaatacagatactatgtattaatatttttcctgtctttctccttggc

SEQ ID NO: 548316 - DNA, 544 bp, Homo sapiens
aacattgaaatgcatccatgaatccttttctttaaaaagaaagggaaaaaatttgacaattgctaattggttaattagcgcttaactaamgtgactccaaatttgagcactcccagatgaacagtaggaaaagcaagcaggaaacaaatgtaatgccttgaagtgaaatgcacacggctgttagtcagacaaacagctggcctgttttcttgcccatcctttttgaggagtgatttcctaaaataacatgtgaaaatgccctgaacaaaggagataaccaataaatattaattcacttgcctcttccaacccgcctccatcccctgtgtgcaaagatctgaggctactccatttctaatcagaaagaatgcaagttgtgcattcatttgttcaacaggatttcctgggtgtctgctacatatcagacaccatgctacacactgagaaatagcaataaaccaaacaggcatggtccttgttcttggtgaactcacaggaatagactttaagtaaatgattacttaacaaccttcatgatgtgaag

SEQ ID NO: 548317 - DNA, 544 bp, Homo sapiens
aacattgaaatgcatccatgaatccttttctttaaaaagaaagggaaaaaatttgacaattgctaattggttaattagcgcttaactaaagtgactccaaatttgagcactcccagatgaacagtaggaaaagcaagcaggaaacaaatgtaatgccttgaagtgaaatgcacayggctgttagtcagacaaacagctggcctgttttcttgcccatcctttttgaggagtgatttcctaaaataacatgtgaaaatgccctgaacaaaggagataaccaataaatattaattcacttgcctcttccaacccgcctccatcccctgtgtgcaaagatctgaggctactccatttctaatcagaaagaatgcaagttgtgcattcatttgttcaacaggatttcctgggtgtctgctacatatcagacaccatgctacacactgagaaatagcaataaaccaaacaggcatggtccttgttcttggtgaactcacaggaatagactttaagtaaatgattacttaacaaccttcatgatgtgaag

SEQ ID NO: 548318 - DNA, 748 bp, Homo sapiens
aaaactaccatttattgagtgcttacactgttccaggcagcagcgaatcttatgagactgatatactgttatttccattttaaagacgagagaaacaggctttagagaagtaaggtatttgcctaaaatcacatagccgagaagtgacagtgttcatcttcaaacccaggtttatctgactcaagagcccacactgttaaccactatgctttctcactgccctgtgctatgtgtaaggccctgaatctgccagcaatttgcccagcattctggaggatgccccaagggaggcatgcccaactcacagattcaggctaaatctctccagcctcaagggcctctctgggtcctccccgctcaagtctacstgcgtcttttatgcattcatagagaagggcattgctccagcttggagtaccacccatagtcctcttcatttttcatgacagaaaaaagttggcaggaccctccttcccttcaccaactcctcctgatacgcaatgttcaaattagcacattttcacaagacctcatatctcccaggcctccaagctgcatgacaacaatgacatttactttaactgacttttctcaaaggactgaaaagaaataatattagaggaaatgctataccttgatggttctctatgttggttggtagtgttagcatctgggaaagccccgttattcccaaagcactacgtatagactatgggatcaagagccaatataacacttctagaaggca

SEQ ID NO: 548319 - DNA, 863 bp, Homo sapiens
atcccatagaaataaaagctctttcaaaaaacagaaggtagaccarattcgatattcaggtcttccctagctctagaaggaaatggagtagatttttgcatgtatacaataaattgctggtttctctaaaatagatgcaatggtagattgaagcttgccacctgctgctcaaacgaaaattatatatgatataaaatcaggcaataacagtctagcaacactagtgtgcctaccatgtgccaagcatgacccaggtagacaataccaacttggccactgtcagagacagaacactcaatgggatggatggtaggacaagataatgtgataattctcttggtcttatgtttcttcttgccatttctggaaaaacccaagccacagaaactaccccatggtgttgattcctcccaatagtgacatagaatctcactatttctttggtacgccccgtcactctttagtgttcagcattgtttactattcagcccattccattcaacttttaaatatatattatttgtcaggcactttacaaagcacaagaaatacctaaagcacttttctcgatgtgctgctgactgatccctagattctgtaaatgagcaggtcttccctcacttcttctcatactccctcatgcaaaataccttaccgtgtaaaaatgatggtcacgtttcccttcacatggaatttgagcatggctatgtagtttttttaaacatagggcatgggaaaaaataaaatctagtacaggacagggacaagtaataacaacataaatatgctgaccccttgattctaacaaccaaactataagatgaaaatcctgttttgtttaaaatctctatccataccattga

SEQ ID NO: 548320 - DNA, 556 bp, Homo sapiens
ttacaagtggtttgtactttgcctgtgttcctgagggcagaagaatttggtgatgggaatgtgggttgtgagaaaaagaagccaaaaatgattycaaggttttggacctgaacagctggaagaaagttgccctctactgagatgggaaaaacaggaagttcaggtttcagagggaaggttggaagtttggttttggacatgttaaatttgacatgcctgttagccagatggaaatagcagaatgttgaataatgaatctgaagttttctcattattttcagctccattcaatagagctaagaacgtgacaagggtgtggctgagagcctgccatcaaagtggagcccctctttcctgacacggagacagctgggaagaccttttttcacatgacggaagactttaccttctgcacctcagcaaaacctctgcaagcatcccagtttgggagcagccagtctcctttcacagagcaggtttctgtttctgtagctggtaaaacaacctaagcattcagaattgcctaaatgaactacctcaggcagtgaggaacatc

SEQ ID NO: 548321 - DNA, 606 bp, Homo sapiens
tataccctgcycccagaggtggagtctacagaggcaggcaggcctccttgagctgcggtgggctccagctagttcgagcctcctggccgctttgtttttctgctcaagcctcagcaatggtggccgcccctcccccagcttcactgccgccttgcagtttgatctcagactgctgtgctagcaatgagcgaggctccgtgggcgtaggaccctctgagccaggcacaggatacaatctcctggtgtgctgtttgctaagactgtcggaaaagcgcagtattagggtgggagttacctgattttccaggtgccgtctgtcacccctttccttggctaggaaagggaattccctgaccccttgtgcttcctaggtgaggcgatgcctcgccctgcttcagctcacgcttggtgcgctgcacccactgtccaacagtccccagtgagatgaaccctgtacctcagttggaaatgcagaaatcatccgtcttctgcgttgcttgtgctgggaactatagactggagctgttcctatttggccatcttggaacccaagcctgaaaatggcttttttaaaatactatgtcttaggatgtcaattatattttg

SEQ ID NO: 548322 - DNA, 606 bp, Homo sapiens
tataccctgctcccagaggtggagtctacagaggcaggcaggcctccttgagctgcggtgggctccagctagttcgagcctcctggccgctttgtttttctgctcaagcctcagcaatggtggccgcccctcccccagcttcactgccgccttgcagtttgatctcagactgctgtgctagcaatgagcgaggctccgtgggcgtaggaccctctgagccaggcacaggatayaatctcctggtgtgctgtttgctaagactgtcggaaaagcgcagtattagggtgggagttacctgattttccaggtgccgtctgtcacccctttccttggctaggaaagggaattccctgaccccttgtgcttcctaggtgaggcgatgcctcgccctgcttcagctcacgcttggtgcgctgcacccactgtccaacagtccccagtgagatgaaccctgtacctcagttggaaatgcagaaatcatccgtcttctgcgttgcttgtgctgggaactatagactggagctgttcctatttggccatcttggaacccaagcctgaaaatggcttttttaaaatactatgtcttaggatgtcaattatattttg

SEQ ID NO: 548323 - DNA, 606 bp, Homo sapiens
tataccctgctcccagaggtggagtctacagaggcaggcaggcctccttgagctgcggtgggctccagctagttcgagcctcctggccgctttgtttttctgctcaagcctcagcaatggtggccgcccctcccccagcttcactgccgccttgcagtttgatctcagactgctgtgctagcaatgagcgaggctccgtgggcgtaggaccctctgagccaggcacaggatacaatctcctggtgtgctgtttgctaagactgtcggaaaagcgcagtattagggtgggagttacctgattttccaggtgccgtctgtcacccctttccttggctaggaaagggaattccctgaccccttgtgcttcctrggtgaggcgatgcctcgccctgcttcagctcacgcttggtgcgctgcacccactgtccaacagtccccagtgagatgaaccctgtacctcagttggaaatgcagaaatcatccgtcttctgcgttgcttgtgctgggaactatagactggagctgttcctatttggccatcttggaacccaagcctgaaaatggcttttttaaaatactatgtcttaggatgtcaattatattttg

SEQ ID NO: 548324 - DNA, 533 bp, Homo sapiens
tcagcctccataattgcatgagccaattccttataataaatatctttacctgccccgctgcccttccccacacaattggttctcttttctctggagaacctttactaataaatgtcccaatttatttgtcaagttttatactgactaactatccccactataatgaatgttccataaaggtagagactgtcttgtctgctatttattcccagtgttcagacttgctcttaataactgtgcaaagaattacttggtgaataaaagcatctctctggggaagcagtgatgcttttagatgatctgagtgtggcaccaaagrggacaaatatgtcaccttgagcaaatggcatctacttgggtgaatggtgaagttaatatcatgttttgaacataaaaagtaaacttgaagaaaatttttaagagatctaaggtatagctctatactagaaggggaagttaatgtaaagccagagggaataatctattcatgagttttaaataccgtttatatatatttgacaatgatatatgtt

SEQ ID NO: 548325 - DNA, 533 bp, Homo sapiens
tcagcctccataattgcatgagccaattccttataataaatatctttacctgccccgctgcccttccccacacaattggttctcttttctctggagaacctttactaataaatgtcccaatttatttgtcaagttttatactgactaactatccccactataatgaatgttccataaaggtagagactgtcttgtctgctatttattcccagtgttcagacttgctcttaataactgtgcaaagaattacttggtgaataaaagcatctctctggggaagcagtgatgcttttagatgatctgagtgtggcaccaaaggggacaaatatgtcaccttgagcaaatggcatctacttgggtgaatggtgaagttaatatcatgttttgaacataaaaagtaaacttgaagaaaatttttaagagatctaaggtatarctctatactagaaggggaagttaatgtaaagccagagggaataatctattcatgagttttaaataccgtttatatatatttgacaatgatatatgtt

SEQ ID NO: 548326 - DNA, 596 bp, Homo sapiens
acatgttacaagatgagctttgattgccttatgccaagtgaaattagtcggtcacaaaaagamaaatactgcatgattttatttaaatatggtacatagagcagtcaaattcatagagacagaaagtagagtgataaataccaggggctgaggagaggggcaatggggagttcattgtttaatgagtatggtatagagttttagtttgaaaagatgaaaaaagttcttaggatagataatgatgatggatatacaataatatgaatttacttaatgccactgaactgtacatataaatggttgactggaatttttaataaatataatttaccataataaaaatacatggattacagatagctatgcaaattttaactcataacatgaaataatttgagaaatctgatatgcacatttaatatgttgttattttactggtccttcaaaatgaatcagtgtacttaagcacctagaaaaaaacattgatcttacacattgataaagatattagggttttagtgattgcacatattctaagaaactataattctgtgaacaagaaaacaaagaaatatataaagttaactgtgtaccag

SEQ ID NO: 548327 - DNA, 897 bp, Homo sapiens
caaatgatttttcttagctctgagatggctgcatttaagcttaatgcatatatgcctatgcctatattaaaactccacagactatttcagtattttctaatttcattctacattcttatctagtggaattaacttcttatgagtttattcttcaaaraaacagaataggaactcaaggactgactactatgttcattaatgtattttgctttgtatttttcacattctttaatgtatcctggatgtaaaagttgtcaagctactacatctgccaatccgctgattatcagagttgattttgctaaaacaggttccctcagtattccaaaggtattccggacattgtgttaaagaagataatcttttgtaagctacatcatttggagacaaaaccttaaaatcgtgcatgtttctaagagcttttgtaaaggtcttaaggtatttatttcagttttggtggggcactttttggctttgttcttttaatctgaaaagtagttaagacatggtacaggaaatcttacttgaagcctttctgtattttcccttatcatggaatattcctaagactggggccatgcctaaaatcataaacaagataattttaatgaaccaaccacaaggactaatggggatggcttctaatctgcatatgacaaaagaacaataatttcttgtgtcaatatatttttcaaattaaaaaaatgattccatatcacttatttaatcctcacaacttattgtaaaggagatctggggaaggtaacatcagggagaatctaacatagtagaggttcgcaaatatgtacatagctctgaaaatgagtccttgttttaaagatcacattcttttgtacaagctttttaaggaaatattattttaagtgaatcaattcc

SEQ ID NO: 548328 - DNA, 897 bp, Homo sapiens
caaatgatttttcttagctctgagatggctgcatttaagcttaatgcatatatgcctatgcctatattaaaactccacagactatttcagtattttctaatttcattctacattcttatctagtggaattaacttcttatgagtttattcttcaaaaaaacagaataggaactcaaggactgactactatgttcattaatgtattttgctttgtatttttcacattctttaatgtatcctggatgtaaaagttgtcaagctactacatctrccaatccgctgattatcagagttgattttgctaaaacaggttccctcagtattccaaaggtattccggacattgtgttaaagaagataatcttttgtaagctacatcatttggagacaaaaccttaaaatcgtgcatgtttctaagagcttttgtaaaggtcttaaggtatttatttcagttttggtggggcactttttggctttgttcttttaatctgaaaagtagttaagacatggtacaggaaatcttacttgaagcctttctgtattttcccttatcatggaatattcctaagactggggccatgcctaaaatcataaacaagataattttaatgaaccaaccacaaggactaatggggatggcttctaatctgcatatgacaaaagaacaataatttcttgtgtcaatatatttttcaaattaaaaaaatgattccatatcacttatttaatcctcacaacttattgtaaaggagatctggggaaggtaacatcagggagaatctaacatagtagaggttcgcaaatatgtacatagctctgaaaatgagtccttgttttaaagatcacattcttttgtacaagctttttaaggaaatattattttaagtgaatcaattcc

SEQ ID NO: 548329 - DNA, 646 bp, Homo sapiens
acctttattctattttattttttggcctgaatttcatctcttatggtattaagattttgacctctgctttctttttaatttgaacttaatttaattgcctttgcctgttctttaattttcactttattttagatgtgcctctcatatacaacataagagttgagttttgctttgtgatccaacctctaattgaattaaacctttcatacttgttattatattacatacrtcctggaattctattattttgttatgcctttccctcttgcctcccctttaaaaaaaattgtgttggttgttttcatcttacactatatggtctgtttaccttgttttggggatgtagtgtttatcatatttagcaaaatttctggttttgctctaatggttgcctttatagttatgtaatacccctagtactctatttctttagatcatgcattctcaaccagggcagtaattaccaccaagggagtgaaaattcgtttttgtggaggatgagaaaaatcttagcttatggtcctccaaagctcaacactacccaacaacatggcattccttagtatttatttgtctcattggtcttattggatatcacatgagcagcattgacattaagttcatggaagataaacaaaaaacaaaa

SEQ ID NO: 548330 - DNA, 671 bp, Homo sapiens
acaaagcctaaatgatactacctggatccaaataccagctctaccattttcacaaaccatactctttcaggtaagtcagttcttgtgatccttagctgccttctctatggagtgacgatccctctcttgtagggtttctggggwagtaattgaggttataactgataatacactgggtgctccatacatgtaagtttgagacattgtaagagcagagaaagcacaaagcaagtaggatgcaaccaaactgaatgtctatcattgaagccaggaaagtatacgatgtagatgatgagagcaggctggacgcagataatacggagttctggagctaactggaaagccaatgctcaattgaaactcatttacaatttagaatttaaaatctctgtaagggacaaacaaaataaacaccaagactgctagttcacaaaccctgcaaagcaaatgaaacatttatgtttcaggcgagaccgcaactgtgagccatgagatgcagttgcccagttctgggtgttcccatgaattagggttctggggaaaggaagccccgtggtgctccccgaccatgtcccccctactcagcaccctcttcctcccaaagccaagagaattgaagggcctttgagtccatgcctctcttttaatttcaaaactgaacatgaccactc

SEQ ID NO: 548331 - DNA, 671 bp, Homo sapiens
acaaagcctaaatgatactacctggatccaaataccagctctaccattttcacaaaccatactctttcaggtaagtcagttcttgtgatccttagctgccttctctatggagtgacgatccctctcttgtagggtttctggggaagtaattgaggttataactgataatacactgggtgctccatacatgtaagtttgagacattgtaagagcagagaaagcacaaagcaagtaggatgcaaccaaactgaatgtctatcattgaagccaggaaagtatacgatgtagatgatgagagcaggctggacgcagataatacggagttctggagctaactggaaagccaatgctcaattgaaactcatttacaatttagaatttaaaatctctgtaagggacaaacaaaataaacaccaagactgctagttcacaaaccctgcaaagcaaatgaaacatttatgtttcaggcgagaccrcaactgtgagccatgagatgcagttgcccagttctgggtgttcccatgaattagggttctggggaaaggaagccccgtggtgctccccgaccatgtcccccctactcagcaccctcttcctcccaaagccaagagaattgaagggcctttgagtccatgcctctcttttaatttcaaaactgaacatgaccactc

SEQ ID NO: 548332 - DNA, 634 bp, Homo sapiens
gaatgtttaaaatgggaaagaaagttaacaaaggacaggacaaattagggaggagcagaagttaccttctctcttaagtctccaccctgtagcccatccctggggagaggctgttgctgtgaggggcagcctctcgggcagtgtgtgcagggcaagccagggtcctgactgtggagctgggcatggcttttcaaggaagggagtggggagggctcgacctctgaatctcccagcctaagggtgaaggacactggctctggctgattttgagtttggcaatgggggctatgcccaggtggtcctccatctctccgacaggcgtcacccgggcctgcaggtgctgtcgtgttgctcccagccacagaggccactaaggcttagcagggtcaccaagtcagagccckgggctgagctaagaacggccagaattgctttcacaggggttagaattaattatacaggagatagattatttactgcatgactgtgatgtttatcatccatactgttagttgtccgctttgaccatcctctgtctgcctctatctttaccccaaagagccgcgacaaccaaaccattttcactcagcgccccctagtggcctgagagctgcactgtctccgcctttttttt

SEQ ID NO: 548333 - DNA, 634 bp, Homo sapiens
gaatgtttaaaatgggaaagaaagttaacaaaggacaggacaaattagggaggagcagaagttaccttctctcttaagtctccaccctgtagcccatccctggggagaggctgttgctgtgaggggcagcctctcgggcagtgtgtgcagggcaagccagggtcctgactgtggagctgggcatggcttttcaaggaagggagtggggagggctcgacctctgaatctcccagcctaagggtgaaggacactggctctggctgattttgagtttggcaatgggggctatgcccaggtggtcctccatctctccgacaggcgtcacccgggcctgcaggtgctgtcgtgttgctcccagccacagaggccactaaggcttagcagggtcaccaagtcagagccctgggctgagctaagaacggccagaattgctttcacaggggttagaattaattatacaggagayagattatttactgcatgactgtgatgtttatcatccatactgttagttgtccgctttgaccatcctctgtctgcctctatctttaccccaaagagccgcgacaaccaaaccattttcactcagcgccccctagtggcctgagagctgcactgtctccgcctttttttt

SEQ ID NO: 548334 - DNA, 567 bp, Homo sapiens
tattaggacaccagtcagattggattaaggctcaccctaatggcctcattttaacttaattacctctttaaagtccctatgcccaaatatggtcatattctgaggtacttggggttagagtccaatgtatamatttggaggttgggacacaattcaacccataacagacatatcaatcaaaactgagtatcagcaagtcagatagtgtttttgtggttattttacaggtgagaaaattgaaacacagaaatgttaagtaataagcttaaagtttcatagctagtaagtggcaaggctgagaatgggacaaagtttccagacccaaacctagtggtccttgtataagaccacactgcttcttgaatatcatttagagagtcttccttactccctgaatggccaaaaaatttcttctcctaagtatgaagtgacaaacttctggctgtttagtggtcacttgcagcttggacattaaggaagaagttgaatcacatctgcttttcatgaaaagaattaccgttaacacaaaatcctgatataaccagatcaagagaatgatacaattgc

SEQ ID NO: 548335 - DNA, 519 bp, Homo sapiens
agccagagcaatccagcaagagaaagaaataaaaggcatccaagggccaggcacggtagctcacacctgtaatcccaacactttaggaggctgaagtaggtgtatcacctgaggtcaggagttcgagatcagcctggccaacatggtgaaactccatttttatkaaaaatataaaaattagctaggtgtggtggcagatgcctgtaatcccagatacttgggaggctgaggcaggagaatcgtttgaacccgggaggtggaggttgcagtcagtgagccaagatcgcaccattgcactcactccagcctgagcaacaagagcaaaactccattaaaaaaaaaaaatccaaatagaaagaggggaagtcaaactatctctttttgcagatgatgtgattctatacccagaaaaagaaatgtgtatgtaagatgcctagttaagacaaaatggtcaaaagtggggcttgtttagaccaatgttctctattattataagaatttctagtggttttcctttat

SEQ ID NO: 548336 - DNA, 1545 bp, Homo sapiens
catttaatcatgtaaacattaaaaggcaaattttaaaaaaaggatagctagccatttaacattatatagatgtctcataatctaaattttaaagctgggttttactggatgaactgatcttcaggtaattaataggcagagacaacrtcaacaataataatcataatattttggatttatatgctgcaatgcattccatttgcagagtgagtagttctcacaaacattctgacctgcattctgaattaccaaaaaaaaaaaaatatgacttcccacccacagactataaatgggacaggtaatgtgaacttacaagagagtgagctatagagccccacaacattaggtgaaaatatgagccccataatgcaaactacgcattataaatcttgaattactgtggtaatttaagagtttattatatataaaatctacaatttctagataacaagttggtaaaatgccagaaacttaaacctagagttgtgggatattcttctctttatcaacattgactgacttatggatgagtttaatgaagaaacagcctgtttcacaactttatattttagaatcaaagaatgacatctacataggtaatacgattaacatgctattcatgtatcattagcctggctcatcaaccaagttatttagagaactttatataaatatagggtccctggccctgggctcagagcagtgggtctagaatgagcactaaaaatctgaatgcacagccaactagaggaattacagctccacagaattcaaaatcccagcacattacaggctccatggacaggaaaggtctccagacacttgcttcatccatcttcctctgaggatgagacatcactgaagcagccttctcagattaatttcatacctctgtaaatgattttcattctccctctgtgatgcctcctgagtagcaatataaggccagggctgtatcacaattccctgcacactgttatttcccaatcacaggtaatatttttctgaaaacatgactgatccaatgccagttccgacactcttctactcttctttcctaacatataaatgtgcttatttttcaatagtgagctacagtagtcctgggatacaggttgaactataccctatctagatatgcaatgcacaattctgtaatacagagggcctaaatatgagtattacattatccaggcaatcaaaggataatcctttgggtgacaaggactttgccatatttgttcactcattacacaattattaattcaatgtcctatgccagactgtgcttaaagaacaagttgtactaaacacaaaaacttttcttaagtgtctcaggcagcattatgatcactaattattggggctggtatggtgattaattcttattttgaatacttccattggactgtaccagaaactcattttaaaaatgtgaaacaaaaaaagttcacaattttaaaggctcatttcaaaaggatccttcgaaagtctagaaaaggatcccctcttccaagaaaaagtgacaactcctcccttgaatcc

SEQ ID NO: 548337 - DNA, 1368 bp, Homo sapiens
tttggtataagtggttttaaaatgtacatcaagaagtgggacaattttcaccaagtctcctaagtcccttattaaaaataagagttcaaatccattctgagaataatgactcagaacttctcatgatgactccctaaattatatctttctcacaagaagacgaagtgaccctaagttttggaaacccttttatggaattttaagtttgattgtatttctaagatcctatggtatggaggaaattacattgctcagagataagaggaaaaagcatgacattttctctaacccaaattaataattattaaatacaaaaacaaattcaaaatgcataaccaatctgctgctctgctgatctacaatcacaaatctttgcaaccaaagctggtcctttgcyctctatgatttattaggacatataatggaagacaattattaaaacttaaattactttccatgtttagatatatagaatttagtgaggcaaggtggggaataaaagaggaatagaaatgttggtcgataatcacaattcatattaatctaagtggatttattatgaatggatatgttgaagcattgtatatttcccaaagaattatagttgaccttaaaaaaaacacaaaataaatgcaataccaaaaaataaatggcatttaattgaggtaatcaagagggaagagaaagtaatgtaatagagtataaagccagttaaaagacaggtccttaaaacatatataatgtagctctgttattttgactaccatttggctgaattgattgtttctaattcttaggcatagagacagatcaataagaaaggttgaaaatacacaaagtcatctcatcacatgaaggtttgatattttcattcaacttaaatgacagtatttgaatattgataatttgttatgaaattatagtttgcatttaccttacattttttggttcaatttatctggaaggagaatgattcagataaagaattctctgctaaaatacaggttctcttatgtatagagatatatttactatatatagtggatatatagtattgtatattatatagatatgtagtatcacataattatgtattacatagttatataattatataattataataattattattataattatatcattataattataataattattataatttattgattataatataattattattataattatattgaatcatcaattatcacattatattaatatattataattatcacatcacatattatattaatataatatcaataattattataattcataataatataaattcatacattcatcaattattgttataattataatatatatataattatattatataat

SEQ ID NO: 548338 - DNA, 599 bp, Homo sapiens
tattttacttttgcattttttacaaaaacatataatcatggtgacattgtgagggcactttcaagggtcttggaaggggcccatgcaagtgaggggcctggaaattcagattcattagcttcaccacagatctacttctgtttaaccagttcttgagtctctgcagggtcagtaattacagatcaaattaattcattcagttctctcaagtgctagcgttagtcttagattctaagagcaytgacctgagagacacattttctcattagaatctattcttctaattggcaaaaatatgttatacttatatagaatctttaaagtagatgagtgacacagtatgatttaaagaaacttaaagagtgaataacaaagtggctttaataaagaactccccagatcttgtactagcacttagctctttctccccaatcatctttggcttccattctgacatatactacttatgcaacatgcaactcccatcattcttgaccatatagttctgcttttgtctcaaaggatggggcctaactgcgtggttgattttcacccaagcaccatcaatcaaaaaggaccctgccatgcttttctgacat

SEQ ID NO: 548339 - DNA, 645 bp, Homo sapiens
tcagtgcttacgggattttatttcagctctaatttccccaaaccagcacaggtcctagaggaacctgtatgtctttagctattttagttttttttccccaccttgaaattatttctaataattatatttaataatctactacctaatatacatcagctgcctgaaataagtaaaacaatatttcttgagaattttgagacttgacacttaccactgagttttgaattaacacatagccttttatttcatagaaggccttgtcaaaatttgctctcatatattatttgaatagagctgcctaaaagcttttttttctttctttagtactttgctagagagttgaaggacttcattttaacgttgcaatcacttgtttytaaacttaaaatttgaataaatttttcatattagattcttctaatttctggctatgatttgcaaaagatgatttattttttcatggaacaagattttcagaagtaattaaaagtaatttcctattagggagaccactaacaagactaacacattctataacttctttaagatttaacagccttttgtatttacttggcctgggagattaggcttttagtggataatgactttcatcataacaatgagaaagacgggacacttctatta

SEQ ID NO: 548340 - DNA, 645 bp, Homo sapiens
tcagtgcttacgggattttatttcagctctaatttccccaaaccagcacaggtcctagaggaacctgtatgtctttagctattttagttttttttccccaccttgaaattatttctaataattatatttaataatctactacctaatatacatcagctgcctgaaataagtaaaacaatatttcttgagaattttgagacttgacacttaccactgagttttgaattaacacatagccttttatttcatagaaggccttgtcaaaatttgctctcatatattatttgaatagagctgcctaaaagcttttttttctttctttagtactttgctagagagttgaaggacttcattttaacgttgcaatcacttgtttttaaacttaaaatttgaataaatttttcatattagattcttctaatttctggctatgatttgcaaaagatgatttattttttcatggaacaagattttcaraagtaattaaaagtaatttcctattagggagaccactaacaagactaacacattctataacttctttaagatttaacagccttttgtatttacttggcctgggagattaggcttttagtggataatgactttcatcataacaatgagaaagacgggacacttctatta

SEQ ID NO: 548341 - DNA, 645 bp, Homo sapiens
tcagtgcttacgggattttatttcagctctaatttccccaaaccagcacaggtcctagaggaacctgtatgtctttagctattttagttttttttccccaccttgaaattatttctaataattatatttaataatctactacctaatatacatcagctgcctgaaataagtaaaacaatatttcttgagaattttgagacttgacacttaccactgagttttgaattaacacatagccttttatttcatagaaggccttgtcaaaatttgctctcatatattatttgaatagagctgcctaaaagcttttttttctttctttagtactttgctagagagttgaaggacttcattttaacgttgcaatcacttgtttttaaacttaaaatttgaataaatttttcatattagattcttctaatttctggctatgatttgcaaaagatgatttattttttcatggaacaagattttcagaagtaattaaaagtaatytcctattagggagaccactaacaagactaacacattctataacttctttaagatttaacagccttttgtatttacttggcctgggagattaggcttttagtggataatgactttcatcataacaatgagaaagacgggacacttctatta

SEQ ID NO: 548342 - DNA, 538 bp, Homo sapiens
catcgaaccatacctgaaatatctctggacaatgaatggcacttataggagccaacattatttctgaagatgtatgtattttttaaatttctactaaaacttttccagtgcagaagtttctggcaaaatagccaatgcatgtttcactaaacagaaacagatatctttttcagagaatttttttcttcatgcatcagttggctttttaaaactactggtattaagtatacttaatctttgaaactttattagaaaatgtagaagcttcatactacatatctgtctctaaaacaagactttcaaatatgagtttgaatttaaaattgagcaaaatcctaagtgtaaaacataaacatttaaaaattattaaaaaatttcttaagrtatgacttttgaatatagtaatattcaaaatattttcttgaaatactttataatgttgctgagttaagcacaaatatatttaaatattaaaaaggtttaaatcttatgagcatcatgcaatcactttattatcaacaattactgagaggctatg

SEQ ID NO: 548343 - DNA, 658 bp, Homo sapiens
tctccaccaaagttcctgactgattgaacaaacccgtcatgaccataactgttattgatagatgatagctctcgtgttgcctgaaacagcagcaaatttattctrtctgttctggagccctctgtaaactctcatgagtataaagtacttgtttccttttccctttcccttctttattaattgttttccctttctccatttttttaaatgccattataaaaattttctgcagtttatataccagaagctacaacatcaaattttattaaggatatcagactctgcttcattttgaattcattttgaattcagagataatgccaaatgcaatctctagctcaatgcaaagtacttccaagtgtgactatctaatccattttggggggagggtataatcagatacagtgattgtagtaagtgaataatttctttgtccacagataattcaccagagcaaatatgcaccacctgtgtatctctactaacagagttttattataacaactaattattctggatgttctgtatatttggctcattatgagacaaacattcaaggccagggaaaatatagcataacatacatgccttaaacaaactactaaggaagatgtggccacatcctgatttaagattctgagtatttgaactcaatcat

SEQ ID NO: 548344 - DNA, 1020 bp, Homo sapiens
tgactgcaacctctacttcccaggctcaagcaactctcctgcctcggcctcctgagtagctgggattacaggcgctcaccaccacgcctggctaatttttgtatttttagtagagatgaggtttcaccatgttggccaggctggtcttgaactcctgacctcaaatggtccaccctcctcascctcccaaagtgctgggattacaggtgtgagccaccacgcctggctgtagttgaccttttctaagccaatgccactccaagtgtggatcccaaactgtctgtacgaggctgcgaggagataaggggcttgcaccagaaaataaaatgagccacgccactcaacacactacttaacttggctgactttttttccaaagtcagactttctcaatgaaggaaacagtaacttggtttacattctgtcccaggttccttggcaataaaattggaaaataatactaacttcacagggctgccactgtagagattaaattaatggtgttgcatgaaaagtgtctggcacgatgtgtgtacaataaatagttgttttagtgtgtctgagttgcacaatttagcactaagagcaaacttttcaagcaagtttataaccagcaacaggctcatagaagacaagagaggtaagaggctaagggctttataccctgccattcgcctcattgctctgaagaccctaagccttgcctctccctaagcatctattccctcatctgtaaactggaataataatagcgcccacttcacagagctgttctgagaacgaaattacataccctatgtacaatacctagaatactgccacatatttagtaggtgtctgatgaatattactttccttttttgcacttcaacggcattgaggatgctttcaagaatatttgcatgatatttaaggaaacagctatcacatgcaaaacttttctaatgctaacagcaactccagaactccagaaaagaattaaagattggagtaatgaaacagaaggaccctgctggtaaa

SEQ ID NO: 548345 - DNA, 573 bp, Homo sapiens
cgtgtaggtactgaaatattgtgtgcgtgctctcacacacaatctggaaagctattcctaaaagagaaaatctctgaaacagcattatgaactctgcctacggcggggaagggaggggagtgacagttccttgtcccctgtgctgcaccaggcatgtgctaggctcccatgtacgttgttccccatttaaacctcagtcaacccctctggtaggtgaggaacctgaggctcaaagaagctaaggctcttgcccgctctggtgacttacctggcaacttctagagctggtgctgaaggcaggagtccctcttgactttggagcccttccccaccacactgttcccaagactgatgaagtgtgagctctgtgaaggatgttgctaaacagagtgamcatggaagcgttacagcatgtgctctgctgtggctgtgccaccgtccactctcccttggccggtgtgacgaggactagcgagaacgcacggcgccctgctgcccctctgcgtccctctgcgtcttcccagcacccactgtcgtcaaaaattataaagcatcttataccacaaagatttg

SEQ ID NO: 548346 - DNA, 372 bp, Homo sapiens
gttttgtgagttgagatgaagcattgatgcctaaagaaatagtctcttggtaaattgttcattastgaagaatggtcaagaagccagtctctttcagcataagtcagggtaatcagcaggccatctcagctcaccgcaacttccgcctcccagactcaagcacttcttgttcttcagcctcctgagtagctgggactacaggtgtgtgccaccactgaccagtgctaaattttgtatttttggtggagatggggtttcgccatgttggccaggctggtctcaaactcctagcctcaagccatctgccggcctcagcctcccaaagtgttgagattacaggcaaaagccacaatgcctggcctctgggctata

SEQ ID NO: 548347 - DNA, 873 bp, Homo sapiens
gaattttttagagagaccatctgattatttaaagatacatccatctatttatttgccaataagmaggtctgaatatgacccataacactaaaaaaacttttttttaatctttattttatctaatatttaagttccccagaaaatatagttttatttaactggatgtacaacaacacattgtttcccttttttttttcaattatatatgcatacataaagattgcagaataaaattgtaagcatgaaatatacatctattactatactttccaaaggttaatttacatcatgagtttctttgtgatttcgggatgaggttggaggcaaggtagcctagtaggaagagcgtatatgaattaccaggaggcttgagtgtgagtctggttctgcctgaacgggctgttttaactttggtcaattcacatagaacgctctgccatgattttctcagttaaaaaaaaggtagtaaagcaaggatgtgcgttgaggatgtaatatcttattagctgcataagttcttaaaaataagtttaaagtaatgtatatcagagtaagttgttttgttttaaggcataaagtgcacatctgctcagctatcatattgtttagatgagctctcttgcaaccatctcctcctgtttaaatcaaaactttggattttgagtcaattagcttccgcccaaacgtattgagcttttcacacactctgtacaagaagatctgtgtaatttgtgaagctaagatgataatagaaatggtttaaccattattcaaaatggtcaatttaacaacaaaccagaaaatgtaaaaccagaaaatgtaaaagtcatgtaaatgttatctattattcattgttaacatatgtttctttct

SEQ ID NO: 548348 - DNA, 841 bp, Homo sapiens
gcatgcctgtaatcccagctactcaggaggctgaggcaggagagtcgtttgaatctgggaggcagaggttgcggtgagctgagatcgtgtcattgcactccagcctgggcaacaagagcgaaactccatctcaggaaaaaaaaaaaaaagaaagaaaagaaaatgtattccaagggagagaggagctctttcccaaggaccactgtgatattacaccataatacaaacctcaggccaggcgtggtggctcatgcctataataccagcactttgggaggccgaggcgggagatcacttgaagtcagcagttcgagactagcctggccaacatggcaaaaccctgtctctactaacaatacaaaacttagcagggtgtggtggcaggcacctgtaatcccagctattcgggaggctgaggcaggagaattgcttgaacctgggagccagaggttgcagtgagtcgagattgtgccactgcactccagcctgggtgacagagcgagattccatcccccccaccaaaaaaaatcccaaaaaacaaactccaggtttgtactcacagacatggcaggtaagtgaggcatyctcacatgagcatgtgtttaggaatgatttcaggcagtctttcatcttagaccctgctttggttaactgctgttccattattataagtccacgttaagatattcagatgcttgccgggcacggtggctcgcgcctgtaatcccagtactttgggaggccaaggcgggcggatcacttgaggtcaggagttcaagaccagcctgaccaacatggagaaaccccgtctctactaaaaatacaaaaaattggccgaggg

SEQ ID NO: 548349 - DNA, 950 bp, Homo sapiens
tgtccaccctaacaaaagcataggtgagatctccagtttttgtaagaggatgattatttctaaagatagaaagatagggaagacagttatgcttaagtgaaggcactgagttatgtcaccacgacccaccccacattctccaacctccccccaaaatattgctaagaaacttgaagaaaaatcccatttcaaatggccacagttttcaacagacaccarcaaattttccctagtggaagagaatagatatttttctctataaaagtagaaaatgggtctgatgaaaatgttccttaaagccaactcaaggcatctctgggaccaccagtcatccaattcatggattcctgagatgcccaggcaagctcatctctgcaggggaagagcttctttccccaactcatgccagctcttgaccttttcataggaagtgaaccattccagaccaaacagggctgaaagaaagggagaatgcagtggaaccaagtgctaagcagctgggcagagatgatcttaacactggcgctgagtattccagaaggcccccagatgtgtgtgtgacatgaactgtaatgaaagagacagcatgtcagggttagctggtcctctttgctgattgttgacttggcctaattaaagccattaaaacagcacttagtgtaatttcttggttctttaatattctaaaagaatgaaatctagtaaaaagatttttttctctgaattcattgaaatagatcaaatacaatgtttgagcatgggtcagaacagaggtaactttgaaatatttttaattagttcactgactctctaactccttcaggactgggcagggaaattaggttgggcaatgaggatcctggcatcacagagctttgcatgttaaatacagtggcaaagaggtcacttgctttctccaggtttttaattgtctttaaggagctaaaccc

SEQ ID NO: 548350 - DNA, 950 bp, Homo sapiens
tgtccaccctaacaaaagcataggtgagatctccagtttttgtaagaggatgattatttctaaagatagaaagatagggaagacagttatgcttaagtgaaggcactgagttatgtcaccacgacccaccccacattctccaacctccccccaaaatattgctaagaaacttgaagaaaaatcccatttcaaatggccacagttttcaacagacaccaacaaattttccctagtggaagagaatagatatttttctctataaaagtagaaaatgggtctgatgaaaatgttccttaaagccaactcaaggcatctctgggaccaccagtcatccaattcatggattcctgagatgcccaggcaagctcatctctgcaggggaagagcttctttccccaactcatgccagctcttgaccttttcataggaagtgaaccattccagaccaaacagggctgaaagaaagggagaatgcagtggaaccaagtgctaagcagctgggcagagatgatcttaacactggcgctgagtattccagaaggcccccagatgtgtgtgtgacatgaactgtaatgaaagagacagcatgtcagggttagctggtcctctttgctgattgttgacttggcctaattaaagccattaaaacagcacttagtgtaatttcttggttctttaatattctaaaagaatgaaatctagtaaaaagatttttttctctgaattcattgaaatagatcaaatacaatgtttgagcatgggtcagaacagaggtaactttgaaatatttttaattagttcactgactctctaactccttcaggactgggcagggaaattaggttgggcaatgaggatcctgrcatcacagagctttgcatgttaaatacagtggcaaagaggtcacttgctttctccaggtttttaattgtctttaaggagctaaaccc

SEQ ID NO: 548351 - DNA, 530 bp, Homo sapiens
attatactggagtagggcgggcctttaatccaacatgactggtacccttataagaagagaagagacacccagacagacggggaagatgtccatgtggagatggtggcagacattggagggaagtatctataagcyaaggaatgccaaaaactggctgcaaacaccaggagttaggacaagacgaggaaggatccttcctagagcctgcagagagagcctggccctgccgacctgctttcagacttccagcctgcagaactgggaaaagtctctgttgttttaagctacccagtttgcagtaatttgtggcagcagcccaaaaaaactcagacagtacgatatacattttaagacggagatggaagtgacaatttttttttccttttttttttttttgttgagacggagtttcactcttgtcacctatgctggagtgcaatggtgcaatcttggctcaatgcagcctctgcttcccgggttcaagcaattctcctgcctcagcctcctgagtagctggaattacaggcaca

SEQ ID NO: 548352 - DNA, 530 bp, Homo sapiens
attatactggagtagggcgggcctttaatccaacatgactggtacccttataagaagagaagagacacccagacagacggggaagatgtccatgtggagatggtggcagacattggagggaagtatctataagccaaggaatgccaaaaactggctgcaaacaccaggagttaggacaagacgaggaaggatccttcctagagcctgcagagagagcctggccctgccgacctgctttcagacttccagcctgcagaactgggaaaagtctctgttgttttaagctacccagtttgcagtaatttgtggcagcagcccaaaaaaactcagacagtacgatayacattttaagacggagatggaagtgacaatttttttttccttttttttttttttgttgagacggagtttcactcttgtcacctatgctggagtgcaatggtgcaatcttggctcaatgcagcctctgcttcccgggttcaagcaattctcctgcctcagcctcctgagtagctggaattacaggcaca

SEQ ID NO: 548353 - DNA, 1868 bp, Homo sapiens
aatgaggggatggcaggtgtgctggacataccctaaggtgaccccaaygggtcatcattcccctagaacttgtgtcttgctttcagcaaacagaatgacaaagatgaaggacctgtcacttcctagattattttatgtaaaacttcatcttggtggactggagagaaagcttctccagatgaccttggagatgtgagcagctatactgttagaaggcttacgagagggccacggaacaaggaattcttgggggcggaaggcggggagagtggcccctgctgcagccagcatgaaaacaggacctcagttctacaaatgcaagcaattgaattctgccaacaagcacgtaagcatggaagaagatactgagctctagaaaagaaggcagcctggctgacaccttaacaatatccttgtgagaccctggactgaggacccagctacactgtggccagactcctgatccatagaaatcatgggctaataaatatatgctattttaagccgctaaatttgtaatttgtaatgtgacaacagagaatgagtatagtgagttttctttttgtcaaagcaattgtcacaggttttctttaaataatgaacttcctcaatgtatttagacataagagttacaaaaccacacatttttatggctgtgacttagaagattgcatgatttagtgctatcatttgttcatgatgaaataggctggattggttaaaccccagactttcatccagtacatgatccttctagtacacaaaagtggcctcacatttcaggtaaaaatatttgatttatactggatgttccatggacgatatgaagagataagtgccagtaaaaccaaaatgttggagtagactgctagtactgcctgcctctgcctgaaataagctttgtaaatgactttcaacagataatgatgtagtacctattatatacttgctttgtgccagaccctgagttcatggtgatgagacatgaataggaaattctgatttgatgttgttctgactttagctacaaggcaggagtcgtccctgggctggctcccagatttctcaaatgcccaatatgtgacatctagaacaacttgtaggcctcaagtcactgcaaactgaagggagcagagctcctgtggctgaggaaacttcatctggaccagtaggaagcccatgcgtttctgctaacagggagagagaaatgcattcagtcgaatcacaccagtatagggagccatagcttgaagagggagttttattttcaggtccctcaggactggttcctgaaaacttcataaactgcccaaactccagggctctcctcaaccctccctgcagaaagtaagtgctttgagagcatttaggatgccctgggataggtttattttccaccacgcagagtatagtctcacatgataaacaaaggaaatgtctcttcgatcactaaaacaagaaaaaaacacaagtgtgggctcatgagggtgtaataaggataaaaatgggcaattggtggtgtggtaagcaggattcgagaaggccctctgggacccctggtgttactcttatgatcatgctatgttgcacggcaaaaggcattctgcagatgtaatgcaattgtactaaccatttggcctcaagatagggagaccttgttggccttttcaaattgcatgaggcttctaaaggcaggagttttcctgctggaggaagaagggaaaatcagagagaaaaactggacgtgcccttgttggctttgaaatggagggggccacgtgtaaaggaatgtgggtgcctctgggagctgagagtggccctggctgatagccagcaaggaaacaggggcctcagaatctacgacctaa

SEQ ID NO: 548354 - DNA, 1868 bp, Homo sapiens
aatgaggggatggcaggtgtgctggacataccctaaggtgaccccaatgggtcatcattcccctagaacttgtgtcttgctttcagcaaacagaatgacaaagatgaaggacctgtcacttcctagattattttatgtaaaacttcatcttggtggactggagagaaagcttctccagatgaccttggagatgtgagcagctatactgttagaaggcttacgagagggccacggaacaaggaattcttgggggcggaaggcggggagagtggcccctgctgcagccagcatgaaaacaggacctcagttctacaaatgcaagcaattgaattctgccaacaagcacgtaagcatggaagaagatactgagctctagaaaagaaggcagcctggctgacaccttaacaatatccttgtgagaccctggactgaggacccagctacactgtggccagactcctgatccatagaaatcatgggytaataaatatatgctattttaagccgctaaatttgtaatttgtaatgtgacaacagagaatgagtatagtgagttttctttttgtcaaagcaattgtcacaggttttctttaaataatgaacttcctcaatgtatttagacataagagttacaaaaccacacatttttatggctgtgacttagaagattgcatgatttagtgctatcatttgttcatgatgaaataggctggattggttaaaccccagactttcatccagtacatgatccttctagtacacaaaagtggcctcacatttcaggtaaaaatatttgatttatactggatgttccatggacgatatgaagagataagtgccagtaaaaccaaaatgttggagtagactgctagtactgcctgcctctgcctgaaataagctttgtaaatgactttcaacagataatgatgtagtacctattatatacttgctttgtgccagaccctgagttcatggtgatgagacatgaataggaaattctgatttgatgttgttctgactttagctacaaggcaggagtcgtccctgggctggctcccagatttctcaaatgcccaatatgtgacatctagaacaacttgtaggcctcaagtcactgcaaactgaagggagcagagctcctgtggctgaggaaacttcatctggaccagtaggaagcccatgcgtttctgctaacagggagagagaaatgcattcagtcgaatcacaccagtatagggagccatagcttgaagagggagttttattttcaggtccctcaggactggttcctgaaaacttcataaactgcccaaactccagggctctcctcaaccctccctgcagaaagtaagtgctttgagagcatttaggatgccctgggataggtttattttccaccacgcagagtatagtctcacatgataaacaaaggaaatgtctcttcgatcactaaaacaagaaaaaaacacaagtgtgggctcatgagggtgtaataaggataaaaatgggcaattggtggtgtggtaagcaggattcgagaaggccctctgggacccctggtgttactcttatgatcatgctatgttgcacggcaaaaggcattctgcagatgtaatgcaattgtactaaccatttggcctcaagatagggagaccttgttggccttttcaaattgcatgaggcttctaaaggcaggagttttcctgctggaggaagaagggaaaatcagagagaaaaactggacgtgcccttgttggctttgaaatggagggggccacgtgtaaaggaatgtgggtgcctctgggagctgagagtggccctggctgatagccagcaaggaaacaggggcctcagaatctacgacctaa

SEQ ID NO: 548355 - DNA, 651 bp, Homo sapiens
aggaaataataccgaagaagcatctaccaaaaagaccctctgacccttacttagcctttaactgtttattaaccaccctcagtttctcattatccctctgcctagtgtcaatacgatttaatcataatcatcccactccaccgtccttgtaggtgttgttactctcagacctttccagtgtttgaatcatctcactggcaagggcattcatctccaccaggcttttccccaagttaccaacagtgtaatcattagcaatgagtccatgactttgggccaggcaccctccttgccccacatttcaccctgtatgtggctcttccttccagctgggcagtgagtgatgaggatcccaaaaactcatctcagtctatgtccttgctatgtatgtacaaaaatgagaaatgtaaattgtgtttaaaaaccttatctcattacatactttctcaaaccactctttgagtgtcatttttgggtcctccaagaagctgagataaaaatggaatttgatgtgcaagatatttactgcggaaagtacctgaggatgatcaagaggagaggagaggagaaggaagagaagtaggcagaragagccttctgatcactaggtgagtctgacatcacaaaaaaaaaagaaaaaaaaaaaggaaa

SEQ ID NO: 548356 - DNA, 651 bp, Homo sapiens
aggaaataataccgaagaagcatctaccaaaaagaccctctgacccttacttagcctttaactgtttattaaccaccctcagtttctcattatccctctgcctagtgtcaatacgatttaatcataatcatcccactccaccgtccttgtaggtgttgttactctcagacctttccagtgtttgaatcatctcactggcaagggcattcatctccaccaggcttttccccaagttaccaacagtgtaatcattagcaatgagtccatgactttgggccaggcaccctccttgccccacatttcaccctgtatgtggctcttccttccagctgggcagtgagtgatgaggatcccaaaaactcatctcagtctatgtccttgctatgtatgtacaaaaatgagaaatgtaaattgtgtttaaaaaccttatctcattacatactttctcaaaccactctttgagtgtcatttttgggtcctccaagaagctgagataaaaatggaatttgatgtgcaagatatttactgcggaaagtacctgaggatgatcaagaggagaggagaggagaaggaagagaagtaggcagagaragccttctgatcactaggtgagtctgacatcacaaaaaaaaaagaaaaaaaaaaaggaaa

SEQ ID NO: 548357 - DNA, 651 bp, Homo sapiens
aggaaataataccgaagaagcatctaccaaaaagaccctctgacccttacttagcctttaactgtttattaaccaccctcagtttctcattatccctctgcctagtgtcaatacgatttaatcataatcatcccactccaccgtccttgtaggtgttgttactctcagacctttccagtgtttgaatcatctcactggcaagggcattcatctccaccaggcttttccccaagttaccaacagtgtaatcattagcaatgagtccatgactttgggccaggcaccctccttgccccacatttcaccctgtatgtggctcttccttccagctgggcagtgagtgatgaggatcccaaaaactcatctcagtctatgtccttgctatgtatgtacaaaaatgagaaatgtaaattgtgtttaaaaaccttatctcattacatactttctcaaaccactctttgagtgtcatttttgggtcctccaagaagctgagataaaaatggaatttgatgtgcaagatatttactgcggaaagtacctgaggatgatcaagaggagaggagaggagaaggaagagaagtaggcagagagagccttctratcactaggtgagtctgacatcacaaaaaaaaaagaaaaaaaaaaaggaaa

SEQ ID NO: 548358 - DNA, 1523 bp, Homo sapiens
gtaatttcatatatatctttacctatgacctggatgaggatgaccactttaaaaatctatgataaaacagtgttcaaagttacataaacattctgatacaaaacaaaacaaaaaaaaacacctactcaaattgaacttgtttagaggccatgttgtcttaacagttatctaatggattttcccatgtggcttttaaatacaagtataaattttcttaaaatgtagtaaagaaaacaatctattagggaatcattataaatctttgatctgaaatactttattacttagtttttaatttattaacattttaagcgagaaaagagaaagagaatgaatacaaataaacggcacctcygaatcaaaagtacagtcaaggcctaccatcgaggaataagcgccttgggaagcagacatcctttaaccatctttcctcttataccaagaagcagggaatgtgttcattgaaaataattattccttttccccacaccccatacccgctatgctatgccactgtcaggaggaagagaagggagggaagaacaaagaagaaaatactaccaaacaggtactgcagaatatactgaggtccagacttcctgtctctgcaagttcaactattgtctgtgaattaaaaaaataatatttaattcaaaactgaacaatgctcaccaactcttttgccaccactatgaatcaataaacatgattttcatctttaatttactgatgttttgagttcaaaaagagaaataaaatcttttatttactgctatttcattgcaagaagaatacagggtagcaatctctatgctgcccagaaaaaaggggattagaccataagaatctgccattgtcttagtcaattgtggactggaataacttatcaaaatttgtcctgtttttagagactaaataaaacagctcttaaaataatctaaaatgcttctagtccagttctctaaatacacaacattgttagattataaaattggtttcctaattacctgcattataagaaagggatgccctggatggtatatacaaatattttagctactgggatggtgtacctgcactatcaaccaatttattaaccttctagtttacatagtcattcagcaaacatctactgaatgcaaattatttcctggagatttacagagatgtttaagacaccgtattcacccctcaaagcaatcacagcagtcttgtaagggagagaaacacgaaattataaaatgtcatggaagtgttatggacaggcatcacaagagcaccaaggatgagcaccaaataaaagatacataatctcaatttagcttaaaacttctttacattctaaacgatagttaattcctctgtcctctaatgtctgctgtaaatactgataatctggcagttaaatacaagtgacttagttggtattttgctacctttttcttttgctcttctgttgctttaataatccctggatctgatttccaagattttccaaaattgtagaaaagtgcaacactatt

SEQ ID NO: 548359 - DNA, 896 bp, Homo sapiens
agacacatgtgctactaacaagaaaaaagagggtaatgagtgggaataatgttgggaaaggctgctcaatggagataaaatctgacctgaatggagaaagggagtcagccacatgaagatttgggggaagatgtttcaggtagatgaatcagctattgcaaatgtccccaaacagaacgaatcttgtgatgtttagggcagaaatggtggggtcactttcaagacatgattggtttccatttctacagaactgacacagagaattaacaggcatctcctgctgtgtgtaactagaggacaactgtggcctttgggaaactccagattcctcggtagtcacattactttgtgaagctgaacttaccgcattggagttcaatttaacaagcttctgcgaggctgcaccgggcaggtatactctcttgcatcccccattcctcaagctgcactttgatccrtgccagtctttagaataatatagaggaaaccgcaaactcatataggaaacttcaactctatcattttagttttctctttcatagctttccttttgctcaggctctgttctgacaagccaaggctttttggcaatttagctgaaaagtaaatgtaagcaaatacatatgattctagggatccagcctaccagaataactctattagagaacttgtttagacaaaacctattttctcattcccgaaactgacaaaactgtaggaaaatcactcatgtttgaaagcaaagtataataaagtgctatattgtaccactgtcttcatcaaagggaaaacaaacaaacaaacaaatcataaaccacaatgtattgcctgaaaatgagaggtcagaggcttattttaaaaggagaaaataaaaaaaaaactagactggtggcttg

SEQ ID NO: 548360 - DNA, 896 bp, Homo sapiens
agacacatgtgctactaacaagaaaaaagagggtaatgagtgggaataatgttgggaaaggctgctcaatggagataaaatctgacctgaatggagaaagggagtcagccacatgaagatttgggggaagatgtttcaggtagatgaatcagctattgcaaatgtccccaaacagaacgaatcttgtgatgtttagggcagaaatggtggggtcactttcaagacatgattggtttccatttctacagaactgacacagagaattaacaggcatctcctgctgtgtgtaactagaggacaactgtggcctttgggaaactccagattcctcggtagtcacattactttgtgaagctgaacttaccgcattggagttcaatttaacaagcttctgcgaggctgcaccgggcaggtatactctcttgcatcccccattcctcaagctgcactttgatccatgccagtctttagaataatatagaggaaaccgcaaactcakataggaaacttcaactctatcattttagttttctctttcatagctttccttttgctcaggctctgttctgacaagccaaggctttttggcaatttagctgaaaagtaaatgtaagcaaatacatatgattctagggatccagcctaccagaataactctattagagaacttgtttagacaaaacctattttctcattcccgaaactgacaaaactgtaggaaaatcactcatgtttgaaagcaaagtataataaagtgctatattgtaccactgtcttcatcaaagggaaaacaaacaaacaaacaaatcataaaccacaatgtattgcctgaaaatgagaggtcagaggcttattttaaaaggagaaaataaaaaaaaaactagactggtggcttg

SEQ ID NO: 548361 - DNA, 896 bp, Homo sapiens
agacacatgtgctactaacaagaaaaaagagggtaatgagtgggaataatgttgggaaaggctgctcaatggagataaaatctgacctgaatggagaaagggagtcagccacatgaagatttgggggaagatgtttcaggtagatgaatcagctattgcaaatgtccccaaacagaacgaatcttgtgatgtttagggcagaaatggtggggtcactttcaagacatgattggtttccatttctacagaactgacacagagaattaacaggcatctcctgctgtgtgtaactagaggacaactgtggcctttgggaaactccagattcctcggtagtcacattactttgtgaagctgaacttaccgcattggagttcaatttaacaagcttctgcgaggctgcaccgggcaggtatactctcttgcatcccccattcctcaagctgcactttgatccatgccagtctttagaataatatagaggaaaccgcaaactcatataggaaacttcaactctatcattttagttttctctttcatagctttccttttgctcaggctctgttctgacaagccaaggctttttggcaatttagctgaaaagtaaaygtaagcaaatacatatgattctagggatccagcctaccagaataactctattagagaacttgtttagacaaaacctattttctcattcccgaaactgacaaaactgtaggaaaatcactcatgtttgaaagcaaagtataataaagtgctatattgtaccactgtcttcatcaaagggaaaacaaacaaacaaacaaatcataaaccacaatgtattgcctgaaaatgagaggtcagaggcttattttaaaaggagaaaataaaaaaaaaactagactggtggcttg

SEQ ID NO: 548362 - DNA, 1003 bp, Homo sapiens
ccaaatgcttactctgggcctggtaactttctaggtattctggatagattaactcattgaaacttcacaacaaccttgtgagagacatgttcttaatggtctccaatttccagatcaggaaactaagcaactcaccccaagggcatgctcatggacccttgaaaaatagagagatttcccagacatctaggtcttcagcttctctttaaaaagatctgaagctaggtggatgttgctgagttcacatcctgtccgggacagccagcagcagtccagctgattgaccacagtctccaccatccactcttgtgtgatgcctcccttcttccctgtttacaccgagtagctgacttcttttgctcttggtaagggaccacaagttatgtttgtttgtttgttcttttttcctagctgatttgatgaacatggcagtgccttaggaaacaatcaaacttagaagacagaagtttagacctctgggatgaggggaggtgacagagaatgtaagaaaggtttagtaggcagtacccacagtggaattcatatgtcagccctatgtatatatataaatgagatgctgcatctctttagttcttttgttccaaagttcaggttatacaggttagtctgtcattgcctgrtctttctgtgctggtgggagcaggtagcggttgggtgggagggattatgaatagtcgttcaaggcctactgagatcttagatcaacctgcttttctgaatcccagcctaggattttcttttcctttttcttttagtgtttcctttttctgttactgctttttttcccctcttaaatgcacattgcattaaaaaaaaaaaaaaagaagtaggcactcaggaggttgaggtgggaggaccgcttgagcccaggaggttgaggatgcagtgagccatgatcacaccactgtactccaactggagcaacaaaacaagactctgtctgttaaaaaaaaaagaaaaaaattgaaaacagcaaatacca

SEQ ID NO: 548363 - DNA, 761 bp, Homo sapiens
atggatgtcatttaacccgcctaagtgccagtctccttatctataaaatggggatgtgttgtgaggaatagaggagataatgttccttacatctgtgcttagcacaaaagaagcactcaactagaaaaggcagctgctcttgttattcttattactgggatctcaggacaatgtgtgtcattataccagaacagtatttaagcaagcaaccaaaaggttgggatagaaaacccaacatacaaaaaaagcatctactgcaaaatactatctatctcagccagcagcagtgggtggggggtagaagaggctgatttcaagttatatggagcacaagaccgaacaaacagaagtcttgaacatttacttgcatttatttccttttctgttattaaaggcataaaagaaaggtcttcatttcaacgtcatggggcaatgctgggactaacaagtttgtgcttgaatgtgaaatgtgttccagtaaaactgatagagtctatacctccttatttaaagaggtagtgaagaggtgagaaagattcaaaagggggcccatttttatttgagtgatatagcactgaaattaagattcggggctctagaattagcctggattcaaattttggctctagtgtgtaactagccctgactattagaaagctacacaacctttstaaccttcactttcctgagcaaaaattggagagcacgaaagtatttccttcatgtaatagaattgtgttggaagtcaaatggtataatgc

SEQ ID NO: 548364 - DNA, 546 bp, Homo sapiens
tttgtatagaggcctggctgggattaaggagctcgcctgaagtgcccagagtggtggagggtgtggctggtcccagggtcagaacactcatgcctgtgtgacacaccccagctgtgtggcctgggtgtgtagctcacactctctgagcctccgttcctccaaggacaaaatacaatagtctgtcttgtctagcactgagtttgcagaggggccaccaccaatgcaggcgaagagcccggcctggagcctggctgagagggcagggatggaagacgtgatcgtgggacagtcacatgagagtgctttggaaagttaaggcaccacagaatctccaggtgtgctcttgctaccaggccatgacccgcctgtccacgcgcctgcagggtgtgggtacatgtatattaagtgtgctgatgagatcgcrtgcacgcccagcaggcctcccgccctccaggcacgtagaaacctgggcacagcgcctgaacaggcaggtccaggagccaggtgtttggcgccaggtgcgcgtctgtggaatttggctctaca

SEQ ID NO: 548365 - DNA, 2587 bp, Homo sapiens
tgtaatctcagcactttgggaggctgaggcaggcagatcacctgatgtcaagagttagagaccagcctggccatgaaaccccatctctactaaagaaaaatacaaaaattagctgggcatggtggcatgcacctataatcccagatactcaggaggctgaggcagaaaaatcacttgaacctgggaggcagagattgcagtgagctgagatagattgtgccactacactccagcctgggggaaagaatgagacttcatctcaaaaaaagaatgtacataatattctatcctttgaattactcataattgatatgagaatttcccacttgtggaaatttagtttggtttctgctttccctccggtttaattaacaactctctacaaacaagcttctgattttacccccacttaggacagatttctaaaatggaacctgcttagtcaaaatatatgtattttgtaaagctttagatagatattgtcaaattgctttgcagttagaccatgtcaatttacaattatatctgagctgtttaaaatttcccatttcccatgccctatttattttgcatacttttttaactgttaatttcacagtccagatctgtttggagtcattttatttgctccagtcattttttattactattggaaatgaaaatttattttatatgcatgctactatataatattcttatttatatatttattttagagacagtgtcttgctctgtgtggagtccagtggcacaatcataaactcactgtagcctagaagtcctgggctcatatgatcccacttccaccccggcacatttcccctctctagcctctggcgtagctgggaccacaagcactaatcaccatgcctaagattttctttttttttttttatagtgacagtatgttgcctgggctggtctccaactcctggcctcaagcgatcctcctgccttggccacccaaattaatgggattataggcttgagccaccatgcccaatctccttttctctacaattgttattgctgtctacctactttcctgtaggtttttaatgggaattttaaaataaatttttaaagtattctatgtgtagagggtagaaaacttttggctatcatatttttagtgatataccaaaatttatattcttttaaagtttacagttgttttgtcatgcaaaatttttaaatttttctatgatcctaactactgatttctctttctgatagctttcattgcttctatatttaaaaagattcctatactagaatcaggaaaatagttacatatattttcttctaaatttgtttatcgttcttttcatacatttaaatctgtaattcttctgggatttggtagaataaggttagaatcttcttgttttgtttcatcagttattatttttcagtaactttttactgttggacttatttcagtatcttgttttacccatattttatacttggcttggagtcccatctctcctgggacccagtaatgggtttcaggcagtaatcttttcacagctccttacagtgccatgaatttgaaggaagagctttctaagtgctgaattttctcagccagttacatcgtttgctgttgctgttgtgtatgtgtaacggtttttagcactctttttatacattattaagaaacaatttttaaaagaagatagaatcatcattctcacacagatatagagtgaatatatggcaaagatttttaactcattaattaatgagggaccagtaaggtattacaactgattccagagaattcaaagagcagagacataaaaaaggaataaacagattttaaaataaatttgcaaataaataaaaagcatcaatgcaaaaatgcattgtattccactgaacacaactattttgcattactacagacaagaattatttgaattattatcaaatttctaaaagttgcagaattgtaatatagatcataagtgagaaaacctaaatgagtgagtaatcaagatacccactgtttgattttttgcccatttcaaagtttttcacaagtttccctggcagtctgtctcctttcctctttttatcataataatttcgggaaggttattcttgatcataaaatgcagctagtcttattaggtttgccttactgtttatataggtatctcaaaagtgttattttaccatataggtcaccttaagtttgcattgtaaattctaaggctatacaattttgaacaaatactaaattaaattctgtctggaagtattcataaggaatctcaaattggacttttaaggccctctattatttgtcgtcctgctgctagaaaactaaatccaagaaactctgtccgtaagatttcacctrtaaaacctgtaactttgggtaaattattctcttctaaaagtccccaaataccttaagataacttatacatagtatacaatattcttgactattaaagccaaggagtagaccagattgtacagaaggtctttgtaaatactacctccataagtcaagtcgaacttaattccttaaaagtagctgtttctgtgtgattcaatgaacattgttttcaaa

SEQ ID NO: 548366 - DNA, 1197 bp, Homo sapiens
ggatccttctccatggaagagccttgtcttactgtgacagttgtagcgttagataatgggatggaatggacactaatgatgagatagtgaatctcaccttctcctttcagagatagggaaactagagctgaaagagctgtccatggattggttggccagggattgttgtggctagctgactgcttatctgtcacttctccattgttgccagccaatcccagcttctttcctgacacataaacagcccccgtcccttctcccctctccacagtaccctcctttgctttcctgagagaggcacaaagatttctgtctgattttccccctttctagttcacatacgagaagttctattttgccacttaaaccctaatcactcaacttacatttcttggatacccattcttgaaaagaccctgtgattatgttgcggaagttgcaaagatgtatcaaacagtctgtatcagatgggacgagaaagagacacaattgattacaatatggctacttaaatttaaattaagattaaataataaggcarttaaattattaaataatttaaaattctgtttttagtcacacatggtcacatttcaagtgcccagtagctgctgtacgggccgtgcagacacagaacatttccaccattgaaggaggttctgttggactgtgctggtttagagcttacgattcaaagtgtagtccatgccaggcagctccagggtactacttgtaagaaattcagaatctacattgaaacaggatgcccaagtaatacctgtgtacagtgaggtttgagaagagctgctttagaacatcaacagttagttccacaatcagagaaagctgaggttttaggaagaactgatgtgatctcctttctccgtcattatctgtagtaagagataaaactaccacccaaattttgaaaatcaagaatttctcatgcagtagaagcttgtcagcctctaatttgtcagtattttactattgggattcattttgacatttaaaaaaaggtacaagtggaagttgtgttgcttttgatatcacagaaaacactaacttatcacagtcattactagcaaatccctctacccactgaaaagtgtctgataatcaaatattgatatatccccaagtaccccctacactcaaataagtggagaaaacaaccattcacttctaatctcttcc

SEQ ID NO: 548367 - DNA, 706 bp, Homo sapiens
acatgagattttggagggrccagggataaaatgataaaatgatatggtttggttgtatccccacccaaataacatcttgaattgtaactcccacaattcccacgtgacatgggaggaagctggtggggggtaattgaatcataggagtgggtctttctcgtgctgttctcatgatagtgaataagcctcgcaagatctgatggttttaaaaatgggagtttccctgcacacgcgctctctttgcctactgccaaccatgtaagacgtgacttgcttctccttgccttccatgatgactgtgagacctccccagccacgtggaactgtaagtccactaaacctctttttcttcctagtctcggttatgtctttattagcagcatgaaaacaggctaatatggcacgtatatagtttacacataaataaatacagagaaggtgcatgcatataatttattttgtggatgcaggtttggagatagctactgtagaaaatcattcttaagaccaatgagtatcttactttgggttccctggaagcagggcctgagatgggaatttttgttcaagtgacttactgagagagattgctctcagaagaagggatgtgagaagcagggtggagcatggaaaaaaagccaagcaaaaatatggggtcaaatggagtctagcaagagtctgctccctcaggaaccactggaaacag

SEQ ID NO: 548368 - DNA, 706 bp, Homo sapiens
acatgagattttggaggggccagggataaaatgayaaaatgatatggtttggttgtatccccacccaaataacatcttgaattgtaactcccacaattcccacgtgacatgggaggaagctggtggggggtaattgaatcataggagtgggtctttctcgtgctgttctcatgatagtgaataagcctcgcaagatctgatggttttaaaaatgggagtttccctgcacacgcgctctctttgcctactgccaaccatgtaagacgtgacttgcttctccttgccttccatgatgactgtgagacctccccagccacgtggaactgtaagtccactaaacctctttttcttcctagtctcggttatgtctttattagcagcatgaaaacaggctaatatggcacgtatatagtttacacataaataaatacagagaaggtgcatgcatataatttattttgtggatgcaggtttggagatagctactgtagaaaatcattcttaagaccaatgagtatcttactttgggttccctggaagcagggcctgagatgggaatttttgttcaagtgacttactgagagagattgctctcagaagaagggatgtgagaagcagggtggagcatggaaaaaaagccaagcaaaaatatggggtcaaatggagtctagcaagagtctgctccctcaggaaccactggaaacag

SEQ ID NO: 548369 - DNA, 706 bp, Homo sapiens
acatgagattttggaggggccagggataaaatgataaaatgatatggtttggttgtatccccacccaaataacatcttgaattgtaactcccacaattcccacgtgacatgggaggaagctggtggggggtaattgaatcataggagtgggtctttctcgtgctgttctcatgatagtgaataagcctcgcaagatctgatggttttaaaaatgggagtttccctgcacacgcgctctctttgcctactgccaaccatgtaagacgtgacttgcttctccttgccttccatgatgactgtgagacctccccagccacgtggaactgtaagtccactaaacctctttttcttccyagtctcggttatgtctttattagcagcatgaaaacaggctaatatggcacgtatatagtttacacataaataaatacagagaaggtgcatgcatataatttattttgtggatgcaggtttggagatagctactgtagaaaatcattcttaagaccaatgagtatcttactttgggttccctggaagcagggcctgagatgggaatttttgttcaagtgacttactgagagagattgctctcagaagaagggatgtgagaagcagggtggagcatggaaaaaaagccaagcaaaaatatggggtcaaatggagtctagcaagagtctgctccctcaggaaccactggaaacag

SEQ ID NO: 548370 - DNA, 1149 bp, Homo sapiens
cacattgtgcacatgtaccctaaaacttaaagtataataataataaaataaaattaaaaaaataaaattcaaaaaaaaaaacggtaatttcctcacactgtcttaagttccacatatcatccactcctcttaacttttgccattctgatagataaaaaattatacgttgtttatttaaggtttattattacttcattttggagagaagtaagtttcaaagatttgagttagtcaagcttcttggtccattgtacatyggtctgtgtaattctttcttctttcatttgacttcactattagtttttccattatcccccttcatcactcccattttgcttccacctacagtctctcccctccaaaataaatgtattttaatctgtctttgaatttgtaactatctatgaaaaaaaatcattattgttgctttaatatgctgattctttataaaaatacattattacagaagatatctatactttataagcaatatattttaagatctatcattgttattttatatacacctagctgactgctaccaatggatgcatagtatgcaaggttaagccaccaccacattttatttgccattaaccgccagggctgcctcaagtactgtgctttcacaaacacattgtgatgaatagcattgtacatatccccttgaggacttacatgtgagctccttggagatatatccacaggcgcagaattgctgtgccacactatatacacataattatttttgctattcactatcaaatttctctccagaagccatgatagttcacaatgcagtaacaattctcaatactcattctcccacatccttgttaagactttttaatctgacgtttgaaatttttgccttatgatagatggaagacatagttcatttgttttaacctaattttctgtgattactagtgaatatgcacatctattcatttattcatttgccatgtggatttcctttatagaaccatttaaagtctttataatctttttaattgagtttgcagccctttacttgaagctaaggagcactttcttatgtagcctaggtaatattctttagaagtcttatatgttatgagtgtgtctttaatctgtcacttgttaggttttttgttgttgtcctttgga

SEQ ID NO: 548371 - DNA, 1149 bp, Homo sapiens
cacattgtgcacatgtaccctaaaacttaaagtataataataataaaataaaattaaaaaaataaaattcaaaaaaaaaaacggtaatttcctcacactgtcttaagttccacatatcatccactcctcttaacttttgccattctgatagataaaaaattatacgttgtttatttaaggtttattattacttcattttggagagaagtaagtttcaaagatttgagttagtcaagcttcttggtccattgtacattggtctgtgtaattctttcttctttcatttgacttcactattagtttttccattatcccccttcatcactcccattttgcttccacctacagtctctcccctccaaaataaatgtattttaatctgtctttgaatttgtaactatctatgaaaaaaaatcattattgttgctttaatatgctgattctttataaaaatacattattacagaagatatctatactttataagcaatatattttaagatctatcattgttattttatatacacctagctgactgctaccaatggatgcatagtatgcaaggttaagccaccaccacattttatttgccattaaccgccagggctgcctcaagtactgtgctttcacaaacacattgtgatgaatagcattgtacatatccccttgaggacttacatgtgagctccttggagatatatccacaggcgcagaattgctgtgccacactatatacacataattatttttgctatkcactatcaaatttctctccagaagccatgatagttcacaatgcagtaacaattctcaatactcattctcccacatccttgttaagactttttaatctgacgtttgaaatttttgccttatgatagatggaagacatagttcatttgttttaacctaattttctgtgattactagtgaatatgcacatctattcatttattcatttgccatgtggatttcctttatagaaccatttaaagtctttataatctttttaattgagtttgcagccctttacttgaagctaaggagcactttcttatgtagcctaggtaatattctttagaagtcttatatgttatgagtgtgtctttaatctgtcacttgttaggttttttgttgttgtcctttgga

SEQ ID NO: 548372 - DNA, 529 bp, Homo sapiens
gtggggaaactggtcattatcctttgggggtgaccaccaccagagatccccacagccaccaaggacaatagygatctgaagaggtgttttcattcttggctgctggaaaatagccaggagaccaagaaaggatgaggatctcaactaaaaagagaatagttcatgaaacaatgttttggcaaaaatggaatcaaaataatggaggaaaaggatcctttccctttccttttgtctaaaaccttgtaccacctcccttcccaaggcaggcagccaaggcaatatttcattaacccagccttcagctgtcccttcatactatttttttttactatagggtttcatcttctttccttcactgttccctttcaccacgccctccatgaccaaggtgatgttaattatgcctttatggtaataacttagttccagatcatacatccaaatgcccgcacgctctcacttagatgtacttactcataagatgggacagctgaatttcaggtttggggagcccatgtctgacctggtt

SEQ ID NO: 548373 - DNA, 529 bp, Homo sapiens
gtggggaaactggtcattatcctttgggggtgaccaccaccagagatccccacagccaccaaggacaatagcgatctgaagaggtgttttcattcttggctgctggaaaatagccaggagaccaagaaaggatgaggayctcaactaaaaagagaatagttcatgaaacaatgttttggcaaaaatggaatcaaaataatggaggaaaaggatcctttccctttccttttgtctaaaaccttgtaccacctcccttcccaaggcaggcagccaaggcaatatttcattaacccagccttcagctgtcccttcatactatttttttttactatagggtttcatcttctttccttcactgttccctttcaccacgccctccatgaccaaggtgatgttaattatgcctttatggtaataacttagttccagatcatacatccaaatgcccgcacgctctcacttagatgtacttactcataagatgggacagctgaatttcaggtttggggagcccatgtctgacctggtt

SEQ ID NO: 548374 - DNA, 561 bp, Homo sapiens
tgtcagcacatttaccacggcatctccaaagggtccatcatagtgtggtgtatacaattaagaatcatctcatcattaatgcgtgtacgaaattcaccgttacttttagattctggtgtatcaactaatgattgcagtttggcaatctcaggcccataactcccaccgaccccccaattaataaacttaatcttatctcaagcccccatttctgctgatggcaaaaatgcgatctcatcatttccaaacagattcaattactttagacatttctcagttagtccagggaaccgtgtttcgtcttccccctggagttctgcccatataaggaggtgagtgaagagagaagcgtaagcacctgtgggaagggggccatcacatcctatggttctctgtccactccagtctctgctgagatgtgacttgtcctcctggtcttcaacttttatttatttattttttttttttgaggcagagtctcactctgktgcccaggctggagtacagtggtgtgatctcaactcactgcaacctctacctcccaggttcaagcaattctcc

SEQ ID NO: 548375 - DNA, 929 bp, Homo sapiens
cccactgtgtagtcagtcttttattcttcacccctttccctcccttcccctgagtccccaaagtctattatatcattcttacacctttgcatcctcatagcttaactcccacttataagtgagaacatatgatatttggtttctgaacaatggtctccaactccatccaggttgctgcaaatgccaatatttcattccttatgatggctccaaactctgtacttctgttacctggataaaaatgaaaagtatattgtaaacaaggtccaccctattctagtatgacctcatcttaacttacctaattacaatctatttttgtaccttttgggttgaggtaaaaaaaaaaaaaagaagaagagaaaacacagacacataagggacaaacaccacatgaagatggaagcaaagactggagttaacacacctgcaagccaaggaacaccgaagactaccagaaaaccactggaagctaggaagagacaaggaaggatttctcccctacaggtttcagaggaagaatggccctgctgatgctttgattttagacttcaggccaccagaactggagacaataaatttctattgttttcagccacccagcttgtggcacttggtgacagctgccctagaaaactaatatagatagtaggagaagggaataaacattggggaagaaacaagtcgctataagtactaatttaaagatcaaactaataatgtactcaaaagtacattataatcataggcaagtgtttcaaaaggacatgtacatgaggarttcagacatttctcaggaagactttaagctgtagtgttaaactcaggctcagagtcatactggcttgggtgataattctagataggtcattttttttttttagcagctatgtggtcttaaggaagttcattgacttctctgctcctca

SEQ ID NO: 548376 - DNA, 572 bp, Homo sapiens
gaaaagcccaaaactcgaagcaataaggcaaaaaattaataagtttgtctaagtagcaatctaactttggtacaaaaaaagaaggaaaaataaaacaactaaatcaaaagactcagttcaaaaataaggaaaacagtcccagcaccttggraggcccaggcaggtggattgcttgagccaggagtttgagaacagcctgtacaacacagtgagaccccctatctctacaaaaacaaaaacagggaaaatattgaaaacatatttgtaaaagagctttttttcttaacataaatagaactgacacacatgaatgcaacaacaacaaaaaagaacaaactaatagaaagttgtgcaaaggatagaaatggtttatagaaaaacaaattccaaagactgtaaacatatggagagatgctctacttgaggtatagtagaagaaatgcaaatcaaaatagtgagaaaacgttttctttccacttaaactggtgaaagtcttcccgagtgctggcaggaatatgagggaaggaataccgccacccacttttaatgagagggtagtacaactgatgcga

SEQ ID NO: 548377 - DNA, 619 bp, Homo sapiens
tacccacccacaggcaatgcataggagtgtctattccccacggcctcactaatgtaaagtattgttgaacttggaggtctctgccactctgagagatgaaaagtgctagcttattttgagcratgttgagcatctttgcacatgtttaacggcctgctctgtgacctgtctgtatcacttgctcacaaaggctttaatctgctcagaaacagtaggaatatccttcagagtatcaggccaggactactgttccttgaaataccagttttgcaaaatgattccagagcctttgcctgtaaatttcttagtaacagagtttgacaaactatagcccggggtctaaatcctgcccacttcccacttatttatttatttatttatttatttatttatttatttattttttgtatggcatgcaacctaagaatggttcctaatttttttcccccactggtttgaaatggtggcttttatcatacattaaattaccaatcacacctaagtaaaattcttgattttccactttccagagtggaaagttcagaacttcactcaggtatatctgatcgatccattctatcttatactatgctactctcaattttcattacagttgacc

SEQ ID NO: 548378 - DNA, 2021 bp, Homo sapiens
tatattaataacacatttaatagcacatttaatagcaaacatctggaaacaacgtaattaaaaaaatagaacagctgtttttttatttttatttttttgagacagggtcttgatctgtcacccaggctggattgcagtggtacagtctcctttcactgcaacctctgcctccctggctctggcgatcctcccactgtagcctcccaagtagctgggactacaggcacacaccaccgtgcctggctaatttttatattttttgtagagatgggatcttgctatattgtccgggctggtcttgaactcctggacttgagtgatccatgtatctcggtctcccaaagtgttgggattataggcatgagccactgtgcctggcctagaatagctttattgagatataattcacataccataaaatgcagtggtttttgggatatttacaagattgtgcaaccgtcaccatctagagtgtttttgtttttgttttgaggtggagtcttgctctgtttgccaggctggagtgcagtggtgcaatctcagctcactgcaacctcagcctcccgggttcaagcgattcttgtgcctcagccccctgagtagctgggattacaggggtgtgccaccatgcccaggcccggctaatttttgtatttttagtagagacggagtttcaccgtgttggctaggctggtcttgaactcctgaccttgtgatccacccaccttggcctcccaaagtgctgggattacaggtgtgagccactgcgtctggcctactgcctggctaatttttaaattttttgtagagacagagtctctctgtgtttccattctggtcttgaacttctggcctcaagcaattctcctgccttggcctcccaaagtgttgggattataggcatgagccactatgcccgatctgtaggttatatttttaaaaatcaattgcaagttggttttatggctccccattcatgtattcgttaaattcaacaaacatttattgagcaccgactatgtatttaggactgttttaggtgttggggatatagcagtgaataaaacaaagtccttgctttcaatgaccacctattctattaaataaatacataacactgtagtcccagctgtttgggaggctgaggcaggcagtttgtttgagcccaggagtttgaagccagcctgggcaacatagtgagatcccatctcaaaagaaaaaacacaatgtaagttatctttcatgggattagagaaaaacaacaacaagaaaaacccagagggcgataagtgttatgaagtaataagtcagaataaggggtgtgcagagtgtaagtgtgcgccatgattagtacaggcctctgtgataggtgatgcctgaatagggtcctggagggatgcaggaggcacctgggaagatagctgggtgaaagagttttaagcatagagaagaggaagcacaaaccaatccctgaggcggatatgtctttggtcaattggagcaacaggaaggaaaccgagagaggtgagagtggtggggaatgcgggggaaggcaggggacgtgtagcccaggaagcgccttatagatgcaccaactaaaaggatttaggtttgattgttttctttttaccatttgttaaggattttggatttatatctgaatgtgggttttgaggagaatagagaatttggcttaattttaaaaggtcgctttggtctgcatgtggagtatagactccagggtcctgcaagggtggagccagtgaagccagttagaacctcagtaagagatgcagggtgggtttcttggctagctcacagaagcctttggtactggtatttggtttctcctggatggtcaaggacttccttgagtcctgggttcaggcagctaaaggtcctgttgatccaggctgtggtgtcagggtttccctttttctgggtaaagatattsttataatcagccaagtgagcctctggcctcatggtatgacaagggtctctactcatcccccacacac

SEQ ID NO: 548379 - DNA, 553 bp, Homo sapiens
ttggagattatactcyaagtgaagtaattcagaaatggaaaaccaaacatcatatgttctcagtgatacgtggaagctcagctatgaggacacaaaggcataagaatgatacaatggactttggggacttggtggggaaaggtgagaaggtggtgagggctaaaagcaaatagtgtgcagcgtatactgctcgggtgatgagtgtacagtatctcataaatcatcactaaagtatacttatgttaccttacacctcctgtacactaattaacctatggataaaattaatatacaactttattttaatagctaattaagttaaaagattactatacttttttctttacattatggaagcagtaggacaggaagaaacagtcgtcagtaacagcagctgtttagaaggatcattgtaaacatttttggtttagatgcatgtagaataaatcctaaaacctgttcagcaggccactggaatgggacaataacatatgggaaacagttaaactgtatattctattatgttactttaaacaaaatattttggaatgtt

SEQ ID NO: 548380 - DNA, 545 bp, Homo sapiens
atgcttcccattgaccattgcttttaaaccaccagagcctctttcagcagagaatgcccttttgtgctgtgaaattttttgagtccccgtcaaaactcccttgtttgctttgccacarccaaagacatttgtaagcatctcaaaagcacagaaggcccttgacttctaaagggactgtggtaagataagctttggaggataatggggctgggcgtggggaaaggcatacttacattattcaatttagcagttaatcatatattagcatattgtcgctttattttatgatgtctataaatgctgttttttttcaaatttagtaaagtcttgatttaaaaagacattcttctgcaataatctcatgttctcacatagaacaaggcctataatgaacattcattaacacttgttgacttaattcttaaagattagaaatgtttcattatattcccattatattccttgaggactttttaaatcccacttacagttatgctgtattctgaaaaagactgatttaaaagataagtatgaatacataaaaa

SEQ ID NO: 548381 - DNA, 611 bp, Homo sapiens
agttctcaagactcatgcctgtaatctcagcactttgggaggtggaggctggaagatccttaagtatgatagctcgagacctgcctgggcaacatagagagaccccatctctacaaaaaaattagccaggtatagtggtgcatgcctgtagtcccagctacttgggaggctggggtgggatgattgcttgagcccaggagttcgaggcttcattgagctatgattgcatcactgcactccaggctgagcaacagagcaagacaccgtctttaaaaaatatataatatataaattaattaaggaaagggaaactttccgcaacacacacacacacacacacacacacacaccctgaatcatctttgaaatagccttctttaacctgaaaatatccttagagaagtgatcctttacttgtttgtttattataaggtaacaccttaaaaggaataatctccaagctgactcttgctgcctcaagggccaaactgtgacttttgcgacaagcccgtgtgatttgtatgttggacattcrgggatatggaatatgatgttgaaatgaagtgtttgtttttctcattgaggttgtaaataagcattattagtccaga

SEQ ID NO: 548382 - DNA, 568 bp, Homo sapiens
gtttttagcctccctggaccttatttccctctgaatcctggtctggtaattcttcactatcatagtaatggttcactcccctattccttcaagcagatgacttcgtattttgtccaccttttctagttatcttcagcaggggatttctcccaaagtatcaatttcattatcactagaagagcaagtttcttattctctttaacttaataagtgtaaggctatattatgatgcaattaccatggagctagcctatcctgacgctagcagcaaacttgtttaatacttagatgtatctatctatctatctatctatctatctatctatctatctmtctctctctactttaaaaagaaatttataaaaagagatggggtttcaccatgttgccccacgctggtcttgaactcctgggctcaagagatccaactgcctcttcctcccaaagtgctgggcttacaagagtgagccacctagcccagccttagtactatatttatctgggagaggttccagtgccccaaaatactgtgttctgttaatatctccaaaattttttttggagatag

SEQ ID NO: 548383 - DNA, 529 bp, Homo sapiens
agggagtatggcacaatattgaacagagtcattcattaattggtgaggggttttggaaacagtaggagaaaaaagaaaataaaggaaggtagatacagaagcgtaagctagaaataatataaatatcagagaaatataagatttcaagattaattcaaattaaaaatgaaattcaatgaaatgaagcttacacgagatgaaaaagatataataaagttgaaaataaaagaatgaaacaagatatatcaggaaagcatgaagaaaaaaaaagcaggagtggtacattcatgttaaagaataaattgaagaaaattggggactcgggggaaaggatgggaaggggtaagggatacaacactacaaagtgggttccgtgtatactgctcgggtgatgggtgcaccaaaatctcacaaatcaccagtaaagaacttactcatgtaaccaaataccacctgttccccaaaaacctatggaaagaaaaaattttaaacamaaacacaaataaagaatatattgaaaaaaaggtta

SEQ ID NO: 548384 - DNA, 1171 bp, Homo sapiens
tacagtagcctgtattagtctactgaggatatgaaacatagggaatattaccaattaactccccacactgcccgcctccccaccccgagacagagccttgctctgtcgcccaggctggagtgcagtggcacaatctcagctcactgcaacctccacctcacaggtttaagtgattctcctgcctcagtttccggagtagctgggattacaggcgtgcaccaccactcccagctaatttttatatttttagtagagatggggtttcaccatgttggccaggctggtctcaaactcctgacctcrtgatccgcccgcctaagcctcccgaagtgttgggattacaggtgtgagccaccgttcctggccttaactcttatactacttttcatgtcacagagggtcgtctaattacatgaaaagaggccaactgtatccaacccaaacagttctctaaactagaagtctccaagctttgataaaggtgtaccatcagcataaaatttgagtgcacatctcttccatttctgttttaaaagtagttacatattcccgtagtggactgaatgatgcaccctgtccctgtccccacctcccaaaatatgtccacccagaatctgtgaatgtgataattttgggaaaaaaagcttctgcagatgtaattaagttaaggatttccagatgagataatccgggataagactgagccaatgacaattgtccttagaggagacagaagagggaaagatagagactcacaggggagaaggccatgtggatgaagcagagactagaatgatatgtctatgagcaaaggaatgccaagaactattgacaagccagaaacaagcagcagcatggaatgaattctccctcaaaggttctagaggaaaccaaccctgccattaccttggttttagacttctggcctccagaactgtgagagaataaacttctgttgttttaaaccaccaagtgtatggcaatttgttgtggcaaccctaggaaactaatacagataccaatgagattatgtatacaggacaaaaataaacacaagtaggaattctaacattttctctctatgccacaatggataatcctgtctaccacaaagagactacagctttagaccaacatgagggaagaaataaagccaagtgacagactaaac

SEQ ID NO: 548385 - DNA, 1171 bp, Homo sapiens
tacagtagcctgtattagtctactgaggatatgaaacatagggaatattaccaattaactccccacactgcccgcctccccaccccgagacagagccttgctctgtcgcccaggctggagtgcagtggcacaatctcagctcactgcaacctccacctcacaggtttaagtgattctcctgcctcagtttccggagtagctgggattacaggcgtgcaccaccactcccagctaatttttatatttttagtagagatggggtttcaccatgttggccaggctggtctcaaactcctgacctcatgatccgcccgcctaagcctcccgaagtgttgggattacaggtgtgagccaccgttcctggccttaactcttatactacttttcatgtcacagagggtcgtctaattacatgaaaagaggccaactgtatccaacccaaacagttctctaaactagaagtctccaagctttgataaaggtgtaccatcagcataaaatttgagtgcacatctcttccatttctgttttaaaagtagttacatattcccgtagtggactgaatgatgcaccctgtccctgtccccacctcccaaaatatgtccacccagaatctgtgaatgtgataattttgggaaaaaaagcttctgcagatgtaattaagttaaggatttccagatgagataatccgggataagactgagccaatgacaattgtccttagaggagacagaagagggaaagatagagactcacaggggagaaggccatgtggatgaagcagagactagaatgatatgtctatgagcaaaggaatgccaagaactattgacaagccagaaacaagcagcagcatggaatgaattctccctcaaaggttctagaggaaaccaaccctgccattaccttggttttagacttctggcctccagaactgtgagagaataaacttctgttgttttaaaccaccaagtgtatggcaatttgttgtggcaaccctaggaaactaatacagataccaatgakattatgtatacaggacaaaaataaacacaagtaggaattctaacattttctctctatgccacaatggataatcctgtctaccacaaagagactacagctttagaccaacatgagggaagaaataaagccaagtgacagactaaac

SEQ ID NO: 548386 - DNA, 1115 bp, Homo sapiens
gtggacagccctttaagatgcttttctaatctgttggagagttagaaaggcaaacagagagatactgattgttaaaggtagtgtgcaagcatggtgctgattttataggttagattataactaggattataatttatgtgggggaaatattctttaagtctacatttcagagactcactatccaagaaatcaacttcatgaaaattcagataaaaattggaacttgggggaaaaaaggaagacttaaaaccttgatttcatgtgccccaaattcaggctattctactcttacacacatttggagaattagaggaaaattagaatcaacttttacatatgtaatgttttgctgttatttacctctcaattgtatcaccttcaaaattcaataaattcaataaaattcatccctttttctggacaaccctctaacatttaatggactaagtggtatagacggtcccaaagctggcaatgaggactgagctctcagagtcactttccctgctgtcctcacagcaacaagacatgcacccaggtctaggggccatcctcagtggtgaaaaacaaagcccagctcatgccctactttctgtggcctttccaaacctagatacttattatgaatcaatagcatatgaatagttggccttctactttacaaatgcaatagagattctgagcagcaagctaaattaatcatgtccttcccccattgtcataaagttctatttgtctaaacatctctgttatgtaggcttacctcacattttcttacctctgcttctgctctgactccatcacacagttcctggagatctggtccagtcagttcccacctaagtcattgattgccttcagagcagctttcttccctaagaacccactgacctattgtgattactcaaccccaggagggagagattgtttttcctttctctgtgccctgaaatctgaagttcattgctcctatgtgctgtccatctcccaaaatgactcttagcttgcttgcaaagcagggaagacracattctgcatccacagcttccctgtttgtttcgtgctctgattgttcaggtgaactcattccctcaatttacagcctggattcttag

SEQ ID NO: 548387 - DNA, 600 bp, Homo sapiens
atgcaaagcagagactctgtgcccattcaacactaattcccatccccctgaccccagcccctggtgactactattctagtttctgtctctattaatttgactaagaacctcaggttaagtggaaccatatagcrtgtgtccagagtgactggtttatttcacttagcacagtgttctccaggttcatccatggtctagcatgtgtcagcgtttctttcctttttaggggtgaataatattccatgttgcgtacatcctgcatttttttatccattcatctgtcaatggacgcttgggttacttccaccttttgattattacaaataacgctgctatggatacggggttgcaaatatctttttcagtccctgtcttcaattttttggggtgtataccaagaagtggaattgttggatcctatggaaactcgatttttaatttttggggaatggccatactaagatggttaattttctgttatgtgaattcacttccacaaaaaatattgtgatgacgtatctccattaagtaggcttgtgcaatttcatagtttgaaagtattaaaagctgtaatttctctaaagtgacttggtgtggagg

SEQ ID NO: 548388 - DNA, 600 bp, Homo sapiens
atgcaaagcagagactctgtgcccattcaacactaattcccatccccctgaccccagcccctggtgactactattctagtttctgtctctattaatttgactaagaacctcaggttaagtggaaccatatagcatgtgtccagagtgactggtttatttcacttagcacagtgttctccaggttcatccatggtctagcatgtgtcagcgtttctttcctttttaggggtgaataatattccatgttgcgtacatcctgcatttttttatccattcatctgtcaatggacgcttgggttacttccaccttttgrttattacaaataacgctgctatggatacggggttgcaaatatctttttcagtccctgtcttcaattttttggggtgtataccaagaagtggaattgttggatcctatggaaactcgatttttaatttttggggaatggccatactaagatggttaattttctgttatgtgaattcacttccacaaaaaatattgtgatgacgtatctccattaagtaggcttgtgcaatttcatagtttgaaagtattaaaagctgtaatttctctaaagtgacttggtgtggagg

SEQ ID NO: 548389 - DNA, 600 bp, Homo sapiens
atgcaaagcagagactctgtgcccattcaacactaattcccatccccctgaccccagcccctggtgactactattctagtttctgtctctattaatttgactaagaacctcaggttaagtggaaccatatagcatgtgtccagagtgactggtttatttcacttagcacagtgttctccaggttcatccatggtctagcatgtgtcagcgtttctttcctttttaggggtgaataatattccatgttgcgtacatcctgcatttttttatccattcatctgtcaatggacgcttgggttacttccaccttttgattattacaaataacgctgctmtggatacggggttgcaaatatctttttcagtccctgtcttcaattttttggggtgtataccaagaagtggaattgttggatcctatggaaactcgatttttaatttttggggaatggccatactaagatggttaattttctgttatgtgaattcacttccacaaaaaatattgtgatgacgtatctccattaagtaggcttgtgcaatttcatagtttgaaagtattaaaagctgtaatttctctaaagtgacttggtgtggagg

SEQ ID NO: 548390 - DNA, 525 bp, Homo sapiens
cccagatgatgtaaggagcaaaaatgaaaccagaaggcaggaggagataaaaaggacttctttcctattattccaacatgttcctgtcagagtcactcgagcaggggctgtgggtctagcatcagcatgtgactacagccagcttctcagccactctcagaccagccttggcagcctgggtccggcggctcatcagaaacctgaatacccactggatggggcttgcattcccagctcctaatttggggcgattcctttagttttcctcagttccaagggtggtagctattttttattattatctyagttttgcctttatgctctttgagcccactaacagctgtgtaatgtattttctatatgaaatcctgactgtcggcaattcctcgtaccacataaggtgctccactttccaggctggatcctgacagtaaagcatggtggaaggtgatggtttagaggagggaacggtggggtgttgagaaagtaaaggaaacctgggtctgtagagaggtctgaatcttc

SEQ ID NO: 548391 - DNA, 588 bp, Homo sapiens
atagtgtgtgaagcttacgaatcttgagaaattaatacgggcagcgaagaaacgattttagcacagaagacaaaatcattaaggcaacatctgttcattcctagatgaaaaatgacaattgctgaatactgagagggtccttgttttgcctggaaatttgtattgaagcaataagtggaactaataagttggtagtggggattctttaaaattttaaagcgacaccttatttttcacaagatttggtaggttccatstaatctatcaagcatttcagcactgtgcagcaccgaataggtcatgcctattcttatctgagagagtgcaaattttatatggccactgagttatccaaagagaattaattatattgtatgtagtttcagtagatgtaatgataatatatttgagttatttggctatggcaatcaatacatgagatctagttccatcttcactgattaacctacccccacaaccctgtctccttttctcaaatactgctgatgatagtgactttacattgttttgttactgtttgtttgatgtggctttctttaataatatgcactccttttaaaatgaagc

SEQ ID NO: 548392 - DNA, 994 bp, Homo sapiens
cctttcccaatgtctttggcagtaggctgaggccacatgcctaaggtctggccagtgatctttgaatagaagtgttaggtcaggcactgtccttaaaagggaaaggcatacctttctcctctcctctactcttgctacctggaatgtgatagctggagcatggcagctgtattagaccctgaggacaaggacctactccaggtttgacaaagaataggtcaagagaaaaccaggacttgatgaccctgaagctgtcatgccaaccccgggctgcctacctccaggtttcttttacctggggtagaaacgatcttcaaagccaccattattttccatttttctattatacacagctaaacctaattctaactgctatgccaatatttaatgaatgtttattgggttagtatataaaaatggaaaagtatgtaaacttttagaagtttctattgtcccagttaagtctattttatatgcagaaactcaaatggacattgtttgaaagggaaaaaaatacacctaaggaaaaaaaaaaactaccataactaaatttgttatatgaatttttcatgggaggaaaaacccttactcaggactctggatggctgaaatgtgcagcagcgaatcttttctgtagatcacaaaaaccagacgctgtcctatgtacttctccccaaaacagattcattatggctcgttgttgcactctgcttctagtgggcatttgccatatggcttggcagtttaatgattttctgatacttgacaaaaatgaagcacaattattttgcaaggagcttgcgttcctagatgggtcttttccaaataacagctgtgcctcgaaattgagttactcaatttgcaatttgtggacacaatactcaaacatttacaagtgagcaaaacctcaaatsacttgggctatttccaggcatcagagtttatgaagtttttagcaatgttatgagtgtgcagctgtcaacaaactcaagcc

SEQ ID NO: 548393 - DNA, 656 bp, Homo sapiens
gtgtacactttcatgggccaaatgtgatcctagtgtgcaaagataagtatcttctgcataatrtggtctctaaaatcaaggaagcaacttcatgtgggttgcagttgaagagagactgcacctgtgcctgaggaggccttggtgtatggggcctaggaaaggatgatatgttgagccccactgtggcgctgccctgggaacttttcagaaacacttttgaatgaacattatttttggttggcactgtgacctgagaacttaacctcagggtaagctgcctccagaacctcttaacagacccctctggactgcatccagtgtcccatgggcaccatggggacattgatgagggcagccctgcatctggtagaatggtctccacattcttgatggctccacagtggggcttccttcattgtggtgtcctgactccccctcttcagagggtgaggaagccctgcttttcctgcattagtgctggctgcttccctcctgtaatttatggtctgacacagcctggtgacttaaaaaacctgaatgtaccctgcactctgacacctccatgcctttgatcctgctgggccctctgcctagaatgtcctttccatccatttctgtctattaaattttgccccccaacactcagcctatataag

SEQ ID NO: 548394 - DNA, 533 bp, Homo sapiens
ctaccatgcccagccaactcatctatatttaatagtaattatcaataactaaaattccaaataatttccatcgtggtaataagtttgctttatatcatttcaatatttgtaaattggattcaacattttctcccttatgcaatgtaagatttatgttcacttcacttatatatattgtccacctaatcactattcaaaacaccagagttagatattgatttagatataaatatgataactaaaatttttatgtaaacatttgtatcatcagataatgatagatatacctgtatgacagattagagataaacagatagatagatagacagatcgaccaattgatctatactkctccttttgtccaaggagaccaaaaatttggacagttttgaaaagcgtatgttgcatgttttcccttcgttttgaaagtttatgctttcaataatcattactcttttaactgaagttagaatttgaaaaataggatgtaagtaacttaccaagactcaaaatgctaccagagggcataatgt

SEQ ID NO: 548395 - DNA, 523 bp, Homo sapiens
gagagttttctcaytaaaaaaaaaacaggattaaatgataaaatagtttcatttaccaccagggagttttcttagatttctgatatttaatttggcttaatggctatattgtgttaacattgctatgccaatgaatttttatactattgtagttaataaaagatagaatcctcccagcactttgggaggccgtggtgggtggatcacttgatatcaggagttcgagaccagcctggctaacatggcgaaacccacctctaataaaaatacaaaaattagccaggtatggtggcagatgcctgtaatcccagctaatcgggaggctgaggtaggagaatagcttgaactcaggaggcggaggttgcagtgagctaagatcgtgcttctacactccagcctaggcaacagagtgagactccgtctcaacaaaaaagatagaatccgtaatttggtctattaaaaggcactgaccaacacagaaaattgttttatctgttcttaaaaattcataaaacaaatggta

SEQ ID NO: 548396 - DNA, 584 bp, Homo sapiens
ttgataatataacagaataccatgcacacattaaaattaataaatatactaagatggatattgggtgaatgagacagcccatcttgaaggcacaatgtctcatttgtcaaatctgatcaagccgaaagacctaactatatattgcctatagagaaatgcaaatataaagtcatagattaaaaataaaataatgaaaggtgatatataatacaaacattaactacataaaaagaggaggttatattaataatagccaaaatacattcaaggaatattaccaggtataaagaaatttattccatattgaaaaagggggttgttagttcaaaggaacagaaaaatcttaaatgtgctttgcagctaataacagagcttcaaaatacatkaagcaaaactgatagactgaaaatgccccattatagtcagagcttccaaaactacctcacaatgctggttgaacaagtagacataaattctataagaatgtagaagactagaacaacacctaccagaaatttatagaccactccatccaaaaacagttcaatacattcctctaaagttcacagagaccatttactgag

SEQ ID NO: 548397 - DNA, 584 bp, Homo sapiens
ttgataatataacagaataccatgcacacattaaaattaataaatatactaagatggatattgggtgaatgagacagcccatcttgaaggcacaatgtctcatttgtcaaatctgatcaagccgaaagacctaactatatattgcctatagagaaatgcaaatataaagtcatagattaaaaataaaataatgaaaggtgatatataatacaaacattaactacataaaaagaggaggttatattaataatagccaaaatacattcaaggaatattaccaggtataaagaaatttattccatattgaaaaagggggttgttagttcaaaggaacagaaaaatcttaaatgtgctttgcagctaataacagagcttcaaaatacatgaagcaaaactgatagamtgaaaatgccccattatagtcagagcttccaaaactacctcacaatgctggttgaacaagtagacataaattctataagaatgtagaagactagaacaacacctaccagaaatttatagaccactccatccaaaaacagttcaatacattcctctaaagttcacagagaccatttactgag

SEQ ID NO: 548398 - DNA, 593 bp, Homo sapiens
gaactaccaaaaagttgcaagggcaaccacacttgaagaaaaacgtgttagtaacatatagtttaaagctttttttatttataaaattatattccaaattgttaaattaattttattatgcagacttgatgtctgaaaacttcttaaaatagagaagttcacaatattagatactgtgtctttcttcatataatgacaaaagacttcagttctgaaattttaggaaaagttttgctttaagattaattaaaacataagattgcataagcagagagcatgtaggtacagctattctatggaaaacttwttttgtgattagaactgttaggaacatcttttgagaatattcaggctatatatgatgctgcaaatttattttcataattgctataactggcagggcaagcagatgatatgtttgtagctatctcgttgtaagcacatctccaggaataaaaaagggccttaagaagagggaggcaggtggcacagtaatcacatcatgaacacagatgcggtggcccctgagaaagagtcatgatgacagctgcattctttgtttctatcgcctatgtaatctaatttcaaggaag

SEQ ID NO: 548399 - DNA, 593 bp, Homo sapiens
gaactaccaaaaagttgcaagggcaaccacacttgaagaaaaacgtgttagtaacatatagtttaaagctttttttatttataaaattatattccaaattgttaaattaattttattatgcagacttgatgtctgaaaacttcttaaaatagagaagttcacaatattagatactgtgtctttcttcatataatgacaaaagacttcagttctgaaattttaggaaaagttttgctttaagattaattaaaacataagattgcataagcagagagcatgtaggtacagctattctatggaaaactttttttgtkattagaactgttaggaacatcttttgagaatattcaggctatatatgatgctgcaaatttattttcataattgctataactggcagggcaagcagatgatatgtttgtagctatctcgttgtaagcacatctccaggaataaaaaagggccttaagaagagggaggcaggtggcacagtaatcacatcatgaacacagatgcggtggcccctgagaaagagtcatgatgacagctgcattctttgtttctatcgcctatgtaatctaatttcaaggaag

SEQ ID NO: 548400 - DNA, 593 bp, Homo sapiens
gaactaccaaaaagttgcaagggcaaccacacttgaagaaaaacgtgttagtaacatatagtttaaagctttttttatttataaaattatattccaaattgttaaattaattttattatgcagacttgatgtctgaaaacttcttaaaatagagaagttcacaatattagatactgtgtctttcttcatataatgacaaaagacttcagttctgaaattttaggaaaagttttgctttaagattaattaaaacataagattgcataagcagagagcatgtaggtacagctattctatggaaaactttttttgtgattagaactgttaggaacatcttttgakaatattcaggctatatatgatgctgcaaatttattttcataattgctataactggcagggcaagcagatgatatgtttgtagctatctcgttgtaagcacatctccaggaataaaaaagggccttaagaagagggaggcaggtggcacagtaatcacatcatgaacacagatgcggtggcccctgagaaagagtcatgatgacagctgcattctttgtttctatcgcctatgtaatctaatttcaaggaag

SEQ ID NO: 548401 - DNA, 2450 bp, Homo sapiens
tcccagcactttgagaggccgaggtgggtggatcatgaggtcaggagttcaagaccatcctggccaacatagtgaaatcccatctctactgaaaataaaaaaatttgctgggcgtggtggcgcatgcctgtattcccagctacttgggaggctgaggcaggagagttgtttgaacctgggaggcagaagttgcagtgagctgagatggtgccattgcactccagcctggatgacagagctagactccatctcaaaaaaaaaaaaaattatttttaaattttgtcatggaatgatatttgagaattcttaaaaggagtatattgcccagtagttaagagtagttacggtattcttgacttcacttatgtctcagtagcctaagatttgacctctacttgtgagaattatattagatggtctatgtaaagcttgaagcatattttctgggcaaaatttaagaaattttctaggtttcaaaatccaaatttaacaatgctgttcagaaataatcagtgtgttttattattaataacatatgcaagcctactkaaatcaccatagttctttagtaagcatcagaagcctggagtacggatgtatatttttctcctgtctttattataaaaccccttagaaagcagtgacattgactagatcagggattaaacactataatctacttgcagtgggagtcattaaaatgttgacccaacttttcacagagttgcaacaagaactgtgaagtgtgtctttgctatttaaagtgggaatgcactcctgtgatgtagcaatgttcattggagaaaagcacaactgggactggcctaggagaagaaaacattgaagcagtcatttacagagcatatggggaacaaaaattactcctttagttatggaaatattcccatatttatgccccagttttcaaaatccaacaattggaaaattattcttttaggctaaggcaatttgtctccagcaaatacttgcttactggaagttgcgtattaaaggaagtatcatgcattaaagtttctgacaatacattaaaaaattagcacaaactaatactgatagctgtttcgagggataggtgaatcatagaaagggggacgttggaaagtccaacatagccaggaggagagaagagaggtagtatggagtaccttagatgaatagtgtaaaaattaaattatagaaataaacgttaaacattcagttcaatgcttactacaaggaaagtacttaataaaatatagtagaaataatagcagggatgtttataataattatcattatttttgaagtgttcataatggattatccaggaagatacagatgtggattcacaacccaaaaccataagccaagggtcttgccatatttacctgcaggtcaatcatttatctgtggcttgctctctaagcacgacttgtttcccaaatacctcaaagactgaactcttcccaactgtcatatccatcctacattccccacaggtctggcaatagaccccaagaaaatcttccctagctgaccacatttctagcactctttgaaataagaaagcaagtttagttttaagatgtttttccttctacgaagaaaaaggaaacgactttttaaaaacttaacaaaactggtataaagatttaatagttttctagttgtcccttggtatccatagaagattggttccaggacccccgctgataccaaaatccatggatgttcaaatccctgagttaaaatggcatgatatttgtatacaatctaaacacatcctcccatatactttaaatcatcttagattacttatgatgcctaatacaatataaatgctatgtaactagttgttatactgtatcactttctgaatttgtattatttgtattgttttttattaatattttggatccgctattggttgaatccaagaatatggaacccacagaaaaagagggctagctgtaaatctaaaatatgtatccaattgtaaaacaagaaataaggatatatagtaattattagagtaatcctggaaaactgtataaatcctggaaaacaggtataattattattagagtaatactggaaaaggcaagagaataaacagaaaaagaatagaaataaaaataattcagaaagagagagcatgaaggagttttttggtattagtaacctgttctatatcttggttgtggtgctgattacataatctatatatatgctaaaattaatggattgtttaccagaacaaagaaaaggtccattttactttaagataattttataaagtagaattttaaaaagtaaacccagataattcagtacaagggcaaatttcaaaatgagaaaataaattcaataaccttcttacaaattattcaacaatatattgaacttaaatatattgaacttaaatatatttaattgttaaataaatatat

SEQ ID NO: 548402 - DNA, 864 bp, Homo sapiens
atagccgtaagtcacatgtggctattgagcacttgaaatgcgactagcgctactaagatactgaatattatattttgtttaattttaattaatttaacccaacctatctatatgtgcttagtggctattatattggacagcacagcttgggacgtatgctagtctactttttgttctcacatgtaaggctcagcccagctgacatagttccctctatcttaaatgttctttctaatttgttatcttgaaaactgcaactttttcttcaaaaaattacttcagtgaagccacactttctctggaattttccttgccaaacttccatcagtttatatgttttatgaatgaattatttacacatgaaatgaaaggaatcctctcctctccacaaggttctcttcaacactgtgtgcctgttcaatgtttcacaggccacataatatgatgtctgaagactgcctgggatgctaggcataggccacataggtctggctttgtgatacctgtctgtttccacaagaacagttcctttaaaaatacattttatgtttttataaaaaataaaaatattgttatttaaaaataataaaatatcttatgtatatttgttataaaaatamcctacttctgaaaaagcatgagaaattattcatctaattgttaattccctcacagactccttgtttaattttgatctttatcttggactattatttatattgtatcttattatgtttgtatttgcgatgcattttttcacaactggatgtaatcatccctgaaagcaaagaacacattctatctcttttttgtctccataatgtctcgtccatagctggataaataaatttctataatttcaca

SEQ ID NO: 548403 - DNA, 864 bp, Homo sapiens
atagccgtaagtcacatgtggctattgagcacttgaaatgcgactagcgctactaagatactgaatattatattttgtttaattttaattaatttaacccaacctatctatatgtgcttagtggctattatattggacagcacagcttgggacgtatgctagtctactttttgttctcacatgtaaggctcagcccagctgacatagttccctctatcttaaatgttctttctaatttgttatcttgaaaactgcaactttttcttcaaaaaattacttcagtgaagccacactttctctggaattttccttgccaaacttccatcagtttatatgttttatgaatgaattatttacacatgaaatgaaaggaatcctctcctctccacaaggttctcttcaacactgtgtgcctgttcaatgtttcacaggccacataatatgatgtctgaagactgcctgggatgctaggcataggccacataggtctggctttgtgatacctgtctgtttccacaagaacagttcctttaaaaatacattttatgtttttataaaaaataaaaatattgttatttaaaaataataaaatatcttatgtatatttgttataaaaataacctacttctgaaaaagcatgagaaattattcatctaattgttaattccctcacagactccttgtttaattttgatctttatcttggamtattatttatattgtatcttattatgtttgtatttgcgatgcattttttcacaactggatgtaatcatccctgaaagcaaagaacacattctatctcttttttgtctccataatgtctcgtccatagctggataaataaatttctataatttcaca

SEQ ID NO: 548404 - DNA, 590 bp, Homo sapiens
atgcccagtctcttttaagagtttcatagttttagctagctcttctctttatgtttgatccattttgaataatttttgtatgtggtgttagataagagtctaacattcttttgcatgcgaatatccagttttcccagtatcatttgttgaatacctgatttctaaaaccctaatcagttaggaattttgttcagcttgaagaaataaaaactgactacagtagcctaaacatataagtttttactatttcacataaaggaagtccatggggagactgttctcagctgctataatatgaagggtccatggagatctgggctccttgtttctcttctgccagacatggcttccattctaggcccactatcgttgtgtgagctccagccaacacctgggaattccaggcagcaggaaggaggargggggaagggataaaacaatgtcactctttttaaagggcctaagtcttgaactgtaggagttcagtcaggatggtgggaaaacttacagaaagatgcaaaccttcttagaaggctaggttttgtaaaagcttcaggaaaaaatgtggctgaaggcagctgaattctctc

SEQ ID NO: 548405 - DNA, 1231 bp, Homo sapiens
gatgagtacttaatagaagcctttgtcagcaaggccccttggtctagcagaggaaggttaaggttagaaaatagaaggcgggggttcttatgcagctacttgtggtcttaggtgaaggtacttaacttatgcgtacttcagcttttcctgtttgtaaaacaaagggaatacagttttgccagagttcttaaaaggactacttaagatgacatttattaaagatgacaaattttttaagtgttttagaagtaaaagtgctgtcatctttagatgagagaagatacttgggacctgagatatttaattattttccttttccctgttctgacaagtttagtttgcttattctgtagaaagtctggagtaagtgaccactgggctttggatgatcatcatgcccttcacttaactaggaaggttgtgaggaatctaaattatcagaagaaattggatgtgagtacgatatgttcttatatcttttattttcctgaaatgcattttgactcactgcaccttgaaatcatgtctttaaacakgttaacatgatctgtatttctgcaggtcaccattgaaccttctgaagagcctttatttcctgctgatgaattgtatggaatagttggtgctaaccttaagaggagctttgatgtccgagaggtatgtgaaagtggaactgtgagctttatgaccagctgtgagtctctttgtatgtgtatctatttgcaaagctaaagtttgttaagatatgttcatgcctagaaatagatgtggatctcagtaaggagtgacatatgtggcaatgatacctttccatactgtggatatcattggcacagagtaaatactaaaagaggggagtgggggacctcaatgattggaaagttttcattgcgcaaaaagtgtgatttggtcataagtaagactccatgtcctgtgcacattatgaatgatgtaaggcaacttaacaattgtcagctatttcttttcattgttcttattttgggaaatgggtgaaatgtcagtaagttgttggaagaaaaaacatacccttttagatcaatatgacatttgcaatgattagacctgattacagttgaaaatgttgctatggttacacattgtcgacatagtgttctgtaatttagatggacaacttttagggtttagagcatatagtcttttattttgttcagtatccatagttggcagagtagtttttaaattaggaaat

SEQ ID NO: 548406 - DNA, 926 bp, Homo sapiens
gatggaactggagtttattaagtgaaataagccagacacagaaagacaaacttggcatgttctcacttatttgtgggagctaaaaactacaattaaactcatggagacagagagaaggatggataccagaggctgagaaaggcagtgggggtgggggaaagtggggctggctaatggatacaaataaatacaaagagagactaagacccagtatttgatagcccaacacagtgactaccgcaataaataatttaattatacattttaaaataactaagagttaaactgtttgtaacagggataaatgctggaggtgataaataccccatttaccctgatgtccttattacttattgcatgcctgtatcaaagtatctcatgtaacctataaatacatacttactcataacaactaaaaattaaaaattataccactacctaaatttgaaagtggaagaatctcaaattatgagcttgggttctcccttmagggaaaaaaaaaaaaaaaaaaagtaaaggcaatggaggggtgcacaacagggactaacacatcaatgacagccaagcagtgttaaatacttagaaaggggaaatttacataatccacatatttacatattcatgaatacttactgaaggctttggtcctcgtttctttttctctgccttctccttttcttctagttccatgttttctctttcaatcaaagtaattaaggtattacatctcctctggagctcctaaattataaacaaacatggtacacgcactttccatccacaagtttcatgatttcaattttaaaacaaggtatgttttaataggataatatataaaaccactaatacacccctgatttaaaaaaaaaacaactgattttcatatacaattcatgctatgaagattaaaggcaagatatttgtaa

SEQ ID NO: 548407 - DNA, 926 bp, Homo sapiens
gatggaactggagtttattaagtgaaataagccagacacagaaagacaaacttggcatgttctcacttatttgtgggagctaaaaactacaattaaactcatggagacagagagaaggatggataccagaggctgagaaaggcagtgggggtgggggaaagtggggctggctaatggatacaaataaatacaaagagagactaagacccagtatttgatagcccaacacagtgactaccgcaataaataatttaattatacattttaaaataactaagagttaaactgtttgtaacagggataaatgctggaggtgataaataccccatttaccctgatgtccttattacttattgcatgcctgtatcaaagtatctcatgtaacctataaatacatacttactcataacaactaaaaattaaaaattataccactacctaaatttgaaagtggaagaatctcaaattatgagcttgggttctcccttaaggraaaaaaaaaaaaaaaaaaagtaaaggcaatggaggggtgcacaacagggactaacacatcaatgacagccaagcagtgttaaatacttagaaaggggaaatttacataatccacatatttacatattcatgaatacttactgaaggctttggtcctcgtttctttttctctgccttctccttttcttctagttccatgttttctctttcaatcaaagtaattaaggtattacatctcctctggagctcctaaattataaacaaacatggtacacgcactttccatccacaagtttcatgatttcaattttaaaacaaggtatgttttaataggataatatataaaaccactaatacacccctgatttaaaaaaaaaacaactgattttcatatacaattcatgctatgaagattaaaggcaagatatttgtaa

SEQ ID NO: 548408 - DNA, 452 bp, Homo sapiens
agttcccccaactccccaatatacacacttccccccacagccccgtcttctgctgtcgctgtaaggtggtgtttgagaagcccaggctgttcggcctgaacacacttcctcttggagtgtgcaaggccccctcagcaccacccctacagcaccacccaaggccctgtgcgagaagctgaaggcactccctctgcctccttcctctgcactccctcctcggcttcaccaccctgcgccaccaagtttccagggcttgactgaaacagggactcctcagggtcacactcagaactcctgtgatcacacataagcttatcctgagacacacgtgtttacacgtgtgtataacttacgctgatattgcctgtgtgtaactctgcatgtgcatgctgttaagtgtgcatacactcaccccratactgcagatgtataactagtatgtgcatattatg

SEQ ID NO: 548409 - DNA, 1059 bp, Homo sapiens
gctactgagatgtagttctataaaagtctcttagagtttgtcattttgttgtgtcttacatcacatacctgtcctgttccaggctatttttcaaagatttttgtacacaaataacctggaaaaagggtagtagtttttctcttcaggtgaatggcagataaattactcaatcaatataataaagacaatttttctctgtgaggcaaaggttggacaggtttgcatgtaacctactttaagaagattgaggtttcttagtcttgagtctgctcagctgtgacacaaatcttccccatgtgcaatgtccatctgagccttttgaaatccctctaaaaaatgtagtatggacaaggagaactaatacaaaaatgaggcttttgcctccaggtagacagtaaatagtagktttttttttcatacttcagtgtctcatgccttctaccagcatccatgaaaatggaaggttaataggttcgtttacaaataggatgaaatcttagatccttcacaattatttaattttggagatgacaatgggatgctgagataaacgcaactttctgaaaggggaaaatacacaaatacttgaagagcttgcaagggttatgagaagttcccctaggactaacagcaacttctctcagccaagtggttagtttggtgaaacaagggatcaagactctgctgtctgctaatgagactgattcttgagaggattataacaatgagcctgagagctttgcatgttcatttttctcctgctggaaagatcaaggagctcttaaaattaatgttgagggttggatgagtccaaagcactagaagttcacctctgtgagatgaatgcacatatcacaaagaagtttctcagaatgcatctgtctagtttttatgtgaagatatttccttttgcaccataggaggcaaaacgctccaaatatacacttgcagatggtacaaaaagagtgtttcaaaactactcgaacaaaagaaatgttcaactctgtgagatgagtgcacacatcacagagaagtttctcagaatgcttctgtctagtt

SEQ ID NO: 548410 - DNA, 1059 bp, Homo sapiens
gctactgagatgtagttctataaaagtctcttagagtttgtcattttgttgtgtcttacatcacatacctgtcctgttccaggctatttttcaaagatttttgtacacaaataacctggaaaaagggtagtagtttttctcttcaggtgaatggcagataaattactcaatcaatataataaagacaatttttctctgtgaggcaaaggttggacaggtttgcatgtaacctactttaagaagattgaggtttcttagtcttgagtctgctcagctgtgacacaaatcttccccatgtgcaatgtccatctgagccttttgaaatccctctaaaaaatgtagtatggacaaggagaactaatacaaaaatgaggcttttgcctccaggtagacagtaaatagtaggtttttttttcatacttcagtgtctcatgccttctaccagcatccatgaaaatggaaggttaataggttcgtttacaaataggatgaaatcttagatccttcacaattatttaattttggagatgacaatgggatgctgagataaacrcaactttctgaaaggggaaaatacacaaatacttgaagagcttgcaagggttatgagaagttcccctaggactaacagcaacttctctcagccaagtggttagtttggtgaaacaagggatcaagactctgctgtctgctaatgagactgattcttgagaggattataacaatgagcctgagagctttgcatgttcatttttctcctgctggaaagatcaaggagctcttaaaattaatgttgagggttggatgagtccaaagcactagaagttcacctctgtgagatgaatgcacatatcacaaagaagtttctcagaatgcatctgtctagtttttatgtgaagatatttccttttgcaccataggaggcaaaacgctccaaatatacacttgcagatggtacaaaaagagtgtttcaaaactactcgaacaaaagaaatgttcaactctgtgagatgagtgcacacatcacagagaagtttctcagaatgcttctgtctagtt

SEQ ID NO: 548411 - DNA, 531 bp, Homo sapiens
tacccattaaattcaaaggggaaaggtcatttctaataaaatgtgagcatcatcatgaaaagacaacacaaaacaaaaacaaaaaataactctagcatttccctaaatcaatgtagttcaacttcctaaactccttcccttagtttagcttgaccttccaaccaacagttatctaagggaattgcagcattgattgggtcttaaacagtagtatttcctgaattttrgcattttcttcactagcaaacataaccaaaaaacataactaatattttcatatttgtcaccagacatagcaataattttatgtcacagtagagatatatctcctctcctcagaatgaagattgaaatccatgtctcctcaaacaaaaatcagaatttttcttttactcaacaaaaattgtcttaacaaccaccatgattcaagtatcttcaccaaggtatagagataggtttattcatccctcgatcttcaaggctcagtcctgggtaaggataagtttgttaaagcaacttttttttttttaa

SEQ ID NO: 548412 - DNA, 531 bp, Homo sapiens
tacccattaaattcaaaggggaaaggtcatttctaataaaatgtgagcatcatcatgaaaagacaacacaaaacaaaaacaaaaaataactctagcatttccctaaatcaatgtagttcaacttcctaaactccttcccttagtttagcttgaccttccaaccaacagttatctaagggaattgcagcattgattgggtcttaaacagtagtatttcctgaattttagcattttcttcactagcaaacataaccaaaaaacataactaatattttcatatttgtcaccagacatagcaataattttatgtcacagtagagatatatctcctctcctcagaatgaagattgaaatccatgtctcctcaaacaaaaatcagaatttttcttttactcaacaaaaattgtcttaacaaccaccatgattcaagtatcttcaccaaggtatagagataggtttattcatccctcgatcttcaaggctcagtcctgggtaaggataagtttgttaaagcaamttttttttttttaa

SEQ ID NO: 548413 - DNA, 634 bp, Homo sapiens
attagcatatattacattgtcagaaaaactttaagtgcctagtaaataaacaaaaaaatagaaaaaaattaaccaggaaaaatgcaagttaaacaattctataatcaagaatttaattaagaaatgaaattttattcttagaaatttgaaatatatatatttctaaactatgaatatcaaaggcccacaaatttttagcaaaatgagtttactcctagctctgaaaattagtattagcattttggaaaaaatataaatccagatatttttgacatgatagacataaaaattactgtaaagaaactttatactagtacgtatatgaaatgtctttttaaataaaagaaaatataaaataaactatctcattttagtagtataggtagaaaaagtattatatatggatataaggtaaacatgcataaattaaaaattataattatatgaaatatgaaaataaatttatttgaatggaaaatgcctggaaagcggaaaataaaaactataaaaycactatgctgacaactacttaaatagctataagatggcatctaggtaaaagataagtgataaaaaggtttttttcttgtaaaccaggatttttttacttttatatattttttaagtgtttgca

SEQ ID NO: 548414 - DNA, 394 bp, Homo sapiens
atttttgaacaagcttgagattgctgtaaattacgaggttgaaattaacaaagagacatatatcaaaaaagatcatacatatgcatgtaaacttaaaaaataagtaagtaacagcaactaaagttaattaattttaacaagcatggtttttaataagtggttgaaacccagaaaattttagactaaacatttttcctatttccataaagttacattttaaaaatctttacatatagcttaattggactttttatttaaaaattagtgggtaatgatatatcatctcttaacaagtgccttaaatcaggggtccccaaaccccaggccataagcagataccagttcatgacctgttaggaamcaggccaccacacaggaagtgagcagcgaagct

SEQ ID NO: 548415 - DNA, 554 bp, Homo sapiens
ggtgaagatggtgtgagtcattgtcacagctacaaatctattgaaacaattgtggaatgaagagttactcatgctctttcatttgcgacctagttgaacgagaggatggaaagttmattcctttagaaaatattgatggatcacagatggtttaccaggcactattccacagagtggagatttctggagagaaggtgttcagaaaaggagaacatcaagtgaaaggaaaaggtgtcaatggctgttgtgagatcttagttcttgtcttcttagtttagaagaatttaaacaagagacacacaacttagatcccatttgtcatttttggcttttgtttcaattgcttttggcatttttgtcatgaagtctttgcccatgcttatgtcctgaatggtattgccgaggttttattctaggcttttatggtttggggttttacatttaagtctttaatccatcttgagttaatttttgtacaagatgtgaggaagggatccagtttcagttttctgcatatggccagccagttttcccagcaccatttactgaatagg

SEQ ID NO: 548416 - DNA, 602 bp, Homo sapiens
tcaaggttagtcttcctgcgatgtcttttccggaggactaaattccctgtttggaaattatgaagaggccgtgatggagtatttggagggaaggcagctcacacttgttagtgacaagcataagtgtacttagtccttgataatatctgagaatgtcgattgtaatagattagagtcctcaagggcccaataggagtagaatccttgtgagtctttgagtgattatttcataagaagattattgatatgtgctctggtaggaagagtaatggccccccmctaagatgtctacatctttatccctggaacctgtgaatatagcaccttttatggaaaaaggaactttttgtgattaagaatcttgagatagggagatttatcttggattatcctggtggacccagtatcatcacaagtttccttataagatggaggcaagaacgttagagtcagagaaatatgtaaatatagaagcagaggccgggccaggcacagtggctcacacctgtaatcccaaagctttgggaggccgagtgggggaggatcgcttgaggccaggactttgagaccagcctgggcaacacgtttctacaaaaaaaaaa

SEQ ID NO: 548417 - DNA, 630 bp, Homo sapiens
tggmttatcattgtctttgttagaatgtgtgtatccccttctattcctcctcagcttagtaccatagttaagagcctgaattctggagtcaggctgccatgattagataccagctctcctacttaaaagctttgtgaccataagcaagttacttaacctctctgtgcctcagttgccttatctgtaaaatgggaaatataatagtacctacctcataaacttgaaattaaatgagtttatatatgtaaaatacccagaataatgccaggcactataagcaccatatgaatatgatctattatgatgatgttgatgataataaagaacatcactattcagaagatattccccaatgtttatgcataagaaatccataccaaatcatatccagaatatataaatatttgcattatgagcagagaaaacctaaaacaaactgtaggtctcttcagtgttcatttatggtatggaaaaatgcatttctcaagtaaatcatcttggaaaagtcctctttaaagctacgaaaattaaaataaattctactctgcctagtgtgtatttgagatatttggaagacaatgtattcttgatactgattcaggttacactctggactgaggaatggcagaa

SEQ ID NO: 548418 - DNA, 623 bp, Homo sapiens
agtatttgaaactgagtgccaggtataggggaaccctgtactatcttaatctttctatatcaaactgttctaaaattaaaagtctactttttaaaaagtaggtagcatgatctctacctcatggamtgtacttaataaatgtcaactgttattatcttctacctgacaaatactaagtcaccagggatttctatggtcaaagagaagtcagataattattggatgcttaaatagaatattgacctgtaattaacctgaataattctagatctaaaaagaaatgactaaagcatagattagccagattaccagtctctcattttgcttcaagagccaaccatagaataatatgagagtcagaatataaggtagaaaaaatacaaatcctaagtgattttctctcttaacctataagcgaaaatgaacaatattgcctactaccaaaagccttgtattgctttcaaggtgatgtcatctagtccacttttgaaagcttactgcatagtcctcacaaggtcatttatatttcaatagtaaagacccttaaggtataaaagcatgcatgcaatattactaaggctcagagaggccgtttaaaaatattggaggagataagagatgtg

SEQ ID NO: 548419 - DNA, 623 bp, Homo sapiens
agtatttgaaactgagtgccaggtataggggaaccctgtactatcttaatctttctatatcaaactgttctaaaattaaaagtctactttttaaaaagtaggtagcatgatctctacctcatggaatgtacttaataaatgtcaactgttattatcttctacctgacaaatactaagtcaccagggatttctatggtcaaagagaagtcagataattattggatgcttaaatagaatattgacctgtaattaacctgaataattctagatctaaaaagaaatgactaaakcatagattagccagattaccagtctctcattttgcttcaagagccaaccatagaataatatgagagtcagaatataaggtagaaaaaatacaaatcctaagtgattttctctcttaacctataagcgaaaatgaacaatattgcctactaccaaaagccttgtattgctttcaaggtgatgtcatctagtccacttttgaaagcttactgcatagtcctcacaaggtcatttatatttcaatagtaaagacccttaaggtataaaagcatgcatgcaatattactaaggctcagagaggccgtttaaaaatattggaggagataagagatgtg

SEQ ID NO: 548420 - DNA, 1540 bp, Homo sapiens
tggagaataaggcaaggattcagttcctagaacaagtgaggcatcaggactgggcagaaccagtaactatctcaattgtatatgttatctttgaaacattaataggtctccccttcttttcactaaaggcagaaccagtgaagattgttgagaagagcagttactttctccagccatgaaggttatagccatacgggggcaaggagccaagcagattttaactgctgaaggaaaactaaaaactgtttaccaactagactgtgggattcttaaaggcaaggaaaatattccatttttctctacttttctttctgttttttgggggggtagagggaagggggatacctgggaagtatctggcacatagtaggtactcaaagaaaatgtctttttaatcaataaataaatgattgaggattctgccagtaatgggaatgacttataataatggaataatggataaaactgagagtggcgatggccagcttttcttctcctggggaccttttatttaactgaggaattggtaaagaatcaatagccttaaaattgagtattcttgttcattccattcaatatcttgatttggaaaaatacactgagaaactcccattaagtgcctgctgaaagtaagtatagtaaaaccacagtgttctatttctgaccagtttcatcataactctgagtatcaggaattctcgtcccttattaaatatcatcttcactgacaaaacttgttattaagcacagtgttttatgcccatgctatttttgccttgactatatttgattttttttttttttttgaggcagggtcttgctgtgtcacccaggctggagtacagtggtgtgatcttggttcactgcagcctccacctcctgggatcaagtgatcctctcacctttcagcttcccaagtagctgggactacaggtgtgtaccactatgcccagctaatttttgtattttttgtattgactgggtttcgccatgttgccaaggttggtctcaaactcatgggctcaagcaatccgcccagagtgctagaattataggtgtgagctaccgcacctagcatgtatttaattattaatccatctttagattctgtgtttggtcccaaggcaacttcaataaatgactaattttgaagtcaaaggcataaacaaatgactgaagataactcacactgagagatagcaggaataacacaaatctacaagtgacccccaaattactctcagtttaaaatagctgccctaccccactccactggtataattaggctgggaaaactctgtcatttkcatatttttctcttttctccatggtacagctcttctctaagtgagcgactgtagtaaaatatgggagagaaagcaacagaatagagaaaaacagaaataattaacactagatcattttccaaatatttatttaagtgttatctatgacccaatatatgtaatatatacttgcggcatctgatgtgagtgctgaatggcagggatagtggagccaaagtatcatctctaagagc

SEQ ID NO: 548421 - DNA, 1540 bp, Homo sapiens
tggagaataaggcaaggattcagttcctagaacaagtgaggcatcaggactgggcagaaccagtaactatctcaattgtatatgttatctttgaaacattaataggtctccccttcttttcactaaaggcagaaccagtgaagattgttgagaagagcagttactttctccagccatgaaggttatagccatacgggggcaaggagccaagcagattttaactgctgaaggaaaactaaaaactgtttaccaactagactgtgggattcttaaaggcaaggaaaatattccatttttctctacttttctttctgttttttgggggggtagagggaagggggatacctgggaagtatctggcacatagtaggtactcaaagaaaatgtctttttaatcaataaataaatgattgaggattctgccagtaatgggaatgacttataataatggaataatggataaaactgagagtggcgatggccagcttttcttctcctggggaccttttatttaactgaggaattggtaaagaatcaatagccttaaaattgagtattcttgttcattccattcaatatcttgatttggaaaaatacactgagaaactcccattaagtgcctgctgaaagtaagtatagtaaaaccacagtgttctatttctgaccagtttcatcataactctgagtatcaggaattctcgtcccttattaaatatcatcttcactgacaaaacttgttattaagcacagtgttttatgcccatgctatttttgccttgactatatttgattttttttttttttttgaggcagggtcttgctgtgtcacccaggctggagtacagtggtgtgatcttggttcactgcagcctccacctcctgggatcaagtgatcctctcacctttcagcttcccaagtagctgggactacaggtgtgtaccactatgcccagctaatttttgtattttttgtattgactgggtttcgccatgttgccaaggttggtctcaaactcatgggctcaagcaatccgcccagagtgctagaattataggtgtgagctaccgcacctagcatgtatttaattattaatccatctttagattctgtgtttggtcccaaggcaacttcaataaatgactaattttgaagtcaaaggcataaacaaatgactgaagataactcacactgagagatagcaggaataacacaaatctacaagtgacccccaaattactctcagtttaaaatagctgccctaccccactccactggtataattaggctgggaaaactctgtcattttcatrtttttctcttttctccatggtacagctcttctctaagtgagcgactgtagtaaaatatgggagagaaagcaacagaatagagaaaaacagaaataattaacactagatcattttccaaatatttatttaagtgttatctatgacccaatatatgtaatatatacttgcggcatctgatgtgagtgctgaatggcagggatagtggagccaaagtatcatctctaagagc

SEQ ID NO: 548422 - DNA, 638 bp, Homo sapiens
tgggggagaggggacctgcagagggagccatgaagccaattttctttctttctgttccagggccctggttttgctggacctcctgtaagtcctcagggatggggcaggatccccagaactcccagggaaggaggggacaacagaaaggcttcgagggaatggccaccatgggaaggagccagcttgctgtgatagtgtcaggaataagtggacctgccagagacccagggccagcccactctgggcctgtccactggctctgcaattctctggtccttaaagcctcagtctgtcagtctctctggggttggcaaaaaaaaaaaaaaaagtaaaagtggagaaacgggctttgggtgcctgtctctaccttcgtgcccagggtatctgaccctctgaggcatcctgaccatcamctctctgctccccaggggcctcctggacctgttggcctccctggtgagattggaatccgaggccccaaggtgagcctcagccaccctctgttcactgcctcctgccttctatctccaagctggcaagctgggtggtctttctggaagttcctgggcctgctcctggccactgggaaactcctccaggtctggggcagaaacccctcctatgagcccacccggcac

SEQ ID NO: 548423 - DNA, 1231 bp, Homo sapiens
catattttcagtaagacactgctttttaaaactcccatttctaatactgttatagttccaataacatatccctaagtcatagcaattatataactaccatttttatcaagttatttctatcaaataacttattcaaattcatattttcttttccaattacttacattgccagcctttaaaaataaatatcttttggactattgtctgtctgtctaatttcctcataatgttcaatatgacctgtacaatgtttgcaatgttttcccttgaatctaacgaaatagccagttttattgaaatgtatgttcttagactgtgagaggcaaacttccctactcattatagagcaagtttgttccttatctcaaggtgtctctaaggaatttttgaaaagaaccctgcctttgatttcatctaatcatgagaacagtaaatcagactaataaattcaagtatacttgtatttgaaatttttagtaccatatatatatacatataaatacatacacatatagtcaataaatctatgatagttttcaatgcaagtcataaattcccaaaagcaacaaaatgactcattaaataaggtaaggcggtctctttaccttctaccccaaagtatcctttctttttctccatcagagtttcctgctattctgtcacataacacacatacacaaacatacacacacacacacacacacacaatattccaaccgacgtataaaattctttctcacacttctgttcttcttcgttcttttgtctaaccaaccaacaaatccctattcatatttcaaaattcaatttgaatatcaccccttttttgaagcttccccttaatattgcaaggcgtttttcttctttattctcacagacccttttaccggtgtttattttagcacatacattactgatagaaatattttctacttgttctcatccctctcgactgtgaacttttgaaggacaggacaaatgatcaattactctttttatgtaaagcccagcaaaacactgggcacattaaagataatttaataattattataaacaaattcggaagagttatttctcaaaatggtrgatttcttaaactcttcatccttaggcatacctcaaactaatattttcatttacttgcaaactgtactcatttttaatcattatgccataaattaatagcttctctttcattataaagggttcttttaaaagtctttctatattc

SEQ ID NO: 548424 - DNA, 1032 bp, Homo sapiens
tttcttcatttagggtgatatttgctcagatttattataaatgatatgcttatcggaatagggaagttctcttctattttcaatttactgaaagttttatgttaaagagttatttattgtatcagatggcttttctatctaataagatgattatttgttttctcttttgatttgttaatgtgatgaacaatattcatggattttctgatggaaactattcttgtgtacctggaataaacccacttacggtatattgtctctttaaatatacatttgcattcaaattgcaattttgcttaagattttacacaggcctgagctttgtcttttttataacctcttttttttgttgttttgtgataagaattgtactaaccttgaatgagttgggaaatgtttcttcattttctattataaatatttggaggaacaaaaacatatgtcaatgtatacttttttgctggaatttcacaggaaatctattacagtggtcacattggagaggagggataaagacttaggggacagggagtgatgaagagggagagggaggcctctattttcattatagtctcctcaggctgtttgctttattcaccatgttcatgtattacattatttcttttggaaaaattttgaagaataaagtcttccatctatcacaaatacaaagtaaactctttccattaccccctttataacaatattacagtagccttcagggcatactcacagagctcaagtgaacccccctggtgctgacttgcaattcagatttttactctatcccttagaatttatttctctacacgagtgttttgctgcccagcatccagaggttcaccgtcctaggaactaaccyggctttccatctacaggaacccatactcctccactcttagtgcttatgggcaggcaaagccctctctagctttaactttgcccaatttaggccaaggggcagcacacttttggaattcatatagttagacagttaggagatgtagtagctggggctctggtaacattccc

SEQ ID NO: 548425 - DNA, 1032 bp, Homo sapiens
tttcttcatttagggtgatatttgctcagatttattataaatgatatgcttatcggaatagggaagttctcttctattttcaatttactgaaagttttatgttaaagagttatttattgtatcagatggcttttctatctaataagatgattatttgttttctcttttgatttgttaatgtgatgaacaatattcatggattttctgatggaaactattcttgtgtacctggaataaacccacttacggtatattgtctctttaaatatacatttgcattcaaattgcaattttgcttaagattttacacaggcctgagctttgtcttttttataacctcttttttttgttgttttgtgataagaattgtactaaccttgaatgagttgggaaatgtttcttcattttctattataaatatttggaggaacaaaaacatatgtcaatgtatacttttttgctggaatttcacaggaaatctattacagtggtcacattggagaggagggataaagacttaggggacagggagtgatgaagagggagagggaggcctctattttcattatagtctcctcaggctgtttgctttattcaccatgttcatgtattacattatttcttttggaaaaattttgaagaataaagtcttccatctatcacaaatacaaagtaaactctttccattaccccctttataacaatattacagtagccttcagggcatactcacagagctcaagtgaacccccctggtgctgacttgcaattcagatttttactctatcccttagaatttatttctctacacgagtgttttgctgcccagcatccagaggttcaccgtcctaggaactaacccggctttccatctacaggaacccatactcctccactcttagtgcttatgggcaggcaaagccctctctagctttaactttgcccaatttaggccaaggggcagcacacttttggaattcatayagttagacagttaggagatgtagtagctggggctctggtaacattccc

SEQ ID NO: 548426 - DNA, 1559 bp, Homo sapiens
tatttttaaaatgggtaatggatacaaattgcaataacactctttattttcctctttaaattctcttttgaggcttttttggcctgaataaattttaaattttttttgttctaagtatttgttgcccatattttttttttttttatgtatttatatctcaaattcttagttaaaacacctgagatgttctgacatcctttatgcttctaaatctgtttagtcattattatttaagggcctgtttccattttaggaatcaagttaaaacattttaggaaacataataaaaaaattcttaagaaaatatgtgtacatatatttctttcagtattttgagccatgttccaaccatagagagaaaatgatatttacattaagaactgattctgattaccagggatttaaggacaacctctgttggggtcaaaagagaaaatgaaatcctagtggggtaagaaatagcctccaactttgatatataggctctagtagcttcttttctactgattgtttttgatcctgcatagccacgcacagtcaattgcttactttttttatttgaagcttttaacaataaaaataaatttgtcaattgatatcttatgagatatgctccatatttacacaaagtactttcyacttggatgacatttctgtggacacacttaccagggaaacatgtccaattttagtaggtccaattagactttcatttttgactcatgagacttcatgtgcaaatagatgtcaatattaccagtcacataggtattcctgacagatatgaccctgactacaatttgtattacatatctttttattatcataggcagcagaaggaaaattttcaaggacaaggacacatctttgtgcccttttcaattataaggcagttattaacaaaggtgagcacataatcaagtaaaaggaatgcaatgcgtgagctttggaccatgcagtaccccaatagatagatgcctggaggtaggttatgccatgtttttgccagtgatcttatacttcaactgccattatggttacagatctttctaaaccacctctgaactatgacttatatatttcaggtcttttaataggcggttagcttttggggggcttgtcacataagttccacattttcttataacatcttagttgtattctatgtcttagtaaatcagtgacttatgattttacttctcaccggttttgttgtcaaggcaaatgtcttgtccttatacacaaaagtcatcagtctgcctctgtctgccgttggtttttcatccccactccactgctacctcctcataaagacactcacatgaattactagtttcatgcatttttatactttacataattctcacaacatagtatttctatacatcctagtcattaataggttgtatgaggtcactgtttctatcccaaagttgcctttctttattctattcattctttattctcttcaacatcttgtttataagctgtctgttcatacctgtctacttttgtagagtgtggttaattgatataaattataatatcgagctacattt

SEQ ID NO: 548427 - DNA, 1559 bp, Homo sapiens
tatttttaaaatgggtaatggatacaaattgcaataacactctttattttcctctttaaattctcttttgaggcttttttggcctgaataaattttaaattttttttgttctaagtatttgttgcccatattttttttttttttatgtatttatatctcaaattcttagttaaaacacctgagatgttctgacatcctttatgcttctaaatctgtttagtcattattatttaagggcctgtttccattttaggaatcaagttaaaacattttaggaaacataataaaaaaattcttaagaaaatatgtgtacatatatttctttcagtattttgagccatgttccaaccatagagagaaaatgatatttacattaagaactgattctgattaccagggatttaaggacaacctctgttggggtcaaaagagaaaatgaaatcctagtggggtaagaaatagcctccaactttgatatataggctctagtagcttcttttctactgattgtttttgatcctgcatagccacgcacagtcaattgcttactttttttatttgaagcttttaacaataaaaataaatttgtcaattgatatcttatgagatatgctccatatttacacaaagtactttctacttggatgacatttctgtggacacacttaccagggaaacatgtccaattttagtaggtccaattagactttcatttttgactcatgagacttcatgtgcaaatagatgtcaatattaccagtcacataggtattcctgacagatatgaccctgactacaatttgtattacatatctttttattatcataggcagcagaaggaaaattttcaaggacaaggacacatctttgtgcccttttcaattataaggcagttattaacaaaggtgagcacataatcaagtaaaaggaatgcaatgcgtgagctttggaccatgcagtaccccaatagatagatgcctggaggtaggttatgccatgtttttgccagtgatcttatacttcaactgccattatggttacagatctttctaaaccacctctgaactatgacttatatatttcaggtcttttaataggcggttagcttttggggggcttgtcacataagttccacattttcttataacatcttagttgtattctatgtcttagtaaatcagtgacttatgattttacttctcaccggttttgttgtcaaggcaaatgtcttgtccttatacacaaaagtcatcagtctgcctctgtctgccrttggtttttcatccccactccactgctacctcctcataaagacactcacatgaattactagtttcatgcatttttatactttacataattctcacaacatagtatttctatacatcctagtcattaataggttgtatgaggtcactgtttctatcccaaagttgcctttctttattctattcattctttattctcttcaacatcttgtttataagctgtctgttcatacctgtctacttttgtagagtgtggttaattgatataaattataatatcgagctacattt

SEQ ID NO: 548428 - DNA, 626 bp, Homo sapiens
actagtcatccctggctttttgtctttgtttttagctaagtccctttttctttttggtgtggttagatgtggtcatctgtcagtgctctggcttggggtcttctcttgcctacatcttctttgctttggctgttgcctctctgcaggtgatggctacgtttctctctactgcctgaatatgttgccagaatgtcatagaaactgaacgtgtgcttgycatcctcacactagctgttcttaccacctgcccgacttccatagaaactcggggtggacatgcgccaggccctcaccaatgaccctgtccattctcataggtgccttcccctgttctcctaaatccatcgatgctaagtttgtacctcagtcctggttctgaaacctgtttctctatcatcataaagaaatcatggaacctctgtgtactttggtttacttttttggtgggtttaaggaagattctgtgacttcattggtgatgacatggcattgggagatagggtccatttctgattttcagagtgaggaagcaggcatgtgtgttactgttttagagaattgtggcacctaccctgttcttcagctcttggtacctggccttgtaatgaacacgaatgatctttaaa

SEQ ID NO: 548429 - DNA, 612 bp, Homo sapiens
tcttttatttattaaacagattagtgtagaattggtgttattacttctttaaatgttttatagcattcccgaaattatctctacatagaatgttctttttgataagatttttaactacaaatttaatttctttaatagatataagactattcaagktatctatttcatcttgggtgaattttactttgctacatttttacttttcctacttttaaggaaatggctcatttttttcctaaattgttaaatttttatgtagcgagttgctggtataatataataattaagaacaattagaaactgacatttgaaaaatatcatgtacaatagttctcaaaaatatttgaatatctaacaaaacaaattcaggatctgtaagctaaaaactatgcaaagcggatgagagaaataaaaaacctaaacatatcagtgaattggaagactaaatttaagatgtcaattctccttactttattctgttgattttcccttattattcttataatgtatatgagtttatagtgatattccttctttcattccttatattagtaatttgtaccatttctcctttatatttgtatgtctggctagaggtttattatagtgtta

SEQ ID NO: 548430 - DNA, 1555 bp, Homo sapiens
cgggggcgagacatgccggagtcagactggaaacaagtgctctgtctttccttctaggtcagacctcccgtataaagcataatgggtaacacactacggctgccatrcttcatctgtaggtggggtgggccacagggggaagatgggcaggttgagaggactcctgtacttggacccctggactcagctatgctccctggggagcctggaacccactgctgatgatccccttcccagcagtggaagcccatggttttacaaagcatgatactgttctttctcagacacttaaagttaattttttgtttgttttaggaaaaaagaataggtataaatgaatagaaaattgtatgataacactgacaccgatagtaactgataatcttgattgagtacttgccctatgtccagccctgatggagcattttaaacacgtttcctcatccagtgctcacccggactcttgcaagaggcagtgtcagggatgatgaagagcccaggccttggcattgactgactagggtttgcacctcccagtcctgccactaactcacagcaagtcacattacctcactgtgcttccatttccctgaagtctgtagtctttacctcatggggctgttgtgacgattaaatgagctaatcatgtgatgcttagccgggtgccttgcacagcacctgcactcactttagtgctggtggtggtgtgtggagcggagccacccagtgaagctgaagaagtgggtagcgtggtggtgcccttcagatgggcagagggtgtgcgccgatggccagtgacagaagagggcctgagggctgtgttgaagggctgtgagacttgagaattcagttgttaggaaagcagggagagcaaggcctctcgtttgggccaggctgagcagtttgagctcgctccgtgtctgggctccccttgggaagagctacagagtgccaggcacacccagaaaggagtcaagcccacttcagcctgggcctgagataggctggatccactcaaagaggatcaagctggctgtcttccatttggtctcctgtggtgactctctgttaggcctggattgagtcactttaatcctgtttgaactgatctgaacaggttccatccataccagctggtttgttctggcttagaacagacaggctgagttggtcagccttatactgcctttgaatcttgagatggatttacttttagtctcagtttttggtttcccattttgaagtgtatgggtttttcatgggagtttctgttggagggtcccagccactccatcctgggaagcctttccttgcctccaggggctgtttccctcctctcagtgccgtctcttctgcactagacattcctcaaagttttttgcttattaatagtatcctggataagtgtggtgactcatgcctatctataatcccagcactttgggaggtgaaggtgggaggatcgcttgagcccagcctcaagactagcctgggcaatgtagtgagacttcatttctacaaaaaatagaaaaaaatagctgggcatggtggcacg

SEQ ID NO: 548431 - DNA, 1555 bp, Homo sapiens
cgggggcgagacatgccggagtcagactggaaacaagtgctctgtctttccttctaggtcagacctcccgtataaagcataatgggtaacacactacggctgccatacttcatctgtaggtggggtgggccacagggggaagatgggcaggttgagaggactcctgtacttggacccctggactcagctatgctccctggggagcctggaacccactgctgatgatccccttcccagcagtggaagcccatggttttacaaagcatgatactgttctttctcagacacttaaagttaattttttgtttgttttaggaaaaaagaataggtataaatgaatagaaaattgtatgataacactgacaccgatagtaactgataatcttgattgagtacttgccctatgtccagccctgatggagcattttaaacacgtttcctcatccagtgctcacccggactcttgcaagaggcagtgtcagggatgatgaagagcccaggccttggcattgactgactagggtttgcacctcccagtcctgccactaactcacagcaagtcacattacctcactgtgcttccatttccctgaagtctgtagtctttacctcatggggctgttgtgacgattaaatgagctaatcatgtgatgcttagccgggtgccttgcacagcacctgcactcactttagtgctggtggtggtgtgtggagcggagccacccagtgaagctgaagaagtgggtagcgtggtggtgcccttcagatgggcagagggtgtgcgccgatggccagtgacagaagagggcctgagggctgtgttgaagggctgtgagacttgagaattcagttgttaggaaagcagggagagcaaggcctctcgtttgggccaggctgagcagtttgagctcgctccrtgtctgggctccccttgggaagagctacagagtgccaggcacacccagaaaggagtcaagcccacttcagcctgggcctgagataggctggatccactcaaagaggatcaagctggctgtcttccatttggtctcctgtggtgactctctgttaggcctggattgagtcactttaatcctgtttgaactgatctgaacaggttccatccataccagctggtttgttctggcttagaacagacaggctgagttggtcagccttatactgcctttgaatcttgagatggatttacttttagtctcagtttttggtttcccattttgaagtgtatgggtttttcatgggagtttctgttggagggtcccagccactccatcctgggaagcctttccttgcctccaggggctgtttccctcctctcagtgccgtctcttctgcactagacattcctcaaagttttttgcttattaatagtatcctggataagtgtggtgactcatgcctatctataatcccagcactttgggaggtgaaggtgggaggatcgcttgagcccagcctcaagactagcctgggcaatgtagtgagacttcatttctacaaaaaatagaaaaaaatagctgggcatggtggcacg

SEQ ID NO: 548432 - DNA, 1151 bp, Homo sapiens
tgcatagcagttacacatctgggatttaggcatattttattcaaagcccagctctactatttgctagtcatatactctgcagagagacatttagcttttaggtttcttaattttcaggattaagatatgatgtaataagtctctttgtatagtggtgtctgacacataaaattgctaaaggaatgttaacaatttgggttatgcattggactctgtcatcataactctaaggttttaggtacagatccccatctagaataaaccattcacctattaatgagaatacatttaatcattaagggttttttttttttggtaatgtacaatgaatattgatagcagtactgagggaatcaatattctgtgaggggctaggagtaaatgcaggtaccaaattacaacaggtattactaattgacttatcagagactgaatttagcatgttttgttttggtcttacaatgtttttaaaatggtgctaacttttaaatattgagacatttatatatgcataataaacctatatattaaaatctctatataaattctacatagattttaatatatagatgttaaaatacagatgttttattaaatctgttttatataaaatctacatatatttatatatagattttaaaatataaattttataaagattcttataaaatckatatagattttaatatatagatttattttcttttataaaattagaaggcctggctacaatatgtgtccctattctgtaaatggcaacaattgaccaaaactgactcacagccacaaattttatctgtccacagtttactagacatcccactactctctcttgtgttacctacctggtccctaaaccactttagagtctggggcattgagagaaaagataaaaggaaagctgcattcactccgaaggaaaatcttttataccaagaaggcgtaattaaaatgcaggtgtcctgatgaaaagaaaaaacaaatctgaatttatttatagagttcagaagaaaaaataacacaaaaaactttgttaaagcttacattttcttagattcctgaatgtgaaaaaaaaaaaagtattcactttctgcatcaggacacttcattttaagcagtggcattacaaatagcattttaaatcttaaaaa

SEQ ID NO: 548433 - DNA, 1151 bp, Homo sapiens
tgcatagcagttacacatctgggatttaggcatattttattcaaagcccagctctactatttgctagtcatatactctgcagagagacatttagcttttaggtttcttaattttcaggattaagatatgatgtaataagtctctttgtatagtggtgtctgacacataaaattgctaaaggaatgttaacaatttgggttatgcattggactctgtcatcataactctaaggttttaggtacagatccccatctagaataaaccattcacctattaatgagaatacatttaatcattaagggttttttttttttggtaatgtacaatgaatattgatagcagtactgagggaatcaatattctgtgaggggctaggagtaaatgcaggtaccaaattacaacaggtattactaattgacttatcagagactgaatttagcatgttttgttttggtcttacaatgtttttaaaatggtgctaacttttaaatattgagacatttatatatgcataataaacctatatattaaaatctctatataaattctacatagattttaatatatagatgttaaaatacagatgttttattaaatctgttttatataaaatctacatatatttatatatagattttaaaatataaattttataaagattcttataaaatctatatagattttaatatatagatttattttcttttataaaattagarggcctggctacaatatgtgtccctattctgtaaatggcaacaattgaccaaaactgactcacagccacaaattttatctgtccacagtttactagacatcccactactctctcttgtgttacctacctggtccctaaaccactttagagtctggggcattgagagaaaagataaaaggaaagctgcattcactccgaaggaaaatcttttataccaagaaggcgtaattaaaatgcaggtgtcctgatgaaaagaaaaaacaaatctgaatttatttatagagttcagaagaaaaaataacacaaaaaactttgttaaagcttacattttcttagattcctgaatgtgaaaaaaaaaaaagtattcactttctgcatcaggacacttcattttaagcagtggcattacaaatagcattttaaatcttaaaaa

SEQ ID NO: 548434 - DNA, 865 bp, Homo sapiens
tatatatatttaaagaaatattgttgtttagttttcttttcatatgatgtcttcacttggttttgatatatgaataatgctggcctcactgaataagttgaaaagttctatctttttggaaggatttgtaaagaactgatattaaaccttccataaatgcttgtaaattcatcagtgaagtttttttgtgtggaaagttttgtaagatacgaattcagtcttttttatatattgatgttctattcaggatttctatgtttacattctctcattttatttttgtttttgttttatatatgtgtcaccaacagaccacagctagrtggagatatcaaatctattctgattttccagaatttaacctttaatagacttattcaatctattaatatttttattaggaatagcaacatttagaatatttgttgtattttgtatatttgggtatatccttttctttcttcatttttatcattttttgctttctgttggattaataaagctttctttatccctttttatttttttctcagacattatttaatatgtatatttctttcaccacagtcacttccattatactccctagaagtggtcattgttaacagcttgtggatattcttcctgaaactttctatgcacatacaaacatacactgttttatacaaattgaattatataatacatactgttattcaatcaaccgttttctttaaaaataaatctagacatctgtcgaagttaatagagagttatcttattcttttgttaaactgctgcataataattcatggtttggaaattccataattgactcttactagatttttgcattattgtaaaagtaagatatatacttacaaac

SEQ ID NO: 548435 - DNA, 865 bp, Homo sapiens
tatatatatttaaagaaatattgttgtttagttttcttttcatatgatgtcttcacttggttttgatatatgaataatgctggcctcactgaataagttgaaaagttctatctttttggaaggatttgtaaagaactgatattaaaccttccataaatgcttgtaaattcatcagtgaagtttttttgtgtggaaagttttgtaagatacgaattcagtcttttttatatattgatgttctattcaggatttctatgtttacattctctcattttatttttgtttttgttttatatatgtgtcaccaacagaccacagctagatggagatatcaaatctattctgattttccagaatttaacctttaatagacttattcaatctattaatatttttattaggaatagcaacatttagaatatttgttrtattttgtatatttgggtatatccttttctttcttcatttttatcattttttgctttctgttggattaataaagctttctttatccctttttatttttttctcagacattatttaatatgtatatttctttcaccacagtcacttccattatactccctagaagtggtcattgttaacagcttgtggatattcttcctgaaactttctatgcacatacaaacatacactgttttatacaaattgaattatataatacatactgttattcaatcaaccgttttctttaaaaataaatctagacatctgtcgaagttaatagagagttatcttattcttttgttaaactgctgcataataattcatggtttggaaattccataattgactcttactagatttttgcattattgtaaaagtaagatatatacttacaaac

SEQ ID NO: 548436 - DNA, 865 bp, Homo sapiens
tatatatatttaaagaaatattgttgtttagttttcttttcatatgatgtcttcacttggttttgatatatgaataatgctggcctcactgaataagttgaaaagttctatctttttggaaggatttgtaaagaactgatattaaaccttccataaatgcttgtaaattcatcagtgaagtttttttgtgtggaaagttttgtaagatacgaattcagtcttttttatatattgatgttctattcaggatttctatgtttacattctctcattttatttttgtttttgttttatatatgtgtcaccaacagaccacagctagatggagatatcaaatctattctgattttccagaatttaacctttaatagacttattcaatctattaatatttttattaggaatagcaacatttagaatatttgttgtattttgtatatttgggtatatccttttctttcttcatttttatcattttttgctttctgttggattaataaagctttctttatccctttttatttttttctcagacattatttaatatgtatatttctttcaccacagtcacttccattatactccctagaagtggtcattgttaacagcttgtggatattcttcctgaaactttctatgcacatacaaacatacactgttttatacaaattgaattatataatacatactgttattcaatcaaycgttttctttaaaaataaatctagacatctgtcgaagttaatagagagttatcttattcttttgttaaactgctgcataataattcatggtttggaaattccataattgactcttactagatttttgcattattgtaaaagtaagatatatacttacaaac

SEQ ID NO: 548437 - DNA, 1496 bp, Homo sapiens
ttgcttgtcatgtagaatgaaaagcagaggaatcttatagaaagagaataaagagagaaagatgaaaaataaagaataaatgttatctttcatcttgatgatattctcctattgcggctaagaatctaggttacatttctgtacttaagttccatgagacacacctgtaacctcataaattttttaaaattgcatcatttaaattttattcacttgttttgcttaattcattcttactggatttctatgcttgaaaattttttatttccaatccaaataaacaccagtctcctcttagcaaatcttttaaccaaccaatcattcatgacttaactattaaatagtcaaattgattccttgctgtaccttcttctgaataaaaattggaaggaataaaatataaacagtttttcataaataaaaagtttgtgttttccaaaaaatttgctagcaggaaatatccaacctatcagtcttgaaggtagactagcagagaaaggtcatttttgaggaccaagtgaggggtgcaaataaaagatggggaaaaagaagtcttttgatttaatgtaaaagtgttgtttgcatccatagctaactgttttttctgtaacaaagaacagaaaacttgaacatataaatgatgaggttcaaattctctggaagtaaattgtggacattttgattcaagagtactttcatgcggatgtaacttgttctagttgaaaagcctctttttaggctgaaatttaaaaagaaagataaaaaagaataaaggtaaaagatactgagcagtacaacagccatcatctacagagaaccacagtctatgcagtgtagcttgagatttctcaaaaccattaggaatttcaaaatgctttcatttctgatttttttgctataagtttcctgttttagtgtaatgaatttaaatttgttttcaattacttaatctktcatcttaagagaaattatccttctttcctaaatcacatagccagcaattagacctgcagaacaaattatcttctcttcttacttgcttcacaacttaaaaagaaaaaaaaaaagaaaaaagccagtggccttacttgatcacatgaactgagttttatttaaatggcttccaaagtgaaagattacctactttataatatatctaatcaacaaaatctacatatttgtctaacagataaagtaattatacaggttttatattattcaagttacataactatcaactgtagagaaacatctagtaaaacaactgatattcacaaaatataacagcactgtatacaaacagctgcccatgcacagatgtatatttctcatttcttcttagcagtagtctctaattctggaattgggacagcctcctgatctaatatgcagtgtctctgtgtcatctaactctggcctcatttgcaatcactgcttcccctggagccactagattacgtcatccctgtggagtctagaataatacagtattcttg

SEQ ID NO: 548438 - DNA, 1496 bp, Homo sapiens
ttgcttgtcatgtagaatgaaaagcagaggaatcttatagaaagagaataaagagagaaagatgaaaaataaagaataaatgttatctttcatcttgatgatattctcctattgcggctaagaatctaggttacatttctgtacttaagttccatgagacacacctgtaacctcataaattttttaaaattgcatcatttaaattttattcacttgttttgcttaattcattcttactggatttctatgcttgaaaattttttatttccaatccaaataaacaccagtctcctcttagcaaatcttttaaccaaccaatcattcatgacttaactattaaatagtcaaattgattccttgctgtaccttcttctgaataaaaattggaaggaataaaatataaacagtttttcataaataaaaagtttgtgttttccaaaaaatttgctagcaggaaatatccaacctatcagtcttgaaggtagactagcagagaaaggtcatttttgaggaccaagtgaggggtgcaaataaaagatggggaaaaagaagtcttttgatttaatgtaaaagtgttgtttgcatccatagctaactgttttttctgtaacaaagaacagaaaacttgaacatataaatgatgaggttcaaattctctggaagtaaattgtggacattttgattcaagagtactttcatgcggatgtaacttgttctagttgaaaagcctctttttaggctgaaatttaaaaagaaagataaaaaagaataaaggtaaaagatactgagcagtacaacagccatcatctacagagaaccacagtctatgcagtgtagcttgagatttctcaaaaccattaggaatttcaaaatgctttcatttctgatttttttgctataagtttcctgttttagtgtaatgaatttaaatttgttttcaattacttaatctttcatcttaagakaaattatccttctttcctaaatcacatagccagcaattagacctgcagaacaaattatcttctcttcttacttgcttcacaacttaaaaagaaaaaaaaaaagaaaaaagccagtggccttacttgatcacatgaactgagttttatttaaatggcttccaaagtgaaagattacctactttataatatatctaatcaacaaaatctacatatttgtctaacagataaagtaattatacaggttttatattattcaagttacataactatcaactgtagagaaacatctagtaaaacaactgatattcacaaaatataacagcactgtatacaaacagctgcccatgcacagatgtatatttctcatttcttcttagcagtagtctctaattctggaattgggacagcctcctgatctaatatgcagtgtctctgtgtcatctaactctggcctcatttgcaatcactgcttcccctggagccactagattacgtcatccctgtggagtctagaataatacagtattcttg

SEQ ID NO: 548439 - DNA, 1496 bp, Homo sapiens
ttgcttgtcatgtagaatgaaaagcagaggaatcttatagaaagagaataaagagagaaagatgaaaaataaagaataaatgttatctttcatcttgatgatattctcctattgcggctaagaatctaggttacatttctgtacttaagttccatgagacacacctgtaacctcataaattttttaaaattgcatcatttaaattttattcacttgttttgcttaattcattcttactggatttctatgcttgaaaattttttatttccaatccaaataaacaccagtctcctcttagcaaatcttttaaccaaccaatcattcatgacttaactattaaatagtcaaattgattccttgctgtaccttcttctgaataaaaattggaaggaataaaatataaacagtttttcataaataaaaagtttgtgttttccaaaaaatttgctagcaggaaatatccaacctatcagtcttgaaggtagactagcagagaaaggtcatttttgaggaccaagtgaggggtgcaaataaaagatggggaaaaagaagtcttttgatttaatgtaaaagtgttgtttgcatccatagctaactgttttttctgtaacaaagaacagaaaacttgaacatataaatgatgaggttcaaattctctggaagtaaattgtggacattttgattcaagagtactttcatgcggatgtaacttgttctagttgaaaagcctctttttaggctgaaatttaaaaagaaagataaaaaagaataaaggtaaaagatactgagcagtacaacagccatcatctacagagaaccacagtctatgcagtgtagcttgagatttctcaaaaccattaggaatttcaaaatgctttcatttctgatttttttgctataagtttcctgttttagtgtaatgaatttaaatttgttttcaattacttaatctttcatcttaagagaaattatccttctttcctaaatcacatagccagcaattagacctgcagaacaaattatcttctcttcttacttgcttcacaacttaaaaagaaaaaaaaaaagaaaaaagccagtggccttacttgatcacatgaactgagttttatttaaatggcttccaaagtgaaagattacctactttataatatatctaatcaacaaaatctacatatttgtctaacagataaagtaattatacaggttttatattattcaagttacataactatcaactgtagagaaacatctagtaaaacaactgatattcacaaaatataacagcactgtatacaaacagctgcccatgcacagatgtrtatttctcatttcttcttagcagtagtctctaattctggaattgggacagcctcctgatctaatatgcagtgtctctgtgtcatctaactctggcctcatttgcaatcactgcttcccctggagccactagattacgtcatccctgtggagtctagaataatacagtattcttg

SEQ ID NO: 548440 - DNA, 616 bp, Homo sapiens
ttacatagttttccatgacttatgttattatttctgtgtttttgcagttatcagcagaaagtagttcccatagctttagaattggttatttgtgtttgttgttggccttaaaatactgtattaattcacatagggacacagacagatgtatgtttggatgttgagctgtaatttttcatgagctgttacaatagagtctcatggcttccgctcgaacttcatttccctcttcacagttaaagtgaatataaaacaaacacaaatgcttatgtgcagcaattttctcccacaaataggtctgcagttatctcatcaggaagatatattgtatttaagcctttatttgccctctttcacacccagtcaaggtggcttagggagtatcattttatcaagtagaattagaagcacttggtaagttgctcatcttatgtataaacctgaaattaacctgtcgaatagaaaataatgagaaactgattcagttcatctgatgcttatttcttgtgactaacctatcatttaaaagaactagtaaaacagacatttttggcytgagttagctatatatttacaatggttttctatttctttttgcacttaaatatttagttcc

SEQ ID NO: 548441 - DNA, 649 bp, Homo sapiens
cagttgggggatagcagtaacaactgtgtttatgtagctctttcaaagcttcaaagaatttataaataacacaaaatactttcaaagcacattattctctgtaattcctgaaactctgtgatgtattggaactaatattaccacccttttacaaaggaaaataagatrcaaagtttgagtacgagtaacatttctggtcataaatctagtcagtgacactgataggactagaactcaagtctccagaaataataacccagagctgtttttactacaacattcacagttttggaatgtagtccatagttatttatagcagaattatcttcttaattgtattgtgttttggtcaacataaaaattagtttgcattcacttccaaatggaaagcaaaggcaggctgcccagaagtgtgaaaaaacggtggccggggaaattagcctgggattaaaattttgccaaagttaaacaacgaattgaagggtttacatcatttccaccgtgggggagatgacttttcaggccagatgtaacaggaaatacaagaaaaaattcaaaactgtcttgagtgtaagacaagaaacttctgaatcaagtatttctaaatcctttatttaaattgagagcattgggacttagagataataaa

SEQ ID NO: 548442 - DNA, 634 bp, Homo sapiens
gatataaccgtgaacacgtggactgatgaggagaaaagggaccattaaacagaggggcaaatcaaacctgagagaatcaatgtcaaagctgatggtgaatgtacagagtattttaactccacacaccagaggcactgctgccagcacagcacaaataaattccccttgtcttgtcactgaggaaatacgcagttgggatgacagttcaggtgaatgtgtgattcacctctcatcaaagaaagggttctacattgatcagctaggatacacacttatgaaataacagctaatcaaactactcatttttcccatgatcacatgggctactgcagcacctacatttctcctatcccctcatttggcyttgaattagagctccttgatccactcatgcaaggtggtccatgaaacacatcaaataaaccatgtcgaataagcttctgatatcaaaatatttatcaaaaaagaaaacattgaatgaccacagacttgctggatattaatacatatttatatttcaaaatcagtgcagtatttattgaaaatgataattttggttttcatggaatgaattttatgattacttctaaaattaactaagtttggtatattatcttacactgtaaaggacttt

SEQ ID NO: 548443 - DNA, 634 bp, Homo sapiens
gatataaccgtgaacacgtggactgatgaggagaaaagggaccattaaacagaggggcaaatcaaacctgagagaatcaatgtcaaagctgatggtgaatgtacagagtattttaactccacacaccagaggcactgctgccagcacagcacaaataaattccccttgtcttgtcactgaggaaatacgcagttgggatgacagttcaggtgaatgtgtgattcacctctcatcaaagaaagggttctacattgatcagctaggatacacacttatgaaataacagctaatcaaactactcatttttcccatgatcacatgggctactgcagcacctacatttctcctatcccctcatttggccttgaattagagctccttgatccactcatgcaaggtggtccatraaacacatcaaataaaccatgtcgaataagcttctgatatcaaaatatttatcaaaaaagaaaacattgaatgaccacagacttgctggatattaatacatatttatatttcaaaatcagtgcagtatttattgaaaatgataattttggttttcatggaatgaattttatgattacttctaaaattaactaagtttggtatattatcttacactgtaaaggacttt

SEQ ID NO: 548444 - DNA, 634 bp, Homo sapiens
gatataaccgtgaacacgtggactgatgaggagaaaagggaccattaaacagaggggcaaatcaaacctgagagaatcaatgtcaaagctgatggtgaatgtacagagtattttaactccacacaccagaggcactgctgccagcacagcacaaataaattccccttgtcttgtcactgaggaaatacgcagttgggatgacagttcaggtgaatgtgtgattcacctctcatcaaagaaagggttctacattgatcagctaggatacacacttatgaaataacagctaatcaaactactcatttttcccatgatcacatgggctactgcagcacctacatttctcctatcccctcatttggccttgaattagagctccttgatccactcatgcaaggtggtccatgaaacacatcaaataaaccatgtcgaataagcttctgatatcaaaatatttatcaaaaaagaraacattgaatgaccacagacttgctggatattaatacatatttatatttcaaaatcagtgcagtatttattgaaaatgataattttggttttcatggaatgaattttatgattacttctaaaattaactaagtttggtatattatcttacactgtaaaggacttt

SEQ ID NO: 548445 - DNA, 808 bp, Homo sapiens
aaatatgagcttaagccaagaaagaaaacgaaaaacatgaagtacaataaagtacatggggaaatagatctataacagagccttcggtctttcataactctgataatactaattaatatttatgctgcaattagttttttgtaagtacttctgtgatagtgtttcttactataagacattcaattagctaaatatggtcatctaccattacctgaaagaacattattataacagagagagaaaactggaactttccatcaactttccacccagaaaaagaattggtcaccagaattctaaagagtaatgtatggcagacacatgaaaaaaatgctcatcatcactggccatcagaaaaatgcaaatcgaaaccactatgagatatcatttcacaccagttagaatggcaatcattaaaaagtcaggaawcaacaggtgctggagaggttgtggagaaataggaacacttttacactgttggtgggactgtaaactagttcaaccattgtggaagacagtgtggagattcctcaaggatcaagaattagaaataccatttgatccagccatcccattactggatatatatgcaaaggattataaatcatgctgctataaagacacaggcacatgtatgtttattgtggcactattcacaatagcaaagacttggaaccaacccatatgcccatcaatgatagactggattaagaaaatttggcacttacacaccatggaatactatgcagcataaaaaatgatgagttcatgtactttgtagggacatggatgaagctggaaaccatca

SEQ ID NO: 548446 - DNA, 674 bp, Homo sapiens
ctaaggtgacagtgatgaggacctgggtgcacccatgagtggagaagctaggcctgtccagagaagcaagacaaacacacacacacacacacacacacaggcacacatgcatacwcaaatacattgcatacacacatgtcagttcaggggatagaggacactgactctgggccctgttgacccaagcagactcccatggtggtgggttgtgtcaccccacaatgtcactgttgctgagtccccatcgcctctgtgttgtggagcagttagagacacacagcagtgtctgtgagtagctctgcgtgaaggaccattttctagatgagaggcacatctcaacacagctcactgatcagattcaggtgagtgggacctgctcttttctcttcctcctggcttgggaaaagtcactatcaggtgggtggttttggcctctgggcagctactgagggtaatccctgaacactcaccagctgcctgttatgtgctgacagtcatctcattcatcctcgcagcaattccattttgcatcttttctgatcacctccgtgaccacacaggacaaccccatcagggcccctgtcaccaggcccagtctagctccatgataaccaagacagaggtccagagacaatcgtcctacattgtgcctgcatctgaccccccttggtagg

SEQ ID NO: 548447 - DNA, 875 bp, Homo sapiens
ctttttttcctggaagggtcagtaagagctttcaattttacattttttcaacttttagtcgaccctaattagatatctacatacctkacaaattataatttggctgtaacagaaccatgtctcaaaatggacattccaaagtggaaggaaaagcttgtcatcaccaccatgattttgtttgcttcactgataagattttgaagcatatcccccttccaggcaaatatttcaaatcatcctttctggacaatatagtaacatatcacattactttaaaagaattaggggagaaaagcctaaacatttagtctcttttaattcaggataggctactgaagtttatttttattttttgatttttttttctggagacgatattataacctgtgcttggtgctcattcttcatgctgtaaagggtggggagagcaggatactgtcctctaagcaaggggattagtttccactacaccatacttggtttttcgtgctgttagatttagacatttgtttcataaaatcaaatgtaactagattttcaattcacttccactttttgttaaaatgcatattcagagattttaagataaagcagacaaggcagatgaaaaaatgttaatttgtaatgtatacaaatatcccactgaaaagtcagtagaaattaagaagtacccaacttctcttatgacacttactcccacagcactgtacagctgggaagggctaagtcgatgacctaactttatgaatatgcaaactgaggatttaaaaagtgaggctgcttgctgaagccacagactggctagggaaagagccaagactacctcaagctgccccttcaagttattgatcatggtgccaccccagcaccatgct

SEQ ID NO: 548448 - DNA, 875 bp, Homo sapiens
ctttttttcctggaagggtcagtaagagctttcaattttacattttttcaacttttagtcgaccctaattagatatctacataccttacaaattataatttggctgtaacagaaccatgtctcaaaatggacattccaaagtggaaggaaaagcttgtcatcaccaccatgattttgtttgcttcactgataagattttgaagcatatcccccttccaggcaaatatttcaaatcatcctttctggacaatatagtaacatatcacattactttaaaagaattaggggagaaaagcctaaacatttagtctcttttaattcaggataggctactgaagtttatttttattttttgatttttttttctggagacgatattataacctgtgcttggtgctcattcttcatgctgtaaagggtggggagagcaggatactgtcctctaagcaaggggattagtttccactacaccatacttggtttttcgtgctgttagatttagacatttgtttcataaaatcaaatgtaactagattttcaattcacttccactttttgttaaaatgcatattcagagattttaagataaagcagacaaggcagatgaaaaaatgttaatttgtaatgtatacaaatatcccactgaaaagtcagtagaaattaagaagtacccaacttctcttatgacacttactcccacagcactgtacagctgggaagggctaagtcgatgacctaactttatgaatatgcaaactgaggatttaaaaagtgaggctgcttgctgaagccacagactggctagrgaaagagccaagactacctcaagctgccccttcaagttattgatcatggtgccaccccagcaccatgct

SEQ ID NO: 548449 - DNA, 538 bp, Homo sapiens
ggaaatcactttgctttgcttaaatgtccttatctataaaatggggctaatactagcacctattcttctagagtttttgtgtatataaaatactaaatacagtgcttgagatattgtaagtgctcaacgaatatgaattgtcattagatgtacgcttaaagatgaaagggaaagactgagagactagatgaaaagatagcaattaaaaacctagattactcagcaaggccaaggaaatgaagtaatgagaatatgaagaagaaagtttrtgaaaggatagacaattatagtaaagaatggggagatatgactttaatatttcaggtgaaactattgtgcctgatgatacagtagaaggtactgccatggaattaagtagcaagaaaagagatacgaaagatcattgacattgacaacattaaggaactgggaggttaaaatgttccttgagttatcaaagtcacttagaatagcaaggagagagaggaagactgaaaacagatgccagatgggaagcaagacagggtagcaattaaga

SEQ ID NO: 548450 - DNA, 535 bp, Homo sapiens
ataaataagacaaggtcttcaccctcaagaagcttacagcctctctgaaaaagttacccaaaaaaatgacattttaggccagacacagtggctcatgcctataatcctagcactttgagaggctgaggcaggcggatcacaaggtcaagagatcaaractatcctggccaatggtctattaaaaatacaaaaattagctgggcatggtggcacgcgcctgtggtctcagctactcgggaggctaaggcaggagaatctcttgaacccaggaggcagagattgcagtgagctgagattgcaccactgcactccagactgggcgacagagtgatactctgtctcaaaaaagaaaaacttacattttatgccccactaatcagaaaatcctattaaatccacattgaaaatgcatccagaatctcagcacctctactgttaccactctgctccaagtcaccatcacattgtacacagatcattacaacagcctcctaacactctttgctcctaccctcaccccactaacacacagcag

SEQ ID NO: 548451 - DNA, 535 bp, Homo sapiens
ataaataagacaaggtcttcaccctcaagaagcttacagcctctctgaaaaagttacccaaaaaaatgacattttaggccagacacagtggctcatgcctataatcctagcactttgagaggctgaggcaggcggatcacaaggtcaagagatcaagactatcctggccaatggtctattaaaaatacaaaaattagctgggcatggtggcacgcgcctgtggtctcagctactcgggaggctaaggcaggagaatckcttgaacccaggaggcagagattgcagtgagctgagattgcaccactgcactccagactgggcgacagagtgatactctgtctcaaaaaagaaaaacttacattttatgccccactaatcagaaaatcctattaaatccacattgaaaatgcatccagaatctcagcacctctactgttaccactctgctccaagtcaccatcacattgtacacagatcattacaacagcctcctaacactctttgctcctaccctcaccccactaacacacagcag

SEQ ID NO: 548452 - DNA, 532 bp, Homo sapiens
agcagcataggcagctgaacggttgatcttagtataatcctttcctcaaaggcacctcctccatgaacaccccaacctctgtaagtgtccataatggttttctgtccagtcatacaaaccagcatcaccccgaggcacaccaataacaagtctgccacttggctataggtggtagattgtatcctcatcaaggtattttgcaggcacaatggctttgatgactttctcctttagggcatccctcatctcaccaagacgaacctcttmatcatgccaaacagatataacaattgtgtggactctgatgggaagcatagcacctcaatcctgcatatagtgcacagtaacttgagttgtagaatcagggcataacccaggcaaagtgccattatggcgtagttctgccagtttggctttaagcttgtatgctaagacaatggttaaaggcctacatacactcctcagtttcatcagtggcgtagccaaacatcaagccctggtctccaacaccaatgtcttcttcatttctgtc

SEQ ID NO: 548453 - DNA, 532 bp, Homo sapiens
agcagcataggcagctgaacggttgatcttagtataatcctttcctcaaaggcacctcctccatgaacaccccaacctctgtaagtgtccataatggttttctgtccagtcatacaaaccagcatcaccccgaggcacaccaataacaagtctgccacttggctataggtggtagattgtatcctcatcaaggtattttgcaggcacaatggctttgatgactttctcctttagggcatccctcatctcaccaagacgaacctcttcatcatgccaaacagatataacaattgtgtggactctgatgggaagcatagcacctcaatcctgcatatagtgcacagtaacttgagttgtagaatcagggcataaccmaggcaaagtgccattatggcgtagttctgccagtttggctttaagcttgtatgctaagacaatggttaaaggcctacatacactcctcagtttcatcagtggcgtagccaaacatcaagccctggtctccaacaccaatgtcttcttcatttctgtc

SEQ ID NO: 548454 - DNA, 537 bp, Homo sapiens
attgggtaatgtgagtcccccaagtttgttctcctttcttaaaattactttgagtattccagatcatttgcgccactaaattttcttatataacaaggtgaggttgctggttccaggtttgatatagtggttctataatrtcatcaatggtccaggttctacttgaccttcctcctgtatgttgtccctgcttccctaagtttggaggtcaaaatatagttgattattatattttgtcacagttctaagcatctcctgtttacattcaaggtaggaaaaaaggagccatgtgtttagaagttctcctttttttacattaggtaaaatattttattaaagctttcatgaccaactctaagggcaaaaggtaaacaaaatgaggttgtaccagcttagatcagtgcttctcagctaggggtgagtttgcctcccagcgacatttttgattgtccatacttaggctgccgctatgcatgtatagtgggtagaagccagggatgcttctaaacatcttacaatgcatagggtagtctcctg

SEQ ID NO: 548455 - DNA, 1134 bp, Homo sapiens
ccagcactttggaaggccaaggcaggtggatcacttgaggttgggagttcaagatcagcctggccaacatggtgaaaccctgtccctactaaaaatacaaaaattagttgggtgtggtggtgcacacctgtaatcccagctattcaggaggctgaggcatgaaaattgtttgaacctgggaggcgagtttgcagtgagccaagatggcaccactgcactccagcctgtgtgacagagtgagactccatctcaaaataataataataataataacctcaatgaaagggcttgtaccacattgaataactttaatatttcttcgtagcattggcccagcataggcacctcaatgrcttgagatcttctttcactttgtaaattgaagttgtatcagttagctatggctctataacaaataatcccacaacttactggcttaattaacaacagtatattacttttcactattttatgggttttctgggtagtttttctgctaattatgtctggactcacttatatgggttaattcatttggaaggttgttggctggaggctgggttcggttgatataacaggaatgtctaggcctgtctccatgtggtatttcattttaggcttgtttacaccatggtggtcttggacaggggttctgagaatatgagagtgaaatctgcaagtcctctgcaacttatgcaatgtcatttctgccctattctgtcagtcaaagcaagtctcaaggccaactcagatttgaggaatggggaatatacctcttgaaagaaggagctccaaaaccttgtggccaagtctttttagtctaccatgtggctagttatcgaggagagaattattaggacatatggggctggggtgggtggtcatatctgggttttgagtctcacatagttgccatctgagccagccagctcagctgagtctttatgtatttatgagggtagctggttctgtgcatgcatgcatgcatatgtaattgcattccaaagtcagtccccatcatatggccccaagcttcatctcttcatctttaaagtaggaataataatagtgcctcttacataaattgtgaggattaaatgagagagggaatgtgtggaaagtgctttgcagttc

SEQ ID NO: 548456 - DNA, 522 bp, Homo sapiens
ctcagcttcctgagtagctgggactacaggcacrtgccaccatgcccagttaatttttgtatttttttgtggagacagagttttgccatgttgcccagtctggtctcaaactcctaagttcaagtgatccacttgcttcagcttcctaaagtgctgggattacaggcatgagccaccatatccagcccagactttttttcttgtcattatttcccaaacaatacagtataacaactatttccatagcatttacattgtatcaggtatcataggtaagatagagatgatttaagttactcttgagaggatgtgtgtaggtcatatgtagacactataccattttatatgagggacttttgagcatctttgggttttggtgtctttggcggtcctggaaccagtgtcccccacggataccaactgtccataagcaaagtagaggtttatttgtttgattatagtggtgagaaatgaatgaatttctttctctgtcctttacaggaagaagttctaaaggatttt

SEQ ID NO: 548457 - DNA, 659 bp, Homo sapiens
acaagcttaactttatttatttatttatttatttatttatttaatttatttattttagagatagggtctcactctgtcgtccaggctggtcttgaactcctgggcctcaagcaatcctcccaccttacttggcctcccygaatgctgggattataggagtgagccactgcacctggctacaaccttaatttttttttttttttgagacaagagtttcactccgtcattcaggctggagtgcagtggcgcaatcttgtctcactacaatctctgcttcccaggtttaagcgattctcatgccacagcctccccagtagttgggattacaggcgtgtgccaccacgcccaactaatttttgtatttttcatagagacggagtttcatcatgttggccaggccggtctcaaactcctgagctcaagtgatccacctgccttggcctcccaaagtgctgggattaccggcgtgagccactatgctcagcctactatcttaatttttaaaagtaaagtatgaagcatctcatttggagttagatagtcctgttcgaattctattattttattattagcagcatgactttgggcctggcagagaggagatgtgcagtaatcattaagttttcctctcccttccctaatcctgattggctttaagc

SEQ ID NO: 548458 - DNA, 659 bp, Homo sapiens
acaagcttaactttatttatttatttatttatttatttatttaatttatttattttagagatagggtctcactctgtcgtccaggctggtcttgaactcctgggcctcaagcaatcctcccaccttacttggcctccctgaatgctgggattataggagtgagccactgcacctggctacaaccttaatttttttttttttttgagacaagagtttcactccgtcattcaggctggagtgcagtggygcaatcttgtctcactacaatctctgcttcccaggtttaagcgattctcatgccacagcctccccagtagttgggattacaggcgtgtgccaccacgcccaactaatttttgtatttttcatagagacggagtttcatcatgttggccaggccggtctcaaactcctgagctcaagtgatccacctgccttggcctcccaaagtgctgggattaccggcgtgagccactatgctcagcctactatcttaatttttaaaagtaaagtatgaagcatctcatttggagttagatagtcctgttcgaattctattattttattattagcagcatgactttgggcctggcagagaggagatgtgcagtaatcattaagttttcctctcccttccctaatcctgattggctttaagc

SEQ ID NO: 548459 - DNA, 659 bp, Homo sapiens
acaagcttaactttatttatttatttatttatttatttatttaatttatttattttagagatagggtctcactctgtcgtccaggctggtcttgaactcctgggcctcaagcaatcctcccaccttacttggcctccctgaatgctgggattataggagtgagccactgcacctggctacaaccttaatttttttttttttttgagacaagagtttcactccgtcattcaggctggagtgcagtggcgcaatcttgtctcactacaatctctgcttcccaggtttaagcgattctcatgccacagcctccccagtagttgggattacaggcgtgtgccaccacgcccaactaatttttgtatttttcatagagacggagtttcrtcatgttggccaggccggtctcaaactcctgagctcaagtgatccacctgccttggcctcccaaagtgctgggattaccggcgtgagccactatgctcagcctactatcttaatttttaaaagtaaagtatgaagcatctcatttggagttagatagtcctgttcgaattctattattttattattagcagcatgactttgggcctggcagagaggagatgtgcagtaatcattaagttttcctctcccttccctaatcctgattggctttaagc

SEQ ID NO: 548460 - DNA, 2833 bp, Homo sapiens
ccccagaatctatatgttagaaacttaatccccaaggcaaatgtgttgggggatggggactaatgggagatatttaggtcatgaggattctacctcagggatgaattaatgcaattataaaaagaacttgcaggagtaagttcattctttttgctcttctgccatgtgaggacacaacatttgcccccacttgcccttccaccttctgccatgtgagtaccatagcaagaaggcccccaacagacaccagataccagcgccttgatcttggactttccagcctccagaaccatgagaaatacgtttgcgttctttataaattacccaatattctgtcatagcagcataaatcaatgaacacagatggtcaatctcatcaattcctggtaggtacgtctgctgctctttctgcattaaacttcaccacctttgctgagcctcctcctcagagtaagcatacacacaagtggtaggtctctcaaataacccacagatttttttctatctcccagcccttaattgtaaccccttgagtgaaaacatcccttcctggtctgtgaaactgcccctgtaaatttaatagcctcctctttgcaaatggaatcataatattaaatgtgcaagagaggaattgtttcttaaagttccagaagactcatctattcataatcaagttgtgcctactgtggatatacctttacctcctccattatatttgatggatacccccacatgaaggtcttcacactgtacctgacattttgtggccttaaaagtccacagacatagaaaaaaataactggagtagaaactgaagagaagataggttgtaccaaactgttacccaatcatgcccaatatcccttgaagacagagcaaaggaagattttaaaggtacatttgaaggccttatatctaatggtcttttcataccctgcactagcgtttgtaacactctagtcttgccagtaaagaaaccaaatgtgtgagaatatcaattttgcaagacctcaggataatcaacagatttttgttccttgcttcccagtagtacctaactcagataccatcttggcatcaattctacctgaaaccacttgcttcactgtagtgtatttttgctctgcctttttatttattgattgatttattttggatgtgcctctagaccacttctaggacagtaaataccttttagctttcacctggagaagataacaatatacctggacaatcatgggttttattgaagccccctcctgtttttcccagttcctcaaacagttcttaaaagatctgaatttctcttgtgattcagttctgatatcatatgtagatgatctattttactcagagaacaagaaaacttgtaaaagtgttccatttacttgctctcagccttaacagaaaaggaacaaagtttcaacagaaacatttcaagttttccaaagtacaatccattatttaggacatggtatgtctaaggagggaaaaacattctctcattaggcaaaagattgtccaaacttattttagacctctcactaaatgacagttgataggacttctaggtttaactagatattgcatacaaattttctgagattgtgatatccttttatgaattgactcagacctcaggaagagactttttcttctgggaacccaaacttggaataggctttctgcaacctgaagaaagttcttcaacagcttctttcactggtcatctttaactacaaaaatccctttggtctattcatgtataaactatatggataagcccttggggttttaatacaacttgataggaaccatcaaaactcatgacttactatatatagccttacctttgatctggttgcaaaggctttcctctcttatctgtgtcgaaagctgcaattctgaccaacatggtgaaaccccatctctactaaaaawacaaaaattagctgggtgtggtggtggatgcctgtggtcccagctacttggaaggctggggcaggagaattgattgaacctgggaggcagaggttgcagtgagctgagatggcaccactgcactccagcctgggtgacagagcaagactccatctaaaatatatatatattaaataaataaataagtgggtgaatctagattaacattatctatataaaaattacaatacagtgttgtagggtttaaaatatggagaaagaacattattggcatttatttaagtagagaggaggtaaagaaagtaaagtgttctaaaggctttctaatcatagagtggctcatagagcttattagaaggcagaatctcagaactatcattgaatcagaatttctattttaacaaaatcctctatgattcatatgcatattaaggtttgggaagtattgttcccaaaaggtgtgtatcatctgaaaagggagtaaaagaaccaattgatattagatttttgcatatctagaatttattttgtagtctctatggtaaccactcaaggaatgctaaaagactgcataattttcaaacacgggggaaagtgaaaaagtaaaaaataatcagctcaaaataaaccaaggaaagaaaggaaaagaaacagaacaggttgaatacatagaaaccaaatataagtaagcaaaatatccatattagaagacaatgattatccgactagattttcaaagacaaaaacaattacatatacaagatgatgtttgtatttccatgtaaatgtgtatagcaatttacaatttatagtttttcacatacgctaaggctgagaaacattaagactaggttattaataacctgaagagcagtgggttgtcatattaagg

SEQ ID NO: 548461 - DNA, 2833 bp, Homo sapiens
ccccagaatctatatgttagaaacttaatccccaaggcaaatgtgttgggggatggggactaatgggagatatttaggtcatgaggattctacctcagggatgaattaatgcaattataaaaagaacttgcaggagtaagttcattctttttgctcttctgccatgtgaggacacaacatttgcccccacttgcccttccaccttctgccatgtgagtaccatagcaagaaggcccccaacagacaccagataccagcgccttgatcttggactttccagcctccagaaccatgagaaatacgtttgcgttctttataaattacccaatattctgtcatagcagcataaatcaatgaacacagatggtcaatctcatcaattcctggtaggtacgtctgctgctctttctgcattaaacttcaccacctttgctgagcctcctcctcagagtaagcatacacacaagtggtaggtctctcaaataacccacagatttttttctatctcccagcccttaattgtaaccccttgagtgaaaacatcccttcctggtctgtgaaactgcccctgtaaatttaatagcctcctctttgcaaatggaatcataatattaaatgtgcaagagaggaattgtttcttaaagttccagaagactcatctattcataatcaagttgtgcctactgtggatatacctttacctcctccattatatttgatggatacccccacatgaaggtcttcacactgtacctgacattttgtggccttaaaagtccacagacatagaaaaaaataactggagtagaaactgaagagaagataggttgtaccaaactgttacccaatcatgcccaatatcccttgaagacagagcaaaggaagattttaaaggtacatttgaaggccttatatctaatggtcttttcataccctgcactagcgtttgtaacactctagtcttgccagtaaagaaaccaaatgtgtgagaatatcaattttgcaagacctcaggataatcaacagatttttgttccttgcttcccagtagtacctaactcagataccatcttggcatcaattctacctgaaaccacttgcttcactgtagtgtatttttgctctgcctttttatttattgattgatttattttggatgtgcctctagaccacttctaggacagtaaataccttttagctttcacctggagaagataacaatatacctggacaatcatgggttttattgaagccccctcctgtttttcccagttcctcaaacagttcttaaaagatctgaatttctcttgtgattcagttctgatatcatatgtagatgatctattttactcagagaacaagaaaacttgtaaaagtgttccatttacttgctctcagccttaacagaaaaggaacaaagtttcaacagaaacatttcaagttttccaaagtacaatccattatttaggacatggtatgtctaaggagggaaaaacattctctcattaggcaaaagattgtccaaacttattttagacctctcactaaatgacagttgataggacttctaggtttaactagatattgcatacaaattttctgagattgtgatatccttttatgaattgactcagacctcaggaagagactttttcttctgggaacccaaacttggaataggctttctgcaacctgaagaaagttcttcaacagcttctttcactggtcatctttaactacaaaaatccctttggtctattcatgtataaactatatggataagcccttggggttttaatacaacttgataggaaccatcaaaactcatgacttactatatatagccttacctttgatctggttgcaaaggctttcctctcttatctgtgtcgaaagctgcaattctgaccaacatggtgaaaccccatctctactaaaaatacaaaaattagctgggtgtggtggtggatgcctgtggtcccagctacttggaaggctggggcaggagaattgattgaacctgggaggcagaggttgcagtgagctgagatggcaccmctgcactccagcctgggtgacagagcaagactccatctaaaatatatatatattaaataaataaataagtgggtgaatctagattaacattatctatataaaaattacaatacagtgttgtagggtttaaaatatggagaaagaacattattggcatttatttaagtagagaggaggtaaagaaagtaaagtgttctaaaggctttctaatcatagagtggctcatagagcttattagaaggcagaatctcagaactatcattgaatcagaatttctattttaacaaaatcctctatgattcatatgcatattaaggtttgggaagtattgttcccaaaaggtgtgtatcatctgaaaagggagtaaaagaaccaattgatattagatttttgcatatctagaatttattttgtagtctctatggtaaccactcaaggaatgctaaaagactgcataattttcaaacacgggggaaagtgaaaaagtaaaaaataatcagctcaaaataaaccaaggaaagaaaggaaaagaaacagaacaggttgaatacatagaaaccaaatataagtaagcaaaatatccatattagaagacaatgattatccgactagattttcaaagacaaaaacaattacatatacaagatgatgtttgtatttccatgtaaatgtgtatagcaatttacaatttatagtttttcacatacgctaaggctgagaaacattaagactaggttattaataacctgaagagcagtgggttgtcatattaagg

SEQ ID NO: 548462 - DNA, 545 bp, Homo sapiens
actgaaaatacaaaaaattagctgggcgtgrtggtgggcgcccgtagtcccacttactcaggaggctgaggcagaagaatagcatgaacccaggaggtggagcttgcagtgagccaagatcgcgccactgcactctagcctgggcaacagaacaagactctgtctcaacaaaaaaaaatataaatgttttctcaataaaccttatacttaagaagcttcttgcaaataatctgtagacatgatatggtgaactgactgtaggtaacactttcttgtgctcagaatcgtggcatgaccttatcaagctgaaatacatgggtccagtgcttttcattctttgatcctcagttacttcatttataaaagcaaggctaataatatttatcttgcgggttaaaaagaaacaattcaacaattatagcataggatcagaaagacattaagaataaaaatacgaataactttttataaaatggatttgtagtcataaaataaataaatgtgttccttaataatgctcctgtttttataatcaatttgccatg

SEQ ID NO: 548463 - DNA, 545 bp, Homo sapiens
actgaaaatacaaaaaattagctgggcgtgatggtgggcgcccgtagtcccacttactcaggaggctgaggcagaagaatagcatgaacccaggaggtggagcttgcagtgagccaagatcgcgccactgcactctagcctgggcaacagarcaagactctgtctcaacaaaaaaaaatataaatgttttctcaataaaccttatacttaagaagcttcttgcaaataatctgtagacatgatatggtgaactgactgtaggtaacactttcttgtgctcagaatcgtggcatgaccttatcaagctgaaatacatgggtccagtgcttttcattctttgatcctcagttacttcatttataaaagcaaggctaataatatttatcttgcgggttaaaaagaaacaattcaacaattatagcataggatcagaaagacattaagaataaaaatacgaataactttttataaaatggatttgtagtcataaaataaataaatgtgttccttaataatgctcctgtttttataatcaatttgccatg

SEQ ID NO: 548464 - DNA, 545 bp, Homo sapiens
actgaaaatacaaaaaattagctgggcgtgatggtgggcgcccgtagtcccacttactcaggaggctgaggcagaagaatagcatgaacccaggaggtggagcttgcagtgagccaagatcgcgccactgcactctagcctgggcaacagaacaagactctgtctcaacaaaaaaaaatataaatgttttctcaataaaccttatacttaagaagcttcttgcaaataatctgtagacatgatatggtgaactgactgtaggtaacactttcttgtgctcagaatcktggcatgaccttatcaagctgaaatacatgggtccagtgcttttcattctttgatcctcagttacttcatttataaaagcaaggctaataatatttatcttgcgggttaaaaagaaacaattcaacaattatagcataggatcagaaagacattaagaataaaaatacgaataactttttataaaatggatttgtagtcataaaataaataaatgtgttccttaataatgctcctgtttttataatcaatttgccatg

SEQ ID NO: 548465 - DNA, 545 bp, Homo sapiens
actgaaaatacaaaaaattagctgggcgtgatggtgggcgcccgtagtcccacttactcaggaggctgaggcagaagaatagcatgaacccaggaggtggagcttgcagtgagccaagatcgcgccactgcactctagcctgggcaacagaacaagactctgtctcaacaaaaaaaaatataaatgttttctcaataaaccttatacttaagaagcttcttgcaaataatctgtagacatgatatggtgaactgactgtaggtaacactttcttgtgctcagaatcgtggcatgaccttatcaagctgaaatacatgggtccagtgcttttcattctttgatcctcagttacttcatttataaaagcaaggctaataatatttatcttgcgggttaaaaagaaacaattcaacaattatagcataggatcagaaagacattaagaataaaaatacgaataactttttataaaatggatttrtagtcataaaataaataaatgtgttccttaataatgctcctgtttttataatcaatttgccatg

SEQ ID NO: 548466 - DNA, 521 bp, Homo sapiens
ttatattgccaacttttggacttgtaatattccaaacaaattttgggattgacttactaaattacttgaaaattacatttaggatgtttgattgcaaaaaaaaaaaaaaaaaaaaaaaaatggggcatggttcatggttctrtggttcttgcctatgatcccagccctttgggagccaaagcaggagcattgcttgatagcttgaggctcagagttcaagaccagcctgggcagcatatcaagacctagtctctggaaaccaaaaaaaaaaaaaagaaaaaagaaaagaaagaaaggaagaaaaaaaaagttagccaagcatattgacatgtgcctgtagccctggctacttgggaggctgaagtgggaagatcactggagcccagaagtttgaggttacaatgagctattattgaaccactgcactctagcctggctgcagagcgacaccctgtctctaaaaagagagagagagagagaattggttttatgtactttgagtctggtagatgtttaaagct

SEQ ID NO: 548467 - DNA, 521 bp, Homo sapiens
ttatattgccaacttttggacttgtaatattccaaacaaattttgggattgacttactaaattacttgaaaattacatttaggatgtttgattgcaaaaaaaaaaaaaaaaaaaaaaaaatggggcatggttcatggttctgtggttcttgcctatgatcccagccctttgggagccaaagcaggagcattgcttgatagcttgaggctcrgagttcaagaccagcctgggcagcatatcaagacctagtctctggaaaccaaaaaaaaaaaaaagaaaaaagaaaagaaagaaaggaagaaaaaaaaagttagccaagcatattgacatgtgcctgtagccctggctacttgggaggctgaagtgggaagatcactggagcccagaagtttgaggttacaatgagctattattgaaccactgcactctagcctggctgcagagcgacaccctgtctctaaaaagagagagagagagagaattggttttatgtactttgagtctggtagatgtttaaagct

SEQ ID NO: 548468 - DNA, 521 bp, Homo sapiens
ttatattgccaacttttggacttgtaatattccaaacaaattttgggattgacttactaaattacttgaaaattacatttaggatgtttgattgcaaaaaaaaaaaaaaaaaaaaaaaaatggggcatggttcatggttctgtggttcttgcctatgatcccagccctttgggagccaaagcaggagcattgcttgatagcttgaggctcagagttcaagaccagcctgggcagcatatcaagacctagtctctggaaaccaaaaaaaraaaaaagaaaaaagaaaagaaagaaaggaagaaaaaaaaagttagccaagcatattgacatgtgcctgtagccctggctacttgggaggctgaagtgggaagatcactggagcccagaagtttgaggttacaatgagctattattgaaccactgcactctagcctggctgcagagcgacaccctgtctctaaaaagagagagagagagagaattggttttatgtactttgagtctggtagatgtttaaagct

SEQ ID NO: 548469 - DNA, 521 bp, Homo sapiens
ttatattgccaacttttggacttgtaatattccaaacaaattttgggattgacttactaaattacttgaaaattacatttaggatgtttgattgcaaaaaaaaaaaaaaaaaaaaaaaaatggggcatggttcatggttctgtggttcttgcctatgatcccagccctttgggagccaaagcaggagcattgcttgatagcttgaggctcagagttcaagaccagcctgggcagcatatcaagacctagtctctggaaaccaaaaaaaaaaaaaagaaaaaagaaaagaaagaaaggaagaaaaaaaaagttagccaagcatattgacatgtgcctgtagccctggctacttgggaggctgaagtgggaagatcactggagcccagaagtttgaggttacaatgagctattattgaaccactgcactcyagcctggctgcagagcgacaccctgtctctaaaaagagagagagagagagaattggttttatgtactttgagtctggtagatgtttaaagct

SEQ ID NO: 548470 - DNA, 530 bp, Homo sapiens
ttttataaatcacaatcaaacaacaaagctgttttattataaatctatmtttagatacgataatctggttaggaagtaaaattattaacaaatgtagatttgggagttagttgtccatgaaaagttttcatagagattttgtagaataataaattatacaaatactagggagatatattctcctagtttataattttttttagtttcttatatcacaaaattatttttacctacattttatcaaattagaaataatagaggttaatcacaataattccaataaatctcagagaattatctttaacctagaaccagctaagaatttttggtgaattatttaccctaaatgacttgtgaaatagaaaaattctgggaaagatctttgtcttctgtataaaagaagaaaaatagaaaaagaaaaaatagattgagaggcattgtcctttattatattaatagaaggaagaatatggagaaatggcaaagagaaggtctaaaataggattcaataagatcttatgtctgcatgt

SEQ ID NO: 548471 - DNA, 558 bp, Homo sapiens
tcaaaaggatgtgcctggaatggctttcaagcactagtttatctgaagcctctgataggaatgtgcattcagtatgcatgcgtactcccacacaccctcaaacacacagaaacataacaacccatattcatttttctgccaggaaacaccacaaatcaatttccactagtgtctttttggtttttaaaacaatttactggactgataatgatgctaataatattttctgggcactggtcatygtgtgagggacattactacattatcttaatttaatgctcccacaaatcctaggaggttagtataattactatccccattgtaccactgcaaaaaccagtgcttggaattgttaatgagcttgcaaaggtcatacacccagtaaactgagatattgggatctgaacctggaaagcccaaatctgaaccctttgtttctaacagccatgcctacttgcctcttccagggaaggtgaacagggcagtgataagggtgtctggctgtagggccacacattattttcacatttactgttaaggtctcaggaaaatcccagt

SEQ ID NO: 548472 - DNA, 558 bp, Homo sapiens
tcaaaaggatgtgcctggaatggctttcaagcactagtttatctgaagcctctgataggaatgtgcattcagtatgcatgcgtactcccacacaccctcaaacacacagaaacataacaacccatattcatttttctgccaggaaacaccacaaatcaatttccactagtgtctttttggtttttaaaacaatttactggactgataatgatgctaataatattttctgggcactggtcatcgtgtgagggacattactacattatcttaatttaatgctcccacaaatcctaggaggttagtataattactatccccattgtaccactgcaaaaaccagtgcttggaattgttaatgagcttgcaaaggtcatacacccagtaaactgagatattgggatctgaacctggaaagcccaaatctgaaccctttgtttctaacagccatgcctacttgcctcttccagggaaggtgracagggcagtgataagggtgtctggctgtagggccacacattattttcacatttactgttaaggtctcaggaaaatcccagt

SEQ ID NO: 548473 - DNA, 631 bp, Homo sapiens
cccacgaggtggcggtacagcctcctgctgcaatgttaaactacagtagttcaccgtgagcagttgattgtaatagcgaatctattctctttttcaaaaagtacacttaaacattttttacattacaaaagtgaaatattctttgtgacagaatcaaatagtatactgtagaagtgtataagtaaaagaaagggcttcctgagttcccccttgaaatcctaccctttagaattgatgtgtatctttttagattctttkcttgtgcgtgtatatgtatgcatgcataactagtagtgtactgtttgtttttcaactcacttataactttcaacattatactttagacatctttaaaaataatttagaggtatctcattttttttaatggatgcattgtgttctgatgtatggatgtcctataatttctatatattcttattaatgggcatttgggttctttccagttttttttcctgatacaggcaattcagtggtcatgccgctatttctgtaggatagattcctggaaatgtgagagctgggtcagagtacatttaaaatattgatgaattggctgtactagtttatactcttaacagtgtagcagagtgcctttttctctcccaaacat

SEQ ID NO: 548474 - DNA, 631 bp, Homo sapiens
cccacgaggtggcggtacagcctcctgctgcaatgttaaactacagtagttcaccgtgagcagttgattgtaatagcgaatctattctctttttcaaaaagtacacttaaacattttttacattacaaaagtgaaatattctttgtgacagaatcaaatagtatactgtagaagtgtataagtaaaagaaagggcttcctgagttcccccttgaaatcctaccctttagaattgatgtgtatctttttagattcttttcttgtgcgtgtatatgtatgcatgcataactagtagtgtactgtttgtttttcaactcacttataactttcaacattatactttagacatctttaaaaataatttagaggtatctcatttttttwaatggatgcattgtgttctgatgtatggatgtcctataatttctatatattcttattaatgggcatttgggttctttccagttttttttcctgatacaggcaattcagtggtcatgccgctatttctgtaggatagattcctggaaatgtgagagctgggtcagagtacatttaaaatattgatgaattggctgtactagtttatactcttaacagtgtagcagagtgcctttttctctcccaaacat

SEQ ID NO: 548475 - DNA, 631 bp, Homo sapiens
cccacgaggtggcggtacagcctcctgctgcaatgttaaactacagtagttcaccgtgagcagttgattgtaatagcgaatctattctctttttcaaaaagtacacttaaacattttttacattacaaaagtgaaatattctttgtgacagaatcaaatagtatactgtagaagtgtataagtaaaagaaagggcttcctgagttcccccttgaaatcctaccctttagaattgatgtgtatctttttagattcttttcttgtgcgtgtatatgtatgcatgcataactagtagtgtactgtttgtttttcaactcacttataactttcaacattatactttagacatctttaaaaataatttagaggtatctcattttttttaatggatgcattgtgttctgatgtatggatgtcctataatttctatatattcttattaatgggcatttgggttctttccagttttttttcctgatasaggcaattcagtggtcatgccgctatttctgtaggatagattcctggaaatgtgagagctgggtcagagtacatttaaaatattgatgaattggctgtactagtttatactcttaacagtgtagcagagtgcctttttctctcccaaacat

SEQ ID NO: 548476 - DNA, 626 bp, Homo sapiens
gtgtaaatcttctacatactgatatgrggttctagtgctgtgttttattaatttgtatttttcttgcatctcagatgttgtgctattttataaaccatgaagtaaaaaagaaattggctgaagaaacaatttctcttgagaggctgacctaggcgctttagaaacgtttggcttactattgtgtaaacaaagcacaaaacttcttatttcagaaatcttacgtaaacattaatactaatttgcaaaacagggcgcaagcattggatcttttgcaattcacgttcctaagcagcttaataattatttctttcacatggaagttagaaaaacaaatcctagcttccaaagaagaatatgtagccatgaaacgtgtttttcttcttaacatttacacaaaaagcattacactgatagttctgtgaaatgataaactcttctggtaaaagtaaactgcgtcattgtcgccctagaataaaaagacggtggagaaacagctttactaacacttaggatcaatacagcattgacgaattaaactttcttaatagactgctgtatattttacaatctcttataataatattcaatattttatcaaacaaatacttgaaccatgttgaggaagt

SEQ ID NO: 548477 - DNA, 547 bp, Homo sapiens
ctctgctggtggasagaagtgtattccccctactaagaattttgattaaaaaaaatctccccaacagaagaatgagaaacacaataaatatttgctctgaatcttgatcttactgtcgtgtatatttgaaaactagtttaggccggcaaagaaaaggccagcattacctaaaacacataagcatcttttaaagtgtccacacagaaaccatcatttaaaatttctagatccattttagagaacaatttttaatttaatcaattcctagttatgaggcatttagggtgttataatttatcattactattcatagtacaacacccaaatcttttcatacaacatacactcaaacacatacactcgcatgcacacctacacacactcacaatcttttcacatggtttattattatttttccccttggtgttaagtttcagaagcaggattgatgggtcaatgaaaatgtaaacttaaaatttaaaatcatacgtaatgtcaaatggcttcctgaaagcctgtactaatctaaccgtctaacagcatggat

SEQ ID NO: 548478 - DNA, 817 bp, Homo sapiens
aggtagaaagaagctgaaacagtcttggattctttgatattcttaaaacaaaattgagaccgggcgcggtggctcacacctgtaatcccagcactttgggaggccgaggcgggcggatcacgaggtcaggagatggagaccatcccggccaacacggtgaaaccccatctctactaaaaaaaaatacaaaaaaaattagctgggcatggtggcgggtgcctgtagtcccagctactcgggaggctgaggcaggagaatggcatgaatccaggaggcagagcttgcagtgagctgagatcatgccactgcactccagcctaggcaacaaagcaagactctgtctcaaaaaaacaaaacaaaacaaaacaaaacaaaaacaaatgagtaaaatttgttttactcagtatatacagtatatacaaatttgagtaaaaataaatcaatgtttataatcagaaacagcttttgttaatgaagtaattttgaagctatgtacctggtaaagaatggaaaataaataaaactatttctatcagtgagtcaaccaaatatttaataagcccaagaatgtctggagtccaacccaaggctgatctctgctattcagacttgctttayctccaagcagtcattatctccacattctaacaatgagaaattatagaagaaatatgaaacaacttccaaatctttaacagagattcagtttattatcccacaatttatttaggtactacagaccagataggctcgactgaggaccaactttgaaaaggaaaacagtatagtaacttctgctgttggaaaacaaagcctt

SEQ ID NO: 548479 - DNA, 2809 bp, Homo sapiens
tagcctattcttttcaagaccttggttttattctgatagtgctgatgtatcgttttgactcactcatatcctatgttctgattctaattctgacaatatctttaaagacagcaacctggcagaacttgtgccatgataaaataatacatctttcatgaatcagggagtatgttaactaacagatataactgtgtattactgctatgcaatgaagtcacccctgaggtcctccacaatcctacaggatcttaaataggaagcttatcagaataatctttgctgactgcaaagcatgctttagctgaacttggcaattgtggatatcctggtcagattttgcaaaatccaagggggatgccagcagttattagcaaaagctatgctctctccacacagaccaccttctacatgttaggtccctaaccctgacaaagccaacacaaggataagcaaaaagtaagtttgctgacaacatacggtttaatcactcacttacatataggtttgcagaaaagttactagggattttgggatggagatgagtaaatcacggactaattgtgccttgctttaggtcaattaaaacagcaataataataccaccataataacaaaaactaacacttattcactgattattgtatgccagacactgttataattattttacataaactgatgaatccttacaacaataaataccattattatttctattttacagacagcacacatacaacaaaacaaaatcctgaggctcaaagaggccaggttacttacccaaggtcacagagttagaaagtaactgtatcatataggcaagtacatgattttaagttactattcatgatataccttggctctcactatcatctttctttcaacaaaacccaagactgtgatatgtgcctgtaaatagacagactgacaaatcaccaactatctgcttacaaaatccacctggaaatgaaaagtggtactactacatactttaatttatatattatttttttccaacataaattctattaaagagatacttttcagcattttagtaattattaggtatacaaaatacagtcattttgaagtaataatatggtggcttccaactttaaaaacttatttaaggaaactcatctataaggatatttaaggagaaatagatgatttatttgcatgcatggggctttattactatattagaattacatataaataataaagtagtcttaaaattgctggtacattggggctatagcctgatattttttttaaacaggaaagctaaataggtaaatactgtttcttaacattgggcacttcaaagttacataaccactacttgtgcttagcgctttaccatgaagccatttattcttgsagtcctttgggaaacagtaatagtcatgcactattaatttaatatataatcccattttcttctactgaagtctaagaaaaaaagcttgacttttcaacataatttatgattaaaatataatttatagtttttcaaaaatgggattttaaaagaatcttacttttgatatccctttattttaaatagagatatcaaaagtaagatacttttaaaatcccatctctactgaaaatacaaaaattagctgggaatggtggcgcacgctgtagtcccagctactcaggaggctgaagcaggagaatcgcttgaacccaggaagcggaggctacagtgagccgagatcacaccattgcaccgcagcctgggcgaaagagtgagactctgtctcaaaaaataaataaataaataaatatattaatttttaccttacaaatacatacacaatgctatactcataaattgaaaggtgattcccagagtattgcctcaaaataaaaatacacaagaggatatctaagctatcagcaccaaaagttacactcctcttacagtaacagagtatgcaattaactttcctctttctgtgtaatgcacttcctaggctgttactgtctgccttcacacctccagtaccctttgggagagatctgctcctttctctctgggcttaggttcggcctggttgttagtcactgtagcccactgcttcatgaatgtactgcagtgtcagtcctgcctcctcattttcaggtgtcaccagatcctgcagctctgttcagaccttttggcatgactctcccatatggctggaggcagaacaaagggcccccactgcagctcacagagttcattaactggataggcagaaacacttgggtggcatcagcgattcattcttcaaaatcttggtgccatccaccctgccatgtgcctcgaagctaccaagtcggggagcagatcttctgggaagaatgttgtaaatgctaaaaacaattatgatttcctgagagatgcttcaaatgcaaaatcttcaattattttaaaatgaatcagacaatattattctttatgactcttcagcacatgttctcatatgtgatttcattttaggtaggaagaattttcctaaaaacatataccaaaagctactaaaaggttttgcagcttttcctatctacttattagaggttatagtcaaaacaaaatgtacgtaaatgacctaagtaaattatcaggtttttataggacatgaatgaatatttcttaatcatgggaagtttctattcaaatctgctgtcagttagataattatattcttctatggaaagagagtgggtaccctttgtacaggtacatacatctctgtggtccctaaagcccattctctggtaaagaagttgagtcaacttagggaatgaatatttg

SEQ ID NO: 548480 - DNA, 2809 bp, Homo sapiens
tagcctattcttttcaagaccttggttttattctgatagtgctgatgtatcgttttgactcactcatatcctatgttctgattctaattctgacaatatctttaaagacagcaacctggcagaacttgtgccatgataaaataatacatctttcatgaatcagggagtatgttaactaacagatataactgtgtattactgctatgcaatgaagtcacccctgaggtcctccacaatcctacaggatcttaaataggaagcttatcagaataatctttgctgactgcaaagcatgctttagctgaacttggcaattgtggatatcctggtcagattttgcaaaatccaagggggatgccagcagttattagcaaaagctatgctctctccacacagaccaccttctacatgttaggtccctaaccctgacaaagccaacacaaggataagcaaaaagtaagtttgctgacaacatacggtttaatcactcacttacatataggtttgcagaaaagttactagggattttgggatggagatgagtaaatcacggactaattgtgccttgctttaggtcaattaaaacagcaataataataccaccataataacaaaaactaacacttattcactgattattgtatgccagacactgttataattattttacataaactgatgaatccttacaacaataaataccattattatttctattttacagacagcacacatacaacaaaacaaaatcctgaggctcaaagaggccaggttacttacccaaggtcacagagttagaaagtaactgtatcatataggcaagtacatgattttaagttactattcatgatataccttggctctcactatcatctttctttcaacaaaacccaagactgtgatatgtgcctgtaaatagacagactgacaaatcaccaactatctgcttacaaaatccacctggaaatgaaaagtggtactactacatactttaatttatatattatttttttccaacataaattctattaaagagatacttttcagcattttagtaattattaggtatacaaaatacagtcattttgaagtaataatatggtggcttccaactttaaaaacttatttaaggaaactcatctataaggatatttaaggagaaatagatgatttatttgcatgcatggggctttattactatattagaattacatataaataataaagtagtcttaaaattgctggtacattggggctatagcctgatattttttttaaacaggaaagctaaataggtaaatactgtttcttaacattgggcacttcaaagttacataaccactacttgtgcttagcgctttaccatgaagccatttattcttgcagtcctttgggaaacagtaatagtcatgcactattaatttaatatataatcccattttcttctactgaagtctaagaaaaaaagcttgacttttcaacataatttatgattaaaatataatttatagtttttcaaaaatgggattttaaaagaatcttacttttgatatccctttattttaaatagagatatcaaaagtaagatacttttaaaatcccatctctactgaaaatacaaaaattagctgggaatggtggcgcacgctgtagtcccagctactcaggaggctgaagcaggagaatcgcttgaacmcaggaagcggaggctacagtgagccgagatcacaccattgcaccgcagcctgggcgaaagagtgagactctgtctcaaaaaataaataaataaataaatatattaatttttaccttacaaatacatacacaatgctatactcataaattgaaaggtgattcccagagtattgcctcaaaataaaaatacacaagaggatatctaagctatcagcaccaaaagttacactcctcttacagtaacagagtatgcaattaactttcctctttctgtgtaatgcacttcctaggctgttactgtctgccttcacacctccagtaccctttgggagagatctgctcctttctctctgggcttaggttcggcctggttgttagtcactgtagcccactgcttcatgaatgtactgcagtgtcagtcctgcctcctcattttcaggtgtcaccagatcctgcagctctgttcagaccttttggcatgactctcccatatggctggaggcagaacaaagggcccccactgcagctcacagagttcattaactggataggcagaaacacttgggtggcatcagcgattcattcttcaaaatcttggtgccatccaccctgccatgtgcctcgaagctaccaagtcggggagcagatcttctgggaagaatgttgtaaatgctaaaaacaattatgatttcctgagagatgcttcaaatgcaaaatcttcaattattttaaaatgaatcagacaatattattctttatgactcttcagcacatgttctcatatgtgatttcattttaggtaggaagaattttcctaaaaacatataccaaaagctactaaaaggttttgcagcttttcctatctacttattagaggttatagtcaaaacaaaatgtacgtaaatgacctaagtaaattatcaggtttttataggacatgaatgaatatttcttaatcatgggaagtttctattcaaatctgctgtcagttagataattatattcttctatggaaagagagtgggtaccctttgtacaggtacatacatctctgtggtccctaaagcccattctctggtaaagaagttgagtcaacttagggaatgaatatttg

SEQ ID NO: 548481 - DNA, 2809 bp, Homo sapiens
tagcctattcttttcaagaccttggttttattctgatagtgctgatgtatcgttttgactcactcatatcctatgttctgattctaattctgacaatatctttaaagacagcaacctggcagaacttgtgccatgataaaataatacatctttcatgaatcagggagtatgttaactaacagatataactgtgtattactgctatgcaatgaagtcacccctgaggtcctccacaatcctacaggatcttaaataggaagcttatcagaataatctttgctgactgcaaagcatgctttagctgaacttggcaattgtggatatcctggtcagattttgcaaaatccaagggggatgccagcagttattagcaaaagctatgctctctccacacagaccaccttctacatgttaggtccctaaccctgacaaagccaacacaaggataagcaaaaagtaagtttgctgacaacatacggtttaatcactcacttacatataggtttgcagaaaagttactagggattttgggatggagatgagtaaatcacggactaattgtgccttgctttaggtcaattaaaacagcaataataataccaccataataacaaaaactaacacttattcactgattattgtatgccagacactgttataattattttacataaactgatgaatccttacaacaataaataccattattatttctattttacagacagcacacatacaacaaaacaaaatcctgaggctcaaagaggccaggttacttacccaaggtcacagagttagaaagtaactgtatcatataggcaagtacatgattttaagttactattcatgatataccttggctctcactatcatctttctttcaacaaaacccaagactgtgatatgtgcctgtaaatagacagactgacaaatcaccaactatctgcttacaaaatccacctggaaatgaaaagtggtactactacatactttaatttatatattatttttttccaacataaattctattaaagagatacttttcagcattttagtaattattaggtatacaaaatacagtcattttgaagtaataatatggtggcttccaactttaaaaacttatttaaggaaactcatctataaggatatttaaggagaaatagatgatttatttgcatgcatggggctttattactatattagaattacatataaataataaagtagtcttaaaattgctggtacattggggctatagcctgatattttttttaaacaggaaagctaaataggtaaatactgtttcttaacattgggcacttcaaagttacataaccactacttgtgcttagcgctttaccatgaagccatttattcttgcagtcctttgggaaacagtaatagtcatgcactattaatttaatatataatcccattttcttctactgaagtctaagaaaaaaagcttgacttttcaacataatttatgattaaaatataatttatagtttttcaaaaatgggattttaaaagaatcttacttttgatatccctttattttaaatagagatatcaaaagtaagatacttttaaaatcccatctctactgaaaatacaaaaattagctgggaatggtggcgcacgctgtagtcccagctactcaggaggctgaagcaggagaatcgcttgaacccaggaagcggaggctacagtgagccgagatcacaccattgcaccgcagcctgggcgaaagagtgagactctgtctcaaaaaataaataaataaataaatatattaatttttaccttacaaatacatacacaatgctatactcataaattgaaaggtgattcccagagtattgcctcaaaataaaaatacacaagaggatatctaagctatcagcaccaaaagttacactcctcttacagtaacagagtatgcaattaactttcctctttctgtgtaatgcacttcctaggctgttactgtctgccttcacacctccagtaccctttgggagagatctgctcctttctctctgggcttaggttcggcctggttgttagtcactgtagcccactgcttcatgaatgtactgcagtgtcagtcctgcctcctcattttcagrtgtcaccagatcctgcagctctgttcagaccttttggcatgactctcccatatggctggaggcagaacaaagggcccccactgcagctcacagagttcattaactggataggcagaaacacttgggtggcatcagcgattcattcttcaaaatcttggtgccatccaccctgccatgtgcctcgaagctaccaagtcggggagcagatcttctgggaagaatgttgtaaatgctaaaaacaattatgatttcctgagagatgcttcaaatgcaaaatcttcaattattttaaaatgaatcagacaatattattctttatgactcttcagcacatgttctcatatgtgatttcattttaggtaggaagaattttcctaaaaacatataccaaaagctactaaaaggttttgcagcttttcctatctacttattagaggttatagtcaaaacaaaatgtacgtaaatgacctaagtaaattatcaggtttttataggacatgaatgaatatttcttaatcatgggaagtttctattcaaatctgctgtcagttagataattatattcttctatggaaagagagtgggtaccctttgtacaggtacatacatctctgtggtccctaaagcccattctctggtaaagaagttgagtcaacttagggaatgaatatttg

SEQ ID NO: 548482 - DNA, 530 bp, Homo sapiens
ttaaagttccacaggtgattctaatgtagtcatggttgagagctactgaccttgagaagcatgattttttagaggtggctaacccgttctggtctactggtttacatgcagtagagatagttggggaagataatttttgcttaaaataggaaagcaactgacacaatcgcatggtaggcatgcagggtttagaacagtaagaaactgaagattataccatataacactgtgaatttattaaatayattccagagtgggttatcagccaagatgtgctagatcaactgtgtatggtgctgctaatgagttcacagaaacctagaggtttttacttgcccaaggtcacaccactagctggggacacaaccaaaactggaaaattatagtggtaattcatagtttgttgccttgattatttaggtcaagttctgtaaactttttctgtgaagggccagattgtaaacattttaggctttgcaggccatatggtccctgttgcaactactcaactctactaacatagtaaaaag

SEQ ID NO: 548483 - DNA, 687 bp, Homo sapiens
aaaaaaaaaaaaaaaaaaaaatcaatgtgtcgagaaaatcccgacattaggttggtggaaaattgtctgagcagtcactgggtctatgttcacatatgtgactgattaaggctattcctggaagcagagaatttcctttgtttcaggcttttagaaaaaaagattagcagtgctcttttttctttaagtctgatttgagtttgtgctcatctggggttctttccttcaccacctcaggcaaggcaaacaggagctgagtggaagacaggaaggaagtagggactgggttagaaggtcttggatctaccagccaagagattctctgggtatcagtttcagaatctgtaaaaggggtcaagtgaagagaagtaggctttatgtcaagtttctcaaactgcattttccagaaaataagtgttttacaagaacatactaaatgaaaaaaaaaagattaaaataataattgtcggtatagttgatattgttatgcaataatctgcctttgataaacaaaacgccagacaggaggtagcatgattggtcaaccacttgaatcacacatgcacatttagtggtagggtcttggtaatctttacaaatyttaatatttatgcctgtatctacgatatcttattaacaaaataatttatttttctatttttctccacacatatgtatataattttt

SEQ ID NO: 548484 - DNA, 651 bp, Homo sapiens
atttttaccagcaaaatctctagtcaaaattttctcccccaaagctcacaggagctcatctttactgactggtagatatatcatctttacagtaatcagtattcagtttccaaaaattttgtataaacattggaatcttatttatgaatctctctctcttttttaaaaaaagtattcatatggaaaaaatagaagcttgaaatatcctaagctaaattttgaggatcttttccggttacattccagtttttcttataataccttctgatttcacaaactgttacagaaataagtctgcaataatgaactagcaaaccaggttgcctggtttcctccaagccmcactaaagctcagtgtgttgttcatatcccctttctcccattcttcagtattcagcacataaacatccacctcaaaggtaaattctgatagtttccacactataaaagctatgttctgatatttttcaaacaacacctgttcataaacatgaagcaaacatgatgaaaattaaaagggacaaaaagtaaccacatacccaaacaaaagttgaaatgcctaatttagaaaaaattcttcatattaaaaacgtgttgggccgggcatggtggctcacgcctaaatcctggcatgggaacaccatggcaatt

SEQ ID NO: 548485 - DNA, 651 bp, Homo sapiens
atttttaccagcaaaatctctagtcaaaattttctcccccaaagctcacaggagctcatctttactgactggtagatatatcatctttacagtaatcagtattcagtttccaaaaattttgtataaacattggaatcttatttatgaatctctctctcttttttaaaaaaagtattcatatggaaaaaatagaagcttgaaatatcctaagctaaattttgaggatcttttccggttacattccagtttttcttataataccttctgatttcacaaactgttacagaaataagtctgcaataatgaactagcaaaccaggttgcctggtttcctccaagccccactaaagctcaktgtgttgttcatatcccctttctcccattcttcagtattcagcacataaacatccacctcaaaggtaaattctgatagtttccacactataaaagctatgttctgatatttttcaaacaacacctgttcataaacatgaagcaaacatgatgaaaattaaaagggacaaaaagtaaccacatacccaaacaaaagttgaaatgcctaatttagaaaaaattcttcatattaaaaacgtgttgggccgggcatggtggctcacgcctaaatcctggcatgggaacaccatggcaatt

SEQ ID NO: 548486 - DNA, 549 bp, Homo sapiens
atgcatacagaatgctcagaactgtgtctggcacctggctctcatgcaatcacggtgagcacttatgagtcttttagaaggctttcctggactcctactttcctttaactcagctaatcagattacggtgttagtgttatgtggcctctgagcaccaaagttcagattcattagatttgggttgggattcagatatgccagtccctttttggcaggcattccaggcgatttgagtggttcccacttagttcgtctgggatggtatttctcaattcttcactataagatacgaggctattttctccagaccctgaactctgtgagggcaggagctrcccctgtgttttttttaatcagtgagtttcaacacctctgcacagtgcctagcacagagggctttcttagtaatatctgaggactatgcaagcttgcatgttttgctaacgattccctctgcagcattatatggtacacagaactcagaacataaattggatctagttttcctgatattgctgttactagttaataattatttatactaaactt

SEQ ID NO: 548487 - DNA, 549 bp, Homo sapiens
atgcatacagaatgctcagaactgtgtctggcacctggctctcatgcaatcacggtgagcacttatgagtcttttagaaggctttcctggactcctactttcctttaactcagctaatcagattacggtgttagtgttatgtggcctctgagcaccaaagttcagattcattagatttgggttgggattcagatatgccagtccctttttggcaggcattccaggcgatttgagtggttcccacttagttcgtctgggatggtatttctcaattcttcactataagatacgaggctattttctccagaccctgaactctgtgagggcaggagctacccctgtgttttttttaatcagtgagtttcaacacctctgcacagtgcctagcacagagggctttcttagtaatatctgaggactatgcaagcttgcatgttttgctaacgattccctctgcagcattatatggtacacagaactsagaacataaattggatctagttttcctgatattgctgttactagttaataattatttatactaaactt

SEQ ID NO: 548488 - DNA, 612 bp, Homo sapiens
ccattctttacgaggaatgtggcacagtgtctgtatataatagcgattgcattctcgctccagaatgatcatctgctttgtatgttgatctttaaatcaccactttaaaattgtcataattttgtaagaaattggaaaataaatggaattctcaagggtatgaaggttttccatttaattttagagcattttttgaaaatgctgtcaaaagtatcttgttaatcatctctgaaggcagaagaaagattcatcacttgtaaatgtacatactctactgtgtgattgatatatcatgttattcatggaagaaacattgtgataaaggagtatatttagtggtttrtatgtgcgtgcacaccacaccaattgtttgctgagattcggtgactttttatatgatcagaaaaggaaaggagagtggtcgggatgtaatggtactggatgcaatgcaaaggtatatataacatgcccatgcatgctaacactcacaggcacacgcatggatgcatacatgagagagaggagaaaagcaggcaaaggctcaggtttcaatatcagtaaataatgtaacatggccagtttgcttaatttcttggctcactggctttatca

SEQ ID NO: 548489 - DNA, 612 bp, Homo sapiens
ccattctttacgaggaatgtggcacagtgtctgtatataatagcgattgcattctcgctccagaatgatcatctgctttgtatgttgatctttaaatcaccactttaaaattgtcataattttgtaagaaattggaaaataaatggaattctcaagggtatgaaggttttccatttaattttagagcattttttgaaaatgctgtcaaaagtatcttgttaatcatctctgaaggcagaagaaagattcatcacttgtaaatgtacatactctactgtgtgattgatatatcatgttattcatggaagaaacattgtgataaaggagtatatttagtggtttatatgtgcgtgcacaccacaccrattgtttgctgagattcggtgactttttatatgatcagaaaaggaaaggagagtggtcgggatgtaatggtactggatgcaatgcaaaggtatatataacatgcccatgcatgctaacactcacaggcacacgcatggatgcatacatgagagagaggagaaaagcaggcaaaggctcaggtttcaatatcagtaaataatgtaacatggccagtttgcttaatttcttggctcactggctttatca

SEQ ID NO: 548490 - DNA, 612 bp, Homo sapiens
ccattctttacgaggaatgtggcacagtgtctgtatataatagcgattgcattctcgctccagaatgatcatctgctttgtatgttgatctttaaatcaccactttaaaattgtcataattttgtaagaaattggaaaataaatggaattctcaagggtatgaaggttttccatttaattttagagcattttttgaaaatgctgtcaaaagtatcttgttaatcatctctgaaggcagaagaaagattcatcacttgtaaatgtacatactctactgtgtgattgatatatcatgttattcatggaagaaacattgtgataaaggagtatatttagtggtttatatgtgcgtgcacaccacaccaattgtttgctgagattcggtgactttttatatgatcagaaaaggaaaggaragtggtcgggatgtaatggtactggatgcaatgcaaaggtatatataacatgcccatgcatgctaacactcacaggcacacgcatggatgcatacatgagagagaggagaaaagcaggcaaaggctcaggtttcaatatcagtaaataatgtaacatggccagtttgcttaatttcttggctcactggctttatca

SEQ ID NO: 548491 - DNA, 1235 bp, Homo sapiens
ggagaggactaggggaagatactcgtaaattgctgagactttgcttttctctgtattatatactttcccagcttgcaaaaactattttaaaaaagaatatgggccaggcacggtggctcacacctgtaatcccagcactttgggaggcccaggagggttgatcacctgaggtcaggagtttgagaccagcttgaccaacatggagaaaccccgtctctactaaaaatacaaaattagctgggcgtggtggtgcctgtattcccagctactcaggaggctgaggcaggagaatcactcgaacctgggagcggaggttgcagtgagccaagatcgtgccattgcactccagcttgggcagcaagagcgaaactccctctcaaaaaaaagaaaagaaaagaaaagaatatgatctccccctctccatacctccaaaatattctagccactcatttgaattccaatccacgttctcctagaagtcatggatatcacttcttaactcctaaccaaatcacaagattgttaatagactttaaatgcccttatgacctctgaactccaattgccctctaggcccctgagtcttttggcagtgctggaggctctttggagctttgtttgatttgtaacccccttttgcagcatgggagaaaactttagaggcctggaggtgggactcacataagcttcagcagaattggttgttaaaggaaaggttgggattaacactcscatcaaaggcacacaagggtcttggcagcatggggtagagtttgggatattcacagatcagggcttttctgtttaaattgtgaccaatgttggctttagataatttcctgcatttgcaaatgaggaatgagagataatgcaaaaactaaggaacattgcaccatttttacgttgctaattaatgattgagacaggactggacttaagactctacccgcttaattcagtactgcagtgggattaaaagtcagtgaggcttgaccaccaagattactgatttgctgggacaggttgagtatcttttatccaaaatgcttggaacaggaagtgttttggatttcgggtatttacagattttggaatatctgcatatacatgatgagatctcttggggatacgaataaagtctaaagacgaaattcccatttatgtttcatatacaccttatgcacacagtctgaaggtcattttatacaatattttaagtaattctgtacatggaa

SEQ ID NO: 548492 - DNA, 1100 bp, Homo sapiens
acaattgggccagtttcaccacaataggctaatgacatttaaagaacatataatatcaaactgctgaatatacatttatttcacacatgcaatactgtagttgagtaaatttcaaatggttgaaatttatatggtatgttctttgactaaaattaagtattaggttttttttttttgacagagtctcactctgttgcccaggctggagtgcagtggcrtgatctcggctcaccaccttaccacaacctccacctcccaggttcaagtgattctcctgcctcagcctcccgagtagctgggattataggtgcacaccacgacgtccagctaatttttgtattttttagtagagacggagtttcactatgttggccagtctggtctcaaactcctgacctcatgatttgcccaccgcggcctcccaaagtgctcggattacaggcgtgagtcaccgcacccagccaagtattagttttctgaatagatgaataaaatttatagccctctggaaagactggatacttcatttcatgaaatcatgcaaaaattagataaggtcacactgaagtaaccttgggttttctcaagactaagcattgattaaaagttcaggattaaatgtagaactggagttaaaaatctagaataatcaatttctattatttttctattggaatacagtagtcatcaatgcaatgaaaatgtagataatacattatggaatgattatttgattaatggccatgaaatgactttaatacaaatggttcatcttattttctatgtatctttagctccaattcaacaacaaaaaggccaaaaaattattggaagccaactactacagcataaggacaaataattgaaattcaatgaagccaaatatctctgcatataaagatatgctttacatgtaaattaaactaattagcctgaaagagttaatgcaaccttcccaaaggcactgttcttaatagtgaagaacagtttacggactgggtgaatctggttcataaagcctgagagacttaagactgtctagttcacacttttttttttcaatgtaggatactgagacatggaacatttgtaagagtttt

SEQ ID NO: 548493 - DNA, 1100 bp, Homo sapiens
acaattgggccagtttcaccacaataggctaatgacatttaaagaacatataatatcaaactgctgaatatacatttatttcacacatgcaatactgtagttgagtaaatttcaaatggttgaaatttatatggtatgttctttgactaaaattaagtattaggttttttttttttgacagagtctcactctgttgcccaggctggagtgcagtggcgtgatctcggctcaccaccttaccacaacctccacctcccaggttcaagtgattctcctgcctcagcctcccgagtagctgggattataggtgcacaccacgacgtccagctaatttttgtattttttagtagagacggagtttcactatgttggccagtctggtctcaaactcctgacctcatgatttgcccaccgcggcctcccaaagtgctcggattacaggcgtgagtcaccgcacccagccaagtattagttttctgaatagatgaataaaatttatagccctctggaaagactggatacttcatttcatgaaatcatgcaaaaattagataaggtcacactgaagtaaccttgggttttctcaagactaagcattgattaaaagttcaggattaaatgtagaactggagttaaaaatctagaataatcaatttctattatttttctattggaatacagtagtcatcaatgcaatgaaaatgtagataatacattatggaatgattatttgattaatggccatgaaatgactttaatacaaatggttcatcttattttctatgtatctttagctccaattcaacaacaaaaaggccaaaaaattattggaagccaactactayagcataaggacaaataattgaaattcaatgaagccaaatatctctgcatataaagatatgctttacatgtaaattaaactaattagcctgaaagagttaatgcaaccttcccaaaggcactgttcttaatagtgaagaacagtttacggactgggtgaatctggttcataaagcctgagagacttaagactgtctagttcacacttttttttttcaatgtaggatactgagacatggaacatttgtaagagtttt

SEQ ID NO: 548494 - DNA, 1100 bp, Homo sapiens
acaattgggccagtttcaccacaataggctaatgacatttaaagaacatataatatcaaactgctgaatatacatttatttcacacatgcaatactgtagttgagtaaatttcaaatggttgaaatttatatggtatgttctttgactaaaattaagtattaggttttttttttttgacagagtctcactctgttgcccaggctggagtgcagtggcgtgatctcggctcaccaccttaccacaacctccacctcccaggttcaagtgattctcctgcctcagcctcccgagtagctgggattataggtgcacaccacgacgtccagctaatttttgtattttttagtagagacggagtttcactatgttggccagtctggtctcaaactcctgacctcatgatttgcccaccgcggcctcccaaagtgctcggattacaggcgtgagtcaccgcacccagccaagtattagttttctgaatagatgaataaaatttatagccctctggaaagactggatacttcatttcatgaaatcatgcaaaaattagataaggtcacactgaagtaaccttgggttttctcaagactaagcattgattaaaagttcaggattaaatgtagaactggagttaaaaatctagaataatcaatttctattatttttctattggaatacagtagtcatcaatgcaatgaaaatgtagataatacattatggaatgattatttgattaatggccatgaaatgactttaatacaaatggttcatcttattttctatgtatctttagctccaattcaacaacaaaaaggccaaaaaattattggaagccaactactacagcataaggacaaataattgaaattcaatgaagccaaatatctctgcatataaagatatgctttacatgtaaattaaactaattagcctgaaagagttaatgcaaccttcccaaaggcactgttcttaatagtgaagaacagtttacggactgggtgaatctggttcataaagcctgagagacttaagactgtctagttcacacttttttttttcaatgtagkatactgagacatggaacatttgtaagagtttt

SEQ ID NO: 548495 - DNA, 1127 bp, Homo sapiens
caaattcaatggcaacaccaaattttgaaatacaattaaactatattctctagataagacacattttacctacatttacacaaaaaaattagaaaatgaagtaccttatttttatagagagaaaagctgagatatagtgaaattgttgacaaatacatgacagatcactgcagataaaaaataagtataccctctataatctacctcaagtgtgttttaccatttagtgtaatttgtgttgttattgaactttctttccaagctgcttgacaggctttgcacacacttgtaaaaatttggcttaaaccatttctactagattttggctgagaagtgttacattatacaatattggcatgtgatattcctctatcaatatagctttataatgatgacctcctaaagattatcaaaacagttgtgagaaagaattattagggttaaataataagtacatgtaaagtcaatttgggtttgttgtgtgaaatataaaagtgattgtccatttttttgacagatggcaagattttaaatattattttcaatacaaaatgaaggacatattttgataccaacatgacatcagaactatcacaggaaccacagagttcagtgagaagaaaatgattctagttacttccagtaatatagagcattctgcaacatgttggaaatcctgcatgtttcttaataggtaaagcaactctaggcttggaagttctagtaaactttttttaactacatctcaagggaaatatcagtaaggtcacagcagaagaaaacattcctcaatagtcattccattcgacaccctgcttgatctagaaattggagaagatatagagataagggtctcaggacatgtacagtatcatcctctaaatgctaatcaaaaagaaaaatatcrggaatctgagaagtcaaaaagtgtgttggagtatcaaaataggatatattcactttgctgtcatctctcagagtactgactcacattttaaatgaaagcaagcacaaagattgcacaacatatagaattctactttgcaggcaaatatagcctaaaagcattcacaggaacagattaccttttctttgtccaattcacaatataatgtatagtaaagtca

SEQ ID NO: 548496 - DNA, 557 bp, Homo sapiens
tttttttgcttgaatttttaaaaaactttttggcttgaaatatctgaattaattggtttagctgttcctttcrcacggccaatgcagaataggtcagaagactgagcaacaagcaaagttcaaccaattctcctcagcacatccttgaccttaatgttggtaggtaaggtttactgtacagaaaaaaacaaaaaagaggctatattccttaagactttctttcagtaatctctacctctacatccactaagtttttcagatgagaccatacaatgtaggatttagagaagtggcttcaatttagtggttgggtctcagatgggggacagatgacataaagtaaactttttaaataattattatctagtcccaatttgtgggcccctgcaacctcctgttggcctggcctttctgtccctggcttatggcatgaacatcttcctacagaggcttccatggcctcacctacatacaacaaaattttctctctcttcagtcccagtgcctcacactccaaattctccaattaatcttatttaccagacaagttaatttcc

SEQ ID NO: 548497 - DNA, 387 bp, Homo sapiens
gagtttattcacaaacccaacaatgccatctaaagttttgaaaagcattccacttagccataattacacctgtgtgtcacaacttctgtgagcttccctgccctgtattgaagccactgagataaatacagggcccaggtctcaagaattcatccgtgcaagttgttttcttctcaccacctgcaaccaccaatcacagcatctgaggtagaggtgagggacwtggtgatcatgtcacaaagaatgatctcagaaggaggaaaagcagcagacacaaggaaacccaacatcagaggcccgttcttgaaagaaaaggtcacgtaaaagggaaaattttaaaaagaaataaatgcagtgtatctggagaataatcttttattatgactg

SEQ ID NO: 548498 - DNA, 536 bp, Homo sapiens
tccctttatatatatatttaaggagagaatatatatatataagatctctatatatacagaactaataataggacatatatatgtatatatatatatatatatacacactctatcttgagagagacagaactaataataggatatatatataggattatatatataggatatcatatataycctatatatactatatattagtatatatataacaataagatatatgtaggatatatgtaggatatcctatatatatactatatattagtatatataataatagaatatatatcctattattaattctgtctctctagagaaccctgactaatacagatactataagtatttgctatcattcctaatgtttttataataagagcaagtgaaacatgcaatatcttctatttgcatcagtatattaccaatttttaatgccccttactaattaatgagaatttttatgcctcaagtaactaattttcaatgacactgaaaaattgactgaaattcaataacaaaaatagtgttaaaac

SEQ ID NO: 548499 - DNA, 1207 bp, Homo sapiens
tacaggagtagcattagtaatcagtaggccatacccgtttccagctacttttggaccaaggcctgggaaaaaaaaatatattatttgaactctccttggagacactgttaaaattgtattttattaattagtgtccacttaaatttgagtcaatcaatacccagggaaattagcctgctcttaaatcacacccaaacataatgatgatagtaaaacaatacaatactttaatatatgtgatgcttactgtcaaaaagtgcttgtatctattgccttatgtatactcccagaatacttcattagctgaactttttaataagaacatggagatttatcatttttcataatattctgatgataaaaacattcatattcaaaagtacttattaagtactcattactaataataccaacaatactgagatcatttgacttaaatgaagaaccacaaaaggagtttctgtttttgatgaagattatctgtcatttttcactttgttctcaaaagagtaggcaaagccatttgggcatcagagtttagttggatgatacatattccacgtgtggaattggtcaagatcagagaacttcttcctttcctctggcttagagactaagtttttaacatagttattctctctggcatttagatcatgaattttgcacagccccacatcaaggagaaaagaggccctttatatgttagatttgcagaatgacttcagatgttttgactggatagctgtagaacagaatggaaatagtacaagtcatgatctcctttgctgccttccagatgccactggactctgttattactagttatctactggaatatcatgctgtgatccttatccagtgtggtttggctttattattcctcttaagatcttgttaatgtttagtttacttgttttatatttcaggagacccagtaaggtctcctatcaaagtatcttctgtctaaagtagaaagaaagagttgatggcaatgatctttttttgtaagayaggagttgtttcatataaacattctgcacagaaatacatgcacataaccacacctaaagagttttgagttggttttttacaagcccattctcactgtctgtagagagcatcagaagtgtcttaggacacttgctgtctggagtcactatgacacctacacatccttttgataagaaatacttagcagataaacacc

SEQ ID NO: 548500 - DNA, 957 bp, Homo sapiens
cttgaaagacttgttgataaagtcatatgttagcatcttttttgttgtttgtaaaataataccattaacctatcaaagtttcaaagttttaattatcacctctaaccccttccagtggtttcatttttccttgaagactctgggaaggtaggtccgtgtggttctcaatgacatcatccttataatgaaaactgtcaagtcttcaatttaaactgagaaccacaatttccaatgtcgttcttttcaataaaataggggagtkttttaaactttcattgggccagttcaaccacgaatataatgctgctaatcctaaaagcaaagtcctaaatattgaaggttaactggatccatgtgaagtcagcctaaagaaagacagattttagtgtggccaaaagcatgcagtgccagtggctttaaattcaatataaaaagatattagatattagaatgatctaacttaggcatttgcctggtggtacattgtagtgaccagagtctataatgatgtatgtcagaagattctcaggggctctgctcatcatatcatgtggtctgatcatctcagtcacttgaaattttacctcttgttttttctattgatataagtcatctactcattaagaacactcctaaagtgaactttcattaaacagaaggtaatttatatttgttatacacacagctgccattaatatatagccaattcagttcttgttttatgttgttcctcacctataaattcattttgtaatcgggcttctaaagattaggaaaccagcattccacatataaaagccaggttactttaatattcagaatagtaaactatagacacactatggaaaataaaattcatgctaagactaattgatggagccaggagagaacagatagggtttggagagcatattctcagattaaatgctatacaactcaatttacatgcactacatg

SEQ ID NO: 548501 - DNA, 957 bp, Homo sapiens
cttgaaagacttgttgataaagtcatatgttagcatcttttttgttgtttgtaaaataataccattaacctatcaaagtttcaaagttttaattatcacctctaaccccttccagtggtttcatttttccttgaagactctgggaaggtaggtccgtgtggttctcaatgacatcatccttataatgaaaactgtcaagtcttcaatttaaactgagaaccacaatttccaatgtcgttcttttcaataaaataggggagttktttaaactttcattgggccagttcaaccacgaatataatgctgctaatcctaaaagcaaagtcctaaatattgaaggttaactggatccatgtgaagtcagcctaaagaaagacagattttagtgtggccaaaagcatgcagtgccagtggctttaaattcaatataaaaagatattagatattagaatgatctaacttaggcatttgcctggtggtacattgtagtgaccagagtctataatgatgtatgtcagaagattctcaggggctctgctcatcatatcatgtggtctgatcatctcagtcacttgaaattttacctcttgttttttctattgatataagtcatctactcattaagaacactcctaaagtgaactttcattaaacagaaggtaatttatatttgttatacacacagctgccattaatatatagccaattcagttcttgttttatgttgttcctcacctataaattcattttgtaatcgggcttctaaagattaggaaaccagcattccacatataaaagccaggttactttaatattcagaatagtaaactatagacacactatggaaaataaaattcatgctaagactaattgatggagccaggagagaacagatagggtttggagagcatattctcagattaaatgctatacaactcaatttacatgcactacatg

SEQ ID NO: 548502 - DNA, 957 bp, Homo sapiens
cttgaaagacttgttgataaagtcatatgttagcatcttttttgttgtttgtaaaataataccattaacctatcaaagtttcaaagttttaattatcacctctaaccccttccagtggtttcatttttccttgaagactctgggaaggtaggtccgtgtggttctcaatgacatcatccttataatgaaaactgtcaagtcttcaatttaaactgagaaccacaatttccaatgtcgttcttttcaataaaataggggagtttkttaaactttcattgggccagttcaaccacgaatataatgctgctaatcctaaaagcaaagtcctaaatattgaaggttaactggatccatgtgaagtcagcctaaagaaagacagattttagtgtggccaaaagcatgcagtgccagtggctttaaattcaatataaaaagatattagatattagaatgatctaacttaggcatttgcctggtggtacattgtagtgaccagagtctataatgatgtatgtcagaagattctcaggggctctgctcatcatatcatgtggtctgatcatctcagtcacttgaaattttacctcttgttttttctattgatataagtcatctactcattaagaacactcctaaagtgaactttcattaaacagaaggtaatttatatttgttatacacacagctgccattaatatatagccaattcagttcttgttttatgttgttcctcacctataaattcattttgtaatcgggcttctaaagattaggaaaccagcattccacatataaaagccaggttactttaatattcagaatagtaaactatagacacactatggaaaataaaattcatgctaagactaattgatggagccaggagagaacagatagggtttggagagcatattctcagattaaatgctatacaactcaatttacatgcactacatg

SEQ ID NO: 548503 - DNA, 957 bp, Homo sapiens
cttgaaagacttgttgataaagtcatatgttagcatcttttttgttgtttgtaaaataataccattaacctatcaaagtttcaaagttttaattatcacctctaaccccttccagtggtttcatttttccttgaagactctgggaaggtaggtccgtgtggttctcaatgacatcatccttataatgaaaactgtcaagtcttcaatttaaactgagaaccacaatttccaatgtcgttcttttcaataaaataggggagttttktaaactttcattgggccagttcaaccacgaatataatgctgctaatcctaaaagcaaagtcctaaatattgaaggttaactggatccatgtgaagtcagcctaaagaaagacagattttagtgtggccaaaagcatgcagtgccagtggctttaaattcaatataaaaagatattagatattagaatgatctaacttaggcatttgcctggtggtacattgtagtgaccagagtctataatgatgtatgtcagaagattctcaggggctctgctcatcatatcatgtggtctgatcatctcagtcacttgaaattttacctcttgttttttctattgatataagtcatctactcattaagaacactcctaaagtgaactttcattaaacagaaggtaatttatatttgttatacacacagctgccattaatatatagccaattcagttcttgttttatgttgttcctcacctataaattcattttgtaatcgggcttctaaagattaggaaaccagcattccacatataaaagccaggttactttaatattcagaatagtaaactatagacacactatggaaaataaaattcatgctaagactaattgatggagccaggagagaacagatagggtttggagagcatattctcagattaaatgctatacaactcaatttacatgcactacatg

SEQ ID NO: 548504 - DNA, 588 bp, Homo sapiens
ggtgtaacttatgattccccaaaacataactaccagagcttactgtagaacagaagctttcctggtaacataaacagtcaattaacacatattttgtatgttccatatatawtatattgctgtattctgacaataaagtaagctagaggaaatgaaatgttattaagaatatcataaggaagacaaaatatatttactcttcattaagtggaaatgactcatcatcgttctttacattgagtaggctgagaaggtggaggaaagggaggggttggtcttgcttgtgcagggctggcaggggtggaagaaaatcctctcataagtgggcctgtgcacttccaacccaggttgttcaaggctcaactgtacataccatgataatgcatcttgcctaattaacagttgtgaaatgttggagttatgtggtatttttatttcatattaagaaagtcaaaaatatttttgtagcagttgagttctcactggccgctgcagaagtatttgttaaaacttgtatggtaactttaccttctggtagattctaaactctttctttctgattgcaggagcaagatgtatcaaccaggg

SEQ ID NO: 548505 - DNA, 605 bp, Homo sapiens
ggatgttctacccaggcccctcctgccagcacacactgtgccatgatggggcagtctcgtctcatagtccttcttttcctcttcctccagctgtataaggaggagagagtcrggcccatcaccatgcaggggggtgatatgatttggctgtatccccaccacaatctcatcttgaattgtagttcccataatccccatgtgtcatacaaggggactggtgggaggtaattgaatcatggggagcagttactcccatgctgtactcttgatagtgatagagtgatagagtgagttttcatgagatatgatggtcttatgaggggcttttccccctttgcttggcacttctctctcctgctgccatgtgaagaaggacatgtttgcttccccttccaccatgactgtaagtttcctgaggcctccccagccaagtggaactgtgagtcaattaagcctctttcctttataaattacccagtctctggtatttcctcatagcagtgtgagaacagactaatacagtgaattgctaccagtagagtgaggcgttgctgaagagacacctgaaaatgtggaagtgactttggagctggatgacaggcaga

SEQ ID NO: 548506 - DNA, 1465 bp, Homo sapiens
gcattctttaggcccttctctgtgagtgcagaatgctctgcatactcaacagccttccagtccgaggccagtctggagtgataggcttctgttttttgttcttggcaagttttacaagagtagagggatcattctctgagatgaatttgggtctcgacaagcaagaaaggaatctttggatagyggtgagttatcacaggcacccacttttctttcacatttttgaatgaggacggagataccactgaaaaactgactagaaatacatctgtttgtagatacttagcaattgcaatcttttataaccctcttgcccagaagtgtcaaaaagtccaagagcatatggctctccaccaaccataaccatgaccacatagttgttagaaatagttggtacattttcagatgtaaatttgtttgttgtgtaggatatcggtatgttttaccaatggcatcattgcttacaacagcacacttaatggtctgcattgctgaaatagttttgtatttactttaaatatttcgaacttgatgttgacctcagcttctccctggggcatggcggcactcaggacctctctcctagacagtgctggcattgcagttggaacttgggcctctcactctaccctaacatgctctcctcaccccaactcttccaaagactgtgactcccaaggaaatgaatgctttgtgccctgcaccacatgctaatcccaagctcagttccagagtgcagctggctttgtgtgatcttctatctctggttttcatctatgaggaagggttctgcccattgacccagaggaccctctctgagctgacacctaagcttctttattataaatggtgacttcatatttaaacttaaatgcaaacaatactaatttgaaaagagaaaagtatatttccatataggctgtgtgctcttgaaggtcagaatatgtttctccttttcaacctacatttcctgggcgtccacccttggtaaaagaaaaaaaatgggctgggtgcagtggctcgtgcctgtaatcccaacactttgggaggctgaggcaggaggatcacttgagcccaagagttcaagaccagcctgggcaatatagtgagacctcatctctacaaaaaaataaaataatcagccaggcatggtggcacatgcctatagtctcagctactccagaggctgaagtaggacaatcgtttgagctagtagtaagccgtattcatgccactgcactccagcctggggagacgctttctcaaaaaaaaaaaaaaaaaaaaaaaaaaatgactcccctgtctacgtggaccttggaatgggaaggtgggaagaccatcaatgaatagcaacaatcatgtgatctgtccagcgaccaaagaagtaggaataggagagaaggggaagcagaaagaacaaccatttctggggtctggaggcgtgaaaatgcctggcatatttagg

SEQ ID NO: 548507 - DNA, 640 bp, Homo sapiens
aactaagcagtttataggtgctacttccttttcctcaaaatagcccaaaagattggtgttaatattgtttccacttcacaaatagggagactaaggtttagagaaatgagcaatttgctcaaggccacacggctagtgagcaccaaaayggtgacttgactccaaagagcatgcccatcattgcaccctatcctgggaagaagagtctgggatccaaagtcctgggttcaaatcccggttgtgtaactcagagcaagtcccctaactctctgacccttcagctctgcatttcaccaatgaggcaaataaactctctcaggttattctgaagattaaatgagagaagttgtataaagtgccccacagtgagcttggtgcacagtagatgcccagcaaatgcctggcctctctagacccctctccacatcctcagcccagtgcagtttctatcatttcaatcctctttgtttccgctcctgccttcagtccttgctcagaacttaaaaactgtggatgaattgtgactgtgatggattaatctttaatagcttcaaattcctagctctttaaaggaaaaagtaagggagctccaggctccccaacaggtgatgctgagaggctgctcatctttgccgcgcca

SEQ ID NO: 548508 - DNA, 640 bp, Homo sapiens
aactaagcagtttataggtgctacttccttttcctcaaaatagcccaaaagattggtgttaatattgtttccacttcacaaatagggagactaaggtttagagaaatgagcaatttgctcaaggccacacggctagtgagcaccaaaacggtgacttgactccaaagagcatgcccatcattgcaccctatcctgggaagaagagtctgggatccaaagtcctgggttcaaatcccggttgtgtaaytcagagcaagtcccctaactctctgacccttcagctctgcatttcaccaatgaggcaaataaactctctcaggttattctgaagattaaatgagagaagttgtataaagtgccccacagtgagcttggtgcacagtagatgcccagcaaatgcctggcctctctagacccctctccacatcctcagcccagtgcagtttctatcatttcaatcctctttgtttccgctcctgccttcagtccttgctcagaacttaaaaactgtggatgaattgtgactgtgatggattaatctttaatagcttcaaattcctagctctttaaaggaaaaagtaagggagctccaggctccccaacaggtgatgctgagaggctgctcatctttgccgcgcca

SEQ ID NO: 548509 - DNA, 643 bp, Homo sapiens
gaagagccctgactcttcagcatgcctgttcctcactcagcatgtggcctttcacaagatgctaaccctttgtgagcctgggttacatttctagaaaggctgcacagaccagagagaaggccaagcagaagacagtccacagcagacactcaccaaacacctggacattgtagaggatgaccgctgccccgggctgcccaaccccattgtcggccatgcagcggtaggtgcctgagtcctcctcgctggtggtgtcgatgaggaggttgctcagcaggaagcgcgtcttgttgtagccggtgacactggacccatccttggcccaggtgacccgtgggggtgggattccactggccacacactccagaatgagactctggcctttggtgacgatgatggtttgggcctctggggggtagatgatgcgggcagcctcagcggtggagcctggaggggcaaggagggcaaggacagaaggcgtgtggaccaggatgtcctgtagagcatscccaggaggcagtcccagagagcatggagatgggatcaaacagccattccgggtctttcaacctatgtagagtggggcgtgctacagaattcccttggggcttggtgtccttatcagaaacaaggactgcttctg

SEQ ID NO: 548510 - DNA, 879 bp, Homo sapiens
cccaagttgtagaatgcttaaagtgaaacacatatacctttctggataacacaatagtgcgtgacactcgtggaaatggcgcccgtgcacagcagatgaaaagtgtgagcactgccccctctgcatgcctctcactcggcgaatctgtgcaaagcaaatgttttgagatcttctaaatgtggcacaccatccagattgctttccagttattttgtctgactagaaactgtgatgtcacataaattggtgactgtgtctgcctgaatccataatgccaaaacatcatttgttgatttagcaggtttggggataaacaagttgttatattgaaaaaaaaaaaaaaaaaaaaaaaaaaaaggagggctccaaaaagtgctgtggtttttcaagagccatcatggcaaaaacaaaacaaaactcattaatrgaacagtcgttttgaactacagctgagtaaattaccagaaggacatctgtgcacattaaaagtaatataggatgttctgatgctcacttgagtcatgcaaaaaaatgtttaaaaatttaaaaaagtatatatagcatgaagttcagccaggtaagagccaagtggctgaaaggcattcaggagagagagtgagtccttcccagctgatgaaaatgcagagatggcaaggaggaagcacagtttccaggggcccactggcccccgaaatgccacagggtgagtacgccagagagcgtggcaaacgcacaccatttccattcattcctcaaggaagacgcaagtccaggcaaatattctggttgtgtggtttttcagctgaaagtgaagacaaagggcattgagcaggaattaatgcaaggctccaggctcctggcacgctgcccggagctcca

SEQ ID NO: 548511 - DNA, 623 bp, Homo sapiens
aagaactaattattttgctttaaataagtttttctaattcaatttccttttatgattatgaattcctttctcttttgaaggattactgatacccaaatgttttttctccttcaaatatgttacttgaaaggaaatgaagtgagaagtgaaaactgcttgtttgtggtgtaggcttcctacttctataaaattgcaacactgagatgtaataggtagttgcttaagtagaaactattaagattccaggatatggctgtgactgaccagttgccccaggccatagcttttccttcctttccatatggctttgttgtaagggtattttgaaagcattggtatgcagtgttttttttttttaataaaactttcccatttaggatctttcagcatcctcagctgatgctttgccaacttaatttatactaacawcacacaagattgcttgcatataaatcatacttttctacttagatatcttaatagttcacagtaaaatgagtgggtgggttttaataaaaataacattttagaatgtttaaaaaggtgagaatatataactaagctatatttagtcaccattaatcaactaacacatttctatgtattgaactgtttgttttgtg

SEQ ID NO: 548512 - DNA, 623 bp, Homo sapiens
aagaactaattattttgctttaaataagtttttctaattcaatttccttttatgattatgaattcctttctcttttgaaggattactgatacccaaatgttttttctccttcaaatatgttacttgaaaggaaatgaagtgagaagtgaaaactgcttgtttgtggtgtaggcttcctacttctataaaattgcaacactgagatgtaataggtagttgcttaagtagaaactattaagattccaggatatggctgtgactgaccagttgccccaggccatagcttttccttcctttccatatggctttgttgtaagggtattttgaaagcattggtatgcagtgttttttttttttaataaaactttcccatttaggatctttcagcatcctcagctgatgctttgccaacttaatttatactaacatcacacaagattgcttgcatataaatcatacttttctacttagatatcttaatagttcacagtaaaatgagtgggtgggttttaataaaaataacattttagaatgtttaaaaaggtgagaatwtataactaagctatatttagtcaccattaatcaactaacacatttctatgtattgaactgtttgttttgtg

SEQ ID NO: 548513 - DNA, 562 bp, Homo sapiens
aatgaataagacctactatacgatagcataatagggtgactatagtcaataataaatgacttgtgtattttaacataaagaatataattgaattgtttgtaactgaaagaataaatgcttaggggatggataccccattctccatgacgtgcttatttcacactgcacgcctgtgtcaaaacatctcatgtaccccataaatatatatacctactatgtacccacaaaatttttttaaataaaagaaaattaactcstaaattcctaccattatgcagactggataactaaatcatgataccatgatatcatagtgaagaatgtgatgagggctatgaggttagacttatctgggttcaaatctttatgagttacaaaaaatatagatacacttgagatacagccatagacagacagacagatcgatcaatcccaggtgtaggtttccaagatatattgttgagtagaaaaaaaagttaagttgcaggaaacaaagtctaatgtgacttttcttacaaaggagatgaaagaaagagagaggagagcaaaataaaagtcccgt

SEQ ID NO: 548514 - DNA, 562 bp, Homo sapiens
aatgaataagacctactatacgatagcataatagggtgactatagtcaataataaatgacttgtgtattttaacataaagaatataattgaattgtttgtaactgaaagaataaatgcttaggggatggataccccattctccatgacgtgcttatttcacactgcacgcctgtgtcaaaacatctcatgtaccccataaatatatatacctactatgtacccacaaaatttttttaaataaaagaaaattaactcgtaaattcctaccattatgcagactggayaactaaatcatgataccatgatatcatagtgaagaatgtgatgagggctatgaggttagacttatctgggttcaaatctttatgagttacaaaaaatatagatacacttgagatacagccatagacagacagacagatcgatcaatcccaggtgtaggtttccaagatatattgttgagtagaaaaaaaagttaagttgcaggaaacaaagtctaatgtgacttttcttacaaaggagatgaaagaaagagagaggagagcaaaataaaagtcccgt

SEQ ID NO: 548515 - DNA, 704 bp, Homo sapiens
  misc_feature 370: n = A,T,C or G
gaatgatgtgcagagaccacacattaaaaaaaatcaaatttaggaaacaaaatctttttaagggcacaatcttgctaaatatacgccaatttgtacttgtaaacaaaatgtgtaatatgtcagtttgaggcatttccatctagattaatgggtgacaattttcttcaaaaatggtgtgcatatttgctttactttcaggtcagaagaggatccgttccaatgattttcctaaaacaatggaagtgttttccaaaggtaatttgatgtctttactgatagagatagaaaattgcttgcactttttaaagagcaccccacacctcactagtgttgcaggacttttccttaagttttcacaaggcctaaaaanggaaaccgagaggccttttctttggtcattggttcccccatttggggccccaattgaaaaaacattttacggctcgcagacagtttaaagggtaactaagcagggttttatcgggtgaaaaytgttcgaatcccaggttccacacagaaggaggaagggcgaggctcctccccactgcaaagggtgtgaacttcccaagtctcctccccagtgggcaggctggttggagtttcaccagagaccttgtcctacctggctgtctcattcccctctctaaagaagtatatctaactgtcgttaggttaagcataaggacaaagaccaatcttaactg

SEQ ID NO: 548516 - DNA, 1407 bp, Homo sapiens
ggatattactaagaagcatccactcccaggaagaggaggaaggccatatggctcctctctgcattgcctttgacacatgctaggaacctgcaccacctgagacagacagaggccagccagtaactaatccaatgagagaatgaaggtgggtgttttatgtttattttataatatttaaatgacaaattaaggtggtatgtattcaaggtgtgcaacattacggtttgctatatgtatgcattgtgtaatggttgtcacatttagattaatgaacacatccatcaccacccatgctgtacattacatccccagcacttattcatcttatcacagaaagtgtgtatcctttgaccaacttttccccattttccccaacccctagcccctggaaaccacccttctactcaaaagaacaatctagccttgcctgggatgaagtgcaagaaacactcctgtggatacaatctctaccccagccttcacttcctgtttctgcacttcagagcctctcctgtggggcatttctcctttctcctataagttccactcttccatcttctcgtttatttgagctgttaagctcaacattaggtgttcacatatgggtcagggtggtgagcatgtttttgcagtagaaatgagaaaacagctgggcaccggtggctcacgcctgtaatcccagcattttgggaggccgaggcaggcggatcacaaggtcaggagatcaagaccatcctggctaacacggtgaaaccccatctctacttaaaaaaaaaaaaaaaaaaaaaaaaaaaaaaaaaaaaaaaaattagccgggcgtggtggygggcgcctgtagtcccagctactcgggagtctgaggcagcagaatggcgtgaacccaggaggcggagcttgcagtgagccgagatcgcgccactgcactccagcctgggcgactgagcaaaactccgtctcaaaaaaaaaacaaaaaaaaacaaagaaatgagaaaacaatttgctcagccactgtgggaaatcccttctcacatgagcaatcagacactcaaacatgccatggctcacagcaccttcactatttggggtaccctggaacacatcccttgtacttatcctttctgctccttcaggaataaatgaagtatctgctggtgcagatgtaataggacaaaaaatatttcagaagaagaggttttaatacctgtctgtaagaatcaaacagggttaaaacaaaaaagggaaaaggaagtactgcatgaagaactttatgtattgcaggtcactgaatactgtattctttattgagctgggttttttgtttaagcatttttattttcctgcattggtaaaaaaaaaaaaaaaaaagtgggaaagatggaatcttaaatttttatttactcagtttca

SEQ ID NO: 548517 - DNA, 637 bp, Homo sapiens
ggtggacattgtaaaatatgggcaggatcaaggggtaagtggagtcttgttcttgactcaaatgctgatcttaaatttgtgttttcctgcagatattaaaacatgcaatgaaggagtgtttggaaaaatgcattgagcaaaatataacttccatttcctttcctgcccttgggactggaaacatggaaataaagaaggaaacagcagcagagattttgtttgatgaagttttaacatttgccaaagaccatgtaaaacaccagttaactgtaaaatttgtgatctttccaacagatttggagatatataaggtaagttaatatcttagaaatgtcctactgttcattcattcattcattcaytcagcaacatctgtttagtatctacaatgtaagatgcaggggatgcagggctaggtgctgtacagtgtggtggtgttctaacttggtgaagtttaatttttacagattgtccacctctgacctagtaaaacatgtcattatagaagccatgtttggcaagacacggtggctcacacctgtaatcccagcactctgggaggcggaggcaggcggatcacctgaggtcgggagttctagaccaacctgaccaacatggagaaaccctgtctctacta

SEQ ID NO: 548518 - DNA, 566 bp, Homo sapiens
gcatagacgtgggatccacgcttctgtttccccggaatagsaggaaaattaaaagaaaacagcaggctggaaattgagtgtttttaaacattaatacatagagatgtatgtatttacatatgtaaatgcatgtgtacaaatttttttacataaatgtgtatgcatttattttcatatccatacgcatgtaaatttatagttacataaatatatccaatatacaaaaatatgtgcatatatttctataaatatattcatgtatgagaatatatgcaaccgaagggccacatttcggttaatatgtctatgtatgtgacatggatgtcatcctgctttacgtgacatgtgtgtaacgtagactgcgtgtgtggcagactgaaggatggatgggagggatttgatttttttattgtacaatcactttgtgccttgtgatatttatctcacccagctcagaggcaggcgattagcagctcagaggaaggtaaaataacgcactgtgtgaaccaagcatacaggacaattccagtttgggaccttggaaccttctacgccaccctcttcca

SEQ ID NO: 548519 - DNA, 566 bp, Homo sapiens
gcatagacgtgggatccacgcttctgtttccccggaatagcaggaaaattaaaagaaaacagcaggctggaaattgagtgtttttaaacattaatacatagagatgtatgtatttacatatgtaaatgcatgtgtacaaatttttttacataaatgtgtatgcatttattttcatatccatacgcatgtaaatttatagttacataaatatatccaatatacaaaaatatgtgcatatatttctataaatatattcatgtatgagaatatatgcaaccgaagggccacatttcggtyaatatgtctatgtatgtgacatggatgtcatcctgctttacgtgacatgtgtgtaacgtagactgcgtgtgtggcagactgaaggatggatgggagggatttgatttttttattgtacaatcactttgtgccttgtgatatttatctcacccagctcagaggcaggcgattagcagctcagaggaaggtaaaataacgcactgtgtgaaccaagcatacaggacaattccagtttgggaccttggaaccttctacgccaccctcttcca

SEQ ID NO: 548520 - DNA, 561 bp, Homo sapiens
tcatgctaaatgattatcagggccttttttaggaccatcacaatctcccaactctgtccagctttcccaggtctatgatgttaacgtattgctgtgcctgctataatgttaatgacataatagctttagatgatcatccttaaatctgaattttatttcccactcaacccacatttgaagcctgcattcacttgycacaaatatctcacccaattaaattcaaaaaatatatgcataactaacagtctaaacatgcatatgcatgtgtttcttaaaataataaaatctgaacagaaaagaagtttagatcatcttgaattgtttagacatatattgggggtctatattattagtatatcttctgtatacaattctgtaaatgtaatcttatatgttattgttagtagtgttttttttaagtctctaatacatgatagaatcatatcgtggaatttttatgtcctctcacagggttattttatcattaaaaaatatcctttggtttgttaaatgccaagtactcaaggatgcaattgagaccatttcaatttatcattcact

SEQ ID NO: 548521 - DNA, 561 bp, Homo sapiens
tcatgctaaatgattatcagggccttttttaggaccatcacaatctcccaactctgtccagctttcccaggtctatgatgttaacgtattgctgtgcctgctataatgttaatgacataatagctttagatgatcatccttaaatctgaattttatttcccactcaacccacatttgaagcctgcattcacttgtcacaaatatctcacccaattaaattcaaaaaatatatgcataactaacagtctaaacatgcatatgcrtgtgtttcttaaaataataaaatctgaacagaaaagaagtttagatcatcttgaattgtttagacatatattgggggtctatattattagtatatcttctgtatacaattctgtaaatgtaatcttatatgttattgttagtagtgttttttttaagtctctaatacatgatagaatcatatcgtggaatttttatgtcctctcacagggttattttatcattaaaaaatatcctttggtttgttaaatgccaagtactcaaggatgcaattgagaccatttcaatttatcattcact

SEQ ID NO: 548522 - DNA, 624 bp, Homo sapiens
catttcattgagatgtggggactggggtctctgaccttgaatctgggaggacttttaacttctttgactaagagaatacaaaaaaaatcaatgctgtgtaacttttgagacctggcctaaatcgacaatctgacttctgctcactttttttcagamtcctccatctcaggagggccccagtattgccaggctgggagaaacccaaaccatgaggatagaccacgaataggagttctggttgacaatcccagttcattcctagcttcaaatacacaaggccaagtgccagatatgggcataaaaagcaattttggaagtggacactccagtccaagctgtcctagccctcagctatttgagttgcatccagacatgtaaatcttcccagctgaggcctcatcattgaggtgcagaaaaggggcatgcccactgtgcctgtttctaaattcctgacccacagaacctgtgagcataatacaagtttactattttataccagtaagtttggggtatagtattatgcaacaatacaacctgatgcacaaaaaatctcttctttgttacataaactctatataaactggcatatgcttagttcttaaacctctctccaatctccttctc

SEQ ID NO: 548523 - DNA, 624 bp, Homo sapiens
catttcattgagatgtggggactggggtctctgaccttgaatctgggaggacttttaacttctttgactaagagaatacaaaaaaaatcaatgctgtgtaacttttgagacctggcctaaatcgacaatctgacttctgctcactttttttcagactcctccatctcaggagggccccagtattgscaggctgggagaaacccaaaccatgaggatagaccacgaataggagttctggttgacaatcccagttcattcctagcttcaaatacacaaggccaagtgccagatatgggcataaaaagcaattttggaagtggacactccagtccaagctgtcctagccctcagctatttgagttgcatccagacatgtaaatcttcccagctgaggcctcatcattgaggtgcagaaaaggggcatgcccactgtgcctgtttctaaattcctgacccacagaacctgtgagcataatacaagtttactattttataccagtaagtttggggtatagtattatgcaacaatacaacctgatgcacaaaaaatctcttctttgttacataaactctatataaactggcatatgcttagttcttaaacctctctccaatctccttctc

SEQ ID NO: 548524 - DNA, 624 bp, Homo sapiens
catttcattgagatgtggggactggggtctctgaccttgaatctgggaggacttttaacttctttgactaagagaatacaaaaaaaatcaatgctgtgtaacttttgagacctggcctaaatcgacaatctgacttctgctcactttttttcagactcctccatctcaggagggccccagtattgccaggctgggagaaacccaaaccatgaggatagaccacgaataggagttctggttgacaatcccagttcattcctagcttcaaatacacaaggccaagtgccagatatgggcataaaaagcaattttggaagtggacactccagtccaagctgtcctagccytcagctatttgagttgcatccagacatgtaaatcttcccagctgaggcctcatcattgaggtgcagaaaaggggcatgcccactgtgcctgtttctaaattcctgacccacagaacctgtgagcataatacaagtttactattttataccagtaagtttggggtatagtattatgcaacaatacaacctgatgcacaaaaaatctcttctttgttacataaactctatataaactggcatatgcttagttcttaaacctctctccaatctccttctc

SEQ ID NO: 548525 - DNA, 624 bp, Homo sapiens
catttcattgagatgtggggactggggtctctgaccttgaatctgggaggacttttaacttctttgactaagagaatacaaaaaaaatcaatgctgtgtaacttttgagacctggcctaaatcgacaatctgacttctgctcactttttttcagactcctccatctcaggagggccccagtattgccaggctgggagaaacccaaaccatgaggatagaccacgaataggagttctggttgacaatcccagttcattcctagcttcaaatacacaaggccaagtgccagatatgggcataaaaagcaattttggaagtggacactccagtccaagctgtcctagccctcagctatttgagttgcatccagacatgtaaatcttcccagctgaggcctcatcattgaggtgcagaaaaggggcatgcccactgtgcctgtttctaaattcctgacccacagaacctgtgarcataatacaagtttactattttataccagtaagtttggggtatagtattatgcaacaatacaacctgatgcacaaaaaatctcttctttgttacataaactctatataaactggcatatgcttagttcttaaacctctctccaatctccttctc

SEQ ID NO: 548526 - DNA, 517 bp, Homo sapiens
atgtgtctggtttgaatcctgaaccagccaggatttgctaggcttgttaggaaagtcacstaatttttctgaacttccatttcctcatcttcaaaatgaggaatatcatagtatctacttcctagggttttttaggaggtttgaggtcatgtaagtaaaccctttggcaaatttccagacaactaacaatcatttagtaaataaatgatagttttattattattttatttacctgtaaaacattaactattgtctggaatttgtgtttttttttctagttgtttactattaaaataattccacaatgaatattgcattagtctgttctcatgctgctaataaagacatatctaagactgggtaatttaatttataaaggaaagaggtttaatggactcataattccacatggctgaggaggcctcactatcatggtggaagacaaaggaggagcaaaaagatgttttacgtggcagcaggcaagagcgagctagtgcagagggactctccgttatat

SEQ ID NO: 548527 - DNA, 517 bp, Homo sapiens
atgtgtctggtttgaatcctgaaccagccaggatttgctaggcttgttaggaaagtcacgtaatttttctgaacttccatttcctcatcttcaaaatgaggaatatcatagtatctacttcctagggttttttaggaggtttgaggtcatgtaagtaaaccctttggcaaatttccagacaactaacaatcatttagtaaataaatgatagttttattattattttatttacctgtaaaacattaactattgtctggaatttgtgtttttttttctagttgtttactattaaaataattccacaatgaatattgcattagtctgttctcatgctgctaataaagacatayctaagactgggtaatttaatttataaaggaaagaggtttaatggactcataattccacatggctgaggaggcctcactatcatggtggaagacaaaggaggagcaaaaagatgttttacgtggcagcaggcaagagcgagctagtgcagagggactctccgttatat

SEQ ID NO: 548528 - DNA, 657 bp, Homo sapiens
ctttctgctaagacagctgtcaaaatcactgacgctggccttatgaaagctaattttcagaagcccaatccgggtactatgagtgaaaggttttgagtatacacattgacttatttgtgaaagttgattgtaggaaggaagttgtagtgatgaggaatgtatacgtacagataagtgtgtgtgcacttgaacacatctgtaattgagaatttttttttttttgaccaatgtagtagtgctcagggaaagttaggaccaaataattttagatggtgatttacatcagtgcagtatacwcttgatatatttattctatcatggagatttggctaacaaatttaatagggacaataaactgttttctacccttttacatgaaaaaagggacagagacacaagtctatgaactatgagtatttgcctttcagtaagtacttttttatctcatcaaaatggccccaatgtcaaggagaatgattcagcacaaacaattcaccatttcatctctttcattccacagaatccttcttaaagagagtgagtagatttatctcttgttattatctccagcaagtatctgaaacagcaatgaccaatgggcagatgtatgtactggggtccaatttatgtatccactttcagtttcaatcttttttt

SEQ ID NO: 548529 - DNA, 545 bp, Homo sapiens
catttctctgatgattagtcacaaagcattttttcatgtytgtcggccacttgtatgttttttgaaatgtgtctgttcatgtcttttgcccatttttttttaacaaggttatttgttttctggttgttcaattctttaaattccatatagattttggatattaaacctttgtcagatgcaaattttgcaaatattttctcccattctgtaaattgtttactctgttgatagtttcttttgctatgcagaagctctctagtttaattaggcccaacttatttgtttttgttgcaattacagctagactctatccccaccattttgatgtactattttaatcacaggtgagtttaattattctgttttcactgtgatatttgctctttgcaggtcaattatgtgactagttagtaggcaaagtgatgacaagtttatggaagaatcagattagtaatgagataaccaataaaattttgggatcactaatgagaattatatatggctttatcatgcattagccaagaaatgattacagattatttttt

SEQ ID NO: 548530 - DNA, 545 bp, Homo sapiens
catttctctgatgattagtcacaaagcattttttcatgtctgtcggccacttgtatgttttttgaaatgtgtctgttcatgtcttttgcccatttttttttaacaaggttatttgttttctggttgttcaattctttaaattccatatagattytggatattaaacctttgtcagatgcaaattttgcaaatattttctcccattctgtaaattgtttactctgttgatagtttcttttgctatgcagaagctctctagtttaattaggcccaacttatttgtttttgttgcaattacagctagactctatccccaccattttgatgtactattttaatcacaggtgagtttaattattctgttttcactgtgatatttgctctttgcaggtcaattatgtgactagttagtaggcaaagtgatgacaagtttatggaagaatcagattagtaatgagataaccaataaaattttgggatcactaatgagaattatatatggctttatcatgcattagccaagaaatgattacagattatttttt

SEQ ID NO: 548531 - DNA, 542 bp, Homo sapiens
atccatatgcagattgaagaagtgtggcaatgaaggggcaaaagttggagttaccctcttgcctcaagtggttggagaaattgtaagccaattgcatatatttcagtcttaacacttttgtatacttctcaatttcttttaaaatttaactccggaagtcatagttagaaatttgtcttctttaccaacttcctccatgcattacctatcgcccatctacctcctaaaatttggagtcttctcaaagcaggcaatatttgtagatagtattatatgaaaatgttggaatccagtgaaaatttttatggtaaacatagatggaaatgtcctctttgctataagatagtagctactttaagtattttttcctttgaataatgttgttcatgtcaattgccaaaaraaaaaatccttgtaattatatgaaaataaaaaggaaaaaatacttaagaaataggagaccaggagggaaattataattgaatctggaaaccattttttttaaccttggctaaataaataagaaatgataagaggtacaa

SEQ ID NO: 548532 - DNA, 548 bp, Homo sapiens
aagtgtttatcctccaattcttgcttgtattgactaagggttgttctcagagtgtcaaccctggcccctctgacctagcctgtgtctgcagagtgcaaaaaamgaaaaaaacaaaaaacaaaacaaaacaaaaaaacaccacagatagggttacaaatgcatgcaatacaaagctgttagtgtttatggtgagtgcagagggaagtggccaggttctgctataattagggatggaaacaaggaaggaagagactaaggaaagcaaaggactgagagattaacatttactgagtgccgaatatgcacgggatactgcatatgttagcatgtgtgtgtgtttcagcctcacgtagtcctcatgatttccatttgaagaaactgaaattcagagagattaactttgcaatgagcaacagagacccagttctttattaggtcacctaaagatcaagctactccaccattcagcaagtaaatgtggggtgttaatgtgggcatagtcaaaatagtggcctgtggtgtgtttggacagatcatctcatcggaat

SEQ ID NO: 548533 - DNA, 996 bp, Homo sapiens
tgctrtgtttatttatattaaactctcaagaccatcatgaagggtgaaactaacacagccaaaacaatgcatgtggttttgatccccaaacctgtttctctccacctccccatttctgtaatggtaccagtcattcactatttggacaaactgaaaacctaggagtcatccttgttttctctcttggtcccatcacttcttctcccaacaaccaaaccatcggcacactcttccattcaaaggctacttccaaaatatatcctaaaatcattcacttctctccatctgtgtgccacctcctagcccaggacacccatctcttacctgtaccatctcatcagcttcctaacatatctccctgctctcacagttgccactccctaaatccactctctgctagagtagtcacttcattacctgcctaaaggcagtcagtggtgtcctgccccatttcaaggcctggcttggacctacctattcctgtgttctggtgcctaatgcctgtcacaccatgcctctccctgcttatccactatatcctagcattacactgcctgcttcttgttccttaatcaccaatccattcccatctcagggtatctgtaccttctaattactctgcctagaatgttcatgtccagtctttgcatgactggcttcttcacatgggtcaacttgaatttcccctcctttaagaggtttggttctatgccaggcaaggtggctcatgtgtgtaatcccagcactttgggaggctgaggcaggcggatcacctgaggtagggagttcaagaccagcctgaccaacatggcgaaaccctgtctctactaaacatacaaaaattagccgggcgtggtagtacatgcctgtaatcccagctactcaggaggctgaggcaggagaatcggttgaacacggaaggtggaggttgcagtgagccgagatcacactattgcacttcagcctgggcaacaagggccaaactccgtctcaaaa

SEQ ID NO: 548534 - DNA, 996 bp, Homo sapiens
tgctgtgtttatttatattaaactctcragaccatcatgaagggtgaaactaacacagccaaaacaatgcatgtggttttgatccccaaacctgtttctctccacctccccatttctgtaatggtaccagtcattcactatttggacaaactgaaaacctaggagtcatccttgttttctctcttggtcccatcacttcttctcccaacaaccaaaccatcggcacactcttccattcaaaggctacttccaaaatatatcctaaaatcattcacttctctccatctgtgtgccacctcctagcccaggacacccatctcttacctgtaccatctcatcagcttcctaacatatctccctgctctcacagttgccactccctaaatccactctctgctagagtagtcacttcattacctgcctaaaggcagtcagtggtgtcctgccccatttcaaggcctggcttggacctacctattcctgtgttctggtgcctaatgcctgtcacaccatgcctctccctgcttatccactatatcctagcattacactgcctgcttcttgttccttaatcaccaatccattcccatctcagggtatctgtaccttctaattactctgcctagaatgttcatgtccagtctttgcatgactggcttcttcacatgggtcaacttgaatttcccctcctttaagaggtttggttctatgccaggcaaggtggctcatgtgtgtaatcccagcactttgggaggctgaggcaggcggatcacctgaggtagggagttcaagaccagcctgaccaacatggcgaaaccctgtctctactaaacatacaaaaattagccgggcgtggtagtacatgcctgtaatcccagctactcaggaggctgaggcaggagaatcggttgaacacggaaggtggaggttgcagtgagccgagatcacactattgcacttcagcctgggcaacaagggccaaactccgtctcaaaa

SEQ ID NO: 548535 - DNA, 642 bp, Homo sapiens
tattcaaaatagtcttattaaaaaactctagatttttttttaaaaaacagactttcaaatattttactgtacttcacttggtctcatttcagcaataagatctaaacttaatacctggagaataatctcaacattcttaaggacccagaaagtggagtacttcaaagatagcatgggacatgccataaattaaacaaacaacaacaacaaacgcaagaaaatatcttcagtatgctttttgagaagaggtaattcatacgaggactatttatgagtaaatcagggtgttatgatgactttttaatgaaagttggaattcttattctggtccaaagagatagccatgtgtttgaatgaccttgaagactgttattttgaaccattacgtaatccascagctgtggcaatgcccttttctgagatacacaaacaaagaagcaaaatagaatagacaagtgaattcttgagaaagtttgcacatcgccatgtagctatgtgtgtagagtgtcagcctccatacaatgttaactgtttccaagtgatagtggtgatgcccaacctgcagtttagctgtgagatttgggccagtaattgatgttacagcccatttagggacgactttaattaacatcacctgtgagc

SEQ ID NO: 548536 - DNA, 2138 bp, Homo sapiens
tgagcattggtaacaaagtgacccagggagagatatcagagcaaggaggagccaaatctgcctgaagaagaattatttgagtggtggaaaaggggatagagtggcatttgaattattttactctcagcttaattaatgttagagcagaatttccaggggaccaggactcagttttatcctggcttcaattaaagggtctctctgtcttgtctttgcttgtcttcatccctctccactttcctacccacccaagagacagccctgctacccaagctcaatgattgaaagatgagtaagaaatcataatttgaaaactgcctcatgaggcaggccatgaatcagaagagaagaaaactatgatttaaatgtaaatactgccaggagctatggggagaagtaaagctggacctggggtcactggacagaaagccagtaaaccttgcccgttctgacagatgaaggtcatagccttagccaaaatctatcaggcagatggatcgacccgactgagaagcaacttcttacagtggtgcagcaaagtgcagacagctttttcctgaaaatcttgcagaaaggattatcttggagataattttctgctttctttgcacattttataatgtactaagtgcattattaaaaaaatctgaaacagagtactgttgcagtcaaactcactgctcaggggtaatgagagaaaaaagtccagctattacctggtgcctactcggaatgtttgtgcctgtacttgtatgtttctgggtagccctgggtgattgcgtataggtctgtgtgtacatcgctctgaatttcactgtgtatctctaactatgctttgcgtaacaacatgtgcataactacactacacacatctctctctctctctctccccgtgtgcgtgtgtgtgtgtgtgtgtgtgtgtgtgtgtgtgtgtgtgtgtggtactgatgggagttattcattgcaggctttaggggaagttcacagtctttttgtcctcatcacagagttcccctaaccctaaccattttctacccatgaggactctgcatagcactgctggtccctggtggagcggcaatgtctgggcagtgtggacacggtgatgcctatcctcagcactgccctcagtgccctgctgctaccagggacagtggtggcaggtctgctactcatcttggctgtgtcaaagccaagaaggtctcgggctgtttgtggcacccacatctcctgtgcaggtcaggtctagggcctggcaggaggaagggaatggcccctaaggctaaggttttggcatcctcttgaccttttctcttatggatcccctctttgaaagacaccctagcaagttccctgccgagaaaagaccttttaattccagacacaggtgacccccatcaggcacaccgaactgccttctttccttgaacagtgatttacttagaaaagatggggctttgcaaccaaagtgatgcaagaaagtcctctttgttgagattcaccccagttaacagggcatctggttcactgatagatgcataacaatggaaatgattgaggtgttaatttgcatatttttgtttcagtggtgtagaaaaatctcaggactgagggtgattttttttttttttttttttttccctgaracagagtgtcactctgtggcccaggttggagtgcagtggcatgatctcggctcactgcaacctctatctcctgggttcaagcaattctcatgtctcagcctctcaagtagctgggattacaggcgagtgccagtacacttggctaatttttttatttttagtagagatgaggtttcatcatgttggccaggctggtctcaaactcctgacctcaagagatctgcccactttggcctcccaaagtgctggtattacaggcatgagccaccgtgcccggctcaagactgagggtaatttttatccacctgtctccaactccttcataccaatcctcaggatctccagggctgatttgataggtttttgctttttcttttccacaaaagagttgatggatgaggggaggggttcagactctgggaaatgggttgttatgggggcagatgtagcagcatcagaatgagggtcccaggacctagaggtagatgctgg

SEQ ID NO: 548537 - DNA, 639 bp, Homo sapiens
aatgactgactgaacttcaaatatgtaatttaggctttcccaagctgctcgatgatatgatgcagtgttgctttagactgtacattatttttcatatggtggaagtgtaatgtgaatcattctaatagctcctggcatcacatccacctactctctctctttgtgcaagtaatattcatgcatgtgagcagtgtgcatcaaagagcatataggaaatcacagtggaactgtggggatagcatggcttccacaaaagtcatataactgtagcttgcatccatagaaatacagtgcccactacaaggagaggttataaactggactgctccagtcaggctatatgtgtagctaagtrttaagttttgtccagacacattttaagatgggtattgaaatactgtcatttagaatacaatctgagttcttgtcctgtcctacatgagcttgtggtggggggctccccatgtgcattatcaggccatcttccaacactttccccctctgagcatcttttttttcctggctcaggtctagctcattctacccagggcctttcacttacaaagtcctcctgcttcaaaacctcttcctcttccatgctagttaattatccccattcaggtcttagagaaacctccc

SEQ ID NO: 548538 - DNA, 631 bp, Homo sapiens
gaacagcataggtaggaagcggtggggtgtgtgactagctcacacctcggtctcacagcaaattatagcagcaatagcagtgggatttgttttgggggstacattattggggtcttgatttgcatttccttgatgactagagatgttgaacacatttttatatattttttggccatttgtatatcttctttggagaaatacctattcagctgctttgtccattatatattggggtaatttgttaatttgctattcaattgttctttatatgttttggatattaacccttatatgagttccttatatgttttggatattaaccccttgtcagatatatggtctccaaatttataaaaacaaaagaggtttaattggtgcatggttctgcaggctttacaggaagcatggtactggaaactacttaacttctaggcaggtctcaggaaactttcaatcatggtggaaggtgaagggagagcagacatgttacatggcgagaatgggagcaagcaagatagtgcaggaggtgacatacactttttaataaccagatcttatgtgaactcagagtgagagctcatttatcaccaaggggatggccaagccattcatgagggacccactcccatga

SEQ ID NO: 548539 - DNA, 631 bp, Homo sapiens
gaacagcataggtaggaagcggtggggtgtgtgactagctcacacctcggtctcacagcaaattatagcagcaatagcagtgggatttgttttgggggctacattattggggtcttgatttgcatttccttgatgactagagatgttgaacacatttttatatattttttggccatttgtatatcttctttggagaaatacctattcagctgctttgtccattatatattggggtaatttgttaatttgctattcaattgttctttatatgttttggatattaacccttatatgagttccttatatgttttggatattaaccccttgtcagatatatggtctccaaatttataaaaacaaaagaggtttaattggtgcatggttctgcaggctttacaggaagcatggtactggaaactacttracttctaggcaggtctcaggaaactttcaatcatggtggaaggtgaagggagagcagacatgttacatggcgagaatgggagcaagcaagatagtgcaggaggtgacatacactttttaataaccagatcttatgtgaactcagagtgagagctcatttatcaccaaggggatggccaagccattcatgagggacccactcccatga

SEQ ID NO: 548540 - DNA, 506 bp, Homo sapiens
ttttgtaacagactgagtaagaattatcaaaatacaatacacacattgggcgccccaggccagagaagggtgtgggcctgacagtctgtaagtgcaggctggggatgcaaaaatcacaggctaggcccaaggaaaccaggaaaagagctgtgctcttgcttatacttcgccaccccatagcacccatggtgagtgtctaggggcctgggtggaccaggtctgcagataactggctccctcccctttctctgcccatgtgatattgttggaaggtttttaraattgttgcaggttatgaggtggaaaagtgaggcatgggagcaaggaacctacccctcccagactccctagggagcttggccagctcagtctccatcagggatttgggtttagtcaccttggagacctgggtctgtgccaccaaattctcaggaggcagggctggcccagtgctagctaatttagcctctcagtcacatggctgatccttggggagatggctgtga

SEQ ID NO: 548541 - DNA, 945 bp, Homo sapiens
tcaaggtgaaagggaccttatcaggtgctcccaagtaacacttgtgccactaaactaaatggaattgtctcctagatatacatcactcactcaaagaaagctactttggctttgccaatttagacttcatgtcaaactggtgatctacaattgaaattctccataaccaacaaagatcaaaagaaggtggcatctgaggtaaycggacttccgaagtcataagaccaggcctgtatccaaatgaacactttacattagtaataattaatacttgaggaaggtcttcctttataaatttccactaaatttctttcttttcatctcaaattcttatattttgttgctactatcaccatctgtggaccatatagcaaacctcttcttgcaatgggctcaggactatggtaatagattacaaaaaacaagaaacatttgttgggtatgtagtctcctgcctgtttctgatggttctggcctaccctggtggtatttcctctccaaggacaagattggatagaatatcagaaatatatccacatttctcaagaacaatcatcagtacttagcactagtatgactaagcaaggtgtgcatcactggcctattaatattgctttacaaagcaaaaagcatagaaaaagagttttgagaaaaaaaaaaaaacagaaaaacaaaaagcccccagttcattaattgtaacactggaagtgccccaaatgaggaatgaaacaatgacactgtcccaactgagagataagacaactcaatttcaggatggcataacacaaatttgggacagttttatctgacttacccactcctttggctaatttagtcagcttgcccatctatgttgggaacagataaatcatactgaggataccccattcaatagcaccagagatatgggatggatacccaaagaacagtgtatccccatcatta

SEQ ID NO: 548542 - DNA, 945 bp, Homo sapiens
tcaaggtgaaagggaccttatcaggtgctcccaagtaacacttgtgccactaaactaaatggaattgtctcctagatatacatcactcactcaaagaaagctactttggctttgccaatttagacttcatgtcaaactggtgatctacaattgaaattctccataaccaacaaagatcaaaagaaggtggcatctgaggtaaccrgacttccgaagtcataagaccaggcctgtatccaaatgaacactttacattagtaataattaatacttgaggaaggtcttcctttataaatttccactaaatttctttcttttcatctcaaattcttatattttgttgctactatcaccatctgtggaccatatagcaaacctcttcttgcaatgggctcaggactatggtaatagattacaaaaaacaagaaacatttgttgggtatgtagtctcctgcctgtttctgatggttctggcctaccctggtggtatttcctctccaaggacaagattggatagaatatcagaaatatatccacatttctcaagaacaatcatcagtacttagcactagtatgactaagcaaggtgtgcatcactggcctattaatattgctttacaaagcaaaaagcatagaaaaagagttttgagaaaaaaaaaaaaacagaaaaacaaaaagcccccagttcattaattgtaacactggaagtgccccaaatgaggaatgaaacaatgacactgtcccaactgagagataagacaactcaatttcaggatggcataacacaaatttgggacagttttatctgacttacccactcctttggctaatttagtcagcttgcccatctatgttgggaacagataaatcatactgaggataccccattcaatagcaccagagatatgggatggatacccaaagaacagtgtatccccatcatta

SEQ ID NO: 548543 - DNA, 945 bp, Homo sapiens
tcaaggtgaaagggaccttatcaggtgctcccaagtaacacttgtgccactaaactaaatggaattgtctcctagatatacatcactcactcaaagaaagctactttggctttgccaatttagacttcatgtcaaactggtgatctacaattgaaattctccataaccaacaaagatcaaaagaaggtggcatctgaggtaaccggmcttccgaagtcataagaccaggcctgtatccaaatgaacactttacattagtaataattaatacttgaggaaggtcttcctttataaatttccactaaatttctttcttttcatctcaaattcttatattttgttgctactatcaccatctgtggaccatatagcaaacctcttcttgcaatgggctcaggactatggtaatagattacaaaaaacaagaaacatttgttgggtatgtagtctcctgcctgtttctgatggttctggcctaccctggtggtatttcctctccaaggacaagattggatagaatatcagaaatatatccacatttctcaagaacaatcatcagtacttagcactagtatgactaagcaaggtgtgcatcactggcctattaatattgctttacaaagcaaaaagcatagaaaaagagttttgagaaaaaaaaaaaaacagaaaaacaaaaagcccccagttcattaattgtaacactggaagtgccccaaatgaggaatgaaacaatgacactgtcccaactgagagataagacaactcaatttcaggatggcataacacaaatttgggacagttttatctgacttacccactcctttggctaatttagtcagcttgcccatctatgttgggaacagataaatcatactgaggataccccattcaatagcaccagagatatgggatggatacccaaagaacagtgtatccccatcatta

SEQ ID NO: 548544 - DNA, 945 bp, Homo sapiens
tcaaggtgaaagggaccttatcaggtgctcccaagtaacacttgtgccactaaactaaatggaattgtctcctagatatacatcactcactcaaagaaagctactttggctttgccaatttagacttcatgtcaaactggtgatctacaattgaaattctccataaccaacaaagatcaaaagaaggtggcatctgaggtaaccggacttccgaagwcataagaccaggcctgtatccaaatgaacactttacattagtaataattaatacttgaggaaggtcttcctttataaatttccactaaatttctttcttttcatctcaaattcttatattttgttgctactatcaccatctgtggaccatatagcaaacctcttcttgcaatgggctcaggactatggtaatagattacaaaaaacaagaaacatttgttgggtatgtagtctcctgcctgtttctgatggttctggcctaccctggtggtatttcctctccaaggacaagattggatagaatatcagaaatatatccacatttctcaagaacaatcatcagtacttagcactagtatgactaagcaaggtgtgcatcactggcctattaatattgctttacaaagcaaaaagcatagaaaaagagttttgagaaaaaaaaaaaaacagaaaaacaaaaagcccccagttcattaattgtaacactggaagtgccccaaatgaggaatgaaacaatgacactgtcccaactgagagataagacaactcaatttcaggatggcataacacaaatttgggacagttttatctgacttacccactcctttggctaatttagtcagcttgcccatctatgttgggaacagataaatcatactgaggataccccattcaatagcaccagagatatgggatggatacccaaagaacagtgtatccccatcatta

SEQ ID NO: 548545 - DNA, 544 bp, Homo sapiens
aggtgagatctctttactgataagaccttttcaaatgaagaaaatagttttgtggtatcttccctgttgggggttctgctgataaccttttataggaccaagtggaacaacccatattaagtaggctgtagtggactcctaattagtccaattaatgtgatggctttaatttgtaagagatctaatggtgtagaatctgatttctttgaaatcactcctctctrgaatgtaaaacaacaatgaaaggcagctaaagcagtcctggagtggctaagtactgcatttagttattgtatttcccaccccttccctccttaaagagaaaataaaaggtatttcttcctccatattattccccctggcatgccgcctttgttaggacaacagcagccaagagcagatttgaaatgactcctcggcattttcttaagatgagtccagtggaggctcttcaattagtagtggtcatgtgtgccggggtcaatattccagaatacttatgtttttgctcttttctgcagaaataaacattattattgttgtt

SEQ ID NO: 548546 - DNA, 544 bp, Homo sapiens
aggtgagatctctttactgataagaccttttcaaatgaagaaaatagttttgtggtatcttccctgttgggggttctgctgataaccttttataggaccaagtggaacaacccatattaagtaggctgtagtggactcctaattagtccaattaatgtgatggctttaatttgtaagagatctaatggtgtagaatctgatttctttgaaatcactcctctctagaatgtaaaacaacaatgaaaggcagctaaagcagtcctggagtggctaagtactgcatttagttattgtatttcccaccccttccctccttaaagagaaaataaaaggtatttcttcctccatattattccccctggcatgcygcctttgttaggacaacagcagccaagagcagatttgaaatgactcctcggcattttcttaagatgagtccagtggaggctcttcaattagtagtggtcatgtgtgccggggtcaatattccagaatacttatgtttttgctcttttctgcagaaataaacattattattgttgtt

SEQ ID NO: 548547 - DNA, 670 bp, Homo sapiens
cctttgaaatatattttgaaaactatgcttattgatacttcttatcttccatcctatttgttattatctatttttactcccttatctttatctcccttatctttctctcactcttaaaataaaattttaattgaagcatgatagacatcagatatgcacaaatcatacaagaatttccacaatgtaaacattcatgtaaccagcatccaaatcaaaaaacagaaccagaactccggagcccccactcatgcctccctagagtcattaccttccccaaagatggccagtactctgacttctaccatcaaagatgggattttcctgtttttgaactttatataagtagaattatgtagtatctggcttcttttgtccaacatacttgcaagattcatctatattgtatgtaaccatagtttgttttttctcattattgtrtagtattttcctatgattctaccacacgttacctatccattctcctgctaatgaacgctttggggttttaatgaacagtgctgctatgaactttcttttattaatttttaatttttgtgggtacacagcaggtatatatatttctggggtacctgagatattttgataaaggcatgtaatttgtaatagttacatcatggtaaatggggtatccatcccctcaagcatttat

SEQ ID NO: 548548 - DNA, 1414 bp, Homo sapiens
taccctgccactacagtggagctgtcacatccatgtgctggaatagaggctcatgttctctattcacatgccaaaatggcattgtctggaccaatggaacccacgtcacctatcggaaggacacacgctataagctattgggggacctttcaagaagggatgtctctttgaccatagaaaatacagctgtgtctgacagtggcgtatattgttgccgtgttgagcaccgtgggtggttcaatgacatgaaaatcaccgtatcattggagattgtgccacgtaagtttttctttgatatttcttgctagttaattgaattttctgttcggtagtaattttcttttttcttaatagggaaagaggaggttcccgtaagtcctgtttttaaataaactcttgttcttgggaaatagaataacttttgtgtagatgaagttacaaggccaagcataattcaaggtcaggctagaatcagcaaactagctcctacagcagtacaattgttccttgatatctatgggaaattgtttccaggacccccttgataccaaaatctgcagatgctcaagtccctatataaaatggtgtagtatttgcatgtaaactatgcacatagtcccatatgctttaaatcatctctagattacttataacaccgaatacaatgtaaatactatgcaattggttgttttactgaaatatttagggaataatgacaaacaaaaaagtctgtatttgttcagtacagcagacaacatatccttctttttccaccatacattttccatccaaagtcttggttatatctacagatatagaacccacaaatatggaggtccaaatatacttcaaacatagtagttggcccaagaaatagcatttactgttccatagtaaaatacagtgaatatttttatcaagctgaatttattcaccttgaggaactgtccttttttatttttttatttactttttttgagacagagtctcgctgttgcccaggctgaagtgcaatgtcacaatcgtggctcactgcaaccctctgcctcccaggttcaagcaattctcctgcctcagcctcccaagtagctggaactataggcaggcrccaccatacccagctagtttttgtattttgtgttagtagagatggggtttcaccatgttggccaggctggtcttgaactcctgacctcagatgttctgcctgcctcagtctcccaaagtgctgggattacaggtgtaagccaccatgcagggcctttgtttttttttttttttttttttttgagatggagtctcactcggttgcccaggtagcaggctggagtgcggtggtgtgattgctactcactgcaacccctgcctcctgggttcaagtgattgtcctgcctcaacctcctgagtagctggg

SEQ ID NO: 548549 - DNA, 548 bp, Homo sapiens
ggtgtggtggcatgcacctgtagtcccagctatccggaggggctgaggaagaaggattgcttgaacctgggaggtcaaggctacagtgagccaagatttcaccactgcactccagcctgggtgacaaagtgagaccctgtctcaaaaaaataaaaaataaaaataaataaactatacatggtcccaaggaaaacaactcattttcatgttcctaatagacacyggagacttacgaaagaaaggagaaaggttggccgggcgcggtggctcacgcctgtaatcccagcactttgggaggccgaggcgggcggatcacgaggtcaggagatcgagaccatcccggctaaaacggtgaaaccccgtctctactaaaaatacaaaaaattagccgggcgtagtggcgggcgcctgtagtcccagctacttgggaggctgaggcaggagaatggcgtgaacccaggaggcggagcttgcagtgagccgagatcccgccactgcactccagcctgggcgacagagcgagactccgtctcaaaaaaaaaaaaaaa

SEQ ID NO: 548550 - DNA, 548 bp, Homo sapiens
ggtgtggtggcatgcacctgtagtcccagctatccggaggggctgaggaagaaggattgcttgaacctgggaggtcaaggctacagtgagccaagatttcaccactgcactccagcctgggtgacaaagtgagaccctgtctcaaaaaaataaaaaataaaaataaataaactatacatggtcccaaggaaaacaactcattttcatgttcctaatagacactggagacttacgaaagaaaggagaaaggttggccgggcgcggtggctcacgcctgtaatcccagcactttgggaggccgaggcgggcggatcacgaggtcaggagatcgagaccatcccggctaaaacggtgaaaccccgtctctactaaaaatacaaaaaattagccgggcgtagtggcgggcgcctgtagtcccagctacttgggaggctgaggcaggagaatggcgtgaacccrggaggcggagcttgcagtgagccgagatcccgccactgcactccagcctgggcgacagagcgagactccgtctcaaaaaaaaaaaaaaa

SEQ ID NO: 548551 - DNA, 548 bp, Homo sapiens
ggtgtggtggcatgcacctgtagtcccagctatccggaggggctgaggaagaaggattgcttgaacctgggaggtcaaggctacagtgagccaagatttcaccactgcactccagcctgggtgacaaagtgagaccctgtctcaaaaaaataaaaaataaaaataaataaactatacatggtcccaaggaaaacaactcattttcatgttcctaatagacactggagacttacgaaagaaaggagaaaggttggccgggcgcggtggctcacgcctgtaatcccagcactttgggaggccgaggcgggcggatcacgaggtcaggagatcgagaccatcccggctaaaacggtgaaaccccgtctctactaaaaatacaaaaaattagccgggcgtagtggcgggcgcctgtagtcccagctacttgggaggctgaggcaggagaatggcgtgaacccaggaggcggagcttgcagtgagcygagatcccgccactgcactccagcctgggcgacagagcgagactccgtctcaaaaaaaaaaaaaaa

SEQ ID NO: 548552 - DNA, 626 bp, Homo sapiens
caaagagactgcaagaaaaccaactataggccaatatccatgatgaatataattgcgaaaatcctcaacaacttactagcaaaccaaattcaacagcacattaaaaggaccacacaccatgaccaagtggggttcatttctaagatgcaaagatgattcaacatacaaagatcaattaagccatcctaaatactgcctaaaacattttagccatgatcaggctggaataacagaatgaaggatgaaaattgtatgatcatctcaataaatgcagaaaaagcatttgataaaaatcaatactctttcatcataaaaactttcaataaacaaggaatagagggaaattttctcaacatagtaaaggtcatatatgaaaaggcaacctatggaatgggagaaaatatttgcaaaccatatatttcataaggagtcaatttccaaaatatttaaggaacccctgcaacttaatagcaaaaaaagygctaagaacccaattttaaaagtggattaaggacttgaacagacatttctccaaagacatacaaatggccaacaggtatatgaaaaggtgctcaacatcactaatcattaggggaatggaagccaaaaccacagtgagatagtgt

SEQ ID NO: 548553 - DNA, 2138 bp, Homo sapiens
atttagtccaacttttgctacagtaacccatatcaaaatttcctgacagatagatgatcctatgacctctgaaggagagctcagtatctcacctgtagccattccatttttataaatatttttcttrcaataaacccccaaactacctccccataactcatatccatagcctgttcaactttctaacattaaataaggagtacatttaatcccttcccctacttatgatagatcttaaaatatttaaagactatcaaattgaagaaataatttgagcattaagtcctgcaaagaaaatgacttttcttaccaaaactatatattttatgcctttaaccattgttttcagacccttgaacatctggttactcttccttatctactattctagtagataaagctattttatatttggaattccattatttttcctgtaatagactattatacatactttatttttttgttttagtgattgcacttaaaagttttagctttcataattaatttaacattgtgaagttaataaaaatttttatccaccttgaaaaactatacacaaatcttataacaatttaaccttaattatttccctcccaagttacatgcttttgattatctgtattttcatttacctttttataagcccatatatttcagattatctggccctattttatatttatacatgacagatattttaaatttcaatgttactatctagtatatcagctatttttaccgaatttgcagtatttattaatgtcttcctccaggtcacgggtgaaaatgttgaggctctttttctgttctagctatggtcagcattgctacctgtccactagaccccattcctctcatccaccaagaacattcctccaggcatcattttttctataaatcatatcaatatttttttttcttttctactgaatcattctcataccaacaggctattatttggggaaccataaaaaatacagaaaactctttatgaccttacactccatgtctcttctttcctttatagcaaaagtttatgaaagtattgtctataccaattgtcccctatatgtatttactctcattttatcttaaatttatttcagtaaagttttgcctaaccaatctattgaagcttcctttatgaaagtcatcaataacctcctccttactattagttcattagttgagctataaactagaccagcaaagtttatcacttgcccttgaacacttttgtagcctggttttctctgcctctctggaagttcatgttcagtctcctttactacttcttctgcatctccttgatctccaatgccagatttaacaggtttttgtaaactttatcccacatagttttcacaggaacccagcaaaataagcagtatcaaccctagtaataaattttagcagatgatttttggagccctcttggaagcatacggttatcaatttatcaagtttttccaggaaaaatgatctttattgccatgcatgtttgatgtgtagatcagaggaaaatagatataattaactgtattttcaccaagtcttcaggcactatcatacctgacatttttggagaagagatgataaaatgtctagaaatctgaaaaaaacagatgcaatttgtaccgattaatggatccaaataaaaaacaagaggggactttagtgccacttcattattatgtttttgtctgcagttgctttattcattaattgattggttagaaatatttattgacagcctatttccaggcattttttttaaatgctgggtctgtgaacacaaaaaaataaaaatccctagcttcatgaaatttacattatagtgggagagacaagtagtcaataaatcaaatatatcacatattagatgtgagtaaggattaaagatagtaaaagcagggaagagtgataataagtgtgtgtgtgaggttgtaattatgaacagggtgaccaggataggacttagtgttacaatatatgtaagtaaagaactgaagaaagagaaggaaggagttccttgttgctcaactcacaattactacataccacttaacataatgtctcacacaagctggcactaaataatattttttaatatatgaacaaggaaataaatagag

SEQ ID NO: 548554 - DNA, 563 bp, Homo sapiens
ctgggcacggtggctcatgcctgtaatcccagcactttgggaggctgaggcgggtgagtcacgaggttaggagatcgagaccatcctggctaacacggtgaaaccccatctctactgaaaatacaaaaaattagctgggcttggtggsaggcgcctgtagtcccaactacttgggaggctgaggaaggagaatggcgtgaacccgggaggcagagcttgtagtgagccgagatcctgacactgcactccagcctgggtgacagagcgagactgtctcaaaaaaaaaaaaaaaagaaaaagaaaaaggctcaattcacccactttgaagattaactacttcatcacatgtaagcggtgagtgaggaataagggacaggttcattttcatcacaaatattataacctcaaaaataaaagtttaccttattctccactggaattatgcaaatacataaaatgcaaagtatccacactcaatattgaatataacatatgtcgaattactggtggatatttttctttctcttacttaatcagctgtatgttgagaaatttatatattg

SEQ ID NO: 548555 - DNA, 1297 bp, Homo sapiens
ttacacgcaattcgcaggcccaccttgccctcccaggtctcacgtcccatgctctcctccccactctctgctcttgctgtcctggcctctgctcttctttgacacagcaaaagatacacttggtttggggattttgttcttgctgccccaggtcctcctagcttgctctaaattcccacagcgcacaatctgaaacccaggtacctgacttgtctgtccattcccgttctcctaccagaaggccagcaccatgaagatgatgacccagtccacctggtgcatggctacctccctgatgcctagctgtgcacctgcacacattctagcctcagttggtgcttagcaagaaagtagcgacaatccatgtccagaaaataccccagacgctgagctccagtgtttactgcttctgtctaattttcatcagtgaatttcctagctcattttgttttcactggttggtaattaaaattggaataatgataacatgtaattgtatttttttcctttttttttttttttttttgagacagagtctcgctgtcacccaggatggagtgcagtagcgtgatctcggctcacttcaactctgcctcccagggttcaagtgattctcccacttcagcctcccaagtagctgggaccacagccgtgcaccaccatgcctggctaatttttcgtgttttagtaaaggcaggctttcaccatgttggccaggatggtctcgatctcttgacctcgtgatccgcccacctcggcctcccaaagtgctgggattacaggtgtgagccaccgcacccagccgtaattgtattttaaataaaatacttatctttaaaactcaacatgaggctgtcctcctgttggttctctgtacctgcacatgctggtgactcccgtgggctgacctctcccggcccctgtaaggtcccctgggactcattctcccaacccctcctccccgcaacaccataagctcctcttgggcaggaaattatcacattcttccagcacaggggtcagtgaggttcccacaagctaaagccggccagcayctgcctttggaggtcaagttctttggagactcccattcattcatggactgtccgtgactaatttcaggctacaaaggcagagtagagtcttgtgaaggctgcaacactaaaaatatttattaattggtcttttatactaagaatttgccggcctcttatctgacccacaggagagaattgactacattcaggttcataaagaaataaacatatagcatgaggaatgcggcagtaagtcaata

SEQ ID NO: 548556 - DNA, 809 bp, Homo sapiens
ttcagaagttatagtcactagaagtgttagaatggtcgcctgagttggacggggcatcaagagaaaatattacacgtaaatgaagtggacaagagctaagaggtcayagtatgtgtggaaatattaaggccaccaaggataataaaagtagtgatataagccaggcacagaaagacaaattctgcacaatcctacatgtggagtgtaaaaaaaaaaaaatcaaacttagattaaaatggtggttactagagatgggaagttgaagggaataaagagatgtcaatcctcagataaaaaatcgatgatgctttaagaccatgacacatcaattaaatcagaacttctaggaagaggcatgggtatcaatgactctaaaagtttctcaggtgattataatgggcagacagagttgaaagctgctaaatcaatgctactcaaagcttggcctccagatcagcagtgtcagtatcatgtggaagatgttaaaaatgcaaattctcaccccaccagaccagttaaattagaaactctggaagtggaacccagaaagctgtctttaacaagccccctgggtgattttgatgaggactaatgtttaagaaccatagcgctgggccaactgcagtatggctggtgcctggacactccaccccatagtcccattaatttttggcagtttcctcccacagctcatgtttgtcaggaccttgaggtgggttttatattcttcttgattcccttttctgcttccaaaatgtgtcttcttattgatgcttcaaaataccccaaatcattgaggagaatgtcat

SEQ ID NO: 548557 - DNA, 564 bp, Homo sapiens
aattatatgtggccgttagccaggaatggtagcgtatgcctataatcctagctactagggaggctgaggcaggaggatcacttgagcccaggagtttgaggttagttacaytgagctatgatcacaccactgcattccaacctggggaacagagcaagactctttctaaaaaacaataaaaataaattatatgtggcttgtattatcttcctgttggacagcatttgtcaagatggcaaaaaaggccaggtgtggtggctcactcctgtaatcccagcactctgggagaccaaggcgggtggatcacttgaggtcaagagttcaagaccagcctggccaacatagtgaaaccttgtctctactaaaaatacaaaaattagccgggtgtagtggcaggcacctgtaatcccagctactctggaggctaaggcacaagaatcacctgaatccgggagacggaggttgcagtgagccaagatagtgctggtgcactccagcctggacaatagagcaagattcagtctcaaaaaaaaaaaggcaaaaaagataaacacaataaaatat

SEQ ID NO: 548558 - DNA, 617 bp, Homo sapiens
taagtggtgatgctaggatttgaaattacatcactggatgccaaatccaggattcctagaggaaaaactactgttgctcagtctacctatgcttaatctcacaggtatgctcaaatactcattgtaaaaactgaatgaacagttccctctcttcaaccacactcagcgaaaagaaacattatttgttcatgaaagtcagggatttccctcctgctagggaactggagcttctagtccttggctactgaaagtgtggtccttgcactagaagcattggcatctactttgagcctattggaaatgtagactatcagaccttaccccagacctctaaaaatacaatctgagtatggatacagcattatcattttctaggtagctaccagacgtctcgattccatctattaaaaattatattttcatagatgggagatyttaaacattttcaaaacaaaaagcttacttttactacatttatttgagacaaaagaagatatctcttatctatttatttatttacagatggtgtttcactatgtgaatagcgccacaataaacatacgtgtgcatgtgtctttatagtagcatgatttataatcctttgggtatatacccag

SEQ ID NO: 548559 - DNA, 999 bp, Homo sapiens
ctgtcaataaataggtgggaagaactctgctggtggctctcagctctgaagggtgtcagccccctgattcccactctgcactctatatttctctctgtgtgtgtgtctttaattcctctagcgccgctgggttagggtctccacgactgagctggtcccagcccaggagtctctcaattctcaagtatctaggagcaccatttgcaaatatgctcacataatttgcacattatgtcttcatgccatttttctctgatccagaagccaagacaagtgtaagataatgagtgactgagaattaaacagaaccagatgtggacctaaatactccacagtattatttgcattctgccacttagaagtggcatgctgcttagtttgggatactggctattaattttctaaagactggagaatgttatccccagaatatactcttctaggatgttaagttagggtcttcattgctttatctagagcatcttaacaaactagtaagtccattttgaaagagataaagtagtggraaaagggagccagggtgtttgtctcatgttggaggagggaaaagccatatccctgtaaaggtggattaggaaaaagtgggagccggccagtggggaagtagggaagtgggtttctttaagtggtagaaatcagaaccactcaaatgcagtgcactgagaatataaaggtactcaccttgagacagggcagcaccctcagtgccagggtttggggatttaaggcaaaggtccttggagctgagtggccacaactgagccatctgccttctgtgtaatgaggtctcatgagctattgtcctgtggcaaaactcctggactaaatgatgttcagccttgagcatatctttagcaatgatctcaacagactgaatgccagataactctcccttattcatccggaacatgaagaagctccagaatgctggtgaggcccaaagcaagagaagggagtcctgaagaatgactgatatca

SEQ ID NO: 548560 - DNA, 1536 bp, Homo sapiens
tcctaaggcttctcatgctagtgccaattcctttttttttttttttttttttttgagacagagtctcactctgtttccagggcagggttggagtgcagtggcgcaatctcggctcactgcaacctcggccttgcctccccggttcaagtgattctcatgcctcagcctcccgagtagctgggactataggcacccaccaccatgtctggctaatttttgtatttttagtagagatggggtttcaccatgttggccaggttggtcttcaactcctgacctcaagtgatctacccgcctcggcctcccaaagtgctgggattacaggtgtgagccaccacggccggtgcaaatgctaattcctgacaagcagagtgtgtttcctagacttgcatcatcttgtgaacaaatgttgctgctttatttgttccaaagttatagtgagcttatagaaacttcaaggacaccatttcaattttaacatttattgctactaaaattagtgatttaaggcttgtattataagaatgatccccagagaaataatccctcaaaataaaacaaagttctcttaaacatgcaagatgaagccctgcagaagcaaagatgacctatgtttaacatttaacatttgaacacctactggaacttaaataagcaaggaggctcatctagaatggcagaccagctttgaaacatcatctttcttttgaaaaatcttctacctgttttaatgaaattaggtctattaatatgatcgcataaataaattatgatcagtatagagtcagtattgcacattaagcctggactaactcaaagtgtctttttactagttctttctgttaaatgtttccatgaaaattctttttaatctaaagactgttgtcaagacatactagttattaaatatgccttcagagctaaatctgcatgagcattccacatttcctatcacttttttgggttcatcttctttccatagaaaggagaatttcaaggaaaggaagaaatatctacaagtaaatatcattcagtatgggttagcatgcttgattgctattggtgaattatagcaaaaaaaggccttagcatctatcatgttatgttttatgtaacattttaacaatggcaaggtaagtcacactgctgatttcagcagtgttatatttgatagcaattgatagccgactactaaacaaaatcactaaactgtatgaatgctttaattcttttttttttttttttttttttttttgagatggaatcttgctytgtcacccaggctggagtgcagtggtgcaatcttggctcactgcaacctccgcccaccgggttcaagcgattctttgcctcagtctcccgagtagttgggattataggcacccgccaccacacccgcctaatatttgtatttttagtagcgatggggtttcaccaacttggtcaggctggtcttgaactctgacctcgtgatccacctgccttggcctcccaaagtgccgggattacaggcgtgagccatgaatgccttaattc

SEQ ID NO: 548561 - DNA, 573 bp, Homo sapiens
atttgttggctaaattaacaaatgaaatatatattcatttatttattttgcaaacatccatcaagccataccatgaaccaggtattattgtaggttctggagttaccacagtgaataaaacagacttttatctcagccctcatggaacttatacttaaaggttgacatagaccatttttaagtatatataaatatataacttttaagtatatatatattaactcaataatcagatggtagtaaatactatggtgaaaaataaggcagagaagtgggggaaataagtagtgytgaggcatatggagaatttgtctcattgtccatagagacatatgtggattagaacctgggcactgagggatgacctggaagctctggactccttggagtgacagggcatagaagacattatgaaattagttctgaaagtctcaaggcatagtgaagccgtgaatgttgagcaaggggaagatcaggagtcatgctggaattacagagaatcctgggttccttctgttcatcttgcaaatggcaatgtggaagtttaggtgatgttatctaggtcacataaag

SEQ ID NO: 548562 - DNA, 1283 bp, Homo sapiens
  misc_feature 767, 798, 799, 800, 801, 802, 803, 804, 805, 806, 807, 808,809, 810, 811, 812, 813, 814, 815, 816, 817, 818, 819, 820,821, 822, 823, 824, 825, 826, 827, 828, 829, 830, 831, 832,833, 834, 835, 836, 837, 838, 839, 840, 841, 842, 843: n = A,T,C or G
  misc_feature 844, 845, 846, 847, 848, 849, 850, 851, 852, 853, 854, 855,856, 857, 858, 859, 860, 861, 862, 863, 864, 865, 866, 867,868, 869, 870, 871, 872, 873, 874, 875, 876, 877, 878, 879,880, 881, 882, 883, 884, 885, 886, 887, 888, 889, 890: n = A,T,C or G
  misc_feature 891, 892, 893, 894, 895, 896, 897: n = A,T,C or G
tgtagcaagaatgaatggaawggagaaagctagaaggaaagcatattcacctggacctggtttattcatatatcttctacaagacttcattttcagaaaatatggttcaattactgtctacatgaacacactctactttgggaataaaatgagtgagggattatagatacttaaacttcatttagccaaaaagcttatactagaggataacgcccacaactgaaaggtacatgtaaatcactcgaggcataatcttagaaattattttagttcattgtaagtataacaggatgagccactgtttgagctaaaaccagggagcaagctgaaaacgaatctgaagaacaatattcaagaatttgttaccaattcttagtctgaagggttcaacctgttaaaacacacacttaactcttcccagaaagagagatcaaagttggcaacaatacaaattcatgttctatctctgtatctgtggtgtaggttgagaaataacttatttcattttggagatacctgggtttatacaattatttttgcacgtattacgatagtctcatttctattttgtttattttaaacacaaatctatatgcgacagagcacttttttgagggtaagaggaacagctcataaaatcagaaataattgtcatttatctaacagaatggcagtgatatgcagagatagctggtattctaaaactatagaataaaaagcttctaaccactctctcaaaaagcaaaatactggatctacaccaatanacatctctcaataacactttcaaaattaaannnnnnnnnnnnnnnnnnnnnnnnnnnnnnnnnnnnnnnnnnnnnnnnnnnnnnnnnnnnnnnnnnnnnnnnnnnnnnnnnnnnnnnnnnnnnnnnnnnngatgtttgattttgaggtcgactctagaggttcccctaaataatgctgtcagccatataggaataaatgaagaccactgggatatcctttaacaaattgcctttctctctctgtttctctctctctctctctctctctctctctctcatacacacacacacacacacacacacacacacacacacacacacacacacacacacagagcttcccatcttcttggaagaagattcatttgtctcatcttgggaaacactttgcactttgtgctttttggttcatcacagcaccaactatattaataaccaaaagctgagctaccaagctgggttctcatggaatcattgcatttccttgaatagctttgttgaaaggaaacaaacaaa

SEQ ID NO: 548563 - DNA, 517 bp, Homo sapiens
ttgttaattaataagttaaataaaatcttttacaagcattcattttctatctgtatgacagtcatgagttcaacatstttttggaagaaatatgtcttaacactagggtacaatagctgcttagtaattctcttatacaacctttagtaaaggccacatttggcatttcacaggttttctaacaagactgactttcagtgacataatttcgcaattatccagcctaattcatgtccacaaagatttactgagcctttgttccatgcacgtgtatcagagatcagtaagatccacttgggtcccatatagttcacatgggtacaattacagctctaagcttgatgatgctatgtgttatgttatgtgtaataatagaatcccatgcaaaatgtctggggagactgaagaagcaatgaattccaatgagacagaatgtgctatacgttatgaagaaggcaggatttgagttgagtcctgtagggtaagtatggtttttactgaaaaaaaagaggaaagg

SEQ ID NO: 548564 - DNA, 1883 bp, Homo sapiens
ggatccaacagtgtcattttcctaggagtgtccccaattacgacmgctcacctcggcagctgaaacttattctttcagatttcaaacgtctccttccctcctccctccagcttggccttcacactcttaataaaacattaaaaaacaccccacactatgctgcctgcacgtgtttcgcgagcttccctgaagtctgaccgtttctctgcatttccatattacagccatctttatccatttgcgtatagaggtgtccgtgcatgaggtctgatttcctgggaagtcagctgtgatgttattgtgttcaaagggaaagacagagaatatttttcactgctgtagaggctctgtgcctgccttttaaacttgaaagatcagtgggttttctgtggaacctgaacacagtattggaaaaagtgtttctgtaagaaaaaaactcattttctttaaagagccctactcattagcttacaggatttaactttctttggggggagggacaaaaaacataaaaatagatcactttattgagcatttgctctgcgccaagcagccttccaagtacttcacacaaatggttttatttaatctcgtaccatctctcctagggctgttgtgaggagtagacgaattaataaacacagagaacttaaagcaatcgagcatgtaatacttgttcaataagcatgagctatttgtgagtgacagtccagtgagataggtaccattatcatgcccattttacagatgaagaaacagaggcaggaaagttctggtatcttgctcaaggtgaagcaatgtgtaagtggttgagtcaaactaaaaaccagctcatagagaaggcaagatatagttcagtcctaaacgatgtttatatctgcacatcctttaagtgtaagatgccagtttgcactccaatctgttatcgttttctgtatttctttctcctccttctgagaaaataatctagaatgtaggataatatctatggcctcaggaatacttcttgatttttctcttctgtttctctgtcttgaaacagcatccccaaagatgctagtggagaatttaaaactatgagctcttggagctgattttaattttgctcgggtagcccaagggttaagttaaagatacagaggctgagttatcacgggcaggagtggatcctcctaagtcactcctgtaagacccttgctgcattcccccttagtgctatccggatcacgtattttgacgttggataaggccatttgcataatctcctctgccaatcctcttatagtaaaaatgggcacccagcgcccaagtggttaaggggctgctcccagtcacagctccccttgcaacctcctctttgttcacctggccctgaggtctgccctcctccctcctctgtccctggagagacccacttgcttcctgaggttaaccacagctccaactctcaccatttcaaacacccgcctgtgaccatgacctcatcccaaattctctacagacacctcgatggcaaataatccacactgcactcatctttgcttcccatcacactgcctgtcctctgttggttttctcctgtcttgatgaatgtcactttgccaccaaagtcagaaatggtgtggtcctccctgaccattccttcttgctccctctctacataaaacctaatcctggttctaccttctaaggacctctccatccacctgcttccccctagccccactgctagcaccctcgcgactgctgcaaaaatgcaggttgccacggcctcctcccttgggctcccccacactggccaagtggcttttgctctttgccatgcaaccttgttccccttttgcttggaataaaggtgcagcagtgctgctgtgaagatgaaa

SEQ ID NO: 548565 - DNA, 665 bp, Homo sapiens
tcaccttctcaatgctgtttgcaattgctttcttcaccccagctgcacttgacttcccaaagagggtttaagacatgtagagatatgaagagatgtgggttcaaaaaatgataggggagagtgctaaagattatctttgcttatttaaaattttgcctatggatggctcacttgaaaagagaaagtttttgctatgtggtcacctattctgaggttccatgtagtttaagtagtgcaatggccttaagaatttaataggcatttttgaactatctggataatctagccaccattcataacgcaattttcaataaaatcatttttaatttccataaaactgatgataaggagaatgtttagaatataactcattcactggttgaagattgcctgtactattttttttaaatctctttcccactactgtggggagctcatagtggaatgtccaaagttgtgagaaaaatgagtgtcaaagagccttgataagcattaacttatgagtggaccttgaatacttaagaattagctacatacaactaaaacaattagtaattaaaaacaactagacagatacacatcttcacaagtcatagtaatttagggttcatcacatttagaatacwaacatccctaaagaatattagacatttgaccctttgtat

SEQ ID NO: 548566 - DNA, 681 bp, Homo sapiens
aatgcaaatgatcctgtctactccgtggaggtgtctatgaaaataaaccacaggaatcatacacagcttcttttccagacttgtaaaattagttctcagtaaaggtgaattcttctgctgctgatcctatatcataactatgaaccaacacctctatgtttgtaaaaagatgatgggtaggattctttcatattcggttagaccaggagttgaaagattaaaaaacatatttttctcgccaatctgtcacttaggaatgataataagcattgtccattccaaattataaatcagatgattataaatatttttatgattaaacagcaccctactccatgtgtagcttatactcaaagcataagaatatgacagttgcaatgctatagaaatagcaaacaagttttacaacaaaatacagtatttaaatgttgtatatgaaaccatagggaatgatcaaattaatatttctgtcattcaaaaatatgaaagccattatacctctagtttctctgacaagttaactcaaaactatcttaataacatgtccatttttaaaaaaattttaaaaggtaagatctaactgctcttaatttttattttaaaattgacaccttttgctgctgctcaaatttatccacagtcttcaaacttcyagactctcattctcttccttcctcgtca

SEQ ID NO: 548567 - DNA, 1937 bp, Homo sapiens
ccctcttttctgccatctcctgctacttctcttatcaacgcttctcctgaactgtcaagctaaattaactcaagtgaacctgaggctgccatacaaactaacaaggtaagttggatggaaaatcgcacttctttcaaatacagccctaacccatgctgttggccactagttttacttacagaaggaaacagaaatatgtgggggaaaaatggtagaagatgaattttaagaagctgaataccctcaccttatgggaagaatagattagtgatgtccccctccctagtggagtattttgcaagatgaaaccgtttttgctattttaacaaggagaaagtctgcaaatgaggagagagtggcagttcaggaagcagaaacaacaccttgatatggcccctagaagaagagtccggcgatggataattatagccatgtcaagtgttggcagttgagagttactactaaagttccctgcaaaccacaggctttggaaagcatgaatcccgacaaaaattttctcccttgacgtcatgattagactcttcgctcagaacccacacatgacactaaggactttgctaacagttaaatcacttttaatgacccatggtttcgagttaaatcaaatatcataaatctttcaagatagaagagctggcatttgccttgaagtcatggtgttacatgaataatgccaagagagtgccaaaaaactccatgargggggcttcatgacattatttgataaatgcatttagttattaatagtacatatttagcttggctcatgatatctgaaatgaggctgtattcttaaacaaagtctaggtctaacgcatgggaggtgttcagagcctaaagttggtaattacagctatgtgtatacgtgtgtgtgtttgcttttagacatcatcgtgcacatacataagctttaaaactagtaagtgtcacagcaaggattcaaacccagagagggggacttaagaggccatgcctttaatctttatgttgtatttggaaccacatacaagtaagttagaaaaagagccctctctggccgggcgcggtggctcacgtctgtaatcccagcactttgggaggccaaggcaggcggatcacctgaggtcgggagttcaagaccagcctgaccaacatggtgaaaccctgtctctactaaaaatacaaaattagccgggcatggtggcacatgcctgtagtcctagctcctcaggaggcttaggcaggagaatcactttaacccggaaggcggaggttgcagtgagctgagatcgcaccattacactccagcgtgggcaacaagaatgaaactccatctgaaaaaaaaagaaaagaaaagaaaaagagccctctctgagcagatgaagcccctacgcaaggctcctggcatggactggatttcagtctcccatgcctccccgggtgctcgggtgcagggaacgatctccacaacagacctttgccaactctaccttcctaacccaccccatctgccattcgcagaggttattcacatttgtgttgatttattccccctccagaattctatgaaggcacctggactattctcatttcattttttcccttatgattgttcctgacatataggagattctatttctccatctccttcttctttccaaattaacatgttattgagattttaaaatatgaatctgcagcgctagtttgaaataaatggctgttgacatacgagggagaagaattagatgaggattacatatttcacaaaggggcatttctgtctcatttcctgaaaaagaacatgaaagactttaaagcttagaggggggaaacgaagaaaaatggtctccccaactaatttccagcttcctaagcctcaggccatcaagggatttttaatttttatggtaatttatatactttaaattgcttaa

SEQ ID NO: 548568 - DNA, 1103 bp, Homo sapiens
gatagttaattttaattttattctttttttttttttttttttgagacagggtcttgctctgtcacccaggctagagtgtagtggtgtgatcacagcttattgaagcctcaacctcctcctgggttcaagtgatccttccatctcagcctctggagtagctgggactgcaggtgtgcaccaccatgccaggctaatttttgtatttttttgtagagatagggtcttgctgtattgccctggctggtcttaaactcctgggctcaagcagtctgcccgcctcagtctcccaaagtgctgggattataggcaccagccaccacrcctagctgataattaatttttttaatagcataaatatattctaggacaaccagaatagtatttaccaaccttgacttgagacagctaaatctttaaccagcagtgggaaaaacgcagaagcaaatgatatatatggcaaaaagacccccaaagccaatgaattagcggcatccactatgtctggagatggcaatgaagatgaacctaaaatcaggaggtgtagttacatttatgtttgaaaagcagttacgccttcagattgcctgtttcatactgtttaacttggaatttgattctcccttgggcaaaatattggaaattcagtttctaaagaaagtaaaacagggggtctctggactaggagaatccaggcacagttaaggatattatgttgaaaacatgagattcagtaaaaaacttacacatgaatgttaagaccccaggcctgtttctaccatgtagagcccagaaccttgcaaagaaaattacagagatttggaagcatatctatggagatttaagaacactgacatggaaggattccccattagagtggcccacagatcttcctccaatgatgtgcatagctgacaggcttactccacctacttccaaacagctggaatatgaatagagatccagtgattgctagacatttgaagaaaccctctaataggaaagacagggttcaaaacaaacaaagggagcttatcaacctacagaaaatcatatatggaagatgaataaaacttctaaagaaattattattaggatcctagagg

SEQ ID NO: 548569 - DNA, 1103 bp, Homo sapiens
gatagttaattttaattttattctttttttttttttttttttgagacagggtcttgctctgtcacccaggctagagtgtagtggtgtgatcacagcttattgaagcctcaacctcctcctgggttcaagtgatccttccatctcagcctctggagtagctgggactgcaggtgtgcaccaccatgccaggctaatttttgtatttttttgtagagatagggtcttgctgtattgccctggctggtcttaaactcctgggctcaagcagtctgcccgcctcagtctcccaaagtgctgggattataggcaccagccaccacacctagctgataattaatttttttaatagcataaatatattctaggacaaccagaatagtatttaccaaccttgacttgagacagctaaatctttaaccagcagtgggaaaaacgcagaagcaaatgatatatatggcaaaaagacccccaaagccaatgaattagcggcatccactatgtctggagatggcaatgaagatgaacctaaaatcaggaggtgtagttacatttatgtttgaaaagcagttacgccttcagattgcctgtttcatactgtttaacttggaatttgattctcccttgggcaaaatattggaaattcagtttctaaagaaagtaaaacagggggtctctggactaggagaatccaggcacagttaaggatattatgttgaaaacatgagattcagtaaaaaasttacacatgaatgttaagaccccaggcctgtttctaccatgtagagcccagaaccttgcaaagaaaattacagagatttggaagcatatctatggagatttaagaacactgacatggaaggattccccattagagtggcccacagatcttcctccaatgatgtgcatagctgacaggcttactccacctacttccaaacagctggaatatgaatagagatccagtgattgctagacatttgaagaaaccctctaataggaaagacagggttcaaaacaaacaaagggagcttatcaacctacagaaaatcatatatggaagatgaataaaacttctaaagaaattattattaggatcctagagg

SEQ ID NO: 548570 - DNA, 1457 bp, Homo sapiens
tgaagagaaagtatagccaggattgtgagataatttaaaagactgaagactttccagggtcctgctaggtgaagtggtgaaatacatgtataagcaagaaagaaccaatcaggtaggaggacaaaagagggagatggaagtatggagaagaataaggttcgagaattcagaatatcagaataggaaatacaaagactgaggaaggatttyttttttttcatgttgacaacagacaacatatatgtcaacaagactcacatcaacatgacataaccaccagtgtcaacatgacttatttgcttgttccaggcaaagtttacctgggaaagataagactggaaacgaacaaataactttattgtttgcttcaggaaatgtttcctgatccatttgtcagagacaatagttttccaacttagccaagccattctctgatcaagacttggttcaggaccctcacttggcagttttcacccatccggaacagtacaaaaatttgccaaattctaattagttccttagttccttgccttgacagagatgccttaacctactgacttttccccccatctttaacactgtaaaaactgtcaaggtgttctcgtctctaaaagtagtaagttctaaagttgagctttattaaccgtttttctagtgatatgttaggggagttgaacaatctggtggtttctccaatatccactcaaggccgtcttgcttccctggtctaagatctgaaacttgtaaagagtaggttccactgagaggccctttgagcttctgcctaaggtctctggctgtgataatggggtaagtcaggtactggttctaagctttttcttgatttctcgaaagctaactttactttgtctcctaggaatccctcgattaactgatcagatttgaaatttgtaattctcagtggaaacctgtctgctatatatcgatcctcaccattattttggaaatctatgaaagtgttttcattaggaagaagcaagaacgcagagattgataaatttgtttcttgatttgaccccaggggtggaagagttcagaaatttctccttccactagcatccttctgacaaattctatttcaggccaattattaacatgtcatgtgagcttttattttgttgatgagagtctggcactgcaacaaatctctttcctaaacttctcttttgccaggagtcataggcagactggggcccaaagcacaagaccaaaagcaaagctttccaatggacgttgctggactcatgagtttttatcagtggacaccaaagttcatgcatcttctatcccagacccttgctcttgatacagtatacatatttatactgtaattccagatgacaatctgccacgttgggtaacctttgataacaacaaatgttcattcgagaggatacttagtacagaaagaaaattaaattcccaaccttcaatgg

SEQ ID NO: 548571 - DNA, 1457 bp, Homo sapiens
tgaagagaaagtatagccaggattgtgagataatttaaaagactgaagactttccagggtcctgctaggtgaagtggtgaaatacatgtataagcaagaaagaaccaatcaggtaggaggacaaaagagggagatggaagtatggagaagaataaggttcgagaattcagaatatcagaataggaaatacaaagactgaggaaggattttttttttttcatgttgacaacagacaacatatatgtcaacaagactcacatcaacatgacataaccaccagtgtcaacatgacttatttgcttgttccaggcaaagtttacctgggaaagataagactggaaacgaacaaataactttattgtttgcttcaggaaatgtttcctgatccatttgtcagagacaatagttttccaacttagccaagccattctctgatcaagacttggttcaggaccctcacttggcagttttcacccatccggaacagtacaaaaatttgccaaattctaattagttccttagttccttgccttgacagagatgccttaamctactgacttttccccccatctttaacactgtaaaaactgtcaaggtgttctcgtctctaaaagtagtaagttctaaagttgagctttattaaccgtttttctagtgatatgttaggggagttgaacaatctggtggtttctccaatatccactcaaggccgtcttgcttccctggtctaagatctgaaacttgtaaagagtaggttccactgagaggccctttgagcttctgcctaaggtctctggctgtgataatggggtaagtcaggtactggttctaagctttttcttgatttctcgaaagctaactttactttgtctcctaggaatccctcgattaactgatcagatttgaaatttgtaattctcagtggaaacctgtctgctatatatcgatcctcaccattattttggaaatctatgaaagtgttttcattaggaagaagcaagaacgcagagattgataaatttgtttcttgatttgaccccaggggtggaagagttcagaaatttctccttccactagcatccttctgacaaattctatttcaggccaattattaacatgtcatgtgagcttttattttgttgatgagagtctggcactgcaacaaatctctttcctaaacttctcttttgccaggagtcataggcagactggggcccaaagcacaagaccaaaagcaaagctttccaatggacgttgctggactcatgagtttttatcagtggacaccaaagttcatgcatcttctatcccagacccttgctcttgatacagtatacatatttatactgtaattccagatgacaatctgccacgttgggtaacctttgataacaacaaatgttcattcgagaggatacttagtacagaaagaaaattaaattcccaaccttcaatgg

SEQ ID NO: 548572 - DNA, 604 bp, Homo sapiens
tggtggctcacacttgtaaccccagcactttgggaggccgaggcaggtggattactgaaggtcaggagttcgagaccagcctggccaatagatagcccgtctctattaatatgataattagccgggtatgctggtgggcgccygtagtcccagctactctggaggctgaggcaggagaatcacttgaacctgggaggtggagactgcagtgagccaagatcatgccactgcactccagcctgagtgacagagcaagatttcatctcaaaaataaaataaaataaataaaaatgagacaaacagacaaagaagtagtctattcgaagaaaccctggaattatttcccaggtgtagaggagagcttgctaacgggtagggaggaagctgcagtaaaaatgaagtgacaatggcagctctttttcattgtgtggtattcagtgtggtgaataatcagtcattaccagagcaaaaacacaatatatatcatcatttaatgtttttagcctttaaaaaagagtgctgagagaataatgaaaaaaatcctttttaaaacatttaggccaaaattctggcatttaagagacagagaaagcaattgtgatta

SEQ ID NO: 548573 - DNA, 604 bp, Homo sapiens
tggtggctcacacttgtaaccccagcactttgggaggccgaggcaggtggattactgaaggtcaggagttcgagaccagcctggccaatagatagcccgtctctattaatatgataattagccgggtatgctggtgggcgcctgtagtcccagctactctggaggctgaggcaggagaatcacttgaaccygggaggtggagactgcagtgagccaagatcatgccactgcactccagcctgagtgacagagcaagatttcatctcaaaaataaaataaaataaataaaaatgagacaaacagacaaagaagtagtctattcgaagaaaccctggaattatttcccaggtgtagaggagagcttgctaacgggtagggaggaagctgcagtaaaaatgaagtgacaatggcagctctttttcattgtgtggtattcagtgtggtgaataatcagtcattaccagagcaaaaacacaatatatatcatcatttaatgtttttagcctttaaaaaagagtgctgagagaataatgaaaaaaatcctttttaaaacatttaggccaaaattctggcatttaagagacagagaaagcaattgtgatta

SEQ ID NO: 548574 - DNA, 604 bp, Homo sapiens
tggtggctcacacttgtaaccccagcactttgggaggccgaggcaggtggattactgaaggtcaggagttcgagaccagcctggccaatagatagcccgtctctattaatatgataattagccgggtatgctggtgggcgcctgtagtcccagctactctggaggctgaggcaggagaatcacttgaacctgggaggtggagactgcagtgagccaagatcatgccactgcactccagcctgagtgacagagcaagayttcatctcaaaaataaaataaaataaataaaaatgagacaaacagacaaagaagtagtctattcgaagaaaccctggaattatttcccaggtgtagaggagagcttgctaacgggtagggaggaagctgcagtaaaaatgaagtgacaatggcagctctttttcattgtgtggtattcagtgtggtgaataatcagtcattaccagagcaaaaacacaatatatatcatcatttaatgtttttagcctttaaaaaagagtgctgagagaataatgaaaaaaatcctttttaaaacatttaggccaaaattctggcatttaagagacagagaaagcaattgtgatta

SEQ ID NO: 548575 - DNA, 544 bp, Homo sapiens
atgtgttactaaacacttagtaagcattagaaacagtgaatgagtaggctacaaggaattgcatcaaaattttaacaatgcttgttttcttttccttgtgatggagtcttgctctgtcgcccaggctggagtgcagtggcgcaatctctgctcactgcaacctcggcctcccgggtttaagcaattctcctggctcagcctcccaagtagctgggattgcaggcacacgccaccatgcccagctaattttttttgtattttagtagagatgaggttgcaccaygttggccaggctggtcttgaactcctgacctcaagtgatgcgcccgccttggcctcccaaagtgctgagattacaggcgtgagccaccgcacatggccaacaatggttattctttaagtaatgagatcacaattttatttgtattttacttttctgtgtggttcaagttatgaacatacatctttattcgattaatttttaaagtaatacgtcctgagttttaaaaattaaatcatgctaaaaagcttaataaaataaaac

SEQ ID NO: 548576 - DNA, 616 bp, Homo sapiens
ttcaggtagcataaatgctggcatgcaagtaatttttgtgaaagtagcataagcctaaagtgtttaactcttatttctctgcagtgataatactgatgaatgctattgtgtagaatgtgtatatgtcctgtgaatgggacagaagattatagggttatcaaggccatgcaacttgtgcctttcagtggaaatgggccatcctctgtcttttcccttcgccaaaggtacttttatcctgtggaagtatgtgcctgaaaatgccttgtattagtccattttcacgctgctgatgaagacatacctgagactagggaaaaaaatggtttaattggacttacagttccacatggctggggaggcctcagaatcatggcaggaagtgaaaggcacttctgacrtggcggtggcaagagaaaaatgaggaagaagcaaaagcagaaaccactgataaacccatcagatcttgtgagatttattgactatcaccagaatagcacgagaaacaccaaccccgtcattcatttacctccccctgggtccctccccctgggttactcccacaacacgtgggaattctgggaaatacaattcaagttgaggtttcaatggaaacaca

SEQ ID NO: 548577 - DNA, 616 bp, Homo sapiens
ttcaggtagcataaatgctggcatgcaagtaatttttgtgaaagtagcataagcctaaagtgtttaactcttatttctctgcagtgataatactgatgaatgctattgtgtagaatgtgtatatgtcctgtgaatgggacagaagattatagggttatcaaggccatgcaacttgtgcctttcagtggaaatgggccatcctctgtcttttcccttcgccaaaggtacttttatcctgtggaagtatgtgcctgaaaatgccttgtattagtccattttcacgctgctgatgaagacatacctgagactagggaaaaaaatggtttaattggacttacagttccacatggctggggaggcctcagaatcatggcaggaagtgaaaggcacttctgacatggcggtggcaagagaaaaatgaggaagaagcaaaagcagaaaccactgataaacccatcagatcttgtgagatttattgactatcaccagaatagcacgagaaacaccaaccccgtcattcatttacctccccctgggtccctccccctgggttactcccacaacacrtgggaattctgggaaatacaattcaagttgaggtttcaatggaaacaca

SEQ ID NO: 548578 - DNA, 562 bp, Homo sapiens
cctcagtctcccaagtagctgagactacaggtgcccaccaccacgcccggctaattttgtatttttagtagatacagggtttctctrtgttggtcaggctagtcttgaactcccgacctcaggtgatctgcctgtcttggcctcccaaagtgctgggattacaggtgtgagccaccacgcctggccctagtaaaatcacattctaattctacatcccccagagtatgtattctttgacccagacctctaaataggtaagggtgtgtgtgtgtgtgtgtgtgtgtgtgtgtgtgtagaagtgatggcacattaactccaacatataggtactatgggccttttaaatctatataactcttagagcttattaaagttcctttatgtattatctcatgtgattctccccaagagggaagaatgaccattatgtaccatgtaacctcatgttacaggtaggtaactaatactgagagaagtaaaataatttattgaaggttgcatgtagtagagatagtaatgctcactaaacgttccatttgttctacatttctcagcttcctta

SEQ ID NO: 548579 - DNA, 2094 bp, Homo sapiens
aagtatatattataaaatgatgtatacatatggtacatcatgagacaactggtcactgttcagcactatcagcctaagggtcttgttacctagttttacctattattctgaaaataataaatgctgactcctaaaaatataaaatttatgaatgggtttataaaatataatcaagcactctattcaatattatagttagataaggatagtatgttgttatcctttagaaatgaaaacttataggaaattggtatttgacattgatagtaggtaaatgaaagatcaaaatagaagcttataacggatgtcttgtcactttatgttagtgagaataaattccatttcaagggtgaattaaaattcatagcttcattattagacctttatttgaatgcaactcatccatatttggattttataatggaggactggtacatcttttgaagctttcttaacaggatcaaattcagtatatattgatctctttgcaaaagacattttatcccattaggttatctggaagttgtattttcaaacacaccagccatgagtaaggctgaacaggtcactgagaagccaataagtagaatgtgtttgagttcagaattatttgacatattgaatcagttcagacctatgaaacctaaacttttcattattaacaggaatttagataaaggtttttttccctaataaactatccatagtcattgtactcaaaaacaccactgacctctggtgtttgcgctcattgcttagagccattacctctatctcaagctcttaatcagccacataagaaatcaacagtccttcagatttggtcatttgggctgctggcccctttttcagtgagacaaattctactgttccagttagtttcccatggcttccttccccgctgctcctggatccagtcactttcagttaagaatcttcaatgtgctttggaccaaggatcctgttggtcgtgatgctaatcatatctttgtctctgactcaaacatgcatcactttcttcccttgaagcctgggcagcacatatgggagccaaatttgagttttctacatgaaaccagcagcctttttttttttttttttttgagacagagtcttgctctgtcacccaggctrgatgagtgcagtggcgcgatctgggctcgctgcaagctccgccttccgggttcacgccattctccttcctcagtctcccgagtagctgggacttcaggcgcccgccaccacgcccggctaattttttgtatctttagtagagatggggtttcaccgtgttagccaggttggtctcgatctcctaatctcgtgatccgccctcctcagcctcccaaagtgctgggattacaggcgtgagcccccttacccgaccccagcagcttttaacattaaaattttggaaatatttttcaaaaagttcatttgattattttctctctctctcagtaaaattgagactctgctaggtcaacagttattttgtttactaccgtatttccagaggcttgaacagagaccagtacgtaataaccattcaataaatatttctgaataaatcaaagtgaggatgcacaagagttctttgatttaatttcagtgatttgcaaataaagctgtatagaaataatatgtaaaaatgtttttaaaataacaattctggatgccatccctgaagataataaatcaggtttagatagggcccaagaaagtaggtgtacacatacatacatacaagcatgcatacatgtgaatgtatataatagattttgtaatattttaaaaaagatattagcatttgaaatatactagtatttctgtagaatagctcttagaaagtgaattgctgattaaaaggtaacgaattttatatatttgtaaaatattgtcaaatttccctccaaaagaatcctatactaatatgaatttttattctcaatactctaacctacattgaatattaacaattaatttttgtatcatgttctaatctaagattcagctttttctgttttttaatcatgtatgtttcctgttctataaattttttatccaaatattttgctcatttttctatcaaat

SEQ ID NO: 548580 - DNA, 2094 bp, Homo sapiens
aagtatatattataaaatgatgtatacatatggtacatcatgagacaactggtcactgttcagcactatcagcctaagggtcttgttacctagttttacctattattctgaaaataataaatgctgactcctaaaaatataaaatttatgaatgggtttataaaatataatcaagcactctattcaatattatagttagataaggatagtatgttgttatcctttagaaatgaaaacttataggaaattggtatttgacattgatagtaggtaaatgaaagatcaaaatagaagcttataacggatgtcttgtcactttatgttagtgagaataaattccatttcaagggtgaattaaaattcatagcttcattattagacctttatttgaatgcaactcatccatatttggattttataatggaggactggtacatcttttgaagctttcttaacaggatcaaattcagtatatattgatctctttgcaaaagacattttatcccattaggttatctggaagttgtattttcaaacacaccagccatgagtaaggctgaacaggtcactgagaagccaataagtagaatgtgtttgagttcagaattatttgacatattgaatcagttcagacctatgaaacctaaacttttcattattaacaggaatttagataaaggtttttttccctaataaactatccatagtcattgtactcaaaaacaccactgacctctggtgtttgcgctcattgcttagagccattacctctatctcaagctcttaatcagccacataagaaatcaacagtccttcagatttggtcatttgggctgctggcccctttttcagtgagacaaattctactgttccagttagtttcccatggcttccttccccgctgctcctggatccagtcactttcagttaagaatcttcaatgtgctttggaccaaggatcctgttggtcgtgatgctaatcatatctttgtctctgactcaaacatgcatcactttcttcccttgaagcctgggcagcacatatgggagccaaatttgagttttctacatgaaaccagcagcctttttttttttttttttttgagacagagtcttgctctgtcacccaggctggatgagtgcagtggcgcgatctgggctcgctgcaagctccgccttccgggttcrcgccattctccttcctcagtctcccgagtagctgggacttcaggcgcccgccaccacgcccggctaattttttgtatctttagtagagatggggtttcaccgtgttagccaggttggtctcgatctcctaatctcgtgatccgccctcctcagcctcccaaagtgctgggattacaggcgtgagcccccttacccgaccccagcagcttttaacattaaaattttggaaatatttttcaaaaagttcatttgattattttctctctctctcagtaaaattgagactctgctaggtcaacagttattttgtttactaccgtatttccagaggcttgaacagagaccagtacgtaataaccattcaataaatatttctgaataaatcaaagtgaggatgcacaagagttctttgatttaatttcagtgatttgcaaataaagctgtatagaaataatatgtaaaaatgtttttaaaataacaattctggatgccatccctgaagataataaatcaggtttagatagggcccaagaaagtaggtgtacacatacatacatacaagcatgcatacatgtgaatgtatataatagattttgtaatattttaaaaaagatattagcatttgaaatatactagtatttctgtagaatagctcttagaaagtgaattgctgattaaaaggtaacgaattttatatatttgtaaaatattgtcaaatttccctccaaaagaatcctatactaatatgaatttttattctcaatactctaacctacattgaatattaacaattaatttttgtatcatgttctaatctaagattcagctttttctgttttttaatcatgtatgtttcctgttctataaattttttatccaaatattttgctcatttttctatcaaat

SEQ ID NO: 548581 - DNA, 2094 bp, Homo sapiens
aagtatatattataaaatgatgtatacatatggtacatcatgagacaactggtcactgttcagcactatcagcctaagggtcttgttacctagttttacctattattctgaaaataataaatgctgactcctaaaaatataaaatttatgaatgggtttataaaatataatcaagcactctattcaatattatagttagataaggatagtatgttgttatcctttagaaatgaaaacttataggaaattggtatttgacattgatagtaggtaaatgaaagatcaaaatagaagcttataacggatgtcttgtcactttatgttagtgagaataaattccatttcaagggtgaattaaaattcatagcttcattattagacctttatttgaatgcaactcatccatatttggattttataatggaggactggtacatcttttgaagctttcttaacaggatcaaattcagtatatattgatctctttgcaaaagacattttatcccattaggttatctggaagttgtattttcaaacacaccagccatgagtaaggctgaacaggtcactgagaagccaataagtagaatgtgtttgagttcagaattatttgacatattgaatcagttcagacctatgaaacctaaacttttcattattaacaggaatttagataaaggtttttttccctaataaactatccatagtcattgtactcaaaaacaccactgacctctggtgtttgcgctcattgcttagagccattacctctatctcaagctcttaatcagccacataagaaatcaacagtccttcagatttggtcatttgggctgctggcccctttttcagtgagacaaattctactgttccagttagtttcccatggcttccttccccgctgctcctggatccagtcactttcagttaagaatcttcaatgtgctttggaccaaggatcctgttggtcgtgatgctaatcatatctttgtctctgactcaaacatgcatcactttcttcccttgaagcctgggcagcacatatgggagccaaatttgagttttctacatgaaaccagcagcctttttttttttttttttttgagacagagtcttgctctgtcacccaggctggatgagtgcagtggcgcgatctgggctcgctgcaagctccgccttccgggttcacgccattctccttcctcagtctcccgagtagctgggacttcaggcgcccgccaccacgcccggctaattttttgtatctttagtagagatggggtttcaccgtgttagccaggttggtctcgatctcctaatctcgtgatccgccctcctcagcctcccaaagtgctgggattacaggcgtgagcccccttacccgaccccagcagcttttaacattaaaattttggaaatatttttcaaaaagttcatttgattattttctctctctctcagtaaaattgagactctgctaggtcaacagttattttgtttactaccgtatttccagaggcttgaacagagaccagtacgtaataaccattcaataaatatttctgaataaatcaaagtgaggatgcacaagagttctttgatttaatttcagtgatttgcaaataaagctgtatagaaataatatgtaaaaatgtttttaaaataacaattctggatgccatccctgaagataataaatcaggtttagatagggcccaagaaagtaggtgtacacatacatacatacaagcatgcatacatgtgaatgtatrtaatagattttgtaatattttaaaaaagatattagcatttgaaatatactagtatttctgtagaatagctcttagaaagtgaattgctgattaaaaggtaacgaattttatatatttgtaaaatattgtcaaatttccctccaaaagaatcctatactaatatgaatttttattctcaatactctaacctacattgaatattaacaattaatttttgtatcatgttctaatctaagattcagctttttctgttttttaatcatgtatgtttcctgttctataaattttttatccaaatattttgctcatttttctatcaaat

SEQ ID NO: 548582 - DNA, 538 bp, Homo sapiens
ttaatctaagagaattgatgtgggacagacacatacagaataactgaataatatcagctaacatttaagtcaatttcatcaggtaatagacaaacagactgaaatctaggcaataaaacaattaatctgtggtcactttgctggttaatggcaaatctgggaccatgaatcctatctttaaatttctggtttaatgtctttttcactctccaaattgtctgctrtactcttttcccctcaatacaagtaaaaagcaaatttactggcttaattgtacaaaaggtcccacaccaaaagaatgagtaagtctaaagtgtgatttaaacaaagagattagaactagctcctcactgtgatattcataaacagcaataagaaaatatactttttattgctagatagatattttctgcatttaatgtctacatatattttacccaacctaggataattttagtatttatatatatcaaactgaagttcctgaaaaccagatattctgtggcaacaagtctgggaatttatacaccatacagtc

SEQ ID NO: 548583 - DNA, 547 bp, Homo sapiens
cacctgttgagtaataatcaagctactttttctacttttggccagagaacaagtctgtctcttgccaacacttattgattttttagtcaaactataagggtctttccagagtaccagaagtctccaataacagtactcacaggatatgattccaaaaataaactcttaaaaaggttggggccctatagatgctaatgtgggagacatccaaggatatttatttttaaaaataccttttcattttgaaatgatttaataaaaaattttggaaaaatagtatagctcccacatattctttgtccagctttcccaaatgataatatcttatacagccatagtatactgtcaaaatcaagaaactgacattggcacaatattatcaacttaactacagatgctatttcatytgtcatttccacaaaggatattaataaagaattaacagcagcatcttaaaagctatgatacactttgcagtcactttctgttacagttacaggcaacagtataggcagcaccgtatattggatagaggaggggttttgga

SEQ ID NO: 548584 - DNA, 569 bp, Homo sapiens
tgggaaattattcacccggctctgcctgccaagtttttgcactgtaatatgtactttcatctgcttcctaatcttagtaatctggcagtgttttcagaaactgtgatgctgttacacgtatcaaatggtttctgtaactcctggttttgaaacagctamaatgtaatttcacgtataaatgctgattataatttataatacaggttgagtatctgtaatccaaaaatccaaaatcttccaaaatgtgaaacttagtgtgtgccaagaagatgatacaggtggaaaattccatatctgacctcatgtgacagctcacagtcaaaatgcaggtgtctaaacagtttattcagcatccccaagggaaaaataatcatcagactatgtgtataaggtacatatgaaaaataaatgaatttcatatttagacttgggtcacatccccaagatgtctcattatatatatgcaaatattctaaaatctgaaaaaatctgcagtcagaaacacttctgaaaagcatttcaggtaaggaataatcaacctgtatgctgtattaattaactaacggagg

SEQ ID NO: 548585 - DNA, 637 bp, Homo sapiens
cagcctgagaaagaccctttagaccttagagagcctccacctccccagcctttgggaataatggtggtcatgaggtaggaagcctcacctcactgcagggttaagcagggactatataacctagtgttaatagattcttacactgatggataagttggctttatcttctataattcctattttctctatactctcctattcattcttctcaaaatacctatgtaaaaaaaacaaaggcacacgttactgatacatattttataatctgagaaactgaagtcaaaagctgaggtgagttgccaaaagtgaggcacttgctagcaaagctaagaacagatctctccttcctggtattcttccttcttaacccccttttcttcaccctacaaaccacataggtgcctcttaggaaacactaaagcacttaggaatatagcctgaaaactgctattgtaggccagtcaccttcgaacctaaaaatgcaagttcctgggcgtgyctcagattaactgaatcataatctgtgcaaatgggactcaggaatctgtatgccaggttgggcaccaccattttagacttctttccatctggaataagggacaggaaatctgatagtctcgtgttctatatactattc

SEQ ID NO: 548586 - DNA, 552 bp, Homo sapiens
cctggtttttacttcccctccatctaacattggcctgtaaacatctgtcccccacctcctgagtgttcaattccgttgaagtgctttcaaatatcctccaagttatacccaaaaactatgaatctgaatgttmccaaatgtttctttccagctgcaccagagtcgtgctgagttccacctaggcaagtcccagtggtctgcagcactcttgatttcttcaatcagatagtaggcatctccagacccaggaatgactcagcttcacttttaatttgagattttatactctgcatcactcctaaatcatttaagaaagctgaaatagcttttccattttccaaactccccagaccaaatatagtgctgattatacccaacaggtattaaataggggggtgattgcagttaaaaaaaaaatacaaaaattagcggggtgtggtggcatggcctgtagtcccagttacacaagaggctaagggaggagaatcgcttgaaccctggaggtggaggttgcagtgagctgagatcacaccactgcactccagcctgggc

SEQ ID NO: 548587 - DNA, 552 bp, Homo sapiens
cctggtttttacttcccctccatctaacattggcctgtaaacatctgtcccccacctcctgagtgttcaattccgttgaagtgctttcaaatatcctccaagttatacccaaaaactatgaatctgaatgttaccaaatgtttctttccagctgcaccagagtcgtgctgagttccacctaggcargtcccagtggtctgcagcactcttgatttcttcaatcagatagtaggcatctccagacccaggaatgactcagcttcacttttaatttgagattttatactctgcatcactcctaaatcatttaagaaagctgaaatagcttttccattttccaaactccccagaccaaatatagtgctgattatacccaacaggtattaaataggggggtgattgcagttaaaaaaaaaatacaaaaattagcggggtgtggtggcatggcctgtagtcccagttacacaagaggctaagggaggagaatcgcttgaaccctggaggtggaggttgcagtgagctgagatcacaccactgcactccagcctgggc

SEQ ID NO: 548588 - DNA, 552 bp, Homo sapiens
cctggtttttacttcccctccatctaacattggcctgtaaacatctgtcccccacctcctgagtgttcaattccgttgaagtgctttcaaatatcctccaagttatacccaaaaactatgaatctgaatgttaccaaatgtttctttccagctgcaccagagtcgtgctgagttccacctaggcaagtcccagtggtctgcagcactcttgatttcttcaatcagatagtaggcatctccagacccaggaatgactcagcttcacttttaatttgagattttatactctgcatcactcctaaatcatttaagaaagctgaaatagcttttccrttttccaaactccccagaccaaatatagtgctgattatacccaacaggtattaaataggggggtgattgcagttaaaaaaaaaatacaaaaattagcggggtgtggtggcatggcctgtagtcccagttacacaagaggctaagggaggagaatcgcttgaaccctggaggtggaggttgcagtgagctgagatcacaccactgcactccagcctgggc

SEQ ID NO: 548589 - DNA, 595 bp, Homo sapiens
tgagggtttatgtgtctcctgaagagaacaggaatctgagcttcagtaactgcttccagtgtttcattctttcctgcaaaactctgaatattaacagaaatgcaaaaaagtggctttatgtctcacwatgaagaatacagtgatgtcaagatgtcagatcctcagatcagattttatatgtatacattaaacagcgaaacaagttcagattgacattagcctgaagtaaaatttatctcatggcatcccttgtccagatcagccctggaccagttgtacatcaatatgtgcaatgagggcaccccctagtggttagatactaaagcagcttttcaactgacacttcatgtatataaagacaaaaacagtaatttaagagaaaaactatcaaaatagatgcactatgcagagtgatacattttaaaataagaatagaagtaaaaagaagaaaagtcttctcagcgtccccactgtcctcattccccaagctgttcccactagctgggtgcccagaggtggtccccatctagagatttttttatttgtctttctttttgttttgtgtttttggttttccccagtggtcacagttatc

SEQ ID NO: 548590 - DNA, 752 bp, Homo sapiens
ttcacccctgtgattaggttactctatccagcaatgatggggagaattttcacatgtaattaaggtccttgatcagttgaatttcagtgactcaaaagagagatcatccttagtgcgcctgaactaatcaggagcrtctttaaaacaaaggggcccttcctgaaggtagcgatttgaagcatgagagagattttcctgctggctttgaaggaggacctgagggcagcctctaagagctgaaagtgagccctggtcaataatcagcaggaaaacagggacctcagtcctacaacttcaaaatctgaattctgccaacaacgtgaatgaccctgaaagatgacgtcttcaaagcagaggtgccagctgagcagctggcagagccactggcctcatcttcgactctgggcccccttctagctgcaccaccctatcctccagagactttaaagttatgggtgccttcctgatctgtggtctatgttgagccattatcttgggattgagagaggcaagcgaggaacaacttccattatgtacaagcatagtgtcaaccccagggccatgctgcctcaggtaaaagtgagcctcagatgagaatacagctggctgccaccctgattttagcctgttaagctcacattattttacatgagcagctgtcccatacctgaactcttgacccacggaaactgtaaaataatgaatgcatgttgttttcagcctctttaactgtggtaattccttacatagca

SEQ ID NO: 548591 - DNA, 322 bp, Homo sapiens
agaccatgctctttcattgagaactttcagactttgctgtcctagtgcttaaatgtacaatttcattaatatagttttggcatgagtaataaaatataaatgttttacagaatccaagctctaagaaggaactgtgaaacwgttcctgtgtttcttaaagtatttccctccaaattaatttaaattggctctggaatgagcactgaaaatttgcttaaggaccataagagaaaggtaattataaatggcagagcatctgacttaggggagctatctggtggggtgcttggtgttcatccaagttttctctaacaactttatt

SEQ ID NO: 548592 - DNA, 682 bp, Homo sapiens
cctttctcctaaaatcaaaatctgacataaaaatagccattgctaatttgcagacgatgatttcagcattccaccattttggcttctaattatttatagttttgcagaagagcacttgcttatctgctcattgacaaaggtaaataaagcatttaactggtgtaaaatgatggagtaaggatttacgtatgctctgagaggggtaayctacttcctctttttggataccaaaatgtatgattcctccttcagatggtgacatagaacacctgagtttcctcacttgtatattctttttttttttttttttttttgagatggagtctcactctattgcccaggctggagtgcagtggcatgatcttggcatcctggctcactgcaacctccgcctcccatgtttgaactatcttcctgcctcagcccccctagtagctgggattacaggcatgcgccaccatgcctggctaatttttgtatttttaatagagatggggttttgccatgttggccaggctggtctcgaacttctcacctcaggtgatccacccacctcagcctcccaaaagctgggattacaggcgtgagcccctgcacccggccatcattgtgtatattcttgatcccccctccacaacccccagggtctatcaaaagactgggtgggagaagtaagatttaa

SEQ ID NO: 548593 - DNA, 1189 bp, Homo sapiens
caaccctatgaacttttcagaattcttttcagaaccaactctacttgatttaagcagtatattagtcagcttgggttgccataacaaaataccaaagactgggttgcttaaataacagaaatttatttttcacattctgaaggctggaaagtccacaatcaaggcttgacagggtttggtttctggtgaggtccctggcttgcagacagctgccttcttgctgcatcctcacatgaaagagagaggtttctctttctctcttcctcttcctataaagtcttggtcttatctgattagggtcccactcttatgacctcatttaaccttaattacttccaaagatcctacctccagatatagtcacactgggggttaggacttcaacatatgaatggaggagtagagagatgacaaaattcagtccatagcaagtagaaaagaaattggttgaaagaaactagagtagctcataaaatctccaggaagtttaaagtgccagctcagaaaataggcaggagcaaaaggaagtgaggtagccagaatcatagccaaaccatgaccagaaccattctgatgaggaccctgttgctatcactggctgtcagccactgctgcctcaaaagccaaatgctggtgtccgccaccaccagcagccttggtattcattttccctgcttctgtaagtgccagttcaacaaaccaggcatctgattaagcaagcttaggttacaggtaagcaacctagctgcaagggatgctgggaaagacaagacctgggctattttttagcttctataatggaagcaggccctacatcctaccaagtctcatataatacagaatattctaatcatggggaaaggttcagatgctagatagatgcccctccaaaggacaaccaacacaattataatctcccattacaagtggtaagttaacacttagcatacatatgtaaataattaaaacaatttcatgaaatctcttattatgtgccatgtactccaatattgtgtatatgttctattttacatcactaaaaagttatgatcatgaacaagtaaattgagtttataacctacaggaacatgaatcataatttgaaaaacraaagactaagattaatgtcagaagaaatgggaaatatttaggaggttatcccactatcagctgagaaaagataagggca

SEQ ID NO: 548594 - DNA, 1189 bp, Homo sapiens
caaccctatgaacttttcagaattcttttcagaaccaactctacttgatttaagcagtatattagtcagcttgggttgccataacaaaataccaaagactgggttgcttaaataacagaaatttatttttcacattctgaaggctggaaagtccacaatcaaggcttgacagggtttggtttctggtgaggtccctggcttgcagacagctgccttcttgctgcatcctcacatgaaagagagaggtttctctttctctcttcctcttcctataaagtcttggtcttatctgattagggtcccactcttatgacctcatttaaccttaattacttccaaagatcctacctccagatatagtcacactgggggttaggacttcaacatatgaatggaggagtagagagatgacaaaattcagtccatagcaagtagaaaagaaattggttgaaagaaactagagtagctcataaaatctccaggaagtttaaagtgccagctcagaaaataggcaggagcaaaaggaagtgaggtagccagaatcatagccaaaccatgaccagaaccattctgatgaggaccctgttgctatcactggctgtcagccactgctgcctcaaaagccaaatgctggtgtccgccaccaccagcagccttggtattcattttccctgcttctgtaagtgccagttcaacaaaccaggcatctgattaagcaagcttaggttacaggtaagcaacctagctgcaagggatgctgggaaagacaagacctgggctattttttagcttctataatggaagcaggccctacatcctaccaagtctcatataatacagaatattctaatcatggggaaaggttcagatgctagatagatgcccctccaaaggacaaccaacacaattataatctcccattacaagtggtaagttaacacttagcatacatatgtaaataattaaaacaatttcatgaaatctcttattatgtgccatgtactccaatattgtgtatatgttctattttacatcactaaaaagttatgatcatgaacaagtaaattgagtttataacctacaggaacatgaatcataatttgaaaaacgaaagactaagattaatgtcagaagaaatgggaaatatttaggaggttatcccaytatcagctgagaaaagataagggca

SEQ ID NO: 548595 - DNA, 535 bp, Homo sapiens
tgtgggcttatgtaatatttgttaattaactcmaagatccattcagggaagaagggggttaaatgttgttggttggtgctgtatcttgctcagacagtctgacatttttgtggccaggcttcatctaccagtttaatgtcatttctagcttatcgcctcaaaaaaaattctgagagaaaaacatattcaacaccaaaacctgagcatatttgatatggttccttttctcaagtcaagagtattctgcacatccactctctgagacactgtattttttttctcattttcctccggtactctcccatttcccaaaaggtagtgcttgcctaaggatctatcagctctgttttcgcttctcccttactaattccatcaattttatagcttctactctcaccaaaatgcctctccaaactctattactctgatagtcagtttcacattccaacagtttcacattccaaatgataaaaatttattagatttttccatctggacatctgctctaccttcaaactcagtccctacagaccca

SEQ ID NO: 548596 - DNA, 535 bp, Homo sapiens
tgtgggcttatgtaatatttgttaattaactcaaagatccattcagggaagaagggggttaaatgttgttggttggtgctgtatcttgctcagacagtctgacatttttgtggccaggcttcatctaccagtttaatgtcatttctagcttatcgcctcaaaaaaaattctgagagaaaaacatattcaacaccaaaacctgagcatatttgatatggttccttttctcaagtcaagagtattctgcacatccactctctgagacactgtattttttttctcattttcctccrgtactctcccatttcccaaaaggtagtgcttgcctaaggatctatcagctctgttttcgcttctcccttactaattccatcaattttatagcttctactctcaccaaaatgcctctccaaactctattactctgatagtcagtttcacattccaacagtttcacattccaaatgataaaaatttattagatttttccatctggacatctgctctaccttcaaactcagtccctacagaccca

SEQ ID NO: 548597 - DNA, 641 bp, Homo sapiens
aggtgtctttaagtagaaatacacaaaaaacaggttatgtactgatcagttgataaaaatgtgaccagtggcttgtaggaccctaacccagtactttctctaggtgcaagagttcagtattttgttagtttttgtggtgactttagaacataactaccaaaaataacgagaacctgctgtacagagtaagagaataatttagaagttcaaaaaagtgctgcaaatagggcttgkaaatactttagcctatacagaaaactgcagggagctgcattaagaaaatctacaatgagaaattagactgggagcacatatttggttgacaacagctgagagaagggtaaatgatggctcaatgcactcaccctagctgatggaaatcacctgaagagtttaagcaatgttaatatctgggttccaccacagagcttgagttaatcgatacagcatgcttacaagctgcaaaagcttcctaggtgattctaatatgcaacaaaaacttcttaaagttttacttagcattcctaagaatcacatgcagagcttgttagaacagattactgggtttcaccctcagagattttaattcagtagatctgggatgggacatcagaatctgcataggtgatgctaaagcacca

SEQ ID NO: 548598 - DNA, 641 bp, Homo sapiens
aggtgtctttaagtagaaatacacaaaaaacaggttatgtactgatcagttgataaaaatgtgaccagtggcttgtaggaccctaacccagtactttctctaggtgcaagagttcagtattttgttagtttttgtggtgactttagaacataactaccaaaaataacgagaacctgctgtacagagtaagagaataatttagaagttcaaaaaagtgctgcaaatagggcttgtaaatactttagcctatacagaaaactgcagggagctgcattaagaaaatctacaatgagaaattagactgggagcacatatttgrttgacaacagctgagagaagggtaaatgatggctcaatgcactcaccctagctgatggaaatcacctgaagagtttaagcaatgttaatatctgggttccaccacagagcttgagttaatcgatacagcatgcttacaagctgcaaaagcttcctaggtgattctaatatgcaacaaaaacttcttaaagttttacttagcattcctaagaatcacatgcagagcttgttagaacagattactgggtttcaccctcagagattttaattcagtagatctgggatgggacatcagaatctgcataggtgatgctaaagcacca

SEQ ID NO: 548599 - DNA, 641 bp, Homo sapiens
aggtgtctttaagtagaaatacacaaaaaacaggttatgtactgatcagttgataaaaatgtgaccagtggcttgtaggaccctaacccagtactttctctaggtgcaagagttcagtattttgttagtttttgtggtgactttagaacataactaccaaaaataacgagaacctgctgtacagagtaagagaataatttagaagttcaaaaaagtgctgcaaatagggcttgtaaatactttagcctatacagaaaactgcagggagctgcattaagaaaatctacaatgagaaattagactgggagcacatatttggttgacaacagctgagagaagggtaaatgatggctcaatgcactcaccctrgctgatggaaatcacctgaagagtttaagcaatgttaatatctgggttccaccacagagcttgagttaatcgatacagcatgcttacaagctgcaaaagcttcctaggtgattctaatatgcaacaaaaacttcttaaagttttacttagcattcctaagaatcacatgcagagcttgttagaacagattactgggtttcaccctcagagattttaattcagtagatctgggatgggacatcagaatctgcataggtgatgctaaagcacca

SEQ ID NO: 548600 - DNA, 539 bp, Homo sapiens
gaaatgcacagcattgaagatatttagattaatttagaaaattatacactagagtcattcttaatgtttaaaagccattaattttagagcttcaagttaaaatagcattattgaaccatttctcctcttctaatcctcctatagtccctgaaataccaaaaatttaagggttaaaagataaaagtattaataaataaaatgtctttttttttttttttgagacagggtctctgtcactcagtctggagtgcratggtgcaatcttggctcactgcagcctcaacctcctggactcaagcgatcctcccacctcagcctcctgagtaactgggaccacaggcgtgcaccacacctggctaatgttttgtatttttggtagagatggggtttcaccatgttgcccagactggtcttgaactcctgagctcaagcgatctgctagcctctgcctcccaaagtgctgagattacaggtgtgagtcactgcacccagcctaaaatgtctgtcaatagcatctaaaggaacctttgcctgagtgg

SEQ ID NO: 548601 - DNA, 683 bp, Homo sapiens
tgaatgagtgaggaaggaagcacatggaaggtagcacaaggccagaatacaggatacctcatgaaccagtacaaagaatttgactcttactgagcaagatgggaagccattggagrgttttgagccaaaactgtgcagtagtaccgtttacattttgaaaggatcactgtggctgctgctggagaattgactgtggggaatgaagtggaggcaaggaaccagttaggaggctgttgcaatagtccaagtcagagataatggtgaattggaccagcgttcctgcagtggaaagtggctggattatgggtaaattctgcagacagagttaataagatttattgactacctcaacctctgggtgtagcaagactggagggtgaagacgtgccattcatcttcactacttgctgattctgtacttgtgaatttgcaaaatttgcattctcataaaatgtacatgtaacccccaaaccaatacttgtggtacttttagtcatttgttgacatgcagagtggtgaaaattttgagtacccaggtgcacatgttcccatctgaggttgagcaaggcgacactctgaattcttgtttcagctctcacaccgtgtaagtgttcctgcagtctaccttgtgccgtttatttttgcatttttcttagtgattttactatttcaaatggcaccca

SEQ ID NO: 548602 - DNA, 683 bp, Homo sapiens
tgaatgagtgaggaaggaagcacatggaaggtagcacaaggccagaatacaggatacctcatgaaccagtacaaagaatttgactcttactgagcaagatgggaagccattggagggttttgagccaaaactgtgcagtagtaccgtttacattttgaaaggatcactgtggctgctgctggagaattgactgtggggaatgaagtggaggcaaggaaccagttaggaggctgttgcaatagtccaagtcagagataatggtgaattggaccagcgttcctgcagtggaaagtggctggattatgggtaaattctgcagacagagttaataagatttattgactacctcaacctctgggtgtagcaagactggagggtgaagacgtgccattcatcttcactacttgctgattctgtacttgtgaatttgcaamatttgcattctcataaaatgtacatgtaacccccaaaccaatacttgtggtacttttagtcatttgttgacatgcagagtggtgaaaattttgagtacccaggtgcacatgttcccatctgaggttgagcaaggcgacactctgaattcttgtttcagctctcacaccgtgtaagtgttcctgcagtctaccttgtgccgtttatttttgcatttttcttagtgattttactatttcaaatggcaccca

SEQ ID NO: 548603 - DNA, 966 bp, Homo sapiens
ttttttgaggcttcctttccctttttgtaaatgggaataattccagcctgccttgcctccttccaggactgccatgaggataacatagcatgatgcacaggaagacactttaattgaaagcatagcacatgccatgctgggtactgggcactctactgatgtcatgtcacttattctttgtaacaatcctgcaaggtaggaatgattaccccatgttacagaggaggaaacaaaggggcagtgggactatataactccccaagagcacatggctagtaagaggcagagctggcattccaactcagatttttccggtgctgaagccaatattctttccattagagcatgattactattagtgctgttgttgttattgagttatgcctcttctgtgatccatttcgagagcatattcttagtataaggaacacaatgaggtatttgggtctcatggaagggtacctgcttgcccccaaattctctcacttttaaccccataagccatactccaactaaattaatcagatttctgcagcattgtctcccaaagaggtctggattcctaagactgaggtcctyggggcatgcagggccagagatgatgcaaccaatgatgtggctgagaagatgactatttccagtgcctgctgatggcataagggagaccaggcagcattccccaggacagccaccttagggacaggctgatgggaggctcagtttctgcaacctacagggagcaaaaatctgagcccgcaatgcaggcaaatctagcctggacaagctacctgaattggaatgagcaggagaatttcagcatgttctcctcacaatgctccctaaatgacttttctgatcaaagaacaccacccccaaccccaacaaatgggcaacctcgcagtactgggaaaatgagcagctgggcatgcagaccatgctctgctttccaacaaattagcctagaac

SEQ ID NO: 548604 - DNA, 759 bp, Homo sapiens
catggggtagattctgcaacatgaaaatacttgttcaaatctttgttttcccctgtacagaggctcaagtatttttgaagcttggttgttgtttttccatctcttattgtttattttatttttagcatgtgaatccaatcattacactcctgtttaaaattgagcgatggtctcccaacaatcacgggggtaagtcccgaatccttctgatcgatgggctgatgcatcactggcccttctcttgtcctccaccccagcctcatgccactccattttgcaccttgatcactgtttctggccatgcaggcttaactgcagctcctcaagtatacaaatcttttcccatccacagggcctttgaaagagctcttcctctgaatatgactcagataacttacccttcaggtatcagctataagtcgcttcctcaaagaggtcttcccttattcccctccctaaaagtttctcccatagcaccttgttttttcccatcatawcatttattgcaaactgcaataatgtgtgcatttgtgtgattacttgcttatttccactagactagaagctccatgaggacagagatcatggacttttgtttgctgcctgcccccagagcctacctggcatacagcaggtcctcacaaggaacttcttgaatcaatgtttgtgaatagaaaaccagggcccagaagaatttagagatgtgctcaaggctgcctgtccaggtagcaggacacctgcctagccctgatggcaaat

SEQ ID NO: 548605 - DNA, 515 bp, Homo sapiens
tatataagttgactatcactaacaggtaatatttttctgtttgaagttgttacttttgtttacagcaaagtttgatgtagtgtgcagtagtgagctctagactgatctttttctaaatcagaaagtgattaaagtatgcacaaccaaaggcaggtttttctttttcatttattcagcaactatttattaagcatcaactctgtgccaggcacgttactagctgctacatactgtctgaacatgacatacggttaagtaactttacaattattatcaaatacttcaatgtagatatttcttmagttgaaatagcattaactaggataatgctttcatgttattttattgtcttgtgatagaaattcaacttgtaccatctaaaactaggttgctataaaaataggaggatgaagtcaataaagtttatgccagtttaaaaactggaaggaaaaggtaagagctctccattataaaatagttgcattcggttaatttttacacattagtgcattgcg

SEQ ID NO: 548606 - DNA, 1252 bp, Homo sapiens
ctaaataaactacctgcaagtccttgtctcaaggtctgctttgagggaactcacatagagacaccctctaacaaaggctgcctcaaaggctagattttgaattgatatgggaaaaactaaggggtgaaactatccaaatctgcttgattttgacatacttcatttcagaaaatatttccaagcgtattcagcttctcctagtctggagctttgtcttctctcctaagtctctttttctctttagagaaaaatgtagagatccgggagaggtgaggggcatgatgcctttctttgttagtttttacaaaaattttataatttaacacatagtgtcttttagctagtgaggtcagaattattacttggtgagatacagagtagcagttatattctaagaagaatgcaaatttatcaagtggacacttaatgggagatcaaagaaatgaattttctcagctcttatttcagaaattttgtgctaaaacaagttgcagcatggartagcatgtctccatcttttccttcttggccttggctccagagctcacttcttttcacccatgaagtctttatcttgggttaggagtaggttccagccactgtgatgagcccgcattacctctgccttatgcagaaccagcagagactgaataaaacaagaagcccgtgagtgaattttttttctcatgatgggccctccaagatgtgcaagacagaagaggggacctatagactgaagtttattatttctattgaagaggtgtcctttctaaaagaaaagagatgatgtgctgtggacagaaagctgaggacaaaagcaggggattgcaggaaacagggtgaagagggcctgagttgggaatcaagggatttgcatctgggaccctccttattccccaggcttcagctgtaagattgtcccccctttgatgacatagggatgacatgactggatcacaggcattgtgtcagatttgcttcaacctggctgtatacagttttgggactcttcaatgaaaaaaatacctaaataacatccagtacgcattgggtgggccaaggccagccaaatagcctctagtgcaggtggaagaagattccccttttctctggtcgtcactgagtgatggacttctgagcatcaagaatcaacacagagataacagttcacagagggaaacagtgaggtctgcacccatttttccctcctcagagaatggctggaatgcacttgttgggtagaagaaggaaa

SEQ ID NO: 548607 - DNA, 525 bp, Homo sapiens
gctgggatcacaggtgtgtgtcaccatgcccagcttatttttgtatttttagtagagacagaattttgccattttggccaggctggtcccaaactcctggcccaaagtgatctgcccaccttgacctcccaaagtgctagaattacaagcacaagccaccacrcctagccaccactttcatgtttttcaaaacataacttctttcagacagtctactaattgtatttagaatgcaccttaattctcttcctgtacattattcctttaaaaaaagttatattgaattttggagacatatacacacatttttccccatgtaaataccggccaacaagccctggagtgaagatacatatgttctgttaaggagtggttgtgcagggagaatgttacctggggtggagttctgagggtagacctgagctttgtttctccgagcacaggaggtagtatgattttctagtcctgttgcagcttgaaggactttggagaatgtctcattctttttcagttcacagggaaagg

SEQ ID NO: 548608 - DNA, 525 bp, Homo sapiens
gctgggatcacaggtgtgtgtcaccatgcccagcttatttttgtatttttagtagagacagaattttgccattttggccaggctggtcccaaactcctggcccaaagtgatctgcccaccttgacctcccaaagtgctagaattacaagcacaagccaccacgcctagccaccactttcatgtttttcaaaacataactkctttcagacagtctactaattgtatttagaatgcaccttaattctcttcctgtacattattcctttaaaaaaagttatattgaattttggagacatatacacacatttttccccatgtaaataccggccaacaagccctggagtgaagatacatatgttctgttaaggagtggttgtgcagggagaatgttacctggggtggagttctgagggtagacctgagctttgtttctccgagcacaggaggtagtatgattttctagtcctgttgcagcttgaaggactttggagaatgtctcattctttttcagttcacagggaaagg

SEQ ID NO: 548609 - DNA, 1046 bp, Homo sapiens
gtaaaatacttgcaacttcactgaacttttatctaagtcaaagcaacctgtgccatcctttgtacagtggaactttgagattctgaacaaccacttgcaccggaactgaaacagataccatattgcttttaaaaatcagtttttgctttgyctgctatgctccttatgtgtaagatgaaatccacttgaatggtaataaggggctgagtcttaaatttcacagtggaatagctactgtaccactggtccatcaaattccccaagcctatctgtcaattatcataaatcatagcatatcataaatcacagaatatcataaatggtccctatcaaaagtacaagaaagaaaatctattctatgacatgccaccttcactcctctgtgcacaccaaatcccatatgagcatcaagtgaaatcaccagaagaacacattcttttgctcactggtgtaaatcgcactccttaccccaattcttaaatgaaatgaatttgcagcgaacccatttattaccagtttgggttaataaggctgattacctatttcctgggggcaagaaattagggccagctcctagattcacatttttttgctgcatcactgttgcactttcttaagtctgcactgccgacttttgatagctaaactcctccacttcagggtagagagtcgattttaaatcacatgattattgatagcgtatagcaattttcacctcttcactccaaaaacaaaagtatcataaacagatttccaagctcagtttcttgaaggatactttgttgaactctatcactctatcacaaattctctcatttctttatgcaagacatttacatgaaaaccctagggaattctaatgatcttggtttgcttttttttttaagctgaaattttgaggcacaaaataaatattttaaaacttcccagctgtcagtaatagcaacgtgctttccagggaacgctgaacaaacaatgtggtttggttttataattactttaacaaaacatctaattaaaagggcaatccaagaggacttggggta

SEQ ID NO: 548610 - DNA, 964 bp, Homo sapiens
ccctatcttattttatttttgatccatttgccaatgctgtgtggttgcagatgaagaaactgaagctaagagagttgaaatggctggatgcggtgtctcacgactgtaatcccagcactttgggaggctgaggtgggcagatcacgagctcaagagatcaagaccatcctggccaacatggtgaagccctgtctctactaaaaatacaaaattagccaggcgtggtcgcacatgcctgtaatcccagctacttgggaggctgaggcaggagaatagcttgaacctgggaggcagaggttgccgtgaaccaagatcacaccactgcattccagcctgggcatcagagtgagactctgtctcaaaaaaaaaaaaaaaaaaaggagagaggtgaaatgggttgcctaactgatgctgttcaaaagtatcagaatcaggagcaaaatacaaacctactggcactaagtagagtgcttttgctaaccatgttccctcctacatgactcttgttaaaattgttacacccaggcgagttagagaaaacgccacactctgagacgaattaagagtcttttatttaagccagcagccaaagagatggctaacgctcaaaattctctcggccccaaggaaggggcttgattaacttttataccttggtttaggaaggggaggggaagttaaatgcaataattctacagaagtaaaaacatgcaagaatcaaagaaacaaatggttacagagagataaacaatttaaaaagacaaatggttacaaaaaagcaacggaaccaggtgtggggctctraatctttcattagagttagatatagatgctatgccggacacggactcaaggctttatgttgttatctctgtgtaaaatcctgggaacttcatacattgtttgtttcagtaccttatcagttaattgggctcctttgaaatgctgaggatctacttacaca

SEQ ID NO: 548611 - DNA, 560 bp, Homo sapiens
ccaggtctattccggggcatggaggtgatggggctgctgtcctttgcgcccaaggaagcgacaggcagcctgctgatcaatagctcctctggtaatgtcttcagaacttagaagagggccagggagcaaagcagaaatcaatactcgggtctagggggaaggaggttatcgttgtattaatttcatttctagaaaagagagaaaacaacaaaagcaaactgaccccctttgtactctttgagaaatgaatgtgctttctgaggaagcatggagctgagtctcggattttagtcaacctcatgcccaaggtgagacactgctgagttgctgagttttgatgtcctcagtgccgttcacyggggcagcattacctgatttacttctgagcatccctaagtcattaacaacttataattgaaaagcataaaagggaagagtttctgacaacacacctgaggctttaggaatgagccactcaatagataaatggggaagtttgggagaaatcaacaaagcaagtcggagaatggaaggattgatttatggggaagattgctcct

SEQ ID NO: 548612 - DNA, 1158 bp, Homo sapiens
tgatttgtgtttgctcatctgcaaagtggaggaactcatggcattatcctgaggttaaatgaaacaacagagatcagtgatttagatcattatcattgcctgcgatgttaattgaagtgtctgataaacattagctattcaagtacaatcagaaagaayggtgacatcttgcactctctggaatactgtctctagaatcttgggtttattttgaaaaccgtcagtgcacgtattatttattaaaaggatatgaagcaccgaagcctttattcataggtgattgtttgtcacacgatctatatgctatcaattcagagatgttcagtttctcccgcattttggtgtccctgaaattggggtgtagttgctgctgatggcatcttacagtggctgctggtcggggttaatcagacgtcagtgtcattgccacattactttttccagtgacaggaatatagaacttcaacttcgcagtatttcggtgcaatagtcacttgagaaccacgcaataaagaacagaagtcctgattcttatcctaaaactttttatacacactatttggtaagttcaaaaagcaccagctttagaacttgtagaaagtgtttaaaagtgtggaaagctctacagtagacactaataggacatccctctatcaaaccttaaatctggtctcaccactgagtcaaaaactagtagaacagctttggacactgaatgttaaaatggcttagaaatgcatgttcattttgcttcaatgttccttgttttatttgtaccaaactgatataagacaaaaatatctgtgctttaatatgtctaaagcatcttttttaaagtatggaatgcaattctaagtaatgagatatgattgttattatttattggtggtttataagagactgctgtgtcttacagtcaaaatacacgattgcagtattgcttagttcatgatgagatgagctcttttattgtgcctaatttggaagataaggcacaggggtgacaagtctatttcatggttagtgttcttttaaagtaagtataaaaagaaacgcatactgagctagatatataaataataattttcacatattagtgtaattaatttttttaaaacactttttagccgtagctttggttaataatgcaggagctta

SEQ ID NO: 548613 - DNA, 1158 bp, Homo sapiens
tgatttgtgtttgctcatctgcaaagtggaggaactcatggcattatcctgaggttaaatgaaacaacagagatcagtgatttagatcattatcattgcctgcgatgttaattgaagtgtctgataaacattagctattcaagtacaatcagaaagaacggtgacatcttgcactctytggaatactgtctctagaatcttgggtttattttgaaaaccgtcagtgcacgtattatttattaaaaggatatgaagcaccgaagcctttattcataggtgattgtttgtcacacgatctatatgctatcaattcagagatgttcagtttctcccgcattttggtgtccctgaaattggggtgtagttgctgctgatggcatcttacagtggctgctggtcggggttaatcagacgtcagtgtcattgccacattactttttccagtgacaggaatatagaacttcaacttcgcagtatttcggtgcaatagtcacttgagaaccacgcaataaagaacagaagtcctgattcttatcctaaaactttttatacacactatttggtaagttcaaaaagcaccagctttagaacttgtagaaagtgtttaaaagtgtggaaagctctacagtagacactaataggacatccctctatcaaaccttaaatctggtctcaccactgagtcaaaaactagtagaacagctttggacactgaatgttaaaatggcttagaaatgcatgttcattttgcttcaatgttccttgttttatttgtaccaaactgatataagacaaaaatatctgtgctttaatatgtctaaagcatcttttttaaagtatggaatgcaattctaagtaatgagatatgattgttattatttattggtggtttataagagactgctgtgtcttacagtcaaaatacacgattgcagtattgcttagttcatgatgagatgagctcttttattgtgcctaatttggaagataaggcacaggggtgacaagtctatttcatggttagtgttcttttaaagtaagtataaaaagaaacgcatactgagctagatatataaataataattttcacatattagtgtaattaatttttttaaaacactttttagccgtagctttggttaataatgcaggagctta

SEQ ID NO: 548614 - DNA, 1158 bp, Homo sapiens
tgatttgtgtttgctcatctgcaaagtggaggaactcatggcattatcctgaggttaaatgaaacaacagagatcagtgatttagatcattatcattgcctgcgatgttaattgaagtgtctgataaacattagctattcaagtacaatcagaaagaacggtgacatcttgcactctctggaatactgtctctagaatcttgggtttattttgaaaaccgtcagtgcacgtattatttattaaaaggatatgaagcaccgaagcctttattcataggtgattgtttgtcacacgatctatatgctatcaattcagagatgttcagtttctcccgcattttggtgtccctgaaattggggtgtagttgctgctgatggcatcttacagtggctgctggtcggggttaatcagacgtcagtgtcattgccacattactttttccagtgacaggaatatagaacttcaacttcgcagtatttcggtgcaatagtcacttgagaaccacgcaataaagaacagaagtcctgattcttatcctaaaactttttatacacactatttggtaagttcaaaaagcaccagctttagaacttgtagaaagtgtttaaaagtgtggaaagctctacagtagacactaataggacatccctctatcaaaccttaaatctggtctcaccactgagtcaaaaactagtagaacagctttggacactgaatgttaaaatggcttagaaatgcatgttcattttgcttcaatgttccttgttttatttgtaccaaactgatataagacaaaaatatctgtgctttaatatgtctaaagcatcttttttaaagtatggaatgcaattctaagtaatgagawatgattgttattatttattggtggtttataagagactgctgtgtcttacagtcaaaatacacgattgcagtattgcttagttcatgatgagatgagctcttttattgtgcctaatttggaagataaggcacaggggtgacaagtctatttcatggttagtgttcttttaaagtaagtataaaaagaaacgcatactgagctagatatataaataataattttcacatattagtgtaattaatttttttaaaacactttttagccgtagctttggttaataatgcaggagctta

SEQ ID NO: 548615 - DNA, 1158 bp, Homo sapiens
tgatttgtgtttgctcatctgcaaagtggaggaactcatggcattatcctgaggttaaatgaaacaacagagatcagtgatttagatcattatcattgcctgcgatgttaattgaagtgtctgataaacattagctattcaagtacaatcagaaagaacggtgacatcttgcactctctggaatactgtctctagaatcttgggtttattttgaaaaccgtcagtgcacgtattatttattaaaaggatatgaagcaccgaagcctttattcataggtgattgtttgtcacacgatctatatgctatcaattcagagatgttcagtttctcccgcattttggtgtccctgaaattggggtgtagttgctgctgatggcatcttacagtggctgctggtcggggttaatcagacgtcagtgtcattgccacattactttttccagtgacaggaatatagaacttcaacttcgcagtatttcggtgcaatagtcacttgagaaccacgcaataaagaacagaagtcctgattcttatcctaaaactttttatacacactatttggtaagttcaaaaagcaccagctttagaacttgtagaaagtgtttaaaagtgtggaaagctctacagtagacactaataggacatccctctatcaaaccttaaatctggtctcaccactgagtcaaaaactagtagaacagctttggacactgaatgttaaaatggcttagaaatgcatgttcattttgcttcaatgttccttgttttatttgtaccaaactgatataagacaaaaatatctgtgctttaatatgtctaaagcatcttttttaaagtatggaatgcaattctaagtaatgagatatgattgttattatttattggtggtttataagagactgctgtgtcttacagtcaaaatacasgattgcagtattgcttagttcatgatgagatgagctcttttattgtgcctaatttggaagataaggcacaggggtgacaagtctatttcatggttagtgttcttttaaagtaagtataaaaagaaacgcatactgagctagatatataaataataattttcacatattagtgtaattaatttttttaaaacactttttagccgtagctttggttaataatgcaggagctta

SEQ ID NO: 548616 - DNA, 838 bp, Homo sapiens
cctggtggtgcccacagtgccagtctcagttgttagaggagccggagcagtgccagttcttctaaggaactcagggtgctcttcatggaaccttgtcccttggggaacctgatgtctaagtgtccagagaggaggatgtggtcagggacggggtgcagaggatagtgtgggtcaggagtgccagtattataatgttcatctccctggagttatgttgaaggcagagttttcatagggttagattttttgttgttgttgttcttccttttctagttgttaattcttcctattgaattgcaccattgtgaaagatgagaaaagtcacaatgatgggtaaggggaaaaccttctggaagtcaatggggcaaggaaaaagaaarcctatgggaaacagttgtgctcccaacatggctttgcagatgatggggggttttttgggtttttgttttgagacaaggtctaactctgtttcctaggctagggtgccagtggcatgaactcggctcactgcagccttgccctcccaggctcaagcagtcctcacctcaccctccagagtagctgggactacagacatatgccatgatgcccgactgatttttgtttactttttttgtagagatggggtcttgccatgttggccaagctggtcttgaactcctgcactcaatcagtcctcccaccttggcctcccaaaatgttgggaccacaggtgtgagccagtgcacccagccagctcctgtgttttgtttttgttctggaactttggttgattttaaggccctccattttgaaagcaggaaaagtcattttttttcccccttatttccctggagga

SEQ ID NO: 548617 - DNA, 631 bp, Homo sapiens
caaatggggtccccatcttgccaggagtcagtccccattcccagcatgggaagatccccttccctggggacctaccttgtcctgggatcmgaaggcacttcacacacacatcccattctcacacccggaaattcggggcggggacatgctgtgggggaggcagatactaaaagaagctgagagggtcctggcccatgggactgcccagcctagaaaatctgtgccttcgtgttagacgccctcttagggaaacataggaagggtacaccttacaccacagatgaccttgtggtcccttgcacccccaaggcggcctcatgcctggaacctcctaccctgggttcacggatcccccaacaacacagcaccttcccagaggattcgggcacccggcctcagaccagctttgacgaaataggagcgttgctagcatccagcaaaggcagcctttccccttcccctgtgcctgccagactctgtccttacgtcctccccatgatgtccaggctatggtgggagagtggggagaagggcagtggggaaattgcagagaaaggggtacgtgaacgctgagcaggatctgcggcaagattggctcactgctctccagttcttgcgaagagcccttggg

SEQ ID NO: 548618 - DNA, 631 bp, Homo sapiens
caaatggggtccccatcttgccaggagtcagtccccattcccagcatgggaagatccccttccctggggacctaccttgtcctgggatccgaaggcacttcacacacacatcccattctcacacccggaaattcggggcggggacatgctgtgggggaggcagatactaaaagaagctgagagggtcctggcccatgggactgcccagcctagaaaatctgtgccttcgtgttagacgccctcttagggaaacataggaagggtacaccttacaccacagatgaccttgtggtcccttgcacccccaaggcggcctcatgcctggaaccycctaccctgggttcacggatcccccaacaacacagcaccttcccagaggattcgggcacccggcctcagaccagctttgacgaaataggagcgttgctagcatccagcaaaggcagcctttccccttcccctgtgcctgccagactctgtccttacgtcctccccatgatgtccaggctatggtgggagagtggggagaagggcagtggggaaattgcagagaaaggggtacgtgaacgctgagcaggatctgcggcaagattggctcactgctctccagttcttgcgaagagcccttggg

SEQ ID NO: 548619 - DNA, 1564 bp, Homo sapiens
aggcagggggagaatggggttgtccagggagacacatgggcagggaaatcaagggaatttccttattaccagcatcaccagaaacagaatctggttgctcagggtcaactgataggaagagggtaaggaatgggaagtcaggtaacccatcttctgttctgcacaaacccttcccacctctcctaccaggagaacagccagttcctgtttctctattcagtcttctgacggtttgaagaaagatgtctagatagataaacctgtttctttcagccacccataaagccttgcttggcccagacatccctcatgggcatttattttcagcgctaagattagatcttcacctcttgggaaatctgacctgcagtctgttcctctcctgggagccttatctgagagataaggatcatagtctcatgatcaatatttttggagcacctggcacacagtaggaggtcagtcagtgctggagtcccctcctcttcttcatctagaggtctgtaccaagtacctcattgtcccaggcctggatgctcgacacacacaccagcctctgagggctcagatgcagaaacagacttacaagggccagttgaggtgactgtcactaagttatctgggaccttggccagttgctcggcctcctcatctggaaaggagggggattggtgattggtggagactaggggcaaagacaattcctatattatagcttgagctgtttggcaaccttccttgatcacagagggtcagggctggagccccacccagggctccctcctgtagacactctggctttggggcatgtctggtgtgctgtcttcctgtgtacatcaaaggatccaccagatgccaaggcaaagagcctgagaaccttactgggtcctgggaaaggggagaccacttggtctggctgcccagccgccacgcactacccagaattccctgtcccatgtccagcccccaggacctgcctcatcccctcaggcaggcgtttcctgttgataagaagctccgtcacaaacactgataaagacatgaaaaaaggaaatygacaggcttgggtataatgggcattttgtctgccttttctacccctcttccttctcccagaaccgcccactccacacccccacctcataccacttcccagaactgaggagaaaggattcccctacctccaccatgggccctatttgatagtctccaggaatttggcctgaaggcttacacaggtctcagaagagggacccagcttggcctgggtcaggatgggagccctgaggcagtaagcactgggtgctgggaggccccaggccagggaaatgggcagcagcacctagaggaaggacagtccagtgcaggtctaatcgaggaccgtcctcttccctcctcctctcctcccagaggcttggatccaagtggtggttaggtggctagatagtctataattagtgcattttccttaattttagtctcaagcttgttactggaaaatctcattaattttgagtctactaatttggaatctatgatccttcaggccaagaggctgaactga

SEQ ID NO: 548620 - DNA, 1564 bp, Homo sapiens
aggcagggggagaatggggttgtccagggagacacatgggcagggaaatcaagggaatttccttattaccagcatcaccagaaacagaatctggttgctcagggtcaactgataggaagagggtaaggaatgggaagtcaggtaacccatcttctgttctgcacaaacccttcccacctctcctaccaggagaacagccagttcctgtttctctattcagtcttctgacggtttgaagaaagatgtctagatagataaacctgtttctttcagccacccataaagccttgcttggcccagacatccctcatgggcatttattttcagcgctaagattagatcttcacctcttgggaaatctgacctgcagtctgttcctctcctgggagccttatctgagagataaggatcatagtctcatgatcaatatttttggagcacctggcacacagtaggaggtcagtcagtgctggagtcccctcctcttcttcatctagaggtctgtaccaagtacctcattgtcccaggcctggatgctcgacacacacaccagcctctgagggctcagatgcagaaacagacttacaagggccagttgaggtgactgtcactaagttatctgggaccttggccagttgctcggcctcctcatctggaaaggagggggattggtgattggtggagactaggggcaaagacaattcctatattatagcttgagctgtttggcaaccttccttgatcacagagggtcagggctggagccccacccagggctccctcctgtagacactctggctttggggcatgtctggtgtgctgtcttcctgtgtacatcaaaggatccaccagatgccaaggcaaagagcctgagaaccttactgggtcctgggaaaggggagaccacttggtctggctgcccagccgccacgcactacccagaattccctgtcccatgtccagcccccaggacctgcctcatcccctcaggcaggcgtttcctgttgataagaagctccgtcacaaacactgataaagacatgaaaaaaggaaatcgacaggcttgggtataatgggcattttgtctgccttttctacccctcttccttctcccagaaccgcccactccacacccccacctcataccacttcccagaactgaggagaaargattcccctacctccaccatgggccctatttgatagtctccaggaatttggcctgaaggcttacacaggtctcagaagagggacccagcttggcctgggtcaggatgggagccctgaggcagtaagcactgggtgctgggaggccccaggccagggaaatgggcagcagcacctagaggaaggacagtccagtgcaggtctaatcgaggaccgtcctcttccctcctcctctcctcccagaggcttggatccaagtggtggttaggtggctagatagtctataattagtgcattttccttaattttagtctcaagcttgttactggaaaatctcattaattttgagtctactaatttggaatctatgatccttcaggccaagaggctgaactga

SEQ ID NO: 548621 - DNA, 1220 bp, Homo sapiens
cccagctaatttttgtatttttagtagaggtggagttttgccacgttgcccaggctggtctcaaactcctgagttcaagtgatcctcccaccttggcctcccaaaatgctgggattacaggtatgagccactgttcccaaccttattttagaatttttaaaaaatttttattattatagagacaaggtttcaggaacgaaactccgtctcaaaaaaaaaaaaggtgataacaattactatttcatgattattgactaaattccaaatgttattttatttggatttggatttcaccaggcttgtttttttgttttttttttttttttcagatggagtcttgctctgtctcccaggctagagtgcagtggcgtgatctcggctcactgcaagctctgcctcctgggttcacgccattctcctgactcagcctcccaagtagctgggattacaggtgtgtgccaccacgcctggctaaatttttgtattttcagtagagacagggtttcactgtgttagccaggatggtctcgatctcctgacatcatgatccacccacctcggcctcccaaagtgctgggattacaggcgygagccactgcacccagccttttttttttttttttaaacaaatgtcctttttctgttcctggattccataagacattgaactatttgtctcataattagtaaaaagacccatgcagattaaaaatggattatttctgtggtaatcgggtgggttctgatgcccatgcagcaccttgaacacggctggagttgatgagtatccctgatgggaagtcgatgctgcgtccatggagagaaggggcacggggttgagtgtccacccagcacctaatggagatacagaccctctccctgccactggcgctccctgtcaggtgggacagacaccagcaagctagcaaggaaaccatcattctgggttgtggtggaactggggagaagcaggcatggatcacgtctagggcatcttggggcaggggcggcctcctgggcacaggtggccctttcctgcctgggcctaaaagctaagaagaggatgccaggcaaagtctgggagggtggcagagggaacagcacatgcaaaggccctgtggcagggtgagcttggtgtgcgtctgaggacaaatgggaaggccagaaggttgatgtcttggccttgtgtcctcatcttgggtggtcaactctggggaatg

SEQ ID NO: 548622 - DNA, 1220 bp, Homo sapiens
cccagctaatttttgtatttttagtagaggtggagttttgccacgttgcccaggctggtctcaaactcctgagttcaagtgatcctcccaccttggcctcccaaaatgctgggattacaggtatgagccactgttcccaaccttattttagaatttttaaaaaatttttattattatagagacaaggtttcaggaacgaaactccgtctcaaaaaaaaaaaaggtgataacaattactatttcatgattattgactaaattccaaatgttattttatttggatttggatttcaccaggcttgtttttttgttttttttttttttttcagatggagtcttgctctgtctcccaggctagagtgcagtggcgtgatctcggctcactgcaagctctgcctcctgggttcacgccattctcctgactcagcctcccaagtagctgggattacaggtgtgtgccaccacgcctggctaaatttttgtattttcagtagagacagggtttcactgtgttagccaggatggtctcgatctcctgacatcatgatccacccacctcggcctcccaaagtgctgggattacaggcgcgagccactgcacccagccttttttttttttttttaaacaaatgtcctttttctgttcctggattccataagacattgaactatttgtctcataattagtaaaaagacccatgcagattaaaaatggattatttctgtggtaatcgggtgggttctgatgcccatgcagcaccttgaacacggctggagttgatgagtatccctgatgggaagtcgatgctgcgtccatggagagaaggggcacggggwtgagtgtccacccagcacctaatggagatacagaccctctccctgccactggcgctccctgtcaggtgggacagacaccagcaagctagcaaggaaaccatcattctgggttgtggtggaactggggagaagcaggcatggatcacgtctagggcatcttggggcaggggcggcctcctgggcacaggtggccctttcctgcctgggcctaaaagctaagaagaggatgccaggcaaagtctgggagggtggcagagggaacagcacatgcaaaggccctgtggcagggtgagcttggtgtgcgtctgaggacaaatgggaaggccagaaggttgatgtcttggccttgtgtcctcatcttgggtggtcaactctggggaatg

SEQ ID NO: 548623 - DNA, 649 bp, Homo sapiens
acacactgcgacttgcattaaactctgggttctctgaagtgggcaacatcgtgcttgaatatcctaacaccctgtaccaggacaccaaccccgctctaggagagtgagcacaccctgacctaggtttcaggactgctgtcgatttttttccactgccttcctcttgtaccagaaaatgaccttttccccattcactcttctgcgtctacctgtggggttccgcatcaggccacgttgaacccaccaggatatgactgaattagaactaccctaaaaatctggttagttctgctattgctttaactcttcaayctctcctctctaaacgtgggcttggtggcctcagtacaccagttgatccaggggcctggggaacaagaaccagggcaggtggggcggctcttgtgatgaagacgtggagctagggtcacctcttgtttttcaccctcataggcataaaaccaattacaactgctgtaacatcaaaggcaatttggagactagtttaacccttgagaagagctcctcagaaggtgagacatgagggattcgtgattgcctctggggtgtccttgcttaggttcgggcgtcctggactccacatcactaagctctctctgtgtgtccactccatcatgctggtgagctc

SEQ ID NO: 548624 - DNA, 1897 bp, Homo sapiens
tgaatgaatgtggtattaacttctaccaaagcgctccacggaaaaccaccgagcttaaaagccctcaacggtgtgcctatcaggtagagattcacgtaggagttcttaggcgggacaagactggctctccagcttctggatgcatacggggttagacacaaggtgtcgggccaccggggatccttctaccccatcttctggagatgtctcctcttcctgctcagctcttctgtgtcttagaaacagcatattttcccatcccatttgtcacagaaacagcttttaaggagcattcaacagtgtttccagcattcaataatttcatagcttttagaaagcgaaggctagactcccacatctactggaaaaatgagagtctagaagtgcggaacacagtctctgaaggaggaagaggagaaagccatccccggggatagtcccaaatggagcgactcactgagaagttctgggacatgcaagggcagagaatgggccttctaggactttccccaacattctccagtaaattacattagaaatgggccaccccactcctttgtctccttcagaaatgatctttggacttgtactgccctttctggcaagttcattctacttttatatccccgttaaaggctagttgtcttataagccttggtttggggaaagtaaggtcctttcaagtgagacttagggggaaaaattccttgtttccagatcaaatgtgctattttctcagccatccaaatgccacttacatagtgccctggactctatccacaaactcccctgcagcagcgttgggcttacgcgttgggctcccagcagctttctgagctccctcagctgctcctggccctcctggcccttggaagcctgtccctgatggatacaaatggatgagctgtgtcttcctatacttccttaagctccctcattctgttcttttctttaaaatgttccatttcaagttaatcaccaaaggtttcgattttccatcctaggttactcacaggcattcttggcatttacatcccggggactcagcacatccccatcaaccatactatgctttggttcctaaggcccctgggcgggctgggtgcagggggtgcaagatctacatgtgaaatgcaaaagtgggtggctgctgctgcaacccttctctaaacagagagtgaggcttgcggtggggtggacacatagtcctgcaacatgagtgatgctatctctaggacttcaaagcagagaagtctgaacccacctgatcagaaaggttggataatcagcactaacgtttcctttgcctgtgatggatagccactttggaaatattttccatcctgacttttccttgggtcagcactgcggcagaagcagggggtggagggacggggtctatcttggtcatgatgttctatattaacccctccaagaagagagaggccccagaattgtctctgtacaaaaggtttgcattaactgtaatgaagcaaatgacaaaatcgataaagtgggaattgcgtggctgtcataaagatgatgtaaatccagggttcacgatggttatgaagctatttagaattgtaattaaaaccagcaccatttttttcaagataaaagcccctttgacaaccataaatgcaagctacaggaaattttcaacaaatatattcaaaattaatgtatggcacaaagatggcataaattaactgaggataatccataagcccaggcttcagaatgtaagagcactgagtaaagagatttcratttcacgtttggttttcaagcaatgtggttttcaattttaatcaagttaaagcttgacagagcacttagagactctgagtgaatggcatatttctgacaactacttttcaatgagactaaaaat

SEQ ID NO: 548625 - DNA, 1897 bp, Homo sapiens
tgaatgaatgtggtattaacttctaccaaagcgctccacggaaaaccaccgagcttaaaagccctcaacggtgtgcctatcaggtagagattcacgtaggagttcttaggcgggacaagactggctctccagcttctggatgcatacggggttagacacaaggtgtcgggccaccggggatccttctaccccatcttctggagatgtctcctcttcctgctcagctcttctgtgtcttagaaacagcatattttcccatcccatttgtcacagaaacagcttttaaggagcattcaacagtgtttccagcattcaataatttcatagcttttagaaagcgaaggctagactcccacatctactggaaaaatgagagtctagaagtgcggaacacagtctctgaaggaggaagaggagaaagccatccccggggatagtcccaaatggagcgactcactgagaagttctgggacatgcaagggcagagaatgggccttctaggactttccccaacattctccagtaaattacattagaaatgggccaccccactcctttgtctccttcagaaatgatctttggacttgtactgccctttctggcaagttcattctacttttatatccccgttaaaggctagttgtcttataagccttggtttggggaaagtaaggtcctttcaagtgagacttagggggaaaaattccttgtttccagatcaaatgtgctattttctcagccatccaaatgccacttacatagtgccctggactctatccacaaactcccctgcagcagcgttgggcttacgcgttgggctcccagcagctttctgagctccctcagctgctcctggccctcctggcccttggaagcctgtccctgatggatacaaatggatgagctgtgtcttcctatacttccttaagctccctcattctgttcttttctttaaaatgttccatttcaagttaatcaccaaaggtttcgattttccatcctaggttactcacaggcattcttggcatttacatcccggggactcagcacatccccatcaaccatactatgctttggttcctaaggcccctgggcgggctgggtgcagggggtgcaagatctacatgtgaaatgcaaaagtgggtggctgctgctgcaacccttctctaaacagagagtgaggcttgcggtggggtggacacatagtcctgcaacatgagtgatgctatctctaggacttcaaagcagagaagtctgaacccacctgatcagaaaggttggataatcagcactaacgtttcctttgcctgtgatggatagccactttggaaatattttccatcctgacttttccttgggtcagcactgcggcagaagcagggggtggagggacggggtctatcttggtcatgatgttctatattaacccctccaagaagagagaggccccagaattgtctctgtacaaaaggtttgcattaactgtaatgaagcaaatgacaaaatcgataaagtgggaattgcgtggctgtcataaagatgatgtaaatccagggttcacgatggttatgaagctatttagaattgtaattaaaaccagcaccatttttttcaagataaaagcccctttgacaaccataaatgcaagctacaggaaattttcaacaaatatattcaaaattaatgtatggcacaaagatggcataaattaactgaggataatccataagcccaggcttcagaatgtaagagcactgagtaaagagatttcgatttcacgtttggttttcaagcaatgtggttttcaattttaatcaagttaaagcttgacagagcacttagagactctgagtgaatggcatatttctgacaactacttttcartgagactaaaaat

SEQ ID NO: 548626 - DNA, 1508 bp, Homo sapiens
acatttctggctccagaactgtaagagaatacatttgtgttttgttaagctagcaaatttgcagtaatttatgacagcgctatgagaaaccaaaacaccaggattatgccccaaggatcctgatgccctccctcctctctgctctgcagtgtgctggagctcacagggctctgctgctgggagttagtatctagtccaacactttacccactcaccccccaagctaagggactcctgaaatcagggaccagatgcataataggtgcccaggaagtgagactcgccttccccagattaagaataaagaagacaaactatccacggctgctgtgagcctctcatcagacctcagcttctagggcagggtccctgcctgtctccagtatgtggcctctgtgtcttcttcgccctccatccccacagtgggacgagaagtcatcaggaaggcaggggatctgcaggcagccatcagggctctaattgcagctggctgggggaccatgggtcagggctgccaccccctggctctgtgccttcacctgtgtaacgaatggggcactcacagcccctctcaagtggtcctggggatgaagtgagaaggtgacatatacaagtgagttatacackttcctgttctgtcactcaccagtgctcactgggtgggtcactgaactcccctcagcgtttccttctccatctgtaaaccaccagtgcaaacctttcccagatagtgctgacccgaagcaggaaccagtgcccctctgccctcagtaagtctgccagcagaggaagcccatagagggtcttgggaaatgaagccaacagagtcaagagggtcagatgatgagggacttcaagtgccaccttcatcccattctttctgcaaatattcaccacacacctacgtgacctcaggctctgtgtcaggtcctggggatgtaatggtgtccatgaagaaacaaggtccctgccctcatagagtggcctgacatatgcccgaggcagtcagcagccgagtgcgggagactcttgagcagagattgagtgtgttgatatctgtaggcatcagcctggctttgctgagtgagctatatcagagtggaggaggccagaggcaaagtccagactccactggatcctggattgaggggagaaggggctgggcggaggagcagcctgagcacctgcatctcactccaactgggtgctgatttgtccccatggccccagcacccaggcaggtcaccaagtaagctcaagacaaaaatgatgagtgactcaacagtgtctggggacaagggagggagagaagaactcaaaatgactgaggtttccagctaccagaaaaatggaaggaccttgaaacaaatgggccatcagcaggggacactggctggaagcccagagtccagtcagctctgtaaggcccccagaataggcatttgacttcaagtcacaggcatttcagcaaaagcctctttgctacagtgattatggtgaagcagatg

SEQ ID NO: 548627 - DNA, 624 bp, Homo sapiens
ccagggccatgggtgcatagagaaaaggccatgtgaagacagaggcggaggacagccacctgcaagccaaggaagagaccttcaaaaaaaccaaaygtactgatactttgtgcttgaacttccaacctccaggactgtgagaaaataaatttctgctctttcagtcacttaatttgtcatattttgttatagcagccctagcaaactatatatgccataaatcatataggttatatttcatatggcaataaaaactggaatagggcagtgatatggatccctgcaaaggagagcagagagcagtaagaacagcaaatcgatctcaggaagcccctgggtgaggcacatggtggaagagagagaagcaagagcaggaggtggccaagaaaagggggatcagagagaaaggagagggcccagattcgtgcagaatcctgcaagttgaggggaactattcccatgccgatgaccttcatcagttcttatttttccatttccctgctactaatgaataacctttgctcatgccactccctttacattaaatactccatcaagacttcttagctttgctatttttcatgaaagactctctagagacgtttattcgatacacaatttgtt

SEQ ID NO: 548628 - DNA, 624 bp, Homo sapiens
ccagggccatgggtgcatagagaaaaggccatgtgaagacagaggcggaggacagccacctgcaagccaaggaagagaccttcaaaaaaaccaaatgtactgatactttgtgcttgaacttccaacctccaggactgtgagaaaataaatttctgctctttcagtcacttaatttgtcatattttgttatagcagccctagcaaactatatatgccataaatcatataggttatatttcatatggcaataaaaactggaatagggcagtgatatggatccctgcaaaggagagcagagagcagtaagaacagcaaatcgatctcaggaagcccctgggtgaggcacatggtggaagagagagaagcaagagcaggagrtggccaagaaaagggggatcagagagaaaggagagggcccagattcgtgcagaatcctgcaagttgaggggaactattcccatgccgatgaccttcatcagttcttatttttccatttccctgctactaatgaataacctttgctcatgccactccctttacattaaatactccatcaagacttcttagctttgctatttttcatgaaagactctctagagacgtttattcgatacacaatttgtt

SEQ ID NO: 548629 - DNA, 1770 bp, Homo sapiens
aagtccagctactaactcaagtttatagaaagaatttagtttaattatcaattcccaggaagaaataagagtagaaatggaagatgtatgagccactctaccaatgaatgtggatttgttaatgccttcatttttaataggattcttttgttgcccaaaagaacatgtctgtggattcttgggatttcttagaaacagattttgcccatgacattaaaatggtagaatgaagttttataatgtttattttgtttgccaataattaatgtgtcatgtggtgcttcttgcatgctttttattttctttttgttcttagaagttttctaggaatcccttttaggaaactctatagatttaatgtttagccttgagttattacttagtacaatgtcttttcaaatagtacagataaaatgacatgtttaaattatttttaaaaatctacctacccttattgagttaaaagatacacattgtgcttcctctttgttttacaaaggccatcaagtgccttagaaaatgccagtactgaaagttctatgcactccaaggttgcagagaaaggcagagaacctgcaatatgcctagaggatgtcctgcatcctctacagccagcgttccctgcttccgtaggaaagcagaatagcacgttgcttacatcttgcatgatatggcaattaccatgaggcagaagagcagaactgtcccaaaggtaacttaatcaatggatactttagatgagcttccaatcttcctattgtaaaaagcttattgaaaggacaatacgaaaattgcaagacttcctatgttggtgtctctatacttgtcagagtgtttcagtggtttcattttattcaatttatgttcattaactaaagcacacagcatttttgtcaccaatatggaaaatctttggagagaagtaaatgcattaaacccttgctacttcttttattatatattcttctaaaactgctgagctagtaggatctatacgcacaaagcagtgtgttaaaaatggcctcagttaaaagcaggtagaaggcaacagcaagaattatgtagcattctacagacaaattgtgtgatttgaagaggaagtgtgaaaatttgctctttttttttttttttttttagagaaaatacccaacagatgctttgagatttttaaaaccttttcagttgcacaggaagagagttgctgcagaaaggttgaatttatagagcaacatcctaatgtggacaactttgtggtcagacccagattagtggtgcagggtaccaaggtttgtactaaggatgtaaaatgctgattttataggcagatgcattgcaggatgtaataaaatgtgggtatatacttattctgatgaatggttccagaagcaatacttaaactgggtgtctgaagtattgtttaatcaaggaaatattgtaatagaacaacagttgtacccagggtctttaattcttcaaatatggtggctatcctacctccacctgtggtccattcccgcttgtactgatggcggctgatgtgtgaccttggccccccccgagtcatccagcagcagctaacaattctatcccatttcccattctttcctcagatacccgagtatgtcctgtcaaagagctgccttctctagggcaaagaatttaggtcctgagctctctctgggcttcagcatagatggcatgaaagtggrtaacttcttactcttgagtataattcctacataaagtaatgtgcttgtatttacagctgat

SEQ ID NO: 548630 - DNA, 571 bp, Homo sapiens
gtttccatatctgctgatgcctttataacttttactgatggacacataaagtacaaagtggtttaattatcacttttgtgtgaagtgagtcttaggacagtctgcataacccttagaaagggacaatctcaagaatgaatttattrtgaacaggtaatagaataaaagtgtagttgacatgtaaactatagaaatgcaacatattttatttgtatgagttgtgaacttaaatttatatgtactattattcagtgtcttctgtgacatgcttgtgtaagataatctttgaaatatacatccctcacatctctcatctctgccatttgttttttcttacaataggaaattcctttattgtgtttcttcaatcacctaaacttaactttaatataaatacaggaaagcattaaggtagctacaaagaaatcaattgcttcctttttgtacaaaaagcttagaataaaagccataattatagcccatttaatgatttgaggaaggcattttcattcctatggaaaagataccagcttttaaaaccccagctgctcaataggatttcttagtattt

SEQ ID NO: 548631 - DNA, 571 bp, Homo sapiens
gtttccatatctgctgatgcctttataacttttactgatggacacataaagtacaaagtggtttaattatcacttttgtgtgaagtgagtcttaggacagtctgcataacccttagaaagggacaatctcaagaatgaatttattgtgaacaggtaatagaataaaagtgtagttgacatgtaaactatagaaatgcaacatattttatttgtatgagttgtgaacttaaatttatatgtactattattcagtgtcttctgtgacatgcttgtrtaagataatctttgaaatatacatccctcacatctctcatctctgccatttgttttttcttacaataggaaattcctttattgtgtttcttcaatcacctaaacttaactttaatataaatacaggaaagcattaaggtagctacaaagaaatcaattgcttcctttttgtacaaaaagcttagaataaaagccataattatagcccatttaatgatttgaggaaggcattttcattcctatggaaaagataccagcttttaaaaccccagctgctcaataggatttcttagtattt

SEQ ID NO: 548632 - DNA, 1243 bp, Homo sapiens
ctatttcttcacaagtaccatttgatcttcaccctttatttgaaaaaaaagaaaaattagcctatgcaatactaggaaaccattaaccttgcaatattgccagttctccccaaacattcttctcttgaaatatggtgcattttcccccttgatgcmcagtgaattttaattttctataacatgcaagatgtataggaagaaaattcttctgtaacattgacagtatgggacacgttaaagccaagtggcctttatattttcatttttgggtaatgccagttgtgtcatcaccacagttagaatctttacgattactttgaggaagttcttcattccactgctcctttagatggccagggttcttctgctgtagcttggcaggttttcctacctttgaaaaaggaacctgattcaacagcctctctacctacttttatggttcttcactctcttgaaagaatccattgatattcttgcttcgaactggcagaatttttttcagttggagacccttctaagcaaaaattcacaaagaggtatatggctttatttgtgagttcttaagaaaattatgtgaaaattctgtcactttaacataaacagtattcagcaaacattcagaagaaagaagttaaaaatagaattaatatagatttaaacatgcacattatccagcatataacacctgtatcgtaaccttttgtagctattaatagttttcatgctcaaagttattcaggaaatagttgagccctttagtgtcattttatttcttggtttatgctatagcgattttaacacatataaaacaatataacaaacatttaaaaataggctgcgttcggtggctcacgcctggaatcccagcactttgggaggccatggtgagtggatcacttgaggtcaggaggttgagaccagcctggccaacatggtgaaacccggtctccaataaaaaataaatagataaataaataaataaataaataaatataatatacagaactgtaaagacagagaaaaatgaggggaggaggtatgctacatgcataacaggaaggttggtatcagaaatctcgaatggcctactgcatgccatgtagccatgatgttttgtattttcttattttgattttactttcatcttaaacaaaaagcactttccatgataggtcttatttgaatcactattactctgcttaattctaatacaataatacacaaaatatgtaggctagatttc

SEQ ID NO: 548633 - DNA, 1021 bp, Homo sapiens
cccacacgctgtttaaactatggcaaagtagtcataggagcataatctctagagtcagacctcccggatgctaatcacaattctaccctcaccagcraggcaaagttggacaatttccttaattacctcatctgtaaaatgggcataataatataaactagctcaaatgtttttatgaaaattaaagagaaataggtatttaggaaatatataggtcctatatctcctaataggacctttaaataaatggcttaaatgtagtaacaatgcaacataatataatttagtatttctagtgaagatggaaataccagaaatatgcccaattttctctctttctccatctttctcactttctttccttcctttttcagcaaatagttaaagcatattatcaatcttcatgtaactttttgtttctttttaaaatttaccaccctccctcctctacacacagacatcttctaagcagtagaggtagattcgcaagactaaagattggaggttgaagctgaaactgggttgatttgctctgcataaggatgtggaaagcagccaaaactggtgaagggatagatggaaaaactaggaggagtctaaagcctgaaaaacaagacaatgaaaaggagaagtgtaaaggattcccattcgtgcctgaaggctggacagtgactgtggaaacaaaacggttttgaggaaggtggttcgtttgttcttagtggtttgatacacgattctcccctatttctcttcttcattatacaggaaaatctacatgactgactaattattggagtaagtggctaagtttttggaaacaaaaggaggtactgagttggggcaaggcaaaaataaatccttaaattaaaaaaaaaagaaagttgatgcagaaacaaatcaaaccaaatattaaagatttaacacggatggagacctagaatccatgtgctaaacagtttcctctttatgaaaaatgtctgcagcccttgaacaacttagctcataaaagctgctgcacact

SEQ ID NO: 548634 - DNA, 1021 bp, Homo sapiens
cccacacgctgtttaaactatggcaaagtagtcataggagcataatctctagagtcagacctcccggatgctaatcacaattctaccctcaccagcgaggcaaagttggacaatttccttaattacctcatctgtaaaatgggcataataatataaactagctcaaatgtttttatgaaaattaaagagaaataggtatttaggaaatatataggtcctatatctcctaataggacctttaaataaatggcttaaatgtagtaacaatgcaacataatataatttagtatttctagtgaagatggaaataccagaaatatgcccaattttctctctttctccatctttctcactttctttccttcctttttcagcaaatagttaaagcatattatcaatcttcatgtaactttttgtttctttttaaaatttaccaccctccctcctctacacacagacatcttctaagcagtagaggtagattcgcaagactaaagattggaggttgaagctgaaactgggttgatttgctctgcataaggatgtggaaagcagccaaaactggtgaagggatagatggaaaaactaggaggagtctaaagcctgaaaaacaagacaatgaaaaggagaagtgtaaaggatycccattcgtgcctgaaggctggacagtgactgtggaaacaaaacggttttgaggaaggtggttcgtttgttcttagtggtttgatacacgattctcccctatttctcttcttcattatacaggaaaatctacatgactgactaattattggagtaagtggctaagtttttggaaacaaaaggaggtactgagttggggcaaggcaaaaataaatccttaaattaaaaaaaaaagaaagttgatgcagaaacaaatcaaaccaaatattaaagatttaacacggatggagacctagaatccatgtgctaaacagtttcctctttatgaaaaatgtctgcagcccttgaacaacttagctcataaaagctgctgcacact

SEQ ID NO: 548635 - DNA, 638 bp, Homo sapiens
gaagttaggagactcctccaaatatcacacagctttttaytgaactcaggaaatggactcaaaatccttttgtttcacagctgggacttgttccattttttccactttccctttccatctattccacatgattcatgaagcaattttctaccatccatccaagctaaaaatgtagatgacattcaattttaaaagttttagtcccttttgtctcttctatgctgacagaatatacagaacgcccttataataagaaattgccttttttacacattcagaatattaaaactcatgtgttcactccattctcccacacagcagctatcatctttcacgtgtatgtgctggattttattctttccagaaggagtgtagtttaccgtctgtatttagcactgtggccaccattgcccagaacagtgagttactcctgacaactcttggagaaaggaagcttccccctcctctgaaactcagatgggattccagtgtgcagcctgaacgcagcttgaagagcttccgtagtttaccatggtcactagttgtgttctcaaggacttgccaatttcgtaagccctgagttgccaaggtttgttttaagaaggggtagagaaagtagtttggattctgagattggt

SEQ ID NO: 548636 - DNA, 638 bp, Homo sapiens
gaagttaggagactcctccaaatatcacacagctttttactgaactcaggaaatggactcaaaatccttttgtttcacagctgggacttgttccattttttccactttccctttccatctattccacatgattcatgaagcaattttctaccatccatccaagctaaaaatgtagatgacattcarttttaaaagttttagtcccttttgtctcttctatgctgacagaatatacagaacgcccttataataagaaattgccttttttacacattcagaatattaaaactcatgtgttcactccattctcccacacagcagctatcatctttcacgtgtatgtgctggattttattctttccagaaggagtgtagtttaccgtctgtatttagcactgtggccaccattgcccagaacagtgagttactcctgacaactcttggagaaaggaagcttccccctcctctgaaactcagatgggattccagtgtgcagcctgaacgcagcttgaagagcttccgtagtttaccatggtcactagttgtgttctcaaggacttgccaatttcgtaagccctgagttgccaaggtttgttttaagaaggggtagagaaagtagtttggattctgagattggt

SEQ ID NO: 548637 - DNA, 599 bp, Homo sapiens
tccagcttaggtgacagagtgagatcctgcctcaaaaawaaaataaaataaaaaaaagaagcttgaagatgagttactaatagttacatggaaaactaggcaaacaaacaagacaattatttacttaggaaaaacaaaaaaaaaatggtatctgacactaaaatatgatcaaaggagactaagtcgttcagttgtaacttatgtttacctagcaataaagatgtaaattccaataaaaaaattttaggtggtagaacttttacttcttttgggaacagagtacacagaaagcgtatatgtacaaagactcaaaatacttacacctctaaaggcaactcccttctttaagaatgagtcttcctttatatgtgtttattcctttaaaaattaagattctttgaatggttcagagcctaaactaccaagttagaattctgatttagaaggggcttcctggctgggtgcagtgactcatgtctgtaatcccagaactttgggaggccaaggcgggcggattgcttgaagtcaggagttcaagaccagcctggccaacatggcaaaacaccgtctttactaaaaatacaaaaattagctgggca

SEQ ID NO: 548638 - DNA, 246 bp, Homo sapiens
gggacataaggaagatgtacaaaggggacttggaggataaattcaacaaataggtcatgtcttctattaatgatttgggaagaagttgactggaaggaaaggtggcccagggaatgaatgaaatcttcaatacctgtgctattaggatcaggtccagcgagaaatgtcctcctccgttcctctccccaactctaccaggggkgacatccccccactatcacctctctgtgcccttctgttttcaga

SEQ ID NO: 548639 - DNA, 415 bp, Homo sapiens
atgcccaactgtcgaacttctaaaattttacttcctacagcggaatgaacatgttcttaaatacacttttaaatttttgctctgagttattttgccaaagcaagggagtctttatgacagaagagagttgcttgcaacaaacaaagaaggaagaaggaatttttccaaacacaggcattttataaattacctaatacgtgcaagaggttattgaagctgtcttttcaagagcttacacgatctctttggctttttttatctttcacattttaaattttgytgctgtcatgtgtatttagagtcacattatttaaatgcagccataaataagcagattttgcaaaagattcaaatctgtagcatttttagctcacaaacagttccaatagtggtgtgtaattggaagactgaattc

SEQ ID NO: 548640 - DNA, 1563 bp, Homo sapiens
  misc_feature 2, 3, 4, 5, 6, 7, 8, 9, 10, 11, 12, 13, 14, 15, 16, 17, 18,19, 20, 21, 22, 23, 24, 25, 26, 27, 28, 29, 30, 31, 32,33, 34, 35, 36, 37, 38, 39, 40, 41, 42, 43, 44, 45, 46,47, 48, 49, 50, 51, 52, 53, 54, 55, 56, 57, 58, 59, 60,61: n = A,T,C or G
  misc_feature 62, 63, 64, 65, 66, 67, 68, 69, 70, 71, 72, 73, 74, 75, 76,77, 78, 79, 80, 81, 82, 83, 84, 85, 86, 87, 88, 89, 90,91, 92, 93, 94, 95, 96, 97, 98, 99, 100, 101: n = A,T,C or G
cnnnnnnnnnnnnnnnnnnnnnnnnnnnnnnnnnnnnnnnnnnnnnnnnnnnnnnnnnnnnnnnnnnnnnnnnnnnnnnnnnnnnnnnnnnnnnnnnnnnntctttcagtgaagttaaggaaaaagtgaaatatttcctgtacttacatttctgttcacattgagaaaaaatatatatagagagagaaagaagctgaagatttcaagaaaatgttttcttataccctatcagcttcactcattttttacctgcctggcatccactggcatttacatctgtgaccttggttagattcagagatgaactcgataagctcagagcacgttgaaaagaatgggtgggtgaaagctgaggattagtgttggggcctgtgttgttatgtgtttttaaatacatactgtacattgtttatgtacaaatacatgcactgtatatgtctgtatacytatggcggatccaatctttcacccaattcatgaatcttctttaaaatatccctgacaggtgtggccatgagtaatatacagactctcttttaaaagcaaaaatttttcacagatcctcactgtttacttactttcaagtaaaaaaaaagtgtttacttactttagagaccctgctatagctcagggtctcttgaatttagcaagcctaatcaactgtggcccatatgataattcagtcaccactttattctaattactacaaaattatggtgtcattttgcccttcacctggtacagggaatcatttacatattaattctgcccgtgttttcttcttggccagttaccagtaaagtaacactgcttggctccaccgtgttcataaacacatctgtaaatgataacactgaatttggctactaatgtttgcttatttaaaaatcttaagggttattttcataaagaaatcacaaaattagaatacttctcatagagaactcttagattcccagcatgtctatgaagaatgcgtctctaaggatccaaagatcccagttggaggagtatctgcctagttcataattggtaactgggtggcagatatactgacttttcattactagcccatgacagacatgctaattcctgacttttcattactagcccatgacagacatggctaatcgatagggcagacattactgatctatctagatgctctttcccctctgagcctgtgttgggattcaagttcttctctacatgatcaaagcaatccttcagagttggccttacttacctattcacctaggcgttacttatcctattcacctagtgggtaggatagactagactgtagaggattttctctagctttagaagtccggcattatcaggaagcagtgggaaaattttgagaagggagtactaggaggaggagttgagtggtggtacctggaatggtaaagagagggaagaaagtggggtcgggcgtggtggttcacgcctgtaatcccagcactttgggaggctgaggcgggcagatcacgaggtcaagagatcgagaccatcctggccaacatggcgaaaccccgtttctactaaaagtacaaaaat

SEQ ID NO: 548641 - DNA, 1563 bp, Homo sapiens
  misc_feature 2, 3, 4, 5, 6, 7, 8, 9, 10, 11, 12, 13, 14, 15, 16, 17, 18,19, 20, 21, 22, 23, 24, 25, 26, 27, 28, 29, 30, 31, 32,33, 34, 35, 36, 37, 38, 39, 40, 41, 42, 43, 44, 45, 46,47, 48, 49, 50, 51, 52, 53, 54, 55, 56, 57, 58, 59, 60,61: n = A,T,C or G
  misc_feature 62, 63, 64, 65, 66, 67, 68, 69, 70, 71, 72, 73, 74, 75, 76,77, 78, 79, 80, 81, 82, 83, 84, 85, 86, 87, 88, 89, 90,91, 92, 93, 94, 95, 96, 97, 98, 99, 100, 101: n = A,T,C or G
cnnnnnnnnnnnnnnnnnnnnnnnnnnnnnnnnnnnnnnnnnnnnnnnnnnnnnnnnnnnnnnnnnnnnnnnnnnnnnnnnnnnnnnnnnnnnnnnnnnnntctttcagtgaagttaaggaaaaagtgaaatatttcctgtacttacatttctgttcacattgagaaaaaatatatatagagagagaaagaagctgaagatttcaagaaaatgttttcttataccctatcagcttcactcattttttacctgcctggcatccactggcatttacatctgtgaccttggttagattcagagatgaactcgataagctcagagcacgttgaaaagaatgggtgggtgaaagctgaggattagtgttggggcctgtgttgttatgtgtttttaaatacatactgtacattgtttatgtacaaatacatgcactgtatatgtctgtatacttatggcggatccaatctttcacccaattcatgaatcttctttaaaatatccctgacaggtgtggccatgagtaatrtacagactctcttttaaaagcaaaaatttttcacagatcctcactgtttacttactttcaagtaaaaaaaaagtgtttacttactttagagaccctgctatagctcagggtctcttgaatttagcaagcctaatcaactgtggcccatatgataattcagtcaccactttattctaattactacaaaattatggtgtcattttgcccttcacctggtacagggaatcatttacatattaattctgcccgtgttttcttcttggccagttaccagtaaagtaacactgcttggctccaccgtgttcataaacacatctgtaaatgataacactgaatttggctactaatgtttgcttatttaaaaatcttaagggttattttcataaagaaatcacaaaattagaatacttctcatagagaactcttagattcccagcatgtctatgaagaatgcgtctctaaggatccaaagatcccagttggaggagtatctgcctagttcataattggtaactgggtggcagatatactgacttttcattactagcccatgacagacatgctaattcctgacttttcattactagcccatgacagacatggctaatcgatagggcagacattactgatctatctagatgctctttcccctctgagcctgtgttgggattcaagttcttctctacatgatcaaagcaatccttcagagttggccttacttacctattcacctaggcgttacttatcctattcacctagtgggtaggatagactagactgtagaggattttctctagctttagaagtccggcattatcaggaagcagtgggaaaattttgagaagggagtactaggaggaggagttgagtggtggtacctggaatggtaaagagagggaagaaagtggggtcgggcgtggtggttcacgcctgtaatcccagcactttgggaggctgaggcgggcagatcacgaggtcaagagatcgagaccatcctggccaacatggcgaaaccccgtttctactaaaagtacaaaaat

SEQ ID NO: 548642 - DNA, 1563 bp, Homo sapiens
  misc_feature 2, 3, 4, 5, 6, 7, 8, 9, 10, 11, 12, 13, 14, 15, 16, 17, 18,19, 20, 21, 22, 23, 24, 25, 26, 27, 28, 29, 30, 31, 32,33, 34, 35, 36, 37, 38, 39, 40, 41, 42, 43, 44, 45, 46,47, 48, 49, 50, 51, 52, 53, 54, 55, 56, 57, 58, 59, 60,61: n = A,T,C or G
  misc_feature 62, 63, 64, 65, 66, 67, 68, 69, 70, 71, 72, 73, 74, 75, 76,77, 78, 79, 80, 81, 82, 83, 84, 85, 86, 87, 88, 89, 90,91, 92, 93, 94, 95, 96, 97, 98, 99, 100, 101: n = A,T,C or G
cnnnnnnnnnnnnnnnnnnnnnnnnnnnnnnnnnnnnnnnnnnnnnnnnnnnnnnnnnnnnnnnnnnnnnnnnnnnnnnnnnnnnnnnnnnnnnnnnnnnntctttcagtgaagttaaggaaaaagtgaaatatttcctgtacttacatttctgttcacattgagaaaaaatatatatagagagagaaagaagctgaagatttcaagaaaatgttttcttataccctatcagcttcactcattttttacctgcctggcatccactggcatttacatctgtgaccttggttagattcagagatgaactcgataagctcagagcacgttgaaaagaatgggtgggtgaaagctgaggattagtgttggggcctgtgttgttatgtgtttttaaatacatactgtacattgtttatgtacaaatacatgcactgtatatgtctgtatacttatggcggatccaatctttcacccaattcatgaatcttctttaaaatatccctgacaggtgtggccatgagtaatatacagactctcttttaaaagcaaaaatttttcacagatcctcactgtttacttactttcaagtaaaaaaaaagtgtttacttactttagagaccctgctatagctcagggtctcttgaatttagcaagcctaatcaactgtggcccatatgataattcagtcaccactttattctaattactacaaaattatggtgtcattttgcccttcacctggtacagggaatcatttacatattaattctgcccgtgttttcttcttggccagttaccagtaaagtaacactgcttggctccaccgtgttcataaacacatctgtaaatgataacactgaatttggctactaatgtttgcttatttaaaaatcttaagggttattttcataaagaaatcacaaaattagaatacttctcatagagaactcttagattcccagcatgtctatgaagaatgcgtctctaaggatccaaagatcccagttggaggagtatctgcctagttcataattggtaactgggtggcagatatactgacttttcattactagcccatgacagacatgctaattcctgacttttcattactagcccatgacagacatggctaatcgatagggcagacattactgatctatctagatgctctttcccctctgagcctgtgttgggattcaagttcttctctacatgatcaaagcaatccttcagagttggccttacttacctattcacctaggcgttacttatcctattcacctagtgggtaggatagactagactgtagaggattttctctagctttagaagtccggcattatcaggaagcagtgggaaaattttgagaagggagtactaggaggaggagttgagtggtggtacctggaatggtaaagagagggargaaagtggggtcgggcgtggtggttcacgcctgtaatcccagcactttgggaggctgaggcgggcagatcacgaggtcaagagatcgagaccatcctggccaacatggcgaaaccccgtttctactaaaagtacaaaaat

SEQ ID NO: 548643 - DNA, 1345 bp, Homo sapiens
caaactgtcaaatgaggtatatttatacctcaatatcttggatgatatcagggggaggtagggaggttaaaaaaaaatagtwcttccagtcatgaaagaaaataaagtataatctagaattccttaaaatccttgattagtctgaattaaacagccatattccagaatattaaatatagaatatgaagaaaaactgtcatctccagtcaatgaagtattttaacttttgagttaatactttttcaaattaatttttttctcttcaaaatgcatcacactacttaactcacttcaaggactggcacagccatcaaccaatgtcatgggggaaaaagccttgtcattttaaggtattaaacagacaatgaaatctgccacaattttggtatttcttctccataagaacataataaattaatggagttttttcttttgcttttttctaagcaacaaagttttatgatatcatgaatgaaaaggtccttaattaccttttggtctacatgtcaaggacttctccctcataaaaccggtagtaatcacaacaaaaggaattaaccataaaaagaggtattaaaaatgtatattgatttttaaatgcaagcatattatttctttacattaaaatttttagatttaaaaagtgtttctggaagctcaatctagaaaagaaagatttaattctttacacccagtagggcaaaacaaatcagacagaaatgatatatgaatgtaaatgcaattttatttaccactttgatgctccaaatggcactgccaggaagctgcctgggtttaaaaatttcccgacctcctgaaatgtctggggaccaggaaggtgggctcactgtattatgggtactccaagcctcctaggatatggcagttgagaaaatagatgtgtaaaactcagcaacataaaaggtcaaagccagcaactaaggaattttagaacagcaaaaacaaatgcaaacatatggaaatttaggacaaattgcttcaaggaaggcaaaataagctaatcactaacagtgatttaaacatttaagtataacaaataacttaaatgtttgctgctacagagacatcactacaatgaaacattaaaaattaaggtttatatgacatcaacattgactcatgaactgcaattactgcaccaaaaagtaaataaaagtcaatcacactttaagaattaacactagaagaaagtattggggggttatttttcttctaacaactatcactctacttaaaaggagaaatggataaccataaggaattctatattctatagctataaacaaccaaaaccagtaggccaaagaatgcaatgagaaacata

SEQ ID NO: 548644 - DNA, 439 bp, Homo sapiens
aaatagaactaagtccagactgaacaatattggttgataatcatttggctgatactgaaatttggatgttattcaaaataatattctaaagcggtgctaatagaaatataatgagaaccacatatgcaatttaaaacttcctagtagccacattaaaaagttacagtgagctgggtgcagtggatcatttgaggtcaggagttaagagaccagcctgaccaatatggtgaaaccccrtctctactaaaaatacagaaattagctgggcatggtggtggacaactgtaatcccagctacttgggaggctgagtcagggagaacagcttgaaccaggaggcagaggttgcaacgagccgagatcgcgccattacactccagcctggtcaacaagagtgaaactcctctcgaaacaaaataaaggttatagtgaacaggcga

SEQ ID NO: 548645 - DNA, 439 bp, Homo sapiens
aaatagaactaagtccagactgaacaatattggttgataatcatttggctgatactgaaatttggatgttattcaaaataatattctaaagcggtgctaatagaaatataatgagaaccacatatgcaatttaaaacttcctagtagccacattaaaaagttacagtgagctgggtgcagtggatcatttgaggtcaggagttaagagaccagcctgaccaatatggtgaaaccccgtctctactaaaaatacagaaattagctgggcatggtggtggacaactgtaatcccagctacttgggaggctgagtmagggagaacagcttgaaccaggaggcagaggttgcaacgagccgagatcgcgccattacactccagcctggtcaacaagagtgaaactcctctcgaaacaaaataaaggttatagtgaacaggcga

SEQ ID NO: 548646 - DNA, 972 bp, Homo sapiens
tgccctgaagacatcactaaagtggcacatgaagcacacttttgaacactcaggaagaaattcctgacaatcaatggacacagaaaaacattattaagtaaaacttgtggtgactcttttgctaggcagtggggcatagtggttaaaaatttgggacttgggagccatttccaaaaagaaaaaaaaataatgaacaaaaaagttcgtggagctgcttcctgcggaaatcatgaaaaatgccaytgaaagtcaaagccctgcactaataactaattatttgtccttgaacaagttatttgtgaatacagaacccatagatacgaaaggccaactgtacttattgaaaacaatccaggtataactagacccgcacagttcaaacccatgttgttcaagggtcaactgtataattcacttaatccctagagcaactgtaagagctagatacgattgttatccttgttttgtaggagaggaaagtgaggcacagaagtgtggttcaaggaccagaagcatctgcatcacttgggagtttgtgagaaatgcataatcttaaggcccacctcagattgctaaattggaatctgctttttaataaaattagcagattcctacaaatattaaagtatcagaagcacctggctaaaaccatcttcccaaaagtggtggaaggggatttcaagccttacaggtctcactctacactgtactgtataagcctctttgcattagaaaattaatgtaaagtgcctagcatattataagtaataaacattgtccatcattataatattttaggaatagtttgtacatatttctacctggaagtaaaactatttatttatttgtttatttatttatttatttatttatttcaaactaaaatttaaaaagctgaaattatcaccaaacacttagcattgacaggaattcgaattgcagaattatagaacatcaacacttaaagggaac

SEQ ID NO: 548647 - DNA, 972 bp, Homo sapiens
tgccctgaagacatcactaaagtggcacatgaagcacacttttgaacactcaggaagaaattcctgacaatcaatggacacagaaaaacattattaagtaaaacttgtggtgactcttttgctaggcagtggggcatagtggttaaaaatttgggacttgggagccatttccaaaaagaaaaaaaaataatgaacaaaaaagttcgtggagctgcttcctgcggaaatcatgaaaaatgccattgaaagtcaaagccctgcactaataactaattatttgtccttgaacaagttatttgtgaatacagaacccayagatacgaaaggccaactgtacttattgaaaacaatccaggtataactagacccgcacagttcaaacccatgttgttcaagggtcaactgtataattcacttaatccctagagcaactgtaagagctagatacgattgttatccttgttttgtaggagaggaaagtgaggcacagaagtgtggttcaaggaccagaagcatctgcatcacttgggagtttgtgagaaatgcataatcttaaggcccacctcagattgctaaattggaatctgctttttaataaaattagcagattcctacaaatattaaagtatcagaagcacctggctaaaaccatcttcccaaaagtggtggaaggggatttcaagccttacaggtctcactctacactgtactgtataagcctctttgcattagaaaattaatgtaaagtgcctagcatattataagtaataaacattgtccatcattataatattttaggaatagtttgtacatatttctacctggaagtaaaactatttatttatttgtttatttatttatttatttatttatttcaaactaaaatttaaaaagctgaaattatcaccaaacacttagcattgacaggaattcgaattgcagaattatagaacatcaacacttaaagggaac

SEQ ID NO: 548648 - DNA, 768 bp, Homo sapiens
attttttctattttaaaacgaatatagagaacaacagaaaggaggagaaatcacttatattcatatacacaaaaacaataatttaaaaatcttagacatttttcctgtatgtcttggttttcatttccccccatgtgtgggtatagcataaaccatcctcctaactctcttccctgtggaattaagattagacactctaaaaactgaatgagatgtttcctggttgttgatcttatctattttcttatatccaaaagattcttcatgtttggattcctgtaacatctctctgtgcaatgtgaatcaaataattggaaatataaatattttaaattatgtgtgccaatgaatttgggttttgataatkgagaaagaactctagtacctgagtaaaatgtactatttagaggaaattttagaagcaagataaatggatcagccactaaagataggaatcattagacatggagagtttttataatagtttggtcatgaatgaacctttttgggagggacttcctgaaaactttcagttgaattattttacttgcttagaaaaaaaaaagaaaaaaaatttactttacttctgcttctacccacctaacagagttatataaggaaagatggctccagtgtgcgtgcttgtaagctcagaccttcgaaataactacgtgaatcacttgagcaagttatttcacttctcagtttctctatctgtaaagtggggataataataatagtgatctcatatgtctgctatggaagtta

SEQ ID NO: 548649 - DNA, 1498 bp, Homo sapiens
tgactgaagttatgttacattattgactaaaataaattttttaagtacaaaaaaaagataattttttttctcctttcatgtgatataacgtggttttgaagtctaggtacaaattataattacctagggaagtctgaaagaacttcccctatctgagtccactccagccagaacaatcagaatctcttggtgttgggtgtcatgaactaattgattctgttttggtttgggtttgttttttgaaactctccaaaagatgcctcaggactgacagcatgaaggcggtgtcacaactttgatattagggatcttattcaattcccaggraaactgcttctcattcttacaacctcagttcagctgagacctctggatagcttctccaagtccccctctgtcaaaggattacctatataatcctgtatatatcagttccccagcgctgaatatgcttgatcttaataaggtgtttaattgcctatccctaagtgacaatatgtttcttgaagggaaggataatttttgtttctctctgaatctactgcctattgtacaaaacataacacaaacaaaaactctactttgaagaaatgggtgcatgaaagaatggcattcaaatgcacagttttagagattctacttcagtacttctggctgtcacttgtgataattatgtagtattttcacaattgcatccttacaaatctagtgcaaatatgaaactaaatgtggtgggaaataaataataagcaatagaaatgggattcatttaaaagaagcctgcatgcaaattaaataatgctgatctttagaatactccttagtactgccataaactgcttttcttagtcttaaaaacagaatttctctctactgacaatcatacattacacagaatagatcccatttggtctcataaatattacatttgtttgtatatacacagaaattaaagtgggaaagatctccctgcatgtaatatgcagttgcatagataagtgatgagaagtggagccctatgaacatattaagtcctatgatgctagggaaagcatatgttctatccctaatgattccagattaacacaatgcaaactttaatttctaaaaacacagtagggaaatcattacatataatttccatcatgcttcccctttttgccttatttccacacatttcccagatgaatgcttgcctacagtagtgcctgtcttctatactgaatgagaattgggccagaaaagagatggtctgatatttgttaaataaatgtcctatacttgagccagcaggaaggggagatactataaatggctatatgccataaaaatgccacagactttttcaacttaccctctgaaaattactgctggaatcaaacagtcaaagaaaaccccatctcattaataacttggaacatttagatggttgtcttgtttctatctggcctgttaacaactgtgagctggacacattcaaacattctgtttattgttt

SEQ ID NO: 548650 - DNA, 1498 bp, Homo sapiens
tgactgaagttatgttacattattgactaaaataaattttttaagtacaaaaaaaagataattttttttctcctttcatgtgatataacgtggttttgaagtctaggtacaaattataattacctagggaagtctgaaagaacttcccctatctgagtccactccagccagaacaatcagaatctcttggtgttgggtgtcatgaactaattgattctgttttggtttgggtttgttttttgaaactctccaaaagatgcctcaggactgacagcatgaaggcggtgtcacaactttgatattagggatcttattcaattcccagggaaactgcttctcattcttacaacctcagttcagctgagacctctggatagcttctccaagtccccctctgtcaaaggattacctatataatcctgtatatatcagttccccagcgctgaatatgcttgatcttaataaggtgtttaattgcctatccctaagtgacaatatgtttcttgaagggaaggataatttttgtttctctctgaatctactgcctattgtacaaaacataacacaaacaaaaactctactttgaagaaatgggtgcatgaaagaatggcattcaaatgcacagttttagagattctacttcagtacttctggctgtcacttgtgataattatgtagtattttcacaattgcatccttacaaatctagtgcaaatatgaaactaaatgtggtgggaaataaataataagcaatagaaatgggattcatttaaaagaagcctgcatgcaaattaaataatgctgatctttagaatactccttagtactgccataaactgcttttcttagtcttaaaaacagaatttctctctactgacaatcatacattacacagaatagatcccatttggtctcataaatattacatttgtttgtatatacacagaaattaaagtgggaaagatctccctgcatgtaatatgcagttgcatagataagtgatgagaagtggagccctatgaacatattaagtcctatgatgctagggaaagcatatgttctatccctaatgattcyagattaacacaatgcaaactttaatttctaaaaacacagtagggaaatcattacatataatttccatcatgcttcccctttttgccttatttccacacatttcccagatgaatgcttgcctacagtagtgcctgtcttctatactgaatgagaattgggccagaaaagagatggtctgatatttgttaaataaatgtcctatacttgagccagcaggaaggggagatactataaatggctatatgccataaaaatgccacagactttttcaacttaccctctgaaaattactgctggaatcaaacagtcaaagaaaaccccatctcattaataacttggaacatttagatggttgtcttgtttctatctggcctgttaacaactgtgagctggacacattcaaacattctgtttattgttt

SEQ ID NO: 548651 - DNA, 1498 bp, Homo sapiens
tgactgaagttatgttacattattgactaaaataaattttttaagtacaaaaaaaagataattttttttctcctttcatgtgatataacgtggttttgaagtctaggtacaaattataattacctagggaagtctgaaagaacttcccctatctgagtccactccagccagaacaatcagaatctcttggtgttgggtgtcatgaactaattgattctgttttggtttgggtttgttttttgaaactctccaaaagatgcctcaggactgacagcatgaaggcggtgtcacaactttgatattagggatcttattcaattcccagggaaactgcttctcattcttacaacctcagttcagctgagacctctggatagcttctccaagtccccctctgtcaaaggattacctatataatcctgtatatatcagttccccagcgctgaatatgcttgatcttaataaggtgtttaattgcctatccctaagtgacaatatgtttcttgaagggaaggataatttttgtttctctctgaatctactgcctattgtacaaaacataacacaaacaaaaactctactttgaagaaatgggtgcatgaaagaatggcattcaaatgcacagttttagagattctacttcagtacttctggctgtcacttgtgataattatgtagtattttcacaattgcatccttacaaatctagtgcaaatatgaaactaaatgtggtgggaaataaataataagcaatagaaatgggattcatttaaaagaagcctgcatgcaaattaaataatgctgatctttagaatactccttagtactgccataaactgcttttcttagtcttaaaaacagaatttctctctactgacaatcatacattacacagaatagatcccatttggtctcataaatattacatttgtttgtatatacacagaaattaaagtgggaaagatctccctgcatgtaatatgcagttgcatagataagtgatgagaagtggagccctatgaacatattaagtcctatgatgctagggaaagcatatgttctatccctaatgattccagattaacacaatgcaaactttaatttctaaaaacacagtagggaaatcattacatataatttccatcatgcttcccctttttgccttatttccacacatttcccagatgaatgcttgcctacagtagtgcctgtcttctatactgaatgagaattgggccagaaaagagrtggtctgatatttgttaaataaatgtcctatacttgagccagcaggaaggggagatactataaatggctatatgccataaaaatgccacagactttttcaacttaccctctgaaaattactgctggaatcaaacagtcaaagaaaaccccatctcattaataacttggaacatttagatggttgtcttgtttctatctggcctgttaacaactgtgagctggacacattcaaacattctgtttattgttt

SEQ ID NO: 548652 - DNA, 470 bp, Homo sapiens
tgtatttttagtagagactgggtttcaccatgttggccaggctgtcttgaactcctgacttcaggtgatccacccaccttggcctcccaaagtgctgggattacaggcgtgagccaccacacccagccgttaatttaaaaaagtgtaaattctagcatgctcagtgctttaaaaaataaaccaaagagtccaagcaagcacccttcttcaaaaataaaatagtcctgtgtctagcctagtgaactgaccattcgcatatttgaacactctattaatgagaaaaaataagccaatacctagaatattccagcccaggctggagtgcagtggcgtgatcatggctcactgcaacctgggctcaagygatcctctgacctcagcctatggagtagctgggactgcaggtgcacacaaccatgcccagctaatttttttttctttctttgcttttctttcttgctttttttttt

SEQ ID NO: 548653 - DNA, 587 bp, Homo sapiens
  misc_feature 6, 72: n = A,T,C or G
ttaagnggtaataggataaccctttacatgttggagcctatcaagccgcccctcagacttgaccctggggtngagacgggaaaggcagccctgctcacagcaattcaactcctgtgctagccagtaatgaagtggcccgaaataatataaaacccttggctgctgtttgatgatttttgtctgggataagagtcgagatcctgattcagagtcacagttcatttcatttttcactcctgatgagatctcagctgttatctgataaaattgaacaactrttactaggctctgctgagtaaagccccttgactgctcttaacagaaatcctatacactccactttgtcagcagttttgaattcatcgtcgcaacaagatgataggaataatcttaccaactgagattgacagttcatttcagaaatcaatatttacaatttacttctttcaaagttcattcgagagaagattccatattatccctctccaaataagctgatcatatctcagtcgtccctggaatgagttttcccaaaatgtgaatttttggtaaaaatcaatgtcagcattgtgcactttaatctcgcc

SEQ ID NO: 548654 - DNA, 556 bp, Homo sapiens
cactgctgattttccctgactacacattcttttactgaaaaaggaaggtgttttccttttaaatccgctgtatacaacaatgaaaacaaaataagattctacacaaatgtgcrtgctcattgctggttaagttactggtttatgttaattcaggtcattccagtattgtgaatacttctttaatctagattctctttaatgagagtcatgtttaaaatggcatttctccctgacagatccagaatatgtctatcttatataaaaaacttaaatgtgaactggatttgaaaaagatgagcagtcaaatttagtgcaatatgaaaaaagattaattaaaaaataataaaattattctttcacctgcctagatatattgcctgtgaaattaaaagtcaaatcctaatcttgttatttcttttaaaacaattttacttaatgtagtctgtcaagaacatttacatatctggagaaattagagtactacataattacaagaaagtttttgaaagggtaaaatgtcttgaagggtaaaattaaaatgcttgaaagtgaactc

SEQ ID NO: 548655 - DNA, 1083 bp, Homo sapiens
tggagtctcactcttgtcatccaagctggagtgcagtggtgcgatcttggctcactgcaacctctgcctcccaggttcaagtgattttcctgcctcagcctcccgagtagctgggattacaggcactcaccaccacacccagctaatttttgtatttttagtagagacggggtttcatcatgttggccaggctggtctccaactccygacctcaggtgatccacctgccttggcttccccaagtgttgggattacagctgtgagccactgcgcctggccagcaaggccattcttaactgggtcatcttcaggttgagaggagttggaggtggaagtgtgggagggagaggggaattgtctcaggtagagggaaggacttggaacaatcgaggaactaagaaaaggccattgtgtaggtagcatggtgctaggacaagcctggtatgagatgaggtctaagacacattatgctataataaagaatatatctggtctttgtgcctggttcttggcacagaggtttaaaaacccttggaatttcctgataggaaattccacaactcttatcctagaggtgactttcatgggcccctagatagcctcaggatgggagcagatcaccagaaagaccagccatgtgattagagaggtgggtgtcagctgcccaacagggcaacacaaatgttccggatagaagcagagacctagatgggcttctgatgcccttgcaccagctggtttcctaaagggaagctggggccatggtctttggaggggtggtgctgtagatcccgcagtgcagtcacatccagaggactcagactaccgatggcttctctagctaggtgtgtctggtgttactggtgcctaatattttacagacattcttctggtttggaaggcattttgagtcacctctcttgtagcagagcataatcatgttgtccatgttgctgatggtgaaactctgccctgagatctacatggcaaaggagctaagcataaaatccttggatcttcaccactcctggcactggagcagtttcctgggctatgtggagtgtgtcttggcctttgccggca

SEQ ID NO: 548656 - DNA, 591 bp, Homo sapiens
gatacacaataattgttgcttgaaaaagtgtctataccgggggtgtttaaaaaacaggaatttaatgtggagatgccagatatttctttttcagtgacacttttcttttcctaagagatatgcacatctaataggaatgtcaagtctttcagcatggaaataggctatcagactcacttttctgtttcctggctgttgtatgcagttgaggcctgcatattcggaagaattccttccacccagcctgctgtgctctccaccagctggggttctcttctgtcggggctgtggggagtcagggggctcaggaagtagaggggaaggatttccacttgttttctcctttacaactgtaatgtgcgtttgagtgcccagctcatgtacagaggggaagtggaatctgcttacaccggattcaagtcagtggtaagccgcacttccaagacacggttttcctgaaggagtttagagacatctaaaaacaccatgagagacttggcaatgaaaaatgatcataataccttattttgaaatagcacttgattctgaatcgcaatactcatgrggttttgtaaacaggaaactgaagcc

SEQ ID NO: 548657 - DNA, 569 bp, Homo sapiens
gagatcatcctggctaacacggtgaaaccctgtctctactaaaaatataaaaaaattagctgggcgtggtggcaggcgtctgtagtcccagctacttgggaggctgaggcaggagaatggcgtgaacccgggaagtggagcttgcagtgagccaagatcgcaccactgcactccagcctgggcgacagagtgagactccgtctcaaaaaaaaaaaacaaacattttaaacatgtatgtgaggttggcattacacagaaactcctctccgggtgggctgggatgggctttctcagccaggctaatsggttttaaatttctctcttttcaagacttgcagtgcatcagcttaaagggtgagccagccagtagaggggaaggcgccccacctagaaggtgcccttagatatcaaagaaatgtgaaaagagaaagattttgctagaatcctcctcaaaggtgttcttgaggttgccagaccagcaacgtcaacatcagcatcacctgagaacttgttagaaatgcacattctcggtccccaccccaggctaccgaaccagaaaccgagcgggg

SEQ ID NO: 548658 - DNA, 576 bp, Homo sapiens
tcaaaaggagatatatggaattttatacttctaaagttttaattgcacatggagatacggattttttaaagtaaaaaaaaaattaaaagaaacgttaaagacaagtctaaaatatattttaaataaccccattgccaccctggtttcctacctcccccctcacaggaagccrctattacagattgttgtctatagttttattttgcgtattcatgcctatatatgtagtagatgttcatttatagtattcatagtgttgtatacatttttatgtgaatgatataaggatacacctggcatttttaattgggttttttaataaatctatatagagttcctttaatttaatatatacagattagactaattcatttcagtggttatgtaatattacacaaaacagataaataggttcagtcagaactaaatactgattgtttatcacaataaaagaaaacaatgatctagcaatgtattatcatttggtagttttgattttcctgtttcttttgccagtgactaccaatttgacagtcagtttgctcttaattttaaaaggggcatcattcaacaggg

SEQ ID NO: 548659 - DNA, 597 bp, Homo sapiens
gggctcaagactgagaggagcagaatcttgcccttccgcctttcaccatgtgagaacacagaagcaaggcaccattttggaagcagagagcagctttccacagacaccaatgccactgccttgatcttggacttcccatttcccagcactgtaagaaattaatttttgctctttataaattacccagtccaagatattttgttatggcagcacacacagaacaggccagttgtgaagactgataactggtgattcattgttgagagtggacaaaaatgggcagataaaaaagcatcaccagcattttgatatgtgtagcatttgtttgccatgttttgtttatttatatttattctgatatcaagactctgactcataaagggtagagaggtgggagaggaaactctatctcastggagaaatatacatgaaggcatatgatacagagactgtgttatctactggaagaataaattagttagggtagaattttgtagatagtgcaaaagccatcttcacactgttttgaaaggcattggaatggccttcctgccaataatctccctgatacccaggtaaaaatggatctgaaatccc

SEQ ID NO: 548660 - DNA, 562 bp, Homo sapiens
tccggcctattcctttgcagggtctcatgggtcacttctacttccggctgctgtgatggagaagacaagacaaggttaaagccaggctctggcagcacatgtagggcctgtccccacctggtcagagtggctgtcctgtggtccccaagggactccctcagtgccagttcatgttagttgtagagttctagggttactttcaaaaaggatcaaacaactagtttgggkttttttttaatcaggtaaaacatttttgagctgtggaagagtttaaaatgaaaccacggtctcccacctctggtccccgtcctagggcgtgtctgtcagccttgcagatgctatctgtgctcacacaagaatatctgtctgtagtatgtaccatgtgtttatctctcctgcacaaatggtattcctgctgctcactgcacttacagagctcattccagctcagcacagagagtgctgcttcaggatttaccagcagcattgtttccgctctctggacagaccgcagtttagcccattgctgatgaagagtgaactgcttccagtgtcttgctat

SEQ ID NO: 548661 - DNA, 562 bp, Homo sapiens
tccggcctattcctttgcagggtctcatgggtcacttctacttccggctgctgtgatggagaagacaagacaaggttaaagccaggctctggcagcacatgtagggcctgtccccacctggtcagagtggctgtcctgtggtccccaagggactccctcagtgccagttcatgttagttgtagagttctagggttactttcaaaaaggatcaaacaactagtttggggttttttttaatcaggtaaaacatttttgagctgtggaagagtttaaaatgaaascacggtctcccacctctggtccccgtcctagggcgtgtctgtcagccttgcagatgctatctgtgctcacacaagaatatctgtctgtagtatgtaccatgtgtttatctctcctgcacaaatggtattcctgctgctcactgcacttacagagctcattccagctcagcacagagagtgctgcttcaggatttaccagcagcattgtttccgctctctggacagaccgcagtttagcccattgctgatgaagagtgaactgcttccagtgtcttgctat

SEQ ID NO: 548662 - DNA, 538 bp, Homo sapiens
ttcaatcacaatttgcaaatcaactgcacgttagtgagaaatagcttgggcaatcctggtgacattctccccttttccttgttctcccttttcaccctggcctccttcagcctcattcttcctccttctccattgctcctgtagacccaaaccaacaacagcaggacctcttattaacctctgttaatacctcaatttagcaaatgtaatgagtactgtgggtaagagggaaggaaatgagccctttgacattcactctctttgaaactgtcatcccacagggaaagaaacaggccaagagtggccagagtatgtaagagaatgggatgactgtgggcagaatcacaggagagacacagaatgtggcggtagagacggtcagagcgaaaaaacaggcacagagcaaggacacaaggcaayatccagaggcagaaaggaggctggagggcactgacaacacagaggaaccaaaacccagacaattcccttcaggggccccagagagaaagtgaacccctaggaaccccctgcaaagggt

SEQ ID NO: 548663 - DNA, 497 bp, Homo sapiens
tacttttgartatttgcatatttaaactatagaagttctctgagttccccatttggataagcaatccagaattatttacatttggctctttgaatactaaatctaatcttttctggcataaatggtctcaacatgtgtatgaggtgtcatagcagtgatataataaattcagatgatttgtatattcaaaaaggcttgaattactatgtgagaattacaatataattgcaagaatgtggtatcaatgtgtgagactaaattttactgacagacctggaaaatagttacaataacaatgtaaatgtatataatgaaaacattgaccttgtttgaaaaacagggaacatgtgtgacacgtaagtgtaccaagaatgtggaaaatatgaagaaagttattctggctacaaatgtttagaatacataactttacagattcatgtattctacagaagtttcatgggttcaggtattgtattcatatataattagattttttt

SEQ ID NO: 548664 - DNA, 989 bp, Homo sapiens
agttaaaacattttatcatttttacataaaactggcaatgattaagaaaaacagcacaatatctagtattagatggagctagggactctggattctctctcatggaatcaaaattaccataaattttaaggcccaccattatttgatgtattattaagaaaaaaaaagtcaccaattaaactatgacacaaggctatcttattacttagtattttattttatagttattrtaagctattttctgtatttagatacagactttaaccactgattatgcccaactatatgtatgaagaaaatataagcaaagtttgcaaaatgcatggctggaagtctgaaataaattaattgtctgagctgcaaagcagagaaatgcattcaatcaacagctgtcaggacctagggtgtttctgacactgaacgaggctctggtggtatggaggtgcacacaagaaggtcctttgttttatggaactcacattctgtttgggcagaagtaaaaaaaaaatcccaaacaacacaggtctgcagattatggtctgttttggtaaataatagtttgatattgcagatgctaatctcttataaaaccacatgaagacagtgttaattggatgatcatttttccgttgaggacatggctgtctttaaatgaaacctgaaagattttcagacctggaaagagcattagagaatatcaagtcccatataaaggtcttctcactctggttatcagccattgtgaacaaacaaaggaattttgaagcccatttagggataaaagaaatacaacactggtgattcttgaagtttcttggaattttagccaagtattcagagcactctgtccacttgcttaagcaggactttgaggtcccttgtctgtgtaacggaatatgtgggttttgtaaatcactgtgttaccttgttcagagtaaaaataaaaaagggattgtttgatcacagtaaacttaaattccatcttttct

SEQ ID NO: 548665 - DNA, 632 bp, Homo sapiens
caacttattgatcagactataagtctcctttagatcagagactgcctaatatttctgtgcttctacagcttggcacatagtaggtgctcagtaaatatttacccagtgaatgtccatgcaaatcaacttaatttaggagggatgcagctaagaaatgcactactaccacaatcacagagcagtctagtgttgaataaaatattatattaaaacatttcamaaaaagcttgctttattaaatattcttattcatcaattcccaattatttctgtaaatagcctgttactactttctataataaaacctgaagtcagcaggcagcattccagatgttgagatatatagtaataaaaaagactatgcaaatacttcaagacattgcagtaaaaccacatatttatattttataaacagcatctcaaatattacctagagaatgtattaatggatcttcaaatggaaatattatgaagagattttcaacaagctgtgtattctatagtttttgtgtgtgccaactatttcatacttgcatgattttatagctatatatagaaaaagagacaatatatatagagagaatatacatacacatactagacagaatgaaaggaagaaagaaataagagat

SEQ ID NO: 548666 - DNA, 636 bp, Homo sapiens
gacttaatgttattataacactcaaagaatgtattgtgcactagtccttgcaaacccaagcaaagcccttgggttacacatgtgagttgtcatcattcagtattccccttgccatgggaggggaargaagcatgtatgatctgcactgcgatgcacacatgggccccctggagatgtggagcaggtgatggatcttcagtctccattagaaccttattattggacatttagaaaaaggcagaaaaagttagcagctccagaactgctggatcgtgattgtgcttctgttttgtatatatctccattgacttcaagttactgcccactcggacctatgattccaatccccctccccattcacctacagaataatgagactgtgatttaaactagaaagccagtagcttttcttctttattttctttgagtgatagccacaaaggggagagtttaagaaataagtcgttgcttgcataaagactgcagagaaaaaccttcatttgtttatttttttcctttcttctattttctattctaaagctgcatgtggtctcctcctaaaaggagtttactggtagcatattaaacatgtctaagacacttctgaatacttgaatataaattatttacataact

SEQ ID NO: 548667 - DNA, 636 bp, Homo sapiens
gacttaatgttattataacactcaaagaatgtattgtgcactagtccttgcaaacccaagcaaagcccttgggttacacatgtgagttgtcatcattcagtattccccttgccatgggaggggaaagaagcatgtatgatctgcactgcgatgcacacatgggccccctggagatgtggagcaggtgatggatcttcagtctccattagaaccttattattggacatttagaaaaaggcagaaaaagttagcagctccagaactgctggatcgtkattgtgcttctgttttgtatatatctccattgacttcaagttactgcccactcggacctatgattccaatccccctccccattcacctacagaataatgagactgtgatttaaactagaaagccagtagcttttcttctttattttctttgagtgatagccacaaaggggagagtttaagaaataagtcgttgcttgcataaagactgcagagaaaaaccttcatttgtttatttttttcctttcttctattttctattctaaagctgcatgtggtctcctcctaaaaggagtttactggtagcatattaaacatgtctaagacacttctgaatacttgaatataaattatttacataact

SEQ ID NO: 548668 - DNA, 1044 bp, Homo sapiens
atggaaaatttacaaacatgttattattaatatttgtgataagaggtagtaatgaagaacaacgtaagtgacttaattggcatgtacatttgaactttaaaaatgactgtcagccaggcgtggtggttcacacctgtaatcccagcactttgggaggctgaagtggatcacaaggtcgggagatcaagaccgtgctggctaacacagtgaaaccacgtctctactaaaagtacaaaaaatgagccgggcatggtggcaggcacttgtagtcccagctacttgggaggctgaggcaggagaatagcttgaacccagaaggtggaagttgcagggagccgagattgcgccactgcactccagcctggcaacaaaaagatattttgtttaaaaaaaaaaaaaaaaaaaaattgtcactgttggaatcataatgttgccaaaacaaacaaaagataaatgtttcaagtgacagatattccgagtactctgatttgataattacatgttgtatacaagtatcaaaatatcacatgtgcccccaaatatgtatgactattatatatcagtgaaaatggattaactaaaaacgattgtgtattagtcttttctcgaattgctctaaagaactaccagaattggtaatttattaagaaaagaggtttaattggctcacagttccacaggctgtatgggaagcatggctggggaagcctcaggaaactttcaatcgtgscaaaaggtgaaaggcaagcagggcatcttacaaggccagagcagaaggaagacagtgaaggaggagatgctatacacttttaaacaactagatctcgtgagaactcactcactatcacaagaacagcaagtgggaaattgggcctcatgatccaattacctcctacaagggccctcctccaacactggggattacaatttgacatgagatttgggtgcagacacaaatccaaactatattagactattgtatcacttaatttcattgtattttttttttctcagcaaatagagaatttacttcctttataggat

SEQ ID NO: 548669 - DNA, 1044 bp, Homo sapiens
atggaaaatttacaaacatgttattattaatatttgtgataagaggtagtaatgaagaacaacgtaagtgacttaattggcatgtacatttgaactttaaaaatgactgtcagccaggcgtggtggttcacacctgtaatcccagcactttgggaggctgaagtggatcacaaggtcgggagatcaagaccgtgctggctaacacagtgaaaccacgtctctactaaaagtacaaaaaatgagccgggcatggtggcaggcacttgtagtcccagctacttgggaggctgaggcaggagaatagcttgaacccagaaggtggaagttgcagggagccgagattgcgccactgcactccagcctggcaacaaaaagatattttgtttaaaaaaaaaaaaaaaaaaaaattgtcactgttggaatcataatgttgccaaaacaaacaaaagataaatgtttcaagtgacagatattccgagtactctgatttgataattacatgttgtatacaagtatcaaaatatcacatgtgcccccaaatatgtatgactattatatatcagtgaaaatggattaactaaaaacgattgtgtattagtcttttctcgaattgctctaaagaactaccagaattggtaatttattaagaaaagaggtttaattggctcacagttccacaggctgtatgggaagcatggctggggaagcctcaggaaactttcaatcgtggcaaaaggtgaaaggcaagcagggcatcttacaaggccagagcagaaggaagacagtgaaggaggagatgctatacacttttaaacaactagatctcgtgagaactcactcactatcacaagaacagcaagtgggaaattgggcctcatgatccaattacctcctacaagggccctcctccaacactggggattacaatttgacatgagatttgggtgcagacacaaatccaaactatattagactattgtatcacttaatttcattgtatttttttttyctcagcaaatagagaatttacttcctttataggat

SEQ ID NO: 548670 - DNA, 575 bp, Homo sapiens
gaaaaaatcaatatttttaaaatgtccgtaccacccaaagcaagctacagrttcaactcaatccttgtaaaaataccaaagacattcttcacagaaatacaaaaaataattctaaaatttgtatggaagcacgaaagatgaaaaatagacaaagctattggatatagaaccaaaaaggcccagaatagccaaagctatttatatggaaccacaaaagacccagaatagccaaagcctacgcaaaagggacaaaattggaaacatattacctacttcaaattatactacaacactatagtaacacaaacaacatggtactggcatagaagcagacacatagaccactgcaacagaatagagaactcaagaacaaatccacatacctacagtgaactcatttttgacaaaaaaagccaagaacatatacctctatctctcaccttatacaaaaatcagattaaaatgcattaaggacttaaatctaagaactcaaactatgaaactactacaagtaaacattgagagagcgctccaggacagtgggcttgccaaaagtttgttgagcaataccttac

SEQ ID NO: 548671 - DNA, 516 bp, Homo sapiens
aattctctcattcttcatttagtttatctgacatctgtactcttattccatgattattatcagaagttacttaagtttctactttagaagaatttattaacttttgtctggaccttgaaaataatttcctaactaacttcttgttcatagcttccatatccactgatgtcacacacatattcgtaaaatacaatgaacatatctggcgctcatgggaagcaatacaggatacatactgattttccattaccaaccaaataaaccttttccactttgacccaaggtttgcacaacccagttgcatacaaaatttctattgtcaccaccttatgtactcttatccaattatcaaactttagcaaataaaatttgcacaggcctacatagatacrctgtattttcccaaatacgtattcttattcacattgttttcactatccagaataacctattgcccacagccgaatacctggatcatacttgtccttgccagacaagaacaaatgtagttcgctt

SEQ ID NO: 548672 - DNA, 639 bp, Homo sapiens
ctagcaacaaaaacaaataagtaactacataaaaagcaagccatgacattcagaatgtgcatgcccttttaatgcactgaagatttaagcaatyagcaatttaaacttagcaatgaaacttaatgaatattgtattcaaaatatcaataatcacattggaaaataaaatcaccttcattaaacaaataccacctttcaactgtctagaaggtaaatcataacacaaagaataagacaattaacagagcaatggctcagtaacatacatcaaatccctcttcactgcatggataatcaaagccaatttggacataacactagagaaaggccctgcaaagaatattgatgcaaatttatcattattctttaactgttcttgttcaatgaagtcatactagtagttccaaattgccccacaagtttctctgttaatcacccatcaattacccaaaaacattggctggaggtgacaagaagggaattatatcagctaagtcctccaaggaggtagcttagcagtgcagtcttggcagtttcactccagggacaggtctgttccagagtcgaggctggtccagaaagatggaactagctgctcagaggggcaagctagaaagtagtaaaatattatttaccttt

SEQ ID NO: 548673 - DNA, 2069 bp, Homo sapiens
cgggttttctgctgccaaaggctttatatcttggtggcacccagatggtgaggaggaagtagtcagaattgccttgcttgactaactctccattttgatgatcaaaccccaaacaaacccaaagctttggtctgggggcagggttgtcacttttaaatataacaaaataaactaccctccctctccccccaaaagcagccatttgtaacttggacatagattcagggcccatgagagcagaaaggctcctagagctactgagaccaaagcctccaggtggcggaggaagcgtcaggcccaggtcagcatgtcttttcagaaattagtcaggaagactatgctggcaaaggcagctcctatgcagacctgtgtcacccttctcttcagagtaagtctctagtccttgccttttcttcttatggactctccttttcctccctcttctcagggggaaaatgatctcaaagtcacaacatgaatatttgctaggtttgattttggcaaaattaaataaccccttggtttaagccaggccacaggagagctgtgtgttttgcctggtgtaggctggagcctggtgaattgtgctttcgtgttgtgcyattgcttgtattgagagacactagcaaggggccttataaagcctgttactttgttcactgtagggattctgcaggctgccatccatacaatcaggccattggcgaatgctttcacataactcatgggaattaatattttaagttttatgatctgggaaaaatcatgtttctccccaacaattgtgaattttttccactataaattttgtaactgaacattgtctgtttattgcttaggctgttgggaagcatttgtctgagcttgcaggttcagtttccttatctgtaaaatgaagataataataacgtacctcatagctttactatgaagaaagataatggctttattttgaagaataaatgtttttttctacaaagataaagaaggtaaaacatggtgcatcttttttaacccatggtgaatgtttaattaatgtcagttgttatgatttatgcatgtgacaacaataatgtatcggtaagcagtagtgatatgtcaggcactctgatagatgctggaaataaggagcaacctagacccagctcgaactctccaagagtgcattctcaaacagcaaaagcaagctggtaagtaaataatgaagtgtgacaggtgctgtgacgaggaaggacaggtgggaacatgcttcgggagcacctactccagtctgaggagcatgacccagaactggaggaagtttaagtgcaagttcagctggtggagaggcagaggagcctcactgaaaaaactgtgcaggaaaggacatatttgaattgttgaacgaggtctggtgtgaccagagggcagagtagctggtggggtgctgagactgccagagaggtggacagcagtgaggtgccgggtcaggctagtattataagctacactgaggaattctgactttatcttatgtatagggggcagtcattaacatgttgaagcaatgataagacctcatctgatttgctttttagaggtatcactcaggtatggagactgagattagaggagggctaggtgggagttgaggagatgaattgggcatctcttgagcattggtgctggggactggactagagtcagggcatccatccagccaaagttccaccttccactttccagcaaccatacaggagtgaatggtttgcatttatatatattttggaatatttccttcagcattagttttcttgtctattttcttttttgctccaatttcagctatttattatatcctgtgtagtgtgtgtcttcaggtatgctttaaattcttttgtgaaatcaaaatgtgcaggaaagaaggaatgaaagacggaagaaagaaaggaggagagaggctggtgatactcatgagctggtactcccttctttacatacatttatttcaaaataactataaagcatctgtcctggttttgacccgatttgagggaaagtctttatatcagactctgtgtatatttttt

SEQ ID NO: 548674 - DNA, 2069 bp, Homo sapiens
cgggttttctgctgccaaaggctttatatcttggtggcacccagatggtgaggaggaagtagtcagaattgccttgcttgactaactctccattttgatgatcaaaccccaaacaaacccaaagctttggtctgggggcagggttgtcacttttaaatataacaaaataaactaccctccctctccccccaaaagcagccatttgtaacttggacatagattcagggcccatgagagcagaaaggctcctagagctactgagaccaaagcctccaggtggcggaggaagcgtcaggcccaggtcagcatgtcttttcagaaattagtcaggaagactatgctggcaaaggcagctcctatgcagacctgtgtcacccttctcttcagagtaagtctctagtccttgccttttcttcttatggactctccttttcctccctcttctcagggggaaaatgatctcaaagtcacaacatgaatatttgctaggtttgattttggcaaaattaaataaccccttggtttaagccaggccacaggagagctgtgtgttttgcctggtgtaggctggagcctggtgaattgtgctttcgtgttgtgccattgcttgtattgagagacactagcaaggggccttataaagcctgttactttgttcactgtagggattctgcaggctgccatccatacaatcaggccattggcgaatgctttcacataactcatgggaattaatattttaagttttatgatctgsgaaaaatcatgtttctccccaacaattgtgaattttttccactataaattttgtaactgaacattgtctgtttattgcttaggctgttgggaagcatttgtctgagcttgcaggttcagtttccttatctgtaaaatgaagataataataacgtacctcatagctttactatgaagaaagataatggctttattttgaagaataaatgtttttttctacaaagataaagaaggtaaaacatggtgcatcttttttaacccatggtgaatgtttaattaatgtcagttgttatgatttatgcatgtgacaacaataatgtatcggtaagcagtagtgatatgtcaggcactctgatagatgctggaaataaggagcaacctagacccagctcgaactctccaagagtgcattctcaaacagcaaaagcaagctggtaagtaaataatgaagtgtgacaggtgctgtgacgaggaaggacaggtgggaacatgcttcgggagcacctactccagtctgaggagcatgacccagaactggaggaagtttaagtgcaagttcagctggtggagaggcagaggagcctcactgaaaaaactgtgcaggaaaggacatatttgaattgttgaacgaggtctggtgtgaccagagggcagagtagctggtggggtgctgagactgccagagaggtggacagcagtgaggtgccgggtcaggctagtattataagctacactgaggaattctgactttatcttatgtatagggggcagtcattaacatgttgaagcaatgataagacctcatctgatttgctttttagaggtatcactcaggtatggagactgagattagaggagggctaggtgggagttgaggagatgaattgggcatctcttgagcattggtgctggggactggactagagtcagggcatccatccagccaaagttccaccttccactttccagcaaccatacaggagtgaatggtttgcatttatatatattttggaatatttccttcagcattagttttcttgtctattttcttttttgctccaatttcagctatttattatatcctgtgtagtgtgtgtcttcaggtatgctttaaattcttttgtgaaatcaaaatgtgcaggaaagaaggaatgaaagacggaagaaagaaaggaggagagaggctggtgatactcatgagctggtactcccttctttacatacatttatttcaaaataactataaagcatctgtcctggttttgacccgatttgagggaaagtctttatatcagactctgtgtatatttttt

SEQ ID NO: 548675 - DNA, 1915 bp, Homo sapiens
  misc_feature 666, 667, 668, 669, 670, 671, 672, 673, 674, 675, 676, 677,678, 679, 680, 681, 682, 683, 684, 685, 686, 687, 688, 689,690, 691, 692, 693, 694, 695, 696, 697, 698, 699, 700, 701,702, 703, 704, 705, 706, 707, 708, 709, 710, 711, 712: n = A,T,C or G
  misc_feature 713, 714, 715, 716, 717, 718, 719, 720, 721, 722, 723, 724,725, 726, 727, 728, 729, 730, 731, 732, 733, 734, 735, 736,737, 738, 739, 740, 741, 742, 743, 744, 745, 746, 747, 748,749, 750, 751, 752, 753, 754, 755, 756, 757, 758, 759: n = A,T,C or G
  misc_feature 760, 761, 762, 763, 764, 765: n = A,T,C or G
aagatttttcaaaataattataaaatgtatgtgaagaaaaaaatggcaaaaaagaaacaagaaacataaggaaaaagtatttttcaaaaaaaaaaagatgcaaggcttgccctgcaattttcttaaaatgcattataaaattatgttattaaacaacatagagattccatatataaaaataaatgaattcattcacatttatgtaatactttaatacataaaaggtagcctttaatactaagaagatgtacttctcaagaatccattagaaaaactggttaacgacctccaaaarggaacatttaaattttaaaaacatttatataccaaaatgtgaagattattaaagctgactggtacaattgaaaattttcaatatattttacagccaatatttataacatagaaagagcccttataaatcaacaagatgcatatatattaatatgtatcttttaaaagataagaagatgtagagaataagaagaaactagaaatatccaaaactggacaaagaatatgaagaggggaaatacaaatggtgagtaaatatataaaatgtttaacctcactaataattaaataaataaaaatgaaaacaacaattagatagcattacttgcctcttctccaacaaagatgtatgttaaggcctaaattgtgtcnnnnnnnnnnnnnnnnnnnnnnnnnnnnnnnnnnnnnnnnnnnnnnnnnnnnnnnnnnnnnnnnnnnnnnnnnnnnnnnnnnnnnnnnnnnnnnnnnnnnaagtttacctttatcgttttcccttttgtgtgtctttcacttgctttgccaaagtaaagtttaggggtgtgtgtacatatttgtgtgaatgtatgtatgagtctctctgtgtttgtctaccaatgagttaaatcccagttatccaaaatgaaaacattcagcctctgtcttcagtgtattattgataaagcatctacaaatctttagctaaggatggttctgtaatgccatggccattgcaatgttacataagaaaggtgtctatgtttttcctcagttaggtaatgtctttttaataatccccaactctgatatgtcatggtttattttagttagtgttcatttagaatctctttcctaaatggcaattagcagcacttctaaccctttctaaaaggaaaatattcaagtaatgcctaagggaaaatactgaccagggtaaaaggtcaaaagaagaatactctgctatgttgaactctcaagatctgttgactgacctgaggtgaccattacacaactcacaaccatgaagaacaaggaaattcaatcaagaaagcacttattgcagaaaaccttaaatgtagacaaattatgattaatttaaaaatattgatgaaacttataggcaaattgtagcaatatttcaaaaatttctcataattgtccgtttatctacctacctatttgtttctatatgatgggtatgatagaagttgacattcctcaaagtatattccatctgcaggatgctcagggcgaagtagttccatagtaaataattttgggacttaccacctgcttatgtctctcttattaagacagtcaaaggactctcttacatagagagttctgagaagttctgcagtaaacaagcctattaaaatttattcagttcaatgttcttcaagtgtacttgactccaaatccttctttacaacgatacctattttgcattctctttttcttatcaatgcaaaaaaacagatgaatctgttttaacagggagctaacttttactaacattgatgcacacacacaattttaaacaaaatttttaaagaaatcttaacagatcaatacttatggaacaaaaattttaacttataaaaatttcttatagatttctaggttagatatatatatgtgtata

SEQ ID NO: 548676 - DNA, 1915 bp, Homo sapiens
  misc_feature 666, 667, 668, 669, 670, 671, 672, 673, 674, 675, 676, 677,678, 679, 680, 681, 682, 683, 684, 685, 686, 687, 688, 689,690, 691, 692, 693, 694, 695, 696, 697, 698, 699, 700, 701,702, 703, 704, 705, 706, 707, 708, 709, 710, 711, 712: n = A,T,C or G
  misc_feature 713, 714, 715, 716, 717, 718, 719, 720, 721, 722, 723, 724,725, 726, 727, 728, 729, 730, 731, 732, 733, 734, 735, 736,737, 738, 739, 740, 741, 742, 743, 744, 745, 746, 747, 748,749, 750, 751, 752, 753, 754, 755, 756, 757, 758, 759: n = A,T,C or G
  misc_feature 760, 761, 762, 763, 764, 765: n = A,T,C or G
aagatttttcaaaataattataaaatgtatgtgaagaaaaaaatggcaaaaaagaaacaagaaacataaggaaaaagtatttttcaaaaaaaaaaagatgcaaggcttgccctgcaattttcttaaaatgcattataaaattatgttattaaacaacatagagattccatatataaaaataaatgaattcattcacatttatgtaatactttaatacataaaaggtagcctttaatactaagaagatgtacttctcaagaatccattagaaaaactggttaacgacctccaaaagggaacatttaaattttaaaaacatttatataccaaaatgtgaagattattaaagctgactggtacaattgaaaattttcaatatattttacagccaatatttataacatagaaagagcccttataaatcaacaagatgcatatatattaatatgtatsttttaaaagataagaagatgtagagaataagaagaaactagaaatatccaaaactggacaaagaatatgaagaggggaaatacaaatggtgagtaaatatataaaatgtttaacctcactaataattaaataaataaaaatgaaaacaacaattagatagcattacttgcctcttctccaacaaagatgtatgttaaggcctaaattgtgtcnnnnnnnnnnnnnnnnnnnnnnnnnnnnnnnnnnnnnnnnnnnnnnnnnnnnnnnnnnnnnnnnnnnnnnnnnnnnnnnnnnnnnnnnnnnnnnnnnnnnaagtttacctttatcgttttcccttttgtgtgtctttcacttgctttgccaaagtaaagtttaggggtgtgtgtacatatttgtgtgaatgtatgtatgagtctctctgtgtttgtctaccaatgagttaaatcccagttatccaaaatgaaaacattcagcctctgtcttcagtgtattattgataaagcatctacaaatctttagctaaggatggttctgtaatgccatggccattgcaatgttacataagaaaggtgtctatgtttttcctcagttaggtaatgtctttttaataatccccaactctgatatgtcatggtttattttagttagtgttcatttagaatctctttcctaaatggcaattagcagcacttctaaccctttctaaaaggaaaatattcaagtaatgcctaagggaaaatactgaccagggtaaaaggtcaaaagaagaatactctgctatgttgaactctcaagatctgttgactgacctgaggtgaccattacacaactcacaaccatgaagaacaaggaaattcaatcaagaaagcacttattgcagaaaaccttaaatgtagacaaattatgattaatttaaaaatattgatgaaacttataggcaaattgtagcaatatttcaaaaatttctcataattgtccgtttatctacctacctatttgtttctatatgatgggtatgatagaagttgacattcctcaaagtatattccatctgcaggatgctcagggcgaagtagttccatagtaaataattttgggacttaccacctgcttatgtctctcttattaagacagtcaaaggactctcttacatagagagttctgagaagttctgcagtaaacaagcctattaaaatttattcagttcaatgttcttcaagtgtacttgactccaaatccttctttacaacgatacctattttgcattctctttttcttatcaatgcaaaaaaacagatgaatctgttttaacagggagctaacttttactaacattgatgcacacacacaattttaaacaaaatttttaaagaaatcttaacagatcaatacttatggaacaaaaattttaacttataaaaatttcttatagatttctaggttagatatatatatgtgtata

SEQ ID NO: 548677 - DNA, 2586 bp, Homo sapiens
tctctggtggttacctactgttgcaatcctattcataaactgtgtatacattattctctggtgattacctactattgaagtaaaattctcttgtgaattcctaatgagaaatctaatttataaagataaaaatatgtgagaaaacatttgaattcccaaaatttgatgccaagtacttttccttcttttcagcatactaatgaartgatcagatagaatttttaaagtacatttctgctttttcctgttgtgttttaccaataaattctaatattcgaaaaactcaaatagttgacattcttttcctgagtgatctaagacttatcttacttaaatgggggtcatttaagtaagataagcttcaatctcaggtcatatctacattgaaaaggtgaaactatcaaatatgcaaacttcccttcatttgactatatagcttaaacttcacactgtggcactagtaggtcccaaggagcttttcttgaaatgtctgtattgatgcatttagagagattctgtgggtctttactgtcagtatatttcctgtctgcgacatcttgctagtaaacagcatgagtaaaatgagcagctgtacagatggcttcaacagtttcagaaagaatatatattaatgtgaggtcaagttttgctctgcttgataaatgtggaaacaagtaaatgatacatcaaatagttctagagatgctttttatttgacaacacatctggagcccataaatataatttcgtatttttgttctgctgggaagaagataccattaaagatgctctgagacctagttattcaacatgagatgggtgtaatcacaccattttctaatatacttttgcctaagtagtacattccttgtgtgaaatgatgggaaatataaaagaaataaatgttgacttatctttggttttataactgagtacttaaaaaaataaaaataagcagagataagtaatacatttcacaaagaataagcaactaaaagtaaaaggaaaatagctgatgaggctttattaaaatgaaaaagatgaaaaatatgagtatataaaaattatgtcacaggcacaaatataaattacttattatattatatgtatttatgtgtttatatattttgatgcttatttaatttaattatgtgaaaaacataactgagaaatcatgtgtccctttgtcattgaacttcacataaatgattcagtgaatattttttcggtgtctttttcatgtaacagggtatttgctttaaattgctttctaaataaatgataatataaaactaaaaccttttgggagacaatgaccttaagcaggacatactacgtgaagatttcacctaatattagagaatgaacaatttaacaggtgggcctgctgtttacctgttacccgtcagtgactcacaggatgaagtctgggacactctcccattatgcatgtgcctgtatttaccgtccatggcatcccttctattgacctcttcgtttatgccaatataatgcgcagtcattttacttttggtctctttcaaacacatggaacttgaatatttttaaaaaatgattttattatttaattaggtgtcaacttgatatgtgtgcatgtctacaacacagtaactaaatgcagctgcctctttgggaattatgacatcttgttgttgttaggagccaaggggagtggctgcaaagtaactgggtggcttaaggggaagaacatagagcatttcttctgaaaacaggagaaagatacgccaaaatccttggtcagttctcactgtgtgagccaatttgccacatcacgtatccccacttcacaggggccatgtaaaaatgagtaataatgataaaggaaattgattccctgaagaagttgaatgagtctccatatttttctatattgtttatcaaaatggcaaagctgaaacatttattttcaaggacaatatcaactataaaggaaacattctttactataaacttgtgactgtaattaggtatgaaatgtaagctagatagtctcttcttgtttttattactgtctctgggggagatgatatcccacatggatagattttccaagtaaccaaaacatgctctattaaacacaaaaggttttcatctattttaaatgtcttgcatcttggatatctttctgaaatgcattgttccaagttgacttaaacagataatataggcggtaataaaatatgtttttctaaattgtttttaaccatattcagcagtatagtagcaatcataaaagttatccttgactaaggtttagtttatgccagggattctgctaaacattttatgtggattatatttcttaaatcttaaaattagtctaaagggtagagaagagcttgcttgcctaaggtaatattattgggagaggaagtggaatgtgaaccaggtcaatttaaatgtgcctgactccagagactgttttgttgaccatgaaaggttgcatttttttaaaaaaatgtagttttacttttttttctttccctggttgtgagtcagtctctctctctcctgcagctattgtgtctggagctctgtcatcct

SEQ ID NO: 548678 - DNA, 884 bp, Homo sapiens
aaaataactagaggaaaatacttaaaacctaattttatcttaatgaatgaattatggatggcttttcatttattctcttttttgcaattttgaaaatactattgaaataatttgaaaataataaattgaaaataatattgtatttttataataattacagaattgttgaagaaagctaaggggatactagtagaatacaggagatatttgtttatgtagtcatccaacaaatataacaagcatctaccagtaccaggcgttgtgttaggtccccagtatataaagggtcagcaaaacaatcaggtgcctttcccttgtgactttrcagtccttgtacctctcaagatttgtatttctggttttcaacctcttcttttctaatattatctcaatcagaataaatagcttgcatttttgtcatactcagcaaaaaaatttagcttgcttccccacaaagaaaacctagcaaccaattctcttaacttcccatctttttgctataataggcagccctcccctggagctaacttttttcatgaaagatgattgtgtcatcagtagcagccacattactaaatgacaccttcctttctctctgatgtgttagcagcccaggagctcaagttagcagaaatctgtgctgaggcctggaaaagaatgaattgtttctttttttctttttcttttttttttttttagacggagtctcgctgtcgcccaggctggagtgcagtggcgcgatctcggcttactgcaggctccggaattgtttcttttaaataagctctaagatggattctaggaagagctatagtaagctacttccccccactccaagattttgttgttatttctacaatatagtgtgtgtctgcgtgtgatgc

SEQ ID NO: 548679 - DNA, 884 bp, Homo sapiens
aaaataactagaggaaaatacttaaaacctaattttatcttaatgaatgaattatggatggcttttcatttattctcttttttgcaattttgaaaatactattgaaataatttgaaaataataaattgaaaataatattgtatttttataataattacagaattgttgaagaaagctaaggggatactagtagaatacaggagatatttgtttatgtagtcatccaacaaatataacaagcatctaccagtaccaggcgttgtgttaggtccccagtatataaagggtcagcaaaacaatcaggtgcctttcccttgtgactttacastccttgtacctctcaagatttgtatttctggttttcaacctcttcttttctaatattatctcaatcagaataaatagcttgcatttttgtcatactcagcaaaaaaatttagcttgcttccccacaaagaaaacctagcaaccaattctcttaacttcccatctttttgctataataggcagccctcccctggagctaacttttttcatgaaagatgattgtgtcatcagtagcagccacattactaaatgacaccttcctttctctctgatgtgttagcagcccaggagctcaagttagcagaaatctgtgctgaggcctggaaaagaatgaattgtttctttttttctttttcttttttttttttttagacggagtctcgctgtcgcccaggctggagtgcagtggcgcgatctcggcttactgcaggctccggaattgtttcttttaaataagctctaagatggattctaggaagagctatagtaagctacttccccccactccaagattttgttgttatttctacaatatagtgtgtgtctgcgtgtgatgc

SEQ ID NO: 548680 - DNA, 1543 bp, Homo sapiens
cccccatgatccaaaygcttcccaccaggccacaccttcaacattggagattacatttcatcatgagatttgggtgggaacgcatagccaaactacatcagggactgatagaacatctctgggtatagcattgacttgcattttattggtgtataagaggcctacaaaacagcttctttctcttctaaccagactccaggcagctttagagcaggaattgagccagtgcatagcagctacttagcagatgtttactgaataaataaatgatgcttatcctttccttatagaaaatatggtgacaaaatttagcccagcacaggtcaaactgaaagtagtggaatctaagttcagtcttgaatcctgagaaagtggtgtgtcccaactaggaattcattaaagctgcatacgatagcaatatcttttctcggctcttaacatatttatgttacataagctagccttattaatgtacatattaatacaaatatgactgtacatattttctgttgtactgttcagttcagatcattgttttatcggtcttttttttcccaattccattattttgaatgtatttcccaaagttcacattgcattacaataccttttaaggagatagaaaaaagaaaaaatgcagactcagataacatcaggatatctgagaatactgttttcacatttactgataaaaatagtgtgtgatatcagtatgataatattttgtttagagttgccttagagaaagtcttagcatacagtagggtgtcactattctttaaaaaagttggcaaataattttttataccagacaatcagacttattcaaaccaggtctgcaataaatatgtgttaacttaggcaggatttgacatttttataacattgacttcctaatggggaagtttaaccaggtcttgtgcattcttcagaaatacattgcattttcttcataaagatctttaactttgttgtaaaatttattctaaggtccttataactttgtcacaaatctgagtggaattttaaaactccatttctttttcttactgttaattacttaatgaattaattcttactgttaattactgatatttttcaaaagctgttgatttcctaatatgaataactagcttgctaaactcttatcctaatagttcgtatttaatttcttaggtgtgtaggcgtaaacaagtaaaattttcttcttttctaataagtatattgtttctttgatttttatcttattctattattttatatccctaaaacaatattgaataataatgctaataccaggcaatatgtctttttcttgaatttacggggagaccttaatattctttcatcctttatgaaagatggtgttttatgttcgtttctggcgtttctttattgtgttttaaaaggtgtctctctatgaaattttagagtgtttataaagactggctgccctgttatcacatgcatatgcgtcctattaatacaacagcttttctgttttagttagcactgtaataaaatcaatgggcttttgtcctgt

SEQ ID NO: 548681 - DNA, 1543 bp, Homo sapiens
cccccatgatccaaacgcttcccaccaggccacaccttcaacattggagattacatttcawcatgagatttgggtgggaacgcatagccaaactacatcagggactgatagaacatctctgggtatagcattgacttgcattttattggtgtataagaggcctacaaaacagcttctttctcttctaaccagactccaggcagctttagagcaggaattgagccagtgcatagcagctacttagcagatgtttactgaataaataaatgatgcttatcctttccttatagaaaatatggtgacaaaatttagcccagcacaggtcaaactgaaagtagtggaatctaagttcagtcttgaatcctgagaaagtggtgtgtcccaactaggaattcattaaagctgcatacgatagcaatatcttttctcggctcttaacatatttatgttacataagctagccttattaatgtacatattaatacaaatatgactgtacatattttctgttgtactgttcagttcagatcattgttttatcggtcttttttttcccaattccattattttgaatgtatttcccaaagttcacattgcattacaataccttttaaggagatagaaaaaagaaaaaatgcagactcagataacatcaggatatctgagaatactgttttcacatttactgataaaaatagtgtgtgatatcagtatgataatattttgtttagagttgccttagagaaagtcttagcatacagtagggtgtcactattctttaaaaaagttggcaaataattttttataccagacaatcagacttattcaaaccaggtctgcaataaatatgtgttaacttaggcaggatttgacatttttataacattgacttcctaatggggaagtttaaccaggtcttgtgcattcttcagaaatacattgcattttcttcataaagatctttaactttgttgtaaaatttattctaaggtccttataactttgtcacaaatctgagtggaattttaaaactccatttctttttcttactgttaattacttaatgaattaattcttactgttaattactgatatttttcaaaagctgttgatttcctaatatgaataactagcttgctaaactcttatcctaatagttcgtatttaatttcttaggtgtgtaggcgtaaacaagtaaaattttcttcttttctaataagtatattgtttctttgatttttatcttattctattattttatatccctaaaacaatattgaataataatgctaataccaggcaatatgtctttttcttgaatttacggggagaccttaatattctttcatcctttatgaaagatggtgttttatgttcgtttctggcgtttctttattgtgttttaaaaggtgtctctctatgaaattttagagtgtttataaagactggctgccctgttatcacatgcatatgcgtcctattaatacaacagcttttctgttttagttagcactgtaataaaatcaatgggcttttgtcctgt

SEQ ID NO: 548682 - DNA, 609 bp, Homo sapiens
agcatttccaaccctgaaagggattggccaggagttttctgagatcccaaatacatatttagtttaaaattctcatgtaagtgaaaaatataaaaatggaaggcaagaaaaagtacctaataggtctgtggctttggctgaagaggtttcaaagcagaatttagataggttgaattatggtttattaggtgctctgaattaagtgagtttagaaaataatttggtcttttcacaatcagagatgaaagagaagacaaagataagaaattccatggttttcagagttgaaagaggcaactttttgcattctcgtttataaaagactcttgagttaagactcagcctctgggcaaagaataaatatggtatcattgcattaagttgggccccaatacrgtaaatcctatctgttagacaaaatggctcagaaaaagagatccagcatatggttagatggaagtctgataagctcaaagtacccttaattaagtctagagagaggcatatagcaaaaagaattggtgttgcaattggcatatggaactgactggcatcaagtagtttgagttttttgagggagctcaaactacttgggggagaaaattttcc

SEQ ID NO: 548683 - DNA, 937 bp, Homo sapiens
acatttagtttctatagagaaccaaacatctcatgattaacttccatggctgttgttataagctattaccttcttgctaatcaaattgctcccttacttctcagggcgagctaggtgcctggaatttcccttgaaggaactaaagattttcctttatttccatgcttggttcggggatagtgcccagcaggctcctaagaggggtccctrctccatctcaccattatccacatctttggaaaagctggccatttagatcctaaagctaagctcgtggtggcagctacttgaatgttaggcacagagcctggggatggcttcacaaatctaaagctccaaggtgacggtgaatgtcttattagctgtgtgactttgaggaaggagttggactctttttcacttttcagcattccagcagccctttgtgtatttaatgtgctgcactttaaggtgcatttttttttctttcattaatatacaagtgactggttttgactcatcagatggaaacttccaagtcagttgcagagaataatgatggctaggtcattgttttcaaaaagcacagcacaatctcaattcatatttacctcaagtggagctgattataaaccaagtttcattttctcctgaccccagctgctgggtcctgaattagctttttattcttctttccgggtgaaggatttaggtggagacctaaaggcatctttaaccaaatgcatctcatatggtgcctaacaaagtccaatatgatgcagaactaaaacagagttggtcagcaggttactggatactatagaaaattggattagtgaagtggaaatcactccagcactcaggtggtgttatcaaatcaaacttgaagtcttctcacctggtgcagtaggaccagcgatccacactgggtttgcagtgggagaaagggaggttttta

SEQ ID NO: 548684 - DNA, 937 bp, Homo sapiens
acatttagtttctatagagaaccaaacatctcatgattaacttccatggctgttgttataagctattaccttcttgctaatcaaattgctcccttacttctcagggcgagctaggtgcctggaatttcccttgaaggaactaaagattttcctttatttccatgcttggttcggggatagtgcccagcaggctcctaagaggggtccctgctccatctcaccattatccacatctttggaaargctggccatttagatcctaaagctaagctcgtggtggcagctacttgaatgttaggcacagagcctggggatggcttcacaaatctaaagctccaaggtgacggtgaatgtcttattagctgtgtgactttgaggaaggagttggactctttttcacttttcagcattccagcagccctttgtgtatttaatgtgctgcactttaaggtgcatttttttttctttcattaatatacaagtgactggttttgactcatcagatggaaacttccaagtcagttgcagagaataatgatggctaggtcattgttttcaaaaagcacagcacaatctcaattcatatttacctcaagtggagctgattataaaccaagtttcattttctcctgaccccagctgctgggtcctgaattagctttttattcttctttccgggtgaaggatttaggtggagacctaaaggcatctttaaccaaatgcatctcatatggtgcctaacaaagtccaatatgatgcagaactaaaacagagttggtcagcaggttactggatactatagaaaattggattagtgaagtggaaatcactccagcactcaggtggtgttatcaaatcaaacttgaagtcttctcacctggtgcagtaggaccagcgatccacactgggtttgcagtgggagaaagggaggttttta

SEQ ID NO: 548685 - DNA, 937 bp, Homo sapiens
acatttagtttctatagagaaccaaacatctcatgattaacttccatggctgttgttataagctattaccttcttgctaatcaaattgctcccttacttctcagggcgagctaggtgcctggaatttcccttgaaggaactaaagattttcctttatttccatgcttggttcggggatagtgcccagcaggctcctaagaggggtccctgctccatctcaccattatccacatctttggaaaagctggccatttagatcctaaagctaagctcgtggtggcagctacttgaatgttaggcacagagcctggggatggcttcacaaatctaaagctccaaggtgacggtgaatgtcttattagctgtgtgactttgaggaaggagttggactctttttcacttttcagcattccagcagccctttgtgtatttaatgtgctgcactttaaggtgcatttttttttctttcattaatatacaagtgactggttttgactcatcagatggaaacttccaagtcagttgcagagaataatgatggctaggtcattgttttcaaaaagcacagcacaatctcaattcatatttacctcaagtggagctgattataaaccaagtttcattttctcctgaccccagctgctgggtcctgaattagctttttattcttctttccgggtgaaggatttaggtggagacctaaaggcatctttaaccaaatgcatctcatatggtgcctaacaaagtccaatatgatgcagaactaaaacagagttggtcagcaggttactggatactatagaaaattggattagtgaagtggaaatyactccagcactcaggtggtgttatcaaatcaaacttgaagtcttctcacctggtgcagtaggaccagcgatccacactgggtttgcagtgggagaaagggaggttttta

SEQ ID NO: 548686 - DNA, 659 bp, Homo sapiens
tatctcactgtggttttgatctgcatttctctaatgagaagtgatgaacttttgttcaaattattgttggccacatgtatgtcttctcttgaaaagtgtccttttatgtcctttgcccactttttagtggagttgtttgtttttttcttgtaaatttaagttccttatagatgctggatagtagacctttgtaggatgcatagtttgtaaaatwtccccccccgttctgtaggttgtctgtttattctgttaatagtttcttttcttgtgcagaaaccctttagtttaattagatcccatttgtcaatgtttgcttttgtggcaattgcttttaatgtcttcatcatgaaatctttgtccatgtctatgttcagagtttttatagttttgggttttacatcaaattcatgttttgatttagtcacaaaggaaaaagtagtgtccctcctcccctaaccttatcccagagattaagtattatttaatcacctgtattttaaatcttaaactcaccctcactatgtctttgcaaagcaacaaatacaatgaagacaacaaaagcaagatgggaggcatgttcacataggtaacacatccttcaaaacacagaaccagacaaaataaaagaaaatgcctttttcctagagtcgaggtatata

SEQ ID NO: 548687 - DNA, 636 bp, Homo sapiens
tgtgggaagaaactttaactggagcatcttaccagtattattcatgttttaactctgcttcagtagtttttcaggtttattacaaacctgcagtagccaactgaattaattatctctaaacagggatttagccagtggactaggcacactgaagctttgtgagaggggaaattgatattcacattttttccagcttgttttgagctcgatatattmttattttttttttttttcattgagacagactctcgcaccgtcacctgggctggtgtgcagtggcacgatctctgcttgcggcaacctctgcctcccaggttcaagcaattctcctgcctcagcctcccgagtagctaggattacaggcgcccgccaccacgcccggctgatgttttgtatttttagtagagatggggtttcgctttattggccaggctggtcttgaactcctgacctcatgatctgcctgcctcagcctcccaaagtgctgggattacaggcctgagccaccatgcccagccaatatattcacatttttaataggaataacagtatactaaaatcttttttagtgcatgtttaagatttgaagatgtaatttgactcagtactttccacttgcatttttttcttccactt

SEQ ID NO: 548688 - DNA, 636 bp, Homo sapiens
tgtgggaagaaactttaactggagcatcttaccagtattattcatgttttaactctgcttcagtagtttttcaggtttattacaaacctgcagtagccaactgaattaattatctctaaacagggatttagccagtggactaggcacactgaagctttgtgagaggggaaattgatattcacattttttccagcttgttttgagctcgatatattattwttttttttttttttcattgagacagactctcgcaccgtcacctgggctggtgtgcagtggcacgatctctgcttgcggcaacctctgcctcccaggttcaagcaattctcctgcctcagcctcccgagtagctaggattacaggcgcccgccaccacgcccggctgatgttttgtatttttagtagagatggggtttcgctttattggccaggctggtcttgaactcctgacctcatgatctgcctgcctcagcctcccaaagtgctgggattacaggcctgagccaccatgcccagccaatatattcacatttttaataggaataacagtatactaaaatcttttttagtgcatgtttaagatttgaagatgtaatttgactcagtactttccacttgcatttttttcttccactt

SEQ ID NO: 548689 - DNA, 636 bp, Homo sapiens
tgtgggaagaaactttaactggagcatcttaccagtattattcatgttttaactctgcttcagtagtttttcaggtttattacaaacctgcagtagccaactgaattaattatctctaaacagggatttagccagtggactaggcacactgaagctttgtgagaggggaaattgatattcacattttttccagcttgttttgagctcgatatattattattttttttttttttcattgagacagactctcgcaccgtcacctgggctggtgtgcagtggcacgatctctgcttgcrgcaacctctgcctcccaggttcaagcaattctcctgcctcagcctcccgagtagctaggattacaggcgcccgccaccacgcccggctgatgttttgtatttttagtagagatggggtttcgctttattggccaggctggtcttgaactcctgacctcatgatctgcctgcctcagcctcccaaagtgctgggattacaggcctgagccaccatgcccagccaatatattcacatttttaataggaataacagtatactaaaatcttttttagtgcatgtttaagatttgaagatgtaatttgactcagtactttccacttgcatttttttcttccactt

SEQ ID NO: 548690 - DNA, 526 bp, Homo sapiens
cattccctagagaaattccactcttatattctcktaattattattttgtaaaataacgaaacaccaaggttggcatttcctaaattctattaaaaataaaccaagtagcacaactttcagattaaattataaataactgtactaataattgaccagaaatgtaaattccccaacctggagttatggactgctggaacaatcctcttcaagtacatttacctctaatgcaaattttccttgttctgctttgccaacaggagtgtaaacacagacacacacaccatcttttgaccttgtttctacaaagtcatattcacccacaacaaatgccaccagatatgtagatgtaacaggtgtgcgggcaaacttcacttccactaaattttcatcatcagggtatggtttccggtcaattacattctttaagaaagaaaaagaagaaaaatttaaataggtttacattaataccatagagcaaataccagccaaaaactgtaggctttattgcatctctttccccctttct

SEQ ID NO: 548691 - DNA, 526 bp, Homo sapiens
cattccctagagaaattccactcttatattctcttaattattattttgtaaaataacgaaacaccaaggttggcatttcctaaattctattaaaaataaaccaagtagcacaactttcagattaaattataaataactgtactaataattgaccagaaatgtaaattccccaacctggagttatggactgctggaacaatcctcttcaagtacatttacctctaatgcaaattttccttgttctgctttgccaacaggagtgtaaacacagacacacacaccatcttttgaccttgtttctacaaagtcatattcacccacaacaaatgccaccagatatgtagatgtaacaggtgtgcgggcaaacttcacttccactaaattttcatcatcagggtatggtttccggtcaattacattctttaagaaagaaaaaraagaaaaatttaaataggtttacattaataccatagagcaaataccagccaaaaactgtaggctttattgcatctctttccccctttct

SEQ ID NO: 548692 - DNA, 638 bp, Homo sapiens
cgctgtaaatctctaggacgatttcccaatgggaaggtaaaggagcctccaattctccgggttggtgtaactgcaaactttttctgtgatgaagggtgagtgtcaggattatttatgagatttaattcatttgtcttgtgtgtgcrtggtgtggactgtgaaacctgcagaagtctcctctgtgaggatctctgggcagtctggggtagggttgtgagaggtaatgctgataaaaggaacagatgcacactgattgaaatgaacttgtcttgaattgtaagtagaggctgctgttcttcagcacaaactgcctaatagttctgaatgacaaccttctgtctccaggtatcgactgcaaggcccaccttctagtcggtgtgtaattgctggacagggagttgcttggaccaaaatgccagtatgtgaaggtaggctaggcaactatggtctgacagcactgcattctcagcttaactaaaagcttttggttcagtcattaccttacagactcttactgaacacagaactcctagagatctttaaggatatgtgcttcaccaaagcatccttattttttgtttcctcaagtaaaatggggttcctaggctttccctcctctgaaagctatgcagaccttc

SEQ ID NO: 548693 - DNA, 601 bp, Homo sapiens
tgagtctgcttgggagccatggctcttgcctaacttaatggtcacctgatggcaaaatgacatacgtgactctgtctctaggtacaagttaagtgggagtgtttatcaggagtgtcaaggcacaattccttggtttatggagattcgtctttgtaaaggtgagtagcaaaaatgatataggagctgaaataatgtgagatctatacatttcctgggagatttttgttttgggacatgttatgagaattagagtattagattctgttctattgattctgccaatagttatggttgcacagttttaccatgtctttcttttgctacctttttcttcatcaataacttaaatctactttgttactgattctattttgtggtttacgattatgggaataatgacagcggtgagtatatgagccaccatcttaattttgggtataccacagtttagtggagagagtaagggataggtgtcagatctgaattcacattctgtctctactgcttactagtgtgagaccttggaccacttgtacaactcctctgaaactctagcctttcttctgtaaagttggcataagactacagactaggasgtcca

SEQ ID NO: 548694 - DNA, 678 bp, Homo sapiens
agaggctaggtgcggtggctcacacctgtaatcccagcactttgggaggccgaggacggcgaatcacgaggtcagaagttcgagaccaacctggccaacgtggtaaaatcctgtctgtactaaaaatacaaaaattagccaggtgtggtggcaggcacctgtaatcccagctgctcgggaggctgaggcaggagaattgattaaaccctggaggcagaagctgcaatgagccaagatcacgccactgcactccagcctgaacgacagtgagactccgtctcaaaaaaakaaataaataaataataaatattaaaaaaataaaaaataaaaagagcatcttcgagagaatggataataacagacttatctaaaaagtcaagttagagagaagatcaacaggaaaagcagtgctatctcaagccatcacacctagaaacaatacccaaatatagtctatgtgctattcttacataaaaatgttgccacatagtacattgcttttgatatgttgaggaagagagaggcaacaaaattagaaaatggaaaaatatattgcaaatatatatgtgtgtgtgaaataaatgttttaggatgtcttagtatcctgaatctattatttccatacccttggattaaaaatacataatcaatgaaagtttgagggaaatataatttttt

SEQ ID NO: 548695 - DNA, 578 bp, Homo sapiens
ctttgataacgatagttgcaaagaatgtgctgttgtcaacaaagatgtgcattcaaagattaacagtgagagtgggtcagaatccattatgctttggttcctatcaaataaacctggttggaatacttgtttgtttgttttccaaaagagacagggttttggtaacagaaatccagatatttttaaagtaaatgagcagtcacatcctaacctgaagcttgccagcccagttcatctgctgctgcggtcaccccattccagctgttgactggttacatttatggttacatttacattggctctaccaaggtttctttccctttttttgaatgaacctatgaaaccagtttataccaaaattcgtaattgtagaatgtggkaatattaaagctaagagagtccttagaagtttctagctcagcaatattccttcatcgtctttccttttactgtgggaaatgtgggactcaagaagtttaaataatcaacccaaggacacacagataataatttatcaaactagaatttagactgaaattttctaaatccctattgcaatggactgacttgtgtctcgc

SEQ ID NO: 548696 - DNA, 622 bp, Homo sapiens
ccgaccacattctccttttcttagagttccgattcggtgagaatgcacgcatagttattgctcttaagcaagctatttgcatgtggcaacttgtttaatagttacaacaccttataaggtaggtattactttaatcattttgttcattttagagatgaaaagctaagatatagtacactttcctgggtcacacaataaaaaggggaatagacgatgtctgcatttcacagtacaaygtaaatactcagagtgccttcacatcgaaaaacatgtagattctacataaagtatatagtaaagcattgatgcacttgtattgaaatcatagtaaaaccttagatcacaatgcaataacatagaattaagtaaaaataattacaagtctccctttgaaaacccagtaagaatcacctccacccccagcaatctaacaaacagcaaaaaacaaattgaggagaaacttgagtcagaagcaatgtgaaataaggaaacgctaaaagtgaggtttccgagaagacaaaggccaatatcaaagatgttcagaatttttttaaagaaattatactttcaataatataatacttagagcacacaaatcattggaacaaagagaatttctaaa

SEQ ID NO: 548697 - DNA, 1352 bp, Homo sapiens
tgcagcagtggggattgcatctctgtttatttgctaactaacttctttaaagtcttttttaggtcatttaaatggctgccattctgaagaattggaattgcattgcccttcttagagatggaagattcagttttcacttgtgatacagttatcataagagggtataagcttatctgaaaggttcagggtgtacactgtaccagatccagtttccaagtatcaccagatccactcagggcaacttgctccctggatcttggcttccccttctgatctatccaacaggagagatgtaatgtcaagttataatccctggcaaccactgctttcacctcatctttttttwaaattatactttaagtcctgggatacatttcaccttatcttttaacatgaattatcttagcctttcccaaggacatggactaaccttcagcaatacctccattaaacccacctcagttccagtatatacaggtcttacagacagagttatgatagctctaccatccccagagacttcctaaaacaaccaaagtaacagaatctggaagtggtggaagttaacagtatatagggaaaattttgactagggagcaatgagacaagaaggaatctacataccaactactcattcttccccaacctgacaacagggattccatttattcacccttaacttgaatcatgtgactgattaactacctgggtgcttttgtgagaatgtgccctgttcagaaccacataactccaaattggctttctcttttttctcatttgttctttcccacctctcttaaatcccagaattataacccacagtaaagtattagtaagtaagcattgtctcaatctgttatttagggaacctgggctcaaaaaccttatgaaacacgccaaagtcctctaacttatcccacaacccctgttaccagcagaggtagctgctgaaactcgaagtatttataaacataatttatcttttgtttgtttcttaaacaaaatggatatccacctaaggataggaatcatggggagcctccaaatcccttttaaaagtctaaaggaacttgtttactcagcaaaggaagaaatatttccaaatattataaaataatgtgcagacacacaagtgtttggcacatgtttatcaaggattaaagcattagtaagtgaaaagagaaagaaaagtaggttggtttaacattataccatggtaaatattattttattaagactcaaggatatgagaaaacagaaggattttcactatgaaatatttaaacatgtgaggaaaatgaaattgaaagggaacacattatgtacttctgaaaagttttgacagaacctcg

SEQ ID NO: 548698 - DNA, 847 bp, Homo sapiens
atgttgccttagaaatggtgattaaaatcactcatttctattcattcctcaggcacttgagtgacagttgtttaccaggcactgtgtgtagccccagggtttggccattcaggggtgcacacatgggaccatgttagctgatgccagttgaaggccagggtatttgggaaggggaagggtattagagtcatgaccaagcaacccttctttttccctttgacttctacagaaatctgggcctgagacattgtctacaattgggttctagatacatcaggaacccatcttggataaataaatacctatcttttgttttgaaaacatctcagttttcaagactgctcttagtattacatgaacaatatttgtatgctgtatatattgtaaatatatataatatataaagttatatatttatgagaaacacgaattgtcttttaattgaaacttttaatcctgtagtataggagttcaccttcttaggactagagactgtgccttatagctgttaattcatttccccctgaacatcaaatatgcctgaagagaagaaagtctagattcttctatgagtaacgccccctcctcactcaggtaaatgtgtctggggatgcctgtccagcttaaccacrtgcatttggcctatgtaatcctgcccatggtggccgcagctaatcagaatcagatggaaaattaaaccgggtaatctacttctaagccttaagaatattccctgggacacagacactataattggaagtgctgagctctggggcagaaggatcaggtgaccttcgcaacaaagtttgcccccacctcacataggacccggaagcagcctgagctg

SEQ ID NO: 548699 - DNA, 527 bp, Homo sapiens
ctgtatttgaaaatgtaattatactttgtaaaaaacctagacgctattttcaagatgataaccctgggtgaagttggaggtataattttaataaaattcatcaggcaatagtacatgtggtttactttcaaatttrttgagagatgtagctttgagaacccctcttttatttctaactctcattcatattaataggctcagactcaagcaaaggataatgatgttgctgttattttcatccatgtgtaaatccgcaaatccaatgccgagtcatgaaaatcctactttgacaatgcgacgaactgtttatttccctgggaataattttgaaaactagccatttgtgtatctttgaggaaagggaaaaaatcagcatgtttattatttttaaaaaattagggcctggattttgacaatgtcaagatttaccgtatatccctgtttgtttggatacaccagtgacgtccacttctagaagacaaagttatattacttaaacaaccaaaggtaagaacccagtgataacg

SEQ ID NO: 548700 - DNA, 680 bp, Homo sapiens
gatattcacactattcccttgatgtccttatgttcktccatgtctcatttctaaatctaaaaattaactcaaatgagaattggagaagtctatgagaaatccctgatatcgccccttggaagtaattctgtgcttccatcacacatgatcaaagtgatcatattactcactgttcaggctgcagtattttggggagaaaaagggagcataattacattggccccagcacaccttgggaagtatgcttatcccacccatggcttggaacactcaggtcatttgctatttactgcttcacccaatagttaattatttacgtcatttacacaaatactagagtctatcttatgagacttagagtctttgagatcaaggcctagatatctgagatgccacgcagtgattaagaacacaggttgcaaacagtcattctcaaacttcagactttggtgcgcattacaattacttggaagcttttagaaaaatcgcaatagccaggccgtaccccagaccaattaaatcagaatctctgtggctgaaacccaggcatcaatattttttgaaaattcccctgatgagcctcatgtgaagttgaggttgagaataactgctctagagccaggctagctgggttgaaatattgtctccgttttttactagctgtgagaccttgggcaagc

SEQ ID NO: 548701 - DNA, 929 bp, Homo sapiens
ctggaagaaaagtccatcagaaatgctgggtggatgggtgggggcagtgctggggaggaaaaggcatcagggagggagctggaggggcaacttctaggcatgaggagcaggctgcacatgaagggatggagtgtagatgaaaatttcagtacaattttgaagacacaaaaaatttaactagattagtgactgaaagtgcatgcattcaaaatgatgccatggtttgaagccaaggaaaataaacagtgaagcagacggaggtcaaaagacagtttgctcaactgagaaaaaaaaaataggtaatagctaattaagtagtcaagagccaaccttctgtggttacccagagctgaatccttgctctgtcctttgcagccgaaacctttaagtctcggcctccttatctataacataggtttactattacagaccctatagggctgtggtgaaggttaaatgagaaattacatgatgtggctggcacagtgcccagctcactgtaagcacatttgattaattatagctcttaaaataataatagtagaagcaacaacaataataacaacagtagtaaaaagaacggacttcaaggagaatgacacttccctttgtttttacagatacaataggctttggtaaaatttcccaggggtctatcaagataaaaaatcactctgatggcaattctggaactaggtacactctatctagcagggtcaggaaagaaaggtctggattccagtcatgactcttttatagttatttaccccaagtcttggttttctcatctacatgcttgttatgaaatgatgtatttagaaatacacrgtacgctgtgaagctctacagaaatatcagttggccctactcttactgctctatttgtactaaataattcctgagatgcctaaaactattaacacaaattc

SEQ ID NO: 548702 - DNA, 1516 bp, Homo sapiens
  misc_feature 131, 132, 133, 134, 146, 147, 148, 149, 150, 151, 152, 153,154, 155, 156, 157, 165, 174, 175, 176, 188, 190, 191, 192,193, 194, 195, 196, 197, 201, 202, 203, 204, 205, 206, 207,209, 210, 211, 212, 213, 214, 215, 216, 217, 218, 219: n = A,T,C or G
  misc_feature 220, 221, 222, 223, 224, 225, 226: n = A,T,C or G
tatttcaagagtattttatcctctgcctcgaagtgcaatatagctctacacaattttgttgactagaacattcatgattctgtcctgcaaatattttctttggtgattcaaattaacacactttaacactnnnnacarccaaattnnnnnnnnnnnntatttttnttttttttnnngggggggggttntnnnnnnnntttnnnnnnntnnnnnnnnnnnnnnnnnnctgatatgcattgactaacagaaaaccactcacaatttttgaagcattgcattttgattgttttcatgtgttttagtgggaagataaaagaagttgtatcaaagactgcttatcatatgatattttaaattggaatgcttactgaaatctcttgactaaagcaaaactgaaaataaactagcatgtgacattgcctcactagatatctctttattccaaggtatagattccaattatatgttgttttatatattttagaaaaagcaaaggaactcagaacgtttactgttcatttcatatatgtagagagatgttcagtcttgaaggattgtgtcaaaattactcttgcagattcaaaaatacggaacacagattctgcaaaatgaagttcacctcaagaacatattcaaaatctattaccttgaagcctgatgctgtcagtgcagatggaataacctgacagctggtggtcaagatatcctggtattcatgatgctggtgaagttgaatagctgaactgtactttgattggtaagaaaatgatgtctcaagacactgcatcttatccaccattactcattaattgcctcagaaattttagctaatttttaaatgcaaataactgatatagtttctacattgttttctcacaaatgcttttatgaaaggttttgagagtacatatttttaaatgcaaaatttatggtctatgctcctagaagtgcagttatacagttacttacatctttaaagcaatctgttttcagaaaacgattgatgaataacttgctttattatctaagtaaaataaaaggtttaaggggtaccctttttgtgtgtgatttgcaccctttttttatttgcattgtaaaactagatatgcaccttttgttgtaaagacgtacatgagcatattagcttccattcaaattcctttgattctctctgtctctctctttctctctctctctcagaaagcggggagagagagagagagagagagacaaagggacagagtcaaagaaatttgtatgaatgcaagtcaatatttgcacctaccattttaagtgaactatacctctctctctcgtgtgtgtgtgtgggtgtgtgtgtgtgtgtgtgtgtaaaagagagatggagggggagagagagaatacatttttcaatggtgttgcatttctcagtgggctcaatagaaaggaacattatgtataactttggagactactaatgctttatgaagtgaaaattcaactactctaatgtttattgactggagttctcaacatt

SEQ ID NO: 548703 - DNA, 1516 bp, Homo sapiens
  misc_feature 131, 132, 133, 134, 146, 147, 148, 149, 150, 151, 152, 153,154, 155, 156, 157, 165, 174, 175, 176, 188, 190, 191, 192,193, 194, 195, 196, 197, 201, 202, 203, 204, 205, 206, 207,209, 210, 211, 212, 213, 214, 215, 216, 217, 218, 219: n = A,T,C or G
  misc_feature 220, 221, 222, 223, 224, 225, 226: n = A,T,C or G
tatttcaagagtattttatcctctgcctcgaagtgcaatatagctctacacaattttgttgactagaacattcatgattctgtcctgcaaatattttctttggtgattcaaattaacacactttaacactnnnnacagmcaaattnnnnnnnnnnnntatttttnttttttttnnngggggggggttntnnnnnnnntttnnnnnnntnnnnnnnnnnnnnnnnnnctgatatgcattgactaacagaaaaccactcacaatttttgaagcattgcattttgattgttttcatgtgttttagtgggaagataaaagaagttgtatcaaagactgcttatcatatgatattttaaattggaatgcttactgaaatctcttgactaaagcaaaactgaaaataaactagcatgtgacattgcctcactagatatctctttattccaaggtatagattccaattatatgttgttttatatattttagaaaaagcaaaggaactcagaacgtttactgttcatttcatatatgtagagagatgttcagtcttgaaggattgtgtcaaaattactcttgcagattcaaaaatacggaacacagattctgcaaaatgaagttcacctcaagaacatattcaaaatctattaccttgaagcctgatgctgtcagtgcagatggaataacctgacagctggtggtcaagatatcctggtattcatgatgctggtgaagttgaatagctgaactgtactttgattggtaagaaaatgatgtctcaagacactgcatcttatccaccattactcattaattgcctcagaaattttagctaatttttaaatgcaaataactgatatagtttctacattgttttctcacaaatgcttttatgaaaggttttgagagtacatatttttaaatgcaaaatttatggtctatgctcctagaagtgcagttatacagttacttacatctttaaagcaatctgttttcagaaaacgattgatgaataacttgctttattatctaagtaaaataaaaggtttaaggggtaccctttttgtgtgtgatttgcaccctttttttatttgcattgtaaaactagatatgcaccttttgttgtaaagacgtacatgagcatattagcttccattcaaattcctttgattctctctgtctctctctttctctctctctctcagaaagcggggagagagagagagagagagagacaaagggacagagtcaaagaaatttgtatgaatgcaagtcaatatttgcacctaccattttaagtgaactatacctctctctctcgtgtgtgtgtgtgggtgtgtgtgtgtgtgtgtgtgtaaaagagagatggagggggagagagagaatacatttttcaatggtgttgcatttctcagtgggctcaatagaaaggaacattatgtataactttggagactactaatgctttatgaagtgaaaattcaactactctaatgtttattgactggagttctcaacatt

SEQ ID NO: 548704 - DNA, 1516 bp, Homo sapiens
  misc_feature 131, 132, 133, 134, 146, 147, 148, 149, 150, 151, 152, 153,154, 155, 156, 157, 165, 174, 175, 176, 188, 190, 191, 192,193, 194, 195, 196, 197, 201, 202, 203, 204, 205, 206, 207,209, 210, 211, 212, 213, 214, 215, 216, 217, 218, 219: n = A,T,C or G
  misc_feature 220, 221, 222, 223, 224, 225, 226: n = A,T,C or G
tatttcaagagtattttatcctctgcctcgaagtgcaatatagctctacacaattttgttgactagaacattcatgattctgtcctgcaaatattttctttggtgattcaaattaacacactttaacactnnnnacagcyaaattnnnnnnnnnnnntatttttnttttttttnnngggggggggttntnnnnnnnntttnnnnnnntnnnnnnnnnnnnnnnnnnctgatatgcattgactaacagaaaaccactcacaatttttgaagcattgcattttgattgttttcatgtgttttagtgggaagataaaagaagttgtatcaaagactgcttatcatatgatattttaaattggaatgcttactgaaatctcttgactaaagcaaaactgaaaataaactagcatgtgacattgcctcactagatatctctttattccaaggtatagattccaattatatgttgttttatatattttagaaaaagcaaaggaactcagaacgtttactgttcatttcatatatgtagagagatgttcagtcttgaaggattgtgtcaaaattactcttgcagattcaaaaatacggaacacagattctgcaaaatgaagttcacctcaagaacatattcaaaatctattaccttgaagcctgatgctgtcagtgcagatggaataacctgacagctggtggtcaagatatcctggtattcatgatgctggtgaagttgaatagctgaactgtactttgattggtaagaaaatgatgtctcaagacactgcatcttatccaccattactcattaattgcctcagaaattttagctaatttttaaatgcaaataactgatatagtttctacattgttttctcacaaatgcttttatgaaaggttttgagagtacatatttttaaatgcaaaatttatggtctatgctcctagaagtgcagttatacagttacttacatctttaaagcaatctgttttcagaaaacgattgatgaataacttgctttattatctaagtaaaataaaaggtttaaggggtaccctttttgtgtgtgatttgcaccctttttttatttgcattgtaaaactagatatgcaccttttgttgtaaagacgtacatgagcatattagcttccattcaaattcctttgattctctctgtctctctctttctctctctctctcagaaagcggggagagagagagagagagagagacaaagggacagagtcaaagaaatttgtatgaatgcaagtcaatatttgcacctaccattttaagtgaactatacctctctctctcgtgtgtgtgtgtgggtgtgtgtgtgtgtgtgtgtgtaaaagagagatggagggggagagagagaatacatttttcaatggtgttgcatttctcagtgggctcaatagaaaggaacattatgtataactttggagactactaatgctttatgaagtgaaaattcaactactctaatgtttattgactggagttctcaacatt

SEQ ID NO: 548705 - DNA, 540 bp, Homo sapiens
atggaagtagagattagcatgatggttatcagggtctggggatggaattggatagggagatgttggtcaaaggakaaaacatttcagttatataaaataagttcaacagatctattgtacaacatggtgactttatttaataactgtgttgtattcttgaaaattgctaagagagtaaatattaagtgtcctcaatataaaaaattataagtatgtgagaaaatgatgttaattaactcaatttagccagtccaaatatatgtgtgtttcaccttatgttgtacataataaatatacatactttttattcataaattttaaaacataagtaaaatgaggcatttaaaaagttctaaggacaagtaatatacaatattatataataattttagcttttgttgtttttttcccttgatccttattctatgcactttccttcatgtaagcaaagtgacgctacattaaaattacaagtaaattttagtgcaattagtaatatgctacatattaaacaataaataaccagttctctcaaaatgt

SEQ ID NO: 548706 - DNA, 540 bp, Homo sapiens
atggaagtagagattagcatgatggttatcagggtctggggatggaattggatagggagatgttggtcaaaggagaaaacatttcagttatataaaataagttcaacagatctattgtacaacatggtgactttatttaataactgtgttgtattcttgaaaattgctaagagagtaaatattaagtgtcctcaatataaaaaattataagtatgtgagaaaatgatgttaattaactcaatttagccagtccaaatatatgtgtgtttcaccttatgttgtacataataaatatacatactttttattcataaattttaaaacataartaaaatgaggcatttaaaaagttctaaggacaagtaatatacaatattatataataattttagcttttgttgtttttttcccttgatccttattctatgcactttccttcatgtaagcaaagtgacgctacattaaaattacaagtaaattttagtgcaattagtaatatgctacatattaaacaataaataaccagttctctcaaaatgt

SEQ ID NO: 548707 - DNA, 540 bp, Homo sapiens
atggaagtagagattagcatgatggttatcagggtctggggatggaattggatagggagatgttggtcaaaggagaaaacatttcagttatataaaataagttcaacagatctattgtacaacatggtgactttatttaataactgtgttgtattcttgaaaattgctaagagagtaaatattaagtgtcctcaatataaaaaattataagtatgtgagaaaatgatgttaattaactcaatttagccagtccaaatatatgtgtgtttcaccttatgttgtacataataaatatacatactttttattcataaattttaaaacataagtaaaatgaggcatttaaaaagttstaaggacaagtaatatacaatattatataataattttagcttttgttgtttttttcccttgatccttattctatgcactttccttcatgtaagcaaagtgacgctacattaaaattacaagtaaattttagtgcaattagtaatatgctacatattaaacaataaataaccagttctctcaaaatgt

SEQ ID NO: 548708 - DNA, 1217 bp, Homo sapiens
gcattttgtactgcttctcagtgaggacccaggaatcacagcacctctggcagcacacagaatgcaccctcatgttgctctcactccttccctgctttgttcccttgttcttacttgctccctggggtcactctccaatacaatgctatgccttagttggctgtgctttctgggaatcccagggtaagacactttgattccattataaacatttacagctatacattttcttttcagcaccttcattagctgtaactcaatatatttcgatttgcagktttttttgtttttgtggaatggagagttctaagactttcctaattttcactattatgttgcattgacctatcaattatttgtatgtgtttatattttgtagattttgaaagttatcttttttgttattgatctctatcttagttatattgagattagaggtttttttctgttcagtactgattctttgaaatttattgagacttgttttgtgacttactacatggccaatttttataaatgttctctatgcgcttgaaaaagccttttcttcagttttgtgggtacgatgttctgtattattgtcctcccaaatcttctatatacttgctgattgtttttcatatgcctgatctgtcaattacagagagaaggatactcatatcactatgatggcagatttgtccatttctcttgggcagtcaatttttgctgcatatatttttgctttatatcatcagccaaagttagccagggctcaataatggagttgaggtcaagaaaatgattgtttcagcatttcaaattatcctaggctgttttaaaaagaaaaaagtaggtaagccttagctgaaccattttctttaaagtaagtaatgggtgaacatgttaaaaaaaaaccctcatttgtctatagtaagttgttctatatgaatatatggattttccacataactgaagtttaggccaattaaatgtctaaatctttaaaaaaattaactgttttctctccccatcgttttattttgaaaaatttcaaatctatataaatgtaaaagactagtgtaatgaaagcacataaaatatgagcaccttcttcaagattcaccagttattaatgtttttgtcatatctgcctccccctcaccccatatatattttttggattgaatcattgggaaacagcttgcaagcatcatgatacttcaccactgtatgtt

SEQ ID NO: 548709 - DNA, 521 bp, Homo sapiens
gtctccaaaaagtactgcctaatttwgagcactcaaaaaacttggcaagagtcattctaaagtctggctaaagtatgactcatacagataagtgctatataagaacatttattaggatggatctttcacttacatgatttcaattttgaatacttgacttggtaaacaattagccaagttaacattatttatgttagtcaatgaaagaaagtacagaatatagtcactgaactacttcccctcatttctctgaccttattaagtgtattgcaatgtcctttttttcctatatatttcctaagtgcattctggtaaagatagcattttcttttgctattaggtaacatctgctaaattacatgttcataaaagcatagaatcagaattttggaacctcaagacacattgagtggctcagctctatgcctcctgggagtactacatggcccttttagaatgataaattcagtgcctctggaatgttccagagtatctttaaatcaggccagggagtaaaaaaa

SEQ ID NO: 548710 - DNA, 2374 bp, Homo sapiens
ttactcactagttattttcctttcctataatattttcttttcagaattttcagatggttccagattatttcttcacagtatcatcatattctttatctacatcttcctctaataattaacacttttataaacctgggtcctgtctttgcaagagcaatagatggatgagtatatctaatggagaagtagattttctctctagcccctctgtgtgagtgtgcaagtgtgtgtgtgtgtgtctttgtgtttgagcaggctatgggaagggcaagagaaatggaaagattacatgactggctgttatttggatgacagtaagatcactgctcagaaaagaaagagttaaacttttgacagttctccattagccgatagtgtaattatcaattgactaaaactgcttttttttttttctatcaaggaagaaaagccaagtttggattaaaaaatggggacaattttctacgtgtaatatttttcagttttggaacagaatctaataaatgaagcagtggaaataaattagaaaatggtaaatgaaaaggtataccacttgacagtcagtcttgtcttgtccacatgttataactatggaaactgtacaagctccctgaggacatggaagggcagcttggatattttaaagattagattatttataaaaaatacattgtgacatttgggtttaatgaatataatacgctagtcataaatacttggtgaaagagttaggttaattttggaacctacagggataattttgtttaggtcataaaagccagcattggatcctagttgtgtattgagtggattaaggaaattacagaatctgaaaaggctgtgttttctctgaccctgtgaatactcccattttatatgacaaaatgtcttgtcctggaatgtggctgttgaaatcagttacctgacccatataagaaaatatgttttcctgtatctgaatctgttctctagctattttcacctatacacaaacgtatctgcatgtttgtctatgtgtatgtgtgtgtgtgtgtgtgtgtgtgtgtgtgtgtgtgtgtgtgtagatgtacagttttttcttggtatcttgaaacaaagtttggaatattttgaaaatgccgyaattagttgttcataatttgatttctaggttgttgagagtctttctttctaggctgaaggataacattttagacccacagagaagaatatctggtcagatatgtttatgtcaccaagatgaacagaaatgccattagtctctgtggtgtgatttgctaattaggaaaaggcaccccctccgtgtaggtatagccctgtgggccacagcttggctcctgggcaggggtggatttcagcccccactcccccctcgcagcctggcatcattgcacaattcatgtactttacaagggtatgtgggagctctaaatattaaggtgtgaaatggctagcagcactggaataagtctacaggaggttttgcttgaatattaaatatagaggccatgattattgattacttaatggccagtcctagatatttaaaccaccctggagatctggagatggggaggagatgggtgaagatgttctcaacctttttagccagactctcttctattatgttgcactcatagggcttatgttttgagataattggtctaactaaataaagttaattatttaataactgtttgtttgcatatattgatctcttaaccaaatagacataactgccaacttttgagagcttttgagcaatatatatgaatattttcatattgggttcatgtgatttttaggccagacaaaataattcttttactaaaaaagaattttttattaaaaaatttttatttaatccatgtgtctatggcccaagtaaatgtatgattttcacatggtgttttgcttttgatatttatttatatatcctaaagttcagaaattttacattagaaataagtaaacaggtccacaaaggacctattgctcttaaacgtattctattctcattattgataatcctgagtgacaatgtaggcaacattaaacaagcaaaatatggtgattgggtcactaagaagtgaagatctctctaactctttaatcttccaatgtgtaaatatttgataaaaacctgcccttttgtttaactttaatttttcttttgaggagagaaagcattttaactacataccaaagaatagacagatgcaaacaaaccttgactgctacttgcccgataaaggaaaaaactggtcgtctggtctgtttattgttttgtaaattgaaagatatataaaataatggttccaacatgttctagtaaagtcatcaggatcttaaatgagttggtgagacttaaagg

SEQ ID NO: 548711 - DNA, 926 bp, Homo sapiens
cagttakggtccagaaaaaaggaagtggtaaaacaaagagagagtgagaggaagaaactcttcaaatgataataactgatccagattaaaacagaataatggaaatttcaggaagaaatattcgggaaaaataaggcaactcagataatcttatatatgaacatatggagaaaagtgaaaggcctataacaacaacagaaaaaatattaaagataacaatgaaagtatgaagactgtcatattaactccaaaaaacaacaaaatgttttccaaaaaaataactaccatagaaaaaatacttgatgctgtagtgcatcatatttatataatcacaataatgtaaatactgatttttgtcaaattaaaacctgatagattatgactatagagataggaataagttctgtttaacataagaattagataatatttaaaattaataatttaaaaattgtaacacgtacacattatgcagataaaaccagaagaaacagtttaaagagttaaagtaactgccaaaagagaacagaaccaggaagcatggtgagatggaacaggagactaatgttttgcatcaaaagtactttagtcatattttagtttttttatgtatttattattttcataaaaatagaataatcagctgggcacggtggctcacgcctgtaatcccagtacttggggaggccaaggcaggtggatcacaaggtcaggagatcaagaccatcctggctaacatggtgaaagcccgtctctactaaaaatacaaaaaattagctggccatggtggcgggcacctgtagtcccagctactcaggaggctgaggcaggagaatggcatgaacccgggaggtggagctttcagtgagctgagatcgcgccactgcactccagcctgggcaacagagcgagactctgtctcaaca

SEQ ID NO: 548712 - DNA, 670 bp, Homo sapiens
tccccctcttcaccccagggctggggcctcctgtctacagcccccacagaggttcccaaacacaacttccccttcgtccccccagcacccgccgaactaccgaggctcctctgcacctgccccgtgccactctccagcggcctctgcagcccactcacctccaaggattcacgggggtctcggggccttcagaggctggggcgggtgacaagagccagcaagcccctgcccctgcctagcatctgcttaagccagggagggtccccaggactcaccacagcccccagggctccaagccttccctctgctgggcagttggcccagggaaggggagctggcctgggtaatgtcacgggggcaccgcagcacgcggcagccaagtggtgggggccgatggagaggccggcaggtcttttattgaaaatattcactgtgaacttcagaacaaaacgaagatccccacgggtcccaaaggaagggagaattcccaggggttgtgttctgaacgcagargaggtgggggccggcaagtggggtgctgacagccagtgccacgggacccatgtggccggaggcttggccagtggctcagcagatgacaggcggaaaatccctgtcaccagtctggtacatgctccagagcccctgatttggacatcatctggaagcc

SEQ ID NO: 548713 - DNA, 630 bp, Homo sapiens
gttcaagtgattcccttgcctcagccccccaagtagctgggactacaggcatgcaccaccatacctagctaatttttatatttttagtagagatggagtttcaccatgttggccaggctggtctcgatctccggacctcaagtgacctgcctgcctcagcctcccaaagtgctggggttactgacatgagccaccgcacccggccctacacaccattcaattttaaggaacttccaggtgctgtggycaagcccctcttgtgtggcatggaggatgggggagatgggatggaagatgactggatgggggcacggagctaggtgggaagaggaaaagtgtcttgaaggaagtaagtcccttcagataagggaggaagaagcttgatcaatatgcagactttcacagtccttcagtcatggggatattggaggagagacaggtgttgccttgtatttgagagttaccatcccaggcagtgaccctacttccaccttcttgcaggtggggctggagggcaaatacttagaggagaaatgaacaccctttgtaagcatgtgaaaagtttctggagtggagagatgatgaagcaggatatttggagtcaacagccaatgtttttattttattttt

SEQ ID NO: 548714 - DNA, 630 bp, Homo sapiens
gttcaagtgattcccttgcctcagccccccaagtagctgggactacaggcatgcaccaccatacctagctaatttttatatttttagtagagatggagtttcaccatgttggccaggctggtctcgatctccggacctcaagtgacctgcctgcctcagcctcccaaagtgctggggttactgacatgagccaccgcacccggccctacacaccattcaattttaaggaacttccaggtgctgtggtcaagcccctcttgtgtggcatggaggatgggggagatgggwtggaagatgactggatgggggcacggagctaggtgggaagaggaaaagtgtcttgaaggaagtaagtcccttcagataagggaggaagaagcttgatcaatatgcagactttcacagtccttcagtcatggggatattggaggagagacaggtgttgccttgtatttgagagttaccatcccaggcagtgaccctacttccaccttcttgcaggtggggctggagggcaaatacttagaggagaaatgaacaccctttgtaagcatgtgaaaagtttctggagtggagagatgatgaagcaggatatttggagtcaacagccaatgtttttattttattttt

SEQ ID NO: 548715 - DNA, 630 bp, Homo sapiens
gttcaagtgattcccttgcctcagccccccaagtagctgggactacaggcatgcaccaccatacctagctaatttttatatttttagtagagatggagtttcaccatgttggccaggctggtctcgatctccggacctcaagtgacctgcctgcctcagcctcccaaagtgctggggttactgacatgagccaccgcacccggccctacacaccattcaattttaaggaacttccaggtgctgtggtcaagcccctcttgtgtggcatggaggatgggggagatgggatggaagatgactggatgggggcacggagctaggtgggaagaggaaaagtgtcttgaaggaagtaagtcccttcagataagggaggaagaagcttgatcartatgcagactttcacagtccttcagtcatggggatattggaggagagacaggtgttgccttgtatttgagagttaccatcccaggcagtgaccctacttccaccttcttgcaggtggggctggagggcaaatacttagaggagaaatgaacaccctttgtaagcatgtgaaaagtttctggagtggagagatgatgaagcaggatatttggagtcaacagccaatgtttttattttattttt

SEQ ID NO: 548716 - DNA, 548 bp, Homo sapiens
ctggtgtcgttaaacggaactgttcttcagaggaaaaacttcatctctataaggtgctttattgctcctctgttgtaaaatttgacaagctcgagatttataagcctaacaattcactttttattgctgcataagtgttcagccgctagaggaaaatgctaattttcacaagtaaaccgcaaggtggttcctattttcaagacataggtcagttgacacactcgcgggtaaattcgtactgttcacaagatcaggaattggcttggaaagcaagagcgtagtgaatagtcgcttataccgcagccactcctcaagcccgtgagctgcaagttacaaacgactttakattgtacaaagaaaaatcggggagggagctagaacacaaacaaaaaaatcggtgacttataaaagttttatgttttaatcagaaaaaaaatcatgaagtggctgatgacttgtgtaattcacacatccaccctgtttcttgccactggtactctttctccctttctctttgttttcagaaaggaaggaggagacctgaacag

SEQ ID NO: 548717 - DNA, 788 bp, Homo sapiens
tgtgtgcctgagccttgctgtcatcaggggcactgggccagctcctaccctcaggcctgtggcagaaattgtgatggtcagatatgtctcctaccacgcccaccatgcctgggagccaggatcaagaggggctgggctctgggctgtgccctgcaggtagaagaacaccactccagtgctttcccctgtaccacaatggtgactgttgtggcaatgagccacaactctagctgccatcctcctggggtagggctatatgcttctgtccccatcggctgcccaatccctctctagtctggttcctggagaggctgcaggagaagccctgtgtcttccctaatcttccaccctcttcgtggcctacagaagctcagctcaaagaggcccagcttatagcactgcaagccaggcctcacacattgaccagctagaagcctatccacgcatcctctgggcatctacagcctctggtggggtgtggggtcaggcgtcygtcggctctggggtaggtggaatggaggctctgaggggtgtgtctttcctcctgctgctgctgccggcagagtcatcactgagtctgcccagcccagatgggaaacaggccattaggaaattcctgcttcgccatagaaaccaaaagccaaacaccactcaggagggagaaaaacatcataaacctgccataagcagggcaggcaggccgagaggctacgtgcctaaggcccagccctgtcactcagtagccctgtgagaaggcaggccaggaaggggcatggaccctggactgg

SEQ ID NO: 548718 - DNA, 630 bp, Homo sapiens
gaatgaaaacttgatgtagagaatggtggcaagcacaatttttgcatactgattaaaacaagtgctatatgacaaaaataatatttttaatattagatgaaaagtgagtcagatatgtttatgattaagtgctgcctgtttcatataattcatattttgtaagtcaaattcaccaagaaacatactcttagatgaagatttgtattcaaaagattaactggggacatctcttgagattgtcacctgtaagaaacaaggatagcaggagtaagcagaaggcaagttggaaaagagatgtaggtacaacaatggcttccaccaaccccacaggagctccaaagcttgaatgactccttaaagatgaagaaaagggctgagcatgatggcttatgcctataatcccagcactttgggaggatcaagtagggggattgcttgagtccaggagttcaagaccaacctgggcaacatggcgaaaccccatcttcacaaaaaaatccaaaaattagtcaggcgtggtggtgtgaacctgwattatcagctacttgaggggctgaggcaggaggatagcttgaatctgggaagtggacactacagtgaactgagattgggccactccactccagcctg

SEQ ID NO: 548719 - DNA, 1943 bp, Homo sapiens
tcctgtaaataaatgggcaagaggctcttggaagtctcctttactgtcctggggttcacaggatagaagcacacgtctgamttaatctcaaaatcctcaatgctgccccataatggaagagtctgcttacctgtggccaccgtttcagcttttcttcctagatataagcaccaaggaaaatcaatgctggtacatagtaggcattccataaatatttttcgagtggatgagcacatgaatgaatatgaatatgcatgtataaaacatcattttcctcccacactggctgacttcatctgtataaacttattcttgcctgagagctggattccgggagaggctggcacatcccaacacacagcttgctctagcttgcgtggagcctggagggagggtgggaaatgcatgctttcattcttgctgtgtcttaagaggagtcaagcccatgggccttgtgactataggcaaaagatgcccagttctgtgtcccggagctctgtcctgtatcctgggagctactgcagcaatctgggcagcatgactgacagcttcttcttgtgccctgtgcctctacaggccgcacccctccttgtccatgtcagttcctttgcagccaccagccataagaagaagctgtatgtgatcgggggagggcccaatgggaaactggccacagacaagactcagtgttatgacccttccaccaacaagtggagtttgaaggcggccatgcccgtggaggctaaatgcatcaatgcagtgagtttccgggaccgcatctatgtcgttggtgagtaatggcttcttattggtctgaatggcttagaacctgatgagcgcctggctgcagcacgtaaacggtgtgtcgcggtgtctccagcgctggcaactcactgcccctaggacccactctggctttcaggagagccatcaatcgactgtttctcttggcaagagggtagacttggcctaatcagaagttgaattttagtggttaagagggaagaaaccagaaaaatggagcgatgcccaccgtgtttcctccctctcctcaggtggggccatgagagcgctgtacgcctacagcccgctggaagacagctggtgcctggtgacccagctcagccacgagcgggccagctgcggtatcgcgccctgcaacaaccggctctacatcaccggcgggcgggacgagaagaacgaggttatcgccacggtgctgtgctgggaccccgaggcccagaaactgacagaggagtgcgtcctgccccggggcgtgtcgcaccacggcagcgtcaccatcaggaagtcgtacacccacatccgcaggatcgtgcccggagcagtgtctgtctgacggcaggatggggagctggagagcccccccgaccctcagcgtacccgcctcacctctcaccctcctccagtcccacttcaggcagcaggctcgagtttgaggccatacatcaggggatccccttgactcactttgggggaaccttggaagtcacagtttggggtcacttgagaccggccaggaatgtttgcatgacctacctcaggaggggaggcgaggaagagtaatatttagcattcaggacccacccaccctatgccggcttctgtgccaggcacttccttttatcggttcatttaacctggtgactggctcttatcacttctagtttacaggtgagggaaccaagtttcacagaggctaagtggcgtgcccctgatcactcagatagcaagtagctaccccaggagtctaaaatccaggtctttcatctccgaagtcaatgctctttccaccatgctgcctatctcagagcaggaaaaacaaacaaaaaacaacaacaaaacctggctcttgctgggcgtggcggctcacgcctgtaatcccagccctatgggaggctgaggcgggcggatgacctgaggtc

SEQ ID NO: 548720 - DNA, 565 bp, Homo sapiens
tcaaaaaagactaaattaagagtaaagaccgctgaattccagcccactctgccccttactagctgtgtctaagtttctccatttgttaacatattatatcatatagtttttataatttcaacagaggaaacatattttaaaatattgaaataagagtaaagattctatgtcatatcattatgactagtgccagaatgggattggactcaagttaaaataacttacctataaattccagtggtctcatatggattgatttatccctcttacctatcatctgtggctagggataragaattaaagcgacctgtggtatccatgcttttatcagtcaaatgtgtgcaagattggagtgaggcaaggaacttggtaacaccagttgaaatcacttgtttagtgactgaaagcacattttccaaacataggcaatagaaggtctcaacagactcaataaaggttgtatattacatccatctccgatttcccacaggctaacagagaactgattgaaacagtaaaactttacagagtttttcatttattgaagcagaataacaaaatactg

SEQ ID NO: 548721 - DNA, 549 bp, Homo sapiens
catgacaaacgtccattggtatcctctccttcaggaccgtgtttagggtcacaaagttgggatgttgacccagtttaaatgttctaggcttaaaacatggagggacaaaggcaatgtgaaggacagcaaatactttgtgtgtagatctgctctcatcccccaaacacacaaaagcaagctttgcatactggcccccagcagcaaatttctagtcatcgctctgccacttccttttccacatgagccttccagatcacctagctacccctcacctgaaatatatacagggcaccagaaccaggccctccaatctgtactactcaccactgcaatcttgtcacccaggccagggtgcagtggcacagtaacagctcactgcagcctcaaactcctgggctcaagtgatcctcaygcttcagcctcccaagtagctgggactacaggaacgcgcccctactcccagctaatttttaaattgtctgtagagatagtgtctccctaagttgcccaggatggtcttgaactcctcactcaagcaatcctcccacc

SEQ ID NO: 548722 - DNA, 1089 bp, Homo sapiens
gaaaagttggaaatatttatgtaagtagaccctggttcagcaataacaacacacaattcacaacccagtgatagtgaggaggttagctccagggtaataacgctgccacatttcatgggaaaaggactttgcctcccatgcagttctctgaaagatctgttggtaggtgatatcatttctagtttttaaataaggaaatcaagactcaagcaattatgtgactaccatgctatatattaatattaatctataaccatcctttctccagaaataatttaagataaaaaacatacgcatatccatgttcccatcactttayaactgaaatataagagctacttgctagtcagtgtttctgtgttgtttttttttccactctcagggtcagcaaactctttcttaaactgccagatagtaaattatttcaggtttgcaggaaataccatctctgttgtaactgctcaattctgccactgttgcatgaaagcagctgtagataatacataagcaaatggacatgtctattatccagcaaaatttctcttacaaaaacagtcagcaagctagatttggactgtagtttactgactcttgatttaaagaatcttgtaaatgtcatgaattctttcctttcaattcaaagttcacttcaaatttgctctgagcaaacttaatcaataatcagcccaatatgccaggaaaccccacagcctcacatcatttataaacatgttgtgtgatggtgtgtgtgtattatgtagcttataatgggctttacaaaatattttagagtttattctctttctctttttaggttgcatactcttgaaagacaaagggcctgtcctctcattcctattgggattgcttatatcatcaatccattgtgctgatgaatgtttaataaatgtggttgaatagtgaaagggtataaaggagttcaaatttgttgtaaatttaagtaactgaatataaaacttgtgaagaaagaataacagaatttcattctcagaaataggaaaaaaataaaaatacatgtgcgactgttgagatttccttaaaacccctagatttgggcagggggttcac

SEQ ID NO: 548723 - DNA, 626 bp, Homo sapiens
ttttttcttctctttttttgcctaatgtgtactggatactatgaaataaagaaggcttctattcaaactactgaaaaataaagaagtggtttgatttctattaaaggtacaaactayggtagactgaattattggtcccgttacccctccccataaacaactttgcagtccctcccactaaaggtgagatttttctccttgccttttttgggctctttcataatatttggattggacaatgggctatctataaaaatagcacaagaaggggcttaaaatacacttattcttttctacctctgccatggtcactagaacagtatgtttctgctagcccactactaccagaaagactagagatactgagtagaggaatctcagctggaaggtttttagactgaagccaagcttcctagttgagtctagcctagagaagcccaactgcagttatccagaaatgtgtgaggataaaagtgaatttttgtaggcctttgagatttttgtggctctttattatgcaacattattctggcagtagctaacagatacaaaagccaaaacaatgaattcattaactggttattttactttgtttccatgttctaaataattactggtctaacatg

SEQ ID NO: 548724 - DNA, 626 bp, Homo sapiens
ttttttcttctctttttttgcctaatgtgtactggatactatgaaataaagaaggcttctattcaaactactgaaaaataaagaagtggtttgatttctattaaaggtacaaactacggtagactgaattattggtcccgttacccctccccataaacaactttgcagtccctcccactaaaggtgagatttttctccttgccttttttgggctctttcataatatttggattggacaatgggctatctataaaaatagcacaagaaggggcttaaaatacacttattcttttctacctctgccatggtcactagaacagtatgtttctgctagcccactactaccagaaagactagagatactgagtagaggaatctcagctggaaggtttttagactgaagccaagcttcctagttgagtctagcctagagaagcccaactgcagttatccagaaatgtgtgaggataaamgtgaatttttgtaggcctttgagatttttgtggctctttattatgcaacattattctggcagtagctaacagatacaaaagccaaaacaatgaattcattaactggttattttactttgtttccatgttctaaataattactggtctaacatg

SEQ ID NO: 548725 - DNA, 671 bp, Homo sapiens
aagtacaataagaaacaatgcagcccccatgataacatggtcgccatctttagtggttttctagaacctacacgagacttggctatagttcttttatggaatgactgcaatgtcaaaataatcactcttcctcatttcacatttgcatagtagtcttcacctttgcagacatttctattmtttgatgcaaaagacacaaacctttgactcatagctatgctattctatttcagttggttattagtctataacaggggtctccaccccctgggcacagaccggtactggtttgtggcctgttaggaacccggcccatagcagcaggtgaggggcgggcaagtgagcgttactgcctgagctctgcctcctgtcagatcagctgcggcattagattctcaaagaagggtggaccctattgtgaatggtgcatgcgaaggatctaggttgcacgctctttatgagaatctaatgcctgatggcctgaggtggaacactttcatcccaaaacccacctcccacccagtatgtggaaaaatgtctttcaccaaactggtccctggtaccaaaaagtttggggaccactggtctataatagttatatgtccttatatcttttaaacagctatcttaaactataaaattaaagtctctttctagagtcttgtgttgta

SEQ ID NO: 548726 - DNA, 1213 bp, Homo sapiens
tagcctattatgaatcattttatatattaacttttaatttatttgaccctacagagccatcgggttttgaactaattgacagaagaaattagatctcactcacttcaatattaatcttcaactttgtgctcaaaattaagcacactcctatcttatttagcaaaataaaattataaaagtacgtactttaaaatccacttagaaaatatctatggccagaaatatttgcaaaaattagaaactcatgtgttactttattcataactttatttatttcatacatattgagcccctgctgtgggccagacattgtgcatgttattatttcatttaatgtactcactcctgaacctttcaataatacagtgcactttttgaatacaaaataaagttttacaagggaagaaaactcctggaccttttaaatacctggttatcaatggcaaatatatcaatttaatatcaaaattgaggtatgaaaaacaaactccattatggcatctcatcattcattccttttcccaccaattcccttgtggcttactcaagtattcctgacatgaatggtgctggagtggtcacagctcataagtgaagcttctcctatccagatttcaytgtcattagaatttactctattgtcaacaaagcaatactgctgatggttggagaaaaacaactgccacggtatccaagtgtgggagaaagctttgtttgagcttggctcactttttggaagaaaggataaaaggctgcagagttcaagtgcacaggacgtgccttgattcctgcaagatggggtgcagaactcaagtgcctagcctgttaagaaggctctcctagagcagcctcccaggaaagcagccctctagtgaaaaaagacagcataatatctctgagtggccattccatgacacgccaggctcagagaaacagtttcacgggttgctagtacagtatggcatcgcctgttaagattgtggtcaatgacggactacatatatgatggtagtaccataagattataatggaactgaaaaattcttatcacttggtgatgtagtagccatcatgaggtcataatacaatgtattactcacatgtttgtggttttctgatgtaaacaaacctactgtactgctagtcatatagaagcatagcacatatagaagcatatattatgctcctatatgtcatatagaagcatagcaca

SEQ ID NO: 548727 - DNA, 543 bp, Homo sapiens
cacttctgtgtatctcctgtctctcctaaagcctattaaagttaccataaagacacttgaaaatatgtcaaagagatacacaatgaataaaaaagaatgcagcaaaaggaaatactttctccattttttgcaattatgggaagaggttatgatctaagtagctaattccagaaatctctgttyttccccatcatggtatgttgtcattatagaaccagaagtgattacattgagtgctaagaaatggactcaaaggtgttttcaagtgattctgctaaagttaaacctgaagtagcatattagaggggagattgggggttgccccatgtaaccccaagttcatttttttaacttcatattgagtatttattgtgtatattttagatgtagtcacacatattcctgaagacattcagttctaattgaactgtcagaaatataaaatcagggtttgcatgcagagtggtgagatccatgaaaaaggaatctgtgaatgtgataggagcccagaaaaaaaccatctaatcagactgggaaggccat

SEQ ID NO: 548728 - DNA, 524 bp, Homo sapiens
accaagcctcattcagttttaaaatgcaaacattcaaagaccaagcctcattcacaccttcggtgtaagttactttcatctgcgaaactcccatcactcagaaaggaatgcccaggtaaaggcaggaagtacaggtacacagagctggagacaggcctgggtggcaatttgggatgggggttgggagaagagattttacaagtcagatgggaaggaaamgtaactatttgctttgaggtttggcccagggccttgggagcagccggcggattcaggtgtaagaactagccaccaaaagcctctgcatctcttgttcaaagctgattgtctcaggtttgactgtctcaggctttggtgtctcgcagaagcaccaaaggagaggacagggaggaagaaagaaggggtggaaaggagatacagagacttaagtcaagaatgaggcctcccgcctcccggaaagcaaacctaggaatactcttgacagctggtcacactgcacctgcctgaacaagtccagtgacggg

SEQ ID NO: 548729 - DNA, 561 bp, Homo sapiens
cacttatatgcagattttcttctgcctctgcaacagagagacagcaagatccacctctcctcttcctcctcagcctaatcaacctgaagatcatgaagacctttgtcaggactacttatgctttatgaaaagtcaatatgtttctcctgatgatttcctttctaacagcttcatttctctagcttattttattgtrcgaacagtatataataatgcagcacaaacaaaataggtgttcatcaactgtttatgttatcaggaaggcttccagtcaattgtgggctattagtagctaaggtgaaggaatcaaaagttatactcagattttcaactgcacagggatcagagtccctcacccccacattattcatgggtcaactgtagttatttgtttactaaatataaacaatttattataaaaatgaaattgaagatccatttgtataacaagtccaatttgttataatgtgactatagaggaaacatacaacatactaacttaaaaatcttttttcttatttatgcaaaaatattatataggattttagggatcataattaa

SEQ ID NO: 548730 - DNA, 561 bp, Homo sapiens
cacttatatgcagattttcttctgcctctgcaacagagagacagcaagatccacctctcctcttcctcctcagcctaatcaacctgaagatcatgaagacctttgtcaggactacttatgctttatgaaaagtcaatatgtttctcctgatgatttcctttctaacagcttcatttctctagcttattttattgtacgaacagtatataataatgcagcacaaacaaaataggtgttcatcaactgtttatgttatcaggaaggcttccagtcaattgtgggctattagtagctaaggtgaaggaatcaaaagttatactcagattttcaactgcacagggatcagagtccctcacccccacattattcatgggtcaactgtagttatttgtttactaaatataaacaatttattataaaaatgaaatygaagatccatttgtataacaagtccaatttgttataatgtgactatagaggaaacatacaacatactaacttaaaaatcttttttcttatttatgcaaaaatattatataggattttagggatcataattaa

SEQ ID NO: 548731 - DNA, 561 bp, Homo sapiens
cacttatatgcagattttcttctgcctctgcaacagagagacagcaagatccacctctcctcttcctcctcagcctaatcaacctgaagatcatgaagacctttgtcaggactacttatgctttatgaaaagtcaatatgtttctcctgatgatttcctttctaacagcttcatttctctagcttattttattgtacgaacagtatataataatgcagcacaaacaaaataggtgttcatcaactgtttatgttatcaggaaggcttccagtcaattgtgggctattagtagctaaggtgaaggaatcaaaagttatactcagattttcaactgcacagggatcagagtccctcacccccacattattcatgggtcaactgtagttatttgtttactaaatataaacaatttattataaaaatgaaattraagatccatttgtataacaagtccaatttgttataatgtgactatagaggaaacatacaacatactaacttaaaaatcttttttcttatttatgcaaaaatattatataggattttagggatcataattaa

SEQ ID NO: 548732 - DNA, 599 bp, Homo sapiens
taagacctgaggcaagtcaggagagagggaagaggaaatgaataaagagaaagaaagaatgaggagagcggattgtacatggaataaataaaaaagcatatgcagaggtaagtaagagaggatagtaaaggcaaattgatctgtagaagaaggaagaacatggtgttagaaacaggaaagaagataaagtgagcttccagtaccaaaatgtgtcagagaattacagtaacattttccttctcttgctgtcatcctcrctactggggaggcattaaggattgaggcacctcaccacacagacctgtgttttatctaccatagatgaacatcaccaaagatggtcagccatgtatggctataatttgtttttatagaaaatgttgtaacctcataggatagtatcatataggccaaattaacataattgaatagtgttgggtgatttatggagaagaaattaattcaagaagttattgcctgattaaaagttcattagaaacattatggcttataatgtagtattaaattgagggacataatagggaagaaattgaggctaggccaaaagggcaattaggggaaaccaatatggaagcaca

SEQ ID NO: 548733 - DNA, 1068 bp, Homo sapiens
gagacttaagatcagctagtacatgagccaaatcttcagatacaaaatccatgtgttctccatagtggaacactgtaaaattaaactaccacacactcacaaagctttgttttttttttttttgttttgttttttgttttttttttgagcagagtcctgctcttttacccaggytagatagtggcacgatcttggctcactgcaacctctgcctcctgagttcaagcgattttcctgcctcagcttcccaagtagctgggattacaggcgcacgccaccactcccagctaatttttgtatttttagtagagacagggtttctccatgttgcccaggctggtcttgaactcctgacctcaggtgatccacccgcctcggcctcccaaagtgctgggattacaggcgtgagccactgcgccttgcctcacaaagcttcgaaaaacattccttaataaggcctcaaggatgaacatgtccttgtgtattttttttccgtgaaaatgaaactagtctcaaatctccatgcaactgtagctggaaaaataaatattgatctagtttcctcctataattctgaattttagttcataggagcttagagttagaggcaaactttggacattatttagtcctaatccatcacaaattgtaagaaaaaactcaaaatagctttatttaaaacaaaagtatctttaggtataatgctattttcacacatgattgataaatttattaggatgaaaatcatattagaataaaatatctttgaggctacaactcgtcctttttatgtgaatagcaaaattaaaggcttaaaatatatgctaggatgaagacgaaaaatgtgattttcggaagactggaaagtacaatgaaggtttggctttcatacaaggtttggatttgttttttagattcttcccagtaattagatttagggtttagagtatctcatgtgactctcttataaaaacagacattttaaccaagcactgacatgcaaaataaaaacaaaaacctttttccttcagggactagcccagctacaattggaagttcagtaatgcg

SEQ ID NO: 548734 - DNA, 3075 bp, Homo sapiens
aacatgtgtcagaacgaagataagtgctttacattgtcgttctctttaactttaacccaacaactattctattattaccctcatcattgagatgtggaaccaaggctctgagaggttaaataacttgcccaaaatcacaaagctaataagtggtaaagaagtttgcaatatccagattctgagttcgattactaaatacactgactatcatcatctaaagtcacagacttttagtgacttgcagaatgctaccctcaacagattgtagaatgtcccccaattttttccacatatatttttatataaaggaaccaagacctcaaggggtagagagtgctcctattcctttatgtggcaaaatgcacagtgttcacagatgtttagatatactcaagaaattaggctaatgccaaaataaatctgggaggagaactttcaagtctagaacagctccaaagaatccaggaatttccccaagagtcagttcctccagaacacagataatgactyaaactagaaattctggggatcaaattttcaaagaagacccctacataacctacctgcttggggaaaatggtatcaagaataaattcttactagttgcaatacagtgtggggaggtggaagaaaagtatatattcatcacaaaaggaatagataagttaaatgcatgctatgcaatatttagaatagaaaagaaaaagtgaaaaattcttagaacatactgttaggtgaaaatgagacacaaaacaagagccatagtgtactatcatttatataaattaaaaacacatccacacacaacattgtgagagtactaaacgtcactgaaatgtgtattttaaaacagctaattttatgtgaatttgaactcaatttttaaaaaaaaaatttttttaaatacatgcccatggacttcaggccagtcatgattaaatagcttatatcaggactcagtctctcaccaaaatcaacaaaagacagaagtacataaagtaactgctaaaagacactgggaaacaactgaaataggcagaacctgatggggctactattcaagagaaaaaaagctgaataaagtgagttccacatttacccttgctttttcttgtgaagatatgtacctaaattcacagcacaggggaatagaaagcagaagtccaggggggataaggagccataggttggaatgtgagaaggccaaagctgtaaggacctgaggtcaatacagcccaaagaggaggatgtcgcatggaagtgagccctaaaatcctcgtgcaatttgccctgggggaatttaccaatccctaaactctgcatacataagaaggatgagaatccaaaagcctagcagacagcaatagctgagaggccaaagagctgagcagatactttagcagccagctgcctggtactgggaagataagttggaattcaaggtcagacaaggtgaaactgcccagggatgtacttcaggcttaaagtaagaccccaaaagggttacactgtagaagggcaaactgaagtacaatacagcactaagtctaaaactaacaatatgattaaaatattctgcttgtgcattaactgtcttccagaagatgttgaatgtaatccctgccctcaaggagcttacagactagccagagacaggcaagtaaatcagtaattaccaaacagtaaagaagagaaagggcagtaatagagatttcccaggaacatttaaataatagatatagatctggaagtcatttatcatacaagcgaaaggtaaatgcataaatgagtgtacacacctggagagaatgtaaaacgaggagtccaaatataacattaacctccaagtttatgccattattggataagatctaaggacttttttatattaaattattccttagaataaatagttacaatgagatacactagcataattaccttggtcatagcttgacttaaggaactgcaaataaaagataatagaattccaatcaaaaacaatggtctactgtcaggaaaacagcaacgtcttttttacaaaatccaaaagagaagagtgtcagggtttaaaatattttctgagaacatgaactataataagtatttttcaaactcaagtgttttaatagaatctccactcccaaaagactcatcactcagttgagaagtattgctggcatcagaaattacagctgagatagacacatgaagttcaaggacaaaattttgtgaattcagcctcttatcagaccttgatttaacaaggtgacaaatgtacttgtgacaaatagaataaatccttattcttttacaaataaaatataaaactgtctccttatttagcaaactattaaaagaaaaagtatattacctaaattaaatagtatttggcttcatagtctcttacttaaaaaggagatgaaacaaaagaaaatagaagccctaaaaatattttggcatttttaacatatcccaaaatataaattaattcaggtaaagaaatttgtttaaagctctgccacattctttatatctcaagttacaccatttcaaaatgtccagtaaaatgtgacacacaatatggcacttatacctactttgatattctctatagtgcctagcactgagaatacactgaatgaataaatataacatctacttcatagcaataattcaaagcatactgaaatatatctataaaagaaaaatttgcacaattaatctctctcttcatccagaacatacttcttcctgtctccacctgcccaaattcaaataatccttttcagtgtaactcgtgtctattccaataggcccttatcagtatcttccaatgaaagtcacctggccctaaaatgaatccctaacggcacatggcatattcaagtaggttttctgatcactctatgctttctccatagattatgttattccctcagacttcgctaattattaacatgaatgattcaaataaattaaaatcatagggtttacatttttacaaatgtaaaaaaaaacctaggtgaatgaactgttcatttctggtatatatctttaagtgtggaataatat

SEQ ID NO: 548735 - DNA, 3075 bp, Homo sapiens
aacatgtgtcagaacgaagataagtgctttacattgtcgttctctttaactttaacccaacaactattctattattaccctcatcattgagatgtggaaccaaggctctgagaggttaaataacttgcccaaaatcacaaagctaataagtggtaaagaagtttgcaatatccagattctgagttcgattactaaatacactgactatcatcatctaaagtcacagacttttagtgacttgcagaatgctaccctcaacagattgtagaatgtcccccaattttttccacatatatttttatataaaggaaccaagacctcaaggggtagagagtgctcctattcctttatgtggcaaaatgcacagtgttcacagatgtttagatatactcaagaaattaggctaatgccaaaataaatctgggaggagaactttcaagtctagaacagctccaaagaatccaggaatttccccaagagtcagttcctccagaacacagataatgacttaaactagaaattctggggatcaaattttcaaagaagacccctacataacctacctgcttggggaaaatggtatcaagaataaattcttactagttgcaatacagtgtggggaggtggaagaaaagtatatattcatcacaaaaggaatagataagttaaatgcatgctatgcaatatttagaatagaaaagaaaaagtgaaaaattcttagaacatactgttaggtgaaaatgagacacaaaacaagagccatagtgtactatcatttatataaattaaaaacacatccacacacaacattgtgagagtactaaacgtcactgaaatgtgtattttaaaacagctaattttatgtgaatttgaactcaatttttaaaaaaaaaatttttttaaatacatgcccatggacttcaggccagtcatgattaaatagcttatatcaggactcagtctctcaccaaaatcaacaaaagacagaagtacataaagtaactgctaaaagacactgggaaacaactgaaataggcagaacctgatggggctactattcaagagaaaaaaagctgaataaagtgagttccacatttacccttgctttttcttgtgaagatatgtacctaaattcacagcacaggggaatagaaagcagaagtccaggggggataaggagccataggttggaatgtgagaaggccaaagctgtaaggacctgaggtcaatacagcccaaagaggaggatgtcgcatggaagtgagccctaaaatcctcgtgcaatttgccctgggggaatttaccaatccctaaactctgcatacataagaaggrtgagaatccaaaagcctagcagacagcaatagctgagaggccaaagagctgagcagatactttagcagccagctgcctggtactgggaagataagttggaattcaaggtcagacaaggtgaaactgcccagggatgtacttcaggcttaaagtaagaccccaaaagggttacactgtagaagggcaaactgaagtacaatacagcactaagtctaaaactaacaatatgattaaaatattctgcttgtgcattaactgtcttccagaagatgttgaatgtaatccctgccctcaaggagcttacagactagccagagacaggcaagtaaatcagtaattaccaaacagtaaagaagagaaagggcagtaatagagatttcccaggaacatttaaataatagatatagatctggaagtcatttatcatacaagcgaaaggtaaatgcataaatgagtgtacacacctggagagaatgtaaaacgaggagtccaaatataacattaacctccaagtttatgccattattggataagatctaaggacttttttatattaaattattccttagaataaatagttacaatgagatacactagcataattaccttggtcatagcttgacttaaggaactgcaaataaaagataatagaattccaatcaaaaacaatggtctactgtcaggaaaacagcaacgtcttttttacaaaatccaaaagagaagagtgtcagggtttaaaatattttctgagaacatgaactataataagtatttttcaaactcaagtgttttaatagaatctccactcccaaaagactcatcactcagttgagaagtattgctggcatcagaaattacagctgagatagacacatgaagttcaaggacaaaattttgtgaattcagcctcttatcagaccttgatttaacaaggtgacaaatgtacttgtgacaaatagaataaatccttattcttttacaaataaaatataaaactgtctccttatttagcaaactattaaaagaaaaagtatattacctaaattaaatagtatttggcttcatagtctcttacttaaaaaggagatgaaacaaaagaaaatagaagccctaaaaatattttggcatttttaacatatcccaaaatataaattaattcaggtaaagaaatttgtttaaagctctgccacattctttatatctcaagttacaccatttcaaaatgtccagtaaaatgtgacacacaatatggcacttatacctactttgatattctctatagtgcctagcactgagaatacactgaatgaataaatataacatctacttcatagcaataattcaaagcatactgaaatatatctataaaagaaaaatttgcacaattaatctctctcttcatccagaacatacttcttcctgtctccacctgcccaaattcaaataatccttttcagtgtaactcgtgtctattccaataggcccttatcagtatcttccaatgaaagtcacctggccctaaaatgaatccctaacggcacatggcatattcaagtaggttttctgatcactctatgctttctccatagattatgttattccctcagacttcgctaattattaacatgaatgattcaaataaattaaaatcatagggtttacatttttacaaatgtaaaaaaaaacctaggtgaatgaactgttcatttctggtatatatctttaagtgtggaataatat

SEQ ID NO: 548736 - DNA, 643 bp, Homo sapiens
ttttgacatctttgtcatgacatctttgtcatggaatctttgccaggtcctatgtcgagaatgccatttcctaggttatcttccagggttttttatagttttaggttttacatttaagtttttaatctatctcaagttgatttttttatatggtgtaaggaggggtccagcttcaatcttctgcatatggctagctagcttcccagccccatttattgaatagagagtcctttccccatttcttgtttttgtcaactttatcaaagatcagattgttgtaggtgtgtggcattatttctgggctctctaatctgttccatttgtctatgtgtctgtttttgtgccagtgacatgctgttttggttactgtagccttgtagtatgatttgaagtgagagaatgaaatcaactttcagcctcagtttcagagagacaaaaacaytctcattgtccaatcaatctaaaaacctttaatgggattaaatctctaaagtggaaaaatctctatggatagttgttgctaagcaaaagaataaacattttatgttctgcatcactatgaatacatcagtacctaagatatacatgggtatcttctaggaaaaaggaaatatatttttatttgatattacacctgattcta

SEQ ID NO: 548737 - DNA, 1481 bp, Homo sapiens
cttttatgtgagttgaggtccagtgttaggaaagcaaggaagacacagtacctaaaatgagaaacagtctattgaaaaccacgaagattaatttagtgataccactaaatgtgactatttaattagacatttttattttgctgtgatatcctcacactgcttaccaggtgattacctttgaaattgcctagccatgccaattcaattaaactggataggataataggagtgaaaatgttttgcaaatgacaaaatctttgcaatcatttgctaatattactaattctcatattccatgaatttagagttgaatacttctatcctaacacatgtacttctaaatgtgtttgaagtttgagtcttactaacttatgtagaattcacatattttttggccgggcacggtgactcacgcctgtaatcccagcactttgggaggccgaggcagacagatcacaaggtcaagagtttgagaccagcctgaccaacatggtgaaacccccgtctctactaaaaataaaaaattagccgggcatggtggcacgygcctgtaatcccagctactcaggaggctgaagaaggagaatcgcttgaacccgggagacggaggttgcagtgagccgagatatttttcacacaaaaaccttaaatattacagtgcagtggttagcaactctgaaagtttgtttgtttctaacaaccaccacctgttaaaggcatgatttaatctctttaagactcagagtagataattacagtaccaagctcatgcctgtccaggatcttatcatgccttatcatctctacctatatcattcacatccactgtctctcatgtttactactatcataatcccctgtactcagtcttgttcttctacagtctattgttcacatggaagtcagaattatcttttaaaaacatcttaatcaattgatatgactctcctatgcagaatccaccaatgactgcctgtaatagtcaaaaataaagcccacactcctacaatggccaacaagatgctacatatactggcatcttctacctacatcatctcgacatgatctcctctcatggagggcagagactatgatgttcagagctgtattaccagcccctagaactaccacctatcctggtggatggaccctcacttgctgaagggatgactagggatgcaagggttaccatggaacaatgtaggtagatgctctgcacacagagtacctttaatgcagaacagtgatagtcgttgcccttttaaggattcctttggtttgtttcaacagaggccatcacatctgcaatgctaaagcactttcatgtttttgactcatgattttatagcattatgagaaactttacttagctgatttataattgcaagccataatgtataataccaaaagaaagaaaaatgcacatagacaaatcaggaactaattagctggatgagaaagccagttgaagagcagaaaat

SEQ ID NO: 548738 - DNA, 634 bp, Homo sapiens
ggtgccaagtgcatcactgacctcagagtcgaatccctgagtgacctggaagcaacaagacactgttacatttgtggcaaattaggaggcagggacccaggccctagggacgtcccttcaattcctgaacctacccctacccaagcaaccacactctggggctcttcttaacatgcatttcaacttatctatttaatttttgtaatgtatttctatgcgttcttgactgcttgtcggaagggacctcacaacaccctctacgccccttcctcagcccctccagtcacacagcggctgacacatattcaggcacatggctattctttgcggctctcgtacaaggtgggtggctacgttcagctttttctagaggacattgttccaaagctgtcaaccaacaaatatttatagaacrttatttatcatttctgtgttcagctatgtaaaacaatgaattcgttttgagtaaaccagtcttaaactgttggtgatcctattggctttgttttgtgacaaagcaaggtggtgggatgggaggggaagagcagaaaactctgaagaggggaagtcagcagaaaggaaatgacggtaatgcctctccccaaataatgaaactctattttttaaaacaatg

SEQ ID NO: 548739 - DNA, 3051 bp, Homo sapiens
aatgccatgaaatggggacacaccggccccagcaggttgaatggtttccacctgccaagggtgaagggcccatgatgggctattccagggatgtggaggcagactggggtcagcgaccagaggtctctgtgcaatcggcctcctgggatgctcagggcctcagcgatgcccagtttcctacagggaacaagatctctcccgactgctcggttctactccgctcatcactttggctaccgtggctcttcagtctgaacagtgaagccactttaggaataacgcctgttgagcaggagggtgttgggtttgggggatgaggaagatctattgtacgcatggaaaccacgtctctcgcggagggactgtggagtccaccattctgagccgtcccaacaggaggaggcttcattttcctgggtcactgaggaagaacagtgggtccttggtcctggagaacagctggatggaccgtccctcctgggaatactcgaggcaaaaggagggcgaggcctcaagaggaccacgcagagcaagaaatacctggggagaaccctagtgcccggacccctttgaacacaagggaagatagtctcccctcagccagccctccagggctccttcattttccacagctgcccaagggcagcaggctcccccggacaagggaccatgtgtgttcagtggggcccacagcgaccatcaggacccagcttagggcacagaggtgttctgaggaccgtcagtggatctgtaccagtggctctataccagtggctctgccaggaccaggctctgccccatcgggatgggaaacctgggcagatttgggatctagggcagggaggtcacagggttcaggcctgaattccagcacagcacacggcagggctgagagcaaaactcagggtcatgtccggattcccaggccggttactgcctctctgaccccagacgtctcatctgtcgaatggggacatttgggaacagcacccactctacgaagccaccatggagacgaaagagccaatcgtctacacgggcagtgtagaacgggcgcctggtgagtgctcagggatgaccctcctcggtagctgccccacagaggccaacaccgcccgcaccgtagccactgcccccaagtccgcctggagggaagagagcaggtcacgctcacctgattctgatgaatcagctggcctgggtcatgcctctcagggagaaaacctttgagtccacagagctgctcacagataccactgcctgtgtgtaactgctgtagaccactgaggcagaccagagagcagataggtgctaagcaccagtgacattctgaggtcatggcacgaatcacagtggggccttgcccgggtcagcagcacccagagtcagggtcctccgctgcctgaggtgtcaacatgcctgcctgcaatgtgtttgtgcacgtgcgtgcacatgtgtatgtgggtaaacacatctgtgcacgtgtgtgctgcttctctggccaggcccggctgccccactcatgtgtgcacccagttcctcatcactgtcacccccgaggcccagggccagcatcagagcatccatggctgctccctaacctcagccctccctgcccagggtggtcctgggatacacatagcggtggagggaagtgactgctgctgttggatctcagaatacaaaagctagtactattacctaatggtctttttagtgtctctaatggtatcgctttttcatttctgatattttaactgggtatttctctccatgacccttggatattctagctagaggatcctgtggggaaagtgccgggcacacagtaggggctcactcttctagacatgttatctaaaacctggttcatctgtccttccacrcagggcctaggggatgccaaattccaggggccagaaagagcttgggataaaaagaaacttcaaggggacggctttgacctgggctgagtctgcctgtgccatccaactggagtctcaagtcctgaggcaggacgtccagatgccccagtgcagggtcctcctgatcaacacctgctcccctgtactcattagcaacctcacccaccctactctcaaagcacacttggctctcgtatccaggagctctgcatctgtagattcagcaacagcagatggaaaatattcagaaaataaattggacggttatgtttctattgaacatgtgcagagtttgttcttgtcattattccctaaagaatccagtatcacgaccatttatgtagcatctgcattgtattacacatcatgaataatccagagatggtctaatgtctacgggaggatgtgcatagctgatatgtaaatactaggccatgttatgtcagagacttgaggatccatggattttggcatccccggggaccctagaactaatccatggataccaagggatgactgtataaactcactcaggaaggcttctcattggaggaaggtcccagttcaggacacacagggacatctccctggactactgtccattcatccatccattcatccattgtctccccccacccccccatctcggactgtcccagtgacagccctagcaagaagagacaagaaacaagttcacgttgtccagttttgaggtaatggaagaagttgcaccagtatgagaatagtgggtcagttttctacaggatgcagaaagcatatcgggcagcctcggggtgcggaaaggagcctggcctctctagcagccacacaggcctgcagtaggatggggctgtggctggccatgtggatcacttgggcctcatgaggggaaaggaaataccaggggggcagaagaggagcatgggggcagctggttgcctaaggagaaggcacctcagggaaggggactgtattcatttgttttcacactgatgtaaagaaatacctgagattgggtaatttataaaggaaacaggcttaattgacttgcagttccggaaacttacaatcatggcagaaggggaaggggaagcaggcaccttcttcacaagatggcaggagggag

SEQ ID NO: 548740 - DNA, 3051 bp, Homo sapiens
aatgccatgaaatggggacacaccggccccagcaggttgaatggtttccacctgccaagggtgaagggcccatgatgggctattccagggatgtggaggcagactggggtcagcgaccagaggtctctgtgcaatcggcctcctgggatgctcagggcctcagcgatgcccagtttcctacagggaacaagatctctcccgactgctcggttctactccgctcatcactttggctaccgtggctcttcagtctgaacagtgaagccactttaggaataacgcctgttgagcaggagggtgttgggtttgggggatgaggaagatctattgtacgcatggaaaccacgtctctcgcggagggactgtggagtccaccattctgagccgtcccaacaggaggaggcttcattttcctgggtcactgaggaagaacagtgggtccttggtcctggagaacagctggatggaccgtccctcctgggaatactcgaggcaaaaggagggcgaggcctcaagaggaccacgcagagcaagaaatacctggggagaaccctagtgcccggacccctttgaacacaagggaagatagtctcccctcagccagccctccagggctccttcattttccacagctgcccaagggcagcaggctcccccggacaagggaccatgtgtgttcagtggggcccacagcgaccatcaggacccagcttagggcacagaggtgttctgaggaccgtcagtggatctgtaccagtggctctataccagtggctctgccaggaccaggctctgccccatcgggatgggaaacctgggcagatttgggatctagggcagggaggtcacagggttcaggcctgaattccagcacagcacacggcagggctgagagcaaaactcagggtcatgtccggattcccaggccggttactgcctctctgaccccagacgtctcatctgtcgaatggggacatttgggaacagcacccactctacgaagccaccatggagacgaaagagccaatcgtctacacgggcagtgtagaacgggcgcctggtgagtgctcagggatgaccctcctcggtagctgccccacagaggccaacaccgcccgcaccgtagccactgcccccaagtccgcctggagggaagagagcaggtcacgctcacctgattctgatgaatcagctggcctgggtcatgcctctcagggagaaaacctttgagtccacagagctgctcacagataccactgcctgtgtgtaactgctgtagaccactgaggcagaccagagagcagataggtgctaagcaccagtgacattctgaggtcatggcacgaatcacagtggggccttgcccgggtcagcagcacccagagtcagggtcctccgctgcctgaggtgtcaacatgcctgcctgcaatgtgtttgtgcacgtgcgtgcacatgtgtatgtgggtaaacacatctgtgcacgtgtgtgctgcttctctggccaggcccggctgccccactcatgtgtgcacccagttcctcatcactgtcacccccgaggcccagggccagcatcagagcatccatggctgctccctaacctcagccctccctgcccagggtggtcctgggatacacatagcggtggagggaagtgactgctgctgttggatctcagaatacaaaagctagtactattacctaatggtctttttagtgtctctaatggtatcgctttttcatttctgatattttaactgggtatttctctccatgacccttggatattctagctagaggatcctgtggggaaagtgccgggcacacagtaggggctcactcttctagacatgttatctaaaacctggttcatctgtccttccacacagggcctaggggatgccraattccaggggccagaaagagcttgggataaaaagaaacttcaaggggacggctttgacctgggctgagtctgcctgtgccatccaactggagtctcaagtcctgaggcaggacgtccagatgccccagtgcagggtcctcctgatcaacacctgctcccctgtactcattagcaacctcacccaccctactctcaaagcacacttggctctcgtatccaggagctctgcatctgtagattcagcaacagcagatggaaaatattcagaaaataaattggacggttatgtttctattgaacatgtgcagagtttgttcttgtcattattccctaaagaatccagtatcacgaccatttatgtagcatctgcattgtattacacatcatgaataatccagagatggtctaatgtctacgggaggatgtgcatagctgatatgtaaatactaggccatgttatgtcagagacttgaggatccatggattttggcatccccggggaccctagaactaatccatggataccaagggatgactgtataaactcactcaggaaggcttctcattggaggaaggtcccagttcaggacacacagggacatctccctggactactgtccattcatccatccattcatccattgtctccccccacccccccatctcggactgtcccagtgacagccctagcaagaagagacaagaaacaagttcacgttgtccagttttgaggtaatggaagaagttgcaccagtatgagaatagtgggtcagttttctacaggatgcagaaagcatatcgggcagcctcggggtgcggaaaggagcctggcctctctagcagccacacaggcctgcagtaggatggggctgtggctggccatgtggatcacttgggcctcatgaggggaaaggaaataccaggggggcagaagaggagcatgggggcagctggttgcctaaggagaaggcacctcagggaaggggactgtattcatttgttttcacactgatgtaaagaaatacctgagattgggtaatttataaaggaaacaggcttaattgacttgcagttccggaaacttacaatcatggcagaaggggaaggggaagcaggcaccttcttcacaagatggcaggagggag

SEQ ID NO: 548741 - DNA, 3051 bp, Homo sapiens
aatgccatgaaatggggacacaccggccccagcaggttgaatggtttccacctgccaagggtgaagggcccatgatgggctattccagggatgtggaggcagactggggtcagcgaccagaggtctctgtgcaatcggcctcctgggatgctcagggcctcagcgatgcccagtttcctacagggaacaagatctctcccgactgctcggttctactccgctcatcactttggctaccgtggctcttcagtctgaacagtgaagccactttaggaataacgcctgttgagcaggagggtgttgggtttgggggatgaggaagatctattgtacgcatggaaaccacgtctctcgcggagggactgtggagtccaccattctgagccgtcccaacaggaggaggcttcattttcctgggtcactgaggaagaacagtgggtccttggtcctggagaacagctggatggaccgtccctcctgggaatactcgaggcaaaaggagggcgaggcctcaagaggaccacgcagagcaagaaatacctggggagaaccctagtgcccggacccctttgaacacaagggaagatagtctcccctcagccagccctccagggctccttcattttccacagctgcccaagggcagcaggctcccccggacaagggaccatgtgtgttcagtggggcccacagcgaccatcaggacccagcttagggcacagaggtgttctgaggaccgtcagtggatctgtaccagtggctctataccagtggctctgccaggaccaggctctgccccatcgggatgggaaacctgggcagatttgggatctagggcagggaggtcacagggttcaggcctgaattccagcacagcacacggcagggctgagagcaaaactcagggtcatgtccggattcccaggccggttactgcctctctgaccccagacgtctcatctgtcgaatggggacatttgggaacagcacccactctacgaagccaccatggagacgaaagagccaatcgtctacacgggcagtgtagaacgggcgcctggtgagtgctcagggatgaccctcctcggtagctgccccacagaggccaacaccgcccgcaccgtagccactgcccccaagtccgcctggagggaagagagcaggtcacgctcacctgattctgatgaatcagctggcctgggtcatgcctctcagggagaaaacctttgagtccacagagctgctcacagataccactgcctgtgtgtaactgctgtagaccactgaggcagaccagagagcagataggtgctaagcaccagtgacattctgaggtcatggcacgaatcacagtggggccttgcccgggtcagcagcacccagagtcagggtcctccgctgcctgaggtgtcaacatgcctgcctgcaatgtgtttgtgcacgtgcgtgcacatgtgtatgtgggtaaacacatctgtgcacgtgtgtgctgcttctctggccaggcccggctgccccactcatgtgtgcacccagttcctcatcactgtcacccccgaggcccagggccagcatcagagcatccatggctgctccctaacctcagccctccctgcccagggtggtcctgggatacacatagcggtggagggaagtgactgctgctgttggatctcagaatacaaaagctagtactattacctaatggtctttttagtgtctctaatggtatcgctttttcatttctgatattttaactgggtatttctctccatgacccttggatattctagctagaggatcctgtggggaaagtgccgggcacacagtaggggctcactcttctagacatgttatctaaaacctggttcatctgtccttccacacagggcctaggggatgccaaattccagggkccagaaagagcttgggataaaaagaaacttcaaggggacggctttgacctgggctgagtctgcctgtgccatccaactggagtctcaagtcctgaggcaggacgtccagatgccccagtgcagggtcctcctgatcaacacctgctcccctgtactcattagcaacctcacccaccctactctcaaagcacacttggctctcgtatccaggagctctgcatctgtagattcagcaacagcagatggaaaatattcagaaaataaattggacggttatgtttctattgaacatgtgcagagtttgttcttgtcattattccctaaagaatccagtatcacgaccatttatgtagcatctgcattgtattacacatcatgaataatccagagatggtctaatgtctacgggaggatgtgcatagctgatatgtaaatactaggccatgttatgtcagagacttgaggatccatggattttggcatccccggggaccctagaactaatccatggataccaagggatgactgtataaactcactcaggaaggcttctcattggaggaaggtcccagttcaggacacacagggacatctccctggactactgtccattcatccatccattcatccattgtctccccccacccccccatctcggactgtcccagtgacagccctagcaagaagagacaagaaacaagttcacgttgtccagttttgaggtaatggaagaagttgcaccagtatgagaatagtgggtcagttttctacaggatgcagaaagcatatcgggcagcctcggggtgcggaaaggagcctggcctctctagcagccacacaggcctgcagtaggatggggctgtggctggccatgtggatcacttgggcctcatgaggggaaaggaaataccaggggggcagaagaggagcatgggggcagctggttgcctaaggagaaggcacctcagggaaggggactgtattcatttgttttcacactgatgtaaagaaatacctgagattgggtaatttataaaggaaacaggcttaattgacttgcagttccggaaacttacaatcatggcagaaggggaaggggaagcaggcaccttcttcacaagatggcaggagggag

SEQ ID NO: 548742 - DNA, 1111 bp, Homo sapiens
gtattgctgggttgtaataagtgtatgcttgactcttaaatgctttttaaaatttattaataaaaaaatcagtgatttaaaagacactaatttttgccaagcagatcagaacagatggaacaaatacggtgagactgagtttaaataagctctcattagaatgcttgtaatacatcctgtctagaaggcagctggacaatcacttatagaggcttaaaattactcataccttttcacttagtttttctattcttaggaatttaccatagagaaataatcacataaatacacaaagatttgtatacagtaatactcactaaagcttttagattatcataaaatattggaaacaactcaaatatttagttctgggaaattaattatgtaaaaacgataatctcaatgaactgactccattcagctattacaacttccatttttaaagaaagttgaagaacttggaaaattgcttacatatagtatkaagaagaaaacagccaggtagaaaattttacaagtgtgtgcgtgtgttcttatatgtacctgcataaggaaaaaactataaggcgatgtaacaaattttcagtagtggttgtacttgggtggtaggtaatctagactcttgatttgaaaaaaaatttatcttttcctaatatctaagtcattaaatttaccccctcccccaaaaaaatggatgactttgggaggccagtgtggaaaggacgcagtctgttagagaaatgggctcaggactggaggtcaggagagacagaggtctcagctttagctacgggaccttaacaaatcatctttggggctttgttttatgtattggtaaaagaaagggttcaacaaaattagctggtttcaaatcatgttctgagacctcacaggctacagtggttgggtgcttagttatttgtccttgcaacaactcaagcaaggttttggggtgtaatgtgtgttttggggtttaatgattagaatcccatggaaaccctaggacttttactgttttttcttttttaaatgagttccactgtttgaaatcctatgatttcttggtgctgctttgtaatagacaaacgctggagatcaaggtagagaaaaa

SEQ ID NO: 548743 - DNA, 937 bp, Homo sapiens
gtagagatggggtttcaccgtgttagccaggatggtctcgatctcctgatctcgtgatctgcccacctcagcctctcaaggtgctggaattacaggcgtgagacaccgctcctagccaaaagattcttaaaaaaagaatctattgattctcaaagcctagtctcataggtaatttcatttggactatctaatattattaaggcaaaaaaaaaaacattaaaccaaaagtttaaatttaaaagtttccatgcctctggctggctgttttcacttcctttaagcytttgtgactcttcctctgatgtcagctttaagtcttgttctgttgaaaaatccatatattcagttaaaatcaaccacttagaacagttaaaaactattgccttttaaaaacagatttaagacatttcatttcataaattgggcgtttaatctttcatgaaattgtcatttaagaaaaaattctcaaaaacttcaaaaaaccacttggggagataccagatgtcaccagattgaagacatacaaacatgtcaaaaattcccttacaaattcatccacccaacatcaatgaacaaacccaccagaaacacagcttcaaaatacagcagaaacatataaagtgacacagtatactgttctccacttcctaatagtaccttataaatgatttccaaaatcactgctgacacctttattagtgtacaacatcttcctaatatctaaaatgtttccctccactattctgacacatttattttcatttttttttttatgagtcagggtcttgctctgtcaccagactggaatgcagtggtgcgatcagctcactgcaacctccaactccctggttcaagcgattctcctgcctcagtctcctgagtagctgtgattacaggcaaccaccaccacacccagctgatttttgtatttttagta

SEQ ID NO: 548744 - DNA, 937 bp, Homo sapiens
gtagagatggggtttcaccgtgttagccaggatggtctcgatctcctgatctcgtgatctgcccacctcagcctctcaaggtgctggaattacaggcgtgagacaccgctcctagccaaaagattcttaaaaaaagaatctattgattctcaaagcctagtctcataggtaatttcatttggactatctaatattattaaggcaaaaaaaaaaacattaaaccaaaagtttaaatttaaaagtttccatgcctctggctggctgttttcacttcctttaagcttttgtgactcttcctctgatgtcagctttaagtcttgttctgttgaaaaatccatatattcagttaaaatmaaccacttagaacagttaaaaactattgccttttaaaaacagatttaagacatttcatttcataaattgggcgtttaatctttcatgaaattgtcatttaagaaaaaattctcaaaaacttcaaaaaaccacttggggagataccagatgtcaccagattgaagacatacaaacatgtcaaaaattcccttacaaattcatccacccaacatcaatgaacaaacccaccagaaacacagcttcaaaatacagcagaaacatataaagtgacacagtatactgttctccacttcctaatagtaccttataaatgatttccaaaatcactgctgacacctttattagtgtacaacatcttcctaatatctaaaatgtttccctccactattctgacacatttattttcatttttttttttatgagtcagggtcttgctctgtcaccagactggaatgcagtggtgcgatcagctcactgcaacctccaactccctggttcaagcgattctcctgcctcagtctcctgagtagctgtgattacaggcaaccaccaccacacccagctgatttttgtatttttagta

SEQ ID NO: 548745 - DNA, 937 bp, Homo sapiens
gtagagatggggtttcaccgtgttagccaggatggtctcgatctcctgatctcgtgatctgcccacctcagcctctcaaggtgctggaattacaggcgtgagacaccgctcctagccaaaagattcttaaaaaaagaatctattgattctcaaagcctagtctcataggtaatttcatttggactatctaatattattaaggcaaaaaaaaaaacattaaaccaaaagtttaaatttaaaagtttccatgcctctggctggctgttttcacttcctttaagcttttgtgactcttcctctgatgtcagctttaagtcttgttctgttgaaaaatccatatattcagttaaaatcaaccacttagaacagttaaaaactattgccttttaaaaacagatttaagacatttcatttcataaattgggcgtttaatctttcatgaaattgtcatttaagaaaaaattctcaaaaacttcaaaaaaccacttggggagataccagatgtcaccagattgaagacatacaaacatgtcaaaaattcccttacaaattcatccacccaacatcaatgaacaaacccaccagaaacacagcttcaaaatacagcagaaacatataaagtgacacagtatactgttctccacttcctaatagtaccttataaatgatttccaaaatcactgctgacacctttattagtgtacaacatcttcctaatatctaaaatgtttccctccactattctgacacatttattttcatttttttttttatgagtcagggtcttgctctgtcaccagactggaatgcagtggtgcgatcagctcactgcaacctccractccctggttcaagcgattctcctgcctcagtctcctgagtagctgtgattacaggcaaccaccaccacacccagctgatttttgtatttttagta

SEQ ID NO: 548746 - DNA, 702 bp, Homo sapiens
  misc_feature 2, 3, 4, 5, 6, 7, 8, 9, 10, 11, 12, 13, 14, 15, 16, 17, 18,19, 20, 21, 22, 23, 24, 25, 26, 27, 28, 29, 30, 31, 32,33, 34, 35, 36, 37, 38, 39, 40, 41, 42, 43, 44, 45, 46,47, 48, 49, 50, 51, 52, 53, 54, 55, 56, 57, 58, 59, 60,61: n = A,T,C or G
  misc_feature 62, 63, 64, 65, 66, 67, 68, 69, 70, 71, 72, 73, 74, 75, 76,77, 78, 79, 80, 81, 82, 83, 84, 85, 86, 87, 88, 89, 90,91, 92, 93, 94, 95, 96, 97, 98, 99, 100, 101: n = A,T,C or G
cnnnnnnnnnnnnnnnnnnnnnnnnnnnnnnnnnnnnnnnnnnnnnnnnnnnnnnnnnnnnnnnnnnnnnnnnnnnnnnnnnnnnnnnnnnnnnnnnnnnnaaataaagtccaatcagagtaggcctagaggttttttctctcatccaatcagaacatgtagtccaggaactgcatgtgcgcgacctcagtacgtaaagcatgctgaggcggtgtcaggtcattttaggctcttcagtttcgcgtttggtatccggcatggctgccacctgtttctggctggagcctcggacactggctcactgcagttggtggtgtcgacagagcggtaggagggcggcgggcagcaggagcttctcctgctgggcaggaagacgagtagaagggagcggcaccgaggcatgctggaggctggagcctgagccaccccggctcgcctcgctgcrgttggtggtgacctcggacactgcagctcggccagagtggtagaaatgtcctggtgtaggtgagtcagctggggatgcactgcccgcatgtgggggcaggggttgggtgtcctattggggctcactccccgaggctgcactgcctgtgtcaggggggctggttgggggcactctccgaggttgcattgctggcggtgggggtgcggtgttggctggctatctggggctacactgcccacggtggcgggggtggtggg

SEQ ID NO: 548747 - DNA, 629 bp, Homo sapiens
gggactaccgggtggggattagtgggcatcgcgggggactgtgggaacagggcactgtgggtggaggtgtcaggaacgggaaccagcagttgagtggggagggctggctgggtctgagtttctcctactcctgctccccaaggagtgcagccctggtgggcccagcaatttctggccagttgcacctggatgggggtggtttcagcataggcactcacacccgcccccagttcctggccaccttttgccagaaagagaggctggacttcggtgggtgggtgtgagtgccttagctgaagctggtccctgccacccagtggccagcatgacaaggtgaggctctaacgttaccactccctgcatcccattctaggcttttctggctttgcccgtctagctgctccaagccaggctggaggaggaggagaaggaatcacctgtggtacgctggagcctgcatgtggcgtgactctgcagctcgcctcatgtgattggtggcagccacagagactgcagctcgacaggagtggtaggagggtgccygcgggggcaaggtggtaggaaccttgtagggtgggctgctgcattgacggcgacagcaattgtattggcattggtgctagtggtgg

SEQ ID NO: 548748 - DNA, 378 bp, Homo sapiens
ataaatcaaaagctccccatgttccatgaatatctattctcatatcccggctgtttaagactttcaccaaaatttcttgtttatccttcatatagatctcgcatatttttcaggattaattttactcctacatatggtaatagtttctattgagatgataaatgaaatcttcgtatccattataaaatgataagtagttattacmagtctttaggaaagctctcattttttgtgtgtttcacatgaatcagtgttctgctctattgctctgagtatggctggcacagaaagagttaagttggggaggaaagctcttggtttctatgttttttgtaaaatggcattctgttctattgctgtaagagcctagcgggagaa

SEQ ID NO: 548749 - DNA, 378 bp, Homo sapiens
ataaatcaaaagctccccatgttccatgaatatctattctcatatcccggctgtttaagactttcaccaaaatttcttgtttatccttcatatagatctcgcatatttttcaggattaattttactcctacatatggtaatagtttctattgagatgataaatgaaatcttcgtatccattataaaatgataagtagttattacaagtctttaggaaagctctcattttttgtgtgtttcacatgaatcagtgttctgctctattgctctgagtatggctggcacagaaagagttaagtkggggaggaaagctcttggtttctatgttttttgtaaaatggcattctgttctattgctgtaagagcctagcgggagaa

SEQ ID NO: 548750 - DNA, 500 bp, Homo sapiens
  misc_feature 399, 400, 401, 402, 403, 404, 405, 406, 407, 408, 409, 410,411, 412, 413, 414, 415, 416, 417, 418, 419, 420, 421, 422,423, 424, 425, 426, 427, 428, 429, 430, 431, 432, 433, 434,435, 436, 437, 438, 439, 440, 441, 442, 443, 444, 445: n = A,T,C or G
  misc_feature 446, 447, 448, 449, 450, 451, 452, 453, 454, 455, 456, 457,458, 459, 460, 461, 462, 463, 464, 465, 466, 467, 468, 469,470, 471, 472, 473, 474, 475, 476, 477, 478, 479, 480, 481,482, 483, 484, 485, 486, 487, 488, 489, 490, 491, 492: n = A,T,C or G
  misc_feature 493, 494, 495, 496, 497, 498: n = A,T,C or G
tgaacaggattagtgccgttatgaaagggtttgtgggagcactttttgcccttcagtcttcccagccacgtgaaaacccagcaagaaaatmtaatctatggggaagaggccctcatcagacaccaaatctgctggtgccttgatcttaagacttccagactccagaactatgagaaacaaatttttgttatttacaaattatctagtctggggtgttttgttctaacagcctgaagagatgaagacacttacaaaccaaaatggcttttaaactagtatctgccccgcccctacccaaaagcacagttataggataaaggaccactaaatctacttgtttataatacggtcatgtgctgcataacaacattttggtcaacaacataccacaatttgacnnnnnnnnnnnnnnnnnnnnnnnnnnnnnnnnnnnnnnnnnnnnnnnnnnnnnnnnnnnnnnnnnnnnnnnnnnnnnnnnnnnnnnnnnnnnnnnnnnnntg

SEQ ID NO: 548751 - DNA, 606 bp, Homo sapiens
attgcctagatcacattgtggtgattcattgttttctcactgtctttttgttttagaaaacatctcaaagggaagaaataatacaagtattgatatctacagctctatcgttctcctaaaacatgaattaaaagatrtgcttatggcaatttttcagttaaaaagttacagtataatatgtgtagttaagcacatattaatattaaaataaaaacatggctggccgcagtggctcacgcctgtaatcctagcactttgggaggccggggcaggtggatcacaaggtcatgagttcaagaccagcctgaccaagatggtgaaaccctgtctctactaaaaatacaaaaaattagccaggcatggtggtaggtgcctgtggtcccagatactcgggaggctgaggcaggagaatggtgtgaacccaggaggtggaggttgcagtgagctgagatcacgccactgcactccagcctgggtgacagagcgagactccatctcaaaaaataaaaataaaaaattcaaaaattagctgggcatgatggcaggtgcctgtaatcccagctacttgggaagctgaggcaggagaatcacttgaattcaggcggc

SEQ ID NO: 548752 - DNA, 590 bp, Homo sapiens
tgcataaatttataagcatatataattagatataaaaaaytacgattctaacataaagttttagctaatgcttaaatcagaacacatctgttacaggccaacaggcatataaaaattagaataacaatagtaagtcaccttggatttctataggtcttttcttccagtaagttcaaagcctttccttctaatctctcatctacttatataaaatttatgagaactgttctcatttaacagatgagaaaacaggataaactacaacaaaattggatttgaggtttcttaacttcagatgaccatatgatttttcatctaataaccagtgctccttttgtgagcaaataggggagggtgcaattaataattacacttggacaacaggtggaagccaaaactgtcccaggcacacattaattctcactttaataatctgtgttccacagagaaaatagaattaggaaagttcatttgtatgattttcagcaagtcaaatatccacaaacttacttcgtgggagtttagaatgtaagaaacagagaaatgaggttgttgtatagaaatttcacaagcctagccaggcatggtgg

SEQ ID NO: 548753 - DNA, 550 bp, Homo sapiens
ctgacatgccagattccctggcactcccttttctctcagtaagatggaattatggctgcacatagcattgtattttcaaaatggttgtgtttctgatttcactctcagggctgtgtggaaygctcagaattagtaggccactttctagtgtcccagcacattgttgcttcccactgatttaccaatagtcagtttactgtgttttcataaaacatacttacgatacttgtaatagttattattctaatgagattatttaaataaattttatttaaaccaatgcaataaaaaatggttgtttctataaaaattgagttctgaaaagagaataatggtgacttggtaaacgaaactgtagtcagattaagagtgaagaagatgactggaaaagatggggaaaatacaaattgaaatggtttctatgcttaaggctgaaagtgttgtgaagatgttttaaattcactgaaactgaaattcacagataatcaccattaaatatgttttttgcaataaagacaaaactcaaattgtagaactcctgttcaaagaa

SEQ ID NO: 548754 - DNA, 871 bp, Homo sapiens
catataactgctatcctaatgtttatgttgttagatcaaaaaaatgaataagtatgttaaaggacctcggacttccaaaataaattggtgggcattattgatgttttatttctctgaagcctaccaactccatttcctgattcttcataggactttttgacatattgcttcaaactcttagatcaatgacatattaatccctagatttaaaagaattattgctatattaggcagtatgcatttagttgcaagtaataattttttaaaaggrgctgatcaaaagggaatatttattataaggatacagtcatagtgggcagcaatatacttaggcctctggaatgacctgagagagaggactggacagaagtcttctctctgtccttgtgtttcttatctgaattcatttgattaatcagtatcttgatcaaaaataaacagcttactctaactgagtaatttgggcagaataaagagacatcttatacagacaaggtatagcacagctccctggcataaggaagaccaaggagtcatttccacatctaggtctggaggagaaggagcagaacagaaaacgcacagaggaaaactgcatgggaaggacaccagcaggttagcgctgcccctgtatctcagaactagcagcaggaatactccttaagatgccattttttggacctttcttccattgtctcatatctctttctaaccagagctgggaaaagttctccacttttcagggttcatatgatttgactgaacacacttagatgacccaagataatctctccatctcaatatcatgtattcctttgggttctgtaaaatgcaaattgtcctggaatacccaatgcttgaagcacttttt

SEQ ID NO: 548755 - DNA, 871 bp, Homo sapiens
catataactgctatcctaatgtttatgttgttagatcaaaaaaatgaataagtatgttaaaggacctcggacttccaaaataaattggtgggcattattgatgttttatttctctgaagcctaccaactccatttcctgattcttcataggactttttgacatattgcttcaaactcttagatcaatgacatattaatccctagatttaaaagaattattgctatattaggcagtatgcatttagttgcaagtaataattttttaaaaggagctgatcaaaagggaatatttattataaggatacagtcatagtgggcagcaatatacttaggcctctggaatgacctgagagagaggactggacagaagtcttctctctgtccttgtgtttcttatctgaattcatttgattaatcagtatcttgatcaaaaataaacagcttactctaactgagtaatttgggcagaataaagagacatcttatacagacaaggtatagcacagctccctggcataaggaagaccaaggagtcatttccacatctaggtctggaggagaaggagcagaacagaaaacgcacagaggaaaactgcatgggaaggacaccagcaggttagcgctgcccctgtatctcagaactagcagcaggaatactccttaagmtgccattttttggacctttcttccattgtctcatatctctttctaaccagagctgggaaaagttctccacttttcagggttcatatgatttgactgaacacacttagatgacccaagataatctctccatctcaatatcatgtattcctttgggttctgtaaaatgcaaattgtcctggaatacccaatgcttgaagcacttttt

SEQ ID NO: 548756 - DNA, 871 bp, Homo sapiens
catataactgctatcctaatgtttatgttgttagatcaaaaaaatgaataagtatgttaaaggacctcggacttccaaaataaattggtgggcattattgatgttttatttctctgaagcctaccaactccatttcctgattcttcataggactttttgacatattgcttcaaactcttagatcaatgacatattaatccctagatttaaaagaattattgctatattaggcagtatgcatttagttgcaagtaataattttttaaaaggagctgatcaaaagggaatatttattataaggatacagtcatagtgggcagcaatatacttaggcctctggaatgacctgagagagaggactggacagaagtcttctctctgtccttgtgtttcttatctgaattcatttgattaatcagtatcttgatcaaaaataaacagcttactctaactgagtaatttgggcagaataaagagacatcttatacagacaaggtatagcacagctccctggcataaggaagaccaaggagtcatttccacatctaggtctggaggagaaggagcagaacagaaaacgcacagaggaaaactgcatgggaaggacaccagcaggttagcgctgcccctgtatctcagaactagcagcaggaatactccttaagatgccattttttggacctttcttccrttgtctcatatctctttctaaccagagctgggaaaagttctccacttttcagggttcatatgatttgactgaacacacttagatgacccaagataatctctccatctcaatatcatgtattcctttgggttctgtaaaatgcaaattgtcctggaatacccaatgcttgaagcacttttt

SEQ ID NO: 548757 - DNA, 583 bp, Homo sapiens
aagaaagagtaaatattattctccattcaatattagagctgaactatggggtctttttgatactttttgcttacactctgtgattcaggggacacatggcaaaggtaaacagacagaaacagcaccgtggatattggtgagctgtgcttggaagggtcacagtgattctataataactctcaggtctttattctataatgaaaaattactcttttccatcataaaggtaaagcagagtatgtacaagtagagtgtgaaataactttgtcactcatgatgaacctacttggtccaatactttaacgacttctccaatgtctctgtactcaggtttgatttcctgagtggctcattggtagaatgaataaaatcaagactcctctaaaggaatgtttggaactaaatttcagtgtctccggaagcactggtaaaataaccatgtgtagcgaacrtgcagtatcaattggctctgtctgtgtctttggaactgcccatatgatcattacaaatggaggcttgaggaaaggtggttttggaattggtttctctctagtcttacacgatgcaccaatactgtattgca

SEQ ID NO: 548758 - DNA, 583 bp, Homo sapiens
aagaaagagtaaatattattctccattcaatattagagctgaactatggggtctttttgatactttttgcttacactctgtgattcaggggacacatggcaaaggtaaacagacagaaacagcaccgtggatattggtgagctgtgcttggaagggtcacagtgattctataataactctcaggtctttattctataatgaaaaattactcttttccatcataaaggtaaagcagagtatgtacaagtagagtgtgaaataactttgtcactcatgatgaacctacttggtccaatactttaacgacttctccaatgtctctgtactcaggtttgatttcctgagtggctcattggtagaatgaataaaatcaagactcctctaaaggaatgtttggaactaaatttcagtgtctccggaagcactggtaaaataaccatgtgtagcgaacgtgcagtatcaattggctctgtctgtgtctttggaactgcccatatgatcattacaaatggaggcttgaggaaaggtggttttggaattggtttctctctagtcttacacgatgcaccwatactgtattgca

SEQ ID NO: 548759 - DNA, 724 bp, Homo sapiens
taaaaatacaaaaattagtcgggcgtggtggtgggtgcctgtaatcccagccactcaggaggctgaggcatgagaatcacttgaaccgaggaggcagaggttacagtgagccgagatcgcaccactacactccagcctgggtgccagagcaagactccatttcaaataaaaataaaaataaaaataaaaatgctttaggggactcggatgaaattgaaaatgccctttttgactttgaacagacttggtgacttgttaagaaatctttgaagctttaaagttatggtaaaaataaaaatccatcttccttttcctgcataagttattcagaataggctgttttgacaagaaaggctccccagatttccagagggaagggtccaagctgccagtgttcacccagcaccaggactcatgccctgcccccaggagacctccccaggtctgcacccctcaactccrtgctgacttggtagagcaggagaccagggttcctgaggggccaaggcctccccgcaggtcctcgcctgcctagtaacatccacctccaatggacccagtctgccccagatccccccagcccaggtagaaaggagccccaggtcctcactggctccctcggtggccttctcggtgcggtgggccaggccctcggcagccagctttcccaggcctcccaacatcgtgtggcagcagacagtggtgaactaggaggctgaggact

SEQ ID NO: 548760 - DNA, 557 bp, Homo sapiens
tgtacttggggaacagcacgccttagctcagacagcctcataggagagctggccagaagccatatttagacgactcctcacaccctttttgggaacaaggcagaataaataagtaataaaaaaagaagctagataaacatccttttctgacacaggagctaataacacaaatgaagtgccccttcctgcagggttatagatcttcaaattaaagatcgttcctgtaccctgcaccacccttcagccactctaattaatcaattcacagctttccgtcgctttagtttctcatgttttcaagtcaggccacctcccttcccccaatctctttttcatcatctctgtttccctgggaagtgctccaaagcacttcctgtttcttgatctgggtggccacagattttctagaaagttctgtggctggtgaggaaagaacatggctatcagaggaaaatgcagagcgcttacgcaggccagcagtgaaggcggctctacagctgaaatggccmagtcacaggtttttcaactcaaaagggcagttactggaagtcaggtag

SEQ ID NO: 548761 - DNA, 491 bp, Homo sapiens
tccattacacaaaacctagaatagttgatactaaaaagtaacaacatcaaatgttgacagctacgtggaatactcctgcctaatagtagtttctacaataatgaaaaggtctgtatctgtgttgtctaataaagtagccactggctacctgtgggtatcgagcacttgcaatgtgtctagtgtgactgaggaactacacttttaatattatttgattaaaagcaatttaaatttaaatagcttatatgtaaacagttgaacaactagaattacamtttatatataaaaatcagaaattatttaaactaaatgactctagtgagtttctgatctttttaaataaaatacccctagatatgtactcaatgttaatacaaatgtaagtttacaaaaagaccaagaagacttgaaccagaatgcttgtaacaactttatgcataataatttcaaagaaccagaaagaacaaatccctgccaaatggtaaacagct

SEQ ID NO: 548762 - DNA, 509 bp, Homo sapiens
cagttaactttaaccaaagagaatgactgtcctactccacgccctttctgaaaaagaagcaattctgatatcctagaattccaataaagtggccrtctcagataccctgccagccaagtcatgttcccaaacacagcctcatacagcaaacccacctgggtgacgcagaagtagctctggaggtacagacatcagggggtctgcctgaccagcagagacttttgagcaggttattaaagtttttaacctctctttttgcttccataaaatggagataatacgttttatacatgatctaagagctaaataagattatctctgaaaaggcactttataagctgtgaagcgttaaggcatcatgtcatatctatatgataggtgtgatatagtgtatcatacatagagagacattatatatagttacataaaatcgatacataatattagaaacatgtataattatattaaggtttgcttactgttaatatttacatggcaagtattaatca

SEQ ID NO: 548763 - DNA, 509 bp, Homo sapiens
cagttaactttaaccaaagagaatgactgtcctactccacgccctttctgaaaaagaagcaattctgatatcctagaattccaataaagtggccgtctcagataccctgccagccaagtcatgttcccaaacacagcctcatacagcaaacccacctgggtgaygcagaagtagctctggaggtacagacatcagggggtctgcctgaccagcagagacttttgagcaggttattaaagtttttaacctctctttttgcttccataaaatggagataatacgttttatacatgatctaagagctaaataagattatctctgaaaaggcactttataagctgtgaagcgttaaggcatcatgtcatatctatatgataggtgtgatatagtgtatcatacatagagagacattatatatagttacataaaatcgatacataatattagaaacatgtataattatattaaggtttgcttactgttaatatttacatggcaagtattaatca

SEQ ID NO: 548764 - DNA, 382 bp, Homo sapiens
gccatgcaactggaaaaaaaaatgtagtgagacattagattctgcatttcaccttaccagtgacaaattatggtgattattggaaataatctttatttaaataataaacaaccttctattttaaaatttgttctcagttgcacctctcttttttttctactatcttcatcaagaaaaacaagcattgttctyttttcttccaaatatctataatatgctaattatttggaaattgcatcattattgttactgcagaagcacaaaggcctttcacatgcgtggcctcaggagtgatcttcaacccatactccagcacccaccatcaccctttttttttcttcactttgccaaagggactaatttttctttatttctgcattag

SEQ ID NO: 548765 - DNA, 537 bp, Homo sapiens
tatggacctagagagaggagggctgttcccagatcaaaaattgagtcactgttattcagaatcatgttttaaattaatatttctcagctaggttggtagggaagaaagtgtgtaaggatcttagaaatgggaagaagaattttatgataataagtaggggatatggaaagaagggggaacatgtattaaataaaactgagaactacwatttgaaatatattactgtctctgataaggatataatctatgctatttctatatccaaatgtccacacaacatatatatgtcattttctgatccaactttataaaaaataataggaacctttctatttactatcaacctacttgttcctgaagaaagagaagctgtctgagttcattccccacccagtctagcttttattagagctgtccatgataaacatgcctagtagaaataaatcattcatcacacaataagtagtatgagatagtggaatctatgtagaagtgtgggtgtaaatattatatgttactacttactctgacatttcc

SEQ ID NO: 548766 - DNA, 537 bp, Homo sapiens
tatggacctagagagaggagggctgttcccagatcaaaaattgagtcactgttattcagaatcatgttttaaattaatatttctcagctaggttggtagggaagaaagtgtgtaaggatcttagaaatgggaagaagaattttatgataataagtaggggatatggaaagaagggggaacatgtattaaataaaactgagaactactatttgaaatatattactgtctctgataaggatataatctatgctatttctatatccaaatgtccacacaacatatatatgtcattttctgatccaactttataaaaaataataggaacctttctatttactatcaacctacttgttcctgaagaaagagaagctgtctgagttcattccccacccagtctagcttttattagagctgtccatgataaacatgcctagtmgaaataaatcattcatcacacaataagtagtatgagatagtggaatctatgtagaagtgtgggtgtaaatattatatgttactacttactctgacatttcc

SEQ ID NO: 548767 - DNA, 559 bp, Homo sapiens
ccaggtctggctgggtcatgtgtccatcccaatgattgggagtagaaattactagaagttactagaagaagggtaatggaggaagatgtgctgggcttctgaagacattagtcactatggtccactatggatggtgtggggtggattcaacataaagtgggaagatgtctgtatcacttctaaggtactttgacacacagtaaggatgttaaragcacttgttgaaggaatgtataaagattcattcctgtgtctctgttttatgattttagtctgtcttgttaataccttgcagttgactttgccatggtaggttttttttctgaccagcacaggagctcttttgcttgtgtgctgtgggagggacaccttgaggtgccctctggctactggccacctcactccacacctctcaaataaggcaccttttggagaagacatttccatgttgggacactgtggatagtaatttagaattaccagatggtgattaaatccttcttgcttattgtcgtgattccctgagcctgtctgccaccccttccttcccaagtgttct

SEQ ID NO: 548768 - DNA, 519 bp, Homo sapiens
tgtagtcaatgcccatttccaggccccgccacaggcaacctttcatctactttgtctttctagatttgcctttaatgactatttcgtatattcagatggaaacatatgatatgcggccttttgtgtcaggcttctttcacttagcatgttttcacagttcatccatgttgtagcatgaatcaggatttcattccttttatgaccaaataatattcagttgtatggctataccacattttgtttaagcatttatgcagaacacttttgacaaataaaagtttattttatgctctaatgtgtgatgcggatgacagcaaaactgttgattgagaatgggagctgggacctgacccagacacgtgtcaaacgactgcactccccaggcaccccgtataatcaagagttggtcctttctatataaaaagggaaaawtccaatgcagagcttgcggaacctttgaagcacctagggaagaagtgggagctcttctagtcaggaggttaacaagaactaggaagg

SEQ ID NO: 548769 - DNA, 986 bp, Homo sapiens
gggagtaggaattatcttcaccttaatggggagctttactgttgaagtctgttctgcaccattttttgactaaaaaaaaagaaaagaaacttgaaacgccctcattgtgcagaaagaaactttcaggtttgaaaacatcatttctatttatcaacttaacctaaataatttgaacacaagaatttccaataacaaatgtctgatgaaagattcatgtatcataactaagtccattcaaacacttaaagagtttaacagttaaaatttaaggcatattctatcaataaaaactactagagcctcataggattaaccctacatttccttttagagaatgtatatttttggtgcactccttttgagcttgaaatctggtagaaaacagtcttctctgctgttgtgtggccacagaacggcaagccctagcactcactgactgagctacttcttcaaactccagctgctccggaggccctggaaccatcaattgtggccatcgaggataagcctatctgtcaactgtacttccaatggagaccccaggcatttggcctgtccctccctgaaaggtgatgtcaaacagctaagaaaacaagccactttcccgcatatccctacctctgtctctgctggggaagccacagtgatcatgacatggccctgagcaatgccttcccaggaagccgctttcttggtcacagaaatggagatggccaggtagcccgaccaaggccataagaccgaggagtaggagaaggcaacttcaatgttgtctccgttctgtggcaaatagggctgcccagtcaggctgcaggaaaaagaaatcagacaaaggctaaagtgaaaagctccaggagaaaacacgtggaaaccagaaaaactcaattcttaccaaaactggttcygagaaatacttcactaaatagggaaaaataaaatttatacacagatactaagtaactacaaccaaagtagcctatggactg

SEQ ID NO: 548770 - DNA, 2243 bp, Homo sapiens
ggatgctttacacaaatccagggcataagacaaggtgaagctatgtgaagttcatgtttgcatatcagaaaacgtgaatattggcattcataggactctagcctaatagttgagtaaatgatcgtgaaccttgttagaggtccagggttctggattttgctgtcgcatcagtgatacgtatcatgagccatagatgtaagtggcatgaacataccctcgctatagctctgccatgacaaacaccagttattaagtcatctcgtcaggtgttcttgtctcccttttaaatgttcctcccatttctgatgtccccactcaaggctggcactcatcggttcagagtcaccaggtgtcagtgtttcctagcctgttttccaatcttgagtcttttcccaccccagctcttccagcatggacatgggtgaaactaggtgtggaagcagacaggtccgacctgccacttacggctgaggcaccgtcacttctctgagcctcagctccctcacctgtgatgggagtagagagcagcctgcagagtacctatgagactgaaatcagacagcagggggagagcaccatgaatgctgatgatgctctttgaatggaagctgctctttttcttttttgtgcgtatttctactgttcaaacatatattgtagcagttttctaatcaagaatctgcagcagtttattattgcctaatagatgaaatccacatttttcttttgtttttcaaggtcttcagtattctaggctgaattgcaaactttttctgtaaagggtcagataataaatattttaggcgttattgtgtgaaagcagctgcgggtgatatatgtgtaaatgaacatgactgtgttccaggaacgctgtatttgcaaaaacaggtgtgggcctggtttggcccatgggccgtagttggccaactccagccacaatctcagttcaccttgatcttccacttccccatgtacaccttcctggaatgagtgtcctccttctgtttctctcaggtcttccgaacccmatccctctgcccatcctcctggcaatacctgtctggattcccagctctttcgcatgctgttcggactgttttgtcacacgctggctgccgttctgaaaccctgtggcttttgtgggtggttgcactccgtagcttcttaccagagttgtgagtttatggtgtgttgaaggagcagagccttgccaggaaggccccatctccaccttgtgtgtacgctcatgctgcctcacacagacctggccacctgctggctgttgaagtgacagaacgtggcatgtgatcacggcagcccagcttgtggtgggtgtggttttttctgcttgggcatctggtgggactgcttccagggctggtctgaggacagtaacatgcatacgtcagcccctctgggaatgaggcacacatcctccggtcccctttgctgtggtctctttgtctgggtcctgtgcccttggtgctcctagactctgtggtgccagcaagcctgcagcctcacgtccctccttttcaataccagcaatgatttcttgatgcgttcccttattttttaagggtttaaagtacactaagcattatagggcttagcaggtagaggagggtgggaaggtggtatttttttggtcaacttcagtgggagtttctgtcagtgacttctgtaccagcctctgctccttgagttcctgggaatgtgtaaacatctagcatcagtcatcagaaaatcattattcgttcctctgaatgaccagctggtaggatattggtggccagtgggctgaggaggcagtaccactttttctcggtgtgttgggaattgtcagttaaaaacacactctagaaggagaacttcatgctgctattatctcttaagccacttggaatcagttgtatgtagttgttgatttgtcaaagagttcattttttttggtagtggagccataataaagcttagcaatgcagttttataactgagtgtctcatattttcaaatggttcatctttatcttgactttacggtttacacatttttgccattatttatttcactataatttctttgcagatctagtgcacttaaggtattggagagactctaaggagctcaagattacagagtaatgatagtccttctacagttccctatgaggagggtagaacaccaccacaggtcaatcgaaaacttaccacttcctgaccttggcagatgtaaatgtgtgg

SEQ ID NO: 548771 - DNA, 519 bp, Homo sapiens
tctggctaattatttgtatttttagtagagacaggatttcaccatgttggtcaagctggtcttgaactcctgatctgaaatgrtccacctgcctgagtctcccaaagttctgggtttacaggcatgagccactacgcctggcttatattcttatctttatgctcacttgtcttttgccatagattttatgttgcacatgtaagacaaatcttatcttgcattacttctttagtcttctcaatgtgatttgaaattagtttcatgagggaaatttagaaattgcttaggttacatcagtaacacatttacacatgacttttagtggcagaaagcttctacacatgactaatcacatatgccatgctgattttattaacttcaatttcagattgtgtttctagtttgggaatataaaccatgacataaattttattagtaggatacatcatgataagattgtgtggttgcaacctttgtttactaggtttaaatgtcaaaaatatcagaataaaatttatt

SEQ ID NO: 548772 - DNA, 330 bp, Homo sapiens
ctccagcctgggtgacagtgggagactctgtctcaaaaaaaacaaaaaacagaaaacattcataaacgtctccaacaaatacagagtgaactcgttgtgtgcctaagattctgagagttacaaaggatggggaagacctggtctcagacatcatggagctccataggctaagtatgggtgaggatatagggacaggcttccaygttcacttacagaatctctactagtctcaccggtaagtgctaagtgctagataggtatattaatggaacacatagaatcatttgaagggagcatctacattattgcaaatacagtgattcttgtata

SEQ ID NO: 548773 - DNA, 1225 bp, Homo sapiens
gggaaaggaagatctgaaacagtagctgttatggaccagcaacaacagtaacaaaaacttgtcactaagagctcagatgaggatggaagaactggtccttacatagtgtccaaatggctcaagatttccaacccttcttagaagctcaggaataggcatagaggtaagggattcctctattaatccagagctctgggctatatcaaacaggatacagtggagaactatagatatgggcttccaaattcacagttcttgtacaaggctgtttcagatagctgaycctaaaatctgagagtgggaaggaaggacatcaaggccagctgggatgtgataggctggggaataggttggggacaatggggctcaaaatgctagtaaaatcaagttcagtagaagcaaatgaatagatggggtgaaaggaagaagaattcaaagacagggaagaatatttaagggacttagtacatatgatgatcctgtatttcttatagaaataatgctggagagcctggaaaagctgccactattcttttataattcctgtgtcaactactgtaggttctcacattgtgaagttgcagaatcttcatttaacaacacaattgcagtcagtgctataaatttacaagttgctgtaggtgccccattggtacagaacatctgttaacctgcttcaacttccacgggatgtgcaaagaattaatttctcatttcagcccttctccttaagcctttatttactcagattcacccgagagtgaagttcagatttccagcagagtgtcaaggtgagaggccctagaagttactgcatctttatcaataaagaatatgcatgcagaggattatgggaaatatgaaaagctcagctgcaatgtaaaccttgtagctaattgtcatttaaatcatggcgttgatgaataacatcccaggaataaaatgagcattcaccctgacaaatagttcctcaaaaattatctaacacaatttcggcatattgctatttgtcaaattattcctttgccagatgcttacacagaatctgttgcccattgccaaatggcctagctgtacattttctcattagatagaattgatattctatgcagagaatgtatcaaatataattaagaacaaagagatttgtatttgcattttccatctacaaaaccactacatacctcctctcacctggtggttcaagcccatatatatgccatcc

SEQ ID NO: 548774 - DNA, 645 bp, Homo sapiens
taatcaggaacaatgcaagccacaagacaatgaagtgccatatctaatgtattaaagggggaaaaatgacagcctaggcttctatacccaacaaaaactattttactaaaaaatagaaataggacttttagaaatataatgtaaaccatcacattatcatgtataggttaatttcacctgtggttttagtcatttcatggctacagaaagatagataccacctatgtatatgttaccttgcctggatcatgttgctcggacttcgaatgatataaagagaagctaaagttatgatggtcttcgaaatacctcattcatatatgtaacaaagtacatacgcataatcctaaaatgagattagatgtaaaattcagcagtgatcagatattactcagatctaaaatrattatgtccctgattattaattctataatttagcagctatttcatcaacccttcttcttggtgaatgaatatcttagagagaggtctctgcatgttttttaatgttctcctcttgcatggcaggaagcccatgggcttttagatgacacaagtgaattcaacaggcatcttagggagaagtagtttaaatgataaatggcacatttatagctaatgtttggtaagtattttaatgttcca

SEQ ID NO: 548775 - DNA, 548 bp, Homo sapiens
caatatggggacgtggtatgcaccctgcagagaaaagcagaggatcatcctagcccagccttgccaccaacttgccaaggggacctgggccagcactggcccaccctggactcactttatcctttggtaatagaaggggctggaggggtttctgaggtctcttccagccctacatgcctttaaccaggagaacaacatgaaactcaaaactctgcatttagaatttaattgtccatggayacagtaaagtctacataggtatcttctctctggtttataatttttttttaagtaattaaatccttaattcaggagaaaagaattgggacaactgggtctaaagtgtgtagcttccgcatctttacatctgcctgtggtcctagtcgtggaatatttgccaaacagtaaccactttgttgagggcattttaccaggtaatgatgtttaaagtgcagcatagtggctttcaaatatgaatactaaaacatttaaaatatgcacacatgacatatagttctagaaaatttcaaggaaaggagggttctata

SEQ ID NO: 548776 - DNA, 347 bp, Homo sapiens
aatttctgcatttaagtttcttgaccctcttccagagagatgattgtttcactaaccaattgttaattaatgggggaaactttatttcacttcttacctaaaaaatgacaatatgtttctgattatagtcttttgctagtaaacatatttttattttttatcttcttttactatctttatggaaatgctgggtcaattctttttaattattcattactgaaaaaattyggtttatctgttcaacttccctacataatatttctctgtgctactgacggtccattacatcttgcctaatagattcattttcacaactcaaaggacctcttttttgtcagaggccacaa

SEQ ID NO: 548777 - DNA, 570 bp, Homo sapiens
gtaatataatttatttgattgtaagcttatacctaatgtaatttaaattacagtaatgccagagtttaccaactggatcacaaaacttctgaaattttagcaattggctcttgcaagccggtacaagccatytccagttaaccattaaaaatgtggatgtcattgcacatgtgcctactcatgtcatagtacagagaggtttttttgtgcccaaattgttgacagcaaatgtgaattcattgggaacaatcatgaaggtagtgggcaaattatctggaatatatttgtaaacagtctactgatattacaagtcttggtgaggttcaatcagctatagtcttattttccttttttttttttctttagacagggtctcccttgattgtccaggctggagtccagtggcacagtcacagcttactgcagcctcaatctctgggacccaagcaatcctcccacctcagcctcctgagtagctgggaccacaggcatgtactaccacatctggttaatgtttgtttgttttgtagagagagggtcttgctatgttgcccaggctggttttaaact

SEQ ID NO: 548778 - DNA, 570 bp, Homo sapiens
gtaatataatttatttgattgtaagcttatacctaatgtaatttaaattacagtaatgccagagtttaccaactggatcacaaaacttctgaaattttagcaattggctcttgcaagccggtacaagccatttccagttaaccattaaaaatgtggatgtcattgcacatgtgcctactcatgtcatartacagagaggtttttttgtgcccaaattgttgacagcaaatgtgaattcattgggaacaatcatgaaggtagtgggcaaattatctggaatatatttgtaaacagtctactgatattacaagtcttggtgaggttcaatcagctatagtcttattttccttttttttttttctttagacagggtctcccttgattgtccaggctggagtccagtggcacagtcacagcttactgcagcctcaatctctgggacccaagcaatcctcccacctcagcctcctgagtagctgggaccacaggcatgtactaccacatctggttaatgtttgtttgttttgtagagagagggtcttgctatgttgcccaggctggttttaaact

SEQ ID NO: 548779 - DNA, 525 bp, Homo sapiens
tttttcaaccatttagtatactcaggcatttcattcaataaagaaaatactgtaaaagaagacaagctgccttgcataccctactgttatgacacttgtgcattctatatataaggacaaaaaccttaaatttaatgatataacaaaattaaactrtaaacttctgtaaaagatttactaagatggtcatttgttgtttatttgactacccagcatccaagaaatattcttttgaagggaaattgacaatgtaagaaatgtggtaagaggcagggctgaagaaatatcagcaaatagaaaataataaagattaaagcataatttaacagtggaaaaaaagtagaatttgtttgtccaaaaacagtttctttagaaaagctaacagcaaaccatacttagcgttactttgccttactgttagcatcttcttataatttctacttttgcaataacatatatacatacatgcatatatatacatacacatattatattatatatacacacacacacagaaaccatgtg

SEQ ID NO: 548780 - DNA, 1024 bp, Homo sapiens
gctttctctggaagggcagtcaggggaggtgacttttggccagagcccaraagaaaataaaggaatgttctaagcaaagaaaatcctgtgggggaagaatggtccattccgggagaaccgaatcacaaaggtcctggggaaggaggggcgtcgcagtgtgtgaagagcctcaaagagcccaaaggtgttgtgtggagtgaagtgagccacgtggacagtgggaggaatgaggtcagagacgggcggaggctgccctaaggactctccctgttgttctgagacataaacctctgaagggtcccagcaagggagtggcatgggcagatttacatcttgcaagactcactctggctgcagggcagagaatggctgtaaggtccagatagggggagaccatttgggagctattgcaagttataagaaaatccccaaacccaacttctaggggtaagtcaggacagagattatctaacaggaaaggaagagagtaaagctctagaactgtagaactgcctggttatgtcaactagcagctacattttaaaaattagggtttttttttttttataccttgtgataaaaatgtctaactataacagaagcttataactaaaataaagggtcccccttctagtctcactccccccaggacacctgtatttaacagtttcttaggaattcttgcagaatctttccatgtatttataagcactgttcttctcctgcacgcataggattgcagtatatacttcactgtttgtacgtggtgttttcatttataatacagaattggcctatttctctataagcacacaagaacccacatccctgatgttaaaggttatcagtatggcacagtggggtaccattatgtatttaacttgtccccattagtggacatggagctaatgtccaaattctttgctgtcttagacaatgggataatctctatatatttttgtgcacttgtatagacatgtttgtgggctaaattcctacaagtggaatggggggttttgggcat

SEQ ID NO: 548781 - DNA, 650 bp, Homo sapiens
ggtatttggattcctgactctttatcctccaaataaccattgcatttgcttagaatgctttcccgtcacatgagcctgtcctttgctctttagatgagaacaatatgagtgaatgtataaggaagttttcatgacatacatacatagctatggattcagcccctgggcaacagggctcttacttaacggcctgttgcttaaagtgggctcactgtgattgagcaaaccggaagtggctgcaaagttttttagagcattgtcacaaccaatgggtcttcaactttggagtgcatcagagtcacctggaagactattacagcacagattcctgggccctgacccaaagactctgacctggtargtctgtggtggggcctgggaatctgcatttctaataagttcccaggtgatgttgaagctgctggctcagagacctctgctttgagaaccggtgattgcatgcatcatttcagccaatcctccccacgttcttattgtttataacactttccatttacaaatgagctaaatgagcctcagggaggttgtcctccctctagaccagttattttcagaaacctttataaaccactgatgggtaagttcattcactagcagaatttagatggaaaaaacatagtaacaaaaca

SEQ ID NO: 548782 - DNA, 562 bp, Homo sapiens
caggacttctcaatcctcgatacctgtgaacagctggttgctacaacttagaggatatttcacctaatggacagtatctttaattgaaaagtgaaggatgaaagtagagtatttttggagagagggaggtcagaaatttgaacacgtagagccagttgaattttacatgcctattagacacccagtagagataccgcgcgtgtagttgtatttgagtctggatttcaggagcaagttgtagtgctgaagtataatggtgagaattcttatagtgtgaatcatttaaaattctaagacagcatggcatcgcctaaatagatagtatactgaagagaagagagtctaggattaagctttggggttccgaaatatttagaggtgggaagggagaggaraaaaacaaaaaagagaaggaaaatgagtctctagtaacagggtaagaaatccaggtgtctggggacccaagaagctttccgtgcaggagggagtaaacaactgtgtcgcatgctgctgagacattaatgccaaagtgtagcaaacactggtgaccttaatgatagta

SEQ ID NO: 548783 - DNA, 1143 bp, Homo sapiens
gcctcaagtcatttccaaggtgaatttagtatttaagatgacacaaaatggaaaaataaaggaaagatagaaagataggggtacttagtgttgatatctccaaattattcctatatgactcaccattatctgaggttgtgctgcagagacttcctttctccccctcccaccttacctcttatttctctttcccaagaattgcgatggaaacctacatccgccagaggcagctcatcatgtcgcctttgataacatcacacgtgattggggagaatgagccactcacttcagtcttgaataaagtgattgcagcaaaggaagtgaatcacaaagggcaaggtacagtccagtgccagagctgggagggactctgctgagggtgggggacattcacagctgggtccttggactcctgccctttattatctttctctgatacaaaacagcctctgctggggaccgtccccctcagcttccaaccacaggcttttaatactgaactgcattgagatgcacccagcggtgatttgatcacagttgtgttttgtaaattctttggaacaaatttttatcccatgagtctttactctttattcatttatttatttatttatttttgagactgtctcatgttgtcacccaggctggagtgcaattgcatggtcttggctcactgtagcctccacttcctgggctcaagcatcctcctacctcagccttccaagtagctgggactacagacatgtaccaccatgctcagctaacttttaarttttttgtagagatggagtctcactatattgcccaggctggtctcaacttctggccttaagtgatcctcccaccttggcctcccaaatccctggaactttaggtatgagccaccgcccctggcctccatgtttttgcctacccttcattcccaatgtcgaccctagataataattatgctctattctgaataagtttatcccatcacattttttaaaattgagaggaaggaaaccaaagtaatacagatgaatatgtattaatacaaaataatgtaaaaattgtagtttttagtatctccatatcatgttctgttgatagagtgtgttggtgcacacctgtaatcccagctactgggaaggctaaggcatg

SEQ ID NO: 548784 - DNA, 598 bp, Homo sapiens
tgcacaacgtgcaggtttgttacatatgtatacatgtgccatgttggtttgctgcacccattcactcgtcatttacattaggtatatctcctaatgctatccctttcccttccccgcaccccacaacaggccccggtgtgtggtgttcccctttgctgtttagccttgatctgcacacaatgaaaactgaatgggttttgttttcatgtcaaaataaattgactaatcccttagatgcccaagatttctgctgtgtgctttctagaaagcctaagacatggttcctgtcctcaagaaacttacaacctcgttacagagaacacatctaaagcagttaaacagccctagcagtctgcaagcatgtatcagattatcaaataatacggttttaaccatcaaaatgagtggttttttttccctttagcctgcactttggtactctacttagccttcctaacccctgaagggaattgccatgtgcagtatctctattagctgttatctytctgaaatataatgtttacatgactgcattttttcaagactgtgaactcttcagaggcacaggccagtgtattcgtttttgtattcaagcccc

SEQ ID NO: 548785 - DNA, 546 bp, Homo sapiens
cagagcgaacttgagcatattttgatttcttttgatctttatttttatctctagaataaagattatcacaatagttacttcatagaaatttgtgatggtaatcaatrtaaaatactaagcatattgtctggctgatactaactgtctaatatatacataatattattattacaatcatattttaaagatagctggtgtttaggaaaactgcatacaattacaacatagaattttcaaaaatattttatgaagattattttcagaagataacttagcagtcttctagtctagtcatttaaaggttgagagaattaaggtttccataagttacataacatacttaaggtcgtgcaaaggcagaaggagagccacagttttctttaccaggtaaaggtctatgttattaaaactagaaaggaagcacctgtgttttgtgtgctcgtgagaaggaaacttacaccccatgcccttgtgattcacacgttcactttgccttgagacaactaggactaataatgtcattccctctagcactgcgtataacag

SEQ ID NO: 548786 - DNA, 531 bp, Homo sapiens
tcacatctatagttttagacattatgcatcattttctgttctgcttctgaatgagaagccacagcctcccaagtagctaggattacaggcacaccatgcctagctaatttttgtatttgtagtagagacrggatttcgccatgttggccaggctggtcttgaacttgcaacctcaggtgatctgcccacttcggcctcccaaagtgctgggattacagcacttttcctacccagtaggaaagatgtctgggctggatctctaaattttagagacatatggtttgaacattaagacatgagaatgaaaaagatgatcgaggtagattgtatggaataaaaagtgatttaaagatgcaattccaacatttaaggtatctgtcagttaaggaaaagttgcttatggaagagcctgaaaagaagtatccagagaagaggaatgtcaagaaagaaaaaagtcagcaaaagaaaaggagaaattaaaaagaagaagaagaagaagaagagtcaatggtatgcaatgctacaatgaca

SEQ ID NO: 548787 - DNA, 531 bp, Homo sapiens
tcacatctatagttttagacattatgcatcattttctgttctgcttctgaatgagaagccacagcctcccaagtagctaggattacaggcacaccatgcctagctaatttttgtatttgtagtagagacgggatttcgccatgttggccaggctggtcttgaacttgcaacctcaggtgatctgcccacttcggcctcccaaagtgctgggattacagcacttttcctacccagtaggaaagatgtctgggctggatctctaaattttagagacatatggtttgaacattaagacatgagaatgaaaaagatgatcgaggtagattgtatggaataaaaagtgatttaaagatgcaattccaacatttaargtatctgtcagttaaggaaaagttgcttatggaagagcctgaaaagaagtatccagagaagaggaatgtcaagaaagaaaaaagtcagcaaaagaaaaggagaaattaaaaagaagaagaagaagaagaagagtcaatggtatgcaatgctacaatgaca

SEQ ID NO: 548788 - DNA, 532 bp, Homo sapiens
gtatttctttatagcaatgcaaaaacaacctcatacgtgagtgtaacaattaataggagtaaagaaagtaatagtaggtaactttgtaattgagaaggcataaattgagggaattgtttgatggtttctttcctctgtgaagtaatgtkcaggttgtctgctgagggcaaaggtaaaaggctacaggagggtgactaaaggcacagccattgtcgcaaatgtggaggaagctgattgaaatacacagaagtcattccagggagtgctgataattactctaagactagaaaccatgcatgcctaatagcacctaggtcagtgcaggaaaaagtgagagagttttaaaattggaaacaggatatcaattgaataaagaatttaaacaaacaggagggggctttaacttgagaggaaatagaggcaacaactaagaaaatttctctcccagccaataactaatgtgcagaataaaataaaggagctgagagcatggaaagttgtggtcagagtggcatgttaaatacaacagaag

SEQ ID NO: 548789 - DNA, 532 bp, Homo sapiens
gtatttctttatagcaatgcaaaaacaacctcatacgtgagtgtaacaattaataggagtaaagaaagtaatagtaggtaactttgtaattgagaaggcataaattgagggaattgtttgatggtttctttcctctgtgaagtaatgtgcaggttgtctgctgagggcaaaggtaaaaggctacaggagggtgactaaaggcacagccattgtcrcaaatgtggaggaagctgattgaaatacacagaagtcattccagggagtgctgataattactctaagactagaaaccatgcatgcctaatagcacctaggtcagtgcaggaaaaagtgagagagttttaaaattggaaacaggatatcaattgaataaagaatttaaacaaacaggagggggctttaacttgagaggaaatagaggcaacaactaagaaaatttctctcccagccaataactaatgtgcagaataaaataaaggagctgagagcatggaaagttgtggtcagagtggcatgttaaatacaacagaag

SEQ ID NO: 548790 - DNA, 532 bp, Homo sapiens
gtatttctttatagcaatgcaaaaacaacctcatacgtgagtgtaacaattaataggagtaaagaaagtaatagtaggtaactttgtaattgagaaggcataaattgagggaattgtttgatggtttctttcctctgtgaagtaatgtgcaggttgtctgctgagggcaaaggtaaaaggctacaggagggtgactaaaggcacagccattgtcgcaaatgtggaggaagctgattgaaatacacagaagtcattccagggagtgctgataattactctaagactagaaaccatgcatgcctaatagcacctaggtcagtgcaggaaaaagtgagagagttttaaaattggaaacaggatatcaattgaataaagaatttaaacaaacaggagggggctttaacttgagaggaaatagaggcaacaactaagaaaatttctctcccagccaataamtaatgtgcagaataaaataaaggagctgagagcatggaaagttgtggtcagagtggcatgttaaatacaacagaag

SEQ ID NO: 548791 - DNA, 1360 bp, Homo sapiens
taattttgagtagtttgataaaataaaatcatgttaacctacaatagggaaaataataaattgaaaataataacttgaaaattattttatacctgaaaattattttagcctctattttaaatgactagattttgttctggactaattcaaagaatggcttttgtcacatttagtttataaagacccagatacctattgagattattttgcctatgtgatttttttgaaataaaaattttattgaagtgtaagatacagaaagtgcacaaaacataaggtaaaagttaattaatactatttattttctaattattgctggtgtataaaaataactattaacgatgaccttttattctgtgctctcactaaattcacttattaatcctaatgatttactggtagcttcttttaaattttctatggacataatcatgtcatttgtgaataatgacatctttatttttcytttcctatacttaccccttttatttattactcttgtattattgtttggcaggggtaaacaaacagcatctttctctgaaaacatttatgtaagtatgtcttaacttttacctttaaataatattttcactggatatagaattacaggtttgctgttatttatttcattattttaaaagtgttaatccactctctcccatcatttcagttggaaaatcaactgtcttatttttactcattttaagataatgtgtctattattccttcgctttaagattttcttaattgtctttattttacaatcatgtgccttttgtgtggtttactttgcatttacccttcttgggtgctgtagtacttcttgaacttgaagcttgatgtcttttgtcaattttgaaaaatcttacgccatgaattctttcaatattgcttctctctcttattcccttctgaggctccaaccatacacatatattggcatttttattactgctccaagtatgtcttctgctgtttttctgcatcttaaatcctattttctccacgttgcagcttgaacactttctgcctcaatttagcaattctctcttcagctatgtctaatctgctattaattccatttatggaattttaaaaacatttatattatttaatataacacaagtacagaaaacttaagaaagtatacataatgtctatgaaatgaataatcttggaaaggactacacatatcaagagccactccagagctctatccatggtccctgcccaatcacaataccctctagcccctagtggtagtcaatattttgacttttatagtaatataaacttatgaaaattttttttagcatgaggacattatactaagtgaaataagccagccacaaaaaaa

SEQ ID NO: 548792 - DNA, 637 bp, Homo sapiens
tcttgatgatgccttggaaatggagagggcctgcggaagcagggagagactgacacgtgaacaagaaaaattaatcatttaatggaaacctcatttacaatttgcatctctccccttctttctctcttatgcctagaggaaagccatgattttaagtgcttccagtttcttttggctgggcctttattagagacttgagcccatatatcctaattagtgtggacacttttagaaattaaagcaatttatgtttctcttctcagttctcatatatttgaatttattttactaaacttartagttctccaaataaccatattatctaaatattcagaaatgaaatcttcagtcagtttagtgaaatatctaatataaaacagtatattaaaaaaatctgagttgtttaaaaggtttaaaaacacttcttaaagattcttgtcagtggttacagatgagaaatataattggcaaatgtgaaatttaatttagttcacttaacaaaatacaccgtaagcaatttaaaatttggctttcaagtaaaagtcacatttgtcccaaacaatagagaaacagaccttgaagaaagacaggcacactttgaaaatgctgtaaaataatttgtagttgtccatgttgg

SEQ ID NO: 548793 - DNA, 618 bp, Homo sapiens
acccccacacaaagatgcaaatcctggcagctggaaatctctggagcccaaagaagtggcagggtctgaggataccagagagatgtgaaagctatactctgtgtggttgttgtttcacttttaaaatagacctctgccatatggtggctcacgcctataatcccagaacgatgggaggctaaggcaggaggatcgtttgatgtcaggagttcaagaccagcctaggcaacagagtgaaacccctgtctctacaaaaaaatatttttttaattagctgggtgtggtggtgcacacctgtagtcctagctactcgggaggctgaggccggaggatcctttgagcccaggagtttgaggctgcagtgagccatgattgtgccattgcacttcagcctgggtgmcagagtgaggacctatctcaacaaataataataatataatataatagacctcacatgatggaagtaatcttgcctcttgatagccaggagaccttcagaagctgtgaacgagttgcatgagaaaaacgatggtggcctggactgaggtggaggcaaatgtaggtggagacaagacagcgtctcctttgggtgctgctggccagcagtggggagggaaa

SEQ ID NO: 548794 - DNA, 618 bp, Homo sapiens
acccccacacaaagatgcaaatcctggcagctggaaatctctggagcccaaagaagtggcagggtctgaggataccagagagatgtgaaagctatactctgtgtggttgttgtttcacttttaaaatagacctctgccatatggtggctcacgcctataatcccagaacgatgggaggctaaggcaggaggatcgtttgatgtcaggagttcaagaccagcctaggcaacagagtgaaacccctgtctctacaaaaaaatatttttttaattagctgggtgtggtggtgcacacctgtagtcctagctactcgggaggctgaggccggaggatcctttgagcccaggagtttgaggctgcagtgagccatgattgtgccattgcacttcagcctgggtgayagagtgaggacctatctcaacaaataataataatataatataatagacctcacatgatggaagtaatcttgcctcttgatagccaggagaccttcagaagctgtgaacgagttgcatgagaaaaacgatggtggcctggactgaggtggaggcaaatgtaggtggagacaagacagcgtctcctttgggtgctgctggccagcagtggggagggaaa

SEQ ID NO: 548795 - DNA, 618 bp, Homo sapiens
acccccacacaaagatgcaaatcctggcagctggaaatctctggagcccaaagaagtggcagggtctgaggataccagagagatgtgaaagctatactctgtgtggttgttgtttcacttttaaaatagacctctgccatatggtggctcacgcctataatcccagaacgatgggaggctaaggcaggaggatcgtttgatgtcaggagttcaagaccagcctaggcaacagagtgaaacccctgtctctacaaaaaaatatttttttaattagctgggtgtggtggtgcacacctgtagtcctagctactcgggaggctgaggccggaggatcctttgagcccaggagtttgaggctgcagtgagccatgattgtgccattgcacttcagcctgggtgacrgagtgaggacctatctcaacaaataataataatataatataatagacctcacatgatggaagtaatcttgcctcttgatagccaggagaccttcagaagctgtgaacgagttgcatgagaaaaacgatggtggcctggactgaggtggaggcaaatgtaggtggagacaagacagcgtctcctttgggtgctgctggccagcagtggggagggaaa

SEQ ID NO: 548796 - DNA, 624 bp, Homo sapiens
ccaccacgcctggcctcttttttcaatttctttttttgagacggggttggggggggtctcactctgtcacccatgctggagtacagtggcatgatctcagttcactgcaacctctgcctcctgggaccaagcaatcctcccacctacaggcacaccacacccggctaatttttgtattttttgtagagacacgagggttttaccacattgcccaggctggctgcaaaccccttttaaatgcacgttagtgtgaataattaaaaaactgctgagttcaaaatatgatcatatgtcatctttttatttgctattagtagataaagacagtttaacttagccttagttcaaaagtaccttctggagaaactaagttacttaggttttgttttgaagcagtttgaaaatcacattagaaataaatacagtaatccacctggacaacatgtcggtatcccatctccacaaaaaatacaaaaattaatcgggtggtggtgcacgcctgaggtcccagctactcggaggccgaggcgggaggatggtttgggcctgggaggtggaggctgcagagagcgrtgattgcgctactgcactccagcctggataagagggagaccccgtctaaaa

SEQ ID NO: 548797 - DNA, 664 bp, Homo sapiens
agaaatgcaaagaaatcacattttaacatagaaggatacaaagttaatacaaaacatgtcgacgtaaaggaatggtgtgtggcttgaaatgaaagagcaccgttgaaagagataaagaataaaaaggtaagcatcacagtagtaaagaaaatccgttctcattggggagagcacttaagctgagcagcagacatgcactaggctaytggcatttctgaacatgaacttgacgaatgaacatgaacttggaactatctacataaaaattacacctgttcaggctttatttcatctacaggtaaatatgtattaggaaaatagaaaaaacatctagatctaaaccatttaaaaagatgtatatactattaaaaaataaatgcacacatgtgcgttatctaccatacttagatagcctgtttcccatttagctcaatttcagcgatcatagactaggagagctgaaggagattttagagatcatagagcagtttcttcatcttcagatgaggaaactgaggcccaaagcagttcaataatgttctcgatatcataggtctctctggtatcacattcagtgttacatgcatgcacataatgttatatatgtgcacatacactacaaaaagttgcagtcgtatacatatctagggaaggaaagctgcca

SEQ ID NO: 548798 - DNA, 664 bp, Homo sapiens
agaaatgcaaagaaatcacattttaacatagaaggatacaaagttaatacaaaacatgtcgacgtaaaggaatggtgtgtggcttgaaatgaaagagcaccgttgaaagagataaagaataaaaaggtaagcatcacagtagtaaagaaaatccgttctcattggggagagcacttaagctgagcagcagacatgcactaggctactggcatttctgaacatgaacttgacgaatgaacatgaacttggaactatctacataaaaattacacctgttcaggctttrtttcatctacaggtaaatatgtattaggaaaatagaaaaaacatctagatctaaaccatttaaaaagatgtatatactattaaaaaataaatgcacacatgtgcgttatctaccatacttagatagcctgtttcccatttagctcaatttcagcgatcatagactaggagagctgaaggagattttagagatcatagagcagtttcttcatcttcagatgaggaaactgaggcccaaagcagttcaataatgttctcgatatcataggtctctctggtatcacattcagtgttacatgcatgcacataatgttatatatgtgcacatacactacaaaaagttgcagtcgtatacatatctagggaaggaaagctgcca

SEQ ID NO: 548799 - DNA, 664 bp, Homo sapiens
agaaatgcaaagaaatcacattttaacatagaaggatacaaagttaatacaaaacatgtcgacgtaaaggaatggtgtgtggcttgaaatgaaagagcaccgttgaaagagataaagaataaaaaggtaagcatcacagtagtaaagaaaatccgttctcattggggagagcacttaagctgagcagcagacatgcactaggctactggcatttctgaacatgaacttgacgaatgaacatgaacttggaactatctacataaaaattacacctgttcaggctttattwcatctacaggtaaatatgtattaggaaaatagaaaaaacatctagatctaaaccatttaaaaagatgtatatactattaaaaaataaatgcacacatgtgcgttatctaccatacttagatagcctgtttcccatttagctcaatttcagcgatcatagactaggagagctgaaggagattttagagatcatagagcagtttcttcatcttcagatgaggaaactgaggcccaaagcagttcaataatgttctcgatatcataggtctctctggtatcacattcagtgttacatgcatgcacataatgttatatatgtgcacatacactacaaaaagttgcagtcgtatacatatctagggaaggaaagctgcca

SEQ ID NO: 548800 - DNA, 512 bp, Homo sapiens
ctgattggagcccatgggcagaggagttctactcatgccaaggctactcaaaggggagggcatgagcctggaggtttccggtcccaccctggggagaccgtgcctgagaaggaagcacacattgaataaagaaagagggagagggagatactgaccttgttaagcaagctgaactctgatttctcatctacatgaggcaatgaattcttgttttgcttaagtgaatttgatttgaatttcttttccatataataagagttctaactgatacatcacatcttctgatttcaagtcctattataaaaatttctaacatttttattggtgtgaaaaatgttcatttttgcaaggagaagtcataatgcaacagcacatgtttaaccctgtggatttaaatgtaacttttgaagagcaaagtagcttcagtttttttcaacagaacctggcaagtgaagttcacgtctactcaagtcmttcctacatagctttattttttagtttttttaatcttt

SEQ ID NO: 548801 - DNA, 571 bp, Homo sapiens
acacctggctgtgctcagtgtctggggaatatgggcttggtggagaggtaggggcgggtttgagtgtggggaggaggctttctggatgaagggggccagggccgagcctgaaaggaggcagggtttaggtaggtcgtgagaaggaccctgggagcagaggtgtgaacaaaagtacaaatgcagaatgtgccaggcctgcagagagccagcacagcaggcaggctggggcccaggcttggaagaccgcactctacccccagcacaggcatsaggctgtggggcatggaccctgaggacccagcggccccagaggaagatctgggacacacagacaaggaaaatcaagggggatgcttttccttccaccaacaaccctttacccgggaggtccatctcttctcccttgttgtcctgtgcaagtttctggggcctctgggttgagttctggatgtctccaggaattttttcttatctgttaaatttactccaaatgaggcgctggaggctatatcagcacaggtggcaagatggccacacagtggatcagcttacaactgttcatttagaagtc

SEQ ID NO: 548802 - DNA, 440 bp, Homo sapiens
gagtactcatgtctttcagtcatcttcatttggctttttggtcctgtgtggtcctctcttttattcgctcactatcttccacccatgccattattttattagttttattcaacctgccttttgagtgtcctatctttgactttttctgccatctacttaatgtcagacagtattgcctggtaaataggtaagctgaggagctgtccatagtggcagggtgaagtaaggacagtgcctacatagaatctctctgtggaggagaatcaaggtccctgagtkcaagagaccacagatagaagtcaggttggccagcatggagtcatgtctttaccatcactcgtttcttctgggcataccgagccatctcgccatctccagttccatgttaatcttctgttttgcatgtctcttccagactctggcatacccatgcccttgtg

SEQ ID NO: 548803 - DNA, 2356 bp, Homo sapiens
ctgtttttagaatgttagaaaagagactcagactactctttctgactccaagggtaaggcagtcagaatgtatctggtgtgtactagaagaggaaacgtgctgcacattgggaccccaggtcctttggtttaacctgtcctttctgaggcgtgggcatcctggagtccctcagagatttctgacccagccatctcagtaagatctgctgtgttctggaggtgatgagtgctctccagagttcatttgaaagtcaggcccttctctacgtgctcctacccctgtgcctgtcattctctttactgttgaggagggaccttaactcctggcaggtgaactataattaagatcaatggatactaaagtaagcctatcaaaaatctggtttttgacaaagatttgaatagaatttggtccttgccctcaaggatctcacagtatgataaacttgtctttgctttttaaattacagtgccgtttcagcagtcaggcaccttgggtacttgactgaatcttgttcttttccaatatatttcacatgagacttcatgttatcttggacaaccacctaatgagagtccaggctgaagtcttcattccccttctgcatgttctccgctgttggctttgttcagacccttctttcttctcatctatcctactgtaatgggctttacattttaaacatagcttgaaataacaaatcatgactataatacatgaaaacggtttgtattttgttttatttttatttagaagtagagaatacagtaatagtgaggcaggagaacagggaattaggatagccaggggtaggggcataagcaaaggaatagcaggtgcagccagtttgcataaacaagagaacagcaggtgcagccggttctaggcaagatcaggcagcatgcaggccacatcctcatgcctgtgataaaaagacaagaagtttccacttcagcctctgcttgaccatgagctaagmctccacttcagcctctgattggtcacaggccaatccttcacaggctgtagccaattggaggcttctaaagggtacctaggggtgttgccaagttcttttggttttataaaaaccctaattagggccgggcgcagtggctcacacctgtaatcccagcactttggaggccaaggcaggtggatcacttgaggtcaggagtttgaaaccagcctggccaacacagcgaaaccccatctctgctattaaaaaaatacaaaaattagtcaggcatggtagcccgcacctgtagtcccaattactgtggaggctgaagcacgagaatcacttgaaccagggaggcagaggctgcagtgagcagagattgcgccactttgcactcgagcctgggtgacagagggaaactctgtctcaaaaaaaaatttaaaaaactttaatgattcaaaaaaaatcactgatgttaagaattcatgggtggaaatttgtaaaatctgtttcagaacatgtgagaattaagaaaggcaaaagttttattttatttttatttatttatttatatatttattgagacatggtctcactctgttgcccaggctggagtgcagtagcatgatcacagctcactgcagccttgatttccgaggctcaagcaatcctcccacttcagccccctgaatagctgatactacacatgtgcaccaccaagcctttctaattttcatattttttgtatagactaggtttcacctttttgctcaggctggtctcaaactgctgagctcaagcaatcctcctgccttggcctcctccaaagttttaaacatatgtaaatatattattttaaatattttttacactaataggttaaatactataagaagaatcttaatatttcctcaatatccatcaaaatatgtgaaagcaagttagacaaaaacttagggagatctttcattgggaaaatgggggacagacttatatttagaggttccctttaattgggcaaatgcaaaaaaaaaattctgctagagaaacacagtgacttctatgtgtccagttgaaaaagatggaattttatgcagttctgtttctcttctgagtttaactgaactcagaggaataaaccctcctagagctgttcacactggtatttagagcaaaattaaaaactgaattctcacctttatcagtcggcgaatactgtaagaaattaagaggatcgttccaataataccagccatcacacacaaaataatgagtattatcactacaggagctaaagagagcagcaaaattatgaaagtctgaaataaatgaccacatagcaatagaaaaataagacagataacatcagcataacatcaccttgccttttaata

SEQ ID NO: 548804 - DNA, 986 bp, Homo sapiens
agacagaaacagctcactggtttcatagctgcacagcactagctcttcagttcaaactctattttcactgaaagatttgttgcatctcatgtctcttacattgctgtgtgactcaccatgagtttgggagtcttgcagaacctcagaacactcaaatgatttaaatttctcaaatatgttcatttcacatataggaagtcactttcatttggaccaccgggtcttgacattagaaatgagaaggtcyatggctccacaacagctacctcagcctggcacgtgccctggcctcagagattcacagtccagttctttgtccagttgggtggctcctgtctaccaccttaccatgcccatttaacttatgcaaagttaatatcacaagtagccacctgttccttgcagtgaaaattgtacttaccactttcacagccccaagatatccatgtatctttattaacaggcgcttaacaacttgcatcatttaaaatgcctcccctgcctatcagctgatgatggccgcaggaaggtgggcctggaagataacagctagtaggctaaggccagacactgacacttgcagttgtctttggtagtttttttgcactaacttcaggaaccagctcatgatctcaggatgtatggaaaaataatctttgtattactattgtcaggtaagtgattttatttcatcttggttctgttatattgggtatgagatcatagaataaaatatgaactaccctatttcagttctatcttatttaaatcaataaatgagtagtatttcctcttccagtctggtggatggattttactggaactcagctaccaatgtgggggaaatgacacaagggagcccagtatttatggccgaatccagttttctagtatgagaagcttacttcaattctaagtctagctagaattaaaataattttatcaaatgctatgagaaatagctctctgtgaataaatgtattgct

SEQ ID NO: 548805 - DNA, 578 bp, Homo sapiens
cacaatggttagagtaccacacaatgaaaacatcataaatggcaggtatcaaaccaagtaacctccactagttaccactgagagaaccttctctcccagtagtatgtgacaattgagtcaagaggcccattatcatcaacaggccaggacctttactgtagcatcagggaaaatgacaacaatatgcttttttccaataaagctgataattcttccactttaagataaagcttgtcttgattggagtttgatctaaaagagatggagagccttggaagaattctagtgtattttttattttgtgctgttttagtaagtgtatgtatagtgcccaaaggttaattttgcaaaggaattatttacaatgcctcccacctgaaggtaagagacaatggcaaaatatagctaagattttccacgatattgtcttttaagaaaaaagtgtttgataacattccttgtagaaatagtggtggatccacctacaatataacttgggatcgctgattctaatagaccaaagyaggaaactcatgtgttccaaaacaacatagtccaggtaataaaagaagaattcc

SEQ ID NO: 548806 - DNA, 552 bp, Homo sapiens
acccagccaccttattaagatagatagacataaaagagatttgcaaaaaaaaaaaaaaaaatgtaaacaatgatacttttttcactaaatgctttggttttgtaaacttttttttaataaaaatatgttgtctatgtctacatgcatgggcttattagtttattttaaattagtaaatgagtattttaaaatatcagttttaattcaaaatatggaaacatcaatgagtatagtgcacattttaacaaatcctttctgatgctaggtaaktttctgagtgtcgagggattctaagacctaaaagttttagttctactgacttaatttgttcattttcattaaaatatattttcttatgtggtacatttacaccatggaatactatgcagccataaaaaggaatcaggtcatgtcctttgcagggacagggatggagctggaagccattattctcagcaaactaacacaggaacagaaaaccaaacactgcatgttctcacttataagtgggagccgaacaaagagaacatgtaaacacagggaggggaacaa

SEQ ID NO: 548807 - DNA, 463 bp, Homo sapiens
ggcacagacctggaatcacgaggaaatgcccgtcctcctcccacgggcagacaggtcgagtgtgtttccagagaccgggccgtccgtggggcagtagcgcctggatgacgtctgctttcgcctggagccctggctgcaaggggcggtgccgggcaagggccaccccaggggtctgggagtgcagtgtcrggcctgtggaggtggagagcagggatcagcctctttttgtggatgaggaaatggagacacgtggaaacttctggtaagaagctgtcaagcctccaggtttcggttctggacaggtgcggggcaggtattggagcactttgggctctgaggtccacgtggcccagcggcctccaggagtcagctgcaaggcggagtccctgtccacaagctgcgttgcaggcacagagaccaggagagggctgtgaagcaactctgtgtttactgggctgaagca

SEQ ID NO: 548808 - DNA, 242 bp, Homo sapiens
tagtttctttatggaatgtaactgtgcctcttaccactagaatgaattgataccatctatcttcctcttcatctttagatatattatttacccaacttttaacttttccagtgtaaagtaataatatctcactacaataagaaaattaataaacaaagtataaagggactacttttraaaaaatgttttagaaactcagtccttttgattagtaactagccttagtaccagaaaaacttcaa

SEQ ID NO: 548809 - DNA, 683 bp, Homo sapiens
cagcgtgggcaaaggtctgaaggtgggaagggctctgctaccttctagaacctgtaagaatgtgtagtaagttaggatattggtgcaaagtgttagagagctggggaaggtcagatgatatgagcccaggaggcctagggattttgtgctttatccgaagggcagtgggagagttttaagcaagagaatgttaagattaggctagatttttttataaagccactctggctgcaggtagagaatggayatgtggaggggaaagggggagcagtggtgtggagacaaatttagagagcgtgcaataatccaagtggaagaatatgaagtcttcaagaccaatatggtggcagtgaatatcgagaagtgagtaaattcaagacaaatttcagcagatggtactttaatggattagacatggggttgggggaggagaagggagcggatacaatggaatgatctccaggtatctagaaagatttctggagtagatcagggttggacttgttctgttggaacaatggaagaggaacaggctaaaggagtgttgttcatgagttgaattttcaacctactcagtctgaggtagttggggaccttcaaatagggattagaagaagtagatgttgaagagagacttcaggcccttctttaagaagacttcctgtgaagatcttgaagccatc

SEQ ID NO: 548810 - DNA, 683 bp, Homo sapiens
cagcgtgggcaaaggtctgaaggtgggaagggctctgctaccttctagaacctgtaagaatgtgtagtaagttaggatattggtgcaaagtgttagagagctggggaaggtcagatgatatgagcccaggaggcctagggattttgtgctttatccgaagggcagtgggagagttttaagcaagagaatgttaagattaggctagatttttttataaagccactctggctgcaggtagagaatggatatgtggaggggaaaggggragcagtggtgtggagacaaatttagagagcgtgcaataatccaagtggaagaatatgaagtcttcaagaccaatatggtggcagtgaatatcgagaagtgagtaaattcaagacaaatttcagcagatggtactttaatggattagacatggggttgggggaggagaagggagcggatacaatggaatgatctccaggtatctagaaagatttctggagtagatcagggttggacttgttctgttggaacaatggaagaggaacaggctaaaggagtgttgttcatgagttgaattttcaacctactcagtctgaggtagttggggaccttcaaatagggattagaagaagtagatgttgaagagagacttcaggcccttctttaagaagacttcctgtgaagatcttgaagccatc

SEQ ID NO: 548811 - DNA, 1015 bp, Homo sapiens
tgattttatacatatataaaattatacatatatgtatataaaatataccttttaaataaggtatatatgatgggaaaattaaaaatttgcaagggcaaaaccaaaaatagctgtagatgaacattgcggtagtttagcctatttcttttcagacttttttctattcatttgtaccttttccctcacaaaatgatatcatgctatatatactgtttttacattttttcacttaaatatattgtgaatatctttttatgtcaataaatatatatgtattaaaatttaatagtcacttagtattcttttgtgttgaagtatcatgttctagatcaattttccaaaagccagttaccagaagggcaatttgatgttttctcaaatgttacaccgtaccagaagacttgtttcttttaactacttgaatattatttttatttaaaaaactttatgcatttttaatgtgcttttgctagttcttcaaatgacatatcaacattgtttctgcaattagaaaaaataaaatttaaatttataagcctcaaaaagaaattgtaagtgaccaaatcatttccaacacatatgacatgcttaaactttagtttctgagaaggtgaaattaggatgtgttaacctggcagctgtttgcaaaaccatttgagttgaaaggatagaaccatcctgaaataaggaaaggaagtgttcctgtgcatagggataccagaaagaagcagaagacttgaatctcaaatgtaataaaagatgacattaaggttgaagaattttttaaaaattaaaattctaaaaatgtaaggagaggtaaagcaagaagtgaattaggaaactacagaaacaaccatatctcacattaaacttaagctactaattactagtgacagattaatatagttctaagaagactcaataatccttagctttctaaaaaatagaacatttgtcaaaatcttttaaaacaattatatatatattttttgtttgtttgtttktgttttttttt

SEQ ID NO: 548812 - DNA, 1015 bp, Homo sapiens
tgattttatacatatataaaattatacatatatgtatataaaatataccttttaaataaggtatatatgatgggaaaattaaaaatttgcaagggcaaaaccaaaaatagctgtagatgaacattgcggtagtttagcctatttcttttcagacttttttctattcatttgtaccttttccctcacaaaatgatatcatgctatatatactgtttttacattttttcacttaaatatattgtgaatatctttttatgtcaataaatatatatgtattaaaatttaatagtcacttagtattcttttgtgttgaagtatcatgttctagatcaattttccaaaagccagttaccagaagggcaatttgatgttttctcaaatgttacaccgtaccagaagacttgtttcttttaactacttgaatattatttttatttaaaaaactttatgcatttttaatgtgcttttgctagttcttcaaatgacatatcaacattgtttctgcaattagaaaaaataaaatttaaatttataagcctcaaaaagaaattgtaagtgaccaaatcatttccaacacatatgacatgcttaaactttagtttctgagaaggtgaaattaggatgtgttaacctggcagctgtttgcaaaaccatttgagttgaaaggatagaaccatcctgaaataaggaaaggaagtgttcctgtgcatagggataccagaaagaagcagaagacttgaatctcaaatgtaataaaagatgacattaaggttgaagaattttttaaaaattaaaattctaaaaatgtaaggagaggtaaagcaagaagtgaattaggaaactacagaaacaaccatatctcacattaaacttaagctactaattactagtgacagattaatatagttctaagaagactcaataatccttagctttctaaaaaatagaacatttgtcaaaatcttttaaaacaattatatatatattttttgtttgtttgtttttkttttttttt

SEQ ID NO: 548813 - DNA, 1015 bp, Homo sapiens
tgattttatacatatataaaattatacatatatgtatataaaatataccttttaaataaggtatatatgatgggaaaattaaaaatttgcaagggcaaaaccaaaaatagctgtagatgaacattgcggtagtttagcctatttcttttcagacttttttctattcatttgtaccttttccctcacaaaatgatatcatgctatatatactgtttttacattttttcacttaaatatattgtgaatatctttttatgtcaataaatatatatgtattaaaatttaatagtcacttagtattcttttgtgttgaagtatcatgttctagatcaattttccaaaagccagttaccagaagggcaatttgatgttttctcaaatgttacaccgtaccagaagacttgtttcttttaactacttgaatattatttttatttaaaaaactttatgcatttttaatgtgcttttgctagttcttcaaatgacatatcaacattgtttctgcaattagaaaaaataaaatttaaatttataagcctcaaaaagaaattgtaagtgaccaaatcatttccaacacatatgacatgcttaaactttagtttctgagaaggtgaaattaggatgtgttaacctggcagctgtttgcaaaaccatttgagttgaaaggatagaaccatcctgaaataaggaaaggaagtgttcctgtgcatagggataccagaaagaagcagaagacttgaatctcaaatgtaataaaagatgacattaaggttgaagaattttttaaaaattaaaattctaaaaatgtaaggagaggtaaagcaagaagtgaattaggaaactacagaaacaaccatatctcacattaaacttaagctactaattactagtgacagattaatatagttctaagaagactcaataatccttagctttctaaaaaatagaacatttgtcaaaatcttttaaaacaattatatatatattttttgtttgtttgtttttgtttkttttt

SEQ ID NO: 548814 - DNA, 686 bp, Homo sapiens
tattagctttgctttggcaaaagaagaaaattaaactgggcacaatggctcacacttataatcccaatactttgggaggccaagactggaggaccatttgaggccacgagtttgagactagcctgggcaccatagtaaggtcctatctccaccaaaaaaaaaaaaaaaaaaaaattagctgggcatggtgatgtgactctgaagtctcagctactcaggaagctgaggcaggaggaccacttgagccaaggagttcaaggctgcagaragcaatgatcacatcactgtacttcagcctgggcaacacaatgaaatcctatccctaaaaaaaattaaaaataaaaaagaggaagattatttttcccccaacaaatagtgacatttataatagatataaactgagttgtcagctgaagttaatgcagaaaactcaactggcttgacactcatcatgctttaaacttgacgcaatgtttaaatattcattgcaactccagtgaatttttttcttcttcatttttcccagctatggttatagtaaaaattgcaccaagttggcagaactgggggctctcttgttttggccttgctgactggttttcagtgtctgagctcttgtcttcctgaagttcgagtggcagcgcattagattcctggagcagtagttaagcttgagctaaacatcc

SEQ ID NO: 548815 - DNA, 686 bp, Homo sapiens
tattagctttgctttggcaaaagaagaaaattaaactgggcacaatggctcacacttataatcccaatactttgggaggccaagactggaggaccatttgaggccacgagtttgagactagcctgggcaccatagtaaggtcctatctccaccaaaaaaaaaaaaaaaaaaaaattagctgggcatggtgatgtgactctgaagtctcagctactcaggaagctgaggcaggaggaccacttgagccaaggagttcaaggctgcagagagcaatgatcacatcactgtacttcagcctgggcaacacaatgaaatcctatccctaaaaaaaattaaaaataaaaaagaggaagattatttttcccccaacaaatagtgacatttataatagatataaactgagttgtcagctgaagttaatgcagaaaactcaactggcttgacactcatcatgctttaaacttgacgcaatgtttaaatattcattgcaactccagtgaatttttttcttcttcatttttcccagctatggttatagtaaaaattgcaccaagttggcagaactgggggctctcttgttttggccttgctgactggttttcagtgtctgagctcttgtcttcctgaagtycgagtggcagcgcattagattcctggagcagtagttaagcttgagctaaacatcc

SEQ ID NO: 548816 - DNA, 1263 bp, Homo sapiens
gctccttaacaaaagttgtactcttcttaggacttcagaaaggaacattctgttcctagcatataaatatttgctttgcattgaagtgaacttaaatatatgtattaamccctgtatgaacacaggaattaatatcttctttgtagcttcctacttctcgtcttatatgtggtaattacagagtagatgcttggttttcagaacaaatacatcccaagatattctgaatatcacaagagttcatttcctttagaaactttttttcctgaaaatagccataattttttatactattatcagtcataataactaaattacaggaattgtactaactttagttcttctgtttttccctcatatagtattcttatttgatttccctatgcgttgtcaatcaaaattaaactgtcattttattctggaaaagtgacagattttataaagtaacaactttggtattaaatgttctttagcttctgatagcagacactatttagaaattagcatgtgagaaatgtaagaatgacatattgtaacattaagtaaatgtagtatatttgccagatgttaaaaatgactttagagacaatagagactgcacttataggttgacatgataatgaagttttatgttaaaatcataaaaaaacagaatttataagtgaaggaagtatgaaaactgagactaatattatgaagtctttttttaattctttatcttattgcccatttttaaccccttggtgtttgaaatggaaaataaatattctcttcgcgatagataatatgtcaataaccaaaaggtggccttaaccaataattggcccaactttaaattattaccctaaagatatataaattaactaatctaaaattaaatgcaattttgctatgacttaaagtgtcaataatcctgtataagaatccaatttatgcagtcacttaggcatgaagttggcaattcatctaacttggtggatataatagaacagatcaggctgctaaatatgctgtagttggtttgctgaattttttttggtatgaacatggtagaaatatgattggatatactttaaaatttttccaggctaaaagtatccatggctatggtccatagtagtgaaagttgatatcttaactgtccttttatatttgcacttgtgtggacctcaaaagtttcttctgatagctcttagccctgactaggtgtatatctttaaccaacttccttatcattgtttgccacctcacatttttgataga

SEQ ID NO: 548817 - DNA, 508 bp, Homo sapiens
aaaacactttgtgattctgaggaggcatttacttatgggtctagttgtatcattagtaacaatatatattgtgtttatcttaagcacacttctctgcacattatctcaacttcctgggttgcttgatcggataaagcatktatatttgtcttctaaaatatgactaaatactatccccaatcaaagtgacataatattccatagttgtgcaaatgtttagtttttttttttttgtgccgaaagataagtcacaggctggggtatttgatttttcttttaaaaatgataaagcagaaggagagagaaagagaccaagaaaataaaattgtatacagtgaaacacagatgttatctgaaaaatggattttttaagagaaatataggtataaaaggcattcatgagaaatacaagaagagagaaagagaagtgaataaattaaactcttttaattattgcaacagctcaaatagtagattttaactataatatttgatagacatgtgaggt

SEQ ID NO: 548818 - DNA, 1112 bp, Homo sapiens
agcacctatcactatttttttaaaaaccagtttgtttttttgagaygcaaatacagttatttcctgaatttataaacctaaaagtaatggcaaacactcatcctgcaataagacctagctagtatgcacacagtagtacatggctataaagactatatgataaaaactcttattttaactcttatttattcctgtattttaaaagggtagttttaatctgttagtacagtgcaacataaagttcaattatttcttaagtgacaaaatatcttctatggggatagagaaagcctctctttaacttcatcactaattcaatgttagtgagtctcacaccacatgaaatcaaccagaacaaatgaatggggtctgtaagccccacagtggcaccgatcagcacgagaattaagttttgttatttcctttagcatcagtttgctttgccaccacgatgacaaagggatccaccggtatggtcttccaaaagcgtgcctggagcccgtggggtttggcatacagaaatctccaaacacacgctgctccaccctcactcctgtaatcttacctggatactcaacccaattcctcctatcctaacatactcgagctatcaaaaagataacttaggttgacatttctagtttataagaaaagtaagaaccaagcataaatattttattttgctatctgcaatgtgtctgaccgccgtaaatgttgatacctggtctataaaatggttttatttgaaatgaaagctcttactctgtagggagatcaaatttttaacttggcaattttatgtgaacataaaaaattcttcaaaggggaaattctgatgagctgcatttttacccacagaaaatgtagtttcagcatttatgaaagcacttcactccataaacctggcactaaattttttttttaaagcacaataaaatataaactgctcttgaggtaaagtgacttcaaagctgtaatctgcagcaaaagctccaatcctgcaagtagcagactcaggcagaggtgacttcctaggcagatccatgttttctttctctttacttgttacaaaaaaaaaaaaaaagaaagccactaatcaaaacttttataat

SEQ ID NO: 548819 - DNA, 3366 bp, Homo sapiens
tgggatccacaattaatccttggcatcagagctgagaccccatagtgtggcctgtggagccatctactcaggggacaaccacacataaaccattagccttaagagaataaggaggctctgagcaagacactctaacacttttgcaaacaaaaaatttctattatcaggatttagctatttgatgccctaggattctgtcaaggtaatttgaaggactaaaatcaaatttaaaaggaacggcattctgactgtgcatttcacaattttttctacaaaccacctaaaatcatctccctgactttccgcccagcccactctacttccatgactctaagacaaaactgtgcctagggactgagcagaactgaggttataggtggggaatgacatagccccagctgttgggaaggggaaggctgcagagcctaggagcaggtaaagtctggagcaaacacctctgccgtttttattcatctacacactctttgaggcttttttttttttgtctttgaagtggaaaattataagcgattagaaaacatggaattggcgaagacagaatagtagaaacactactaaatggtttttaggaggcattgtaaacagattcaaattttcttgaatgcaaagttttcctcctcatttcttattactttcttatttttgtgtcttctatctctctttgctttctctttgttctgtagccttctctgaacactgtttctgtcatcgaggcttttaaatatatattgttaaatattattaacttgatgtaattaagcaaaggaaggaagtcagtctaaatcaatggcaaactggagaaataagcaattttttaggaaatgaaggattaatactcttagggatatactgaaactattgaaagcagtaacacactacatcactaaggaagtggaaggctgccttaactcctacataagcacattttggaaatttattgtttgaaataatttgttgtgctacagacctttactgtttaaatagactagtatttattttttttacgaattgcttagcaaaaaaacattgaggatattgagatataaatgcaattcttcgttgcttaaaacttggtgctaataaggtcaagaccacacactaaatctccgtatctgccggttctctctctctctgttgcgtggccacaaatgtatgaacaagaaactcagatcataagcagcagtgggggagaggatgtggatgagtctgtccaatatgccttctcatattggaaaatggctctgttttcatctgatatgcacctgtggttagtagcttcgtatttctttgtgagcatcagttatcctagaattttaaagataattttaataccatcattgttgctttaataatttattttatttgctatttcaactctactatgtggtaatattacttaaaactagatgagaattttctgctttcattgatatttcttgcacgtatatttatattcttctcattaaggctaataatactatgtgagctcatagaattggcattggaattctctgaaggaaaaataatgatccatttcatgagatgagcgatttttacaaactgctgtttccagctcagagtgctttgttcagtgattaaaatgtatttctcaattaaattaaaatgcaaatatagacagtctattttatgattataatagaattatttaaagaaggttttatgtaaacctgctattaatatttkatgcataaactgttcgttttattgttgggccggttctgccatgttccattttcaagattactagaagtgctatgaaaacttaatcatactgtccaggttttatcagtttttacccactctactctgggaaattaagtaggatgctttcctatatactttataagttatgccaggggtgttggagaaatataaactactaaaacctcagaatcccctgaaactgaattatgaacaatttactattctttaaagaaatgtttttgttacacagatacagtgactcttaaatttacgagtaccatattttatagtttctcatgaaattaaagatctagaagcatacttcaagaagccattattccaactttttaatttatattagaaatataaaatatttatattagaaactgcatataatgctatggatttaattatgatccttttagggttttcttttttctttctggtgtcctataacttctcaaacatttggattaaaataatctttaaataatattttctaacgtgatcctttttgttgttgttgtttttagtgatctcagtgaaaaccaaattcaggcaatcccaaggaaagctttccgtggggcagttgacataaaaaatttgtaagtatctatttttaaatttatagtgttttaagtcattatctattttcaaagtcaagtttatattaaataaagtgtcagaaagaaatggtgaaaaccctgtgtatatttatgcttgcgtaggagaccttgtaacagtaagttgtcaattgttttcacaagctgtttgacgagatgctcatttagaagatgtctggaaacaagccatcattaaattcattctttaatccttgtgattaatcttttgaaacctatgaagtgatttgattcgcagatatttgtgttttttccccactttttctatcagcttacttcagtaactatgtattcagttgctgttggtgtttattagaaacaaaactgttagttttattgttgggccagttctgccatgttccattttcaagattactagaagtgctatgagaatatggactattattttctggaaatagtagataatattttcttcttagagacacctgtagcctagagctacagctttttccagagttttaagatcaccctttgcattaaataccaaaagcatgagaatgacaaaattatgtctttccctttgtgtgagtgtatttcttacactttccctcatatcctcatgaaagaatgtatttatagcatcctttaaaaaaatgaaagtgcatttctgtattttcctttgataaatctttagtctggtgtttcaattataagcattttttaagtgcctttatttctaaggatgcatatcagatttaagatctcagtgacaatcataatatcaatatctctctaaattttaaaatactatattagcttctaaaaatgatggtttttgatagactatgaatcctaggacataaatgtttttcttagcttttacattagtttggaatgtaggggagaaaagcccctgtatgctgagattaactgtcaggaatttaatatttcttagctagtaataaacagggcaggcactttttcaagaattaacttatattcagaattctccatggtt

SEQ ID NO: 548820 - DNA, 834 bp, Homo sapiens
tgcaggttgtgcctggggtggctcatcttggcccggtactcakctctgagccatcaaagccaactctccgggcagctggagaataagtgccttagacatgaagctgggagtgggctgctcaccatggcctccatttcagtgcccccctctctctctggcaactagcacttccatattgccccagcatctgaagttggggaaaatagagaatcccatagaattatgtatcctgaagttttcacctattgagttagttggaatagattaggttgtgctgtggtaacaaattaactcccaatttgcagaagcttaacacaacagtttattcctaagaaacagtgcatatttcactcagctcagtgttggataagggtctgctccatgtagtgattcagggacccagtctttcaggtctgtcatcttgcagcatacaacctggaacccaggatttcctttattgcagacaagggcagaaccagagggtcatgcgccaacttttaatgcttctactcagcagttaagcttgtcactcctgctcagagcccacttttcagacctattcgtttggcctcgtctaaccacaaggggagccacagataatcagtgggcagcccatgcttctactacacttcactcaaggatattcatgttctctaaggggaaggatggcagatgaataactgccaccagaaaagagctaggcttgaagcgtccttcaagtcctcctctaaattagggaccttaaatagctgctcatgagtaggcttccagggataatgggccctttaacattgcatgtaaaattttgcatgtgttatacatatttctggggta

SEQ ID NO: 548821 - DNA, 1503 bp, Homo sapiens
  misc_feature 986, 987, 988, 989, 990, 991, 992, 993, 994, 995, 996, 997,998, 999, 1000, 1001, 1002, 1003, 1004, 1005, 1006, 1007,1008, 1009, 1010, 1011, 1012, 1013, 1014, 1015, 1016, 1017,1018, 1019, 1020, 1021, 1022, 1023, 1024, 1025, 1026: n = A,T,C or G
  misc_feature 1027, 1028, 1029, 1030, 1031, 1032, 1033, 1034, 1035, 1036,1037, 1038, 1039, 1040, 1041, 1042, 1043, 1044, 1045, 1046,1047, 1048, 1049, 1050, 1051, 1052, 1053, 1054, 1055, 1056,1057, 1058, 1059, 1060, 1061, 1062, 1063, 1064, 1065: n = A,T,C or G
  misc_feature 1066, 1067, 1068, 1069, 1070, 1071, 1072, 1073, 1074, 1075,1076, 1077, 1078, 1079, 1080, 1081, 1082, 1083, 1084, 1085: n = A,T,C or G
cacccaaaaacctcatgcaaaggtcatcagtctcaaagatcaaaagtagataaattcacaacaatgaagaaaaaacagtgcaaaaatgatgaaaattccgaaaaccagaatgcctcttcttctgcaaatgatcacaactcctctccagcaaggacacaaaactggctggagaatgagattgaccaattgacagaagtaggcttcagaaggtaggtaataataaactcctctaagctaagggagcatgttctaacccaatacaaggaagctgaaaacctagataaaagcttacaggaactgctaactggaataaccactttagagaagaacataaatgacctgatggagctgaaaaacacagcatgagaacttcttgaagcatacacaagtatcaatagctgaactgatcaagtggaagaaaggatatcagagattaaatatcaacttactgaaataaggcatgaagacaagattagagaaaaaagagtgaaaaggaatgaacaaagcctccaagaaatatgggactacatgtaaagaccaaacctactattgattggtgtacgtgaaagtgatggggagaatggaaccattcatgataaagagatagcaatcatgaaggtatgtgtacctaccttatttgggtgtgttactctggcccatttatcaagtgacctgaaaggctgccagttttgagtacagtcctgaacaggagaaggctctgcaacaggtccaggtggctgtgcaagttgctgtgccacttgggccatttgacccagcagatcaactggtgcttgaggtgtcagtggcagatagagatgctgtttggagcctttggcaggccttcataggtgaatcacagtggaggcctctaggattttggagcaaggtcctgccatcttctgcagataactactctctttttgagagacagctcttagcctattactgggctttggtggaaactgaacatttgactatgggtcatnnnnnnnnnnnnnnnnnnnnnnnnnnnnnnnnnnnnnnnnnnnnnnnnnnnnnnnnnnnnnnnnnnnnnnnnnnnnnnnnnnnnnnnnnnnnnnnnnnnnctgtgatgtattgaagccatttggtattaacaaactaaattgaaaaactagtgagtctgcctttccgggcccaatccagcatgctgtccatgtgaggcttaaatggaaaaatactgtaaaaagacttattttaatttgatgtcaggaacagagccaaaagatggcctggcacagcacagcaggcaggaggagctatcatcaggactccttctctcttgatcaaaaactcaagcacattctttgactttatgttgtcatttgctgtattaaagattcaattctttttaagcactcaccgggaccatcctccatggggcatggttacaggaaggcagtatttaaaggagttagtgaggctgwttgagaacagctctggggcctacgttctgccaccagtttggctatatgatagtggacg

SEQ ID NO: 548822 - DNA, 609 bp, Homo sapiens
tatagcctgttggaaagatctttacttctcttaacagtacagtaagcttattatcctgaacctaaccagttagagaatttcaggaaccagagcatcctttcatggcccaaaggtttaattctatacaacagagaaagcccatcggagccaagcaactgagttagaatgaagttagctggcgttgctaggagaaaactaaggtgtcagacagctgagacttctcaggtctatcaggatatcrtctcctaatgaaaccagcaagaggacatgtcacaaaaatatacagaggagaaataaagtgtggttgaaaacttgaggaaggatctaaagaatctagtaactggtcagaccagggaaagaaaaagtctagattgcccacttctgccctaactctcctattaacatgtgagacaaagttacagttatcaagacagggcagtactggcatgagggaaggcatataaatcaatgaaacagaattgggagttcagacataaacccctacatgtatagccaactgcttttcaacaagggtgccaagacaattcaatgggggaaagaatagccttcaacaaatggtgccactacaactggatatccacatgaaaa

SEQ ID NO: 548823 - DNA, 2201 bp, Homo sapiens
aagcttcacaataatatatttatatacatatacatatataaccagaattatagatatatacaaacatatatataattattactatattactataattttgattctttggaaactttttcttcttaattctaaatcttccagggttagtgatctatcccagtaaactcaggttgcccaccctataaagcagacagttatcatccagttcattgatgttacttaaaaccagagatctgtcgtgagactggcagctacagacatcctcagagattcttctcaccatccctaggtagagtgtctttttataaccactatgtcaagggtttcaaaatttgaaagggraagctgacattatctcaattttcttcattcacaaaagcttataatactcctgtaggttggttacttaaattttgtatttttttttattctcaagaaagtacaaatattataaagtcttttgtactagatggggtcctaacatatgtaaatgtattttccacctaatgtaagagttttatgggctcttatcttcattactactataggaatatacatcttttatggatattcagagatatatataattacaatttggatgtcccatagcggtgcctgatttgtagtcataactcataaaatcattctgctaataattgtaatttatttgaaggattaaagtggaatagtgtactacttaaggcacaagcaagacaaaatgagtttgattccaggttcctctatttactagctgtgtgaccctgagctaattacttaaacactctgggcttcagttttctcatttgcaaaatgaacatagtaagtgtatttttgtttaagattgttgtgaagggtacattcaatactaaaggtaatgatggcccaggacccagtacaaagcaagtagtcaataaatgctacttattagtagtcctagggtcagttattctggtcctatagagaactttgccatccaggaagagctaccagaaagagatttagtaaatactccagaattgaaacccaggcaaagagaaatgaaaaaaaaaaaaaaaaaaattacagtcctgtaattaaaccagtatccaaatgggaattttccttcaaatttgctgagtggttgatgggtttacacaggctagtttcagctgaccagaccctgaagccagtctagtcttcaacagcactcatttggttcagggtataatcacctttccctgagacagaaaccccaaagagtgggcaaatgcatactaatttgggcatgccagttaagagaagcaaacacattcacagcttgtaaagtttttatttactgggaagctaaagtgacagaaaaacaatttgtctaaaataagggtctgggtcagtttcataactcttgttacatcttttggaagtttccttccgtgtcatgagctgcaaccttgtatcttaatgtgaaggtctgtgggaagctgaaacatgacttaggggaaatgaccttctcttagttgtgtctgggacagggagtctgacatcccatccctctccaatcaggactgcattcagtgtgcacataggtaaacaaaccaaaatagacctcacccaaaatagctccttccaagacaccctacagctctgtgtgaggccaggaaggctagtctggtttggatgctggctagggggccagcgctggtctggcatgcctcctaaggaagcaggagaagtacctgagactgttgtgtttgtgatccgacagcagttactgttccctttcctaagaaaccttggacagtctcagaggctcctttcttgtcctttgtgccagacacattcagctccctgtcctcagtagagattttagtttttctttccctttttaaaaaaaaaaaaaaaaaaaaagcagaggaagtgaatgtaatgtcacagcaagcaatacttggcgagccttgcggcaggcatccattcagaggttgtatttcatcaaactatcattttctcttattcacccaaaccactattccctcaagaggccattttctttggggttgaaaactctcatgttcactcctgatgctagaaggggcacagggatcaaagccatgaataaaattaactggctgtcagctctgtgagtgcaccaacaccctgcggtcacctgcactgaaggcaaaaagcaaaacaccagtgaagatggaagttgagacaacgctatacag

SEQ ID NO: 548824 - DNA, 2201 bp, Homo sapiens
aagcttcacaataatatatttatatacatatacatatataaccagaattatagatatatacaaacatatatataattattactatattactataattttgattctttggaaactttttcttcttaattctaaatcttccagggttagtgatctatcccagtaaactcaggttgcccaccctataaagcagacagttatcatccagttcattgatgttacttaaaaccagagatctgtcgtgagactggcagctacagacatcctcagagattcttctcaccatccctaggtagagtgtctttttataaccactatgtcaagggtttcaaaatttgaaagggaaagctgacattatctcaattttcttcattcacaaaagcttataatactcctgtaggttggttacttaaattttgtatttttttttattctcaagaaagtacaaatattataaagtcttttgtactagatggggtcctaacatatgtaaatgtattttccacctaatgtaagagttttatgggctcttatcttcattactactataggaatatacatcttttatggatattcagagatatatataattacaatttggatgtcccatagcggtgcctgatttgtagtcataactcataaaatcattctgctaataattgtaatttatttgaaggattaaagtggaatagtgtactacttaaggcacaagcaagacaaaatgagtttgattccaggttcctctatttactagctgtgtgaccctgagctaattacttaaacactctgggcttcagttttctcatttgcaaaatgaacatagtaagtgtatttttgtttaagattgttgtgaagggtacattcaatactaaaggtaatgatggcccaggacccagtacaaagcaagtagtcaataaatgctacttattagtagtcctagggtcagttattctggtcctatagagaactttgccatccaggaagagctaccagaaagagatttagtaaatactccagaattgaaacccaggcaaagagaaatgaaaaaaaaaaaaaaaaaaattacagtcctgtaattaaaccagtatccaaatgggaattttccttcaaatttgctgagtggttgatgggtttacacaggctagtttcagctgaccagaccctgaagccagtctagtcttcaayagcactcatttggttcagggtataatcacctttccctgagacagaaaccccaaagagtgggcaaatgcatactaatttgggcatgccagttaagagaagcaaacacattcacagcttgtaaagtttttatttactgggaagctaaagtgacagaaaaacaatttgtctaaaataagggtctgggtcagtttcataactcttgttacatcttttggaagtttccttccgtgtcatgagctgcaaccttgtatcttaatgtgaaggtctgtgggaagctgaaacatgacttaggggaaatgaccttctcttagttgtgtctgggacagggagtctgacatcccatccctctccaatcaggactgcattcagtgtgcacataggtaaacaaaccaaaatagacctcacccaaaatagctccttccaagacaccctacagctctgtgtgaggccaggaaggctagtctggtttggatgctggctagggggccagcgctggtctggcatgcctcctaaggaagcaggagaagtacctgagactgttgtgtttgtgatccgacagcagttactgttccctttcctaagaaaccttggacagtctcagaggctcctttcttgtcctttgtgccagacacattcagctccctgtcctcagtagagattttagtttttctttccctttttaaaaaaaaaaaaaaaaaaaaagcagaggaagtgaatgtaatgtcacagcaagcaatacttggcgagccttgcggcaggcatccattcagaggttgtatttcatcaaactatcattttctcttattcacccaaaccactattccctcaagaggccattttctttggggttgaaaactctcatgttcactcctgatgctagaaggggcacagggatcaaagccatgaataaaattaactggctgtcagctctgtgagtgcaccaacaccctgcggtcacctgcactgaaggcaaaaagcaaaacaccagtgaagatggaagttgagacaacgctatacag

SEQ ID NO: 548825 - DNA, 450 bp, Homo sapiens
accgcctcagcctcccaaagtgctgggattacaggcgtaagctaccgcacctggccaagatctggatttaaatccagttccaagctgtgtgaccttagacaaatcccttcaatttgagcagatgcttagtgaatggaaaatgaactacaaatctgatcacttttctatatcagagtcactgtagaggaatactcactttttctattcatatacctccctgattttcrgatcgatgtttaactatctttaatgttcctgatttggcttgtttatttttcattgttatgatctgaaagccacattactggcttcttcatttggccagtaactgcaactccattgcagccttattttagctaagtctattgtagctcttgcctttctccccacaggaaccctgctttagcctttcccaaagacattttcagtccctacctactagcattggtg

SEQ ID NO: 548826 - DNA, 450 bp, Homo sapiens
accgcctcagcctcccaaagtgctgggattacaggcgtaagctaccgcacctggccaagatctggatttaaatccagttccaagctgtgtgaccttagacaaatcccttcaatttgagcagatgcttagtgaatggaaaatgaactacaaatctgatcacttttctatatcagagtcactgtagaggaatactcactttttctattcatatacctccctgattttcagatcgatgtttaactatctttaatgttcctgatttggcttgtttatttttcattgttatgatctgaaagccacattactggcttcttcatttggccagtaactgcaactccattgcagccttattttagctaagtctattgtagctcttgcctttctccccacaggaaccctgctttagcctttyccaaagacattttcagtccctacctactagcattggtg

SEQ ID NO: 548827 - DNA, 691 bp, Homo sapiens
gatccaatctgtggctcagggtatggggaagagatgacccagacccctctagattctcccagtcccaaggagaacaattctgttagggtgccttccagcaagacagcaggaaccctcaccacccactggctccagtggtggcccctgggctcctccctctctggcacagggactaaacagagccagctccactggagggagtgccctctcctttctttccaycctttgactctgaaccattgtgtcactctgtcctgaccccatttcctccccggctagccctcagccatctgtgggcagctgtgagactgagtttggtgcctggtgcagctcagaccctggcaccgacctgcttggccataggcatgtcctcttgtttcttcagctgactggtgctttttggggtgcctctacccaggtcttcttgtcttcctgagagttctgaaaccctcttctgtggggtcaaacctggctgcacatttgaatcactttaggggctactgaagcatccagcatccagggactcaccctactgagtcagaacttccagaggagaggtcgggaatgtgtatatttttaaagcttcgcagatgacagttgcggtcactcaaatgtggagtgtgcattagataatattattgttgtcaatgttaagttttgtgggtgtgctcatggcattgtgttttacata

SEQ ID NO: 548828 - DNA, 596 bp, Homo sapiens
ggaggatgactagaccaatgcccagcctggagttttttcagctccttccctgaaagggccagaggtaggtctttcattttccccgagactttcctatgggaagacttgggctaagtgacaacataccaggagatcctgcctctaccactcagttcctggcaaccctcgccccagactcagcgtgcccaggacagcagttctcctctcctgtcctgcttctttatggggctgtggtcaagagggagggggacgatgcccactgtatgtttggcattcttgagagagagcgcgcctttgctactctcagtaatatattagcactgttatattaatttcataagccaaagtggctctggcataatctcattataacaaagtggccctgctggctgtcttttggctcgcttctactatagtcatcttttgccaggatagacatcttccagaaatatagcaagtctagaagcacagcgtcttggactgttacccacacttgacgagmttttccttcctcaagatagccacttaaaaacatcggagctacaaggaatcttagaaacaaccccttcatttgtcaaatggggaactgaggtcca

SEQ ID NO: 548829 - DNA, 653 bp, Homo sapiens
aggaacttattaagaaggtggattcctgagccctacctcaggagattcctattcagaggatctggggtagggtcttagaatgtgaatttccatgagcccctcaggtatactgatgaagtggttcattctcttctttcttcctgatctcttacttgccatccagattcttttcctctttcattctacaaacatttattgggcatccactctttgctgcagtgctaggcactggagataaaaacaataagatataggtttttactttaagttaacagggagaatacataaatcaatacttaggaaataatatggtacattcttgaggcatttgcatgatgctatgggaaggaaagaactaatgctctccagggagttcagtgagggcttcccagaggaggaagcatttgagctgattctggaggagagacaagagtgaaagaagccttggaagtagaggcttggggaaataaaggcaccagtgggggctgaggaacaggtaacctagagcactcggagaggttcagtggagayggagtggagctgctgaaatactgtagaggaccaggagaaaaagtaggaagaggcagcttgagagagcccttatgtgctaagctaaggggtcgggactccatcctataggtgatgggaagcca

SEQ ID NO: 548830 - DNA, 942 bp, Homo sapiens
ccccaaagtgtcctcagttctctatttctgcccatcagccaagtccaactgctgaaaatgtgactcagaacgctaagaatgagtatttgctgtcctaaatggtcacagaaaycctgctgcggctcaccacttaacatgtgccttatgctcacatttatttcaggtaaaaaaaattgccatcaaagactcactttttgaaaactggggaaaaatatattactttttaaaagtaccacatttcctattgtcagattcctatagttggttcataaccaaccaataaacaactgtaattgttaagcattatgctatgtgctgtatgggaaaataagtgtgctgtatgaagctataattcattttattaatgagcttgccatagcgctaaataagtacagcaatcacataggaaacaattaagcaaaatgccacagaatattataaagtgataaatgagttcatgcatactttatttaagatgcctaaagaaataaaaagtaataatcacagatactatttactggtcactaagcactgtactgggtactttatggaatgacataacttaatccttattataagcctttccagtagattatattattacccccactttaaggatccgaatacttaaggccatatcctcaagatcctagagctcggtcagaatgagcccccaaaagaaaataaggctacagtttgactttgaaggataaatacaaaaaaaattatcataagagtacttgaattattatttatacattctttttttaacataatcttttcttaaggagtctaagcagagaaaatagctctttacttttgcaaatagaattgtaagaatctatggactttaaaattgaaaagtctgggaagactagttatggttagggtaaaatggaaataaagagaaatagcaattaggtagatcaaaaaggagatgca

SEQ ID NO: 548831 - DNA, 942 bp, Homo sapiens
ccccaaagtgtcctcagttctctatttctgcccatcagccaagtccaactgctgaaaatgtgactcagaacgctaagaatgagtatttgctgtcctaaatggtcacagaaatcctgctgcggctcaccacttaacatgtgccttatgctcacatttatttcaggtaaaaaaaattgccatcaaagactcactttttgaaaactggggaaaaatatattactttttaaaagtaccayatttcctattgtcagattcctatagttggttcataaccaaccaataaacaactgtaattgttaagcattatgctatgtgctgtatgggaaaataagtgtgctgtatgaagctataattcattttattaatgagcttgccatagcgctaaataagtacagcaatcacataggaaacaattaagcaaaatgccacagaatattataaagtgataaatgagttcatgcatactttatttaagatgcctaaagaaataaaaagtaataatcacagatactatttactggtcactaagcactgtactgggtactttatggaatgacataacttaatccttattataagcctttccagtagattatattattacccccactttaaggatccgaatacttaaggccatatcctcaagatcctagagctcggtcagaatgagcccccaaaagaaaataaggctacagtttgactttgaaggataaatacaaaaaaaattatcataagagtacttgaattattatttatacattctttttttaacataatcttttcttaaggagtctaagcagagaaaatagctctttacttttgcaaatagaattgtaagaatctatggactttaaaattgaaaagtctgggaagactagttatggttagggtaaaatggaaataaagagaaatagcaattaggtagatcaaaaaggagatgca

SEQ ID NO: 548832 - DNA, 942 bp, Homo sapiens
ccccaaagtgtcctcagttctctatttctgcccatcagccaagtccaactgctgaaaatgtgactcagaacgctaagaatgagtatttgctgtcctaaatggtcacagaaatcctgctgcggctcaccacttaacatgtgccttatgctcacatttatttcaggtaaaaaaaattgccatcaaagactcactttttgaaaactggggaaaaatatattactttttaaaagtaccacatttcctattgtcagattcctatagttggttcataaccaaccaataaacaactgtaattgttaagcattatgctatgtgctgtatgggaaaataagtgtgctgtatgaagctataattcattttattaatgagcttgccatagcgctaaataagtacagcaatcacataggaaacaattaagcaaaatgccacagaatattataaagtgataaatgagttcatgcatactttatttaagatgcctaaagaaataaaaagtaataatcacagatactatttactggtcactragcactgtactgggtactttatggaatgacataacttaatccttattataagcctttccagtagattatattattacccccactttaaggatccgaatacttaaggccatatcctcaagatcctagagctcggtcagaatgagcccccaaaagaaaataaggctacagtttgactttgaaggataaatacaaaaaaaattatcataagagtacttgaattattatttatacattctttttttaacataatcttttcttaaggagtctaagcagagaaaatagctctttacttttgcaaatagaattgtaagaatctatggactttaaaattgaaaagtctgggaagactagttatggttagggtaaaatggaaataaagagaaatagcaattaggtagatcaaaaaggagatgca

SEQ ID NO: 548833 - DNA, 942 bp, Homo sapiens
ccccaaagtgtcctcagttctctatttctgcccatcagccaagtccaactgctgaaaatgtgactcagaacgctaagaatgagtatttgctgtcctaaatggtcacagaaatcctgctgcggctcaccacttaacatgtgccttatgctcacatttatttcaggtaaaaaaaattgccatcaaagactcactttttgaaaactggggaaaaatatattactttttaaaagtaccacatttcctattgtcagattcctatagttggttcataaccaaccaataaacaactgtaattgttaagcattatgctatgtgctgtatgggaaaataagtgtgctgtatgaagctataattcattttattaatgagcttgccatagcgctaaataagtacagcaatcacataggaaacaattaagcaaaatgccacagaatattataaagtgataaatgagttcatgcatactttatttaagatgcctaaagaaataaaaagtaataatcacagatactatttactggtcactaagcactgtactgggtactttatggaatgacataacttaatccttattataagcctttccagtagattatattattacccccactttaaggatccgaatacttaaggccatawcctcaagatcctagagctcggtcagaatgagcccccaaaagaaaataaggctacagtttgactttgaaggataaatacaaaaaaaattatcataagagtacttgaattattatttatacattctttttttaacataatcttttcttaaggagtctaagcagagaaaatagctctttacttttgcaaatagaattgtaagaatctatggactttaaaattgaaaagtctgggaagactagttatggttagggtaaaatggaaataaagagaaatagcaattaggtagatcaaaaaggagatgca

SEQ ID NO: 548834 - DNA, 586 bp, Homo sapiens
ttgctggtgaatgcagttatcactccactgcccactcatatctcatcatttacttttgttgtaccctgtacctatgccctctttgcaggaattggcagcaactgtgtactgactattcttgagaaaaagtaggtgggaatgcaaaagagaaaataacggagatttcgctagacttagataaacctctgtgtctggtagagaaccttgttagacatgtggacaatggtaagcatccagaaggactcactgctggggtgcctttttggcaattaaatcaaattcaaattagaaggcttaaaaaaaagaaactcatttctactgcaacattgctcaggtctagtacaaattggaaaacaaaatatttggcctagaaatggttctttgttataaaactatttttacaattagatttattctgtagaaaagaaacaaaatagggagaggttgcttaagtaaaggcctttatggtcctttaccaggatcctgacttaagcggtggttgtagaatgtttctggctcatgttacttccaggcacgaagcagctrtgccagttttgctggataaccccctcttagctgttcctcc

SEQ ID NO: 548835 - DNA, 2130 bp, Homo sapiens
tggtctttattctttaaaaaatgttacttgagcattttcatgtacacctcattgtgctttatatcatagacaaatgtactaacatggaggagatataagtaaaataataaagtggccttctttgtaataagccttcagcaatacacaccattctttaaagtatgtgcttatagtcatatttttcctgcctatgtttcttttttttttttttttttttttttttgaaacggagtctcgctctgtcccccaagctggagtgcaatggcgggatctcggctcactgcaagctcctcctcccgggttcacgccattctcctgcctcagcctcccaagtagctgggactacaggcgcccgccactacgcccggctaattttttgtatttttagtagagacggggtttcaccgttttagccgggatggtctcgatctcctgacctcgtgatccgcccgcctcggcctcccaaagtgctgggattacaggcgtgagccaccgcgcccggcctcctgcctatgtttctacttcagatttctccttcatagactctgaggtggaaagaagcaagctacaccaaaatcagctcatttgaattgcaaacatgctaagggagtaaaagtctggtcaaaaaaaattgtgcaaaatagttctgagcaaaagtgctggcattcttcaataatgatatatgaaccaaggttttgttaccacagtatttgcaataaccaaaaaatttggaagtagtcattgataaatgatggtttgaattaaaatgttatattcaaataggaaaaactgttagaatttaaaaataattaggtatagttctatatgttattagtggataattcctatgacaggtaattaattggagaaaaaaaccaagatacaaaataaaatgtatttgtgtacaggccaagtgttagttatggtgggtagagtgaaggagaaatccttctgtcagtcattctgtcagtcaataaataaatattatattctgagttcctggtgccactgtttaaagtgcatacattgttatcaaggaacaatttaggctaaaaaacaaacaaaaagaaaaacatacacaacaataccttcccaaactgtgtctgtggataacctttaatttaaacacgatcatattgtttacatatattacttgtataaatcatgtcactgaagtggtctrcaggacccaaatgtgtatgtagttcaatcacattgattgatcatattcatcataaagttgcgtgcctaacttaaattaacaggagtaacagaagatgacacatgacaaagaatacaaagttgaatatctcttcatatgcccagattagagtcttaaacaattgactctagaaataattccagtaatgtgtctttgattgggttacatttagctaatctcagagaaattttggtttacagattttagttttcaaattgaaccaaaatgatatatactttacagtaacaaaaggttttaaatggaaaggcctcctcaatatctgttctttatcatttttcctcttcaaaacactagcagctaaggaaacatttttttctcagttaaactacagaattttttcaattaaactacagaacaaaatttaattaatatgccatgtctaatgatataactttgatctgctacacctcgttggttaagtgacaatcaacggcatgtcagaggtttaacttggtcaattatttgagaaattagatatcgaggttattgtgatcaagtggcaagctgattttcaaattgacaggatatatgtgagttagtgtgtttccctaggaaatcaggtgaaatcatttcaggaaatagcattcttttaaaaattcagttttctaaaacctctaaaagaaagaaatgcttatcaagtaaagccttaaactatagatatcgcgtgaaggaatttaatatttactggggtgttacaccccagtattaattccttgcttcttttagagtaattcagaacattgtatatagtgaatttattatttaatcttagaatacagtaaaaaacattttgttctattgatcagaacattactgagttcaaaagaaaatggtgagggcttattgtttttcaacagtatagtcacaaaacccaaaatgctcacatt

SEQ ID NO: 548836 - DNA, 2130 bp, Homo sapiens
tggtctttattctttaaaaaatgttacttgagcattttcatgtacacctcattgtgctttatatcatagacaaatgtactaacatggaggagatataagtaaaataataaagtggccttctttgtaataagccttcagcaatacacaccattctttaaagtatgtgcttatagtcatatttttcctgcctatgtttcttttttttttttttttttttttttttgaaacggagtctcgctctgtcccccaagctggagtgcaatggcgggatctcggctcactgcaagctcctcctcccgggttcacgccattctcctgcctcagcctcccaagtagctgggactacaggcgcccgccactacgcccggctaattttttgtatttttagtagagacggggtttcaccgttttagccgggatggtctcgatctcctgacctcgtgatccgcccgcctcggcctcccaaagtgctgggattacaggcgtgagccaccgcgcccggcctcctgcctatgtttctacttcagatttctccttcatagactctgaggtggaaagaagcaagctacaccaaaatcagctcatttgaattgcaaacatgctaagggagtaaaagtctggtcaaaaaaaattgtgcaaaatagttctgagcaaaagtgctggcattcttcaataatgatatatgaaccaaggttttgttaccacagtatttgcaataaccaaaaaatttggaagtagtcattgataaatgatggtttgaattaaaatgttatattcaaataggaaaaactgttagaatttaaaaataattaggtatagttctatatgttattagtggataattcctatgacaggtaattaattggagaaaaaaaccaagatacaaaataaaatgtatttgtgtacaggccaagtgttagttatggtgggtagagtgaaggagaaatccttctgtcagtcattctgtcagtcaataaataaatattatattctgagttcctggtgccactgtttaaagtgcatacattgttatcaaggaacaatttaggctaaaaaacaaacaaaaagaaaaacatacacaacaataccttcccaaactgtgtctgtggataacctttaatttaaacacgatcatattgtttacatatattacttgtataaatcatgtcactgaagtggtctgcaggacccaaatgtgtatgtagttcaatcacattgattgatcatattcatcataaagttgcgtgcctaacttaaattaacaggagtaacagaagatgacacatgacaaagaatacaaagttgaatatctcttcatatgcccagattagagtcttaaacaattgactctagaaataattccagtaatgtgtctttgattgggttacatttagctaatctcagagaaattttggtttacagattttagttttcaaattgaaccaaaatgatatatactttacagtaacaaaaggttttaaatggaaaggcctcctcaatatctgttctttatcatttttcctcttcaaaacactagcagctaaggaaacatttttttctcagttaaactacagaattttttcaattaaactacagaacaaaatttaattaatatgccatgtctaatgatataactttgatctgctacacctcgttggttaagtgacaatcaacggcatgtcagaggtttaacttggtcaattatttgagaaattagatatcgaggttattgtgatcaagtggcaagytgattttcaaattgacaggatatatgtgagttagtgtgtttccctaggaaatcaggtgaaatcatttcaggaaatagcattcttttaaaaattcagttttctaaaacctctaaaagaaagaaatgcttatcaagtaaagccttaaactatagatatcgcgtgaaggaatttaatatttactggggtgttacaccccagtattaattccttgcttcttttagagtaattcagaacattgtatatagtgaatttattatttaatcttagaatacagtaaaaaacattttgttctattgatcagaacattactgagttcaaaagaaaatggtgagggcttattgtttttcaacagtatagtcacaaaacccaaaatgctcacatt

SEQ ID NO: 548837 - DNA, 668 bp, Homo sapiens
ccattataagggtatttaattaatttcatgccattcctttgattcttttccaagtcatttccagttttcattattggttatgttccagaaaggatggtgaacaatggaaaagaatgcccttgatgcagataacaaagggatgatttcaagaagcaaatttgatttaattattaaaagataaaagcttctctaaactataaatatcctcatctccatctctgtcacaatgtttcaagcttcaaagttttgacatttaacaaatatttattcgtatacatatctattcactaacatattactcagagcagatagagattatttactgtatatctagcattgtattagatttggagtgacaaagaagtaactgaagagattcttgactttgagagaattagaagtcattggaagaaaaagatgggttaaaaactgtgttttgtttgataacgtataagcctacatgtccccatctataataccccaagggagttaatatttgttttctaattgcaaatactcaatgcaaaataaagtgagttacgaacaaacaccaacaggaaaaaaataaaacaaccatctcaaaggagttcacactgaattcataaamatgctttctgatcctctctcatagagcagtttatagtgatattgctgttctgttgatggta

SEQ ID NO: 548838 - DNA, 434 bp, Homo sapiens
taaattgtatgtgtcagttgggtccggacatttgtcttctttgaccttgcttcccaccctcttccaaggagaacacaactacatgtctgtggttcattgctctccattctatatttcctctggaccatgtagctgagtcccagcagtagggtggccctcactctttggtgtgcctgagtctgcttccccaggtaaactgggtatgtgtgattttaagaaacttcaggacgctgacttccatgaagcctaggttagtggcttctgggaggtcaaggggagatgcaatctgctaccatagccagaacctactttccccacccccaccccggcctctgggttctaattatatgattgcaataaagaagtcactgaggccagatgtggtggctyatgcctgtaattctagcgctttagtaagctgaggcaggaggatc

SEQ ID NO: 548839 - DNA, 1382 bp, Homo sapiens
gaccccatttataagacaaagaataattgacagctgtcaacatttgtaagatttttggttcacgtggttttcttaaagctcagcttatatacagtattacccagactatagagagtatggagaaaatattttacttttgtctggctactatgagctaragtttaggcagtgtattagtcagggctctccagaaacagaaccaataggatctttatagacatacagatattggcctggtgtggtggcttatgcctctaatcccagcactttggaaggccgaggcaggtggatcacttgaggtcaggagttggaaaccagcctggtcaacatggtaaaaccccatctctactaaaaatacaaaaattaactgggcatggaggcatgcacctgtagtctcagctactcaggaggctgaggcaggagaattgcttgaacccaggaggcagaggttgcagtgagccaagattctgccactgcactccagcctgggcgacagagcgagactctgtctcaaaaaaattatctatctatctatctatctatctatctatctatctatctatatttattaagaaggactggctcaagcaattgtggaggctgagaagtctcttgatatgccaactgtctacaagctggcagcccaggaaaaccagtggcattattccaattcaagctcaaaggcctcagagccaggggagtcaatagggtcaattccattctgagtctgaaggtccaagtaaccagcagtgttgatgttggcgggcaggagaagatggatgtcccagctcaaaaagatacagcaaattccttctgcctctgcctttttgtttaatccttgacacattggtaagggtggatcttcttaactcagtctattgattcaaatactaatctcttctataaacaccttcagggacacacccagaaataatgttttaccagctatctggacatgccatggcccagttgagttaatacatgaaattcaccatcacagggagatacaaagtcattcattcacacattcactctgcaaagcccttacttggctcctgtcacactgtaaactctggttagaccacaaggaatatataaaagaaggagtgtatgggatctctgcccacaatgtgtttcgaactgttgatgaaagcaagacattcacaaaagaaagaaacaaaaggtaatataggagatgtgattataaaaccggtttattaaaataaattctagcacataaaagctcgaagagtcggccgggcatggtggctcactcctgtaatcccagcactttgggaggccgaggcgagctgatcactaggtcaggagatcgagatcatcctggctatcacggtgaaaccccatctctactaaaaatacaa

SEQ ID NO: 548840 - DNA, 1382 bp, Homo sapiens
gaccccatttataagacaaagaataattgacagctgtcaacatttgtaagatttttggttcacgtggttttcttaaagctcagcttatatacagtattacccagactatagagagtatggagaaaatattttacttttgtctggctactatgagctagagtttaggcagtgtattagtcagggctctccagaaacagaaccaataggatctttatagacatacagatattggcctggtgtggtggcttatgcctctaatcccagcactttggaaggccraggcaggtggatcacttgaggtcaggagttggaaaccagcctggtcaacatggtaaaaccccatctctactaaaaatacaaaaattaactgggcatggaggcatgcacctgtagtctcagctactcaggaggctgaggcaggagaattgcttgaacccaggaggcagaggttgcagtgagccaagattctgccactgcactccagcctgggcgacagagcgagactctgtctcaaaaaaattatctatctatctatctatctatctatctatctatctatctatatttattaagaaggactggctcaagcaattgtggaggctgagaagtctcttgatatgccaactgtctacaagctggcagcccaggaaaaccagtggcattattccaattcaagctcaaaggcctcagagccaggggagtcaatagggtcaattccattctgagtctgaaggtccaagtaaccagcagtgttgatgttggcgggcaggagaagatggatgtcccagctcaaaaagatacagcaaattccttctgcctctgcctttttgtttaatccttgacacattggtaagggtggatcttcttaactcagtctattgattcaaatactaatctcttctataaacaccttcagggacacacccagaaataatgttttaccagctatctggacatgccatggcccagttgagttaatacatgaaattcaccatcacagggagatacaaagtcattcattcacacattcactctgcaaagcccttacttggctcctgtcacactgtaaactctggttagaccacaaggaatatataaaagaaggagtgtatgggatctctgcccacaatgtgtttcgaactgttgatgaaagcaagacattcacaaaagaaagaaacaaaaggtaatataggagatgtgattataaaaccggtttattaaaataaattctagcacataaaagctcgaagagtcggccgggcatggtggctcactcctgtaatcccagcactttgggaggccgaggcgagctgatcactaggtcaggagatcgagatcatcctggctatcacggtgaaaccccatctctactaaaaatacaa

SEQ ID NO: 548841 - DNA, 1382 bp, Homo sapiens
gaccccatttataagacaaagaataattgacagctgtcaacatttgtaagatttttggttcacgtggttttcttaaagctcagcttatatacagtattacccagactatagagagtatggagaaaatattttacttttgtctggctactatgagctagagtttaggcagtgtattagtcagggctctccagaaacagaaccaataggatctttatagacatacagatattggcctggtgtggtggcttatgcctctaatcccagcactttggaaggccgaggcaggtggatcacttgaggtcaggagttggaaaccagcctggtcaacatggtaaaaccccatctctactaaaaatacaaaaattaactgggcatggaggcatgyacctgtagtctcagctactcaggaggctgaggcaggagaattgcttgaacccaggaggcagaggttgcagtgagccaagattctgccactgcactccagcctgggcgacagagcgagactctgtctcaaaaaaattatctatctatctatctatctatctatctatctatctatctatatttattaagaaggactggctcaagcaattgtggaggctgagaagtctcttgatatgccaactgtctacaagctggcagcccaggaaaaccagtggcattattccaattcaagctcaaaggcctcagagccaggggagtcaatagggtcaattccattctgagtctgaaggtccaagtaaccagcagtgttgatgttggcgggcaggagaagatggatgtcccagctcaaaaagatacagcaaattccttctgcctctgcctttttgtttaatccttgacacattggtaagggtggatcttcttaactcagtctattgattcaaatactaatctcttctataaacaccttcagggacacacccagaaataatgttttaccagctatctggacatgccatggcccagttgagttaatacatgaaattcaccatcacagggagatacaaagtcattcattcacacattcactctgcaaagcccttacttggctcctgtcacactgtaaactctggttagaccacaaggaatatataaaagaaggagtgtatgggatctctgcccacaatgtgtttcgaactgttgatgaaagcaagacattcacaaaagaaagaaacaaaaggtaatataggagatgtgattataaaaccggtttattaaaataaattctagcacataaaagctcgaagagtcggccgggcatggtggctcactcctgtaatcccagcactttgggaggccgaggcgagctgatcactaggtcaggagatcgagatcatcctggctatcacggtgaaaccccatctctactaaaaatacaa

SEQ ID NO: 548842 - DNA, 1382 bp, Homo sapiens
gaccccatttataagacaaagaataattgacagctgtcaacatttgtaagatttttggttcacgtggttttcttaaagctcagcttatatacagtattacccagactatagagagtatggagaaaatattttacttttgtctggctactatgagctagagtttaggcagtgtattagtcagggctctccagaaacagaaccaataggatctttatagacatacagatattggcctggtgtggtggcttatgcctctaatcccagcactttggaaggccgaggcaggtggatcacttgaggtcaggagttggaaaccagcctggtcaacatggtaaaaccccatctctactaaaaatacaaaaattaactgggcatggaggcatgcrcctgtagtctcagctactcaggaggctgaggcaggagaattgcttgaacccaggaggcagaggttgcagtgagccaagattctgccactgcactccagcctgggcgacagagcgagactctgtctcaaaaaaattatctatctatctatctatctatctatctatctatctatctatatttattaagaaggactggctcaagcaattgtggaggctgagaagtctcttgatatgccaactgtctacaagctggcagcccaggaaaaccagtggcattattccaattcaagctcaaaggcctcagagccaggggagtcaatagggtcaattccattctgagtctgaaggtccaagtaaccagcagtgttgatgttggcgggcaggagaagatggatgtcccagctcaaaaagatacagcaaattccttctgcctctgcctttttgtttaatccttgacacattggtaagggtggatcttcttaactcagtctattgattcaaatactaatctcttctataaacaccttcagggacacacccagaaataatgttttaccagctatctggacatgccatggcccagttgagttaatacatgaaattcaccatcacagggagatacaaagtcattcattcacacattcactctgcaaagcccttacttggctcctgtcacactgtaaactctggttagaccacaaggaatatataaaagaaggagtgtatgggatctctgcccacaatgtgtttcgaactgttgatgaaagcaagacattcacaaaagaaagaaacaaaaggtaatataggagatgtgattataaaaccggtttattaaaataaattctagcacataaaagctcgaagagtcggccgggcatggtggctcactcctgtaatcccagcactttgggaggccgaggcgagctgatcactaggtcaggagatcgagatcatcctggctatcacggtgaaaccccatctctactaaaaatacaa

SEQ ID NO: 548843 - DNA, 1291 bp, Homo sapiens
tcccagattgctttaagtagtagcctaattgtgaataggaattagcacttgggtaagaaggaaactattaccctgaggtcttagtctgttttggctgctataacaaaatgccatagactgggtcatatagaaaaaacagaaatgtgttgcttacgctctggaggtggggtggttcaagatcaaggtgccagcagatatggtgtctagtgagggctcactctctgcttcaatgatgatgcccactacttgtgtcctcacatggcagaaggacaaaagggctccttcaagtttcttttataagggtaagaatcccattcatgagggttctgccctcatgacccagacacctcccaaaaactcccatctcttactactatggccttaggggttaggtttcaacatatgaatcgtagagggcacaaacattcagaccacagcacmtagtgacacagatattttcattagtgggtttttgtttggcttatcccactgatgattgacaaaagtgataatgttaataaaatgtataaagatgttgggttaataatagtatcagtagtaataggaaaagttagaagtactcaaatactggacttagtttttatatctaagcacctacaggtttttttttttcttttcaagaaagtatgtgcccaagcacatatttacattactgctagaaaaattagctttatctcttcagcttcatatatttcccattggagcaaatcattccatcatgtgattttttttttgataacggaatatatgaggagcatagccatcacactatggcagaacagactgttctgaacttcaaaaatatattactatggaaattcatgtccagaaagtcaaatggaaattgccatgagtgtatgtcttgtttaatggcatttttaacactggaaagaatcacagaattatttgtgacagaattagagaagcctatatcagcatatttgtggacattttctagtaaacataagcactccactgcctttattttcatggtcatatttttattctacctgtgtatttttaggaagttcaataaaatatttgctcagaaagtattccggacatgtaaaggtatcaggtgccaagtcatacaaagaactgaatgcaagagaggaacaggaagttgaatgggtgaaaagtggttgggcagagaagtacaaaaggaattaaaaaaaacgtagaatgacccttaacttaagaatcagaggaatcagactataaagttaaaagccgaaactgttttcataacttcttgttcccacaaatggtg

SEQ ID NO: 548844 - DNA, 1291 bp, Homo sapiens
tcccagattgctttaagtagtagcctaattgtgaataggaattagcacttgggtaagaaggaaactattaccctgaggtcttagtctgttttggctgctataacaaaatgccatagactgggtcatatagaaaaaacagaaatgtgttgcttacgctctggaggtggggtggttcaagatcaaggtgccagcagatatggtgtctagtgagggctcactctctgcttcaatgatgatgcccactacttgtgtcctcacatggcagaaggacaaaagggctccttcaagtttcttttataagggtaagaatcccattcatgagggttctgccctcatgacccagacacctcccaaaaactcccatctcttactactatggccttaggggttaggtttcaacatatgaatcgtagagggcacaaacattcagaccacagcacctagtgacacagatattttcattagtgggtttttgtttggcttatcccactgatgattgacaaaagtgataatgttaataaaatgtataaagatgttgggttaataatagtatcagtagtaataggaaaagttagaagtactcaaatactggacttagtttttatatctaagcacctacaggtttttttttttcttttcaagaaagtatgtgcccaagcacatatttacattactgctagaaaaattagctttatctcttcagcttcatatatttcccattggagcaaatcattccatcatgtgattttttttttgataacggaatatatgaggagcatagccatcacactatggcagaacagactgttctgaacttcaaaaatatattactatggaaattcatgtccagaaagtcaaatggaaattgccatgagtgtatgtcttgtttaatggcatttttaacactggaaagaatcacagaattatttgtgacagaattagagaagcctatatcagcatatttgtggacattttctagtaaacataagcactccactgcctttattttcatggtcatatttttattctacctgtgtatttttaggaagttcaataaaatatttgctcagaaagtattccggacatgtaaaggtatcaggtgccaagtcatacaaagaactgaatgcaagagaggaacaggaagttgaatgggtgaaaagtggttgggcagagaagtacaaaaggaattaaaaaaaacgtagaatgacccttaacttaagaatcagaggaatcagactataaagttaaaagccgaaaytgttttcataacttcttgttcccacaaatggtg

SEQ ID NO: 548845 - DNA, 505 bp, Homo sapiens
gaaggtttattttgtaggtttttaaactcataatttcaactagttaagacacttttcccagtgttttacaatggaatatggtmgaaatgaaataattttagtaaacttaattatttttttcactatgcaagtaatactcacttagctatctgaactcaatatgttaatatatacttacttttagggtcattagtgggacttgagtcatttataataacacaaattttactaggttaatctgacaaaccaacctgcagagtatgtgcatctttgtctaatcttaagtaatagtcttactgatttaagcagacacacagagatgttaggaagttgtcttacatatggacaaggaaaaggtttcaattacactggcaaatgttttggttgggcagatgaagaataaatgaaatactggcatgtcctggaggggttttaaacttaagcacaatggttcaccatctatattgaataacttaaacaaattcatgtttcaaggtagaggctt

SEQ ID NO: 548846 - DNA, 676 bp, Homo sapiens
tgtgtattgatcacacgtgagcacaatgttgactttcatgtaatagttaacaattgctgttatgacattttgtctctgttctcatgaagtgtttttatttgtttcttccaaaataagcagtcacttattttgcctgtgttcttaacccccaatactctacgatctgaagtttacctagggaaaacaacagtaacgaatcgtcactcttctcatatgactcacagaggctttggaggtactgattataccctttgattatatcacgtacatggattctatatctttcacaaagaaaccatgaagttttaaaacaatttcttcttatatcaaattggcaycacatgtttatagcaacgctatttacagcagcccaaacatggaaacaacccacatgtccattaacagatgaatggataaacaacatatgttaaatccatacaaatggaatattattcagccaaaaaaagaatgaagtactgatacgtactacaacacggatgaaccttgaaaacattatgctaataagtaaaagaagccagacacaaaaggtcttatatgattccatttacatgaaacatctagaataggtaaatccatagggacagaaaggagattagtggttgccaggggttgtgggtaggaaggaatgcagagtgactgcttatgagtacaaggt

SEQ ID NO: 548847 - DNA, 676 bp, Homo sapiens
tgtgtattgatcacacgtgagcacaatgttgactttcatgtaatagttaacaattgctgttatgacattttgtctctgttctcatgaagtgtttttatttgtttcttccaaaataagcagtcacttattttgcctgtgttcttaacccccaatactctacgatctgaagtttacctagggaaaacaacagtaacgaatcgtcactcttctcatatgactcacagaggctttggaggtactgattataccctttgattatatcacgtacatggattctatatctttcacaaagaaaccatgaagttttaaaacaatttcttcttatatcaaattggcatcacatgtttatagcaacrctatttacagcagcccaaacatggaaacaacccacatgtccattaacagatgaatggataaacaacatatgttaaatccatacaaatggaatattattcagccaaaaaaagaatgaagtactgatacgtactacaacacggatgaaccttgaaaacattatgctaataagtaaaagaagccagacacaaaaggtcttatatgattccatttacatgaaacatctagaataggtaaatccatagggacagaaaggagattagtggttgccaggggttgtgggtaggaaggaatgcagagtgactgcttatgagtacaaggt

SEQ ID NO: 548848 - DNA, 1649 bp, Homo sapiens
aatttgcctttcttttttttttttttttttaatggagtctcactctgtcgccaggctggagtgcagtggcatgatcttggctcactgcagtctctgcctcccgggttcaagcaattctcctgcctcagtctcctgaatagctgggactatagcgcgcaccgccatgcccggctaattttcttgtatttttagtagagatggggtttcaccatgttggccaggatggtctcaatctcctgaccttgtgatccacctgccttggcctcccaaagtgctggcattacaggcgtgagccaccatgcctgactgactcttttttcataattatactctactgatttcctttctccttccattcttccctccccacccttccttctatccctgtttctttttttctctttctctctgtctctctctttctctaggttaaagctttctaaacaatgctgaaaaagagtaggtaatggtgcagtgtcatttatatcacattcttcatgactgtaatggaaatagtggggtttgtctttgcttttgtttttcaatcaaacatagttgttgctattggattgattactaatatactatttgggccgagtgcaggataggaggagagcctgtgaacaagcctccatgcactttcataagataggtgtaaggtaagattgagaattccctttccccttctcacccatcatccccttctttaggctaggcttgcctgtatttcttgccaagcagaacttcactgggttttcagatctttctgaaagctgtcctttggctttccaggtgggctaataaactgctgggtggtttgccattcactaagtttaatctcatcagtatcatgtcttccagaaattgcttgaagtcactcttctctgatttcccttaactttttggtagttcttttgaatttcaatgagaactaagtaaaaaaaaaaaaaaaaaatcagctcagccaaccaacttgaaatagttcctttaaaaattatcatttctaattctcaagtgttaaaatataaatgaatcctcccttaagtaataatgacagatggaaatactatattaaaaactcagctcctatcacatatctgcaatggtaactcacttaaaaatgttatcctgcattggattaagtggtttcaaaatgaaaatatgaatataaataaactgctcttttacaaaagaactgaaaactagcaagtatactgaaaaagtgcttcttattcaaattaatctatgaattattttccttttttgatattgaaaaagaaccttgctaagaaacaatgtttaattttgtatcaacactgaatactaattaggaaaaaaaagcacccttattattctctctgaataacaagtatttttccagttggatcactgtacgtttgcgcatgttaatgacttatttttcaaagatttaccactctgatgtatgttttgcagtagtagatttcctcgtgtcctccacagtgaaatatcttcattgtttgaatcacatttttggcaggatggtgttcttttacattttgggggwatcataggagcctgagagaggagggagacaaatcttatctataaagcttattcatgaatttttgttttggcgtgggaaatttgcccctgtgtgtaacaagggc

SEQ ID NO: 548849 - DNA, 1693 bp, Homo sapiens
taaaaacaaagaaaggacaagcaggtattacacacttcctgatacaaagtatataccactgtgaagctttttttggcaaaaagaaaaaagaaaagaaaatcaaaattaattcatatcaagactagagatctaattactttttttttttttttttgagacggagtcttgctttattgcccaggctggagtgcagtggcacaatcctggctcactgcaacctccgcctcccaggttcaagtgattctcctgcctcagcctcccaagtagctgggattacaggtgcacagtaccacgcccagctaatttttgtatttttagtagagacggggtatcgtcatgttggccaggctggtctcgaactcctgaccttaggtgatccgcccacctcagcctcccaaagtgctggaattacaggcgtgagccactgcgcccagccataattacaattttaaatgacacacggtgatcaatttgcaaactccaggctgtggtaaactacaaaacaactaggcttctttaacaaactgcaaaggggggtaaaaacaggagaaacctatggcttaaaagatacttgagaggcatactaaccactgaggtgtatagaccttgtttgaatcctgatacgaataaatttttaaaaatttctcagaattatttgaacatttgctggatattttatgtcattaagaaattttcctgatattttacaggataatatttatataaagtttatatatgaaaaagagtaaacagaaaaatatacacataaagtaacacaatctctgaaggtctttttaaaaaagtgaggaaaaggaatatgtgatatttttaccaaatatttatttgacatgaccattacttatgtaataagtcaaagaatgttcaaaactaaatgtgaggttaattactggtgtgtgacacagaatataagtaatttgagggaagagcaatattcattatgcataaatggtaacactgtagatacatatgctcttaacaactgataattgatctatttgaactttaaaacgtctactctcaaattggggggaaaaaacttaagactacaacaaaattaactgcagatcaaatatgacaaatattttaactttgaattattggacagaggaactgaaaattgaatatttacctaatacatgaagaaataacttatctttgagggagtataaaaaataaaagaaaaatgtccccaaatgtaataacattttaaacatttacaaaaataaaaaaacaaagggaaaactacaaaggtaaaaactgtaatgtacaaagaacccattcaattatgtaaratattaagacttcatttatttcactgaactagtatttttgaatacctactacgtgccaaccattgtgctaggtgcttatccctgaagggagagttactacaagggagcacaggagagcctactggggtgctggaaatagtctatatcttcacttgaatagtggttacttggatatatacataggtaagagttgtggacttcagtgtaagttgtacatgaaaagttcatttgtgttgctttccacttctgctaactgttcttatacacactatttcaattttaattcacagaaccttgaaacaaatttctacatagagtattacatgtcgtcttatgacagacgttttaaacaatccaggaggagaaaacagatgtataca

SEQ ID NO: 548850 - DNA, 2138 bp, Homo sapiens
aaggtaataataagggaactattaaaagatgctttattattttagtaattagagcaaaacaaattaaaaatacataattatataccattttacacactatcaatttgtaaaatttaagagtgtgttactgtggcaaagataagagaaatagccttttgtaagagtatgaattgctaccaaaactttggaaagcaatttgtcagaatcttgtagggctaaagatacccattgattctactacatatctaaaacagtagacctctagatatctacttataaaatttttccaaaacttgcagaagaaggataattattgtatttttaaaatagaagaaaaatgacaacgacctacctaaccatctcttaatagagtaataagtgtgtatctttaattagtaaagtggaatgctgcataacagttaaaatgaattagtcagagcttcatgtatcacaatgcatataactaaaaagatcaatagactgagtgataaaatgatatttaagagtgtgatgatatctgtgtgtaaattagaaaatatacaaatgatagtatatgcattttttaaaatgtgtttgaaactgataaatattaacatcagaatggtggttacctctggaaaagaaggaagaagaaataaggagtggggtcttagctgtatttataatgttttatttcttttacaaagcatgatctggaacgaatacagcaatacgttaacatttaataaatctgagttttctacacataatgtcttagtctgttttctgttgctataatggaataccacaaactgggtaatttataataaaaataaacttatttcttacagttctggagactgggaagcatgacactggcatctggtaaatgccttcttgctgcatgcataacatttgygactcttgctttcctgtgttcaacagaactcatgatttctggcctgaagataagacacaaagtccagctccctctgagcacagtcagcatggctctccgaaaatacagtacacaatatcagtctcttttctgtgaaagaagttcggaattaaccaggagtcaattattctggtattaaattgaagttgaagtcactgggaattgcagggcaatttaaagaaaatgtgttagtgagattgggtaatagcagatttgagtctctcacacacacacacgagctccatgtggtattccatatgaatacaaaatgggcaaaaccttgtaaaaatgtggtaggataactacattgaaataactgaggtatggagtcactgccaggatttttaacattctgctatcaattgttcttttaatttttagcctctatcctacaagtgaccttaaacttttacttttttaatgtagtttttacttctttaacttcttctgtccctttgtcttatttcctgcatctttactaaggtcttaaaatggcaaattctaaaatactgattctttagttttcatttggagttttcaaagccctgtggtgatatttgccacacaatagttttcaaaatttaaagcccgtcaattttttgtagaaactacctcttcttacaaatcaagctgggttatccctgtttaacaggattcatggtgtaaaacagaaatgtaggagagtaattctcataatgccagaggaaatcatgaccctgaggcaaggtagctgaaatgtgaatcaattacagtagcacctacttggtaaataagaactacaaaaggatgtaaataaagttacagttattaggaaagataattacataatactagatataaatataatatataaatataaatattacatatctataatattataattagaggtaaacctgggatgtggtcattgagattgagattgagataaaagcagataaaattttattatagcagataaaatttgagtcacagttcaagggactttgaggaggtcaatttgcacatggagtccaggggataaagcagcgtttcaaacagaagagtgccttgctttctctggatgtctggagggacagttcagcctgaggctaagaaaataagtcttaagcatagaggtgcgtctagaagagagaaaagtgctaactttttgacagctacaagttgtgccaaataatgaataacacataattgtgtattt

SEQ ID NO: 548851 - DNA, 541 bp, Homo sapiens
atgggaaggagaaggcattcctgggatgccatgagcaaagtgtcacagttttgcattgatcactgtcatccatgtaagagcaaggacagctcaggcaggtggtggccatagaatggaggtggacacataaatatgtggagaaagaaggaagtctttgggttaaaaggccaagacttgacacctgtgaggacctggaatctaaccctgtgtttgtctgtaaacccaaggcaagtcacccttcttccgaggcacagtttcttcacctgtaaaatgaagggactgggcaagacggtttctaaagttcctagggccaggtgcagtggctcacgcctatcttcacaatactttgggaggctgatgcagaaggatcactggagctccctcaagaccagcctggggaacacaggaagaaccttgtctctacaaaaaattaaaaatattagctggacatggtggcaggacctgtggttccagctactcaggaggctgagyggggaggatattttgaacctgggaggtcgaggctgcagtgagctgtgat

SEQ ID NO: 548852 - DNA, 380 bp, Homo sapiens
tggtaatgtctttgattaccaccaccatctgacctggtcttatgayctgttagcttccttcatcagatgtgagcaccaggatggcaggggcctcatctgtcctgttcctcctgtggcctgggtcctagcaccatgtctggtacagtgtagatgctcaagggaagtttactttgtagaactgtttatctgggagatattactgttggtctaacctgtaccatattgtaaacctccagccattttgcagactttgatcacagtgaaacgttccatgggaacttgggccatgagaaacatccttcctaaccacgtgactgcagaaacatccttatcacatcctcctgggcaaaggccaaacagcctgactgcagggacatcct

SEQ ID NO: 548853 - DNA, 1420 bp, Homo sapiens
tctgagagctaaatggagcaaaaggtgagtgtttcgatgttctcataacaatgaaaaggcttgaaaaacatagaaaatgaacaataagtaaatgtaaataactaagtcatacttttgccctttcttgttgtcaagataactgatttcctgattgatttttgtctatgctattcaagacccaaatgacggcagaagtttattcatttctttctctcttcttttatggatataaaacactggaaaattattattaggtcttatactggaccaggttgtcactagttaaagtcaatgaaagagaagcaattggatattctggcccagatggggagctgattaatttatttaattaaccaagaaaagatatacatttaaattctagttattatcaataataattttgcaaacagactctccttcttaccccaaacccatgtcaggaacgtcttcattaaggtccagtccctttatggaatccatgaactaactgcacaggctgttctgtttaatccaacatcagcaatggaggcagttccctgctgtagagagaagtcgtcaggctctggagagagttcctccaatcacttcaatgtcttacttatcttctttgtgcttcggtagtaaagaggcacactcaaaatacctatttctcatggttgttgctttaaatgagattatgtctataaaccacttagatacaaaagtgtttgctagaataatcattgatagtatctttttgattggcccaaagtcttttttcagaaagagccatcccatttccctttatttgcagcaacagagtctatcagatataactatttctcagtttaaagggtgacttcagggtagtcttggagccaatttggtaaatctcacagagtctgtgttttcctggtctgcactttgttaattagtcattcgcgtttttagaactaccgtacaccctgtrtatggagaaaccatatttaaagaattgaagtaaaataaaacattcagcactgaaactgtagtgagcacattcttttgatggctcagatgccgtttcaggattctgtggtcccttgtcctccccactcctgaatgtggtatatgattggatctctctatatataagaagtatatattatatccaattctttttctaaaataatgatgttcacagggctcatgaattcattgctgcacaggaaggatgttgcctataaactgactaaatcacttccaaccataaatgtattattatatttcaaagaagtatgtagctaatcttgtgacaaatgaaatgcaaattcatttaaaagcgctcctgaattaaacatgactccttggcattagaattcttcaaccaaaaagaacactaaattaattactgccatttttggttttgttaggtgagacaccctttctattaaacgaaggt

SEQ ID NO: 548854 - DNA, 523 bp, Homo sapiens
ggtaattatccatttctttcacattacttgctttaagatgttcagattctacccttcttccctgaagaacttcatggtttttctggctttagatttgaaaagtcagagaatgaataaaaaaaaataaaaggttaaaataatataagctcttcctaaggcccccagccaattagacatgcagtccctggaaaataaaaaggacaagtcagccagaggacgtttgtttttgtatgcaagtctgtaaagtgatcaytttaatttttagggctacccgaccgtgtctatccataacaaatgaactaaaatgcttgcagtgtgcgcattttttccccaaaatcactttcatagattgagcaatttggagcatttaggcataccttttgtttcttttgccttgttttgtttcactttctggggttcctctcattgtcatttcaacatagatcctaaatcccttgaatttattttctgatggtggtctttaatggatattttattctatttttttattatctatttgttt

SEQ ID NO: 548855 - DNA, 574 bp, Homo sapiens
cacataattctctttattccccatgccaagcttyaaaggaaaatactctccagttccatccttccttgactaacatatgcagagaaatgataagtcatcagaatgatcaaatgcactggagagattctgtgaacaataaaacagcagctacagcatctcggcagatcaatgctattataaaggagattttcagtttacatttttagctatcgtttaggaaggtggtcataaaaatggtactggactcttcgaaaaaaaaaaaaccttctcattaaaatgtaatgggactgtttaaaatattcagaaatggtagcctggatagggtcactgttttggcagtgtattatttttctattgctgtagaacaaattattagaaacttagcagcctaaaacaacatgcatttagcatcgcgaagcttctgtaggtcacacatctgagcacgacataactgggtcctctgctcagtgtctcacaagcagcaattgaggtgttggctggagctgcaacctcatctgaggctcagagtcctcttccaggcttctgtaagggttgttaggattcagtttcctac

SEQ ID NO: 548856 - DNA, 1235 bp, Homo sapiens
tatcactttgtattaacwaaattaaattttggaacctgggcctgtgtccaatttgaataacaattgtttattttatatatatattcatatattttatttgttgatttgaaacaaatttataccacaaaaaataatggaatctgagacaacaggaatttgatcccaagagggatttggagtctgttcaaatgtctaacaagtattttgcaacatacttgcaaagtcccagactgcgttgctggaccaagtctctctagacaaaaggtgttctgcagtatcgaggtatatttccatcattcactccaaaagctgcttgtttgcctttatttattttggtggagatctagttttgcattagattccaattattactttctggatttaggtaacttgcaattgtgtgactttgcctaatgatatggcaattgaaatgttgcttacttctaagaactcttctttattaataataagtatgttcctaagtatccagtgaaataatctaaaattgcatacatttctatattaacaattttcctatgtcataaaaatatttcattggaagtgaagaccaaaaagcaatgtaagtactaaatctcaaggatttatcaacagaaaacattataattttataaagactataaaactataattataattataaccaagttgtaattatataattatttaactataattgcaaattataattattcctaaaaattactgtaaactttcttcacaaatttgtgaaaccaaataattctttccccattactagcttttcctcaactctcaaaatgttctgaacctacacatattaactttttcagagactttttttatttaatagtgagcagagcttccaaatgaagttaagacgtatgacatgtgaaacatgaaacaatttttaaagagccagccttcctaaagtccctgacatatcttcactcatgttatgctccacttcatggttggattagactggtatgtgtgatcaatagccagtttcctgaatcttcccattgtgtctgctgttcatgtgcataatcgatcagagaaattccacaaaccatactactttgtgcctgtgtgcgtgcatatatatatatgcacataggtctgaaatgagcaatcctaacacaaggtttagaaatgtccaatagctatataaccacagttttcagagtcatggatcacctcactcatctgattttattctgacaagtttgtaggcc

SEQ ID NO: 548857 - DNA, 1235 bp, Homo sapiens
tatcactttgtattaacaaaattaaattttggaacctgggcctgtgtccaatttgaataacaattgtttattttatatatatattcatatattttatttgttgatttgaaacaaatttataccacaaaaaataatggaatctgagacaacaggaatttgatcccaagagggatttggagtcygttcaaatgtctaacaagtattttgcaacatacttgcaaagtcccagactgcgttgctggaccaagtctctctagacaaaaggtgttctgcagtatcgaggtatatttccatcattcactccaaaagctgcttgtttgcctttatttattttggtggagatctagttttgcattagattccaattattactttctggatttaggtaacttgcaattgtgtgactttgcctaatgatatggcaattgaaatgttgcttacttctaagaactcttctttattaataataagtatgttcctaagtatccagtgaaataatctaaaattgcatacatttctatattaacaattttcctatgtcataaaaatatttcattggaagtgaagaccaaaaagcaatgtaagtactaaatctcaaggatttatcaacagaaaacattataattttataaagactataaaactataattataattataaccaagttgtaattatataattatttaactataattgcaaattataattattcctaaaaattactgtaaactttcttcacaaatttgtgaaaccaaataattctttccccattactagcttttcctcaactctcaaaatgttctgaacctacacatattaactttttcagagactttttttatttaatagtgagcagagcttccaaatgaagttaagacgtatgacatgtgaaacatgaaacaatttttaaagagccagccttcctaaagtccctgacatatcttcactcatgttatgctccacttcatggttggattagactggtatgtgtgatcaatagccagtttcctgaatcttcccattgtgtctgctgttcatgtgcataatcgatcagagaaattccacaaaccatactactttgtgcctgtgtgcgtgcatatatatatatgcacataggtctgaaatgagcaatcctaacacaaggtttagaaatgtccaatagctatataaccacagttttcagagtcatggatcacctcactcatctgattttattctgacaagtttgtaggcc

SEQ ID NO: 548858 - DNA, 689 bp, Homo sapiens
ctctggtagttgtcagagaatttcctggactgtccacccaaccatgctagcatctgcttatgtcctgccttcaatagttttgaaagtgtgaaaatgttttgtattaccttttgttctgcttaaactgaatagaatggtttctgttatatgaaactgaagagtaacatggataattctcatatagtaatatgttttgagataggaccaggaactcctagctaattgctggwggatagataatagaaaactaggggactggaaatgtataggtaaattttaaaaattgtttgaatactgagcagaaataatttttctttgtattattatgtaggtaaatctcaatgttctgcatttttatctcatagagaagataaaactgatacatgtgccatttagccccttgcttcccaaagttttttatattatgatacacatagaaatcaatagtatttgtgtggtccactcatgtaaagggattcagattatcccaagttccatcagaccatctatgtactttatgcatcacacaccagtctacatgagaaatctcattgtcaaagtcaaaatgtttgtcatttgaaatctgactttaagcatccaaataatgaccatctcttacttttttttttaatttttcttttttttttttttaagttttgagatggagtctcactctgtctcctaggctg

SEQ ID NO: 548859 - DNA, 554 bp, Homo sapiens
catcgcactccagcctggcgacagagcgagattgtctctcaaaaaaaaaaaaaaaaaacgcatttcaaaggtaaggagacataatatagaatttgtacaccagattctgaacttatgactatttttaaaggataatttgaaagttmtaccagaatatgctgcttcttgatttggtcttattttgctctttttatttcttgtttttgtttgttgtttgaggtaggaatttagttggttgaggactttatcacttctaatataaacatttagtaataaaaattttcctctcacctctgcttcagctgcatcttacatattttcatataccttatttttattttaaatcagttgtatgcactttagtatattgtcaacaagataatatttctaaaataaaaaccaagacatcaagggtttactttctgaacatttcttaacattaaatcagcacagcatcttcccagatcttttcgtttttggatggctccatactttattccctacccacttcctctttcctttaaagaatgattaacagattccatagacaatat

SEQ ID NO: 548860 - DNA, 681 bp, Homo sapiens
ttttttttgtttttgtttttgttttaaaaaaaaaggttgggtacagtggttcacacctgtaatcccagcactttgggaggctgagggtggaccacttgaggtcaggagtttgagaccagcatggccaacatggtgaaaccccgtctctattaaaaatacaaaaactagctggacaaggtgtcgggcacttgtaattccagctacttgggaggctgaggcaggagaattktttgaacccaggaagcagaggttgcagtgagctgagatcatgccattgcactccagcctgggggacagagcaagactctgtctcaaaaaaagaaaaaaaaaagagagaaaaaaaatcctgagaagttacttggggacagattgtaaagcgatagactaagaatttggactttgtcctgaggatttggggatcgtattaggattatccagagggacagaaccaataggatatatgtatatataaaaagggggtttattagggagaattagctcacaagattacacagtgaagtcccatgataggccacctgcaagctggggaaagggaaggtggtagtggctcagtccaagttcaaaagcctcaaaaccagggaagccaacagcgcagccttcagtcggcagccgaaggcctgagagccccaggcaagctgctggtgcaggtttcagagtcca

SEQ ID NO: 548861 - DNA, 557 bp, Homo sapiens
catctctttgtgatttttctcaacacctgtgtgcatgcacctctgagcattccccagaggcttttccacaaatgcacctatttcttactatctccattgcttaaatatttttgccaagagttcaacatttttctttgaccttttttggtttagttcaatgaatatctatcagattcctacaatggcatttactgtattaaacgctggagacatagcaatgaatacgtgattyccataggagaaacaatcacgcaaatgtaatttgagtatcacttcagtgctttgtgggcattctcagcatagttcctctttggcttgcttataacctaaaaagcaccatacatttttacctttattgtccccacactggctttatgactgtctttgaacgacacagttaatgcttctttgcctctgtgcctggaaacaagtaattaagtcccccaaacaaggaggtattacagcctacagcctgggtcagcattgccaagtgtgagaacagtcatagtttggcctgtgcactggttttaggtaagcagctctgcttccagaacact

SEQ ID NO: 548862 - DNA, 557 bp, Homo sapiens
catctctttgtgatttttctcaacacctgtgtgcatgcacctctgagcattccccagaggcttttccacaaatgcacctatttcttactatctccattgcttaaatatttttgccaagagttcaacatttttctttgaccttttttggtttagttcaatgaatatctatcagattcctacaatggcatttactgtattaaacgctggagacatagcaatgaatacgtgatttccataggagaaacaatcacgcaaatgtaatttgagtatcacttcagtgctttgtgggcattctcagcatagttcctctttggcttgcttataacctaaaaagcaccatacatttttacctttattgtccccacactggctttatgactgtctttgaaygacacagttaatgcttctttgcctctgtgcctggaaacaagtaattaagtcccccaaacaaggaggtattacagcctacagcctgggtcagcattgccaagtgtgagaacagtcatagtttggcctgtgcactggttttaggtaagcagctctgcttccagaacact

SEQ ID NO: 548863 - DNA, 652 bp, Homo sapiens
caactggccaaggggcaaagttttgctagaaggaacaacaaggtctgtaaatcccagaagagggggggtgaaattctaatcccctatcctaacactgctacttgaggtaagagttcctgattaagattcccaaatatctaaatgactgcmcagaatcattaacacactacattgaaggttaagattccttcagaaactcacatgacagaatgacaaccatgagatgagagtcttttatctcatccagagacttgaaccactattgctttttgcttacctttcctacttctttctgtggagcctggataatgttttgatcttccattttatcctcttcctcatcaaacaagctaagaacagttttggttctaggcttggttcctttgtcccatggggatgatgaagaaaataaatcagaatgcttgactgtttcctgagcagatctagtcaaaagtccttcctgaaaatgaaaataatagggggaaaaaataagtaacacctggaaatacaaatcctatcatggagcctgccaagcttctcgttaattcagtaactgccacatttgcatgactcagggcacagtgaatcacatctgtgcccaagtaacaaaacactgaggtcaattcttgattggctgctccaagagacagtc

SEQ ID NO: 548864 - DNA, 652 bp, Homo sapiens
caactggccaaggggcaaagttttgctagaaggaacaacaaggtctgtaaatcccagaagagggggggtgaaattctaatcccctatcctaacactgctacttgaggtaagagttcctgattaagattcccaaatatctaaatgactgcccagaatcattaacacactacattgaaggttaagattccttcagaaactcacatgacagaatgacaaccatgagatgagagtcttttatctcatccagagacttgaaccactattgctttttgcttacctttcctacttctttctgtggagcctggataatgttttgatcttccattttatcctcttcctcatcaaacaagctaagaacagttttggttctaggcttggttcctttgtcccatggggatgatgaagaaaataaatcagaatgcttgactgtttcctgagcagatctagtcaaaagtccttcctgaaaatgaaaataatagggggaaaaaataagtaacacctggaaatacaaatcctatcatggagcctgccaagcttctcgttaattcagtaactgccacatttgcatgactcagggcacagtgaatcacatctgtgcccaagtaacaaaacactgaggtcaattyttgattggctgctccaagagacagtc

SEQ ID NO: 548865 - DNA, 968 bp, Homo sapiens
ttttcctccagatttctgcagactcagtttaaatgacatctccctaaaaaacttccatcttgttttctacactaaacttgtcattcttaagatttttatatttattgctttttgtttattgcatttatttccatcttcaactcagtagaacataagcttcatgaaacttgggaccatatctatcttgctccttactgtaccctcagtacttctagaagagagtctgacatgtattcattttctatatatatatatacatatatatatrtatacacacacacatatatatatatagaaaacaaatgaatctagatgtgaaaataagtgtcagataagggctaaaagagtgctttgcaattctacagcaggagagacatcttgtggctatcaggtaaggtttcctggggtgagtataatttaggtaggtagaaaggtagaacaagtaaagctatttctacaaattgctgttctttaaagtttctcttctagaaaatagacgtttttgtctgttttgttcattgctgtatcttcaatgtcttgatagtgccttgctcattgtaggtattctctgaatattcattaaatgaataatcatgtatttttctaattaaacatttttaagagtaaaattgagttttgcttgcttgtttgttttttatcaacagtttttattggcacaagggactcctgggtctgagtaatgcaacagtggaatggcatattccagacactgcccagcctggaatctacagaataagatattttggacacaatcggtaagcaggacaattctgaagcctgctgacatactttcatttgaagggcactaccccgggcttttgaagttgtaactatttagtgaaaagttgatagatcatttaaagaacagctttactctctacccttttataagtgattgcaatgaatgggaactagggaacaccatgttgacttttatatcgaccctg

SEQ ID NO: 548866 - DNA, 968 bp, Homo sapiens
ttttcctccagatttctgcagactcagtttaaatgacatctccctaaaaaacttccatcttgttttctacactaaacttgtcattcttaagatttttatatttattgctttttgtttattgcatttatttccatcttcaactcagtagaacataagcttcatgaaacttgggaccatatctatcttgctccttactgtaccctcagtacttctagaagagagtctgacatgtattcattttctatatatatatatacatatatatatgtatacacacacacatatatatatatagaaaacaaatgaatctagatgtgaaaataagtgtcagataagggctaaaagagtgctttgcaattctacagcaggagagacatcttgtggctatcaggtaaggtttcctggggtgagtataatttaggtaggtagaaaggtagaacaagtaaagctrtttctacaaattgctgttctttaaagtttctcttctagaaaatagacgtttttgtctgttttgttcattgctgtatcttcaatgtcttgatagtgccttgctcattgtaggtattctctgaatattcattaaatgaataatcatgtatttttctaattaaacatttttaagagtaaaattgagttttgcttgcttgtttgttttttatcaacagtttttattggcacaagggactcctgggtctgagtaatgcaacagtggaatggcatattccagacactgcccagcctggaatctacagaataagatattttggacacaatcggtaagcaggacaattctgaagcctgctgacatactttcatttgaagggcactaccccgggcttttgaagttgtaactatttagtgaaaagttgatagatcatttaaagaacagctttactctctacccttttataagtgattgcaatgaatgggaactagggaacaccatgttgacttttatatcgaccctg

SEQ ID NO: 548867 - DNA, 1459 bp, Homo sapiens
gtcagaagaagcaatgggaaaatctactggataaacaacaggatttccttaacaaaaaaaggcatgaaggaagagatcatgagaaatgttatatattaagagtgacataagagacaaaccaaatgctatgtatggaacttgtctgcactctggttaaacaaatccagtgtaaaagacatttttttagataatcatggaaattcgaccacagactgggtattggatgatgttagggggttattgttaactttgtcagacatgagaatgaccctgtagttaagatttttttaagtcgttatctgttagaaaaatataccaaggtatttacagggtaaatactctccagctcaacctccctctccattccagagaatggtgaggagacagatgaaacaacattagcaaaatgttggtaccttctgaagtcggacaatggggtaggtggagtatcatcaractattccctctagctgcttgtatgtttcaaaatttccatgataaaaggattttttaaggtctcagaatactcaatgacagtctaaggttggaatcacagtggaattctcacgatgcgcctcccatggtagaggcacagcaagagtaatatgtatggaaggggatcctcaggttccccttggcagggcttcatattccccagcaaggaggaaacatgatacttccacaggaccccactacattttctgctaaaaggtggacactgtttaaagaaaataaaaagcccctcaaagattggaagatctctcttcaatagggtctgtaaagcattctctattcataaacgcatttcctgaaatagaacatattcacatatttaaatgtaaagtgaatcacttacagaaaacactgttattactttctgcaatgcctttctacaatctgaatacaactgtcttctgccttaatttaaaactaggcctaccatttttttttttattttttgagacggagtctctctctttcgcccaggcctgactgcagtggcactatctccgctcactgcaagctccgcctcctgggttcacgccattctcctgcctcagcctcttgagtagctgggactacaggcgccggccaccgcgcccggctaatttttttgtagttttagtagagacggggtttcaccgtgttagccaggatggtctcgatctcctgacctcatgatccacccgcctcggcctcccaaagtgctgggattacaggcgtgaaccaccgcgcctggcctaggcctaccatatttttaaaagtacagcacaattcctttctggttttgcctccatgtaaacagaaagaaggactatacactgacatttcccctatttgctgcagagcttatagtacttgcataataaattagagaggaaaaagaccaactcagttcaactgcaactgagaagaaacatgcatagtgatacttatcctgattctgtcaacttgtaaa

SEQ ID NO: 548868 - DNA, 675 bp, Homo sapiens
attcatgagaaactgcccccatgatccaatcacctcccaccaggccccacctccaacaytggggattacaattcatcatgagatttggtggggacacagatccaaaccatatcaggagtgtatgcccattacttttgagagtacaagaggaaagtagaacacatcacttctctcatctcattgaacagaacttagctatatggctacaaccggcttctagaggtagccctgggctatacaaaggctgggaaatacagtcctaatccatgaccagttaaaactatcactgtggaagaatgggagagcagattgtggtgtggagtctaatggtctctttcacagccagtcaacctaataaaactccgcaactccttataatccccttccactcttatgaaattgctgtcaagtttcaaaggcttaattcagtccttatcccttgaagcttctctacaatgtttgatataattgacctgcttggagttctttcttcctgatatagtttggctctgtgtccccagccaaatctcaccttgtaacccccataaatcccacgtgttgtgggagggacccagtgaaagataattgaatcatggggtccagtctttcccacgctgttctcatgttagtgaataagtctcacaagatctgatggttttaaaaatgggagtttcc

SEQ ID NO: 548869 - DNA, 675 bp, Homo sapiens
attcatgagaaactgcccccatgatccaatcacctcccaccaggccccacctccaacactggggattacaattcatcatgagatttggtggggacacagatccaaaccatatcagsagtgtatgcccattacttttgagagtacaagaggaaagtagaacacatcacttctctcatctcattgaacagaacttagctatatggctacaaccggcttctagaggtagccctgggctatacaaaggctgggaaatacagtcctaatccatgaccagttaaaactatcactgtggaagaatgggagagcagattgtggtgtggagtctaatggtctctttcacagccagtcaacctaataaaactccgcaactccttataatccccttccactcttatgaaattgctgtcaagtttcaaaggcttaattcagtccttatcccttgaagcttctctacaatgtttgatataattgacctgcttggagttctttcttcctgatatagtttggctctgtgtccccagccaaatctcaccttgtaacccccataaatcccacgtgttgtgggagggacccagtgaaagataattgaatcatggggtccagtctttcccacgctgttctcatgttagtgaataagtctcacaagatctgatggttttaaaaatgggagtttcc

SEQ ID NO: 548870 - DNA, 675 bp, Homo sapiens
attcatgagaaactgcccccatgatccaatcacctcccaccaggccccacctccaacactggggattacaattcatcatgagatttggtggggacacagatccaaaccatatcaggagtgtatgcccattacttttgagagtacaagaggaaagtagaacacatcacttctctcatctcattgaacagaacttagctatatggctacaaccggcttctagaggtagccctgggctatacaaaggctgggaaatacagtcctaayccatgaccagttaaaactatcactgtggaagaatgggagagcagattgtggtgtggagtctaatggtctctttcacagccagtcaacctaataaaactccgcaactccttataatccccttccactcttatgaaattgctgtcaagtttcaaaggcttaattcagtccttatcccttgaagcttctctacaatgtttgatataattgacctgcttggagttctttcttcctgatatagtttggctctgtgtccccagccaaatctcaccttgtaacccccataaatcccacgtgttgtgggagggacccagtgaaagataattgaatcatggggtccagtctttcccacgctgttctcatgttagtgaataagtctcacaagatctgatggttttaaaaatgggagtttcc

SEQ ID NO: 548871 - DNA, 536 bp, Homo sapiens
tgctttgcagtctgggagcttgtagttaacttaaagaattttaaatgcaattagtactttcagacaatcgatgtcagactgtcatatcttattctttggggtatgaagcaaggtattttacaatgcccaaaaataactttcaaaatagtatttagcaaaytgtctggagcctctttccccccaaattagagtatccaacacagatgatacacaagatataacttgaagattactgattttttaaatgcctccccagaatttacatattaaatcgattattttctccttcataatagttaccttttgacacttacacattcaccccaagtacaaattcactaattatcaaggcctaggcactattataattctgggcatataaatcttaaatattctatgattgaatgggtccatgagtgagtgagtgagcaaatggtaaaagaacagataaattaatttagaacctctgctttgaggagtgctttcccagccagtaatatttttaatatctacgctaatggcaaaactttctggtt

SEQ ID NO: 548872 - DNA, 536 bp, Homo sapiens
tgctttgcagtctgggagcttgtagttaacttaaagaattttaaatgcaattagtactttcagacaatcgatgtcagactgtcatatcttattctttggggtatgaagcaaggtattttacaatgcccaaaaataactttcaaaatagtatttagcaaactgtctggagcctctttccccccaaattagagtatccaacacagatgatacacaagatataacttgaagattactgatkttttaaatgcctccccagaatttacatattaaatcgattattttctccttcataatagttaccttttgacacttacacattcaccccaagtacaaattcactaattatcaaggcctaggcactattataattctgggcatataaatcttaaatattctatgattgaatgggtccatgagtgagtgagtgagcaaatggtaaaagaacagataaattaatttagaacctctgctttgaggagtgctttcccagccagtaatatttttaatatctacgctaatggcaaaactttctggtt

SEQ ID NO: 548873 - DNA, 548 bp, Homo sapiens
tgcactctggtggagcatgcggggctgagcaggaggaggtcagcacggctatgggaggccatggccgagtcagcgaaggctggggcccaggtctagacaatctctgcattcagmagcagcacagagcccgtgttctattatctgtataaatggagcagaaaattcaaaagccatttgcagtggtttctggcatgccttatctaggtcgggtgcctttctctccaatttacttttttttttttttttttttgagacggagtctcactttgttgcccaggctggggtgcagtggtgcgatcttgcaatctccgcctcccaggttcaagccattctcctgcctcagcctccggagcagctgagattacaggcacgtgccaccacaccccgctaatttttgtatttttagtagagacgggtgtttcaccatgttggccaggctggtctcaaactcctgacctcaagtgatccacccgtcttggcctcccaaagagctgggattacaggtgtgagccaccatgcccggcctctttccaatttaccttctgatg

SEQ ID NO: 548874 - DNA, 548 bp, Homo sapiens
tgcactctggtggagcatgcggggctgagcaggaggaggtcagcacggctatgggaggccatggccgagtcagcgaaggctggggcccaggtctagacaatctctgcattcagcagcagcacagagcccgygttctattatctgtataaatggagcagaaaattcaaaagccatttgcagtggtttctggcatgccttatctaggtcgggtgcctttctctccaatttacttttttttttttttttttttgagacggagtctcactttgttgcccaggctggggtgcagtggtgcgatcttgcaatctccgcctcccaggttcaagccattctcctgcctcagcctccggagcagctgagattacaggcacgtgccaccacaccccgctaatttttgtatttttagtagagacgggtgtttcaccatgttggccaggctggtctcaaactcctgacctcaagtgatccacccgtcttggcctcccaaagagctgggattacaggtgtgagccaccatgcccggcctctttccaatttaccttctgatg

SEQ ID NO: 548875 - DNA, 1040 bp, Homo sapiens
cgctgcataccactcattccaagtgctttaccgtattaactcattgaagcctcacaactaccctatgaggtagatggatttttttcagggaaggaaactgaggcacagagaggcaactgggattcaaacgttgtgctgccactgctgcrgcagtgcttgtccaaggctgcagggagtcttggatgagtgccaggagctccagctgctccagctgggaccctgcagaggggtccagagggacctggccccagcccagcccacagagcccccactagcctaccctagaaaggagccctgagaaaggaaaatctggcctccttatctcctgggggaaaggaatgcactctccctcctgccaggataacgggctgttttaacgggaagtctccaccctggctgtgggttcctcccagccaccacttattccttctggctgtctctgcctctggcatcccacttcccatgcttcaactcctgacccctgacacccccaaaataatcctaactcaactcatggccccctcaaatcagctgcccctgcacagctccaagctggtcaagaagtcttccctgccccactgttgcttggatatcctcgccaggcaggcagctgagacggggtgggaggtcaagtgacccctgcagggaaggggcagtcagtatcaacacaccgatatgtaagcagagcccccctcctgccaagcaccaggctgaaaatattcacatgctcagaccccttccccaccaagttctgaggccatgggcagctctcccccaccccaagtcctacccaagaaacaaagcagggcctccctcagaatgccatggctaaagattcagtatcatagaactgtagaaagttagcatcacagcagtctttagcctcaaatccattttacagatgggaaagctgaggcctgagaaaggagatgcccacgtcacaaagttagcagctgctcaggggagaccagaacacagtgtggccaagcccttgtccaatatgtcctatgggtccccatctctctgctgttactggctgg

SEQ ID NO: 548876 - DNA, 3111 bp, Homo sapiens
tgggcaacagaaatgactgggtggtggcactcagagaatcttagcgtggactttgtgggagggcctatttgggttgaggggttccttccttctgcctcaggggaaggaaytggggatgcagactcaggagaatccagtactttgtgtgtatgtggacgggagctgacattctgtcctcatgttacatgtctgcccgtactgcagaccgtggtcctgcccctcagcctgtcagagcaggagctgaagagaacgggagagcacgcaggacagagcaagagctctcacgacgcaagggagctgctttgagttctccagccagtcctctcccaagaggcgagctctgggcactagctaaagtctgaatggcatcacaaatgtggcgagcctggacaagggatctgtgagaagagcggggacacacaagctgctacttctttttttttgagacagggtctcactctatcacccagcctggagtgcagtggtgcaatctcggctcactgcaacctcagcctcccaggttcaagtgattctcatgcctcagcctcccgagtagctgggactacaggcacacacaaccacacccggctaatttttgtattttttagcagagacagggtttcgccatgttaacgaggctggtctcaaacccctgacctcaagtgatccacccacctcagcctccaaaagtgctgggattacaggcatgagccactgcgcccagccccaagctgctatttctacatggatgcctgggaggcagcgtggcatctgggaaatatccctcgggggctttatttggcattttattctggggctttccatctcatcctcttcccctttctctctgttttggtttcgtccttttccttctttctctgtctcttgctgggcttatgtagtgtctctctctttctccaagaacatcagggttactcccttggagtcaaacctacgctcttcccacccagtctccgatgagcagactgtgggaagactgagttatagttttttgtcatgtggtgagaaaaggtaggtacacacccctcaatatcctgaaacaagctgccagggctcagtcaccaaacccattttaaaccagttatattttcattctcagggtaaagggtttcctgaagtttctacctgctctaagtttctacccttgaggctgattgactagtccagtgagatcaaggaaatgaaaggcatttcacacaccagcaggtaaacaaacgcatatgcaaaccagccttcagaatgggaaaatgaaggcacgcgtgaaagaggaataaggtttctgtcatcacaaaggcattcatgggtaaggcagatgtattcgcagttatgcaaagtccagagtgttagaatttgaaacctgaaagacttaaatttaggggcaaaaagggcaagtaatgtttaggtgagtgtggggcagggaaaagcacagatcttacaagtgctgggggaagccctggctgtgagactgggccgtcaggtttcttctctcagcctccatctcctcagccctcagtggggccccctcccggcctgcctcacggggctgccgtgaggagcagagcagagagctcctgtggaagctgatggcactctctacagtattagtctttttgttgctgagagtcactgttattactgaggaacagtcggcctgtagcaagccacgataggaagtggaacacaagcagagacaggaagttgggacccatcctgaatttcgagatgaggatcctgggaaacactcctgcattccccagacaggtcctttggtaccatttgctcaaggacaagcctagattggcagagtctttgttccgaaccacgaggactgttctgacaattattgactttcaggagattgctcatttgtggtttgtgaaggacaggcaagcagtcatgtacatgcataaatgaagcttacggagttggagactgacggagacacaaggggtcccctggcccatcagtcccatgtggctgaattgagatccctgagtatttctcgaggccccttcttgatctgtggatgtctgatacaggaggtggaagaggagctgggatcctcccttttggttttgagcacatgccgttggccttagcctttggttctagatcctgggcgcacccattgttctcagccattcaggagccatgccccgtggactctggatcttggatttttccctaaactcttgatttttctgcctttttattgtgtttatggataacatttgctcaccaggtccagattcattgcacacagtgactcctagctttggatgcctctctctccccacccaccccacccagctgagaaccgtaatcactgctgtagtcgtttgtggtcactggaagactctgttcatgcctgagtttagattaattgccaaacctacataagagcattcacagtgtgagttactactggttttgtttaagatcattttagtatatccacgaagttatggtttttttagtaaagggtttccatttgagtgtttataagtgcctttgttatttgtgaattggaaaaatgagcaaggaatctgttttttcattattcgcctctgattccaaacaattgtccagtaatgctgaagaatcctggggtatcagcagagatcactgtattagtgctcagtaaggaaaacagaaataacttcagtcattttaaacagggaatctcatccacagggctgattgcagaggtgttagaagggctgaaggagcaaagagcgcttcagtaaggttggccaaatgtcaactgccggaagctgctgtccctgctaggactggaggatgaagagggctcatgaccatgagccccaggaggtgaaacccagaatctcacactcacttagaagtgtcatctattgcttctgcctgcattccatgggctagaactcagtcacacagccacttctagctgcaaagaggctgggagtctacctgactccctgactacttgagtgatgaccagaggaaaaggactacgtttgtgaataatgagtctctgctacatatggatacggaatcactgttgttacaagagaacagtgatccttttgtagaggtatgcttcaagatgtg

SEQ ID NO: 548877 - DNA, 3111 bp, Homo sapiens
tgggcaacagaaatgactgggtggtggcactcagagaatcttagcgtggactttgtgggagggcctatttgggttgaggggttccttccttctgcctcaggggaaggaattggggatgcagactcaggagaatccagtactttgtgtgtatgtggacgggagctgacattctgtcctcatgttacatgtctgcccgtactgcagaccgtggtcctgcccctcagcctgtcagagcaggagctgaagagaacgggagagcacgcaggacagagcaagagctctcacgacgcaagggagctgctttgagttctccagccagtcctctcccaagaggcgagctctgggcactagctaaagtctgaatggcatcacaaatgtggcgagcctggacaagggatctgtgagaagagcggggacacacaagctgctacttctttttttttgagacagggtctcactctatcacccagcctggagtgcagtggtgcaatctcggctcactgcaacctcagcctcccaggttcaagtgattctcatgcctcagcctcccgagtagctgggactacaggcacacacaaccacacccggctaatttttgtattttttagcagagacagggtttcgccatgttaacgaggctggtctcaaacccctgacctcaagtgatccacccacctcagcctccaaaagtgctgggattacaggcatgagccactgcgcccagccccaagctgctatttctacatggatgcctgggaggcagcgtggcatctgggaaatatccctcgggggctttatttggcattttattctggrgctttccatctcatcctcttcccctttctctctgttttggtttcgtccttttccttctttctctgtctcttgctgggcttatgtagtgtctctctctttctccaagaacatcagggttactcccttggagtcaaacctacgctcttcccacccagtctccgatgagcagactgtgggaagactgagttatagttttttgtcatgtggtgagaaaaggtaggtacacacccctcaatatcctgaaacaagctgccagggctcagtcaccaaacccattttaaaccagttatattttcattctcagggtaaagggtttcctgaagtttctacctgctctaagtttctacccttgaggctgattgactagtccagtgagatcaaggaaatgaaaggcatttcacacaccagcaggtaaacaaacgcatatgcaaaccagccttcagaatgggaaaatgaaggcacgcgtgaaagaggaataaggtttctgtcatcacaaaggcattcatgggtaaggcagatgtattcgcagttatgcaaagtccagagtgttagaatttgaaacctgaaagacttaaatttaggggcaaaaagggcaagtaatgtttaggtgagtgtggggcagggaaaagcacagatcttacaagtgctgggggaagccctggctgtgagactgggccgtcaggtttcttctctcagcctccatctcctcagccctcagtggggccccctcccggcctgcctcacggggctgccgtgaggagcagagcagagagctcctgtggaagctgatggcactctctacagtattagtctttttgttgctgagagtcactgttattactgaggaacagtcggcctgtagcaagccacgataggaagtggaacacaagcagagacaggaagttgggacccatcctgaatttcgagatgaggatcctgggaaacactcctgcattccccagacaggtcctttggtaccatttgctcaaggacaagcctagattggcagagtctttgttccgaaccacgaggactgttctgacaattattgactttcaggagattgctcatttgtggtttgtgaaggacaggcaagcagtcatgtacatgcataaatgaagcttacggagttggagactgacggagacacaaggggtcccctggcccatcagtcccatgtggctgaattgagatccctgagtatttctcgaggccccttcttgatctgtggatgtctgatacaggaggtggaagaggagctgggatcctcccttttggttttgagcacatgccgttggccttagcctttggttctagatcctgggcgcacccattgttctcagccattcaggagccatgccccgtggactctggatcttggatttttccctaaactcttgatttttctgcctttttattgtgtttatggataacatttgctcaccaggtccagattcattgcacacagtgactcctagctttggatgcctctctctccccacccaccccacccagctgagaaccgtaatcactgctgtagtcgtttgtggtcactggaagactctgttcatgcctgagtttagattaattgccaaacctacataagagcattcacagtgtgagttactactggttttgtttaagatcattttagtatatccacgaagttatggtttttttagtaaagggtttccatttgagtgtttataagtgcctttgttatttgtgaattggaaaaatgagcaaggaatctgttttttcattattcgcctctgattccaaacaattgtccagtaatgctgaagaatcctggggtatcagcagagatcactgtattagtgctcagtaaggaaaacagaaataacttcagtcattttaaacagggaatctcatccacagggctgattgcagaggtgttagaagggctgaaggagcaaagagcgcttcagtaaggttggccaaatgtcaactgccggaagctgctgtccctgctaggactggaggatgaagagggctcatgaccatgagccccaggaggtgaaacccagaatctcacactcacttagaagtgtcatctattgcttctgcctgcattccatgggctagaactcagtcacacagccacttctagctgcaaagaggctgggagtctacctgactccctgactacttgagtgatgaccagaggaaaaggactacgtttgtgaataatgagtctctgctacatatggatacggaatcactgttgttacaagagaacagtgatccttttgtagaggtatgcttcaagatgtg

SEQ ID NO: 548878 - DNA, 714 bp, Homo sapiens
  misc_feature 711, 712: n = A,T,C or G
aagataatgatcatgggcactaaccattctattctcattttaataamaatttcaaagagggaaaaaaatcagggaaaaaagatgatggatgtaatgtttaggctacctaccaaacagtaaaaaaaatttgaccatatttggaagaataacagaaataaacaggcacacttctagtagtatcagcaagacattgccatttgtactcatattctcccttgtattctaatcccatttttctagaagagtaatcaaatcctcatatattttttctgtttttgcttttgttgttgatgtgtcttaacagctaataatcactgcatccttctgaagctattcaaataattgcttaatgttcttttccattaccagattttatttaattagggaaaaatttcgtctaaagggggaggtatctgatcttgtggggaacacaagatgattaacttatcattgaccaggctatacagctttgtagaattcaggagtcaacacactacctgctgcctgccccatctcactcttcttcagtattatttcctgttattatgcctgttattctactatcaagttcagcattgccaatcttgacaagtcaacaaatgggcttagtcatagaataagatgaatttttttggatattcactgggtgtgctgatgtgtcttaagcctatataacatccactagccagatctagagctggttgttttgtnnca

SEQ ID NO: 548879 - DNA, 883 bp, Homo sapiens
  misc_feature 164, 165, 166, 167, 168, 169, 170, 171, 172, 173, 174, 175,176, 177, 178, 179, 180, 181, 182, 183: n = A,T,C or G
ggaatctcttatggtaaaatcccattgtttctcaggaaataaagaaagacgtggtgcaattaactgaaaaaaaaaatggcagaaaaatatggacctatcacaaggacccaagaaggatgagcagaataatttgggtgtcctctcttcggcataatgtctagtannnnnnnnnnnnnnnnnnnnattgctcctggagaacatacagttgtgttgccactcacctggcaaagctgcaattctacccctgggaattctgtgggacctaagactacccttcggaagtctaaattcatttcaattacataaatgatggagaataactttctattgtctccctggtactgtctcaactagtactctagaaataaagcattcaagaaaagttaggttatcagtccagagcagaatccagaataacagtaaacctattacatcactgtttaattctccacataatctaactctagacaaatttgcctcacctctttcctttctcagatgaaaggtgattgacaaataaacttaatcatgttaatatgatcttatccatgattttcctttgttcttaaagatgaaacgtcaaaattgatacaaaagaattttgtgcagtcaggcccctacaaatatctccaatctcatctcctatcaggctattctttacttcctgggatccagccctatctgccttctrtaactccatatactcatgttccttgctgccatcacagggcaattgcctgggatatgctctctacccagactcctttccttctcctttttgctctttaagacaccgtttagatctttgatgagtattatttttttaggaaagcttctttgacttccctgagcaggtcaaataatacttatagattttcagaac

SEQ ID NO: 548880 - DNA, 653 bp, Homo sapiens
aactttcctttttctttctttctttctttctttttaagatggagtttcgctgttgttgcccaggctggagtgcagtggtgcgatcttggctcaccgcaacctctgcctcccgggttcaagtgcttctcctgcctcagcctcccragtagctgggattacaggcatgcaccaccacacccggctaatttaaaactttcctttttcaaacttatactgtcagtaaattcttcttactaacccgcaagtcgaccactttccgaagccagagctctgacatgtcgcctggcattaataattgttgaaggtggatgatgggtcctgtatggagcctaatgatctgttcaatccattgtaaaggaaaagaaaaatctcagaaccccaaaactctttgtaccaaagtgaagcctggagactgagtcatgcagtaacaccaaccttttcccaagcggagagctgctgtttcacaggcttgtgttaaagcattatacattagccagactcccacaaggagacgaaaagtctcacgactgccctcacaaattgctcataaattctttgctggcccctaaacctttcaagatatatagatcctcccataaaacaagcacatattaagtataactttaggtttgtaacctaagcctaacccctaa

SEQ ID NO: 548881 - DNA, 526 bp, Homo sapiens
tttgttgtttgttgtttttgaaatagtaggtttacaaaaaaagacccctgtttcaatttgtaaaataatctacttcagcagaaacctaggaaggtcttgtcagtggttttaaatacaagagacttttagtaccagcaattttattcccagactaattcagcatgggaaagagttcaccaaaaacagatgacaaggatgaaatctgtgtagatagaaaactgcttctaatgggtgaaaatcccattttaagcagacccaggtgtgcaagccaattagagaaaatggaacctggcaaacggagagaacgtttccagggtcccctgggagtagcaggttttaatcacagcctgtgtgaggaacacttaactgagatttgggagattatyagaaactattagcacctagtcaactcaggagtcaataagcctcttgctttaaactttgaactgtagttttccactttcttcctaagactataaagacacagttttggtggttacatggagcaactctgcttgctgaattc

SEQ ID NO: 548882 - DNA, 526 bp, Homo sapiens
tttgttgtttgttgtttttgaaatagtaggtttacaaaaaaagacccctgtttcaatttgtaaaataatctacttcagcagaaacctaggaaggtcttgtcagtggttttaaatacaagagacttttagtaccagcaattttattcccagactaattcagcatgggaaagagttcaccaaaaacagatgacaaggatgaaatctgtgtagatagaaaactgcttctaatgggtgaaaatcccattttaagcagacccaggtgtgcaagccaattagagaaaatggaacctggcaaacggagagaacgtttccagggtcccctgggagtagcaggttttaatcacagcctgtgtgaggaacacttaactgagatttgggagattatcagaaactattagcacctagtcaactcaggagtcaataagcctcttgctttaaactttgaactgtagttttccrctttcttcctaagactataaagacacagttttggtggttacatggagcaactctgcttgctgaattc

SEQ ID NO: 548883 - DNA, 495 bp, Homo sapiens
agcaccttgttaaataattcttcttctgctgtttaagattagcttaaatttatacatctggttaaatcttacaataaatgaatccttctttctgttcaatttacattaattgtattttgctttaaatagaactcagtgcttatatttttgtccccatgaacagtatccgttgtatactgttgaatatattattgttttacattctattgtttatatttctaaagcaatcatctcactgtaaacaaacatttgctgttctaaaattttagcgactttaggcagtaatagaaacaaacaaacatttgctgttagtcagattaggaaattttgtttcaatgtaaaaatcaaggtatatttaaaaaacaaattgattttcacaaaccagatgaaaataaaaccaagcataacaattcatgtgacaatgtaatttaaatttgtgtyattaaatcagaacaaacaaacatgcaaactttggaagaatctgtgtttattcag

SEQ ID NO: 548884 - DNA, 1299 bp, Homo sapiens
tttttgagacagagtctcgttctgtcgcccaggctggagtgcagtggtgcgatctcggctcactgcaagctccgcctcctgcgttcatgccattctcctgcctcagcctcccaagtagctgggactacaggcgcctgccaccatgcccggctaattttttttttgtatttttagtagagacggggtttcaccatgttagccaggatggtctcgatctcctgaccttgtgatccacccgcctcagcctcccaaagtgctgggattacaggtgtgagccactgcgtccggcctccagctttctttttaattggggagctctccttacccatgtgagcagttccgggctttgcccttcacaccacatttcctctggctattaaggacctcattgttgaggtcaaccatagtatagatgtgcttataagagtcacagaatattgacattgaggagggggtttgttcataccaggccattcagaactggttgggcaaagtcccaaggcatgagcggcatcctgctactaagacttccttaggggctgtgctgacacttgttgtgggccttccagtacccacagtgagagatgagcaactactcttgctcttccacctggggaacatgcagtgttcactcaagatggtggttcagtttccatgcaactctcagcactggatactaatagggcatggctctctctcagggtgcattacttgtactttttgtggttccgttgggtcagtactcttaccccaacctcctataaacccatatgtaactcaccttacccaggtgaggctcctctagcttggctcttcctgggattttgcttcttcagaacttaaaaatcttcatcattcccttgcaaattccagaacagcataattataaactcagcatttataattcctactaaagtgctgaatattttaacacttgctaattttttacccatgaatattatatgtagaatgtgaaaaaaaaaaagaaaaacrgaacaaggaaagtcgatctataagaaattgtattaccaatcagcgatcataggtcaatgttttaatttttgttgtttaaattatatatatgtattcttatttttgtcagcttaattcatccagtttggatagagttttcttaaagtcatcagtttccgtatttgttagtttttccttaaaattctgtagattttacttttgttagcctcaagcctatgttgtagagtgcttacaagttcagaattggcatggtttctcattagcttgttttatttttttttccattacagggtgtccctttttatt

SEQ ID NO: 548885 - DNA, 1299 bp, Homo sapiens
tttttgagacagagtctcgttctgtcgcccaggctggagtgcagtggtgcgatctcggctcactgcaagctccgcctcctgcgttcatgccattctcctgcctcagcctcccaagtagctgggactacaggcgcctgccaccatgcccggctaattttttttttgtatttttagtagagacggggtttcaccatgttagccaggatggtctcgatctcctgaccttgtgatccacccgcctcagcctcccaaagtgctgggattacaggtgtgagccactgcgtccggcctccagctttctttttaattggggagctctccttacccatgtgagcagttccgggctttgcccttcacaccacatttcctctggctattaaggacctcattgttgaggtcaaccatagtatagatgtgcttataagagtcacagaatattgacattgaggagggggtttgttcataccaggccattcagaactggttgggcaaagtcccaaggcatgagcggcatcctgctactaagacttccttaggggctgtgctgacacttgttgtgggccttccagtacccacagtgagagatgagcaactactcttgctcttccacctggggaacatgcagtgttcactcaagatggtggttcagtttccatgcaactctcagcactggatactaatagggcatggctctctctcagggtgcattacttgtactttttgtggttccgttgggtcagtactcttaccccaacctcctataaacccatatgtaactcaccttacccaggtgaggctcctctagcttggctcttcctgggattttgcttcttcagaacttaaaaatcttcatcattcccttgcaaattccagaacagcataattataaactcagcatttataattcctactaaagtgctgaatattttaacacttgctaattttttacccatgaatattatatgtagaatgtgaaaaaaaaaaagaaaaacagaacaaggaaagtcgatctataagaaattgtattaccaatcagcgatcataggtcaatgttttaatttttgttgtttaaattatatatatgtattcttatttttgtcagcttaattcatccagtttggrtagagttttcttaaagtcatcagtttccgtatttgttagtttttccttaaaattctgtagattttacttttgttagcctcaagcctatgttgtagagtgcttacaagttcagaattggcatggtttctcattagcttgttttatttttttttccattacagggtgtccctttttatt

SEQ ID NO: 548886 - DNA, 534 bp, Homo sapiens
gcatgcaccaccacgcccagctaattttgtatttttagtagagatggrgcttcaccattttggtcaggctggtcttgaacttcaggtgatccacacacctcggcatctctgagtgttgggattacaggcgtgagctaccgtacctggcccttgtggaaattctatttgttgtgtagccctagtctttcttgctgcccatggtctgatttctggcctctcaccctctgcccccatgcacccgcaggctgttgcaggacctgttccccaaagcggcagagctgtatgagcgcgtggcctccaaccgtgagcactggaccaaggtgtcccacaagttcaccatccgcggcctcccaagtaacaactcgctggacttcctggatgaggagtacgaggtgcctgatctggatggcactagggcccccatcaatggctgctgcagccttgatgctgagtgatcccctccagggacacttccctgcccaggccacctcccacagccctccactggtctggccagatgcactgggaacagag

SEQ ID NO: 548887 - DNA, 534 bp, Homo sapiens
gcatgcaccaccacgcccagctaattttgtatttttagtagagatggagcttcaccattttggtcaggctggtcttgaacttcaggtgatccacacacctcggcatctctgagtgttgggattacaggcgtgagctaccgtacctggcccttgtggaarttctatttgttgtgtagccctagtctttcttgctgcccatggtctgatttctggcctctcaccctctgcccccatgcacccgcaggctgttgcaggacctgttccccaaagcggcagagctgtatgagcgcgtggcctccaaccgtgagcactggaccaaggtgtcccacaagttcaccatccgcggcctcccaagtaacaactcgctggacttcctggatgaggagtacgaggtgcctgatctggatggcactagggcccccatcaatggctgctgcagccttgatgctgagtgatcccctccagggacacttccctgcccaggccacctcccacagccctccactggtctggccagatgcactgggaacagag

SEQ ID NO: 548888 - DNA, 534 bp, Homo sapiens
gcatgcaccaccacgcccagctaattttgtatttttagtagagatggagcttcaccattttggtcaggctggtcttgaacttcaggtgatccacacacctcggcatctctgagtgttgggattacaggcgtgagctaccgtacctggcccttgtggaaattctatttgttgtgtagccctagtctttcttgctgcccatggtctgatttctggcctctcrccctctgcccccatgcacccgcaggctgttgcaggacctgttccccaaagcggcagagctgtatgagcgcgtggcctccaaccgtgagcactggaccaaggtgtcccacaagttcaccatccgcggcctcccaagtaacaactcgctggacttcctggatgaggagtacgaggtgcctgatctggatggcactagggcccccatcaatggctgctgcagccttgatgctgagtgatcccctccagggacacttccctgcccaggccacctcccacagccctccactggtctggccagatgcactgggaacagag

SEQ ID NO: 548889 - DNA, 534 bp, Homo sapiens
gcatgcaccaccacgcccagctaattttgtatttttagtagagatggagcttcaccattttggtcaggctggtcttgaacttcaggtgatccacacacctcggcatctctgagtgttgggattacaggcgtgagctaccgtacctggcccttgtggaaattctatttgttgtgtagccctagtctttcttgctgcccatggtctgatttctggcctctcaccctctgcccccatgcacccgcaggctgttgcaggacctgttccccaaagcggcagagctgtaygagcgcgtggcctccaaccgtgagcactggaccaaggtgtcccacaagttcaccatccgcggcctcccaagtaacaactcgctggacttcctggatgaggagtacgaggtgcctgatctggatggcactagggcccccatcaatggctgctgcagccttgatgctgagtgatcccctccagggacacttccctgcccaggccacctcccacagccctccactggtctggccagatgcactgggaacagag

SEQ ID NO: 548890 - DNA, 600 bp, Homo sapiens
cagctgcagggattacagccctgtgagctgtgttcagggccctgtgccaggatgctggcaaccagagtccaggcctggactgtcatggcccttggtgaggccaatggggcctgagagcataaataagagggtgaccacagcatggcagggcagggtctctcacgggccaggccctctggggaccctaagtcttgaggccctcggtctctgctacctctgctgttgccaggctgcctgcatggggctgatggtggcagtcacagggctgacctcttgctgcatctttgggtgggagaagcttcagtagccctcagtgtcattcctccttggagaagccagagagcacatctgatgggtggtgagaagtgagagtaaactccctgctsagtgcttggggattgtcagggtcttgggccagagggagggaaagaaagagttgggtggtgcctactcttctgcccacccacttgtttccctctggcccctggcaggaaagcctgtggtggaatgggctattgggcataggggaggctccttcctttcatttcatcttctatccctgtcctaactgccctggctcccagccagcacaccagtgtc

SEQ ID NO: 548891 - DNA, 600 bp, Homo sapiens
cagctgcagggattacagccctgtgagctgtgttcagggccctgtgccaggatgctggcaaccagagtccaggcctggactgtcatggcccttggtgaggccaatggggcctgagagcataaataagagggtgaccacagcatggcagggcagggtctctcacgggccaggccctctggggaccctaagtcttgaggccctcggtctctgctacctctgctgttgccaggctgcctgcatggggctgatggtggcagtcacagggctgacctcttgctgcatctttgggtgggagaagcttcagtagccctcagtgtcattcctccttggagaagccagagagcacatctgatgggtggtgagaagtgagagtaaactccctgctcagtgcttggggattgtcagggtcttgggccagagggagggaaagaaagagttgggtggtgcctactcttctgcccacccacttgtttccctctggcccctggcaggaaagcctgtggtggaatggkctattgggcataggggaggctccttcctttcatttcatcttctatccctgtcctaactgccctggctcccagccagcacaccagtgtc

SEQ ID NO: 548892 - DNA, 1692 bp, Homo sapiens
catccaggcgcaaagaggaataggagggacatggaaccatttgcctctggctgtgtcacagggtgagccccaaaattggggttcagcgtgggaggccacgtggattcttggctttgtacaggaagatctacaagagcaagccaacagagtaaagtggaaggaagtttattcagaaaataaaggagtatcacagctcttttagaatttgtctagcaggctttccagtttttaccagaaaacccctataaattaaaaattttttacttaaatttaagaattaaaaaaatacaaaaaagaaaaaatgaaaataaaggaataagaagttacctactccataggcacagcagtcccgactggctgctggttggctatttttgtggttatttcttgatcgtgtgctaaacaaggagtggattattcatgagttttccagagaaaggggtgggaattcctggaactgaaggttcttccccctttcagactacttagggaaacttccagatgctgccatggcgttcgtaaactgtcatggcgctggtgggaatgtcttttagtatgctaatgtattaaaattagcatataatgagcagcgaggacaaccggaggtccctttcatcaccatcttggtttgatgggttttggcttctttaccacatcctgttttatacgaggagtctttgtgaaaccagtcctgccaacctcctatcttatccccacctcagacattacatactcgtccttaatcttaagaggttgtagaaggacagagatctatcttctgtcactgcttcatgctgaacaggggccatcatccctacctgctctggaggcatagaaatgtcttcgtacctgatcgaatgacttatagggactccatcttttctgcagtggcacaggctggaacactggactaattatttttctctgaaactgttgtagcctggaagacataaacttgaaccgtccgaacacctgatgaatataacaaatatttttaaaatcaaatagcacctagtgataattcataaaatacttaagcccagtwttaaagaagagatcaaagccaagcatggtggctcatgcatgtaatcttaacactttgggaggccaaggcaggaggatcacttgagctcaggcttttgagactagcccgggcaacatagactttgtctctttaaaaaaataagaaagaaaaaaataagagatcagatgccatttggaatctaagtgaataggctggaaaactagtcttctgttgtctgaaatacaaagccaaacagatttttaataagagagatttttatgagaacagaagaaaaaaaggttaatgctggacacagtctatccaggtattagactcaaaagcatctttagttataaagcaggaaagtggtggcaatctgacacgcctgtatcacaaggtataagctttagcttgcagggcctcaggagaaagctagtagtaattttactgtatgcagatctctaagctgggggtgacacaggaggtgggcaggactggcttcacaagatgcaggtcacaaagactccactgataagatgcggtaaagaagctggccaaagcccaccaaagccaagatggcaatgaaagggactcctggttgtcctcactgctcattatatgctaattttcaccctcctgtaggaccagctccagcagttgtgggaccc

SEQ ID NO: 548893 - DNA, 1543 bp, Homo sapiens
tttcccattaagactgcacacagcctcaggaccttgctcaacacagcgccccagggagccaatgctcctaaatcggctggctgtgagatgaatcccctttgttactcttgcactaggaggttcttcttgaggaaatgttgcactgtttataattcatctctttgctataacaatgtagtgcaaagcacacggctgcatgatagggcctgcaagagaaaaatgccttgcaaattatacattgatggcttttgctgttgatgtttctgttgctggaaactggcattaatggagtggccttctctcatatcattttcttgcctttaaaagttgcctttgtccctgtgacttgaccatctgagtaattagatgcatcttatgcagagatcagttgcttcagccccmttgacagcctctgcctgactcatctctgtccctcacaagcagacctcatcatctcataggattctgaaatgcctctaaaggccctttgtgccaggattctttcacagctgcaagcataaatgatattttggaatcttcacccaaattttacacttttgtttaactcaatattggacacttgaaaggacaggcctcctggaacccagagaatcaatcgccagggttttactttctaaatgggaagacaaaatctgcttcagaaaattgaagcccaggggtttttagcccaacaaaatgccttcaaagccagccagtaaaaaacactcacatattaactttagggtcttaacgacttcaaaccttatttttttaagtcctagattccattccttaccccacaattctttagttcctttctcttcatgatgagatttagttatcagagccagttggccctctgaacatttttctggtgtctggaaacaggatcacttttcagggaccaaaaaatttattttctctagctaacctcataaaatgcagacttctcatgtctatcatacgtcttaattcttatctgtaagtgtatgcccacgatatgaccatcaaaattttcatttctttgaaaagatcgaagctagattaagaaggcaagtgcagcgttcgctgcaatatcaagtggtcataccaaaaatgtacaaagaaataaaaattacagtggagataaagcacagaggtacaaaagtttgaggcctctctctataccaaaatctcattccaacctccggccaaatgcttcagagccactacactaccagaaaagacctgcttcagctgctagctgtaaccatcgaagcagagcccctgtggccttcatttttcgtgagggttgctgggctgctaaccataaaggctcacccaccacactctcatcccaaagggtgctggattccaaagttaacactggagaattccaaaagcacctcacctccaactcattaacatgcagtcctggattctaaacattcctctacttaataaaaacaggaatgaaggagaagagaatgtagggtgaggaaagcattatttttgagacatttacttgatagcattttaagcccaggagacaaaccctggtcct

SEQ ID NO: 548894 - DNA, 547 bp, Homo sapiens
aaatacacaacttggctatgcaggcaagttaccaatgtatcaaagcaacttgtgagtcattgacaagcagaatcattgctgaagtcccttctagttctaaaactgtgcaaatatttaggagcagttttgtyggtttggacatgatggcttctcactttaccccaaactcagattctggtatcatgacatctcatagaactaggaaccattttgcacacaaaaagagatcacagtcttttttcctctggttgtttattcaaaataaactagccaacataagcaaggtaagactttaattttgattttcagagaaaaagacaacaactctttgataatccccagtatcacaaccttcaaaaatagcggaggagagtggggtagaaatgaggtagagaaaagagtaaaagaagtgggattcgctcttgatgttaagtcagtacatctcacattacctcctgaagaagaactagagaaagtgtcatctttgttgtataaaaagaaatatggcataatgatccagcaatcccactacactttgggtgtatat

SEQ ID NO: 548895 - DNA, 547 bp, Homo sapiens
aaatacacaacttggctatgcaggcaagttaccaatgtatcaaagcaacttgtgagtcattgacaagcagaatcattgctgaagtcccttctagttctaaaactgtgcaaatatttaggagcagttttgttrgtttggacatgatggcttctcactttaccccaaactcagattctggtatcatgacatctcatagaactaggaaccattttgcacacaaaaagagatcacagtcttttttcctctggttgtttattcaaaataaactagccaacataagcaaggtaagactttaattttgattttcagagaaaaagacaacaactctttgataatccccagtatcacaaccttcaaaaatagcggaggagagtggggtagaaatgaggtagagaaaagagtaaaagaagtgggattcgctcttgatgttaagtcagtacatctcacattacctcctgaagaagaactagagaaagtgtcatctttgttgtataaaaagaaatatggcataatgatccagcaatcccactacactttgggtgtatat

SEQ ID NO: 548896 - DNA, 803 bp, Homo sapiens
  misc_feature 738, 739, 741, 744, 746, 749: n = A,T,C or G
tgccattgcactcctgcctgggcaacaaaagccaaactttgtttaaaaaaaccaaaaaaaggctgggctcgggggctcacacctgtaatcccaccactttgggaggccgagggggatggatcacctgaggtcaggagttcaagctggtcaagaaactagactggccaaaatggtgaaactccatctttattaaaaayacaaaaattagttgggcatggtggcgggtgcctgtaatcccagctacttgaaaggctgaggcaggagaatcaactgaacctgtgagatggagattgcagtgaaccaagattgtgccactgccctccagcctgagcaacagagtgagactctgtctcaaaaaaaaaaaccacacaaaaaaaaacagtccctactcatcaagtaacttaatggttaataatatgcccttcccagtattttgatttctagccacaattaagtcatttatcaactggtattctaaattatgcatctctccctactattccgttacgtctcctaccatatcacttccttttctcacactcactaaactccagccacacatgccagcctttgcagatgcaatcattattcttattgttattatttttgagacaaggtatcactctgtcacccaggctggagtgcagtggtgggatctcaactcactgcaacctccacttcccaggctcatatgatcctcttgcctctcaacacgtgacactgcctgggaccggtggnntnatncnctntaatcccaccactttgggaggcctgggtgggcacatcacctgaagtcgggagtt

SEQ ID NO: 548897 - DNA, 638 bp, Homo sapiens
cacagttacattgtgatcagaatttttattctattgatgattttgaaaacacaaattctggttttggacaggacccaatagcagttcttgacttctttcccctaccgtgttttaagctcttggaggacaagaaggaattttgtttttgtttgagacaaagtctcactctgtcgcccaggctagagtgcagtggcgagatctcagctcactgcaccctctgcctcacgggttcaagcaatccttccacctcagcctcctgagtaggtgggactacagatggtacaccaccatgcccagctaatttttgtattgtttgtagagatggcgtttcactatgtttgcctaggctggtctcgaactcctgggctcaagtgatccgcctgtcctggcctcccaaagtgttaggattacaggcgtgagccacctcgcccagccaagttttaccttttttttttttttcctttttttctcgctgtgttgcccaggctggagtacagtggcaaagtcatggctcactgcaacctygagctccccaggctcaagtgatcctcccacctcaacctcccaagtagctgggactgcaggcatgtgccaccacacctggctaattttcgtattttttgtggatatgggttttc

SEQ ID NO: 548898 - DNA, 676 bp, Homo sapiens
cttggcctcccaatgtgctaggattacaggtgtcagccactgcgcctggcgtaaaattctaattttaatatagaattttatggttgcctgagctttagggtttagggaggaatattcaacatccaagttaataatcatttttcttttcaggacgtggctttatttctccaagaatttaatgctcctgatatattcatgggagtactggccaagtccaagtgtcctcgattaagagtaagtatgtacatttctaaagccttcttctttgaagcaataagaacagatagtgctggatagtcttttatttttctcactttgattttcttactgaccataaatcaacaaatcagcctgtagatgttaattgaacattgccaggtcctaggtaatttgctatttaaatttwttttattttatttttgagacagggtctcactatgtctccagggcttggagtgcagtggcgtgatcacggctcactgcagtcttgacctcctgggctcaagggaccctcccacctcagcctcccaagtaactgggagtataggtgtaagccaccacacccagctaatttttatttttattttgtggagacaaaggtctccttatgttgcccaggctggtcttgaactcctggcctcaagtgatcctcccaccttggcctcccaaagtgctg

SEQ ID NO: 548899 - DNA, 676 bp, Homo sapiens
cttggcctcccaatgtgctaggattacaggtgtcagccactgcgcctggcgtaaaattctaattttaatatagaattttatggttgcctgagctttagggtttagggaggaatattcaacatccaagttaataatcatttttcttttcaggacgtggctttatttctccaagaatttaatgctcctgatatattcatgggagtactggccaagtccaagtgtcctcgattaagagtaagtatgtacatttctaaagccttcttctttgaagcaataagaacagatagtgctggatagtcttttatttttctcactttgattttcttactgaccataaatcaacaaatcagcctgtagatgttaattgaacattgccaggtcctaggtaatttgctatttaaatttattttattttatttttgagacagggtctcactatgtctccagggcttggagtgcagtggcgtgatcayggctcactgcagtcttgacctcctgggctcaagggaccctcccacctcagcctcccaagtaactgggagtataggtgtaagccaccacacccagctaatttttatttttattttgtggagacaaaggtctccttatgttgcccaggctggtcttgaactcctggcctcaagtgatcctcccaccttggcctcccaaagtgctg

SEQ ID NO: 548900 - DNA, 552 bp, Homo sapiens
ttttttttaatagagatggggttttgccatattggccaggttggccttgaagtcatgacctcaggtgatccacccacctgggcctcccaaagcgcagggattacaggcgtgagccaccgtgcctggccaggttttctagttttcgtacagatgaggtctcactaccttgtcctggtggatttttacctcctagcctcaagtgatcctcctgcctccgcctcccaaagtgttgtgattacagaagtgagtcaccacacctggcccagagtcagagcttttaaccactatgttacactgcttgagagtcacagtaagtaataataaccccacccacaaccatgcaattgtgaagccacctcacagggtctcagcaagagccacccttccagtacagcagtcatcggccccacccgctctgctgaagcctgcaggggaggctgcacgrgcaaggcagatgacgcatcctctcagagaagaggagttcaaatcccagagccgcctcttcctagctatgtaccctcagacaagatcattaatttgttttcctcatcc

SEQ ID NO: 548901 - DNA, 947 bp, Homo sapiens
gaaaagaaagaaggggaaatgattgakaatagtgaaaatcatgaaggcccccaacgttgatgcccatgaacagaaatgtattactcagagaagagctcctcactcaaaatcaatgtgattttatatcatatgcacttctaacacacatgataatatggtttgcaaagcccacatctgattggaggagaagagatggagtgctatggtcaggaacaccaatatcagtcagatgggaaagctgactttctgacaggaagagaggagacaaaagtctattataatggcacacaataaaaacaaaaagcccagtggtaaatatccctaatacaataggacctctctgtagtataatagatcacagtaattgctgcgactttctttttaaatcagcatttagcaatttgaatataattgtcttatggggaaaaaagctctcaagttagtaatatctaaaagtcgatgtacagctgagcttattagaaatgctattagtaacatcagaaatgaaattctgcttaattgcatgcccacgaagtgacaaatgctacatattttatttctgggtttcagttgtggggatcaggataggctgcagtgtacctctgtaaacatttgtaaaaaaacaagcaatactctgtggtttcattaagtaaaagaaactctgggccgggtgcggtgggtcacgcctgtaatcccagcaccttaggaggttgaggcaggcagatcacttgaggtcaggagtttgaggccagcctggccaacatggtgaaaccccgtctctactaaaaatacaaaaattagccgggcgtggtggcgggtgcctataatcccagctacttgggagaatgagttaggagaatcacttgaacccagggggtggaggttgcagtgagccgaaatcgcacggcttcactccagcctgggcaaaaaagtgaaactccatctca

SEQ ID NO: 548902 - DNA, 947 bp, Homo sapiens
gaaaagaaagaaggggaaatgattgagaatagtgaaaatcatgaaggcccccaacgttgatgcccatgaacagaaatgtattactcagagaagagctcctcactcaaaatcaatgtgattttatatcatatgcacttctaacacacatgataatatggtttgcaaagcccacatctgattggaggagaagagatggagtgctatggtcaggaacaccaatatcagtcagatgggaaagctgactttctgacaggaagagaggagacaaaagtctattataatggcacacaataaaaacaaaaagcccagtggtaaatatccctaatacaataggacctctctgtagtataatagatcacagtaattgctgcgactttctttttaaatcagcatttagcaatttgaatataattgtcttatggggaaaaaagctctcaagttagtaatatctaaaagtcgatgtacagctgagcttattagaaatgctattagtaacatcagaaatgaaattctgyttaattgcatgcccacgaagtgacaaatgctacatattttatttctgggtttcagttgtggggatcaggataggctgcagtgtacctctgtaaacatttgtaaaaaaacaagcaatactctgtggtttcattaagtaaaagaaactctgggccgggtgcggtgggtcacgcctgtaatcccagcaccttaggaggttgaggcaggcagatcacttgaggtcaggagtttgaggccagcctggccaacatggtgaaaccccgtctctactaaaaatacaaaaattagccgggcgtggtggcgggtgcctataatcccagctacttgggagaatgagttaggagaatcacttgaacccagggggtggaggttgcagtgagccgaaatcgcacggcttcactccagcctgggcaaaaaagtgaaactccatctca

SEQ ID NO: 548903 - DNA, 633 bp, Homo sapiens
ctaacaagaaagcagaacaaaaatgtgttaaataaaggtaaaagttatacatcctagaaggaatacttttgactagggagtcagggaagatttgaaaagagagggaacatttgaactgggggtttctataggttgttgataggttgcaaatggagtgaaagaggcacttgagacagaaggatgatcgtaaagcaatactcagcagtataaaagtatgtgacatgttcagggaactataaagactggagtgtagggaggtacatggaagactgactgtgttgggagataaggctggaaaamtggggagcaaatcaagacaatctggccttaattctttaggtaatggagaactagctaacataagtgcaattaagtctaaaaattttgaacatacttatgataatttactacagcatggttttgataaggtagactatatagacatagattatgaaggatgctttttatattaatttcttcaacttattgttatatgtctgatactaaatcatttgtgcaattgcaactgtaaatactgtacttgataagccttagggtgtagtttaaaaaaaaaaaactccactgacagagaactggcattgccccttgcatggaagtgaaagacgagacgca

SEQ ID NO: 548904 - DNA, 588 bp, Homo sapiens
ggctaacacggtgaaatcccgtctctactaaaaatacaaaaaattagcagggcgtggtggcgggcgcctgtagtcccagctactcgggcggctgaggcgggagaatggtgtgaacccgggaggcggagcttgcagtgagccaagatcgcaccactgcactccagcctgggcgacagaacgagactccatctcaaaaaaaaaaaaaaaaaaaaaaaaacaaggagtgacttggtttcatagacacaaataaaactgatatgccaagtttaattttacaaaatatatatgtattaagttctactctcaactacagatattctccaatgtcatttttctaattgaatataggtttagtccagacatatcttttctgtaatttttaaaacatagatgttattaaatacataaatttcacctgaatatttttaagaagtccctcctgtttctttagagattcytggactttagttgtaagacctccatagactcgatctagttcagtaacagaaagagcttcttcatttatcatgccatcttgagccagggctgtcaaaaacttgcttgtcatgtcaaaattcacagatttca

SEQ ID NO: 548905 - DNA, 1524 bp, Homo sapiens
ttgcatgcatttcctagtaaacaatgtagacagtattaatttttatgttgccaaggtcatagttttgtccctcaagtcatctgctaaattttgcctcacctggctcagtcagaaggaacagaattgacaatattaactggtctcagttatctccactgacaggaaaaaacgtgtattttctacacggactgtgggaatcagcattttctgttattaacttagattttttttcttgccatttmtctttatgatcccaatgtattgatgtatttctaacactacaacaagatttgtgtcactcaactgtatgtgttgtaatcattatcttttaaccatttatctccatgaaactgatgtcattgaaagatagaaaagagaaacaaaaagcatagaagggagagagggagggagcaagactttagtcgtgatacaatgccaatgtaagggctccttttaagaaagattttaaaaaaattcttcttcaaaatttccattgcctccttgaatgaactgtgaaggattgcaaattcctttaaaactcggttttggcaatgactctggatttccttcattagctagctatgcagaattcattttccaatgctctattaaaaataaaaggccgggcatggtggctctcgcttgtaatcccagcactttgggaggctgaggcgggcggatcacaaggtcaggagatcgagaccatcctggctaacactgtaaaaccccatctctactaaaaatacaaaaaattagccgggcgtggtggtgggcgcctgtagccccagctactcgggaggctgagacaggagaaaggcgtgaacccaggaggcggagcttacagtgagtcgagatcacgccactgcactccagcctgggtgacagagcgagactccatctcaaaaaaaaaaaaaaaaaaaaagaaagaaagaaagaaagaaagaaaattaaataaaaataaaaagggaagattcccttaatgtttcccagtctattaaaggtttccttccaaaaggagctcattctgatcccatttagtacaacaccctcgtgtatgccagatggcacaggcatcatagcttcacaaatgtcattctgattctcacctttaaaatgaaattcccttagtctacctttctttacataaactacaaaactgtagacaaagatatgccaaattaaaagcctcttttgctaaacattctagaaataatttgagaaaaatgggcgcaatttgagaccttagttgtcttggaaagggggtaggtgggtatttgactatgattctggtcgctatttctcctgttaactatttaaatgtgtgaccttaaaagaaaatcattcagtcttgttgagactaatgtctcatccaaaaaaagtacttaaaatttctcctatgtgtcttatagcgcaaaaatgttcaattctgtttcaagccattctaacatttggtttataaacaggtattacatcatcaaggcttactgcaggcctctgcgatctttatttcaatttcattccttt

SEQ ID NO: 548906 - DNA, 659 bp, Homo sapiens
aagataagggtcatcccttaaaaatctttctatcgtcaacatcaaacattgtactggaaacactgaaaaacattctctttttcacaaaactttagtcaaaatttttgaactctcttctgaaacaggctccaactttagggcttccataaacatctctgcattgttcaattttagcataaattctgtaaagtcagtttcagtttagccagtatatattacacttgatatctgattacccacaatatttgactaggttcctcatcctccaccatccctcaagtaatatttgatgatctggcctgcctttagcaagaatcttgctagtttgatttagccacaatcctctttttcttgttgtattcaaaactgagccatattctgtatgaaatctcttcccctattgcaatagttcctgagtaaaatctgtttgtaccgcttkgctgaccagctatacttttttttgacatcatgcatacttcaatttatttttgaactgaattgaattgaaggagattttatagaattaatctttacctaaattgatagtgtattgagatgggggaaaaaagtaaaatgaattaaaaaataaattttgtaaacagttttaagatgtccagtatctggcaaatgatttggaatggaaagtgagaaattaattg

SEQ ID NO: 548907 - DNA, 659 bp, Homo sapiens
aagataagggtcatcccttaaaaatctttctatcgtcaacatcaaacattgtactggaaacactgaaaaacattctctttttcacaaaactttagtcaaaatttttgaactctcttctgaaacaggctccaactttagggcttccataaacatctctgcattgttcaattttagcataaattctgtaaagtcagtttcagtttagccagtatatattacacttgatatctgattacccacaatatttgactaggttcctcatcctccaccatccctcaagtaatatttgatgatctggcctgcctttagcaagaatcttgctagtttgatttagccacaatcctctttttcttgttgtattcaaaactgagccatattctgtatgaaatctcttcccctattgcaatagttcctgagtaaaatctgtttgtaccgctttkctgaccagctatacttttttttgacatcatgcatacttcaatttatttttgaactgaattgaattgaaggagattttatagaattaatctttacctaaattgatagtgtattgagatgggggaaaaaagtaaaatgaattaaaaaataaattttgtaaacagttttaagatgtccagtatctggcaaatgatttggaatggaaagtgagaaattaattg

SEQ ID NO: 548908 - DNA, 659 bp, Homo sapiens
aagataagggtcatcccttaaaaatctttctatcgtcaacatcaaacattgtactggaaacactgaaaaacattctctttttcacaaaactttagtcaaaatttttgaactctcttctgaaacaggctccaactttagggcttccataaacatctctgcattgttcaattttagcataaattctgtaaagtcagtttcagtttagccagtatatattacacttgatatctgattacccacaatatttgactaggttcctcatcctccaccatccctcaagtaatatttgatgatctggcctgcctttagcaagaatcttgctagtttgatttagccacaatcctctttttcttgttgtattcaaaactgagccatattctgtatgaaatctcttcccctattgcaatagttcctgagtaaaatctgtttgtaccgctttgytgaccagctatacttttttttgacatcatgcatacttcaatttatttttgaactgaattgaattgaaggagattttatagaattaatctttacctaaattgatagtgtattgagatgggggaaaaaagtaaaatgaattaaaaaataaattttgtaaacagttttaagatgtccagtatctggcaaatgatttggaatggaaagtgagaaattaattg

SEQ ID NO: 548909 - DNA, 659 bp, Homo sapiens
aagataagggtcatcccttaaaaatctttctatcgtcaacatcaaacattgtactggaaacactgaaaaacattctctttttcacaaaactttagtcaaaatttttgaactctcttctgaaacaggctccaactttagggcttccataaacatctctgcattgttcaattttagcataaattctgtaaagtcagtttcagtttagccagtatatattacacttgatatctgattacccacaatatttgactaggttcctcatcctccaccatccctcaagtaatatttgatgatctggcctgcctttagcaagaatcttgctagtttgatttagccacaatcctctttttcttgttgtattcaaaactgagccatattctgtatgaaatctcttcccctattgcaatagttcctgagtaaaatctgtttgtaccgctttgctgwccagctatacttttttttgacatcatgcatacttcaatttatttttgaactgaattgaattgaaggagattttatagaattaatctttacctaaattgatagtgtattgagatgggggaaaaaagtaaaatgaattaaaaaataaattttgtaaacagttttaagatgtccagtatctggcaaatgatttggaatggaaagtgagaaattaattg

SEQ ID NO: 548910 - DNA, 659 bp, Homo sapiens
aagataagggtcatcccttaaaaatctttctatcgtcaacatcaaacattgtactggaaacactgaaaaacattctctttttcacaaaactttagtcaaaatttttgaactctcttctgaaacaggctccaactttagggcttccataaacatctctgcattgttcaattttagcataaattctgtaaagtcagtttcagtttagccagtatatattacacttgatatctgattacccacaatatttgactaggttcctcatcctccaccatccctcaagtaatatttgatgatctggcctgcctttagcaagaatcttgctagtttgatttagccacaatcctctttttcttgttgtattcaaaactgagccatattctgtatgaaatctcttcccctattgcaatagttcctgagtaaaatctgtttgtaccgctttgctgamcagctatacttttttttgacatcatgcatacttcaatttatttttgaactgaattgaattgaaggagattttatagaattaatctttacctaaattgatagtgtattgagatgggggaaaaaagtaaaatgaattaaaaaataaattttgtaaacagttttaagatgtccagtatctggcaaatgatttggaatggaaagtgagaaattaattg

SEQ ID NO: 548911 - DNA, 659 bp, Homo sapiens
aagataagggtcatcccttaaaaatctttctatcgtcaacatcaaacattgtactggaaacactgaaaaacattctctttttcacaaaactttagtcaaaatttttgaactctcttctgaaacaggctccaactttagggcttccataaacatctctgcattgttcaattttagcataaattctgtaaagtcagtttcagtttagccagtatatattacacttgatatctgattacccacaatatttgactaggttcctcatcctccaccatccctcaagtaatatttgatgatctggcctgcctttagcaagaatcttgctagtttgatttagccacaatcctctttttcttgttgtattcaaaactgagccatattctgtatgaaatctcttcccctattgcaatagttcctgagtaaaatctgtttgtaccgctttgctgaccmgctatacttttttttgacatcatgcatacttcaatttatttttgaactgaattgaattgaaggagattttatagaattaatctttacctaaattgatagtgtattgagatgggggaaaaaagtaaaatgaattaaaaaataaattttgtaaacagttttaagatgtccagtatctggcaaatgatttggaatggaaagtgagaaattaattg

SEQ ID NO: 548912 - DNA, 635 bp, Homo sapiens
ttttttttaaatttttttgaaatggaatcttactctcttacccaggctggagtggcgcgatctcrgctcactgcaagctccacctcccaggttcaagcaattctctgcctcagcctcccgagtagctgggattacaggcccccaccaccatgcccgactaatttttgtgtctttagtagaggtggagcttcaccatcttggccaggctggtcttgaactcctgacctcgtgatccacccgcctcggcctcccaaagtgctgggattacaggcgtgagccaccgtgcccggccataatttcttaataaatgcagcaatagaaaactgttacagggaccacttctctatagtgatcaggagaaaatgtcctaacaattgattttatttacacttttctatgcctgtcagaaaaagaaagtagtattcattctttataacatatagaactttttggagctctctttatatgataaagtagcaagtgccagaaagactacaatttaaaaagataagattaaccctaagtattaaactctagatattttgtaacctggttccttcattaatgaagagagattagaaattgtataaagaataaatgcaattgcaatatttttagtattcacctaaaccagt

SEQ ID NO: 548913 - DNA, 649 bp, Homo sapiens
tgctctttccccagaaatctccctccttgaccctctgtgcatctgtgctcagaggtcctgttaacactgccctggcccctgccatagcactgccatccctcttggccctccaggaaaaggagcaagttctccaaaccccgctagtccaggaggcatgagctgtgcttgacctggctgcacaggacgactgagctaaggggattcagaacaaagttttctcccatagggtggccgggatgctctctgaggcctagcattgaggaagtaaaagaattacggaggccaggcggtggctcacacctgtaatcccagcactttaggaggctgaggcaggaggatcacttgagcccaggagttmaagaccagcctgggcaacatagtgaggtgcaccccacccccgccgccatctctataaaaaatacaaaaattagcctggtgtcgtggaacacacctgtagtcccagctactcaggaggctgaggtgggaggattgcttgatcctgggaggtagaggttgcagtaagccgagatgacaccactccctccagtgtgggcgacaaagccagaccttgtctcaaaaaataaaaataggggccaggcgcggtggctcatgcctgtaatcccagcactttgggaggccaaggcgggca

SEQ ID NO: 548914 - DNA, 649 bp, Homo sapiens
tgctctttccccagaaatctccctccttgaccctctgtgcatctgtgctcagaggtcctgttaacactgccctggcccctgccatagcactgccatccctcttggccctccaggaaaaggagcaagttctccaaaccccgctagtccaggaggcatgagctgtgcttgacctggctgcacaggacgactgagctaaggggattcagaacaaagttttctcccatagggtggccgggatgctctctgaggcctagcattgaggaagtaaaagaattacggaggccaggcggtggctcacacctgtaatcccagcactttaggaggctgaggcaggaggatcacttgagcccaggagttaaagaccagcctgggcaacatagtgaggtgcaccccacccccgccgccatctctataaaaaatacaaaaattagcctggtgtcgtggaacacacctgtagtcccagctactcaggaggctgaggtgggaggattgcttgatcctgggaggtagaggttgcagtaagccgagatgacaccactccctccagtgtgggcgacaragccagaccttgtctcaaaaaataaaaataggggccaggcgcggtggctcatgcctgtaatcccagcactttgggaggccaaggcgggca

SEQ ID NO: 548915 - DNA, 545 bp, Homo sapiens
gattgtaactaggcctacctaaacaatggcttactctgaatatttaccaaaatttgcattttttgtatagaacaccaccttaaaatgtctatgttaattttactgacatccctgccactttggatttctttgaggaggggctggggtaaggctgaattaaatactaccccacagtgcactgtagcatgtctttttgcttatctttttccaattccttttcccaagagtaagacgaaaatccttctttaagtgtaatctttttgaaaagagaagtaccttgtcaggaattgatagtaatctttyagtaagtttaggcaaaatacacagaaccccatctagcttttaatttaaaagtatatttggtttttggaaatgcaaagattggtcatgttatgataatgacatttactaagctcttatgattcactactaaaacaaagaattatgagtggttaacctcttagtaggattattgtataaataaaactttcaaactgaaacaatacaaagtttgtgttcttgtcttttcattgtgggatatctaa

SEQ ID NO: 548916 - DNA, 902 bp, Homo sapiens
gaaattaaatattcacatagccattatttcatttgaattcatctcattcttggaaatagtcaagcaagaaaagtgcttcaatttccattttatggctgaggaaagtgaagcttggagagcttcactggctcaaagccacacagctaattaacacccagaggcactgacctttttagagatagggggtctcactttgtcacccaagctgcatgtgcagtggcatgatcatggctcactgcagccttgacatcctgggctcacttgatcctcccacctcagcctcccaaagtactgggattacaggtgtgaagcaccacgccccacagagcctactgacatttaccctagagtgtgttctaacacatcttggggcagggatcaccatatggagagagcaragggcacctatgattccaaatacttgtgctgactttgttgtttggcacaccgctgcacttgccccttctgctttgggcctgtctgaggaaaagcatcagcttcctggggacacaagtcagtactgcttgttcatgtgccctgagcagcagctacaggttaggaagacacacaggcacaatctgaagagactgcgaattccacgagggcagggactgcatctatttgggtccccactgggacctcagcacctaaaacagtacctgagccctagtaagttatcaaggaatatttgctgagcaacgataacaacaaaacacatgaataaatgaatctgaggggtaagctgacgaaaaggaatacctacctcagttgcttcagctataaaatgggagacaataatctttgccttttaatgttattttgatttcactgaaggcaggggtttttgtctgttttatttatgccttcctatatccccagcttctaaaacagggcctgtcaca

SEQ ID NO: 548917 - DNA, 902 bp, Homo sapiens
gaaattaaatattcacatagccattatttcatttgaattcatctcattcttggaaatagtcaagcaagaaaagtgcttcaatttccattttatggctgaggaaagtgaagcttggagagcttcactggctcaaagccacacagctaattaacacccagaggcactgacctttttagagatagggggtctcactttgtcacccaagctgcatgtgcagtggcatgatcatggctcactgcagccttgacatcctgggctcacttgatcctcccacctcagcctcccaaagtactgggattacaggtgtgaagcaccacgccccacagagcctactgacatttaccctagagtgtgttctaacacatcttggggcagggatcaccatatggagagagcagagggcacctatgattccaaatacttrtgctgactttgttgtttggcacaccgctgcacttgccccttctgctttgggcctgtctgaggaaaagcatcagcttcctggggacacaagtcagtactgcttgttcatgtgccctgagcagcagctacaggttaggaagacacacaggcacaatctgaagagactgcgaattccacgagggcagggactgcatctatttgggtccccactgggacctcagcacctaaaacagtacctgagccctagtaagttatcaaggaatatttgctgagcaacgataacaacaaaacacatgaataaatgaatctgaggggtaagctgacgaaaaggaatacctacctcagttgcttcagctataaaatgggagacaataatctttgccttttaatgttattttgatttcactgaaggcaggggtttttgtctgttttatttatgccttcctatatccccagcttctaaaacagggcctgtcaca

SEQ ID NO: 548918 - DNA, 902 bp, Homo sapiens
gaaattaaatattcacatagccattatttcatttgaattcatctcattcttggaaatagtcaagcaagaaaagtgcttcaatttccattttatggctgaggaaagtgaagcttggagagcttcactggctcaaagccacacagctaattaacacccagaggcactgacctttttagagatagggggtctcactttgtcacccaagctgcatgtgcagtggcatgatcatggctcactgcagccttgacatcctgggctcacttgatcctcccacctcagcctcccaaagtactgggattacaggtgtgaagcaccacgccccacagagcctactgacatttaccctagagtgtgttctaacacatcttggggcagggatcaccatatggagagagcagagggcacctatgattccaaatacttgtgctgactttgttgtttggcacaccgctgcacttgccccttctgctttgggcctgtctgaggaaaagcatcagcttcctggggacacaagtcagtactgcttgttcatgtgccctgagcagcagctacaggttaggaagacacacaggcacaatctgaagagactgcgaattccacgagggcagggactgcatctatttgggtccccactgggacctcagcacctaaaacagyacctgagccctagtaagttatcaaggaatatttgctgagcaacgataacaacaaaacacatgaataaatgaatctgaggggtaagctgacgaaaaggaatacctacctcagttgcttcagctataaaatgggagacaataatctttgccttttaatgttattttgatttcactgaaggcaggggtttttgtctgttttatttatgccttcctatatccccagcttctaaaacagggcctgtcaca

SEQ ID NO: 548919 - DNA, 525 bp, Homo sapiens
agaagaggcctctggggtggtcacagcctctttctccacatgaaccctgagagttcttcctgagctacacagctgggggaagactgccctaagagaygtgaaaagagagacatgggaagtgaggtgtctcagctcttgtctcccctgggtggtgtggcctgacctcaccagagccccagcctaacccacctgacctgtccccaggagctgtactgagcgatggctgcacctgctcagttacctgtggggcccagtgcctctgagagaggtgcccagtgagggctctgcagggctccccccgagcaggagctgggctgagggaaatcagcaggaggtaggggctgcccaggccctggggaggcaggcagcgtggagaggacacagaggtgcactgggagggcgcaagccagtcaggaccaccctctcagctctgagaaatgagctatgctcacggaatgctcacagtcaaatcctgctgggagggccatcctctgctcgggttctctactgtccagggcaggaatg

SEQ ID NO: 548920 - DNA, 534 bp, Homo sapiens
taaaactaattaaaaaatctgttttaaatacattcttattatttgacactttagtgggtctaaatcatataaagacagtcaattttatttttctatacttcaatactacaaatgttagtgtagtgaatattaatacgatcaattgcaaaacatctaattcaattatatatccctttaattctgtactagatacttttacaaagttggtagagatattagagtcttgagtattctttttacctcacttttcctcttctatgtacaattatgtgtttatgtttttatcactttttgcttttttcccactattccttataaaagcaarcaataattttaaaatatatagggtcctctgtgtttaactttaatcttttcttctgcatcttaatagtaataatactacatttgaaattcagggtataatatcttaagtggtatgtctatacaatttccttaaggtaattacactgtaaaattataatacatgcattggtactacaaactacaaatagcccaaactgtattctggtttgt

SEQ ID NO: 548921 - DNA, 534 bp, Homo sapiens
taaaactaattaaaaaatctgttttaaatacattcttattatttgacactttagtgggtctaaatcatataaagacagtcaattttatttttctatacttcaatactacaaatgttagtgtagtgaatattaatacgatcaattgcaaaacatctaattcaattatatatccctttaattctgtactagatacttttacaaagttggtagagatattagagtcttgagtattctttttacctcacttttcctcttctatgtacaattatgtgtttatgtttttatcactttttgcttttttcccactattccttataaaagcaagcaataattttaaaatatatagggtcctctgtgtttaactttaatcttttcttctgcatcttaatagtaataatactacatttgaaattcaggktataatatcttaagtggtatgtctatacaatttccttaaggtaattacactgtaaaattataatacatgcattggtactacaaactacaaatagcccaaactgtattctggtttgt

SEQ ID NO: 548922 - DNA, 1851 bp, Homo sapiens
agtaggaaaccattaagtgctttcctaataaaataataaaagcagttaacaatcaccatatttatttcatctagataattatgtttgtagttataatgcaaatattctaagaaaattatttatattgtttaaaaacagcaggttgtatcatattttacacttgaagcggcctatgaaaatccagtctctaccgcgctgctctccaccacctgacctcttcccaaaatgtctcgactttgttcaggtttctctacttctttgcactcaaagaattcgacccatccctggtagcaggaagtgaatcctgatttgtctaagctagcagatggaggttccattcaaccaaccaataattttaaagtatgggaatagtttgtagttctggccaattgtatgagaagaaaaatatattgggggaacacttggaaaatttccttcactttttaaaatcagaatataaaaagagttaatctcctttgctggtggttatcgttgccatgtctgggtgtgatgtctggaactctgggtaagtcaaagagcaaagtcagtaagtgtgggggtcggcggtagagcagagataccrgaataaactaagttgttcattttcttttctcatcactggaataaccaatcctgaagttgtcctttcctgttattttctgagtttcttaagtagtgaattagtaaattttcaaataaaacccaactaaggctattgaaaccgtgattttctgtcacctgtagttggaacatcctaactgccatactcatctggctcccaacacttttacttggaattttaaatcaccaaatgtactttttgtattttaaacttgttatgtgtgatacttttactttcctcttatttcactaagattacagatgctagacaacccttctctcagattcattggcattttgttaaattgaatttcttttgcctatcttgagaaatgttaatctgaatagaaatgctctatttttaaacagaaacacttgttaaagttacacttctagaatacataaatgtgtggaaactttagaagcgatgaacacttttccctgataaatgtcccactatttttgattcatggtgattttgttttcttccacatatattaaaaacacagaacatttcagtctcatactttggcaaatctcaagtaaacactccagaactggcaaactgattgcaatcgagatattctttacaaatatctttaattgcacatttcaaaactaagtcctcctgagcttgaaatttctctcaagagaatgtatcatgtggagtttagtagaaggggcaagcgcttgcattgctccttattcctcatagtggtatttgtatgtctcggtattttggatttgaatatcctgctggaatctgtctttacttttctgcttgtgaaacatactaaataaggtagaggctatttccctgtaggaaaaaataagccaaaggcaatgaattctgtctttatcttgtaacgtatccttcccattaagagaaatccattatatcaaatattacgtacactgacagctgaaataaaaatttttattggtttagtttagggatttgagaaaagaaaaaaaactcatccaccagataattctaaactggtagcatttttattcaattgtgacatgattaattttttatccatgctaaacttcttccaccaatttcgatttgcaaattcaaatgagtgtcaatagactgaagctttatttgtatgacttccttttaattaccaatttcacacatagatagacaattgatgaaaagtagagacaatgtctttgaataaagacagatgaaaactttgtacttaagtaactatgggaatt

SEQ ID NO: 548923 - DNA, 1851 bp, Homo sapiens
agtaggaaaccattaagtgctttcctaataaaataataaaagcagttaacaatcaccatatttatttcatctagataattatgtttgtagttataatgcaaatattctaagaaaattatttatattgtttaaaaacagcaggttgtatcatattttacacttgaagcggcctatgaaaatccagtctctaccgcgctgctctccaccacctgacctcttcccaaaatgtctcgactttgttcaggtttctctacttctttgcactcaaagaattcgacccatccctggtagcaggaagtgaatcctgatttgtctaagctagcagatggaggttccattcaaccaaccaataattttaaagtatgggaatagtttgtagttctggccaattgtatgagaagaaaaatatattgggggaacacttggaaaatttccttcactttttaaaatcagaatataaaaagagttaatctcctttgctggtggttatcgttgccatgtctgggtgtgatgtctggaactctgggtaagtcaaagagcaaagtcagtaagtgtgggggtcggcggtagagcagagataccagaataaactaagttgttcattttcttttctcatcactggaataaccaatcctgaagttgtcctttcctgttattttctgagtttcttaagtagtgaattagtaaattttcaaataaaacccaactaaggctattgaaaccgtgattttctgtcacctgtagttggaacatcctaactgccatactcatctggctcccaacacttttacttggaattttaaatcaccaaatgtactttttgtattttaaacttgttatgtgtgatacttttaytttcctcttatttcactaagattacagatgctagacaacccttctctcagattcattggcattttgttaaattgaatttcttttgcctatcttgagaaatgttaatctgaatagaaatgctctatttttaaacagaaacacttgttaaagttacacttctagaatacataaatgtgtggaaactttagaagcgatgaacacttttccctgataaatgtcccactatttttgattcatggtgattttgttttcttccacatatattaaaaacacagaacatttcagtctcatactttggcaaatctcaagtaaacactccagaactggcaaactgattgcaatcgagatattctttacaaatatctttaattgcacatttcaaaactaagtcctcctgagcttgaaatttctctcaagagaatgtatcatgtggagtttagtagaaggggcaagcgcttgcattgctccttattcctcatagtggtatttgtatgtctcggtattttggatttgaatatcctgctggaatctgtctttacttttctgcttgtgaaacatactaaataaggtagaggctatttccctgtaggaaaaaataagccaaaggcaatgaattctgtctttatcttgtaacgtatccttcccattaagagaaatccattatatcaaatattacgtacactgacagctgaaataaaaatttttattggtttagtttagggatttgagaaaagaaaaaaaactcatccaccagataattctaaactggtagcatttttattcaattgtgacatgattaattttttatccatgctaaacttcttccaccaatttcgatttgcaaattcaaatgagtgtcaatagactgaagctttatttgtatgacttccttttaattaccaatttcacacatagatagacaattgatgaaaagtagagacaatgtctttgaataaagacagatgaaaactttgtacttaagtaactatgggaatt

SEQ ID NO: 548924 - DNA, 620 bp, Homo sapiens
gcacttaataaagaataacaataaactttgtactttgaggtttaacctaaatttctcctctagctccattttatatgaagtatattagccagatatattttattatgttatatgttatataatatataatatcattttccatttctttgttacacttatttttaacattggttcttaacattttagagtcattgagaatcacgatatctaatgtccacaatgtcacaacataataagtttcttattggaaagtgaattgtcaacaaaactaggatcacaaaacaaggaaaaatttacaaatgccaacagtttaaagttggtggtaggttaagaaaggctctgacttaaattccttcccccmcaaaaaaaaatggttcctaaaatgttgcaagtcaagactcataattggtaatattttgttataaatgtgtctgtgttgggaggggaacgtcacacatcggggcctgtcagggggtggggggcaaggggagggagagcattaggacagataccctatgcatgccaggcttaaaaccttgatgatgggttgataggtgcagcaaaccaccaaggctcgtgtatacctatgtaacaaacctgcatgttctgcacatgtatcc

SEQ ID NO: 548925 - DNA, 620 bp, Homo sapiens
gcacttaataaagaataacaataaactttgtactttgaggtttaacctaaatttctcctctagctccattttatatgaagtatattagccagatatattttattatgttatatgttatataatatataatatcattttccatttctttgttacacttatttttaacattggttcttaacattttagagtcattgagaatcacgatatctaatgtccacaatgtcacaacataataagtttcttattggaaagtgaattgtcaacaaaactaggatcacaaaacaaggaaaaatttacaaatgccaacagtttaaagttggtggtaggttaagaaaggctctgacttaaattccttcccccacaaaaaaaaatkgttcctaaaatgttgcaagtcaagactcataattggtaatattttgttataaatgtgtctgtgttgggaggggaacgtcacacatcggggcctgtcagggggtggggggcaaggggagggagagcattaggacagataccctatgcatgccaggcttaaaaccttgatgatgggttgataggtgcagcaaaccaccaaggctcgtgtatacctatgtaacaaacctgcatgttctgcacatgtatcc

SEQ ID NO: 548926 - DNA, 620 bp, Homo sapiens
gcacttaataaagaataacaataaactttgtactttgaggtttaacctaaatttctcctctagctccattttatatgaagtatattagccagatatattttattatgttatatgttatataatatataatatcattttccatttctttgttacacttatttttaacattggttcttaacattttagagtcattgagaatcacgatatctaatgtccacaatgtcacaacataataagtttcttattggaaagtgaattgtcaacaaaactaggatcacaaaacaaggaaaaatttacaaatgccaacagtttaaagttggtggtaggttaagaaaggctctgacttaaattccttcccccacaaaaaaaaatggttcctaaaatgttgcaagtcaagactcataattggtaatattttgttataaatgtgtctktgttgggaggggaacgtcacacatcggggcctgtcagggggtggggggcaaggggagggagagcattaggacagataccctatgcatgccaggcttaaaaccttgatgatgggttgataggtgcagcaaaccaccaaggctcgtgtatacctatgtaacaaacctgcatgttctgcacatgtatcc

SEQ ID NO: 548927 - DNA, 620 bp, Homo sapiens
gcacttaataaagaataacaataaactttgtactttgaggtttaacctaaatttctcctctagctccattttatatgaagtatattagccagatatattttattatgttatatgttatataatatataatatcattttccatttctttgttacacttatttttaacattggttcttaacattttagagtcattgagaatcacgatatctaatgtccacaatgtcacaacataataagtttcttattggaaagtgaattgtcaacaaaactaggatcacaaaacaaggaaaaatttacaaatgccaacagtttaaagttggtggtaggttaagaaaggctctgacttaaattccttcccccacaaaaaaaaatggttcctaaaatgttgcaagtcaagactcataattggtaatattttgttataaatgtgtctgtgttgggaggggaacgtcacacatcggggcctgtcagggggtggggggcaaggggagggagagcattaggacagataccytatgcatgccaggcttaaaaccttgatgatgggttgataggtgcagcaaaccaccaaggctcgtgtatacctatgtaacaaacctgcatgttctgcacatgtatcc

SEQ ID NO: 548928 - DNA, 1408 bp, Homo sapiens
cccaaaacaacagtaacagtttcttgtgactcaaaaacaaatgaaagcataatgaaggatacttcctatattgttccaatgkaacaaaaatgctctttgctaactttaaaggaatctgaatcgcaagcaacaaattagcaaaacacacagtcttccactgaacaatgccccttacagagtatcaggaattgaaaatcagggcacacagtaagttttgggaaagaagtgcagtaaatgtttttgttgaatgttggagccagaagaccctagcagttgtctaatcccccatctcctcccactcacacacaccctgtatatgttgcagaggctgaggcctgggagttgcgaggcttgtctgatgtcacccagctagtcagcagcacagatgggataaaaattgaggagttcagactcagctctgagctctttccactacaccctgctgacagttttcagccttacttgcagcataaacaagcttttgaatataagcaactataaatagtaattagtcagagtcttgtattagatatgttgacatcatcagaaggcaattctgttcattacaagcccctctgacgctcgctctgaaagttgctgccttcttcatgtccaccaggcaccaccctggacctgccttaggtccaaagtgcatccttccagcatcttccggcaatctgagcttcattacaatgtcccctcctcctgccggaactcaccaaatagtcaggtgcattcgctttttctcagccatattcagggaagggagcatgatttttctaattcttttgcatgttcccacagtactaagcagggatctgacatacacattttggttaaacataagctaatatttactgaatgattactatatgctgggcaaagagctaggcattttaaatgcattatttcatctaattcatcccaaaactctataaataagtaggattgtttgtcttctgcccacagacaaactgtggtctggagaggttaaatgccctgctcaaggtcatacaaccaataaaagatgttgatgctgagattcaacccaagtgctatttgactccaaagtttgtgctttttaactcccagtttttcctaagaatgacctgcctgaatttcggggaggaactgggggaatgcattttggaaagtatcccaggtgattcagatgtgcagccaaatttgggaagtcagtgccccacactctgaaatcctacactgattgactcatcttgcttcttcttctgcagccagaatgacagtgtgaccagaacctgacccaagcccacctctaccaggtgactcaggccacacacacttcagagagtactgtcttctctcctgtatacaaactttaatccttcccatccaaatcctccctggccatctctggatactgttggaa

SEQ ID NO: 548929 - DNA, 1408 bp, Homo sapiens
cccaaaacaacagtaacagtttcttgtgactcaaaaacaaatgaaagcataatgaaggatacttcctatattgttccaatgtaacaaaaatgctctttgctaactttaaaggaatctgaatygcaagcaacaaattagcaaaacacacagtcttccactgaacaatgccccttacagagtatcaggaattgaaaatcagggcacacagtaagttttgggaaagaagtgcagtaaatgtttttgttgaatgttggagccagaagaccctagcagttgtctaatcccccatctcctcccactcacacacaccctgtatatgttgcagaggctgaggcctgggagttgcgaggcttgtctgatgtcacccagctagtcagcagcacagatgggataaaaattgaggagttcagactcagctctgagctctttccactacaccctgctgacagttttcagccttacttgcagcataaacaagcttttgaatataagcaactataaatagtaattagtcagagtcttgtattagatatgttgacatcatcagaaggcaattctgttcattacaagcccctctgacgctcgctctgaaagttgctgccttcttcatgtccaccaggcaccaccctggacctgccttaggtccaaagtgcatccttccagcatcttccggcaatctgagcttcattacaatgtcccctcctcctgccggaactcaccaaatagtcaggtgcattcgctttttctcagccatattcagggaagggagcatgatttttctaattcttttgcatgttcccacagtactaagcagggatctgacatacacattttggttaaacataagctaatatttactgaatgattactatatgctgggcaaagagctaggcattttaaatgcattatttcatctaattcatcccaaaactctataaataagtaggattgtttgtcttctgcccacagacaaactgtggtctggagaggttaaatgccctgctcaaggtcatacaaccaataaaagatgttgatgctgagattcaacccaagtgctatttgactccaaagtttgtgctttttaactcccagtttttcctaagaatgacctgcctgaatttcggggaggaactgggggaatgcattttggaaagtatcccaggtgattcagatgtgcagccaaatttgggaagtcagtgccccacactctgaaatcctacactgattgactcatcttgcttcttcttctgcagccagaatgacagtgtgaccagaacctgacccaagcccacctctaccaggtgactcaggccacacacacttcagagagtactgtcttctctcctgtatacaaactttaatccttcccatccaaatcctccctggccatctctggatactgttggaa

SEQ ID NO: 548930 - DNA, 541 bp, Homo sapiens
gacccttcccaccatgttacatgaatttggatgaggtgggaatgacacaagtccaagttgaagccgaaacttcttttacctcagagattaaatgtaaatcttttatgcaacaaaaaatgaattcctaatgcttataaattaaagagaaaatgatttgtatttgttgatttttgtttctcaactctgaccctataattaccatttttkttgttgttgttgttttttggagacagagtctcgctctgccatccagcctggagtgcagtggtgcgatctcggctcactgcaacctctgcctcccgggtttaagcaattctcctgcctcagcctcccaagtaactgggaccacaggtgcatgccaccatacccaatgggaccacagctgcatgccaccacacccggctaattttctgtattgtagtagagacagggtttcaccgtgttgcccaggctagtctcgaactcctgagctcaggcaatccgcctgcctcagcctcccaaagtgctaggattacaggcatgaaccaccacacccagcctt

SEQ ID NO: 548931 - DNA, 552 bp, Homo sapiens
agtctggtgaagccaaaataagaagtatgtgtgtgtgcaccaatgttagaaaattagcgtgtgcatttaaaatctaactggagtgtctccacatccaatcagtacttaagtcttaccaatgttacctctaaacttcttctcaacacagaattaggggctgcaaccaattctttcttttaaactattataatggtttctaaactctccttggttccaatctgacctaccttagccattagaattttctttctaaaatacaacaaatataatcatgccatccccttgtaacaggtctgggatgatcaggccaaatacacccacttctgcacctgacattcaaagccctctgcaacctgacttcagtctacatttccagcataatttcccaccattacttcctatattatctcatgccctggttacacctgttgctattccccacagasagtgtattcttctattgccataatccttttttcctagaatagccttcctgcttctctccctggagaatccctccccaccactatcaatcatccttcaaggcccagt

SEQ ID NO: 548932 - DNA, 513 bp, Homo sapiens
ctttgggcaagagaggtaacattaactgtcccaaagcacaggtggagatcccaggaacccagatctttggatcttctgtctagtgttctttctaccaccccatacaacctccagcagcaagagacagccctaaaccagatccagaaaggaggcttatgggaggtgtctttgctggactttatctgactaggattcttgcrttttgcatcttcctggtagcagaatgcaccactaaatgttctggaactaggctgccataatatttagtttttatatagttaattaaattatacttgtctaccttactacctcacattgccttcaagaaccttaagatcccagaaaaaattcaagcatacattcacccccacttgtcacaaaaggtatttaagtccactgaaactcttcctatggcaaagagaaaggaaaatgatgtttcaaaaattttaagcattatcggccgggtgcagtggcttacacctgtaatcccagcactttgggaggccgaggcag

SEQ ID NO: 548933 - DNA, 520 bp, Homo sapiens
tcatagattgcaaaagttacaggattatgccacatttcgttttaaaatttagatttgcatatgtgaattcatgtataacttggcatctgagttctcttcattgtgttatctgtgaaatattgttcaaacctcagatgatgctgcttggtgaaaaattaatatgctttgtgataatattgcgataggggatagatttatgatttttgggtaatatctgaatttttagcttttgcaaaggaatttgttattcacgaaagcatcctcatcttatcaacctcgtaataaataactgtaaatttgcrtttatgcaataaaggtacatttgtgtattggccttttgaatgttttacatattggcatttggattttcaaaagagagatcaaatttttcagaaagattaaccatcgctgttgtattctaactgcccgtcattatattgaatggggccaaggaagatcagtaatcaccagcatttgttaaaatgcttgctgtgcatgacagcactcctgcctgaataac

SEQ ID NO: 548934 - DNA, 530 bp, Homo sapiens
gcaatattttataattgttgtgaatgccatgaggctttctcttgtactgggagaggagacagaagtgcaaaaacgagagcgtgtattccacagagaagtgacctgatccatcaacagccaaatctcatcggctcaagtgctctgtgtggataaaaatagggtcatgtgagcytcagatggggaagtcaaatccacgctcctttatttttcatccctggggtattatcaggctatatgaaagattagtgggtgaggctcccagttatgtttcttcttcattcctttttggtagtttctgtctcatcaaattagtcatcggaggttctactctttaatcttctgtcatggtaattgcatctcaaatgcactgtaaaggttttctattaacataccaagaattatttgttgatggagcagattagtaaagatcataatcttcactgagttcagaagatcaaggttcaagatcagcttagacattttctaactgtgtaaccctggacgttttaattaaactctgtctcattttt

SEQ ID NO: 548935 - DNA, 530 bp, Homo sapiens
gcaatattttataattgttgtgaatgccatgaggctttctcttgtactgggagaggagacagaagtgcaaaaacgagagcgtgtattccacagagaagtgacctgatccatcaacagccaaatctcatcggctcaagtgctctgtgtggataaaaatagggtcatgtgagcttcagatggggaagtcaaatccacgctcctttatttttcatccctggggtattatcaggctatatgaaagattagtgggtgaggctcccagttatgyttcttcttcattcctttttggtagtttctgtctcatcaaattagtcatcggaggttctactctttaatcttctgtcatggtaattgcatctcaaatgcactgtaaaggttttctattaacataccaagaattatttgttgatggagcagattagtaaagatcataatcttcactgagttcagaagatcaaggttcaagatcagcttagacattttctaactgtgtaaccctggacgttttaattaaactctgtctcattttt

SEQ ID NO: 548936 - DNA, 1076 bp, Homo sapiens
gtctccatctgcttctcatcctcacgtccatagagaaaacaacattgaacatgagatgatattgttgaatctggtagatgggtaagacatggggattcattactattctttctacttttgtatatgttcaaatttttccaaattaaaaaaaaaagaaaagaaaaagaaaaatactttctggaggtagctgggtcctagctgaacttgactttgagttccccaggagcaagagtttaggtgaaggcatcacaacctgagggaccagcatttacaaggccctgaaagttaccttagaactttgtaggagctcatacacttgatggggcactaactaaacagcattttatggttccctcattagacctagccatgccagcgtgcaccattaattccatgtcaacttcatcaaagtgattatttccattcatccaaccaaaggctacaaaaactgtattttgatgcatggtttaaagactgaaagtttttacttagtgccactgacctcttggggaccacagtggtttaggatggctggagtttgatatgagaattgcatgagatgagtgtagagaaggaacagactgtgaggtaccragtgagtgtttggtgactgaatgaacgagtgtaccagctgggagaagaaatgtatgaagcatgcagagacttgaaattaagagtccagttaagtggaagacactcaagactgttagaaatggcttaagaacagtagtggtatgaagggctcagatttgttaagtgtactatcatgtgtattaaacattggaccaaggccttgacttaggtctgttttgaagtttaataggagtctgcataataaaacatgcttcatggagtacctggaagttcagatggttttaaagtaccaactttaatgaatgaataaatagagaaagcctgtggaaacatctggtctttcccatctgacttgtttaacgtgaagttggctgtttgaaactgagttccctcagcatgtgtgaattgtcaagtcacaaggattattcctctcccccataatagttatgcggatgatttttcaggtgacacatgtgaggaca

SEQ ID NO: 548937 - DNA, 1076 bp, Homo sapiens
gtctccatctgcttctcatcctcacgtccatagagaaaacaacattgaacatgagatgatattgttgaatctggtagatgggtaagacatggggattcattactattctttctacttttgtatatgttcaaatttttccaaattaaaaaaaaaagaaaagaaaaagaaaaatactttctggaggtagctgggtcctagctgaacttgactttgagttccccaggagcaagagtttaggtgaaggcatcacaacctgagggaccagcatttacaaggccctgaaagttaccttagaactttgtaggagctcatacacttgatggggcactaactaaacagcattttatggttccctcattagacctagccatgccagcgtgcaccattaattccatgtcaacttcatcaaagtgattatttccattcatccaaccaaaggctacaaaaactgtattttgatgcatggtttaaagactgaaagtttttacttagtgccactgacctcttggggaccacagtggtttaggatggctggagtttgatatgagaattgcatgagatgagtgtagagaaggaacagactgtgaggtaccgagtgagtgtttggtgactgaatgaacgagtgtaccagctgggagaagaaatgtatgaagcatgcagagacttgaaattaagagtccagttaagtggaagacactcaagactgttagaaatggcttaagaacagtagtggtatgaagggctcagatttgttaagtgtactatcmtgtgtattaaacattggaccaaggccttgacttaggtctgttttgaagtttaataggagtctgcataataaaacatgcttcatggagtacctggaagttcagatggttttaaagtaccaactttaatgaatgaataaatagagaaagcctgtggaaacatctggtctttcccatctgacttgtttaacgtgaagttggctgtttgaaactgagttccctcagcatgtgtgaattgtcaagtcacaaggattattcctctcccccataatagttatgcggatgatttttcaggtgacacatgtgaggaca

SEQ ID NO: 548938 - DNA, 1076 bp, Homo sapiens
gtctccatctgcttctcatcctcacgtccatagagaaaacaacattgaacatgagatgatattgttgaatctggtagatgggtaagacatggggattcattactattctttctacttttgtatatgttcaaatttttccaaattaaaaaaaaaagaaaagaaaaagaaaaatactttctggaggtagctgggtcctagctgaacttgactttgagttccccaggagcaagagtttaggtgaaggcatcacaacctgagggaccagcatttacaaggccctgaaagttaccttagaactttgtaggagctcatacacttgatggggcactaactaaacagcattttatggttccctcattagacctagccatgccagcgtgcaccattaattccatgtcaacttcatcaaagtgattatttccattcatccaaccaaaggctacaaaaactgtattttgatgcatggtttaaagactgaaagtttttacttagtgccactgacctcttggggaccacagtggtttaggatggctggagtttgatatgagaattgcatgagatgagtgtagagaaggaacagactgtgaggtaccgagtgagtgtttggtgactgaatgaacgagtgtaccagctgggagaagaaatgtatgaagcatgcagagacttgaaattaagagtccagttaagtggaagacactcaagactgttagaaatggcttaagaacagtagtggtatgaagggctcagatttgttaagtgtactatcatgtgtattaaacattggaccaaggccttgacttaggtctgttttgaagtttaataggagtctgcataataaaacatgcttcayggagtacctggaagttcagatggttttaaagtaccaactttaatgaatgaataaatagagaaagcctgtggaaacatctggtctttcccatctgacttgtttaacgtgaagttggctgtttgaaactgagttccctcagcatgtgtgaattgtcaagtcacaaggattattcctctcccccataatagttatgcggatgatttttcaggtgacacatgtgaggaca

SEQ ID NO: 548939 - DNA, 1076 bp, Homo sapiens
gtctccatctgcttctcatcctcacgtccatagagaaaacaacattgaacatgagatgatattgttgaatctggtagatgggtaagacatggggattcattactattctttctacttttgtatatgttcaaatttttccaaattaaaaaaaaaagaaaagaaaaagaaaaatactttctggaggtagctgggtcctagctgaacttgactttgagttccccaggagcaagagtttaggtgaaggcatcacaacctgagggaccagcatttacaaggccctgaaagttaccttagaactttgtaggagctcatacacttgatggggcactaactaaacagcattttatggttccctcattagacctagccatgccagcgtgcaccattaattccatgtcaacttcatcaaagtgattatttccattcatccaaccaaaggctacaaaaactgtattttgatgcatggtttaaagactgaaagtttttacttagtgccactgacctcttggggaccacagtggtttaggatggctggagtttgatatgagaattgcatgagatgagtgtagagaaggaacagactgtgaggtaccgagtgagtgtttggtgactgaatgaacgagtgtaccagctgggagaagaaatgtatgaagcatgcagagacttgaaattaagagtccagttaagtggaagacactcaagactgttagaaatggcttaagaacagtagtggtatgaagggctcagatttgttaagtgtactatcatgtgtattaaacattggaccaaggccttgacttaggtctgttttgaagtttaataggagtctgcataataaaacatgcttcatggagtacctggaagttcagatggttttaaagyaccaactttaatgaatgaataaatagagaaagcctgtggaaacatctggtctttcccatctgacttgtttaacgtgaagttggctgtttgaaactgagttccctcagcatgtgtgaattgtcaagtcacaaggattattcctctcccccataatagttatgcggatgatttttcaggtgacacatgtgaggaca

SEQ ID NO: 548940 - DNA, 1076 bp, Homo sapiens
gtctccatctgcttctcatcctcacgtccatagagaaaacaacattgaacatgagatgatattgttgaatctggtagatgggtaagacatggggattcattactattctttctacttttgtatatgttcaaatttttccaaattaaaaaaaaaagaaaagaaaaagaaaaatactttctggaggtagctgggtcctagctgaacttgactttgagttccccaggagcaagagtttaggtgaaggcatcacaacctgagggaccagcatttacaaggccctgaaagttaccttagaactttgtaggagctcatacacttgatggggcactaactaaacagcattttatggttccctcattagacctagccatgccagcgtgcaccattaattccatgtcaacttcatcaaagtgattatttccattcatccaaccaaaggctacaaaaactgtattttgatgcatggtttaaagactgaaagtttttacttagtgccactgacctcttggggaccacagtggtttaggatggctggagtttgatatgagaattgcatgagatgagtgtagagaaggaacagactgtgaggtaccgagtgagtgtttggtgactgaatgaacgagtgtaccagctgggagaagaaatgtatgaagcatgcagagacttgaaattaagagtccagttaagtggaagacactcaagactgttagaaatggcttaagaacagtagtggtatgaagggctcagatttgttaagtgtactatcatgtgtattaaacattggaccaaggccttgacttaggtctgttttgaagtttaataggagtctgcataataaaacatgcttcatggagtacctggaagttcagatggttttaaagtaccaactttaatgaatgaataaatagagaaagcctgtggaaacatctggtcttycccatctgacttgtttaacgtgaagttggctgtttgaaactgagttccctcagcatgtgtgaattgtcaagtcacaaggattattcctctcccccataatagttatgcggatgatttttcaggtgacacatgtgaggaca

SEQ ID NO: 548941 - DNA, 652 bp, Homo sapiens
cttgggaagctgaggcaggagaatcacttgaacacctgggagacggaggttgcagtgagccgagatcacaccactgcactccagcctgggtgacagagcaagacgccatttctaaaaaagcaaagcttcatgggcgggcagcgggaacagcagacagttactctcacagtcctcgaggctggagccgaagatcaaggtttcttcttggacccgcacagggctgggtccttctgaagcctctcaccttggctggtagacagcgtccccctcgtgcacagctctgtctaaatgtcctccttctgctaggacactggtcatgttggattagggcccaccctgatagcttcactttaacttcattatatctgcaaggccctatctccaaataaggtcacctctgaggtcctggggatcagggctgtagtgtccgagagcagggygggggtcacctctgaggtcccgggggtcacctctgaagtcctggggtcagggctgtaacatccgagtgcagggcgggggtcccagttcagcccgggacgtgaggttcttctgcgtcttctacacacccaaccacgtcctgtgtgacgccatcaccttgctttctcctctaatctctcttcttttgggcactggaattcagcccagcgccgca

SEQ ID NO: 548942 - DNA, 627 bp, Homo sapiens
gcagctgagttctacaagatcttccagctagagataggggaagtgtataagaatcccaatgcttccaaagaggaaaggaaaaggtggcaggccacactggacaagcatctccggaagaagatgaacctcaaaccaatcatgaggatgaatggcaactttgccaggaagctcatgaccaaagagactgtggatgcagtttgtgagttaattccttccgaggagaggcacgaggctctgagggagctgatggatctttacctgaagatgaaaccagtatggcgatcatcatgccctgctaaagagtgcccagaatccctctgccagtacagtttcaattcacagcgttttgctgagctcctttctacgaagttcaagtataggtatgagggaaaaatcaccaattattttcacaaaaccctggcccatgttcctgaaattattgagagggatggctccattggggcatgggcragtgagggaaatgagtctggtaacaaactgtttaggcgcttccggaaaatgaatgccaggcagtccaaatgctatgagatggaagatgtcctgaaacaccactggttgtacacctccaaatacctccagaagtttatgaatgctcataatgcatta

SEQ ID NO: 548943 - DNA, 1083 bp, Homo sapiens
tgactaaaattaggacatctattaactccatatccactgaccccaggctagcagtggactgccaatggtaggtgctcaatttttaaaatattttcaataattactaaaaaataaaagaataatttaaaaataaaagaaaatacaaataaaacaacaaatgttgttatgcttaccattcaggtgaactcttaatagagagttttgagttttcttcttctattttttcctttttttttttttttttttttttaaacagacaggatctttctttgttgtgtagtctggagtgcagtggtgaaatcataactcactgtaacctcaaactccttggctcaagtgatcctcccacctcagtcttccaaacagctgggactacacatgcacaccacaatgcccagataaaatttaaatttatttttgtagaaacaggttgtcactatgttgcccaggctggtaatttttctatgcacataatttgtagattgckgactcaatatttttatgcaaattaataactaaattttatattttaattaatatagtaagtacctctctatgcccttaatatatatttcaatgacattaattcaattacataagtaaagtaagttattttgtttcccaagattgatgtcattgattttatttattctttaatccaaaaatactgagctccttttacaaggagtgccaggcactcttgtaaatactggatacacaagggaaaaaaggtgtcactgtaatgaaattggttttctagtgggtggaaacagataatcaatatataatcaatatatgacctaatataaattatatgaagaaaaataaagtgaaataaaaatatggagaactatggttcattctgtttttgaaagggcagagatgcatttttaatgaggtaatgtttgaggggagggctgaatgaggtgaggggttaagccatctggttatttgaggaaagagtattctagacagatggaacagcaagtaaagacctgaagccagggcttagcatgctccgggagcaccaaggactcaggaacccagtgaataaggaggagatcattaaggatcagataaaaa

SEQ ID NO: 548944 - DNA, 1465 bp, Homo sapiens
aaaattctccctctctcctccagtatcaattccctgcctgactatacttgccattaacatacaaaaatggtattattttagctaccttaaaaaaatcctatctagagtaaatatcacccccccaggtaccaacacatttttttctttattttatagcaaaaatatttttaaatttgtctttacattatcgttttctagttttatcctcaattctcatttgaatccttttctatcagatttttgttactcaatcaccacacacttttgtaaagatttttcttaattttttaaagaaactaaaactaaatttcagggaagtttgtaagttgggtttttgtttgttttttcaaagaccctctcagttaagtgttatcactgtttttctcatgattttgagccatctaattatatatgtatcaagaatatataaaaccaagagacatttctctcagctatattggatataacttcacttgacctcctaggcaacatattcacttagttttcctcctaacacactggtcactcctgctaattatgtattaggggtgattcctttctttgacccttttctacttgttggagtgaccaggactttaggactatttgcctacaccttctcctttggcaatctcaataccatatacatgccattgaatcctgaattaatgtctccagcacagacatcatctctcctgaactccaaactactacatccaaacgcatattcacaaaatttacatttggaggactaataggcatttcaatagaaacatatcctaaatgaagctcttgaaacccccattctcaaatcccttacctttcataatcttccacatatcattttctactacctaccatcccctgctcaatttctctctaggactctctgcttttcctgaacacartaagtatactactacttcaaggagctgtttcatttgcctaaaatgtactcccctagatatgtgtatgttttactcatgctcgtccttccgatctttactcaattttaattttcaagaagatctttccttaccactctatctaaaaacttgcaactgcctttcttactacctttttctccatactacttcttactgtctgatatatagtttaataattcatcttacttattggcctattgtctttctctccatgcttgataattccactaagggagggattttatttttctgttttgttatgtctataatcctagagcatacagtaatgtctggtgcacagttgttgcttaatacttgctccttaagtgacttattaaaggcccgtaactatggtttctttctcattcataatattatttttgttcacttgttgctactttctctttactaccatgttttcaaagttttgcctattttatcagtcttttcaaaatctatatttactttaatgtaaattaaacctttgtatttaggatggctttatatcattctttttg

SEQ ID NO: 548945 - DNA, 1084 bp, Homo sapiens
taaaagctattaaaggtgacaatagcttcattattttctacactgtcttttatgcaaaacatactcaaagtgacctasagtgacctcttgccaaatggcacagcttgggggttttcagtgcatgttggattgacactatattttattcatttttgcactgacagtggcaggagtatctaataatataaagaccagagaatctgcctgtatgatattcaggtcacttcttccaggtcctttctattcgagacaactgtgatgttgcctgtgcaaaagtaggaattgaggacaagaggtgaggtgatgaagcaggagcttcaacacttttctagaaccaacttcttaggcctatgttaagtaaatagtcaataatcatcatgcaggatgtgaatatgactattgcattagtgtgttttcacactgttgataaagacataccggagactgggaagaaaaagaagtttaattggacttaacagtttcaatggctagggagacctcagaatcgtggcaggaggcaaaatgcccttcttacattgtggtggtaagagaaaaatgaggaagaagcaaaagcggaaacccctgattaacgcatctgatgttgtgagacttattcactaccatgagaataacatagaaaggaccagcccccattattcaattacctcctcctagatccctcccataacatgtgggaattctgggagatactattcaggttgagatttgaatggggacacagtcaaaccatgtcaattatataatactttttgaataatagatcatccagtcaaagaaaatgaacacaaaggaaaagggaacatgcaattaaaatactttctacagtgcagtctttctcctccaactatatatttttctttacggtttttggctattaatcctgaccttcctgtttgccatgtgaagtcaagttgccccagtgatggagctctgccagttatgggactttcaatcctgttcatgctgccgtgctttcttttactactaatactgctagggcttgtctatttttagaaggagataaatgcacacaatttgtcacagtgcattctgtaatgccaca

SEQ ID NO: 548946 - DNA, 522 bp, Homo sapiens
gggaggccagccatcagacttctggaccagtttttaccatactattctctaaaccctgatatattccctacaatttatggacattgttaaccataacatacctcagttaaaatctataaattcacttcttatcaaggtatatactatgattttatttatttattttttgtagagatggagtctccctgtttcccaggctggtcattgactsctggatcatgtgattcttctgtctccatctccccaagttctgggattacagacatgagccaccacaattggctactacttttttaaaaaatcaccttgagtcctatggggccaatatgtttttgaaaactgaatttcctgcccagtaaagaacaaagtcagcatcactattccaatcaagtctttctttctctggtaacatgctgttgatgcaaacttgtcaggaaccctcttatgctaatattatgaagctaatgacatcgtggaaaagtcatgcatggaacaatccgatcatttcctttaaggtgtcat

SEQ ID NO: 548947 - DNA, 522 bp, Homo sapiens
gggaggccagccatcagacttctggaccagtttttaccatactattctctaaaccctgatatattccctacaatttatggacattgttaaccataacatacctcagttaaaatctataaattcacttcttatcaaggtatatactatgattttatttatttattttttgtagagatggagtctccctgtttcccaggctggtcattgactgctggatcatgtgattcttctgtctccatctccccaagttctgggattacagacatgagccaccacaattggctactacttttttaaaaaatcaccttgagtcctatggggccaatatgtttttgaaaactgaatttcctgcccagtaaagaacaaagtcagcatcactattccaatcaagtctttctttctctggtaacatgctgttgatgcaaacttgtcaggaacccycttatgctaatattatgaagctaatgacatcgtggaaaagtcatgcatggaacaatccgatcatttcctttaaggtgtcat

SEQ ID NO: 548948 - DNA, 922 bp, Homo sapiens
attttgtttacaatgggattttaatatgaatattttatattcttttcacctgctgtcgatatgatgtgaaaattgtaccaagttgatatgttcagataaaaactattatttttaacaattgccttgttacctattattttaatgttagtgtttacatataaaacaatctatttaagcagtctacaactgttggacttatggattttccacatcttttcactattattagaacaacaaaaataaatattctaactttgatttcttttctgataactattttagaatatacagctataaaacaaggtatatatagttctgatycattactaagcataagtttttatataaagctttatgttttattttataattttatattacaggtgctcattattccaggagtaattcagtagattgtatgctggctttgaaattattgtatctttgacaattatttgttttcaatttctaattttattatgagatcataaccattccattgccaaataacagactgacttttgtaaattttcatggatataagaactatgtatgttctttaattacaacacacaaaataatataaacttccctttaaataaatttgtcgattatttaaatcctctgtttctttgctcatgtactacattgtcgcttaatccaataattactaaaatagtaaacacacagataaatattttgatgttgtatattacgggggaaaagctaaaactgaattgtgatatatactatgcaaatttatggaggcaaattttaaaggtgtttgtactatatgatcctatttttaattcatatccaaaagtgaataagatagaaaacttacgtacaggctgacaacctggaacatatggaaaatatcacctttcccctgcttctgagtacataacgatttagcagagta

SEQ ID NO: 548949 - DNA, 664 bp, Homo sapiens
atttcagatgggtctcgccttaattgtggagaataatgagccctttggttccaccaaacacaagaccctgaatgatcacattttccaagttacttaatgtatccagaataaagatcatgaaaaagaaaatcaccaaccaaaaaactgaaatttgcaatatctggrattccatgaaagattaccaggcatgaaagaaggaggaagtatgaccttaagaaaaataaaaatcaatttaatgaatccagcccagagctgatatggatgttataattagtacacaaaaaattccacgtatcttgttatcttttgaacagaagaaatacagaacttccaggtatctctttatcttttaaacagaagaaatacagttgttataactataactatataattatgtaatttattctgttcaaaagataaagagatacatggaagtttttttttaagaccaaacccagactactgtagtatgaaaactacagttactaagctgaaaatatactagatgtgattagtagcagattaggcagcagacaaaaggattattgaacttggtaagtgaaccaataatttccacctaggtttacacctctccttttaatatgttcactaaaagacatatacatacatatatgctccgagaagctgtatttatatctcaaaa

SEQ ID NO: 548950 - DNA, 549 bp, Homo sapiens
tgaaatactgctttaccgcataaataaaaggttcagttacacactccatgacccaggtgacctttaattagattcttaagctgcaggacatattttcatcaattattttttgagaggcaggtggaacctttaagatttatttgaaacactttaatatgggtaacaggcaaataacaaaaaacttcctttccctattttgttctttcttccaacatttattcagcagcaattctgtgccagttgtctgtgaagtgctagggacccagtgatggctgggacccagtccctccctttaaggatctcatggtctcccaatggagatggtaaaaaaattaaatgtatkatgggacttttcatccaaaatggtctctagctagaggccttcaacaagcctctccttgcttctcaggaaaatacctcagcaaatccagacaaatatgaagaattataaaacaaggtgaacaaacactgatagacaacctaattgccaggatgtggaagaaactgacaatacttataaggtacatcaagctggattgagaaaaatct

SEQ ID NO: 548951 - DNA, 667 bp, Homo sapiens
tgaatgcctccttacacaaattaaaggacaaattccaggcagggagaaaatagtttacaatagaagtaatgtgccaatggttaatatctgtgttgcataaacatgtctttccaatcaataagaaaagagtaggaaatgggtaaggatttaacaggcaattcacagaagacaaagtaaccggcccctaaatgggagcatatcctcaacttcactagtaataaaggaaacgaatttaaaagacgatacatttctcacttcttctctccttatagctgtattccacctttgaccatacagcctgtttttatttatcgtaagcataggttaataaatacagggcttaccatgttaatatcttctttctatggatgcgtaacaacttattttatcattccgtttgtgactgaaattgaatttctttctgtaaacctgaaaatatctgagacaagcctcgatcaacttagaagtttactttgccaagattaaggacacgtcttgggagacaggtctgtgcctttctccaaagatgatttcgagggcttcagtatttaaaggaaaaagccagctggaggggacagagggagggtrtggtcacattactgaatccaaatgttgcaaaagaaaaggagcatgtaggggaatggtcagttatgtgttcgtcccatgc

SEQ ID NO: 548952 - DNA, 650 bp, Homo sapiens
tacatatatatacacacacatatatatatacacacatactgaaaaatactaggtacattaaaattgaatactaaaaaatgtgcaagaaggcaaggaaagagagaggtacaaaaaaccagaatataaaccaaaagctaacagataacctgaattgaggtataactaaaaaagaaattaaatttgtgataaaaataacctgaaaacaaaatctctaggcataaattgtttcactggagagttctcacaaacatttcaagaaaaatttacatggattccatacaatatcttccagaaaataggagagaagggaaactttccaatttgttataacaccagcatgtccttgataccagaaccaaagatagcaaaagtaratagacaaatacattacaagccaatatacctcatgaaaactgacacacaaataatcaataaaatattaacaaatcaaatctacaatgtattaaaagaaaaatacatcatgatcaattagggtttcttctaggaattcaaggccaatgtaatatttaaaaatcagtgaatctaaagacagaaactacatgatcatattaattgatatagaaaagcacttaccattcatgataaaaagaaagatatcaccattacttaaaaaaaactatacatgtgtg

SEQ ID NO: 548953 - DNA, 650 bp, Homo sapiens
tacatatatatacacacacatatatatatacacacatactgaaaaatactaggtacattaaaattgaatactaaaaaatgtgcaagaaggcaaggaaagagagaggtacaaaaaaccagaatataaaccaaaagctaacagataacctgaattgaggtataactaaaaaagaaattaaatttgtgataaaaataacctgaaaacaaaatctctaggcataaattgtttcactggagagttctcacaaacatttcaagaaaaatttacatggattccatacaatatcttccagaaaataggagagaagggaaactttccaatttgttataacaccagcatgtccttgataccagaaccaaagatagcaaaagtaaatagacaaatacattacaagccaatatacctcatgaaaactgacacacaaataatcaataaaatattaacaaatcaaatctacaatgtatwaaaagaaaaatacatcatgatcaattagggtttcttctaggaattcaaggccaatgtaatatttaaaaatcagtgaatctaaagacagaaactacatgatcatattaattgatatagaaaagcacttaccattcatgataaaaagaaagatatcaccattacttaaaaaaaactatacatgtgtg

SEQ ID NO: 548954 - DNA, 515 bp, Homo sapiens
gctaatttttgtttttgcatttttagtagagacgggatttcaccgtgttagccaggattgtcttgatctcctgaccttgtgatccgcaagtcttgttctcccaaagtgctgggattacaggcgtgagccaccgcacccggccgggatctgttcttgaatatgcgtgtctgttttagaacattccacttgtgatatttcacctttcccatgaatttcaatagaagtcagtcaagtacagtgtaagaaaatagtcttatgtcttgccctgccccaggggagctgttagatgccatttcattattgcctcaggtataatacctgtatgtaaaaaaattctgataaacactcctttctcgttatactatacactacactttgatgctcattgacatccttggactgtgaaacgtgccaggactagttttgttttactccaygctttttttttttttttgaatgcacttccacttccttctaaggtttctttgaactctatgtgttattgcttttctctt

SEQ ID NO: 548955 - DNA, 635 bp, Homo sapiens
tcttcctctaactggttgtaagaccttgagcaagtcatgtcatccccgtggccttggtgtccttgccgataaaaagcaagggttcgtccagacagttgttttgaaactctgcccgaagggcctgggagctggagggaacaccttgagaatcaggcaggagaagcagccttccttcttttgtatcacagaatttttatctgtccaaaattcatgttgaaacttaactggcaatttaaaagtattatgaggtggggctttcagagggtgataagtcatgggaacagagccctcatcaattcaattagatgtctttattaaagggcttgacagaggcagtttgtgccttcttgcccttctgctctgtgaggacacggcattcaagaagccatcttaaaagcagaaagcagccctcaccagacaactaaacctgctagccccttgatcttggactctcggcctccasaactgtaagaaaatgaatttctgttctttgtaaattacccagtctgaggtattttgttacagcagcacaaaaaaactaaaacacagagtgaccttttctataggatttgaacaaatggttctgaccatctgactgctcatcaacttctgaggttcctctgttctaatgattc

SEQ ID NO: 548956 - DNA, 1304 bp, Homo sapiens
  misc_feature 106: n = A,T,C or G
caacctccgcctcccgggttcaagctattctcccacctcagcttcctgagtagctgggactacaggcggtgccaccaggcctgttttttgtttgtttgtttgtttnttgttttagtagagatagagtttcaccatgttggccaggccggtctcgaactcctggcctcaagtgatccacctgccttggcctcccaaagtgctgggattacaggtgtcagccatacctggccagtcactatatatatttcactcaacaaatatttattggacacttcctctgtgccaggtactaagctatgcacaaaatacctcaatgaatagaataatgatttttgtcctctatggagcttacagtaatcaaggctactgattaatcattttcaaaagtcctgaagaatatgtattatatacatgaggatataaaatattcacaattttaaaaaagctaagcaacaaaaaaatgtgaaggaacaattcttagccctaaaccctaatacagtatttggtscagagaatgctgtgttaatgcaaaataattctggggagaatattcttacatggtactgtctttttccatttggactgctgctgtaacaaaatactataaactgagtagctcataaacaacagaaatgtatttctcacagttccagaggctagaaaagcaagaatcaaagcccatgtagattctgcatctggtgagggcctgtttatgtgttcatacatgccttcttgctgtgtcctcacgtggtggaaggatggatggtctctctgaggccttttttacaagagcactaatcccattcatgaaggctctcaaatacaatcgcctttggtgttaggatttcaacatatgacttttaggagaatgcgaacattcagaccacagcagttgcacaggagaatacccagagaggggtctggaaagaatgtggcccacagcatggtcctgtttgcccacatataagaggggtactgacttaaatttcataaaaattcctattaaaaataattcaaaaactacataagtctacattaggtaatacttcagaaacttgttaagtattttactttgtgcagggaagttttctgagatgcagtggagtaataactcttgtttcaccacgctttccttttgaaactgctctttcctgtagtaactacttcaaagctaataaaagcaaactccaaaacgcaaaatgtagactaaagtatactttatatcttccgattgtatttttgtttctatgtaaattgtatctcaacaatatccacaagaacatatataaataactataaaacta

SEQ ID NO: 548957 - DNA, 544 bp, Homo sapiens
aaattaactgaaaatctttggccttggttatcatatccacaaaatggtctgcatcatgccaatctctcagggttattgcaaaatgaagaagcgacactatgcacatctcctctctcaaaaatgcaaaagtcatgcataacaaagacaggcccttaatgtcgtcattgttttaaaaaagcaaataacctatagaggaattaacacttaaatccattatgcacccttcgtcagctgacatagcagacacaaatggctgatgaaaacagagcctggccagtgctggtgggaggagtgtgattcagatagccccaggaaggacagacagacaggagagcctcctgaccagggaaggacagacagacaggagaccctcctgtccccaagaaggatagacagacagctgctcagggaaggacagacagacaggagaccctcctgccyctgagaaggatagacagacagctgctcagggaaggagagacagacagacaggagagcctcctgcccccggaaaggaaaggcagacagctgctcagagaagaac

SEQ ID NO: 548958 - DNA, 622 bp, Homo sapiens
ggtggctctcacctgtaatcccagcccttgggaggccaaggcaagtgtatggtctgaggtcagaagtttgagaccagcctggtcaatgtggcgaaaccccgtctctactaaaaatacacacacacaaaaaaaagaaagaaaagaaaagaaaagaaaaattagctgggcatggtggtacactcctgtagtcccagctacttggagactgagacgggagaattgcttgaactgggaggcagagattgcattgagctgagatcacaccactgcactccaacctcgatgacagaccaagactccatctcaaaaaaagaaaaaaaaagaaattatattgaaaggcatgaatgttttctctgagaagaaactcacttaaagatgatgtctcatcacataccttgacatcagcaagtctgtgttgaacaaatgaaatttatgtttgacctctattcttgcaatccatcctsttgtttagggttgagtctagatatcgcaggaaagacaacagtggtgatgtggatgctaagtcaagtgaacctctgcttacctatggctttgcctatacatttgcaaatctgtgaccacctacccatggtgtcagttcccgtcctttccagctcgttgc

SEQ ID NO: 548959 - DNA, 838 bp, Homo sapiens
aacactgatttggtgaatattttaaaaagaagctagttcactgaaaaactaatacaataatgcaatggcataccaagttccaaatgcaaaatatacagtgcaagatagaatactatacacagtgctgagactttttgggtctacaaaattttaagaaagcrcactcatggattcattgaacaaccctttttaaagtaacaaagaaagaaaaaagaaaacactaaaaaagacaagtgtgagaagcaagtggcaactgtaaacctgttaaatgtaagggtaaatctaaataagcattaattatttgaaaatgtgaggccaggagtccagtccaacctgggtaacaaagtgaggcatgagttacaattaaaatactagaaaagtattgaccatttcaattaaatgttcctttcaaatcactaattattttcatgttccaaaatttaaaggttaattttttattctcattttattgatctatcagtagtctctttttctttaattaaaaaacaaacaaacaaaaacacataaacaaacaaacaaaaaaacccagctttttttctttggcttccagaacacgtcctcttggctttcttcttatgtctttgtatgctatttcttagtctttggaacacttctgtgtccacccccactcccttgatgagttctcacagagccatggtttacaatattgtttatgctaagaacttgcaaatttgtacctctacctcttacttctcttctaaatgccaggctcttacatccaacttcttatgctgtcttcttttgagaagctaataaacatctcaactttgaaatgcacattctcacctacgaccat

SEQ ID NO: 548960 - DNA, 838 bp, Homo sapiens
aacactgatttggtgaatattttaaaaagaagctagttcactgaaaaactaatacaataatgcaatggcataccaagttccaaatgcaaaatatacagtgcaagatagaatactatacacagtgctgagactttttgggtctacaaaattttaagaaagcgcactcatggattcattgaacaaccctttttaaagtaacaaagaaagaaaaaagaaaacactaaaaaagacaagtgtgagaagcaagtggcaactgtaaacctgttaaatgtaagggtaaatctaaataagcattaattatttgaaaaygtgaggccaggagtccagtccaacctgggtaacaaagtgaggcatgagttacaattaaaatactagaaaagtattgaccatttcaattaaatgttcctttcaaatcactaattattttcatgttccaaaatttaaaggttaattttttattctcattttattgatctatcagtagtctctttttctttaattaaaaaacaaacaaacaaaaacacataaacaaacaaacaaaaaaacccagctttttttctttggcttccagaacacgtcctcttggctttcttcttatgtctttgtatgctatttcttagtctttggaacacttctgtgtccacccccactcccttgatgagttctcacagagccatggtttacaatattgtttatgctaagaacttgcaaatttgtacctctacctcttacttctcttctaaatgccaggctcttacatccaacttcttatgctgtcttcttttgagaagctaataaacatctcaactttgaaatgcacattctcacctacgaccat

SEQ ID NO: 548961 - DNA, 1421 bp, Homo sapiens
ctcaaagcaaaaatcttagagtcaatcctacttattttctttgtcaagaattgcacatcccacctttcagcgagtctttctgcttgctctacattcagaatctatccaaagttagtcactctcttagtctctcccagaaacagatcccagtaaaaacattcaatcagaagtaatttgggatgtagagaaaaactatattctttttcttccctcagccttttgatgtgtttatttcaatgctatttttacaatgttacttactgaatacattaattaaaattgtaatctgccactattactgtgtatcctgccttactttattttcttcacaaaatatataacttttcaacacctgtctatattttatttcttttgtgtcatcctacatctcactgtaatctttacaaaggcaaggatttttttctttaatatcctaaatgtagatgtttgtctctagtagattcaatggtgcctcccaaaatatgataaatatgcacatatctttccatatgctagcccacagaaactgtagatgtgacctaatttttttgtatatattaataaggatcttgagatgacgtcatactggatgatcctagtgcaccctaaatccaataagtgttcttatgaaagacagaagaggagaagatacaggaaatagaagaaggctacttgaggatggaagcagagattggagttaygcagctacaaaccaaagaatgccttgagccaccagcagctgaaagaggtaaagtaggatccacccataaacacttgagaaggaaagtgggcctatctatacctttatttcagatttctgccctacagaactgtaagagaatatatttcttttgctttaaacatttaggtttgtggtaatttgtcataacagatccagcaaactcatatactggcactgagcagatattcaataagaattgattatgaattatagtcattatgatagtgcggcattgactcagagatgaacaatttgttcactggactatagcaggaaattcaaaaattcatggtagactttcgatattttacatatgaattgtcgtatcacccagaaaaatgaataactattcataaaatagcagtgatacatttgattaacatatagaaaaattgtaaattgtattctatcatcacattaacttcaaatgtgaaagacatcttgtatcacttttaaagaaaatataaaatatattttatttagtaaaattgaatttgtagaacgatgactttttttttactttactgcttaatacttgagaaattctcctctttgatgaggctattagaaaacaggaactctaacaattatatagtgggaagataaattcatacaacgactttggaaagctacttgacaatgtaaggatgaaagtgcccaaagttgtaaaatttccctg

SEQ ID NO: 548962 - DNA, 1421 bp, Homo sapiens
ctcaaagcaaaaatcttagagtcaatcctacttattttctttgtcaagaattgcacatcccacctttcagcgagtctttctgcttgctctacattcagaatctatccaaagttagtcactctcttagtctctcccagaaacagatcccagtaaaaacattcaatcagaagtaatttgggatgtagagaaaaactatattctttttcttccctcagccttttgatgtgtttatttcaatgctatttttacaatgttacttactgaatacattaattaaaattgtaatctgccactattactgtgtatcctgccttactttattttcttcacaaaatatataacttttcaacacctgtctatattttatttcttttgtgtcatcctacatctcactgtaatctttacaaaggcaaggatttttttctttaatatcctaaatgtagatgtttgtctctagtagattcaatggtgcctcccaaaatatgataaatatgcacatatctttccatatgctagcccacagaaactgtagatgtgacctaatttttttgtatatattaataaggatcttgagatgacgtcatactggatgatcctagtgcaccctaaatccaataagtgttcttatgaaagacagaagaggagaagatacaggaaatagaagaaggctacttgaggatggaagcagagattggagttatgcagctacaaaccaaagaatgccttgagccaccagcagctgaaagaggtaaagtaggatccacccataaacacttgagaaggaaagtgggcctatctatacctttatttcagatttctgccctacagaactgtaagagaatatatttcttytgctttaaacatttaggtttgtggtaatttgtcataacagatccagcaaactcatatactggcactgagcagatattcaataagaattgattatgaattatagtcattatgatagtgcggcattgactcagagatgaacaatttgttcactggactatagcaggaaattcaaaaattcatggtagactttcgatattttacatatgaattgtcgtatcacccagaaaaatgaataactattcataaaatagcagtgatacatttgattaacatatagaaaaattgtaaattgtattctatcatcacattaacttcaaatgtgaaagacatcttgtatcacttttaaagaaaatataaaatatattttatttagtaaaattgaatttgtagaacgatgactttttttttactttactgcttaatacttgagaaattctcctctttgatgaggctattagaaaacaggaactctaacaattatatagtgggaagataaattcatacaacgactttggaaagctacttgacaatgtaaggatgaaagtgcccaaagttgtaaaatttccctg

SEQ ID NO: 548963 - DNA, 1421 bp, Homo sapiens
ctcaaagcaaaaatcttagagtcaatcctacttattttctttgtcaagaattgcacatcccacctttcagcgagtctttctgcttgctctacattcagaatctatccaaagttagtcactctcttagtctctcccagaaacagatcccagtaaaaacattcaatcagaagtaatttgggatgtagagaaaaactatattctttttcttccctcagccttttgatgtgtttatttcaatgctatttttacaatgttacttactgaatacattaattaaaattgtaatctgccactattactgtgtatcctgccttactttattttcttcacaaaatatataacttttcaacacctgtctatattttatttcttttgtgtcatcctacatctcactgtaatctttacaaaggcaaggatttttttctttaatatcctaaatgtagatgtttgtctctagtagattcaatggtgcctcccaaaatatgataaatatgcacatatctttccatatgctagcccacagaaactgtagatgtgacctaatttttttgtatatattaataaggatcttgagatgacgtcatactggatgatcctagtgcaccctaaatccaataagtgttcttatgaaagacagaagaggagaagatacaggaaatagaagaaggctacttgaggatggaagcagagattggagttatgcagctacaaaccaaagaatgccttgagccaccagcagctgaaagaggtaaagtaggatccacccataaacacttgagaaggaaagtgggcctatctatacctttatttcagatttctgccctacagaactgtaagagaatatatttcttttgctttaaacrtttaggtttgtggtaatttgtcataacagatccagcaaactcatatactggcactgagcagatattcaataagaattgattatgaattatagtcattatgatagtgcggcattgactcagagatgaacaatttgttcactggactatagcaggaaattcaaaaattcatggtagactttcgatattttacatatgaattgtcgtatcacccagaaaaatgaataactattcataaaatagcagtgatacatttgattaacatatagaaaaattgtaaattgtattctatcatcacattaacttcaaatgtgaaagacatcttgtatcacttttaaagaaaatataaaatatattttatttagtaaaattgaatttgtagaacgatgactttttttttactttactgcttaatacttgagaaattctcctctttgatgaggctattagaaaacaggaactctaacaattatatagtgggaagataaattcatacaacgactttggaaagctacttgacaatgtaaggatgaaagtgcccaaagttgtaaaatttccctg

SEQ ID NO: 548964 - DNA, 1777 bp, Homo sapiens
ggaattatttttataaggatatccttatgtaatattttgtttctaacagagaattgaatgtttaaagattaaattattctatccagagaataaaaagcaattatttcacaaggaaaccatgtgtatgttgacacgacattttaaaatctagattttaaaataggtcccatataattttgagtcaattagaatatgtttgtatcagtctgtctacagttttacacctgtcaaaaggtacttgaactaaaagaagtaccttgaacaattttgaaatttattattcctctgaaactgattaaaagaattatggtagagtgaaattctgattggcataatttgggagagaaattattccttggagatcaacctctgccaagatactttataatgacattgagactttttgatttacaaaacttgttatataaaaaatactaagatgatgacagataatacacagactaattaaaattgtactagaattaattgtctaaataaattacaagggtacgtcgtayatctaaatgtatgtttatatattttatttgtgcattttattcctagggttgcttttgctttagtttgtaaaacgttcttatttttatgataatgtagtatatactaaataaagaaaaatcaggaaatagaaaatgaagaagaaaacattagctattgtcaaccaaataaaaatcgtgcaatctctaagtacatgaacgatgtattatttgtacagcatgtacaatgtttatgcttcacagggtgaggtagagactgtaaaacattgaacctgggaaaaataagaaagtaaggaaattttcacaacatattaatattatagaaaatgttgaacttaacagttaagatacaagtagtgaaaaatgatagtatttaaggagatctagaaaatttaatctatatcagtaatgtgtgagaagtattagaataatgcttgtatttctggattggcatcgatttctattgagactggaaatgtaacagaagtgagcaaaaaagaatttaaattgtggatacttgagttttatacctaggagttcgagaaatacattttgttactatcaaagcagttggcacaagagtgtacaaaattccctaattgtgtctatgtggagaagacatagacaaacagagaatagcaaaacagaaatagcaaaaaagcacaaataaattttacctgtatttttaagtaaaagccaattagagaaggaaaacatgaaatttgtgttttatcaaaatttttctctttctcataatatagttgaaaatattactgcaaaaaatttgaagcactggtatgttcacaaaaaaagtaaaatataaggtcaaaaccatgggaatgcagggagcagacaaaatacacctaaacacggaaactgattttgccctacagacatgtagcaaaatgaatgagtgcagattcctactgtcatacatcacataggatagtaaagaaatacatagtttttcccaagatagggcatcacacagaagctcttccctaaagctaggaccaaaatttatatcctcagtataaagaagaatcagaggtaaattagtcccatttcacattccctggaaatggcaaataaaaatgacttgagattggacagatttaaagaaactcaatcattaatgatttacagcaattaatttaaaaattgtttaaatgtgcagtccaaacatatgtccaaacacctttaggccaagaattaatataatgtggtcccagaatggtggtgcctttagaagactcacaaca

SEQ ID NO: 548965 - DNA, 1777 bp, Homo sapiens
ggaattatttttataaggatatccttatgtaatattttgtttctaacagagaattgaatgtttaaagattaaattattctatccagagaataaaaagcaattatttcacaaggaaaccatgtgtatgttgacacgacattttaaaatctagattttaaaataggtcccatataattttgagtcaattagaatatgtttgtatcagtctgtctacagttttacacctgtcaaaaggtacttgaactaaaagaagtaccttgaacaattttgaaatttattattcctctgaaactgattaaaagaattatggtagagtgaaattctgattggcataatttgggagagaaattattccttggagatcaacctctgccaagatactttataatgacattgagactttttgatttacaaaacttgttatataaaaaatactaagatgatgacagataatacacagactaattaaaattgtactagaattaattgtctaaataaattacaagggtacgtcgtacatctaaatgtatgtttatatattttatttgtgcattttattcctagggttgcttttgctttagtttgtaaaacgttcttatttttatgataatgtagtatatactaaataaagaaaaatcaggaaatagaaaatgaagaagaaaacattagctattgtcaaccaaataaaaatcgtgcaatctctaagtacatgaacgatgtattatttgtacagcatgtacaatgtttatgcttcacagggtgaggtagagactgtaaaacattgaacctgggaaaaataagaaagtaaggaaattttcacaacatattaatattatagaaaatgttgaacttaacagttaagatacaagtagtgaaaaatgatagtatttaaggagatctagaaaatttaatctatatcagtaatgtgtgagaagtattagaataatgcttgtatttctggattggcatcgatttctattgagactggaaatgtaacagaagtgagcaaaaaagaatttaaattgtggatasttgagttttatacctaggagttcgagaaatacattttgttactatcaaagcagttggcacaagagtgtacaaaattccctaattgtgtctatgtggagaagacatagacaaacagagaatagcaaaacagaaatagcaaaaaagcacaaataaattttacctgtatttttaagtaaaagccaattagagaaggaaaacatgaaatttgtgttttatcaaaatttttctctttctcataatatagttgaaaatattactgcaaaaaatttgaagcactggtatgttcacaaaaaaagtaaaatataaggtcaaaaccatgggaatgcagggagcagacaaaatacacctaaacacggaaactgattttgccctacagacatgtagcaaaatgaatgagtgcagattcctactgtcatacatcacataggatagtaaagaaatacatagtttttcccaagatagggcatcacacagaagctcttccctaaagctaggaccaaaatttatatcctcagtataaagaagaatcagaggtaaattagtcccatttcacattccctggaaatggcaaataaaaatgacttgagattggacagatttaaagaaactcaatcattaatgatttacagcaattaatttaaaaattgtttaaatgtgcagtccaaacatatgtccaaacacctttaggccaagaattaatataatgtggtcccagaatggtggtgcctttagaagactcacaaca

SEQ ID NO: 548966 - DNA, 698 bp, Homo sapiens
tatttttaatttcacttaatatttctgcttttatttttctacacatgaccataaatatatatcttcatgtatgcatgatgaagcatggtaacagattttttaatggaataagctattatggtactttcattctatgaaatattacgtagttctcaatcaaaatgagagggatagctgtataaaacctaagctattgttaacagaaaaaaagcatgtaaacaaaattattaaattatggttttaataaaatccatatatatgaatttggacacgtgtatacacaagtaaagtcagagaaaatgacagaatataatgtatgttgaaatkatagcaatgactaccactaaaaaaaaatcagaatagaatggtaatttaaaataaatataagacagcagtgggcaggatgaggacacatttaaatctacataatactgcattgtgtaagctaaatttttcaagacctgcttgtgtaattatttttaaaaagaaaaaaggtttgtttccttgtgttgagaattattcaacatggaaagtgctacagaagagagagctcattgactccatttgttctaataaaacaaacaaacaagcaacaaaaaaccctatatattttatacaagtagaaaccctatatattttatacaagtagaaataactagcaatatatttctatagggagaaataagccagcatatttt

SEQ ID NO: 548967 - DNA, 562 bp, Homo sapiens
gaaagccctttcttggagagttgcccrcggcagacacaatttaaattaacttaaactatttccttcccctcccccacctcgttatcctttttcagagagtagggaagagaaaacgttttcgggagaaagctacgggaggagctcctctctctctcttccgtccagcggatgccggggctgcagaggccaaagtttgcagcgggcgcggcggggcgggagcggggagcggcgggtggggcggctgctaagggaacgcgcgggcggctcccggagcccggggaaggatggcggccgcccccggtcccgccgccgcctctgcagtgccggcatcgccgctggggggcagcagggccccgcggaggccaagtcccgtcggagatcgcacagctcctggtctcgtaccccagacccgccttccctgacctccgccctggctgctcacgggaccccggggaccagaggtcgccgaggcagcagcccgctctccttgctcctcccctctttcatctatccctaattcattaattcatccgtcctttccgccttcgtttctccaaccccc

SEQ ID NO: 548968 - DNA, 562 bp, Homo sapiens
gaaagccctttcttggagagttgcccacggcagacacaatttaaattaacttaaactatttccttcccctcccccacctcgttatcctttttcagagagtagggaagagaaaacgttttcgggagaaagctacgggaggagctcctctctctctcttccgtccagcggatgccggggctgcagaggccaaagtttgcagcgggcgcggcggggcgggagcggggagcggcgggtggggcggctgctaagggaacgcgcgggcggctcccggagcccggggaaggakggcggccgcccccggtcccgccgccgcctctgcagtgccggcatcgccgctggggggcagcagggccccgcggaggccaagtcccgtcggagatcgcacagctcctggtctcgtaccccagacccgccttccctgacctccgccctggctgctcacgggaccccggggaccagaggtcgccgaggcagcagcccgctctccttgctcctcccctctttcatctatccctaattcattaattcatccgtcctttccgccttcgtttctccaaccccc

SEQ ID NO: 548969 - DNA, 1104 bp, Homo sapiens
cttcccctgacaatcagagcaggggaatcggtgagcagtaaccagctgttgggattagtggggaagggaggcggtgatttgatctgtgaaggagtaccaaagccccggccaaaagcagtaaaaatggagcagatgcccccaaatacactagctcggggagggacgagtaaatcacatgcgctgccagctgcagccccacagagacaccagatgagctgggtgagctggagaagctcctgagagtcaggggctgtgtctggccctccctgggacttgaggggyttggtagatgggatggagggcagtggagtagcggagagtagtggaccttggtgagctggaccctctgatgagtccccatgtcgctcaggatgaaatccagagagctcaccatggtctacaaggcaataccaatgtggcctctgttattcctccaccctctatccctgctctctgctgcctctccaggtgtgcaccagcagctccacctccagctgcttctggaacatgccaggtgctccccctccttggggtccctcaggctcttctctcctcatccatcttccatttccatggggctcactcttcaaatccatgctcaaatgtcacttcttagaactatttcttataacctccctctccaacccactgccctctggtctcaatctgtttgtgctgctgtaacaaaatacccctggctgggcaatttataaagaatagaagtttatttttcatggttctggaggctgggaagtccaagatcaaggcgctggcagattcagtgcctggtgaaggctcactctgattctagacggtgccttcttactatgttcttacatggtggaaggggacaaaaggggacgaatgctctgtcctcacatagcaagagaggtgggagagccaggcagctgtctgaagcctcttttatgagggtattacggtagcccccgccttatcctagggggatactttccaagacccccagtggatacctaaaaccacggatagcactgaagcctatatatactacattttttcctatacatacatacttgtgatgaagtttaatttataaattaggcacagtaaaagattaacaacaat

SEQ ID NO: 548970 - DNA, 542 bp, Homo sapiens
cggctaattttgtatttttagtagagacagggtttcaccacrttggccgggttggtctcgaactcctgacttcaggtgatcagcccaccttggcctcccaaagtgctgggattacaagcgtgagccatggcaactggcctaattttgtattttagtagagacggggtttcaccacgttagtcaggctggtctcaaactcctgacctcaggttatcagcccgccttggcttcccaaagtgctgggattataggtgtgagccacagctcccagccaaatttttgtattttttgtacagcagggctggtctcgaaatcctgacctcaagtgatccgcctgccttggcctccccaagtgccaggattacagagtaagccacttcgcccaggccacactgcaaatttttaaaaggaaaagattttgggtaattgcttaatgcacaaattaagaaatgtttgttcctaatgtttaccagattaagcaataaaagatatagattaagtagtaattaccacaaaaagtagaaataaagttatagaacttg

SEQ ID NO: 548971 - DNA, 691 bp, Homo sapiens
ttttaatggttagaatttacccattagagatcaatattcaatttcttctctttttgttaaaaaaaaaactggcctttaatgaaggaaaggttttgtcttgtgtgaacagttatctctcacctcactactcatccacatcaataccactactatcacatcatcccacatgccagaatagcttttgtagagaccaaagtttatatcattttaatgcaaaaaactaattaagaggttggccctcttcaaagggtaagaaaagcctcccttctggaccatcttactggttatatgtggtctactgagaatttcaattcttcgttcttctgcaatwgtactatatatccaaatattacattagcctcatcacaggcaaagtgtactttgatacctcttgtttctgagcttagcctagccatatgactcggtcagccaatgggatgttaggagagcagagtctggaaatgtgctggtagggttgggcttggcctcttgcacttctgccaatgccatgacacaagcctcccccagatagatgttacttctccctctagcctggaccccagaaagagacacatggagcagaataaatgcctattgttgcatgccactaagattttgtggttgccaataattacacagcaaaatgtcactgaatcaccatatttaagaaatccagcccaggcgtggtggc

SEQ ID NO: 548972 - DNA, 548 bp, Homo sapiens
ccacaacacgtgggaattatgggagctacaagatgagatttgggtggggacacagagccaaaccacatcaacgatactgggcttatttattcttttaatctttgcaaaacagatatgtaaacattgtatctcattttaattcgcaattcttagagatgctattattagagatgctgaccttcttttcatggggatgagtattagaataaaaaatgtaagaatcagctatcttttcacacttgattacactttttttaagttttttttttttttcccaagacagagtcctgctttgtcacccaggctagaatgcggtggtgcgatcttggctcactgcartctctacctcctaggctcaggcaatcctgcaacctcagcctcccaagcagctgggaccacaggcctgtgccactatgcctagttaatttttgcattttttgtagagaaagggtctcactttgttgcccaggctggtctcgaactactgagcccaagcgatccatctgcctcagcattccaaagtactgggattataggtgtgagccact

SEQ ID NO: 548973 - DNA, 974 bp, Homo sapiens
cgctttacctgggattccaagtgaaggcaggatgcaggcctgggaacagaagatatcacttgctgagggctaagtatcctagcactgcgcatgtattatgtaacttcattttactctcaacatgtccctatgaagtagatactggtactcacactcccatttacagataaggaaagaggagcacaaaaaagtgaagaaasctgccccaggacaaaaagctagtaagagacacagccaacacaggaacccggcagcctatggtgatgccaggacctgctctcctaaccagtaacccgtgcaatcttagccacagtcctactccactaaacactgagctgagcacaaaggtatattttaaaaaataggtatagtttctgttaaaaatatttctttttttttttgagatggagtctcgctctgtcacccaggctggagtgcagtggcgtgatctcggctcactgcaacctccacctcccgggttcaagcaattctcctgcctcagcctcctgagtagctgggattacaggtacctgccaccacgccaggctaatttttgtattttcagtagagatggagtttcaccatattggccaggctggtcttgaactcctgacttgtgatccgcccacatcagcctcgcaaagtgctgggattacaggcgtgagccaccgtgcctggcctgttaaaaatatttctaacagcacaccatctcaatgttctcttatggtttccaaatacaactgattattgttgttaagtattgttacttagggaagagattattctttttacctttgaaataaagaggtgatatgtcaaagacataagcatatcacatgtctataagaacagaacgtaaactctggcatcatacctaatacacagcatgaccaacctttattgaccattccttttcaatactttatttcgagttaacaaatattttaggggaacatgtctattctatcctatcc

SEQ ID NO: 548974 - DNA, 543 bp, Homo sapiens
agactactgcaatagtttcctaatgagttctcaatggtttacccccttccaaagttctttagagttgatttcattttatgattcccactgagtaatcctatcttgaggataaacctgatagctcttatcctggcattaagggactaacacagtctagatccaaaacacccttccaatttatcttctagtatttgttttctttgctcttgccatattcagtatatctgaaatataacatacgcattcacaccttcataatttagttcatggatgtgtgtgtgtgtgtaggtgtggagaatttcctcccccaatcatttgtgatcctttgaaatcaggaaagattaactcattttccagttcatccatgtcttattcatctcccctatatactgtgctatctcttttttgtaaagtcccattacaaggctatttgtaaattatttactatctgggattatcactcactattttccactgaaagtttttctttagccaacaaaattaaaagtttgaagtcacggktggtgtaccttatttacctgc

SEQ ID NO: 548975 - DNA, 539 bp, Homo sapiens
caagtcacattttacatgaatggcagcaggcaaatagagaccttgtgcagagaaactcaggtttctaaaaccatcagaactcatgagacccatacactctcatgagaacagcacgggaaagacctgcccccatgattcaattatctcccaccaggtccycacaggtgagaattatgggaactacaagatgagatttgggtagggacacagagccaaaccgtatgtactaaaaacaaacaaacacagaccttgaaaggctacagttagttactgtttaataccttaggttgcaactgttgtttcataccattacaaaaccaataaagcaagccagggccaggcgtggtggccaccctgtaatcccagcactttgggaggcctaggtgggtggatcacttgaggtcaggaattggtgaccagcctggccagcatgcggaaaccccatccctactaaaaatacaaaaattagctgggcgtggtagtgcgaggctgtaattccagctactcaggaggctgagacagcagaaccgcttgaaccc

SEQ ID NO: 548976 - DNA, 529 bp, Homo sapiens
gcacactaacctgctgaatttgcagtcaggaatctataaagtgaacaagaagaacatttcatttttttgagcgaagataaaaatggtacctattgaagaagctaattttctgactgtctagtgattgcagttaaatctactgtttagtagatttaacaaatcttcagaagttctctacaggtaggtataaaatgaatttggatcttaagttttgcatwgctctttctgggggctttgttttcctcaccccaaattctctcaatatatatttcattcttttacattcagtacttttttttttttttttttgtctttttgagatggagtctcactctgtcaaccaggctagagtgcagtggtacaatcttggctcactgccacctccacctcccaggttcaagaaattcttgtgtctcagtttcccgagtggctgggactataggtgcctgccatcacacctggctaatttttgtatttttagtagagatgggctttcaccatgtttgccaggatggtctcgaactcctga

SEQ ID NO: 548977 - DNA, 2220 bp, Homo sapiens
actcacctcagcctcccgaatactgggattataggcatgagcgactgtacctggcctcaaatgattttcaaaaagagctggctcaatttacaagtaaacagaagtccccttccggagttatctttacagaagaaagctttacagttttgcaggaaattttatttcactgctgaggctaaatgattttgagatcattaagagacaggtaaagtggaagaaaaaaagaacttattataaacaagaatcaaagtcaatttttctttttcttttttttgagatggagttttgctcttgttgcccaggctggaatgcaatggcacaatcgcggctcactgcaacttccacctctggggttctagcgattctcctgcctcagcctccctagtagctaggattacaggcatgggccaccacccccagctaattttgtatttttagtagagacggggtttcaccatgttggtcaggctggtctcaaactcctgacctcagatgatccacccgccttggcttcctaaagtgctaggattacaggcgtgacgaccgcgcccagcccaaagtcaatttttcaaattaaacttgataatctggtaagatattcctactgcttttagagaacaaatctttcctaaaataaaatgttcggttgatactcacatcaacttaacaggaaaataattcttttaccacatttttttkggggaaggaaacttacaaagttctacatcttatcacagctagttaaacgaagtaaaaaatgtttataatttacaaaatcatctcaatatttggccacctgatactcgatctcaggaggaaaatatacgtgagtactttttcccagggcctccactcacataaactataatgtgaaccacggcctctgcagttgtacaacctagcagccttggttttatcttagaggaagtcaataaccaatatgccactctaaaagtggtacacaagtttctggacttaccagcagtttaagcagccaaaaccgggatttatagtagaaagttttggtggggttgataaggaagaaaaccataaatccataaagggcaagtggatacacatatgtggggatgacactaattggagcaaagaagcatgccagaaggctcaggcaccacaatatcccgaggaatccagcaatctagtaaaggatggggaagacagaaagatagagaaaaattgttatttttacttttaccattacttaaaatatctttaataaaacaaaagtaagaaacatgattagttattaagctaataatcctcttcaagtagaggatggatttaagtacccactaaaccagatagctatatagctaatgcaaactatattcatgaggtgttatgtcttgctttgattacctcaaagagatgttgatgagacaaattgcttctcggattaagttcaaagatgagtacatggtttactccagcctgtctccaaccatacgtgttgatgcccagtagaaaaaggaattcaatcagaagaaagccaccccgatagattcttatcaagggccatatacttctatctgtttcaagtttaaatacagctgaaagaatattaagatattggtcagttataaaattcataacttcccttgaattaataatcttttgtcttcattctcatgatatagccctggcatagaaatttttcataaataaaacctaaacctagattatctatcatctatctatctatctatctacctatttatttttttgagacagtctcaccctgttgccaggctggagtgcaatggcgtgatctcggctcactgcaacctccgactccctggttcaagcgattctcctgcctcagtctcccgagtaactgggattacaggcacgcaccaccacgcccagctaattgttgtatttttagtacagacagggtttcaccatgttggccaggattgtcttcatctcctgacctcgtgatccacccaccttggcctcccaaagtgttgggattacaggcatgaaccaccccgcctggccaaacctagattattttaagagccttaaaaagtcgcctgtgggttctttctcgtcttcattttactctgcagaatgtcactagaataatttcccaaaacttgactttcagcatgtcatcccattgttctattagttttttagattacaaagaatcatggtgaagtggcttagaatcatgtgatcagttctgtcatttgg

SEQ ID NO: 548978 - DNA, 1340 bp, Homo sapiens
  misc_feature 878, 879, 880, 881, 882, 883, 884, 885, 886, 887, 888, 889,890, 891, 892, 893, 894, 895, 896, 897, 898, 899, 900, 901,902, 903, 904, 905, 906, 907, 908, 909, 910, 911, 912, 913,914, 915, 916, 917, 918, 919, 920, 921, 922, 923, 924: n = A,T,C or G
  misc_feature 925, 926, 927, 928, 929, 930, 931, 932, 933, 934, 935, 936,937, 938, 939, 940, 941, 942, 943, 944, 945, 946, 947, 948,949, 950, 951, 952, 953, 954, 955, 956, 957, 958, 959, 960,961, 962, 963, 964, 965, 966, 967, 968, 969, 970, 971: n = A,T,C or G
  misc_feature 972, 973, 974, 975, 976, 977: n = A,T,C or G
gtagatagaaatatgccacagctgcaaggttgatacttcagaacactcttgacagacacaaaagaagacttaagcaaagtccatcatgtcccaggagagaaagatttaccatcataaatatactaatttttccctaatttatcaataaattaaattaatccatattaacaggtatttttttctttagtaaatcatacatttatgaaaaacatacttaagtcagatttttttagggatatgttttatgagttctcatttaagagtctcaacaacctggagaggagatattctaaacaatattttattttaaactaaataacctgatcataaaatttacttggagagcaaaataagcaataataacaagaaatattctgagataaaagagaaataagtaggcattaaattaaccagatattttaaatactttaaatctgtaataatttaaatatgttgggcggagcacagtggttcatgcctgtaatcccagaactttgggaggctgaggtgggtggatcatttgagatcaggagttccagaccagcctggcccacctggtgaaactgcacctctactaaaaatacaaaaatcagccaggtgtggcgcaggcgcctacagtcccagctacttgggaggctgagacagaggaattgcttgaacccgggagccggagtttgcagtgaggcgagattgcaccactgcactccagcctgggtgacacagcgagactctatctcaaaaaaataaataaatatgtcacatttcatatttagatagagcaataaaatacattacactagaatattcaggaagaaaatttctgattcaaaatgataattcagtatataatcaatttgtcatttcacatcgctaattannnnnnnnnnnnnnnnnnnnnnnnnnnnnnnnnnnnnnnnnnnnnnnnnnnnnnnnnnnnnnnnnnnnnnnnnnnnnnnnnnnnnnnnnnnnnnnnnnnnatacctatagttaaaaacatggtattgtkcccttaaaatttgttaagaggggaggtcttatattaagtgttcttactacaaaaaacaaaataaggagacacagggaaacttttagggatgatggacatttttattaccttgattataatgatggtatcatggatatgttcaaactcattaaattatatacattaaacatacacagtttttttgtatagctattaaacatcaataaagctgttaaaaacagtgtatatttgtttgcctttaattagaaaaacatattctttgcacttcttctttgaagcccttcctaaacaccccagtcataggaaacgccccctcctcttcagattcccttta

SEQ ID NO: 548979 - DNA, 1182 bp, Homo sapiens
acagtggaaactgtggcaaatgtttgttagtaaagcatgagaaaatttaaagaatcaatgacttggtctgtgaaaattacagtgtttcaacacaggtaagtgtgatatctggcaagttatgtcttctgcagcttgcacctgcctgcctggcatgactgtcamactagcagtggctgatgccaccaggctaccaactctgcactgttatcagcagaagcaggtggtctgagtgtacctttatttccttagaacttccagagatttgggccttggcagccctgtaaaagaaaattaaagagaatgctctcttgtgcttcatttgggggcctgattgaatttcctctggagtttttctctacttcacaatagaggacagcattgtgggaatggttgtggttattgcagtgggcacagtagcaatcattcaggcattgacttagggaagctaactacactagagatcatatggctacaaagtgatatcactagcacgaatgccagtggggctggggttcctatctaaactagaaaaatccaaagtctctaaaaataattgtgtgaatacatgtatgtgtgtcttggcattcttggaatataaaaactacagagcaccataaaaaagatggaacagcctgctgaaatcacaaatgaaaatctgacatttgtaatctggaatgattgcctttatcatactcttagttatcctatgctggctccatgcaaactgtgtacatgactatctttcccattagacagtggttccttgagggggattactaagttttattcatatttgtacttctggtatatgaacacattatatttattcaatgcttctttcttcaaagaatagattttcagtgaggcccagaactgaagtgctttcagtagccaggtagataatatacatgtatgaaaagttctgttgtatgaacaactggaatggaatagtgagaactagtgtcaacatagagagggtatgccatatccattattatgtaataaaccactccaaaatttagtagaataaataattactttaataaatgatgattctgtggattgttggtttgttttgggctcagatgggtggttcttccattggtatgctctgagtttatgtgtgcagcttcagttgcctggcaggtaattaaaggctgattgttttgggatggcctcaca

SEQ ID NO: 548980 - DNA, 652 bp, Homo sapiens
tgagtatggaattttgtctcattgaaaaccagagaaataactttctgatagttaagagttttctgcactgtaaagttggagactaaatgatttgtattctctctcaatgagcctgtgagatgatggattccctaaatactgagagatccagatgaccactctttgttcctttagcattcaataggtacaagtttaccctgagcataagctatatttgaaagataaacaatcatctttagacattgatttgcttcaggtactaatttgagaaccaatacagtcaaatttgctcagttctgtgaaaggtgaaaaatagaaattgctgttaatatttaagtcatggttatacaaactaactttaattgtaagtcatgtaagtggattaaactctcttaataaatcactttttcattttacttgatgcctccattcctcattgcataatggagtaaacgtttagatggtccctttgttgtaaattgctatggcagtgtgaggtctttgatagcagaggcaatgtctatcatttcattcccacagatgagcacaatttttggtacaaaacagtcatgtagtaagtgatttttragtttaaaattttgagtgtaaactcaaataaatttatggtaatcgagtttcaaagcatgactaa

SEQ ID NO: 548981 - DNA, 623 bp, Homo sapiens
accccaccatacctttagggtgatttgattcagaaaataatcaatatacaaagtatttccttcctgaaagaagttatagattttggaaaatctccaagtttgaaatataaaataaaaaattttggcagttaccaacaaacattttatattaaattcattcgaagaatagagaagtatttggtgtcagagttgtttactccgtgatcacaccactgcactccagcgtgggtagcagagccagaccctgtcttttaaaaaaaaaaaaaaaaagaaagaatcacttacctgttccaggagtagatgtaactccaacaagaggactctgcattactgaaatgtttggctacacaaacagaagaaagtgttatggtaaaaatgcaaaacataaatacagtaagtrttaaaaggcttcattcaatggataactgaatttttatcatgtgctagagatgcctctaattagctcaaagtacaaaggcactcttttttccccataagttaaacagtattaacctaaaatttactagatcccttagtatttgtttaaaataagaaaagtcatattatgttaaaaaaaaaaaaaaagactatcttctgtaaaaggtgacatgttaactatttgt

SEQ ID NO: 548982 - DNA, 1514 bp, Homo sapiens
gtttctttccccagctatctctccaacgctcccaagagccaaaccatcctccttctcatctaaacaaaagtacgaccaaagtggagaggttgccctttctacgttcagtcataatttcacagtttcctggagactatctgttttaagcccttctggggtgaactgctgttgtttttaactccccagtgacaccctccgttycccactgacattaaactgcccaatcacagaatgcctgcaggcagtactttcatgttatatgcaccgcagctcctcaactaatattcatgagcctttgcacctgtctctttggcagctaaagtaccctacttctgtctttctctaaatgtttcaggtttgtaatttggcacatagtgaatgcgtcaatatatatactaggaagcgtgaaagggagtaatctgaaagctactcaagcaaaacttggagaacatatttctaacaggtccactaaatttgagtttggtgtgcttttctttctggtgtgaaactattttaattatttttcacattgtttcttaggagatagggctatcatgatgtctacagtgaagttgggaatgagaacacaatgtagataaagtttatggcaggtaaggggctccagatacggttcttcctggtgggacattggtattttaattgaaagtttgtcgggaaatccaaaccagacatatgttctacattacccactgactgaaactagaaagtcctgtcagagaaggataaacaaagccataatcattcaacttaggcagagatttgctcagctttgaaaaaagagtgtttacacaactacaaatcgactctgactctcccttcctcaaaagataacccctatgtatcctctttagagccatgtaaaataatgacaataataaccatcatttactgagtacataataaggttaggctctctacaaagtaaaaatggttattgggggctggttcatataacccacagacaagagctatgctcttcctcatttaatgatggaaaagagaggcctggagacaggccaccgttataagaggctgcagaacagggactgaacttggtttcttctaagatcagagccaagtacttactggcattatgatacactatggcaactgctctctatgattaccagcaccaagtaacacatgagattctggtacgctgagcactatggtttgaatgtgtgtgcccccttcaaaatttatgttgaaacttaatcctcaacgcaacagtatttagaggtaaggcccttaggagagtgataaggtcatgaggactcctccctcatgaatgggattaaggccttcataaaagaggcttcaaacagcattcaaccctcttgcctttttgtcccttccaccgtgtgaagacacagccttcatcccctctggaggacgcaataacagggtgccaccttggaagcacagagcagccctcaccagacaccaaacctgccggtactttgattttagactctccagtctccagaatagtg

SEQ ID NO: 548983 - DNA, 1514 bp, Homo sapiens
gtttctttccccagctatctctccaacgctcccaagagccaaaccatcctccttctcatctaaacaaaagtacgaccaaagtggagaggttgccctttctacgttcagtcataatttcacagtttcctggagactatctgttttaagcccttctggggtgaactgctgttgtttttaactccccagtgacaccctccgtttcccactgacattaaactgcccaatcacagaatgcctgcaggcagtactttcatgttatatgcaccgcagctcctcaactaatattcatgagcctttgcacctgtctctttggcagctaaagtaccctacttctgtctttctctaaatgtttcaggtttgtaatttggcacatagtgaatgcgtcaatatatatactaggaagcgtgaaagggagtaatctgaaagctactcaagcaaaacttggagaacatatttctaacaggtccactaaatttgagtttggtgtgcttttctttctggtgtgaaactattttaattatttttcacattgtttcttaggagatagggctatcatgatgtctacagtgaagttgggaatgagaacacaatgtagataaagtttatggcaggtaaggggctccagatacggttcttcctggtgggacattggtattttaattgaaagtttgtcgggaaatccaaaccagacatatgttctacattacccactgactgaaactagaaagtcctgtcagagaaggataaacaaagccataatcattcaacttaggcagagatttgctcagctttgaaaaaagagtgtttacacaactacaaatcgactctgactctcccttcctcaaaagataacccctatgtatcctctttagagccatgtaaaataatgacaataataaccatcatttactgagtacataataaggttaggctctctacaaagtaaaaatggttattgggggctggttcatataacccacagacaagagctatgctcttcctcatttaatgatggaaaagagaggcctggagacaggccaccgttataagaggctgcagaacagggactgaacttggtttcttctaagatcagagccaagtacttactggcattatgatacactatggcaactgctctctatgattaccagcaccaagtaacacatgagattctggtacgctgagcactatggtttgaatgtgtgtgcccccttcaaaatttatgttgaaacttaatcctcaacgcaacagtatttagaggtaaggcccttaggagagtgataaggtcatgaggactcctccctcatgaatgggattaaggccttcataaaagagscttcaaacagcattcaaccctcttgcctttttgtcccttccaccgtgtgaagacacagccttcatcccctctggaggacgcaataacagggtgccaccttggaagcacagagcagccctcaccagacaccaaacctgccggtactttgattttagactctccagtctccagaatagtg

SEQ ID NO: 548984 - DNA, 582 bp, Homo sapiens
tcagggatgggcacttggtgggcactggatacatgttactggtaaatatagtgtcttagcccatgcttcaggcataaaaatgattatgaaaaagatgataatgatggtaacaataataatttmaaatgataataatggcaagaacaaaattagaagtagttgtaataataatagtagcagcaactagaccaataatgatatgtttccttacatttttatagtacttatttttagcaaatagagaaaactccaacatttttactaataactcatttgattaagaaaacatctcagtaagcagacatggatggcattaagtataaactttaattgtagaaaatatttgaaactcagaaaagttaagaggtttgcttagaattaaacctctaataagtacattatctaggaccagaataaaaaaacactttcaggggagactacaatctccttgagggcaaaaacaacatctcatatttcctaggctcccaaaacctacctcactgtctgacagagtagacatgccatgaaattttattcttaatcacgacaatgatacaagcaatgctatactggattgaagag

SEQ ID NO: 548985 - DNA, 582 bp, Homo sapiens
tcagggatgggcacttggtgggcactggatacatgttactggtaaatatagtgtcttagcccatgcttcaggcataaaaatgattatgaaaaagatgataatgatggtaacaataataatttaaaatgataataatggcaagaacaaaattagaagtagtkgtaataataatagtagcagcaactagaccaataatgatatgtttccttacatttttatagtacttatttttagcaaatagagaaaactccaacatttttactaataactcatttgattaagaaaacatctcagtaagcagacatggatggcattaagtataaactttaattgtagaaaatatttgaaactcagaaaagttaagaggtttgcttagaattaaacctctaataagtacattatctaggaccagaataaaaaaacactttcaggggagactacaatctccttgagggcaaaaacaacatctcatatttcctaggctcccaaaacctacctcactgtctgacagagtagacatgccatgaaattttattcttaatcacgacaatgatacaagcaatgctatactggattgaagag

SEQ ID NO: 548986 - DNA, 847 bp, Homo sapiens
tcccaagcgccttgaaactgtaagatttcccaggtgagcctggtcctccacgttcattgctgatagggggaagtctgtaggaaaattctccctcagctgctagtgactcaaagtctaaggatgtcaaaagagctggcctcatttgtaggaagcacgaggtctcttagtcatttacggtcacagttgggagaaaggtcacagagtgccgttcttttgggagagtgctcttcaacaggcacctgcatcccccaggcttctcttttcagtttgccactccacagcaatcatttctggctggcggtatacctggggaacccagcagaagcaaatgcaaacctgctctggaagaacaaatccacaccttaggccacgtggaattcccacagggaaaaataaatctccctgaagaatttataatacagatgtataaaacactaaaggaaaagatcctttatgaataagagtcagtagataaaataggcagaatgattcactcccccgcaactcgagacgacagaacaggtttaaaatattataaatatattaggctttggtgagttaaggaaatgaaagaaataagcacacaagaaaagaaactaaaagaaaaaaagaaccaaataaaacatatagaaatgaaaagatagtgaaactaaagactcaatgaacgtgttaaacagaagattagatagaaccaaatagggaattggtgaactgaaagatagatttsaaacagcaactatacaaaattcagcatggattaagagaataagagaagaaatatgaaaaaaatggttgaggcataaaaaaatgacagagtcaacatgcataccaatatagtaggagttct

SEQ ID NO: 548987 - DNA, 576 bp, Homo sapiens
ttggaataaagccccttgctatgagctacaaggccctgcatgatctgatgcctggctctcgcttcatcctcacctggtactgtgtcccccacamctaccacactccagctgcattagcctttattcaattccgtgagcctgaaaaagcccttttcacattaggacttgcacatgctgtttcctctgtctggaagtctttgccatggattttcacctggtaccccctgaatgtcaccaccttcctctcctccctgatagtctctatgtaaacactcaagttttttccgtccaagcagctgtcacaatttgtaattattttattcatgtttattttttgttttggcagagatgggggttgttatttttctttgttagccccaccaggccataaattgcacaagcctttggatcatgttgacttgctcatcatttggtcttatctggcatgtagcaggtacccaggaaatatgtaatgaatgagttaaagaaaggaaggaagacttggggacatagttcacttaggagctacagtaattgatggtgatacacctatggtgattggcggacatgtgggtg

SEQ ID NO: 548988 - DNA, 1343 bp, Homo sapiens
gcctggctaattttttgtattttttagtagagacggggtttcaccgtgttagccaggatggtctctatctcctgacctcgtgatccgcccgcctcggcctcccaaagtgctgggattacaggcgtgagccactgcgcccggttttttcttttcttttttttttttttttaagacagagtctcactctgtcatccaggctagagtgcagtggtacgatctcagctaactgcaacctctgtctcccaggttcaagcaattctcgtgcctcascctcccaactagctgggtacaggcacgcgccgccttgcttagctaatttttgtatttttagtagaaatgggatttcaccatgttggccagactggtctccaactcctggcctcaagtgatccaccacccttggcctcccaaagtgctggaattacaggcgtgagccaccacacccagccaagtgtacagtaagtcttatgaaaatttcaatttgtctgtatcttagagtatgcgtattattctagatatatatcaggttaaataaatgactagtagctaaataaatatccgctgaccaaaaaagtcaataaaatagcatctgtactcacagtatttgtaagctacaacatctatctatattagtatgtatatttgggaatttctatatacaatataaaaactatatattaaaaaatatttttgaccaaaaacatcctattttactaaaagtatcaatcattaaaattctgttgatacacttgggcctttaaacccaggtttcaccccaaaagaaaactcataatctatctcaaatcacttaggaagattcagaagttctaggtccacttttatctctatcttcatccaattacctaactctaaaatggaaatttattttgccaattaacagtaatttatttaacgaccttagtggtctttgcaaagttctttagaattcattatttttcatagctaatactaattcttatctgtattcaattttcctccatatgaattattatttctaacaaattattttttgtgaaaggacttcaataagtttaccttagatgctcataagagtttagattaccaaaataaaggaatcaagattctcaggttcatgacataaaaacaaatacaagccttcaagtaattcttaattttttgtacttatattatctcaaaatctaaaatatttttaactacaagttttccttaaaattaaattctattgaatctaataggtcaaattgcattttattttcaggtcatctgaaacatcaaaagattttaattctaaaagtttaacagttactcagactcctagatgaataaactaaaaaaaaaaa

SEQ ID NO: 548989 - DNA, 1495 bp, Homo sapiens
tccccaagtgtttgacatcttctaatagctgattctgttacctcaaaaagcatcgtctgtgtggattagctgttttacagccttatccactgtgaaaactgcagcatttaaaaaaaactaccactactaccaccaccacaaccaccaaattcctaccatgacaatttttcaggatagattattaatgattatgtccatatatctatgcagcttttttgttttttactttcaaaaccattttatagtcttatcacatcagctctcacaacattggaggcaggtaaagcagttgtcattgctgcctttttaaaggygagaaaactaagggatctgagataaattgaggtcacagagttggctgagtgaccaactggagtgagaaacaccagattcatagtctgtacacttcaggactccaacctaaatgggcttaaggaaaagagaagtttgttagctcttagagccaggaaatccaatgaacagatatagttttgggctcagatggttctaggaattctaacgataccattaagagatggtggcattgagtccctctgactcaatggagtctctctccatgtatatctttgtgtgtgtgtgtgtgtgtgtgtgtatgtgtctatatgtgtcagtgagtgttgtgcctctgtctttctatgtgtctgtttctgtgtaatctgtatgcatatgtgcctagggtttctcctctttctctgcttgtggttctgtcttccttttgtctctttccgcctttttctgtctatcactctctttctgcccatctctctgtctctccttctccagttgtttttcttcatctggttctctctctcagttatcaactctttcattctttttaaattttattctcaggaaagtttgtcccatttggtgacaagatgacctcttgacatttcaagcttccatgcttcagtcaaaggtataatgcagctctcccactctcaaaagtcaaactaaacatccgaaatggactctagttgacctgacatgtgccctcccccagaccacactagcacactgattggccgctctcagtcacatgctggcccctgtcagggggcctttatgattcagccccatcagaatcacgtggcctgcagaataagagttccctcaaggaaaaacaggagacgcttaccagaaatgggagaaaggctgcccagtaggtaaaaccaacacatatccacatggccttcatttgactgcaccatagattgcctcttgcgaagggtatttttaggaaatcctgttcttttaaagttaggttaaaaaaaattccatatattacctgaaataatgccatgtaatcatcactgagggtaaaagccaggtaaacagtctaagctcacatttcttacagataaaccctacccatagaagaactttacaagaaaatctggctacttatggaaaaagaatatggcagagggaaggaatatgtaggcaagtcacatcatccctaagcctcagtttc

SEQ ID NO: 548990 - DNA, 639 bp, Homo sapiens
aaaaaaaaaaaactgtggactgtgggccaaatttgacccagtacctattttgctaaatcaagttgtactggaacacagccatgcccatttttttacatactatctatggctatttttgtgttacaacagtagagttgcatagttttgacaaaaactgtgtggctcgcaaagccaaaaatatttactgaggctttacagaaagtttgctgatccctgatgtaktagaaggaagattaagtgaaatcaagtgtggcaggtgtaactacagaattctatgtgaggtatacggtatgggctaaatgaagcagggggtgagttctcagaaaaaaaaaaataaataaataaagatgccttgaaagggatccaagcagagaggcgggatacagaaatgccaggtggaggtaacagggtcaggaaaatgatagagaggaaacagcaggctcctgagagaactatgagtagttcagcatagctgaccacttatggaatggtgaatgaggcatggagaaggaggaagaagagtcagtagagagtcctctaggaagacttggtatagcaagctggagcccctaactctggtgccaataacccttgaaacttgtgtgtgacaaatgcaggctatactaaaaatgaaaccct

SEQ ID NO: 548991 - DNA, 567 bp, Homo sapiens
taaataaatacttctatgaacataaaaaaagaaataaaacccaaactgctcttaaaaaaaaaaaaaactagacagaaaaattctgagaaactttgttgggatgtgtgcgttcacctcaccgagttcaacctttcttttgattgagcagttaggaaacactcttttkgtagaatctgcaagtggacatttggatcactttgtagccaatggtagaaaaggaaatatcttcacatcaaatttagacagaagaaatctgagaaacttctttgtaatatatgcattcatatcacagagttaaacctttcttttgataaagcagttttgaaactctctttttgtagaatctgcaagtgtacattggagtgctttgaggcctatggtggaaaaggtagtatcttcaacataaaaactagactgaagaattccgacatacttctttgtgatgtgtgcgttcatttcacagagttgaacctctcttttgatggagcagtttggaaacactgttaatgtagaatcttcaagtgcacatttgaagcgctctgtggcctatggtaaaaaaggaactat

SEQ ID NO: 548992 - DNA, 693 bp, Homo sapiens
cacaagatcagatgagccagtttattgatctgggtggtgccagctgatccatcaagtgctgggtctgcaaaatatctcaagcactgatcttaggagcagtttagggagggtcagaatcttgtaacttccagctgcacaactctaagccataatttctaatctgtggctaatgttagtgctgcaaaggcagtctagtccccaggcaagaaggaggtctgctttgggaaagggctgttaccgtctttgtttaagctataaactataaactaagtttctcccaaagttagttcagcctacgcccaggaatgaacaaggacagcttggaggttagaaggaagatggaktcagttaagttagatctttcactgtctcagtcataattttgcaaaggcggtttcacttttactcgtacgtgtttaaaattttttctaccataaatgtgtcacttatgtaataagggggagaaagttactttaagaaacaacatcaatcccttaatgcgcataaatgtagagcatgggtttaaagcgttcacgtagccatagggagcctggtccacttgaaaatgatggactgctttgtagtctccagatttatttgggggaaaaacacctcaattcactacataaatctacctctgcaaaagctcttcagtttgcaaagaatcacgaattcaacttttacagtaaatta

SEQ ID NO: 548993 - DNA, 693 bp, Homo sapiens
cacaagatcagatgagccagtttattgatctgggtggtgccagctgatccatcaagtgctgggtctgcaaaatatctcaagcactgatcttaggagcagtttagggagggtcagaatcttgtaacttccagctgcacaactctaagccataatttctaatctgtggctaatgttagtgctgcaaaggcagtctagtccccaggcaagaaggaggtctgctttgggaaagggctgttaccgtctttgtttaagctataaactataaactaagtttctcccaaagttagttcagcctacgcccaggaatgaacaaggacagcttggaggttagaaggaagatggattcagttaagttagatctttcactgtctcagtcataattttgcaaaggcggtttcacttttactcrtacgtgtttaaaattttttctaccataaatgtgtcacttatgtaataagggggagaaagttactttaagaaacaacatcaatcccttaatgcgcataaatgtagagcatgggtttaaagcgttcacgtagccatagggagcctggtccacttgaaaatgatggactgctttgtagtctccagatttatttgggggaaaaacacctcaattcactacataaatctacctctgcaaaagctcttcagtttgcaaagaatcacgaattcaacttttacagtaaatta

SEQ ID NO: 548994 - DNA, 567 bp, Homo sapiens
aaatttctccccagagcaatcaacctagctttttttgtgaaatttctagcgaagtttcagatgggaaaaatgtggagacccatttggagccccaggattcacacaaatgttattttaaagtgaaaacagttgagctaaagaagcagaaaaaaaatacgttctgaacatccataatcttactgaaacagagatttaccaaagtcagctaccacaacccctgactctggagtggtctccaatcagggaggctctggayttagtcactaggacattccaaaatattgtgtaaacaaggcttatcagaaccatccattcattaaaatctgaaaacttcccttccctaaagtttggtatataaactttatctctggctattcagtgaactactcagtactgagcaactgccacatgactgtgtaagtaaattttgtcttttcctctgttaatctattgtctgttaacttgcaagcctccaactggacccaagttagaataggaagtgtttctgccaacattaaatatgcatattcagttataattcattttaagataaaaaaactacgcaat

SEQ ID NO: 548995 - DNA, 616 bp, Homo sapiens
gaattgtatattcactttcagttataaaataaaagaggtttgtgtaagcttcactgagttttccacaacagtaacatcttacagaagtctagtacaatatcataactagaatgttgacatgatagagtctctcaattttattcaaacatcctcagttttccttgtattcctttatgtgtttctgtgtgtgtgtgcgtgtgtgagagagatagagagagagttctgtgcaattttgtcacatgtgtaggttcatatatttactaytatgatcaagacacaaaacagttccctcaccataagaaacttttgtgttgctgcttcataaccgcactcacctccttccctcccagtccctacccccagcaaccactaatcacttctctacatttatcattttgtaacttcaagaatgttttataaatgcagttatatagtttataaccttttagaactgcctttttcactgggtgctattccctggagatttatcctaattgttgcctgtatctaaaagttcatgtccttttttgctcagtagtattccatggactagatcttatgcagtttaaccattcctctgttgaaggacatctgggttgtttctaggatttggttg

SEQ ID NO: 548996 - DNA, 616 bp, Homo sapiens
gaattgtatattcactttcagttataaaataaaagaggtttgtgtaagcttcactgagttttccacaacagtaacatcttacagaagtctagtacaatatcataactagaatgttgacatgatagagtctctcaattttattcaaacatcctcagttttccttgtattcctttatgtgtttctgtgtgtgtgtgcgtgtgtgagagagatagagagagagttctgtgcaattttgtcacatgtgtaggttcatatatttactactatgatcaagacacaaaacagttccctcaccataagaaacttttgtgttgctgcttcataaccgcactcacctccttccctcccagtcccwacccccagcaaccactaatcacttctctacatttatcattttgtaacttcaagaatgttttataaatgcagttatatagtttataaccttttagaactgcctttttcactgggtgctattccctggagatttatcctaattgttgcctgtatctaaaagttcatgtccttttttgctcagtagtattccatggactagatcttatgcagtttaaccattcctctgttgaaggacatctgggttgtttctaggatttggttg

SEQ ID NO: 548997 - DNA, 639 bp, Homo sapiens
caagctggggtttggtggcacagtcatggctcactgcagccccgaccttttgggctcaagggatccctccagcttcagcttcctcagtagctggaactaccggagcatgccacaacagtggctaattttttaatttttttttttttgtagagataggggtctcgctatgttgcccaggctggtcttgaactcctagcctcaagtgatcctcccaccctgcctcccaaagtgctaggattacaggtatgagccattgtgcctggcctccattcagttttttttttttttttttttttttttgaaacggagtctcgctttgtcgcccaggccggattgcggactgcaggggcgcaatctcggttcactgcaagctccgcttcccgggttcacgccattttcctgcctcagcctcccgagtagctgggactacaggcgcccgccaccgggcccggstaattttttgtatttttagtagagacggggtttcaccttgttagccaggatggtctcgatctcctgacctcatgatccacccgcctcggcctcccaaagtgctgggattacaggcgtgagccaccgcgcccggccgcctccattcagttttaatgtcaacaaattgttaagctctaaaatttctat

SEQ ID NO: 548998 - DNA, 1031 bp, Homo sapiens
acacacatatacatacacatatacacatgcacatatatacacacgtatatacacacatgtatacatgtacacatgtatatacatacatacacttacatacatacacatactgtaatttatatatacatatacagattgagcatcctaaatctgaaaaatttgaaatctgaaatgcccccgaatccaaaactttctgagcaccaacgtgatgttcaaaggaagtgcttattggaacattttggatttcagaatttcatatttgggattctcaatggtataattcaggtgttccaaattaaaaaaaaatccaaaatctaaaaaactcctggtcccaagcatttctgttaagagatactcaatctgtatgtatgtacatgtatgtgtacacacacacacacacacacacacatacacctcctttgtgtgtactgtactttttttttttgctcctctctcccttctctggaagcatatagaatcttctctgtttcaccagtttggaaatttagtaataactgctttggtgtgggtctgtctccttttactgaagtgggaacgtaaatgtctggttgccaggaagcctacaaaacagtctttaacttggtgacttttttgggactcacagatctacagagtcatgcacttaattttgtcagtacacttaagagttggtttttctgtctgggatggacttaatctccaaccaaattccaaggagacttctggtttgaccttctatacctcagatcctgttactctccagtgcccaaaactatcagtgactctcatggagaaccgaatctatgctgtttattaccttggcattcaaggctctgtgtaatctgactccaacctaccttccaagctcaacgcctytgattctaccaactaaaccttacattcaaaagtcaaactggaatagtccccatttgaggcataagtcagaaatattcctaacttagcaccattgttcatatagttctatgtcctagattgtccttttcgtatttgtcctgtcagaataatctact

SEQ ID NO: 548999 - DNA, 924 bp, Homo sapiens
ttaagatacatatggaaccataataagtgctatagataaataaaacaacaaaaagatgaaagaaacagagaaagcacatgatatatagaaaacatccaccagaaaaatatagccacagagataaaaattgtgatcaaacattttattagaatgtggctgatatcataaattggctaaatcagtattcactcttattcccttctagcttttctrgctggctaagaaaccacacagtataatttctcagacttgtagctcacgttttgcctatgacaaagatccactgaggaaaatcaccacctgagatttggaaaaaaaagaaacagtggaatccacatatggagcactggtcttctggcaagcacgtggatggagggcactggttctggggcaccggagtggagattctagttcatagtcttcattgccctgggtgctgagtatgggtgatagcagcaaaccattcctgctaggacactggggatatgtgtttgggcattgtcccagctgcattgcccctggcaatgtgtagtgttcaagcctagttcactagctccttaggagagtttgtgagttaccaaatactctttaacaaaccccttttgctttaatcatctagtacaaattattttctgtagttaaagacactgatcaatattcacaaattttaaaaaagagaaaatttaatgaagctattttaaaaatgtacaaaacaaagtacacattggggaatagataatgatacaacaaaaagagataaaacatgagccgcacgcatcaagaaggaggagtgaaaaacataaatgaaggaaaaatttaatataaatttaaatacataagtatatatatatacatatatatatgtatgtatatatatttcttggtgttgactattgagtcagtctttccttgaacttatacatc

SEQ ID NO: 549000 - DNA, 924 bp, Homo sapiens
ttaagatacatatggaaccataataagtgctatagataaataaaacaacaaaaagatgaaagaaacagagaaagcacatgatatatagaaaacatccaccagaaaaatatagccacagagataaaaattgtgatcaaacattttattagaatgtggctgatatcataaattggctaaatcagtattcactcttattcccttctagcttttctggctggctaagaaaccacacagtataatttctcagacttgtagctcacgttttgcctatgacaaagatccactgaggaaaatcaccacctgagatttggaaaaaaaagaaacagtggaatccacatatggagcactggtcttctggcaagcacgtggatggagggcactggttctggggcaccggagtggagattctagttcatagtcttcattgccctgggtgctgagtatgggtgatagcagcaaaccattcctgctaggacactggggatatgtgtttgggcattgtcccagctgcattgcccctggcaatgtgtagtgttcaagcctagttcactagctccttaggagagtttgtgagttaccaaatactctttaacaaaccccttttgctttaatcatctagtayaaattattttctgtagttaaagacactgatcaatattcacaaattttaaaaaagagaaaatttaatgaagctattttaaaaatgtacaaaacaaagtacacattggggaatagataatgatacaacaaaaagagataaaacatgagccgcacgcatcaagaaggaggagtgaaaaacataaatgaaggaaaaatttaatataaatttaaatacataagtatatatatatacatatatatatgtatgtatatatatttcttggtgttgactattgagtcagtctttccttgaacttatacatc

SEQ ID NO: 549001 - DNA, 627 bp, Homo sapiens
gaaagtttctgcgtcgcagtttgcatgcgctctacacatgccttcacacatcctgcaaggtcccccacaacctgctgcctttgtccaaggcttctttctgggctcacttcacctacaactctcttctagttctgaagccctccatgccctcctctacctggatggctcctcccagtacagttcacagagctgattccttctgatcctcaaaaacccatcaagatgtcacctcctcagaaaaactatctctgaccacccagtctaaagcagtcatccactagctccaatgttctcccttacacattcccccattctttttcctcctaacacatcattctttcagccaacaagtatttcctgagcatctactatgtgtcaggcattattctaagtgcaaagaatacagcagtagacaaaacaaggcttaccagagcttgtcattttatttttatttattsctttatgcagtaggatcaatcacttagatattaatttttgctttattcctgtggatacagaaaccccaggaaggaaaatgtgatttcccctctcccaattctcaaagcagctgaacctgtgtggtctaaccagtctaggctctttgggagggtcatagctcccagctat

SEQ ID NO: 549002 - DNA, 1524 bp, Homo sapiens
caaaaataatcctttcgatccatcattttatctcattggactttaagtactatgcaaggatttgctttttagtttgcttgaattcggtttgcttcaatagttactgtgtcccgcacataaatacacaactgacaaatgcaaagacccagacagcaggtccttggtttacatctggaagattatcttagccttctcctgcatggaaatattacttgtctatatggaaatgatgtgcttgacacttcaaggctctgatccagaaggtaagaccattatgtgagtcaaatcatcaatatgtaaggggtcaccttttttctcttgcataaagagtgcacctcctgggtgctctatttaagctcactggtgtacttggatgaaactgacaatgttttgtatcccaccagattctctatggctgtggttttcttcaggtcaagggaagagttgagtatggctaagacttcaatctacactagtatctttctaattaaagcctgccaaagagggtggggtgggaaggaagagatgtaatccattgttattttatctgaaggcatgagtcctctcagaaaccaggtgattatctctctgatcatatagaattacataatctggattcttgcctaaaatgcttgctttatatattttatcgtctgctttcccttttagtaatctattttaaaatgctgcttaaatggtctcaatatgaaaggctaaaaaagataatttagggtgaaatataagctgtactcagggcttcgaggagaatgcccatcaatattgagttccactttctcttttagatgggttgcttggaacttaacacgttcataccattatctctaaattaccatttataataaactacattgcagtccactgaggaatgttactaattaatgttgtctcatagaacttttcaaaccataaaataaaagccacagccttgtgtttctgtctgttcggtctacattttattataagtaattatttagatttattataaaatctattctaaaaattccattgtatgaggaattaggaaatattaatggtgagggtgtcaattctaaactccagcacccatgtgtaaaggagtttctccctgtcccgtccttttctgaatgtatgtttgtgtggagggggttaggaagagggggtgtcatgcattatggggactcttcggtggtagcttcagcagggtcgccgtggaaggtctcctgagagtgctttatgaaatcaratatcttattatttcctcaacaggtaattccattgagaatgaggtcacgacttaaaaaactttttactccttgatttattacaatgacctttgcccttggacatccaggaactactagctggtgtgtaggatctttttttttggagacagcctcactgtgttgcccaggctgtagtgcagtggcaggatctcagctctctgcaacctccgcctcctgggttcaagcgagtctcctgccttagtctcccgagtacctaggattacaggcatgcgccaccatg

SEQ ID NO: 549003 - DNA, 594 bp, Homo sapiens
gaaagaggagactaattgtcagctcagttagcaagtgggaagaggaaatttttgtggcacttaattacaagtttttagagatgttatcagtatcagtagagaaaaaccttgaaatgtgactaaaagtagtatttatattatcattaaaagaaccaggtaatagaagagcatatcttctrcctttacactagctttctggcttaaacatcaaagaaagatgaactgaattagaagtatagccagaaaacaaaaactgttgtatgggatgaacaaaaatctcacctaagcataacccaaggcagtttgcactatagctttatattaagaatgacaaaattagctacatcaccttttatagttttttcaatctattgaaattctaggaaatgtgcaacactctgcattctgttccatatcctttgaaattattgaatcaactacagtaattgtgcaaaaactggtatctggtaagtttgcaaaaattcatagagctatgctaagtaatatgactatattgaatatttacatttggaaatcaaatttgaaataggaattacttattcactatgattagcttgaacatataaagactca

SEQ ID NO: 549004 - DNA, 510 bp, Homo sapiens
aaaaattacagaaattctcatatactctttttaaattaaattttaagtttacttttaagtctccagggaactcattctacaaatatattggcacatatgcaaaatggaccatatattgcmgtttgtaatagcaaattagtgcctactgatagacactaattttagtgtctatcagtcagactgattaaataaacttgtacagcacccaggagaatattgaatattatactgctggttttcactgtatgtcctgatataaaaatatctaaaggatatgttattaaatgaacaagtaaagtatataaaattattacttttatgaaaacgagaggagaaaataagaacctatattattcttgaacacatttttataaataatactggaagagtttagtattggtggactggaaactttggaccaagaatgaaactaagaaaaactagaatacctggtcaaaataaagaaaatatctgttcagtttgaagtcaggtagtgtgatgcctccagct

SEQ ID NO: 549005 - DNA, 569 bp, Homo sapiens
gaatatgtgatggtagaaatgcaaaaaaagttgaagtggaaaaactcacggtataccactttccagagtaatgccaaactttatttcaaatgtagatacttttctggttagatatccaatagagttagtaatttcaattatctatgaatactttaargacaactgtaattcattgcctccatattgccagtgacaaacaaaaaatgacatttactatggaattggaatatttagaagtatgactgaataatgacttatcttatggtcatcatattcagtttggtgattgaacaatgcatgtcttaacagcgtagaaatagaagcatcagtaatcttttagcaaatgtataaggaaattctttttctattatctggaactctaataatagttatttgattatatgtgtcaaatgcttaattctgcaagctaaaatttgatagatatatgtgatgttattcaatatgttgcccaataagttatttttatagttcaaaagtgaaaggagagccattccaatccttgattcaaaaaataatgaaaggagctaaatttgcaaaatgttatcaag

SEQ ID NO: 549006 - DNA, 569 bp, Homo sapiens
gaatatgtgatggtagaaatgcaaaaaaagttgaagtggaaaaactcacggtataccactttccagagtaatgccaaactttatttcaaatgtagatacttttctggttagatatccaatagagttagtaatttcaattatctatgaatactttaaagacaactgtaattcattgcctcyatattgccagtgacaaacaaaaaatgacatttactatggaattggaatatttagaagtatgactgaataatgacttatcttatggtcatcatattcagtttggtgattgaacaatgcatgtcttaacagcgtagaaatagaagcatcagtaatcttttagcaaatgtataaggaaattctttttctattatctggaactctaataatagttatttgattatatgtgtcaaatgcttaattctgcaagctaaaatttgatagatatatgtgatgttattcaatatgttgcccaataagttatttttatagttcaaaagtgaaaggagagccattccaatccttgattcaaaaaataatgaaaggagctaaatttgcaaaatgttatcaag

SEQ ID NO: 549007 - DNA, 569 bp, Homo sapiens
aaagagaacataatttatcacaaaacaaagaaccaatgccaaatgaggacaaatacataatgaggttaaacaggtttacataaatacaaagaattacaaatttatgtcatttgtcaacctggttaaaacatcaagaaacattcattttcttatatctaaatattgtaagttctttctgaagttttattcaatgtgttgccttgcagtcacattttgttctaataaatcagcacaaacatgtgatcagacaatatattgttttcttttcttacaattgaaaatgtaattgtgagctccacattagagtttaatagaataagttgcagctataaacaataaaggagttataaatataattaagaaatgtcattatgcttacataacacttaagatattattaacttagaaatgctgtcattggagcaatgcacacttacttacaaactagaaaaattatcatatagctcttttgtttcactaaagtcctaaaattactagaaagcagtaaattaaaaaatagaatacmtaatgtgttttctttttttattatactttaagttctagggtac

SEQ ID NO: 549008 - DNA, 684 bp, Homo sapiens
tgttaagagtaccaaaaatagggccaggaatgatggctcatgcctataattttggcactttgggaagccgaggtgggaagatagcttgagtccaggagtaaaatagtgrgactctgtctctacaaaaaaataaaaaattagctggatggggcacacacctgtagtccaggtactcacgaggctgaaatgggtggatcacttgagcctgggaggtcaaggctgtagtgaactgtgatcacaccactacaccctacacccagcctgggctacaaggtgagaccctgtctcaaaaaaaaaaaaaaaaaaaaaggtaccaaaaatctatagctgtttcagaaataaaatacatgtagttagtgaggtttttctctcccactgctatgacttaatttttggttgagatgctaagccaaacatcattttaagtctgtggcccaaccaaaaaagggaatcatactctccaaagaattgtacattcccactctaattgctaaaataaaatgttggattatgaaaatcaattttgtaggtatcaataagttataagagcatggcttatttaaaaaaaaaagtgggccaggttacctacatgagctgcaaagcaagcaaactgaattttcttatcgaagagcccatcctcatacttaaaatttcccatgactacatggaaattctttcacttac

SEQ ID NO: 549009 - DNA, 552 bp, Homo sapiens
tggagataatgaaatcacttgtgttctagcctaaacgttatgggaatttcagaactgcaacataacagataatccttggacgaaaactaaatctctcctctggtcaggcatctatgtgcatcagtgaagagaagacggggactgtggaagggaaaacagtgagtcaggaaggactgtggccacatctgttccccggaccctcamgtagttaaatcctgacctcctctaccccagactgtcctggggaatggccaacactggcttttcacaactgtgtgttaccagaaatgcaacagaaacccagctgaatccccagggtttcccttccgcccttctcaatggaaagatctgtcccaggaccatttattccaacattttcaattatgagaaatctgggaagataaagttattttcacatttctcaagaaatacatacttattcatactcattacaggaaagtcagaatctacagaaaaccaagaagatttttaaaaatccatgataccaccatcaaaagagccacacttagtatgttggtccacaggtttcct

SEQ ID NO: 549010 - DNA, 546 bp, Homo sapiens
aaaaaaaaaaagtgccaatcattgacacccatcaccagaagctaggaggcatggaagagatttcccttaagagttctcagaaggatgcaacccagctgatatcttgacttcagacttgtagcctccttaatcgtgagaagaaatttctgctgctttaagccacccagtttgtgatattttgttacagcagccctaggaaactactacagggggtgtatgaagaattggctatgagctgttcatgttttagaatcggttgatgaatgtacgcagggtgtttgttatattgttgtttactgttttatatatttgacaatttcagaaataaattcttttttttttttttgagatggagtctckctttgtggctcaggctggagtgcagtggtgtgatctcggctcactgcaagctccgcctcctgggttcacaccattctcctgcctcagcctcccaagtagctgggactataggcacccaccactatgcctggctaatttttttgtatttttagtagagacagagtttcaccatgttagccaggatgg

SEQ ID NO: 549011 - DNA, 1394 bp, Homo sapiens
cgcttttttgccatgttttggcatctagaatttgctcacttcaaaagaattgatgtgttaatatacttttttgtcgagtttgggcatctggaatttgctgacttcataaaatgggtttgagactttctcttcttttttacattctggaatagctagtatagaataggagctatttgttatttaaatgtatggtagaccaaacttgtaaaaaagactaggcctggagttttattgacaggaacagatgaaattttttagaagcttgacaatattaagagtttctattctttctcaagttagtttgataagttatactttaggaatttgttcatttcatgagttttcaaatttattgacaaaaatgtattcgtgtgaatctaatatttatagcattcttatttttaaaattttaatgttatttcttttctctttctttttctttttatcctgaaaaattgctaggagtttggcaatttcattaggcttttcagtgaaaaaattgttggctttattgattctctccttttgttttcatttttattttacttctgctctttattgtctgtgtttctctcttattttgttgttatttttgtaacttcttaaaaatgcatgttttatttattaattcttagtcttcttttctaatataagcatttatgactttaaattttcctctaagtatttttcaactgcattctacaagtttgggtaaatcggtaatgaaatttggctatttcgtttttgttcatttctcattttttctaaatcccattataatttcttttttgactatgagtaatttagaaatagatttcttaatttctaaacatatgggaaagttctactatcatttttattattttgtttttaatattttaagataattttaaatctatagaaaagaagaataatataaagaactcccacttacccttcccagacttatagttgttagcttttatatcttctctctgtctgtatgggtgtctatgtgcatatatgtattgagggtatatatatatatatatatatatatatatatatatatayacacctatatacatatatatatacatgtatgcctatatacatatacatatattttgtgtgcattgatatatatatctatatatatatacaaaatacattttatataatatataatacatatgatatatactattatatacacacacatgctcatatgtgcctttaaaattagccttgttgagggtgtgcaggtagtaaacttacactttctcagtttttgtttggaattctttatttcatctcaatactttaaaaaaatcgaattttagatcgagaagtttgggggtgctttttcactatgcataatgaatatattattatatattatcatcttctttggt

SEQ ID NO: 549012 - DNA, 1394 bp, Homo sapiens
cgcttttttgccatgttttggcatctagaatttgctcacttcaaaagaattgatgtgttaatatacttttttgtcgagtttgggcatctggaatttgctgacttcataaaatgggtttgagactttctcttcttttttacattctggaatagctagtatagaataggagctatttgttatttaaatgtatggtagaccaaacttgtaaaaaagactaggcctggagttttattgacaggaacagatgaaattttttagaagcttgacaatattaagagtttctattctttctcaagttagtttgataagttatactttaggaatttgttcatttcatgagttttcaaatttattgacaaaaatgtattcgtgtgaatctaatatttatagcattcttatttttaaaattttaatgttatttcttttctctttctttttctttttatcctgaaaaattgctaggagtttggcaatttcattaggcttttcagtgaaaaaattgttggctttattgattctctccttttgttttcatttttattttacttctgctctttattgtctgtgtttctctcttattttgttgttatttttgtaacttcttaaaaatgcatgttttatttattaattcttagtcttcttttctaatataagcatttatgactttaaattttcctctaagtatttttcaactgcattctacaagtttgggtaaatcggtaatgaaatttggctatttcgtttttgttcatttctcattttttctaaatcccattataatttcttttttgactatgagtaatttagaaatagatttcttaatttctaaacatatgggaaagttctactatcatttttattattttgtttttaatattttaagataattttaaatctatagaaaagaagaataatataaagaactcccacttacccttcccagacttatagttgttagcttttatatcttctctctgtctgtatgggtgtctatgtgcatatatgtattgagggtatatatatatatatatatatatatatatatatatatatacacctatatacatatatatatrcatgtatgcctatatacatatacatatattttgtgtgcattgatatatatatctatatatatatacaaaatacattttatataatatataatacatatgatatatactattatatacacacacatgctcatatgtgcctttaaaattagccttgttgagggtgtgcaggtagtaaacttacactttctcagtttttgtttggaattctttatttcatctcaatactttaaaaaaatcgaattttagatcgagaagtttgggggtgctttttcactatgcataatgaatatattattatatattatcatcttctttggt

SEQ ID NO: 549013 - DNA, 617 bp, Homo sapiens
gtgcagtttctgatcatagcactctctggtcaaaatccttctccctccagggcatttgagaataacaagaaagctcatcctaggccataattcrgcatttatatggaagccaacaggattctagtattgtttccttctgattgcaatgcttattcaattatggtatactttagcaaagtgctttcgctcccttaactgaccaaatcaccatttctgctttaagtttatgtataattaaatccagcctttggatactaatacttctgtttgttttctttttgtttatagaggaaataggcacaacttttttcctggagcctgaccatcatcagaatgtcaccagacctctgggcactgaaagccaactctgagtgcaaactgggagggccaccccttccctccaacctactaggaaaccctgcaatccaaagcaggagaaagctttctgctgtcctgactcaaaggaggcagagggataacttaagtcttccaggtggacgttgcgcttctgggcacctgcgctgtgctcagcagaacacagcatagctcagagcaagaagaagagcagaaagctcagcaggacaagtcaagatgcaacaagaccggcagcagcagcc

SEQ ID NO: 549014 - DNA, 617 bp, Homo sapiens
gtgcagtttctgatcatagcactctctggtcaaaatccttctccctccagggcatttgagaataacaagaaagctcatcctaggccataattcagcatttatatggaagccaacaggattctagtattgtttccttctgattgcaatgcttattcaattatggtatactttagcaaagtgctttcgctcccttaactgaccaaatcaccatttctgctttaagtttatgtataattaaatccagcctttggatactaatwcttctgtttgttttctttttgtttatagaggaaataggcacaacttttttcctggagcctgaccatcatcagaatgtcaccagacctctgggcactgaaagccaactctgagtgcaaactgggagggccaccccttccctccaacctactaggaaaccctgcaatccaaagcaggagaaagctttctgctgtcctgactcaaaggaggcagagggataacttaagtcttccaggtggacgttgcgcttctgggcacctgcgctgtgctcagcagaacacagcatagctcagagcaagaagaagagcagaaagctcagcaggacaagtcaagatgcaacaagaccggcagcagcagcc

SEQ ID NO: 549015 - DNA, 2375 bp, Homo sapiens
  misc_feature 2275, 2276, 2277, 2278, 2279, 2280, 2281, 2282, 2283, 2284,2285, 2286, 2287, 2288, 2289, 2290, 2291, 2292, 2293, 2294,2295, 2296, 2297, 2298, 2299, 2300, 2301, 2302, 2303, 2304,2305, 2306, 2307, 2308, 2309, 2310, 2311, 2312, 2313: n = A,T,C or G
  misc_feature 2314, 2315, 2316, 2317, 2318, 2319, 2320, 2321, 2322, 2323,2324, 2325, 2326, 2327, 2328, 2329, 2330, 2331, 2332, 2333,2334, 2335, 2336, 2337, 2338, 2339, 2340, 2341, 2342, 2343,2344, 2345, 2346, 2347, 2348, 2349, 2350, 2351, 2352: n = A,T,C or G
  misc_feature 2353, 2354, 2355, 2356, 2357, 2358, 2359, 2360, 2361, 2362,2363, 2364, 2365, 2366, 2367, 2368, 2369, 2370, 2371, 2372,2373, 2374: n = A,T,C or G
ggtgtgagagaggagacctgcagcattttcctttccaggtttactaggataaaggctgatttcttcatccccayctggctcctagcatctattctcaattggttcaaactctgagcggaggaagggaaatgaatagcaccccaaaacctcaaatattggaggaaaactacacatgcagccttaatctagtgcttgaatttgtcttccagaaaagcttcattattttcctgaaatatataaatgtattggtcctctgaaattcatttcagagctaataaatgaaatgaaataacagggccattaataaagtcacaaatgcatttttttaagctggaggaaaaaaatggcaattctcttttggctgtgcattctctgattttcacaaataagaacttttacatcattagtgaaatgagaatgtatgacaccattcctgcagattgaaacaatctggagagggcagaccttgttttatttttatttctccatctcccctttggcatgaaaaattggtctgagggtttttgtttttatacctgtttacctttgccttaagattctgagaagatctggcagaatatcctaacccactgggttcttctacagagacaacttacttgttttcatcttactggcaaaagaagcttttcacgttcaaaggatacagaggaccacacagagagtgatagatgccgacagaataacccgtggaattccaactctccgtccttcattcttgatgttgaccttgagtgtcagcgcagcctggatccagcaggtcaatgtgccaaatccaaaggtcaaggaagttccgacgttatggatttcttcatcatttgtgagcttagggatgaatggataatgacacatgaaggcccattcagcaaagaagacaggcaagttgaaggaatgaatatatgaggggagaagataggaaaagaaatatcccaataatgggatgatagattgcagaaagattagctcttcgttctattctcaaatggtttgaactctgaggggatgaaggagataaataatacccccaacccttaaaaacatttgtgtagaaaaagtaaaagaaaacagaaggagagttacagaaaaagaaatgtttctacaagcatacaccccaaacttttccaggataagaaaattagaccaggaatttggacatggttttttttgtttgtttgtttttgttttggtttgtttgtttgttttgagacagggtctttactctgtctcccaggctaaaatacagtggcgtgatcacggctccctggctcaaagcgatcctcccacctcagcctctggagtagctgggaccacaggtacatgccaccatgcctggctaatttgtttgttttgaaggaaaatttgtattactttaattgttttttaagtacagaaaactcaacagtgtatatttaacccagcttggtggcaagttctttagcctttgcctttttgagcttagcaatgtgagccacagacttgggacccaggacattgcctccccagtgatggcggatctcatcggatctgtttttgtaattggtcctgatagcttccacccgcttagccaaagctcctttgtcttccaagttaacctgtgtgaagacaacagtggtgcaggtcttcctgtggactagacgtcccagtcttgccttcctcttgataatgcagcaagagacccccattttacgacacagggcaggcaggaagacagctagctcgatgggatccacatcgtgtgcaatcaccaccagctgagcctttttgttttccaccaaggtggtgacagtgttaactcctactcgaagggcaggtggtctcttagtggggacgtcctctttgcaggcagctttcttctcagcctgggccaacagcttctgcttcttctcttgctttgtctctggtctgtacctgtgggctagcttaagcagctgagtagctgcttggcatccagggcctgggtgaactggttaattgcagaaagcacttacagaggttaattgcagccgcttatagaggatggctgtctgccactgcaacctgatatagcggggcaatttcacaaagcgagtgaggtcacttttgggctggatgtcctgtccaatgccaaaattcttaggccttttctcaaaccagggattcaccactttcttggcctcctgcttcttcatgacagcaggggccggagccaccttctttactttggccttctttcctttcagcacctttggcagcaggaggagagcgctaattttttatnnnnnnnnnnnnnnnnnnnnnnnnnnnnnnnnnnnnnnnnnnnnnnnnnnnnnnnnnnnnnnnnnnnnnnnnnnnnnnnnnnnnnnnnnnnnnnnnnnnnc

SEQ ID NO: 549016 - DNA, 1542 bp, Homo sapiens
aattctkaatattgagatagagcaaaggtccggggatcacaaatggaactgtgcatttaatcccagaactggctggctcaactacctaccccttatactcacaaccccgcttgcatgctccttcccatgacaactcctctaagtcttcctgttaatttcctgtgtcatagtgtgtgtgtgtgtgtacatagcgatggctgggaaatcacggacaaggagttaaacgagaagagttagtcttttcaatgccacttccccacatgcaacccccagagttggttcattcttttttgagacagtcttgctctgtcacccaggctggagtgcagtggcacaaacacggctcactgcggcctcgacctcctgggctcacctgatgcccctgcctcagcctcccatgcagctgggaccacaggagtgagccatcatacccaactaactttctgaatttttctgtagagacagaggtcttacattgttgcccaggctagtgtcgaactcctgggttcaagcaatcctcctgcctgagcccacagaagtgctgggattacaggcatgagccaccaagcctgccttcactgctgtgttttttttttttaattcaaacatgaacttgaaccagacactgtttctttatataaaaccgtaaaactgttttatttttcaaggatccccatataaagtttctttaaagaggcaatgtatttgtagtgccaggctcagttcatatcctggagtatataatataagaagtctattactcacctcgagtaacatctgtcagaaacaaaatgttgttggttgagcacccaatgctgtctgcaatctttcggtaactttcactctctactttgtgtccaatcttggtatcaaagtgaccatcaacaagctgaacaaagagaaggggaaagactggcaatacaaatacacttgcatgcccctcatgcctttctctgaaatacatgacaatcacaattacttcattcgttcagtattttctgaaaatctacttaatagggaactttatggaggctatacaaagtaaaaataaagattttatagcaacagacatttggaagaagaaaactaccagctcaacatacataagatcatttcataatctacctggttttcactaccgttcattttacatctgaaatagtttaaaataaacatgccctacatcctacccttaaagatgatttgcactcaaactactcactggattgaattttactcctgatgaaagattctgaacactgtcctttaatcttacgatgaaaaaatttctctaacctgcctcatgaataagctattattttacttacaagaaattctcattttctagttaaaacgttttgaaattctacccaagggctcgtctatgtctctgccctcttggaaacaattggagtcaaatctgtaacttgctaatttgaccaacagtaattaaaataagtccatatttagggtcagttactaagatgtgatcttttgaatgttttcagaacttttcacaaactaaaaacaagcatagtaagc

SEQ ID NO: 549017 - DNA, 1542 bp, Homo sapiens
aattcttaatattgagatagagcaaaggtccggggatcacaaatggaactgtgcatttaatcccagaactggctggctcaactamctaccccttatactcacaaccccgcttgcatgctccttcccatgacaactcctctaagtcttcctgttaatttcctgtgtcatagtgtgtgtgtgtgtgtacatagcgatggctgggaaatcacggacaaggagttaaacgagaagagttagtcttttcaatgccacttccccacatgcaacccccagagttggttcattcttttttgagacagtcttgctctgtcacccaggctggagtgcagtggcacaaacacggctcactgcggcctcgacctcctgggctcacctgatgcccctgcctcagcctcccatgcagctgggaccacaggagtgagccatcatacccaactaactttctgaatttttctgtagagacagaggtcttacattgttgcccaggctagtgtcgaactcctgggttcaagcaatcctcctgcctgagcccacagaagtgctgggattacaggcatgagccaccaagcctgccttcactgctgtgttttttttttttaattcaaacatgaacttgaaccagacactgtttctttatataaaaccgtaaaactgttttatttttcaaggatccccatataaagtttctttaaagaggcaatgtatttgtagtgccaggctcagttcatatcctggagtatataatataagaagtctattactcacctcgagtaacatctgtcagaaacaaaatgttgttggttgagcacccaatgctgtctgcaatctttcggtaactttcactctctactttgtgtccaatcttggtatcaaagtgaccatcaacaagctgaacaaagagaaggggaaagactggcaatacaaatacacttgcatgcccctcatgcctttctctgaaatacatgacaatcacaattacttcattcgttcagtattttctgaaaatctacttaatagggaactttatggaggctatacaaagtaaaaataaagattttatagcaacagacatttggaagaagaaaactaccagctcaacatacataagatcatttcataatctacctggttttcactaccgttcattttacatctgaaatagtttaaaataaacatgccctacatcctacccttaaagatgatttgcactcaaactactcactggattgaattttactcctgatgaaagattctgaacactgtcctttaatcttacgatgaaaaaatttctctaacctgcctcatgaataagctattattttacttacaagaaattctcattttctagttaaaacgttttgaaattctacccaagggctcgtctatgtctctgccctcttggaaacaattggagtcaaatctgtaacttgctaatttgaccaacagtaattaaaataagtccatatttagggtcagttactaagatgtgatcttttgaatgttttcagaacttttcacaaactaaaaacaagcatagtaagc

SEQ ID NO: 549018 - DNA, 370 bp, Homo sapiens
tcttccttcattcatattaacaccaaagggaaaaatttcagtgtgaactttttaatcggtttattgaaatacgtttccacatgacattcgctgactttattctcaccactaactcttattaggaraactgacattttcctttatgactgttattagtagaagatatcatttctttcatcagtttttcagttacatttttttataattccaaactataatcctgcacttgaaatttaagtaaaacaccttaagtggtcttatactaccattcttaaaagaacagtatgacttagaaattgttacataaaaaatacttgttgagtaactgttacaaaaagcatttctgacattgtagcctcaaaaaatcata

SEQ ID NO: 549019 - DNA, 613 bp, Homo sapiens
acctcaatgtatacattcaactaactacaaagttctttcaggtcctagattacacttcattgtttcatctatggacctccatatgtgctatttcatctgtccaagtaccctaatgtatcaccatcccttacttggcctagccaactccaattcatgcttggtataccagcttataatttgccactcctagaaaccaccctagacagatcaagtctgaaaatttgatctacctctttratgagttctgtagttatgcaaaaacaaataaatttctgccttctatgagctgtgtagtagagaaagtaacaagttccaatgctctctctcttcttctctgagaatacacaatggttcccagagccagaaaactgtattggcccttaatgaatttaatacaatcctttctcctcatacctcaatttatcctgatatggaacttctaagagcaactggaattcaaaggctaaaagaccatgggttctatcccagtttgtcatggttctgcagaagtggaaggtggcttcagtttctagtctaccactaaaacattcgatggtcattcagactttgataagctgttcaatttttaccagtttcatttattagcattaga

SEQ ID NO: 549020 - DNA, 550 bp, Homo sapiens
tagtgatgggtgtgaccaagaaagtaaaaccgggtgattgttgggactagcaggaaacacttcggtttgtgtgtccagccccagccccacctctaaaagctcaacacaaggtggtcagggtaaaggccgtgattcagcagtgaactttaatagtcttggtcaccaccaaagtgatgctccagagtcatcttccacaaaacgacacccttagttctcctcgagggacgcaggaaagtgttcatagccattgcatttccggattagcttaccgccgctcttcgaatggcttttaaatctggattgatttaagacgggtcagatagcactagcgtggcttgaagggracagtgtggttcaagaatatctaagtttcatggaagctgaagaattgtaagcccttttttcagaaacgtaaaacttcacctccatcacacccccctctccatattggatgccatttcctggagaagatactgtgctgctctgagtcatgcctttgtggagaaccctcttacaaatatgtcttctttctgtgatattttgagttaaa

SEQ ID NO: 549021 - DNA, 652 bp, Homo sapiens
tgtgaagtcatccctctaatgataacctgtaatgaggttattactgtgatttttaatgaatacattttaaaatgttttaatttcttcaaaagcaaacattaatctctacatatgtgtgtatacatatacaggaaatgtatgtatatatgaatatacatatattcattgtatatgtgtatatatattcatacataatatgtgtgtgtgtatatatatatatatttacacatttcctacataaataaaagttctttaaggtcctaataatttttaagtgaaaaggagtcctgggaccaaaaagttttgagaatcactgaaccagatttctagatctttaagatcattwattcactcaacaaataattgtgcctcctgtggccaggcattttgcagatacggaggataatgtggtgatagcaacatgtttcctgctctgatagagttttacatttgggagggaagagacaaacgaataaattaacaagataatttctgagagcagtaggtttaatgaagccgtaaagcaggacacatatccctgcacaatctgtgcgcctgctcagacgtaacaccccgcagcgcagcaggcagattcagcggcgtcgccccataaggcccgagcctctcagttggcctaggacggcgagggcgg

SEQ ID NO: 549022 - DNA, 652 bp, Homo sapiens
tgtgaagtcatccctctaatgataacctgtaatgaggttattactgtgatttttaatgaatacattttaaaatgttttaatttcttcaaaagcaaacattaatctctacatatgtgtgtatacatatacaggaaatgtatgtatatatgaatatacatatattcattgtatatgtgtatatatattcatacataatatgtgtgtgtgtatatatatatatatttacacatttcctacataaataaaagttctttaaggtcctaataatttttaagtgaaaaggagtcctgggaccaaaaagttttgagaatcactgaaccagatttctagatctttaagatcatttattcactcaacaaataattgtgcctcctgtggccaggcattttgcagatacggaggataatgtggtgatagcaacatgtttcctgctctgatagagttttacatttgggagggaagagacaaacgaataaattaacaagataatttctgaragcagtaggtttaatgaagccgtaaagcaggacacatatccctgcacaatctgtgcgcctgctcagacgtaacaccccgcagcgcagcaggcagattcagcggcgtcgccccataaggcccgagcctctcagttggcctaggacggcgagggcgg

SEQ ID NO: 549023 - DNA, 561 bp, Homo sapiens
gtcccaagtttaaaactaagacaagccacccaggtcccaccccagggaaacatttctataataatcaggcaacctacagtcatcaactatgttagagtctatacagaaccacatcaactgaggtacacccttcccagggctatttttatttggtgggagatataaagcccttgccactgtccttgatgtggaacaataggacaagccatacttgcagggtttgccaacactctgagctcagttgaactcaattcaacctaatcttctgtttaatcctgcttcttcttcctgctattgatccttaataaatagcttgcttccttccaaactttttctcaatgcctgtttctggagaacccaaacttctattaaytctgtctcttttgaaaatattaaaaggttagcatttatttatgctgtctttcagaattactgcctctccaaaaccccaggtggccagcatcttcatgctgccaccagttgccccaccaccctaggcagatcacactgcagtttacaccctaagttcaaatcttggatcctcccacccatggattccaa

SEQ ID NO: 549024 - DNA, 699 bp, Homo sapiens
ccaacactatgttgaatatgagtggtgagagagggcatccttgtcttgtgccagttttcaaagggaatgcagcagcctgtttcttttacatttttcttcacctttcattttcagttcatttctgtttctttttctttcccactaccttggaatatgcacagagctgccttgtcttggggagtcctcagcttgagcctgctttccctattagtcaccacactacagtcacccagatgaactagacaaccttaaatgtcttcggaggtatcagatgatttttcaccttagrgacagagtctcactccgtagcccaggctggagtgcagtggcgcaatcatggctcactgtagcctcaacctcctgggcttgagcagtcctcccacttcagcctcccaagtagcttggactacaggcgtgtgccaccacacctggggactttttaaattttttgtagagacagggtcttactgtgttgcctaggctggtcttgaactaatgagctcaagcaaacttgccacctccacctcccaaagtgctgggattacaggcatgagctacttctcctgtcaattttaattcttcattggatttattatatttgatataaattactgtaagtatttgagtgcgtgtcttctaataaacactatgttggttgtggtaaagttagaatagtatgagaggggtcacttctctgaa

SEQ ID NO: 549025 - DNA, 511 bp, Homo sapiens
gcgcacacgcatgcacacacrcgcgcgcacacacacatgcgtgcatacatggacacacgcactcgcacgcatacacacatgtgtgcacacacgcatgcacacgcatgcacgcacagctgctgccagacattggcgcactgtgtggcctccaccgagagcatcttccccctgacccatggctccagaaagtggcccccacccccagccctctctggcctcctggggaacttgtattagaacaatccatgtctctttctgactgtccaggctggacctggtcttctccatatttagatccttcccagttctgctcccacagagcaccacggattgtgattgtcccagctccgtccccctttctcagacccgtcaatcctaagagccaggcctggtacccatgggtctccttcctcaccaaggccagcccgcgccccgcagtcccatggcacctgccagacaggacacggagcctggcttgtggaggttcacgcctgcaggacggggacgaact

SEQ ID NO: 549026 - DNA, 511 bp, Homo sapiens
gcgcacacgcatgcacacacacgcgcrcacacacacatgcgtgcatacatggacacacgcactcgcacgcatacacacatgtgtgcacacacgcatgcacacgcatgcacgcacagctgctgccagacattggcgcactgtgtggcctccaccgagagcatcttccccctgacccatggctccagaaagtggcccccacccccagccctctctggcctcctggggaacttgtattagaacaatccatgtctctttctgactgtccaggctggacctggtcttctccatatttagatccttcccagttctgctcccacagagcaccacggattgtgattgtcccagctccgtccccctttctcagacccgtcaatcctaagagccaggcctggtacccatgggtctccttcctcaccaaggccagcccgcgccccgcagtcccatggcacctgccagacaggacacggagcctggcttgtggaggttcacgcctgcaggacggggacgaact

SEQ ID NO: 549027 - DNA, 690 bp, Homo sapiens
cacgtgatgtttcagctgccagatttcaactatgcaggcactcacaacatccataggcttgactaattccatttccattctcgcrttttagcatcagtagctgagcagcagagttttgtttacattttgaaagagagggaatagccaggagttaacagagggagcttctgggagagcagcattctgggaacatcctttaaggcaaggtgtgatttcagggtattcaacaagaaacttgtgacccacagatgaacttttttatttatttatttatttttttgagacagagtctcgctctgttgcccaggctggagtgtagtggtgtcatcttggctcactgcaaactctacctcccacattcaagcaattctcatgcctcagcctccgaggagctgggattacaggtgcccaccactaagccaggctaatttttgtatttttagtagagttggggtttcaccatcttggccaggctggtcttcaactcctgacctcaagtgatccgcctgccacggcctcctaaaatgctgggattacaggtatgtgctactgtgcccagctggtgaactctttctgctcctcgagagcacacattatttattctaagaagtaatctaaaaggcttccaagagctaaggaagccctcttacctgctattttggcacttggcacaaccatttttctctttta

SEQ ID NO: 549028 - DNA, 690 bp, Homo sapiens
cacgtgatgtttcagctgccagatttcaactatgcaggcactcacaacatccataggcttgactaattccatttccattctcgcgttttagcatcagtagctgagcagcagagttttgtttacattttgaaagagagggaatagccaggagttaacagagggagcttctgggagagcagcattctgggaacatcctttaaggcaaggtgtgatttcagggtattcaacaagaaacttgtgacccacagatgaacttttttatttatttatttatttttttgagacagagtctcgctctgttgcccaggctggagtgtagtggtgtcatcttggctcactgcaaactctacctcccacattcaagcaattctcawgcctcagcctccgaggagctgggattacaggtgcccaccactaagccaggctaatttttgtatttttagtagagttggggtttcaccatcttggccaggctggtcttcaactcctgacctcaagtgatccgcctgccacggcctcctaaaatgctgggattacaggtatgtgctactgtgcccagctggtgaactctttctgctcctcgagagcacacattatttattctaagaagtaatctaaaaggcttccaagagctaaggaagccctcttacctgctattttggcacttggcacaaccatttttctctttta

SEQ ID NO: 549029 - DNA, 562 bp, Homo sapiens
attccactaatgttactaagtctctagagtaatgaaacagaaaatttagggtaaggcatcgagtctaataacctgttttgaacaaacattatgtgtttgcattgttcatcatggcatttttcatgttcacagattcacattaacgcgctttattaagagtatggggtggtgtgtatgtgactgtctcaacactgatctgaatctccctagatcttggagtctttttgcttttctgagtggcagagcactgccccacgcccccacgagggccattaacaggtgtatgttggatcagcgctcttctatccagttggttaccttctaggtctgtgcttgcttttcttttctcttttcttttctttcttcttcttttttttttaaacagaaatttctcctgggattgcttggagagcttctggaattcactgtttgggcttcacccctggaaattctgaatgaaaggaatggagctcggtatttgcattttaaataagcctatagrttattttaattcacccctatgtttgagagggttctagttaattcacttaactaccatatc

SEQ ID NO: 549030 - DNA, 525 bp, Homo sapiens
gggagaagttccagtataactagtggtgctttctttggggtcccatgatgttatttaaggtttacgatattgcactaaacatgttttaagcaaatattcacaacacttgagctcactgcaatagcaacaggaggtgactatgaattattacagcagtacagtaataaattgctgttggtaattttaagcagttwtgatttaatactgcatctttacatttgtttacattttttaaactgcaaatgatgccctgcacgggtctgtgcttttttgcttacattttgatacctgttaactttttctgatttttttctatattttacagtttgcattttcaaatcgtcacaaatctccaatttttcaacatatttattgaagaaatccacatataagtggatcacacagttaaacctgtgttgtttaagggtcaactgtttaacacctacaagtacattacattgattttaaattagttacgtattttagaaaatttaaatcgctattggggaagtaatttaaattata

SEQ ID NO: 549031 - DNA, 951 bp, Homo sapiens
aagggtggggtagcctggagattggaattgtggaaacagatgtcacagctgccaaagacagactagagggtcttaaaatgcattttaaaggacattttgcaaggtgatatgttatgtaagccccatttcaatccaatgtaaggtttcttaagtggggcatttttggcatttgggactggataattattctctctgggaaacttcctatgcattctaaggagtttagcaacagatattcatactacccagcagagactagcatccttcccctaattgcagcaaccagaaatgtccttagacattggtgaatrttccctgtggggcacaatcaccctcagttgagaatgatgaaacttatttcaaaagttttgataaaggtctatattcattatttgtgctatgtaagttcagtaagtatatgtgtataatgttttaatttacttttagtgttgttatttgtttgtttccctggaggtgtggattgatcccagtgcagaccaaggcaagagcaaatgtttccaagtgggtccaaccacattcagatgaatccttacaagttattgtctagattattcaccctaaaaaccaggttcagctacaatccagtttgaattattaagttatatttcagtcagaaatgcctataatggctgcaaagggcatgtcaatgaatattgaaccgacaggagctatgatgagaaagcccatcgaatttagaaaaagattgtggaaactccagagaattaaagtagtgttcaagattggccatttcgattgaagaggtagatggacacaatgctataacaggaaagtctattctaatgaaaaaacgcaacagcaactggtgtgaaactccagactggaaattgcagtttaacacaacctctctggagaggtaggttataaatcatgttatttcctgggggaaaaaaacagcaaagaaagatcaag

SEQ ID NO: 549032 - DNA, 577 bp, Homo sapiens
acttctaattgtttactattattatatagaaataaatctgatttttctgtattgactttgtatcctaaaactttgttacactcattcattatttttttccaacttccatccatgcttgaatccttgaattagcattctgttagatctattcattgatggccagttttttgttttggtgacagtgtctgaatttcttttcatagttattttaaatttcctgtctgatagtatgtgcctggttttgttaattattttatctcatggtttgttttctcttgtaacttttttttttwaatttgggatatgacatatagaatgggaaagactgagttaaatggaatttatgcctaaaaatgagcatgcctcttcaactggtaggtcattcacatggggaattgaatcaatctaagagtttgagctgggttgggttttattgttgctgtggttaccttagggtaccaccaactttaaattcctttagtattatcttgtgcttagggtagagactgagtggctggagataaaatgggagagttcgccaatcccctcgtaggatgtgtgatagggatgtggctca

SEQ ID NO: 549033 - DNA, 1533 bp, Homo sapiens
gggaggagcacgagcattactgcctgagcaccacctcctctcagatcagctgcggcattagattctcacaggagggcaaatcccattgtgaactgtgcatgcgagggatctaggttgcacgttccttgtgagaatctattgcctgatgatctgaggtaaaacagtttcatctctaagagatgccccctcccaactgtccatggaaaaatcgtcttccacgaaactggaccctagtgccaaaaaggttgtggacagctgcttttagaagttaggattgtatcctactagattggactcagcattgtcaaataaaactacctaatactttctgatagggggaaatcaaataagtttctattcagatggccataccatttgcagagaaggggagaaaacttactgccaccttgagcattattttgtagcatgtggatgactataaacaaaaataggaagatatttatagatatctcggtgtttgttttgttggaaaataccttcactttactgtggctttgaatttaaatggggcagaaatttttgtgtctcagtattaatatgaatgagtaagtgtgaagatccaggaaatggcagtagttggaatctagtctttctgctcatcttggagactaatttggtaactctttacttcctagcacaaattggacttggatctcaaaaagaaatgggaactggtagcattaaatggaaagtacttgggagctgttgtggaaacactactaaaagggaaggaaattcacccaccaatttgttctttccactaraaaaaaaaccccacagatgaagattccctgtgttgtgtcttgaactgtcctcaaaccacacgaagcacatgggcaaattttgtttgaaaaagtctatttctgaagtgtgatttgatagtatagatgaagacacactattcatatccttgtcatctctgaagagcacatgtggtctaatcagggagattggtatggttctctactctcccggattgcagtaagtcatcattggtcacatggttgccgattgcctgccaaaacaaacccatctttgaatacaccatctttggggcaaccactgggattttattatattttctgctgagacatggtacattctagtaataggaactgctttgagtgtagaaatttaaattactctattaatatgccattacgtcttatttggttgagcaagtcagtcactttacaataactgcatcaccatgtgttctttttatggatctaataaaatgcatttagactgaaattagatccctgaaatgagccattttgctcttagacttcacctcaaccagtcttgccaaatctgtgtcattagccagaaatgccagttgatggcttggcagaaaccctatactgccattcaaatgaaagtacattaatgtctcaaaggttgccatcttgatttagaatatggatgctgaagactgtgatagtgaaggaaagcacttttttctaaaaagaatattttccctgtatacattgggtttcaagaatatcaacg

SEQ ID NO: 549034 - DNA, 488 bp, Homo sapiens
cagtcaaggatactggccttgcttgcttttaataagttacttctagttgatcttaaaactcccactagcaagccaagcagtacataactcccactagcgtcctcattgataacatctctgactgtgggtcactatagcaacaggtgcttaaagttktttttcagcaactagggggcagctctttccgactcaagctggttgagaccacccacccttccactctgggtctgtacgggtgacgaagagtgaccttttgacgtcagagagacaaaactccacccttagatcatctgacaccaccattttatgaacatgcatcatgtgaagagccgtgtagctcaattacatttgtgcagaaaccccaattatctcacatttcctacccaccaatcacctttcccatatcttggatcaccttgctcctccatcccataaatattcctaaaaccccatcttcgggcaggctgacttgtgacttgttctcctgc

SEQ ID NO: 549035 - DNA, 522 bp, Homo sapiens
agaagccagattcttctgtgggcattagaaaagctcaactacttgctgctaccatcagctcatgatgcccagtaagccacaaacacttgsagtgaagcatcagaggatgaactagagggagctgaatatgaccaggaaactgtgcctgtggtcgtgggagaggctgcctgaagaccaagaatggtgactcactagtaagccttattcacaattctactcctgccaccacccactggactgaatctcatctgggcctccaggagcaagtaatcctgttatgtgcatcttacatcatcagtcatcttcagaggcagccaaggatatctctcctgcagtttaaacacccagtcaaagcttgggactagcagttttctaatgaggaccaatgagtaggtgatctgtgagaagatcagggagaacccacaagagccagcgtggtccaggttcaaagtagggacttcaggaaacagaagcagcagataaactaaacagaagcagagacttcacttgggcagctaagtg

SEQ ID NO: 549036 - DNA, 1299 bp, Homo sapiens
ccttttacaagaagggctcyttcttatagaaaaaggaaagaccaatagaaaaactggcaaagggcatgaaatacatttcataggagaagaaatacaaaagaagataaaattatacccatccttattcattgtaaaagaaagaacgatgcgtccatgttttctgttactactttttgggccaatagatttatttcttgacttgacaatctcatttttgtgtatctattttacagatatacctgcacttgtaaatatatatggttattcattgcagtattacctgcacttgtaaatatatatggttattcattgcaatattgcttgtaatagtgagaatgggaaataacctgaatgtttacagttatagaggactggttgaatgagttatagtacaatttttccaacacctctgtcaaatgcccattggcattttttccccaaaattttttaatttatcaaattatctatccttttcttccttttcttcttggaaacttctttcctgcagttcttggttctcctgccgcagtttggatggactgtgtggtccctggtccttttgtagtcttgagccttttctttacctctctcctgtgttgcagcccatgtttcttagctctcatgtcatcctttctcatggtcagtttccttgtttgcactcattacattctccagttgattccagaaaaagatatgttgtaagtatatttttttaatccttgactgtttgaaaatgttttcttctaccctctcagtgaattgattatttgtcttgatattagcatctctgctgaaaatcattcttttgaaatttggaaaatattgtgcccctttattcttctgataatcaaatttataaaatactgtttagccatttctttctccattttatttacttataaattctactggggttttttactattcctttgctattcatgtttgcactttgtttttgtgaagacaggaggaaagatcaaattaagatccattaattaggccttctatgttttactagaaacagaaactagaaattaaaacattactagaaaatgaaatgttaaagagacacacaaaatgtaaactgcaatttgttgcttttttattccaagtaacaaaattaagccaatcctgtattcatcatgtcatactgcatccatggaccacaatttcagtgcatcagtataggctgcctcccccaacccattttctgctgtatctctgaggttcttccggagatctttttcttgcttgcctttagaaattaggatttcctttagtgggtttgctggtggaaaa

SEQ ID NO: 549037 - DNA, 1299 bp, Homo sapiens
ccttttacaagaagggctccttcttatagaaaaaggaaagaccaatagaaaaactggcaaagggcatgaaatacatttcataggagaagaaatacaaaagaagataaaattatacccatccttattcattgtaaaagaaagaacgatgcgtccatgttttctgttactactttttgggccaatagatttatttcttgacttgacaatctcatttttgtgtatctattttacagatatacctgcacttgtaaatatatatggttattcattgcagtattacctgcacttgtaaatatatatggttattcattgcaatattgcttgtaatagtgagaatgggaaataacctgaatgtttacagttatagaggactggttgaatgagttatagtacaatttttccaacacctctgtcaaatgcccattggcattttttcccmaaaattttttaatttatcaaattatctatccttttcttccttttcttcttggaaacttctttcctgcagttcttggttctcctgccgcagtttggatggactgtgtggtccctggtccttttgtagtcttgagccttttctttacctctctcctgtgttgcagcccatgtttcttagctctcatgtcatcctttctcatggtcagtttccttgtttgcactcattacattctccagttgattccagaaaaagatatgttgtaagtatatttttttaatccttgactgtttgaaaatgttttcttctaccctctcagtgaattgattatttgtcttgatattagcatctctgctgaaaatcattcttttgaaatttggaaaatattgtgcccctttattcttctgataatcaaatttataaaatactgtttagccatttctttctccattttatttacttataaattctactggggttttttactattcctttgctattcatgtttgcactttgtttttgtgaagacaggaggaaagatcaaattaagatccattaattaggccttctatgttttactagaaacagaaactagaaattaaaacattactagaaaatgaaatgttaaagagacacacaaaatgtaaactgcaatttgttgcttttttattccaagtaacaaaattaagccaatcctgtattcatcatgtcatactgcatccatggaccacaatttcagtgcatcagtataggctgcctcccccaacccattttctgctgtatctctgaggttcttccggagatctttttcttgcttgcctttagaaattaggatttcctttagtgggtttgctggtggaaaa

SEQ ID NO: 549038 - DNA, 1299 bp, Homo sapiens
ccttttacaagaagggctccttcttatagaaaaaggaaagaccaatagaaaaactggcaaagggcatgaaatacatttcataggagaagaaatacaaaagaagataaaattatacccatccttattcattgtaaaagaaagaacgatgcgtccatgttttctgttactactttttgggccaatagatttatttcttgacttgacaatctcatttttgtgtatctattttacagatatacctgcacttgtaaatatatatggttattcattgcagtattacctgcacttgtaaatatatatggttattcattgcaatattgcttgtaatagtgagaatgggaaataacctgaatgtttacagttatagaggactggttgaatgagttatagtacaatttttccaacacctctgtcaaatgcccattggcattttttccccaaaattttttaatttatcaaawtatctatccttttcttccttttcttcttggaaacttctttcctgcagttcttggttctcctgccgcagtttggatggactgtgtggtccctggtccttttgtagtcttgagccttttctttacctctctcctgtgttgcagcccatgtttcttagctctcatgtcatcctttctcatggtcagtttccttgtttgcactcattacattctccagttgattccagaaaaagatatgttgtaagtatatttttttaatccttgactgtttgaaaatgttttcttctaccctctcagtgaattgattatttgtcttgatattagcatctctgctgaaaatcattcttttgaaatttggaaaatattgtgcccctttattcttctgataatcaaatttataaaatactgtttagccatttctttctccattttatttacttataaattctactggggttttttactattcctttgctattcatgtttgcactttgtttttgtgaagacaggaggaaagatcaaattaagatccattaattaggccttctatgttttactagaaacagaaactagaaattaaaacattactagaaaatgaaatgttaaagagacacacaaaatgtaaactgcaatttgttgcttttttattccaagtaacaaaattaagccaatcctgtattcatcatgtcatactgcatccatggaccacaatttcagtgcatcagtataggctgcctcccccaacccattttctgctgtatctctgaggttcttccggagatctttttcttgcttgcctttagaaattaggatttcctttagtgggtttgctggtggaaaa

SEQ ID NO: 549039 - DNA, 631 bp, Homo sapiens
cagagtgcacttaggtagatccctgatcttccgcatcctttgcactgcctttttgctgggcaaaagtctgagtcatcagtctcgctgatcttcaaacccagattttgtcatctggcctggctcaacctccaatataagatacatgttttacacagaaaatacgttgacaccaggaaaaaatacagtagcactagaaatacagagaaacaggtgaggtcttctcattatgaggggaataaaagtagaagatataaataaaggtggctgaaatgtggttgggagcagaagtgggtttgctcagaggatgttgagaagcagcaagagcttttctgtatgsggtctgattcttagagttttcaagcctcttctgtctattccatggtaattcatggactgccacactggggctcaattcctccctggtgtctgaagtctgcctttaccttaagcactaatgggcatttaagaaactctagtctacatgccttgcacacacagcttgaacaggatgctacccttgttgcttgtgtcagcctaaacttaacttcagcatgatacactggacttccacttggtgcccttttgcctccattttggtgttctcagatcagatatatcctggctccctcca

SEQ ID NO: 549040 - DNA, 1399 bp, Homo sapiens
gctcccattgacctctgcttcacttggtacagacctcttagtccgggcttcattcacagacagttgctgagtgctcttccgtgctgtgcctggggctctagccacacagatagatgacggtgataagatttactggtgcctactatgtgccagagaccattctaagcactgtcatgaattccacatttgatcttcacactttgagggaaggtattttattatccctcttttacagatgaggaaacaaaggcacaaagaagttcactaacttgcccaaggtcacataggtagttaagtggcagaaccaggactcaaacccagacattctctctagggaactgctcttcatcactgccctccaaggatctctgagttcagatggcaattagacatgcaaactaattatgttaatatgtgataaatactgtaaaagattgtgtgcataaggctaaaggatacttagagcaacagacatgctgggggttggtgaaggctccttagtgatatgtgagcaggatttttaagggttgcagtgaaccgctggctttcccccagccccccaggccccagctaaaaacctggaggctgcttcctgtcctccatcactcttcgaatcagccagtcactaagatctgttaatttgacaatgcagctcaactccatctcctctccattcccactgcctctgcggctgtcaggacacccattttcttgccattctgccctccaaatccattctccatgctgctgtcaaaatgatcttccaaaattcagaactcaatctctttcccctgctaagaatcattctctctggctgggggcttgagagggcacaataacacaatctttttycccacctgagttaaaaaataagtaagagataagcaagatagaggaaagttatggggatcagagtagcatcttcattagtgagaattcacctttttcaggaaatgccggcttccttagtcaccattcaaggtgtgacttctccccagggaaggagtgaggggtggagggaagcagtgaagcttcctccacacaagaagaaacttcaagaaggaagaaggctccccaccacgaaacctcccagatgaattatgaaatctgcttgtgtgttcaggaccttcatagtgggagcattccatcacatctgcccacgtgtactctattctcaggctgcacttgtctgctggtagttacctaaacaagtcatccttccagacttcttttgcccttcccacgctgttttctctgcctgatctgaaagactttccctgccttatctacatgatgaaactgataccccaaaaccaacttaaacatatgacccccatgaaatatgctctgacctccaaggcaagtagatagctccctccttgggaccagtagtgctttg

SEQ ID NO: 549041 - DNA, 626 bp, Homo sapiens
cggtctcgaatggaataaaaatgtatggaatggaatgcaatgaaacggaatcgaatgtcatagaatgtaatggaatgcaaaaaaatggaatccaaaatcattgactggaaaggctgggtgtcgaaaggaattgactccaatggaatggaatcgaatggaatggaagtgaatagaatcgaactaaatcgaatggaatggaattgataggaacggaatggaaaggaatgcaatgatttggcatggaatggaatcgaatggcatcgaatggaatggaatggaatgcaatggaatggaatgtattagaatgtaatgaactttaatggaatgtactcgaatggattcgactggaatggaatgttctggaagtgaatggactccaatggaatggattcaaaaggaatggaatcgtacggaatggaatctaatggaatggaattaaatggaaatgaatcaaattgaatagcacggaattgaattgaatggaatggaatgcaatggaatctaatgaaacggaaaggaaaggaatggaatggaatggaatgggctggaatggaaaggaatcgaaacgaatggaatggaatcgaagtgamgagactggaatggaatgcactggaatggaagggagt

SEQ ID NO: 549042 - DNA, 1341 bp, Homo sapiens
gcattcagtgctacaaacttcctcttagcactgttctagatttatcccacaaatttgaaaaattgcacttttgtttttattctatgtattacatttttaaaaaattttccttgagaccccctctttgacttgtgaatgattaacaagtgtgctgtttagtttccaagtatttagagatttagctgttatctctctattactgatgtgctttgaatctatggtagtcagaaagtatactttgtgaaaagaagatttagtttatttgttatatttattatttatgattgaagcatattatacatcgagaaaagtttacatataatatttgtacagtttgattaattctcataaactgaaaacatttataggaacccaagtgagaagcagccctccttaatctgttcacttaaccccttccatttacgactcccaaagttcaaccgctttcctaacttttaaatgtcaaatatttttgtaaatactctttatcagcctaaagcagtactacagttttactagcattgtagagtttctgtttttattattgtgtaaaatacaacatagattagtccccttctggatgggatatgtttaagaccctcagtggatacctgaaaccacagacagtagtgaaccctataaatatcatgcttttttcctatacatccaaacctgtgaaaaagtttaatttgtaaattaagtatagaaagagagcaacaataatgataaaatagaataattataatacaattatgacaatatgctttcataaaagtaatgtgacctctgtcactttctctctaagtatcttaatatttttggaccatggttgaccacaggtaacaaattatagacagaaaactgcagataaggggggactactgtaatatttatcttttttaaccaatacctatgatggyaatcattatacatgtgttttatattccacgaaactctctattttggtatatgtttcatgagcactcaaaaattgtgaattctgttgctattggatgaagtgttctacacatttttatgaaatcttcttgctgatgttgagttctatatccttgctgattttctgtctagctgttctatgaattgttgagagaggggttttgatgtctccaattctaactgtggatttatctgtttctcctttcagttctatttgtttttatttatgtttcagctctgctgattggtgtatacacagtattgctataacttcattgagtaacccatttatcttctacaattccccctctctcattgaaaatattctctctgaagtctatataatattaatatagctattgctgctttcctttggttacaatt

SEQ ID NO: 549043 - DNA, 1646 bp, Homo sapiens
cctcaattttagaaatggagaaatttaaatatacaaagttaactaacttgtaccaggtcacaccaatagaaagtgcaggttttaaatccaggctatctgattcctgagtctgtcctctttacctctatgctatattgctttgttattaggtaaatatgaagcattcatttagagataattgtggcttctatgacataataaaaaaactgaataggttactataaaaaataatgggttttgaaattaaaaacccttttgtcaaaataccagttttatttagtagcagtgtgaccttgaacagttcattccatcagaaaacaataccgaacatttaagaattaaaaagctgaaaaataaaagggggtgggaaggtaatcccaaaggatatgaaagtcatamagaaaacaaaagaaaactcaaaatttgtattatacaatttaaaagagctctaaaaaaacacatacataaaacaagaacagattactgtaagaagtttctgagaattaaatacataattatcaaagtttcaaaagtaataataattaatagaatgcataatacatgtagctgaagtctgagtttgtgaactggaagatggacagagaagaattcttgaggcaagtgtaaaatttcaagcctgatactgaacacagtggaagtagcgtctttagagagaaaaagagaagcaaatatccttgaacaaatactgatgtctaaaaacaaaaacaacaacaacaacaaaaaaacgggccactctacatttagcgaaaaaactggggaagagtatttcttactaaacgatcttaatgaaatttaagaatactaagaatcaagaggaaaattctccaaacctccagaaagaaaacagggataacctacaaatcagtaggatcagatttccatacacttgcacatatgaatctatagaataatgatcacaaaaatctgaaggaaaggattttaaaatcttatttttagaatcaacagacctatttttaaatactgttacacatttttaaaatatgcaaattcagaaattatgttattcacataaacctagaaaccatttctgaacaaaataatggcagcagtatatgccaacaaatacaaaggtattaccaaacaccagagccacagaatacaagaaaaatgaattaatatctactaataaaatgtataattaatataagataattgtcgctattatgattgtatatgttttctttcaaatggagatttctgaaatagaagaaacacaatggaaaacatttattagcaatgtgaaaataaagttgcagaagatttaagggaagggatgggcaatagtcaagttgaagaagaaggtcttgtcttacttgaagaaaagccgtacctactgattattatatagccttgattttttctatgtctaagaaaagcagaatggtagaataaaagtaaaacaataataaaatagaaatagaaaactttgactctagtaacagatataaaaccaaacatatcagttgccaattacaatgttagatagacattagacaaaacatatcaatgactataataaatgaatgtttaaaatttctcccccttacacatctaagacattcagaaggaattttctttagtgccccatataattctaacttgca

SEQ ID NO: 549044 - DNA, 1185 bp, Homo sapiens
tgcctaatcaaaaagatatcttggcgttgggcaaagcttctgggggaaaatagtgtcatagataataatgccttattcagttggtggtgtaaagatatagtttctttattttacctgtttgtcttgtaagacaaaattaacatgccggcacacatataggaggcatgggttatacaactaactaccaataatgatgagttaaaatagcccattttatggtgatgatagctgartaataatcaaaatatgttgtcgtgtgaggactgtgaacatgttgaactctgataaaatgtgcaattttatttacaaatagttcaccaaagctgtagaaacagatgctgataggtttggttggatggttttgtttttattcattttttaaaacaagatttttcagattcaaaactcaaacggggctcagctgcccccttataattaaattttaatgacttaggctgagtgtttgtgttttggcagcatgcttaatagtgttagcatttaaatggttacaactcgactttgaggggtagacccattgcaagtggtcagtgaagttcttggaaagatagcctggtttactgggatgcttctgggatttagtgggacagctacccacaggccatccagttataataacttgaaaaattaaaataaaatactacatactctaaattccacagtagcctgagggccaatgcttttcagtttcaactctttttcactagaagtactattctgtgtgttttcctatgccaaagggtgcactggtaaataaaagcaatatgtggtactgctcataaaatcactcatactcacaaaatggcaagaataattcagggtacacattttaatcagttcactttttttttttttttaaaaagaatcattattaactttgcagtggtgtatttcactggttccttttataattaaaaactttttcccctcaaattccctttccagcaagcagcctgttgcctgaagttttactccttcattaccagttaaaacaaaatcaccaattaggcacatgaacacgtctgtattaatctcattaaggtgatagcaccaaataaattggaactatttttgtgcttttactgtgttcctatggctttatcaggccctgtggtcatatacaaagacctcgcagcttagtcatttagagtcattcggttgtggact

SEQ ID NO: 549045 - DNA, 546 bp, Homo sapiens
gcccagagatgagagtcatgtttcagaatccagaatcataatagagaaaactaggattgtagcaggtatgtctagtcggagttggagccatggagaaggcacagcagctttccaaaactgcccggggaaaacatcagatactttacctggaaaaaacagtttggtccaacacatccataaaccagatgtaataagaagaaaataatactgaccaatgaggttcagggccagcgcaatgtatgtgtttgcatatatgtatttatgttatcaaatataaatatataggtacttatatatattacatatatatatgcacatacaactatatcatgcaaccaaatggaaccatcatgcacacatttttataatctgatytaatacttaatgtgaacatggatattccctcatgacattaaatataaatataagtctgtagtagcaaaaaatgtggctgaatgatgtccacatcctagtgatttgtggaaggcaggacttaagaaagtaactaaactatgtgggggggggaaatctctaaacaaaatattc

SEQ ID NO: 549046 - DNA, 2660 bp, Homo sapiens
tgcatatcatgtttagacttaggtcccatccccaagaaatctcattatatatatgcaaatattccaaaaattttacaaaaagatctgaattctgaaacacatctggtcctaagcattgcagataagaaatactcaacctatatatatttgggtgaaaaagtttgatgggtttacccatttatgtttgttgtgccccatttcaactactgtttgtcctagaaaatgagatgaacaataaaatttcagatttaggttttataactttttaaatatacacttaaatgcacgcgcgcgcacacacacacacacacacagagtagctaataaatggctcctacttcaccatgttcgaattcctttataaaaaatcttcaggccgggcgcggtggctcacgcctgtaatcccagcactttgggaggccgaggcgggcggatcacgaggtcaggagatcgagaccatcctggctaacacggtgaaaccccgtctctactaaaaatacaaaaaattagccgggcgaggtggcgggcgcctgtagtcccagctactcgggaggctgaggcaggagaatggcgtgaaccccagggggcggagcctgcagtgagccgagattgcgccactgcactccagcctgggcgacagcgagactccgtttcaaaaaaaaaaaaaaaaaaaaaaaaaaaaaaaaaaaaaatcttcagaagtatagtatgggcctttcatgaagggtatacctaaaaggtacaatctaggaaggatgttagacgctgtcctgattaatacttaggaaacctgaactaacttttctgtagaataaaaagataaaaagaggctggccttcatctgraagagggttataaataaaatccatatcatcattttacttatgacaaaaatcacaatttttttctcctttaaaatggcataccttattttgtcatttttaaaaataaataaatacagacctgggtagttaaaattgccaagggaatggaagtgggtagcgatgtgcatgcagtgtgatggcagaccagagctgtaggagctcttcacactgcttcagtgaggttgctaagggatatgagccctaaaccaataaaggttatggatcagataaaagggatcttacctacataattcccatataataaaacagaagacaccctctgaggcttgaagtagctttaaaaaagtgctgtcttacaaaggtaatagtaaacatttcagctttctaccctagaatacacagatggagaacagtttaggtaaaactatgaatgacagattcataaagtgtatttaggagggagttacaggtatttagaatacatccctcacactttgaagcaattataattgaaaacagtaattatattcttctaagtgtacctctttatctctttttaaaactataatacaaaataatcactgagataataattcatagttttatcctctgtggaagttcttatagcattccttgcttgtttagttatacaccaactcatttttgaataccttctatgcataagctgctatgctaaacctgaactagacaaatatctgttctctagaactatatattttagtgaaggtaagaaacagaaagacaagttacaaagtgacaagtatcagaacaaaagggatgtcaaatatggtatagaaatatagaaaaaaatttttgctttattcatgagtttagaagtagactagatgtccaccaagtaaatgtataatcaaactgtcactaatgagtctgaaacatggaaagaagaatttaggagtgtctttgagtaatagcaagagaattggaggagtgttgggccaagactttgtcagtattattactcaacatgagaacaagaataaaataactcagagttactttaacaggattccatggagaacctattttaaggctgtaatttaattcaggtgtaaattactagactatattttaattacaggagtaaatgtcatccatattcatgactaatgagtaggagtaaatgaatgatatagtacaacattagcattccataagtccaggctgtgacagtatctccctatttaaaaatcaactataaaccaagggaactatgaaaaacacagcactctaaagagatttcacagaattttttcttcagcatttttgctaatcttttttttttagtatggtgttttctgcaatgtctattgttcaaacttccttccaagtagatgtaaccttctaataagcctttaaatctcaaaatagagtgtgcttgatacatttgaaaacagaaaatttaaaaattctttttttaaaatattttgataacttctttgatacaagacacccgaatttgtaagaccaaatccacgactctgaagaggaatgaagagactgaggaaattagagaagtcttaaattttattcaggatgttttactattaaaaaatggctttgtaaacaatgtttaccatatgttgttaaatattaatagaagcatgagaagttatatatacattggtacagggctgatttttcaacaagcacaccagtaagtgctagtggcttttaatatatagtgaaatttctgtacaggtgagcaaataaccactgtcctgaggttctcaaatgccatatcccttaaggaccactggagcctagaccaggacc

SEQ ID NO: 549047 - DNA, 530 bp, Homo sapiens
aaggtagttgtagctaatttataatctcaaacattattgtctgaaaacattcatttatttaattatgatccctaaaatcctatataatatttttgcataaataagaaaaaagatttttaagttagtatgttgtatgtttcctctatagtcacattataccaaattggacttgttatacaaatggatcttcgatttcatttttataataaattgtttatatttagtaaayaaataactacagttgacccatgaataatgtgggggtgagggactctgatccctgtgcagttgaaaatctgagtataacttttgattccttcaccttagctactaatagcccacaattgactggaagccttcctgataacataaacagttgatgaacacctattttgtttgtgctgcattattatatactgtgttcgtacaataaaataagctagagaaatgaagctgttagaaaggaaatcatcaggaaaaacatattgacttttcataaagcataagtagtcctgacaaaggtcttcatg

SEQ ID NO: 549048 - DNA, 628 bp, Homo sapiens
gtactaatttacattgccaccaagagtgtataagtattctcttttctttgtgtctttgccagtatctggttgtttttgttttttgggttttggagggggtactttttgtctttttgataatagccattttagctggggtaagatgagatctcattgtagttctgatttgcatttccccaatgattagtgatgttgagcatttttttaatatacctgttggccatttgtatgtctactataccagtattaagtgtggtttgtttttgtttttgttttgtttttttttgtttcttttgagatggagtcttgctctgttgcccaggctggagtgcaatggcatgatctcggctcactgcagcctccacctcccaggttcaagcgactatcctgcctcagcctcccaagtagctggggttataggcrtgtgccacaactcctggctaattttttgtatttttagtagagatggggtttcgcctgttggccaggctggtctcaaatgcccgacctcaggtgatccacccacctcggcctcccaaagtgctgggattataggcatgagccaccatgtccagccagtattaagtgttatgagataaaccaacacacttctgaaatgggacagtcc

SEQ ID NO: 549049 - DNA, 567 bp, Homo sapiens
tcagggagtttctttggagagagaagagaatgaggctgggctcagaggaagttcctcccactccgtggagctcaaactagtccagtggtggcagctgccctggctggaataaagcatcgacccacagtggcctcacatctctgaggcctttgcaggttaagagtctcctgccatgataccccaccacagtggaacccgttgttgggccagcgtgttctcagggactgggacacgggccaaatactacagccaccaaggccatagcctgtgctctctctgagccgagggaagaacaccctctccggccctgtagttccatttttgtttctttgtttcrtttcctctgctgtcttctccagagctctgcgctgcagctgagagactgggtatctcctagagattcctgacccccacgcaccagccccaccaccagagggcgcccgagcacagagacgccgcaaccggagcaggagccctaaacctgtcagggtgggtcagccctggagtaatcctggagggagggtctgggagagggccccagtgtggggacctgcccggctcaaccaa

SEQ ID NO: 549050 - DNA, 354 bp, Homo sapiens
tctcgctttgtcccaggctggagtgcagtggcatgatctcagctctctgcaacctctgcctcccgggttcaagcgattctcctgcctcagccttctgagtagctgggattacaagtgcgcgccaccatgcctggctaatttttgtwtttttggtagagacggggtttcacagtgttggccaggctggtcttgaactcatgaccttgttatctgccgacgttggcctcccaaaatgctgggattacaggtgtgagccaccgggcctggtctagttttttatttcttaaaaatagcctaccctttaagcaaatagaattttttattttaaaaatttttagcttcccaagcttatga

SEQ ID NO: 549051 - DNA, 1132 bp, Homo sapiens
gatctcaaactcctggcttaagtgatcctgctgccttggcctcccaaagtgctaggattataggtgtgagccaccgcaccctgcctgaattttctaaagtacatatacattgttttctataatctcctaaaacagcctacattttagaaattatgtcatacttttaagaatatatactttgggagccgtggtggctcaggcctgttgtcctggtgcttaaagaggagaggctaggcattcgaggccagcctgggcaacatagaaagctctgatctgtatttaaaaaaaaaaaaaagaatatatacttttactgggcaagtttattcactgtggccatatcctaattaatgaccatctttttgtcttacttctcatttaatccagtgacatttattagatagctcctttattctgggcactttgctaggtggtgaaaaacataacagtgaataaaatatggtaattgacttttgtaaatttataagctagtgggcagaaaatacaaatacataaacataacaggtttaaggtataaagggaagactatagaaaaataagagaaggtgaggttaggtgctatggaagggggcggggtctcagcagatactttagagatgactagacataaacaaagagacccagggaagatggaagtatgtgcaggtagagatgtaggtacaaatgtaggggaaaagatcaagggcatatctggagaaaaatgaaaattttcagggagttagggtagagtttgggaacaggaaatcataagaggttggaatgaagggggarcaaagagttgaagctaacgagctggaagactaggctggtaaatttggatatcggctttgtctatgctaacttcttgatactaaaccaccaaggtgaaaatttaagaagaaaaggcaggcgatcatctgaatatttgacagcaaggtagttggctaaatgcttacctttcattcgaatgttttagtgtattgaatacacacccatagaacaggtagattcctccactgaaaatgtctcctggatcaggattttaaagaggcaactccattgatctgttcacttgtctcagtcgtaatcccaggataaattttaaggcagtactgtaatttactgtaattcttgg

SEQ ID NO: 549052 - DNA, 605 bp, Homo sapiens
ttaatacttaagggacagagggatctcagatttgagagatctgcattctgtggggatacttgatgtgtgtccctgtgctaattttaaatctcatcatagaaatgaaatacatagataagaaaagttgtgttaaatgagcactgtacatggattatccatttgcaaagactgataatgcaataaagtactcttaacattgaaaatgtgagtaataaaatgtaatctttctttgattctgaatgctctttaagattgtgcagtgccttggacttaccacagggaatattactttttatggatcataggaccatagaactttggaattgaaaggaacattttggatcatccagttaagggttgacaactaggttttgcccagttatgaacaacaattgattgttatggttctggtgtgctatgctgagaattctgaggttatgtttggattcrgtggaaaagtataatgagattgattagcaatgtctgagtagggtgggaggaagaacagtggctggtttggcacttatttggtgtccttaatgagtccaacttcttcatttaacaatgagtagcctagtaaaaggatttgccagacagagtcaacc

SEQ ID NO: 549053 - DNA, 517 bp, Homo sapiens
agtagagatggtgtttcaccatgttggccacattggtctcaaactcctggcctcaggtgatcctcagcctcccaaagtgctgggattacaggtgtcagccactgtacctggccttactcttttttttatacaatatcaatttaaacaaaaggtgaaatgtctgctgtgaatttttttcttttatatacattaagtaaatgtatacaagcataatctttttcagtatttgagaattttaccacccttctaaatttgttctatcttttcttatctaaattcaataatccacaactgtcacacttggtaattgatgtttattaaatttcatatctcatarttcaatatattgcattaaggtggcttaatactgtaaaactcatgaaactcttaatgtagttagagtaatggtaagtactcaatctcaaaggctatttaaaaagctgtgcttgaagttgtgtatccaaaggtgcacacgaaatataaaatatttgaattaaaatttctacagaatatgcat

SEQ ID NO: 549054 - DNA, 611 bp, Homo sapiens
ttcagtttgcagggtgatattttcctagtgatcaataaaaattagattcacaatttaatatattttgtaagtggtacctggaaaagcaaaacttaaaaaaaaatagtattctcaatctttgctgcttctacttcatttccataggcattaagaaattcattttagccagctgcagtggctcgtgcctataatcccagcactttggcaggctgaggtgggaggattacttgaactcaggagtttgaggctatcctgggcaacataataagaccctatctcaaaaataaataaataaaataaattagctrggcatgttggcatatgcctgtagtcacagatacttgggaggctgaggtgggaggattgcttgagccagaaggtcgaggctatggtgagttgtgatcatgccacagcactccagcctgggcaacagagcaagaccctgtctcaagaaaaagaaaagaaattcatttcagtgtctcttcagttgattttttgcttagcacactggtctctagtggggtcggagaaggcagtgaactcttcgttttttgcctgattaaagttgtgtattccagtatgaatggctaattctgaaattagacttttca

SEQ ID NO: 549055 - DNA, 554 bp, Homo sapiens
aagaacagcacataaatagacacctttgacttgaagagaggagagaaaagcaagcataayactttgcctcacaacacaggcctggggcccacctcagtaaagctgagtactgagcagaaccccgtggccaaagatgaagcctctaggcccagccctgggccataatgaaaccagtggccctggcaagaagaattcaagatccagcccacattaccaccaggtaactacagcagcctccagccctgaataaccctcagtggtaggcaagccatagcagcagtaggccttgggcatgtcccagtgctgcacaggtctaggtggtcattggctttaggtgcaatccagcactgtgttacccttggaggccaaaggattccgactgtggtggtcctgggattacatttccctttagagctgtcacagctgaagtggtaatgggcttacagttctcaccagtcaatttccccaatgaaaggcgaggaaattatttaccaccacaattatcttacatgaaatgctaaagggaattcttcaagatgaaataaaaggacagt

SEQ ID NO: 549056 - DNA, 557 bp, Homo sapiens
tgggccacctggcaatgccctcagccctgccctcagtgcctctcctgccaaccaatgtttaagttcctgctcaagtggcctgatggcccagagagctctgcgggcgggactgggctggcatctggtgactgccacccggacaacacacagtgcttggtgaaccctggatgaggcgtggggaagggaaggcgccagcagggaccggagcaccagtgcccgcttgccagccctctccctggctcagggtgtcctgggtgcttactcggagaagcggtcrtagaaaggagagcgcagcaggtagtagagcagcaggatggtccggcgccgcagctcccgccgctccctccgggtcaggccctttctgtcactcaggaggctcaggctgggaggcagggaggacatggtcagggccaggggcatgatctaggcccacggaaggggaggagccatgggctgggtgtccagaggggcagcaacaggaggagcaggggccgctgccaccccgcctatgtgaggccaggattatagcagaaagcccagtggagagtgaagcccca

SEQ ID NO: 549057 - DNA, 1514 bp, Homo sapiens
cagcgcaggaggtggagtgtttctgggtctcaggcaacacatttgtgttacgttacattctcacaacaaccatgagagggactgctattgtcccatttcacagataagaagaccaaaccttagtgctctgaagtcactaatgcaaggccccactgcccagtcacttgtggagccagtgaattcacaccacctgactccaaacctgtacactttaagagcccactgacatcctctcctttctctgccttcctccacgaccctccttttccgcctgccttcttggtctctgctgcggggggccaacctggaccttggggtccagtgtcctgccattagtcatctgatacccgggcactaagcccaaccggagggacaaagcccacaccggccacggggtggaggagagtcgatgtcggatttagggcggggctgaaccaagcccagggccgcgggggccgtggcttcagcaccgcggagagcgccatctccgggggcggggctggcggggtgggggcggggcctgggcggggcgcgcgagaccccggccgggtcccgggggcgcgcgcggggcgctctcgccagtcccgcgggccgtgcgcggtgctgtgccgcgccctgccagacacaggtgcgcccgcctagcccgaactccgcggcggcggctgccctctcgccgcgcctccgcctccttcgcagccgccgcctcctccgcgccgcgctccgcccggatggccagggctgtgcccgagaatggcggagcgagaaagcggcggcctgggagggggggccgcgtccccgcccgccgcctccccgttcctggggctgcacatcgcttcgcctcccaatttcaggtgagagtccccggccgccgcgcgcctcgcccttcagcggggactgatccgcattggctgccctgcccgccccccaccccagaacctcgggaacccgggaacgaaagggctgcgtgggagtggggtctcttcccgggacagagcccccctcagaagccccgccagcctcaagtccggactggtagccgttgcatgttcacgaggctgttccctccgccattcctggtcctaggctgggaggtctgcgctggaattggaggagggggctcsgaggcctccttctccccaacctccgggctgcggcagggtctggggtcggggttgcgatcccggagcgggcaggcaggctgcatcttagcctgtgaatagagctgggaacagcctggaggggcgcgggtcgcagtttcctggggcaacgacattgttggtgctgggaggaggatgtttgagcccctccccgagccctgcctggccagatgggcctacctgccaggcctggcgtggccgggcccctctctggattgggcagcaccgacctaggcaggtgtgtctctcagggcaggcgctgaaggctcagcctcaaccaggggaatcctaggcccggctgcgggaagggaagtcggctcggctctggagtagccagggccagcgagggtgtcgagg

SEQ ID NO: 549058 - DNA, 1025 bp, Homo sapiens
cgcccggctaattttgtatttttagtaaagccggggtttctgcatgttggtcaggctggtctcaatctcctgaccttgtgatccgcctgcctcggcctcccgaagtgctgggattacaggcgtgagccaccgtgccyggccagaaattctttatgcagttgaggagatggagggctaaccagggtgcacgttcagtgagagcctgggctgcgatggggaggtgggacaggagaggcatcttgtgaggggccagcaggggtggattctagggtgtctaggaggccatgcttggggcaggagtttgcaggcagaagctgtaggcctgttggagggttttaggaggagaaagacaggatcagatttgtgatttgaaaagtgtccccgatgcagagtgggatatgggtcagcagaaggagggtgtggaggcagactgggacactggttaggaaacagtagttcagaactccagaaacaaaagggaagttgtttgtgaaaagaagttcgtgcctctcagcattgttaacaaccatacatggtgattctaacttgaatttgtgtaggatcagtcatgagacttagattgtttcctgaactctgctctagggaaatgtaaagtggttcttcctcttgactatcaattagcatgttttgacatagactttcttccagtgggatttaaaatctgtgttctttagttgaatcaataggcttgaacattaccatcctggactgtctgggggagaggatgtttttgaagagtctcaggagcaaatgggccatgaaaggccaaattgactgttaattctaattaaaaagaggaagctgctacagcataatgagtgtggacagttaattagcaggtaagaaaacacaattaaagtctctcagaacaaacctacagtgatgtgttctgtttggtggtgagttaagcacactcagatgacctgtttctaagcttggtgaggagtttctgtttcaatagagacggaggtcagcagtcttgctggtaggttctcatgggcgca

SEQ ID NO: 549059 - DNA, 1029 bp, Homo sapiens
tgagctttgcttcacaggctctggttcttggctgaaaggtaccagccgcytacagcaccctgtatccattcacagaccctaaaagaatctctagtcaaattaacaggtctcctttcctaattcctgaccaggagttggggattaggcccttgtcttactattttacatattctctcacctccaagccatggaggtttatatttcttcttttcaggttcgctaaaagtaactcttccagctgctagttctggctaagtaagcacactccaccctatttctcccactgatcataactagcaaccctgggcagaatcgtaatgaaaacatgtaaggactctgaaaaataaattatatcaggcaaattgaagagagaaaccaaaacccaaagtatagttaatatggcagtgagtatctcctggcttatactccaggacagggcagttttagaaactgtgcaatggacatggactgaaaaagctgcaggagacatctcctgcctcgatcccttcccagagtgacaggaaaggggtggcccttgggggaaaaaaatgtgatcaaactgatgaaaatcaaatataaaggaaaaaatcttgaaagtcaccttagaaaatcaaagcattacacagagtggaaaatgatttgcatgactttagatttctcatcagaaaccaaataagccagaagagactggaacaatatctcagtatttttttaaacactgaaagaactgtcaatccagtttgaattttttgaaggcccatctatatgctatgtgcaagaagcccactgtaaacataatgatatagataggttaaaagtaaaagagtgagaaaatatatagtacgcaaatgcaaatcaaaagaaagctggcatattaatagtagaaaaagtagattttgaaacaagaggaattacccatgataaagaggagattatgtagttataaatgggtcaattgagctagaaagctctcaaataattaatataaaatttcaccttaagaaactagaaaaataaaagcaaactatt

SEQ ID NO: 549060 - DNA, 1029 bp, Homo sapiens
tgagctttgcttcacaggctctggttcttggctgaaaggtaccagccgcttacagcaccctgtatccattcacagaccctaaaagaatctctagtcaaattaacaggtctcctttcctaattcctgaccaggagttggggattaggcccttgtcttactattttacatattctctcacctccaagccatggaggtttatatttcttcttttcaggttcgctaaaagtaactcttccagctgctagttctggctaagtaagcacactccaccctatttctcccactgatcataactagcaaccctgggcagaatcgtaatgaaaacatgtaaggactctgaaaaataaattatatcaggyaaattgaagagagaaaccaaaacccaaagtatagttaatatggcagtgagtatctcctggcttatactccaggacagggcagttttagaaactgtgcaatggacatggactgaaaaagctgcaggagacatctcctgcctcgatcccttcccagagtgacaggaaaggggtggcccttgggggaaaaaaatgtgatcaaactgatgaaaatcaaatataaaggaaaaaatcttgaaagtcaccttagaaaatcaaagcattacacagagtggaaaatgatttgcatgactttagatttctcatcagaaaccaaataagccagaagagactggaacaatatctcagtatttttttaaacactgaaagaactgtcaatccagtttgaattttttgaaggcccatctatatgctatgtgcaagaagcccactgtaaacataatgatatagataggttaaaagtaaaagagtgagaaaatatatagtacgcaaatgcaaatcaaaagaaagctggcatattaatagtagaaaaagtagattttgaaacaagaggaattacccatgataaagaggagattatgtagttataaatgggtcaattgagctagaaagctctcaaataattaatataaaatttcaccttaagaaactagaaaaataaaagcaaactatt

SEQ ID NO: 549061 - DNA, 1029 bp, Homo sapiens
tgagctttgcttcacaggctctggttcttggctgaaaggtaccagccgcttacagcaccctgtatccattcacagaccctaaaagaatctctagtcaaattaacaggtctcctttcctaattcctgaccaggagttggggattaggcccttgtcttactattttacatattctctcacctccaagccatggaggtttatatttcttcttttcaggttcgctaaaagtaactcttccagctgctagttctggctaagtaagcacactccaccctatttctcccactgatcataactagcaaccctgggcagaatcgtaatgaaaacatgtaaggactctgaaaaataaattatatcaggcaaattgaagagagaaaccaaaacccaaagtatagttaatatggcagtgagtatctcctggcttatactccaggacagggcagttttagaaactgtgcaatggacatggactgaaaaagctgcaggagacatctcctgcctcgatcccttcccagagtgacaggaaaggggtggcccttgggggaaaaaaatgtgatcaaactgatgaaaatcaaatataaaggaaaaaatcttgaaagtcaccttagaaaatcaaagcattacacagagtggaaaatgatttgcatgactttagatttctcatcagaaaccaaataagccagaagagactggaacaatatctcagtatttttttaaacactgaaagaactgtcaatccagtttgaattttttgaaggcccatctatatgctatgtgcaagaagcccactgtaaacataatgatatagataggttaaaagtaaaagagtgagaaaatatatagtacgcaaatgcaaatcaaaagaaagctggcatattaatagtagaaaaagtagattttgaaacaagaggaattacccatgataaagaggagattatgtagttataaatgggtcaattgagctagaaagctctcaartaattaatataaaatttcaccttaagaaactagaaaaataaaagcaaactatt

SEQ ID NO: 549062 - DNA, 707 bp, Homo sapiens
cgactcaactactaatttaaaaaaatacatttttcttttcatcgtctgtcaaaatcaaacatccaattcctttatttctcaagtgaagcgtagaatgtttaatctccttgtaaaccaggattgttcacttttgccttacatctgaaactgagagttttaaatggcagcacaatcacactttaactttccttgccaaaagccatcaataatgcagtgcttaaatgtgttctagttgaatctctttcactgtctgcattctgatgccctccactacaggtctcttctttcatagattactgtgtctattgctatcayagaatatttagtggagagggcatcctagaggcttagtgaaaatgagaatataattcctttgtcagaatccagttctatttctacagcttcagaatccaattggcaactgcctcatcatttggcaggcgtctggcctttcacagacccaaggcagagaggctgggctgaaacaaactatatggctcttattgttctttgaaatttgaagattcaataaaattataatgaggattgtagaattctgttatttagtttatgtcgatctatctatcttcctgtctagctagtctttctcttactgtttgtcaacattttcttcatataaaaatccttttatttgtattttaaaattctatttgtctgtttctctctggttaaattgaaaaattgtg

SEQ ID NO: 549063 - DNA, 827 bp, Homo sapiens
gcagatcaatctctctgcaaggaccctgggttgtacaaaacaggggctagagcttcctactgggtctctgttggggctcccctttcctgaactttggccaaagacaacaggatattcttgggggttttgttgttgttttgttgtcattttttctgtgcctgttggtgattccagcacagcccagcgtatatgggagacraaaagaaaacttagaaaacttaccatgttgctgttactcaagtcctgaggtttcttgcaagtacaccttttcttctagctttcagagccctttatcattgtctgctgaatagtttccaaggtacttagttgtatttagaggagcagagcagggaaaaatgagtttaaccatcttgttccagaactggaagtcggcagagcctgttttaaaaataatgtttaaaacaaattttatttcgtgggtgattttccagaaagcagaaaaagtactatcgatggcacttcctataataaaaactacaccctatgctttcttggaaggaatcaattgcattattcaacagtcgtcttcctctgaacctgctctgcatttagtcaacaggatattgaattccttttaaaaatctaaacagattatcacttctttcctgaaccaaaagttgattagtaatgtaaatacttgtctgtaacacagaaaactgtgttttctttgagctcttcctattccgtatcccttgtcttgaatgaggagtttttcctttggcaccaaaaggttacaactacatttatctacaaataaactaccatagaagaactggaactttcctaattatcaatgtttagctgca

SEQ ID NO: 549064 - DNA, 827 bp, Homo sapiens
gcagatcaatctctctgcaaggaccctgggttgtacaaaacaggggctagagcttcctactgggtctctgttggggctcccctttcctgaactttggccaaagacaacaggatattcttgggggttttgttgttgttttgttgtcattttttctgtgcctgttggtgattccagcacagcccagcgtatatgggagacaaaaagaaaacttagaaaacttaccatgttgctgttactcaagtcctgaggtttcttgcaagtacaccttttcttctagctttcagagccctttatcattgtctgctgaatagtttccaaggtacttagttgtatttagaggagcagagcagggaaaaatgagtttaaccatcttgttccagaactggaagtcggcagagcctgttttaaaaataatgtttaaaacaaattttatttcstgggtgattttccagaaagcagaaaaagtactatcgatggcacttcctataataaaaactacaccctatgctttcttggaaggaatcaattgcattattcaacagtcgtcttcctctgaacctgctctgcatttagtcaacaggatattgaattccttttaaaaatctaaacagattatcacttctttcctgaaccaaaagttgattagtaatgtaaatacttgtctgtaacacagaaaactgtgttttctttgagctcttcctattccgtatcccttgtcttgaatgaggagtttttcctttggcaccaaaaggttacaactacatttatctacaaataaactaccatagaagaactggaactttcctaattatcaatgtttagctgca

SEQ ID NO: 549065 - DNA, 827 bp, Homo sapiens
gcagatcaatctctctgcaaggaccctgggttgtacaaaacaggggctagagcttcctactgggtctctgttggggctcccctttcctgaactttggccaaagacaacaggatattcttgggggttttgttgttgttttgttgtcattttttctgtgcctgttggtgattccagcacagcccagcgtatatgggagacaaaaagaaaacttagaaaacttaccatgttgctgttactcaagtcctgaggtttcttgcaagtacaccttttcttctagctttcagagccctttatcattgtctgctgaatagtttccaaggtacttagttgtatttagaggagcagagcagggaaaaatgagtttaaccatcttgttccagaactggaagtcggcagagcctgttttaaaaataatgtttaaaacaaattttatttcgtgggtgattttccagaaagcagaaaaagtactatcgatggcacttcctataataaaaactacaccctatgctttcttggaaggaatcaattgcattattcaacagtcgtcttcctctgaacctgctctgcatttagtcaacaggatattgaattccttttaaaaatctaaacagrttatcacttctttcctgaaccaaaagttgattagtaatgtaaatacttgtctgtaacacagaaaactgtgttttctttgagctcttcctattccgtatcccttgtcttgaatgaggagtttttcctttggcaccaaaaggttacaactacatttatctacaaataaactaccatagaagaactggaactttcctaattatcaatgtttagctgca

SEQ ID NO: 549066 - DNA, 640 bp, Homo sapiens
aaggatatcagggactctcatttcttgccagtgagaatgtctaatctttgtgaaggtcaattttggaatacattttaagaaccataaagtgggtatagaagaagttctagttttaatgatgatggagtatcctccactggcccaatcctcctgcagataagayttataaactctgaacaaaatatttttaaaaaattgaaagcactggcagagagaaactggagtttgacctttgaaagaaggaactgcacccgtgcttcctatgcttaccctgtttttatctaagggctctctctagtccgccaggcagaaagctgtgatcttattgcttgaggtgtcagaggacagagtttggggctgccagagtgactggaaattgagggggataaatcctggaaagagctaaagtttttaaagctgaataatgatttcaaccaattgcccattgctcaatgattgggagacagattttggagtttaaatcctatcaatttttccaaaagagctgtttggaaacatcttgggcatttcactaaaatcctaggaaggggtcatacctaagagtaataactatgcccccaggattaaagatcctccctaagactaacgaaaaatctaaataggcctaccctaaagagta

SEQ ID NO: 549067 - DNA, 640 bp, Homo sapiens
aaggatatcagggactctcatttcttgccagtgagaatgtctaatctttgtgaaggtcaattttggaatacattttaagaaccataaagtgggtatagaagaagttctagttttaatgatgatggagtatcctccactggcccaatcctcctgcagataagatttataaactctgaacaaaatatttttwaaaaattgaaagcactggcagagagaaactggagtttgacctttgaaagaaggaactgcacccgtgcttcctatgcttaccctgtttttatctaagggctctctctagtccgccaggcagaaagctgtgatcttattgcttgaggtgtcagaggacagagtttggggctgccagagtgactggaaattgagggggataaatcctggaaagagctaaagtttttaaagctgaataatgatttcaaccaattgcccattgctcaatgattgggagacagattttggagtttaaatcctatcaatttttccaaaagagctgtttggaaacatcttgggcatttcactaaaatcctaggaaggggtcatacctaagagtaataactatgcccccaggattaaagatcctccctaagactaacgaaaaatctaaataggcctaccctaaagagta

SEQ ID NO: 549068 - DNA, 640 bp, Homo sapiens
aaggatatcagggactctcatttcttgccagtgagaatgtctaatctttgtgaaggtcaattttggaatacattttaagaaccataaagtgggtatagaagaagttctagttttaatgatgatggagtatcctccactggcccaatcctcctgcagataagatttataaactctgaacaaaatatttttaaaaaattgaaagcactggcagagagaaactggagtttgacctttgaaakaaggaactgcacccgtgcttcctatgcttaccctgtttttatctaagggctctctctagtccgccaggcagaaagctgtgatcttattgcttgaggtgtcagaggacagagtttggggctgccagagtgactggaaattgagggggataaatcctggaaagagctaaagtttttaaagctgaataatgatttcaaccaattgcccattgctcaatgattgggagacagattttggagtttaaatcctatcaatttttccaaaagagctgtttggaaacatcttgggcatttcactaaaatcctaggaaggggtcatacctaagagtaataactatgcccccaggattaaagatcctccctaagactaacgaaaaatctaaataggcctaccctaaagagta

SEQ ID NO: 549069 - DNA, 640 bp, Homo sapiens
aaggatatcagggactctcatttcttgccagtgagaatgtctaatctttgtgaaggtcaattttggaatacattttaagaaccataaagtgggtatagaagaagttctagttttaatgatgatggagtatcctccactggcccaatcctcctgcagataagatttataaactctgaacaaaatatttttaaaaaattgaaagcactggcagagagaaactggagtttgacctttgaaagaaggaactgcacccgtgcttcctatgcttaccctgtttttatctaagggctctctctagtccgccaggcagaaagctgtgatcttattgcttgaggtgtcagaggacagagtttggggctgccagagtgactggaaattgagggggataaatcctggaaagagctaaagtttttaaagctgaataatgatttcaaccaattgcccattgctcaatgattgggagacagattttggagtttaaatcctatcaatttttccaaaagagctgtttggaaacatcttgggcatttcactaaaatcctaggaaggggtcatacctaagagtaataactatgcccccaggattaaagatcctccctaagactaasgaaaaatctaaataggcctaccctaaagagta

SEQ ID NO: 549070 - DNA, 361 bp, Homo sapiens
gaatgcttccaactatgcacaattatttctttagtttatttaattgtacattgaattttgtgaatttacagagttttctcagaatttcttcatacaacctggtgaatcactttctgtgtcagctctgccgatgtgtagaacagaaggtgctaattgcaccttaaacctattccctatttttctgcattaactctgattgttcctttgggttgatcttggaaattctgatgactatgtgcctggggaatgatcgaattgtataatatcttgcaggggttctctgtttcttgtatttcyatgttgacctctctagcaaaattgggaacattttcattgattatattctcaaatatgttttcca

SEQ ID NO: 549071 - DNA, 1002 bp, Homo sapiens
tttttggtgttatacaatctacagcctcatttcttgacctgtgcaatacctgttaaaaggtgcataacaaaaactcagtgaaatcacatgcttggaaaactagtaactttttaaacaaataatgtggcaaattgtattattacatttrtatttatctttatttggatataaaataataattctttaaaaaataaacatctaaattgtatttgatttttaagaaatttattatgaatgacagatggaatagagaacactatacaataagaggagtccttcaaattttgtgcacgagtatatatcacagaataaatagtttcggtaataaaaaacccaactctgctaaatagactatgtgacacaaaatatgcattgcttctgaagtaaattaagtatgacttaggagaatgagctaaagagacaatttctgggaccgaggggctagaacctcttacaataaataaaatatatcctaacaagcactccttttttccccttcaggcctttcctattaaagtgataaatgattacaaaacaaatattcagctacataactaaagagagtgaatggaaccgaggaacatttaaaaagagtaattttcattcaaatttgcttcaaacttctggaaacaaaattacttttggataaagtatgaaattttaaatcagaatagcaagtgatgaaaaaacctttaaatctgtctcttttttttcttgagattgcatctttttggatcctcacacttaatctcaggaccgagctagacttacagccacaaatcaaatgttgagaagtccttggctgtctgagtctgcctgccctcacccagccagctgggctataaaacacttgggttgattctgtcctagagcggagaagcaaagttgtgcaaaacactatgagaaatgacttcactagggaaactgttgtgtatccaaaatttctttgtcttcccattgtctctgtggcatctgttctttctcagcctctcacatattctc

SEQ ID NO: 549072 - DNA, 1002 bp, Homo sapiens
tttttggtgttatacaatctacagcctcatttcttgacctgtgcaatacctgttaaaaggtgcataacaaaaactcagtgaaatcacatgcttggaaaactagtaactttttaaacaaataatgtggcaaattgtattattacatttatatttatctttatttggatataaaataataattcttyaaaaaataaacatctaaattgtatttgatttttaagaaatttattatgaatgacagatggaatagagaacactatacaataagaggagtccttcaaattttgtgcacgagtatatatcacagaataaatagtttcggtaataaaaaacccaactctgctaaatagactatgtgacacaaaatatgcattgcttctgaagtaaattaagtatgacttaggagaatgagctaaagagacaatttctgggaccgaggggctagaacctcttacaataaataaaatatatcctaacaagcactccttttttccccttcaggcctttcctattaaagtgataaatgattacaaaacaaatattcagctacataactaaagagagtgaatggaaccgaggaacatttaaaaagagtaattttcattcaaatttgcttcaaacttctggaaacaaaattacttttggataaagtatgaaattttaaatcagaatagcaagtgatgaaaaaacctttaaatctgtctcttttttttcttgagattgcatctttttggatcctcacacttaatctcaggaccgagctagacttacagccacaaatcaaatgttgagaagtccttggctgtctgagtctgcctgccctcacccagccagctgggctataaaacacttgggttgattctgtcctagagcggagaagcaaagttgtgcaaaacactatgagaaatgacttcactagggaaactgttgtgtatccaaaatttctttgtcttcccattgtctctgtggcatctgttctttctcagcctctcacatattctc

SEQ ID NO: 549073 - DNA, 1002 bp, Homo sapiens
tttttggtgttatacaatctacagcctcatttcttgacctgtgcaatacctgttaaaaggtgcataacaaaaactcagtgaaatcacatgcttggaaaactagtaactttttaaacaaataatgtggcaaattgtattattacatttatatttatctttatttggatataaaataataattctttaaaaaataaacatctaaattgtatttgatttttaagaaatttattatgaatgacagatggaatagagaacactatacaataagaggagtccttcaaattttgtgcacgagtatatatcacagaataaatagtttcggtaataaaaaacccaactctgctaaatagactatgtgacacaaaatatgcattgcttctgaagtaaattaagtatgacttaggagaatgagctaaagagacaatttctgggaccgaggggctagaacctcttacaataaataaaatatatcctaacaagcactccttttttccccttcaggcctttcctattaaagtgataaatgattacaaaacaaatattcagctacataactaaagagagtgaatggaaccgaggaacatttaaaaagagtaattttcattcaaatttgcttcaaacttctggaaacaaaattacttttggataaagtatgaaattttaaatcagaatagcaagtgatgaaaaaacctttaaatctgtctyttttttttcttgagattgcatctttttggatcctcacacttaatctcaggaccgagctagacttacagccacaaatcaaatgttgagaagtccttggctgtctgagtctgcctgccctcacccagccagctgggctataaaacacttgggttgattctgtcctagagcggagaagcaaagttgtgcaaaacactatgagaaatgacttcactagggaaactgttgtgtatccaaaatttctttgtcttcccattgtctctgtggcatctgttctttctcagcctctcacatattctc

SEQ ID NO: 549074 - DNA, 1002 bp, Homo sapiens
tttttggtgttatacaatctacagcctcatttcttgacctgtgcaatacctgttaaaaggtgcataacaaaaactcagtgaaatcacatgcttggaaaactagtaactttttaaacaaataatgtggcaaattgtattattacatttatatttatctttatttggatataaaataataattctttaaaaaataaacatctaaattgtatttgatttttaagaaatttattatgaatgacagatggaatagagaacactatacaataagaggagtccttcaaattttgtgcacgagtatatatcacagaataaatagtttcggtaataaaaaacccaactctgctaaatagactatgtgacacaaaatatgcattgcttctgaagtaaattaagtatgacttaggagaatgagctaaagagacaatttctgggaccgaggggctagaacctcttacaataaataaaatatatcctaacaagcactccttttttccccttcaggcctttcctattaaagtgataaatgattacaaaacaaatattcagctacataactaaagagagtgaatggaaccgaggaacatttaaaaagagtaattttcattcaaatttgcttcaaacttctggaaacaaaattacttttggataaagtatgaaattttaaatcagaatagcaagtgatgaaaaaacctttaaatctgtctcttttttttcttgagattgcatctttttggatcctcacacttaatctcaggaccgagctagacttacagccacaaatcaaatgttgagaagtccttggctgtctgagtctgcctgccctcacccagccagctgggctataaaacacttgggttgattctrtcctagagcggagaagcaaagttgtgcaaaacactatgagaaatgacttcactagggaaactgttgtgtatccaaaatttctttgtcttcccattgtctctgtggcatctgttctttctcagcctctcacatattctc

SEQ ID NO: 549075 - DNA, 596 bp, Homo sapiens
tgaaccctgggttgctactatcgggttaaaataattgctaatagtttctgttttcagacaggaagttttcaatctctctcgaaggattgctcgccaatttctcctagcaatttggaagtttccagataagaaattaagtactttactgtgctatgtgtcagcctagctctgctcttgaatgctgagtttgtgaytcatttggtatgtttgtatatttactaagattaggtataaatatgtattaatactaaatctactcaaaatctttgttctgactaccttttatttcatcaacattaagctagaacaaaaataagaaaatattcatttactttgaggccgggcatggtggctcacacctgtaatcccagcactttggggggctgaggcgggtggataactggagggctggagttccagaccagcttggccaacacagcaaaaccgcatctctactaaaaatccaaaaaaaaaattagccggatgtggtggtgcacgcctgtaatcccagctacacaggaggctaaagcaggagaatcacttgaacccaagaggtggaggctgcagtgagccaagactgcgccacagcactccag

SEQ ID NO: 549076 - DNA, 359 bp, Homo sapiens
tataytgcttccacaaatatgagggacagagaagccctgctatcacctaacctgttattatgtagaaaggcagttcctactgatcattgtgttcaatattttatcattgtttctttttttaaatttaaatttaatttaatttaattttttttgagacgaagtcttgctctgttgcccaggctggactgcagtggtgcgatctcagctcactgcagccttcacctcccaggttcaagcaattctcttgcctcagcctcctgagtagctgagattacaggtgtgcatcaccacaccttgctaatcttttcttttcttctttttcttttcttttttgagatggaatctctctctgtcaccca

SEQ ID NO: 549077 - DNA, 1298 bp, Homo sapiens
tagctgggattacaggcatgcaccaccacgcccagctgatttttgtatttttggtagagacggggtttcaccatgttggccaggctggtcttgaactcatgatctcaggtgatccacccacctcgcctcccaaagtgctgggattacaggcgtgacgactgcacccagcggttcttagaattttcctccagtgcccacttgcttggagacattacttacctaggcatcatattacttgtgaaagatttgttcttccttttcattcaagaatttgcaccttatcccttcatttgaaggtgaaggtactacctctttgtgggagatgagttacagagcagttatatgagctcatgattgatcccttttccagaaactagggaaatgcaatcccatctttggaaacagatccgataaagataattataaggaaaaaaaaaaaaaagtattgcaaycttacttgaactcttgttaccaccagtgggtggcatctaagtcaccccacctcaagtagaaggtaataagttcctaaggtggccgcccgccattcagaggtagtcacgcgttctgtgtgtttgtgcctgtgtgcttttgaatacagaggagaaataatttcccccaggctgagtgcttcctgtggttactcataatgtgtgttgatttgcaacacatagtgtaccatagatgttaaatgaaaattcattataactgaatatgttacatagtaatacctacatttctagatcattttgtacatttttactaacaggacattggaattgctggaaccacagcagttgttcagaccacttagggacagatgacgtcttttctaacagcctaaatctatttttattttattttttatttttgagaccgagttttgctcttgttgcccaggctgtagtgcaatggcactatctcggctcattgcaacttccgcctcccaggttcaagcaattctcctgcctcagcctcccaagtagctgggattacaggcatgcaccacgatgcctggctaattttcgcatttttagtagagacagggtctcaccatgttgggtcaagctggtctcgaactcctgacctcagatgatccacctgccttggcctcccaaagtgctgggattacaggtgtgagcactgtgcccagcgtatttttttatttttatttttttaattttaaaatttattttattttatcgaggcagagtgtcactctgttgctcaggctggagtgcagtagtgcaatcttggctcactgcaacctctgcctcccaggttccaagtgattctcctgc

SEQ ID NO: 549078 - DNA, 2787 bp, Homo sapiens
gagctgtaaaaaaaattttttttccattgagttacagaaaataaaactgcagttttgcccacctgagtttgtcgattgaggaagtttgtgcctgctatgcgtgtaaggccaaatgcctctgcaccagcctctactgtcatcgaagtgattgctgccctcactggttttcaacttcaagaattggctgggtgtggtggctcatgcctagcactttgggaagctgaggcaggttgactgcctgagctcaggagttcgagaccagcctgggcaacacagtgaaaccccatctctactaaaatacaaaaaattagctggcgtggtgctgtgcacctgtaatcccagctactcaggaggctgaggcaggagaattgctagaagccgggaggcggaagttgcagtgagccaagatcacgccactgcactccagcctgggcaacagagtgagactccatctcttaaaaaaaaaaaaaaaaaaaatcaagaccactattttccaatcaatttctttaccaccttcattagttttgccatatttggtttccccaggggtatagtacattatttactatttttcaactccattttataatttaaaaatgaaatagctttattctaagcaattgaagaacttgttatataaatatatacagatatttcccaatgcatgttgaaattaacatgaaactaccttttcttctttctttttgagagattgaggggggggtctcatcatgttgctcgggctggtcttgaactcctggggtcaagcaatcagcctgcctcccacaacaaagagatattaagtgttttgtttttgtttttaaaagcctttaaaaaggcttgggtgggagggtcattgctgtatgttttcagcattagcttttctgggccacttttttgttatcatgcgtatgtattaccaggagacgattttttttttctttttaaatttcaaaatactgcacctggggctctggattgaggcctcgcagtcgtctctgggtgcaggacgagcaggagaacaatgggcctctgctgacccctgctggccagagcgcctcccacccacccaggtctccacaggactgggatcttgcgccactgcctccatccccagaaacagccgtccttcctcccctgcccccagaaggcctcggcagccaccacagtgtgctctggacatcgagtctggggcccggctgggagacccttgtgctccagagggcgctgaggcyctgggctgcatttgtgtcccctctggccctgtctacatcgagtgggtggggtgtgagtcctgggatcagagtatcctccagctctagataaaacccgactttggaaggccaaggtgggtggatgacctgaggtcaggagttcgagaccggtctgaccaacatggtaaagccctgtctctactaaaaatacaaaaataagccaggcgtggtggtgggtgcctgtagtccaagctactcgggaggctgaggcaggagaattgcttgaacccaggcggtggaggttgcagtgagccaaggttgcaccactgcactccagcctgggtgacagagactctgtctcaaaaataaataaaataaaatagataaaacccagagatttttggagattcaaactcctctcccagggactcacattctctgagctatgggtcaccagggcagagctttcctgagaggaggggcagaagaacgtagcacatagaggattctaacctgccaggactgagctgggagtgggcaatggagaccacggaggatggaggcctttggaggattagggaaggaggaggaagggagggaacccagatgtctgggcaacctctgcagaggaggcaccttcttttctcacctggaaagacctggatcaagggccacgtgacccgtattctccagatctgcaccatatagggcaggggtggaacacactggtttttggatttgcaccatgacccaagccaagtcacctctctgagtctcagtttcctcctctgtaaaatggagagtcctgattaccaggggcagaacccctaactgaaaccagcagagacaaaaaggaccacgagatgatgggtgcaatgcaggacagggtgaataactaaacacaaaggggcgaggggtgctctgccactgggaaggatcccccttctccacctcccttatgagggagtgaatctcatggctcactctgcactggctccctcctgtggagagaccggggataggaagacagccgtaagttccccggctttctcccctcaacagaatggtccaaagtgcagcacacacaacctgtctgggtcacctacatgacatagcaaagagctatgtttccttgtgcaatgaagaacagctcagaaatgcaactaccttctatttatttgctttccttccttttctgcctcatgtcttttttttttccctgattcttgtgccctagaattccacttccaataaagccttaggacataaactttgccttgggctctgttttctagagcatctgggatgagatagatgcttataagctgtttgaccttggatacatgacttaacctctctgtgcttcagttttcttatttgtaaaatggagtcatgattcctagttcatgaggttgcagtgagttaagtctactgaaggcacttagagtggtatgtaaacatccagttagaattcattgccaggtgcaggggcctacacttgtaatcctggcactttgagaggctgaggggggattgcttgagtccaggagcttgagaccagcctagagacctt

SEQ ID NO: 549079 - DNA, 2787 bp, Homo sapiens
gagctgtaaaaaaaattttttttccattgagttacagaaaataaaactgcagttttgcccacctgagtttgtcgattgaggaagtttgtgcctgctatgcgtgtaaggccaaatgcctctgcaccagcctctactgtcatcgaagtgattgctgccctcactggttttcaacttcaagaattggctgggtgtggtggctcatgcctagcactttgggaagctgaggcaggttgactgcctgagctcaggagttcgagaccagcctgggcaacacagtgaaaccccatctctactaaaatacaaaaaattagctggcgtggtgctgtgcacctgtaatcccagctactcaggaggctgaggcaggagaattgctagaagccgggaggcggaagttgcagtgagccaagatcacgccactgcactccagcctgggcaacagagtgagactccatctcttaaaaaaaaaaaaaaaaaaaatcaagaccactattttccaatcaatttctttaccaccttcattagttttgccatatttggtttccccaggggtatagtacattatttactatttttcaactccattttataatttaaaaatgaaatagctttattctaagcaattgaagaacttgttatataaatatatacagatatttcccaatgcatgttgaaattaacatgaaactaccttttcttctttctttttgagagattgaggggggggtctcatcatgttgctcgggctggtcttgaactcctggggtcaagcaatcagcctgcctcccacaacaaagagatattaagtgttttgtttttgtttttaaaagcctttaaaaaggcttgggtgggagggtcattgctgtatgttttcagcattagcttttctgggccacttttttgttatcatgcgtatgtattaccaggagacgattttttttttctttttaaatttcaaaatactgcacctggggctctggattgaggcctcgcagtcgtctctgggtgcaggacgagcaggagaacaatgggcctctgctgacccctgctggccagagcgcctcccacccacccaggtctccacaggactgggatcttgcgccactgcctccatccccagaaacagccgtccttcctcccctgcccccagaaggcctcggcagccaccacagtgtgctctggacatcgagtctggggcccggctgggagacccttgtgctccagagggcgctgaggctctgggctgcatttgtgtcccctctggccctgtctacatcgagtgggtggggtgtgagycctgggatcagagtatcctccagctctagataaaacccgactttggaaggccaaggtgggtggatgacctgaggtcaggagttcgagaccggtctgaccaacatggtaaagccctgtctctactaaaaatacaaaaataagccaggcgtggtggtgggtgcctgtagtccaagctactcgggaggctgaggcaggagaattgcttgaacccaggcggtggaggttgcagtgagccaaggttgcaccactgcactccagcctgggtgacagagactctgtctcaaaaataaataaaataaaatagataaaacccagagatttttggagattcaaactcctctcccagggactcacattctctgagctatgggtcaccagggcagagctttcctgagaggaggggcagaagaacgtagcacatagaggattctaacctgccaggactgagctgggagtgggcaatggagaccacggaggatggaggcctttggaggattagggaaggaggaggaagggagggaacccagatgtctgggcaacctctgcagaggaggcaccttcttttctcacctggaaagacctggatcaagggccacgtgacccgtattctccagatctgcaccatatagggcaggggtggaacacactggtttttggatttgcaccatgacccaagccaagtcacctctctgagtctcagtttcctcctctgtaaaatggagagtcctgattaccaggggcagaacccctaactgaaaccagcagagacaaaaaggaccacgagatgatgggtgcaatgcaggacagggtgaataactaaacacaaaggggcgaggggtgctctgccactgggaaggatcccccttctccacctcccttatgagggagtgaatctcatggctcactctgcactggctccctcctgtggagagaccggggataggaagacagccgtaagttccccggctttctcccctcaacagaatggtccaaagtgcagcacacacaacctgtctgggtcacctacatgacatagcaaagagctatgtttccttgtgcaatgaagaacagctcagaaatgcaactaccttctatttatttgctttccttccttttctgcctcatgtcttttttttttccctgattcttgtgccctagaattccacttccaataaagccttaggacataaactttgccttgggctctgttttctagagcatctgggatgagatagatgcttataagctgtttgaccttggatacatgacttaacctctctgtgcttcagttttcttatttgtaaaatggagtcatgattcctagttcatgaggttgcagtgagttaagtctactgaaggcacttagagtggtatgtaaacatccagttagaattcattgccaggtgcaggggcctacacttgtaatcctggcactttgagaggctgaggggggattgcttgagtccaggagcttgagaccagcctagagacctt

SEQ ID NO: 549080 - DNA, 530 bp, Homo sapiens
caaggcagcatttgaacctggttttgcagtaatgaagagggtttcaccaagaggataaaggagaaaaaacaattttggggaaaaacatttggcatgacagagacattaggaagtatctagtgtggctagaccttagggtatagagggcaatgttgcccatttaggaaatatggaagtcccagaaaaacatttcttagaaattttacttaaaaccaaagtcatagtattcttttcttaaaattgcctttcactgccccccacaaaagaacacaaaaaactaacccaaagtaatcagacaattggggattaagtattgtattttgctttttacaaacttgaggacatggagaacattctgtatttatgtggtcatttagtctacttttgtggtttttgctctctcagatatacctagagaacttgctgggattcagattcccaggctatccatcatacctaatgagtcatgatctctgggtacaagaactaggaacatacattttaaagatgtatttcagatgattwttttg

SEQ ID NO: 549081 - DNA, 628 bp, Homo sapiens
gtgcaggagcgttatctcrgctcacttcaacctctgcctccagggttcaagcaattctcctgcctcagcctcccgagtagctggattacaggcacctgccatcactcctagctaatttttgtgtttttagtagagatggggtttcaccatgttggccaggctggtcttgaactcctgacctcagatgatacacccacttcggcctcccaaagtgctaggattacaggcgtgagccaccgcgccaggcctcttgtaaactttaatgtatttaaagcaacatatcttttccagatcaatattggtgtgctattatgattttgaaaacttaaatatattgtcttaattattaatttgaatgtagtatgtatacttgtgcataaatgtgaatgaatgtgaataggcctgtataatactatgactagataccagaaatatctttatcagtatttagttctattaatttagacaatcattgttgatgattatgtttcaggaagcagcatgggttttaaaagaaataccaaagttttatgttcagaattagatatccatgagtttaaatacatttgtgataaatatttttcaggaagttactcaacctcttgatatgtcttttgttaaatggagt

SEQ ID NO: 549082 - DNA, 2172 bp, Homo sapiens
ggtattatatttctactttctttgttcaataatgttacaaatgttaccctaacctcataaaaacattaaaagaaattttagtatcatcaagtggtgagagaatttttgttttctatttcctcttactaattgtttccaagatacctggcttctctgtaaggctagtttaaaatgttacacttcttacagaattctagctctagataggccataattacataaataacagaggatgaaaatcccttcaaaggatgaaacatagaaattgatgtagtaaagctttaggctgtccaagataatgttttctatttaaaatattgcaaatctggccaattgaattaaattcactttgaacaggctataataagcacttacttttggtgtgagtaaataacaaataaatcacttaagaaaatacggcattattccccctcatggtgcatttaaactagaataaaaaattgttacgagaggaagatgaagtcaccaaaagagctgagaattgttaaagaatgtcaggcagaatactcataaggttgaactgataacataattaggtacttgctaaaaacttaccaagatacaacctgggcaataacaccctctagaatggcaaccagactatatagagtgttaaaaagaagaatcttggtaaaaatgaggctagcaattaaaaatgagaaaactaaggataaacagaaagggttctagaaacaattcaggaagagatatttgaaaggcatgtggtatgataaagttcaagtgacataaaattaatagtaatatcatgaagcaaaaagcagaaatggaaagatatagaacgaaaggggataatcacttgaatcacaagattatatatttgagttcagtacactgaaatatttcatttttcaatatgaaagacatatagtgacctctaggcactcattttaatatacaagagccattaaaaaggcacttcaaggtgttagcaggatctactccattataaccatggatgggaggtttgcattcactctgaaaagagtttcctttgcagttttatgtgagaaaaatacagtatcaaaatgattatattgtgatacagaatctccctattaaccaattgcaatgacccaaatatgaccccacaagaaatgaatctggtgcatataactaacgagatgggtgaaattgttcatcctgtaaaattgatggtcagtcactgaagagaagaatttgggactgcatttcaggaaaaagaaccaaaacagtaacagttctgcttctacataattatacggatcctcatgagtcacctgtgaagaaaacaaaacaaaacctcttctcaaaattctgtccactaatttctaaggaaaaaaatgtggtagataggaawcatgatactgctagagcacagagatgcagataatgaatgagaaatctttctctaaattaagatttttaaacattgattttgctatttgaatataggaagatgactcctgttttctcatttgatatatttaatggtgagttcacagatacaattgtttcctcggcttaaggtcaatgatcatggtggaataggaaaatagagaaaaatgctgaaagttttcagctttagtgtactatctgttaaaaagagtatttcaaagacactgtttttacactgttttaatgaattcagactatgtctcatgatcttttggaaaattgaaataatctcaaattattttcctgagtacaaaatgtcaatttaatgagagtttaaatgtgatgacccaattatttcaattaaattatacaatatttattagactataagttgcaaactgctatcatataactatgaattgcagaagatagaagaggatgaaataatacataagaccataaaattaattatatcattctctctttcatagaaacagacaatatatgctcattataatatttgatgacttagctatcataatcagttctatgttttcacaatactgtttatcctgttataaacctaaattccgtttgatcaattatcggtctcagagcaagggaatcagtcttgcatgtattaattgaagcttatggtatgaagtacagcccaaagattaattttgcaagaaatataactataaaccagattctgacacctctatacaacacattaacacatctttgtcataagca

SEQ ID NO: 549083 - DNA, 2172 bp, Homo sapiens
ggtattatatttctactttctttgttcaataatgttacaaatgttaccctaacctcataaaaacattaaaagaaattttagtatcatcaagtggtgagagaatttttgttttctatttcctcttactaattgtttccaagatacctggcttctctgtaaggctagtttaaaatgttacacttcttacagaattctagctctagataggccataattacataaataacagaggatgaaaatcccttcaaaggatgaaacatagaaattgatgtagtaaagctttaggctgtccaagataatgttttctatttaaaatattgcaaatctggccaattgaattaaattcactttgaacaggctataataagcacttacttttggtgtgagtaaataacaaataaatcacttaagaaaatacggcattattccccctcatggtgcatttaaactagaataaaaaattgttacgagaggaagatgaagtcaccaaaagagctgagaattgttaaagaatgtcaggcagaatactcataaggttgaactgataacataattaggtacttgctaaaaacttaccaagatacaacctgggcaataacaccctctagaatggcaaccagactatatagagtgttaaaaagaagaatcttggtaaaaatgaggctagcaattaaaaatgagaaaactaaggataaacagaaagggttctagaaacaattcaggaagagatatttgaaaggcatgtggtatgataaagttcaagtgacataaaattaatagtaatatcatgaagcaaaaagcagaaatggaaagatatagaacgaaaggggataatcacttgaatcacaagattatatatttgagttcagtacactgaaatatttcatttttcaatatgaaagacatatagtgacctctaggcactcattttaatatacaagagccattaaaaaggcacttcaaggtgttagcaggatctactccattataaccatggatgggaggtttgcattcactctgaaaagagtttcctttgcagttttatgtgagaaaaatacagtatcaaaatgattatattgtgatacagaatctccctattaaccaattgcaatgacccaaatatgaccccacaagaaatgaatctggtgcatataactaacgagatgggtgaaattgttcatcctgtaaaattgatggtcagtcactgaagagaagaatttgggactgcatttcaggaaaaagaaccaaaacagtaacagttctgcttctacataattatacggatcctcatgagtcacctgtgaagaaaacaaaacaaaacctcttctcaaaattctgtccactaatttctaaggaaaaaaatgtggtagataggaaacatgatactgctagagcacagagatgcagataatgaatgagaaatctttctctaaattaagatttttaaacattgattttgctatttgaatataggaagatgactcctgttttctcatttgatatatttaatggtgagttcacagatacaattgtttcctcggcttaaggtcaatgatcatggtggaataggaaaatagagaaaaatgctgaaagttttcagctttagtgtactatctgttaaaaagagtatttcaaagacactgtttttacactgttttaatgaattcagactatgtctcatgatcttttggaaaaytgaaataatctcaaattattttcctgagtacaaaatgtcaatttaatgagagtttaaatgtgatgacccaattatttcaattaaattatacaatatttattagactataagttgcaaactgctatcatataactatgaattgcagaagatagaagaggatgaaataatacataagaccataaaattaattatatcattctctctttcatagaaacagacaatatatgctcattataatatttgatgacttagctatcataatcagttctatgttttcacaatactgtttatcctgttataaacctaaattccgtttgatcaattatcggtctcagagcaagggaatcagtcttgcatgtattaattgaagcttatggtatgaagtacagcccaaagattaattttgcaagaaatataactataaaccagattctgacacctctatacaacacattaacacatctttgtcataagca

SEQ ID NO: 549084 - DNA, 922 bp, Homo sapiens
ttacaatacagtatgtattttatgtattccatgagttttataaagttcaaaaacatgcaaaactaatatatgggttagcagtcaggttagtgattgtccttggtggcggggggttgagactaggattgggcaagaggaaacttctggggtactggtagcattctgtctcttgaccgtttrttcagtttctaaaaataaaatgagctgtacttttatgattcctgctattttatttatatgtgataaaattaaatgttcaattaaatcaattcaagtataaagagttacttgaaactatgttagtaaacctactgaagatctactcaaaatataattcaaatttgatgattacatgtgttggaaattcccaagtttttccttcagttgatttcaaattcctaaatagttttgtttgattcccatggctgctcccttttgtgattcaaggaaattttcttcatcatggcttcttatctcatcatactgtgtgtccaaggaatgtactcttcaatgatgagctcaattctgcattatctcaattatttcctttcgctgattctttccccttagcatataaacatgtctacattttgccatcttcaaaaacaaaatatacttctctgcttcttagctctcactagctagtatgctattatttttccacttttcacagcccggcttgcttggctccatatcttcatctcccaacaacatctcccatggcaacacataactccatgaaaattgtgctccctaaagtcacaggaagcctctatacagtaattcgcctttgtgttattccttggaacatttcaacttttaataactatttcttggggggagctgaggtgtatgaaacaaaagtcctaacctaatgtgtaatggtaaaaggaaatcagtccaatacagtaactttagtcct

SEQ ID NO: 549085 - DNA, 520 bp, Homo sapiens
aatttagaattcatcatcagggagctgatagttcatttgtttgttcattcatttgggacaaatctttatttcaagtgcccattatatgccagtttcagttaggcatggcatgtgtattagtccattgtcacgctgctaataaagatatacacgagaytgggtaatttataaagaaaagagatctaattgactcaccgttcagcatggttgggaaggcttcaggatacttatgatcatggcagaaagggaagcaaacatgtccttctttgcatggtggcaggtagagaaaaatgagaaccgagcaaagtgggaagccccttataaaaccatcagctctcatgaaaacttactcactatcaagagaatagcataggggaaactgcccccatgattcaattacctcccaccaggtccctcccacaacacgtggggattatggaaactacaattcaagatgagatttgggtggggacacagccaaaccatatcagcatgtaataagtgattaataagtttcttt

SEQ ID NO: 549086 - DNA, 520 bp, Homo sapiens
aatttagaattcatcatcagggagctgatagttcatttgtttgttcattcatttgggacaaatctttatttcaagtgcccattatatgccagtttcagttaggcatggcatgtgtattagtccattgtcacgctgctaataaagatatacacgagactgggtaatttataaagaaaagagatctaattgactcaccgttcagcatggttgggaaggcttcaggatacttatgatcatggcagaaagggaagcaaacatgtccttcttygcatggtggcaggtagagaaaaatgagaaccgagcaaagtgggaagccccttataaaaccatcagctctcatgaaaacttactcactatcaagagaatagcataggggaaactgcccccatgattcaattacctcccaccaggtccctcccacaacacgtggggattatggaaactacaattcaagatgagatttgggtggggacacagccaaaccatatcagcatgtaataagtgattaataagtttcttt

SEQ ID NO: 549087 - DNA, 540 bp, Homo sapiens
gacttcagtgagacaagcctcagctcagcactcctgggctgcatgctgtaattgtagggggctgggaccaggcccatggctttgttctctggccccttaaggttgagcacctgctgtactgaagagacccaggtgttcccagtccactgacaataacattccaatgggggagggggtcccagcaaaagtgtttcactgggacagaggcagcaggatccacagtcacatgtgtgtgctgccagcagtagagtagcagcacctgtgcacatacacacacacagaagcaggcagtgacagtgaggtctgcatacatgcaatagtggcggtgaagcaacaggatctgcatacacattccagtaacacagtaggggatggccgtgggtgartgagtgccagcaaaacagagggagaggctgtggacaagcatgcactagcttcacctgcagaagctctttgacagataggtgacctctgccagagaaggagctatgacagtggcactgggaagcactgtggttgggcatgtgaggctgcactgca

SEQ ID NO: 549088 - DNA, 540 bp, Homo sapiens
gacttcagtgagacaagcctcagctcagcactcctgggctgcatgctgtaattgtagggggctgggaccaggcccatggctttgttctctggccccttaaggttgagcacctgctgtactgaagagacccaggtgttcccagtccactgacaataacattccaatgggggagggggtcccagcaaaagtgtttcactgggacagaggcagcaggatccacagtcacatgtgtgtgctgccagcagtagagtagcagcacctgtgcacatacacacacacagaagcaggcagtgacagtgaggtctgcatacatgcaatagtggcggtgaagcaacaggatctgcatacacattccagtaacacagtaggggatggccgtgggtgaatgagtgccagcaaaacagagggagaggctgtggrcaagcatgcactagcttcacctgcagaagctctttgacagataggtgacctctgccagagaaggagctatgacagtggcactgggaagcactgtggttgggcatgtgaggctgcactgca

SEQ ID NO: 549089 - DNA, 540 bp, Homo sapiens
gacttcagtgagacaagcctcagctcagcactcctgggctgcatgctgtaattgtagggggctgggaccaggcccatggctttgttctctggccccttaaggttgagcacctgctgtactgaagagacccaggtgttcccagtccactgacaataacattccaatgggggagggggtcccagcaaaagtgtttcactgggacagaggcagcaggatccacagtcacatgtgtgtgctgccagcagtagagtagcagcacctgtgcacatacacacacacagaagcaggcagtgacagtgaggtctgcatacatgcaatagtggcggtgaagcaacaggatctgcatacacattccagtaacacagtaggggatggccgtgggtgaatgagtgccagcaaaacagagggagaggctgtggacaagcatgcactagcttcacctgcagaagctctttgacagataggtgacctctgccagmgaaggagctatgacagtggcactgggaagcactgtggttgggcatgtgaggctgcactgca

SEQ ID NO: 549090 - DNA, 1808 bp, Homo sapiens
tcacccagtgggccaagagcagtgttttttccaagtgtagtcctcatgccatcttcatccataattccttgggtagcctattagaaatacacatttcaagatcttaacctcatacttactgatttgtaatcttggggtgcagcctgacaacgtttattcataactaaccccctcagtgattctttaaactgaaaataaagcagttgttctctactttggtacattataatcatcagggagctttagaaaatactgaggcctgatcttatcctccaaggttcccatttaagaggtttgggatatagcctgggcatctccatttttaaagctcccccagtgattttaatgcatggaaccactgcacccaatttgaggaccacagaacgagagcatcagattcaagaaggcaaagcaggcacttggagacctgctacaaattataatggagatgtaaaaagttcatgcagagttttccatgccatgttggggagtttggtttcaattttgtagatggtgaagagacaatgcaagaggtggctcctacgggctcatatttctgtttaggcctcaataaatggtggtgttagaaaacaagattgaatctggtttgtacacccatggtgttgagggaagggatgctttactaccactccatgaagtgggctcaactatgccctcagagtaactgttcgtctttcagataaaggctctgaatactcctgttgctttcttaagagacacagtgggcacctatcctgtactcactgttgaaaaatcctcaactgtatcccacgtaaattctgagccgtgcaaagcttcatgaagggaagacctaagggagattggtggtgggcattatatattcacatggtctccattaggcccagcagttacaggtattgacttcaaccttgaagttcaggaatagaagaaaatgtgttgtgtggattattgtgcctacaaggcacagagaagttttgggatagattgcaatggcatagaagaaggagaggtgagaggtgagtggggaaagtatagttataagccaatcaccactccacagtgaggtgttgggacttttgtggaccaccttgattaagatagaaccagatatgttgtgggtacagttgtgaaggaaaatgaagggaggtcagaagtctaatgctggagccacctgaagaccctgactagcagctagtcatgcagacctcaatgaagtctctccctctcattgtctcttcaattttctcccctttccctcttctatcttctcagtcttttcccctcttctttaaccctctgcatcctcactgcccatagtgctcccagaaacaacaataaagcctaccagactccaacatttcttaatgggcccatgagttacagcctttgttgaaacttattgctaagaagaatgttggtgattctttggtacaacctcttcaatttgtgaatggagaaatggaggtccagaaaggagacatgattgtccaggggaaaaaaaaaaggtcatagagctagttagcggtagaattcaaacagatccatgtcttctgactttctctattagcctgcatctactgtgctatgctccggtcacaatggggaattctcatactttgcatgctttgaggggtaaattgtacactcttcacgtttggttcctacaaccactttgtaagaaggctatagccattagttcatcatgtgtgctaagttcaaaragaaggaatgtgctttgcttaagaatgcgagtttcaccagaaaggaagtagaaatttataaaataggaaagttcaggtttacat

SEQ ID NO: 549091 - DNA, 1237 bp, Homo sapiens
ggcaatgatggtgattatgagtgacttctttagtaggtggatgggttggagtggtttatttagtatactaatgtcatcatgacccccaaactacttaactaccttgtcagtcttttttcctttccttccttttcttttcttaccttcctacccttccttctttccctttcttcccttccttcctccactactctctttctttctctctctctttccttccttctgttgcagtgtctgttcattttcatcacgttcactttccatcatcacatttctcactgtcctttccatctcactgtcgtcaacatttcacatttcacatttcctttcctttcttttccatttcctcctttcctgcttcctccttcctccttcctcctttcctttccaacagactctcactctgatgcaccaggctggagtgtagtggtacaagcatgactcactgcagcctcaccttcctcagcctcccagttagctgggactacaggtgcacaccaccatgcctggctaatttttgtctttttggagaaatagggcttcaccccgttgaccaggctgatctcaaactcctgggctcaagtgatcctcccacctcagcctcccaaagtgctgggagtacaggcataagccaccactcccagccgccagtcctttcttaaagagaaaaaggaccaaaagtgagcaaaaataacttattaatacctctttagcagccgggcgcggtggctcatgcctgtaatcctagcactttaggaggccaaggtgggtggatcacctgaggtcaagagtttgagaccagcctggccaacatggtgaaacctcatctctactraaaatacaaaaattagccaggtgtggtggcaagcacctgtaatcccagctattcaggagtcaagtttgcagagaattgcttgaacccaggagggcagaggttgcagtgactcgagattgcaccattgcactccagcctgggcaacagagcaaaaactccatctcaaaaaaaaaaaaaaaaaagcctcttcagttccttttagcttcctagaaattatgatgattgatgatcataatgatgatcatcatcattgatgatgataaatcaatgaaatgttaattcttgggtttatatttttagataatttttttctatttatctattcatgataaatcacagaattatgtatttgtgtgtgagcacaaatctctcaagtgggtaaaataagaatgttggcaagtt

SEQ ID NO: 549092 - DNA, 641 bp, Homo sapiens
tggtctgttagccaagataagggagataattagtccggtaattgacaggttgaagttgtggcaactgtagaaaatctagatggaaatttcctgttggacggatggcactcaaaccaaactcaagatctgagatacagctaatcaatttggattattatctatcttagtccaattgggctgctataacaaatatatcatagacagggtggtttaaacaacaaacatttatttctcacagttctggagactgcagggtgccatatagttgagttctggtgagggcctgcttcctgrttcgcagaaggtcatcttctcactgtgccctcacgtggtggagagacaagagagctctctgcagtctcttataagagcactaatcccatacctgaaggtttagccctcatgacctaatcatcccccaaagtctccacctcctaataccatcacagtggagattaggtttcaacataggagttctgaagggacacaaatattcagcctttagcagtgtcctttaaaatagaaaagcaaaatgaaccaagcacacatgcctgaaaaaaaacagttagttgccaaggtgtagttaacgtcattggaaggggttcatccactgtcctcccacatattttcccaccctaacc

SEQ ID NO: 549093 - DNA, 411 bp, Homo sapiens
atgtctgggatgaggacacagtgggacccggccctcctgccaagacccaatgggttactgctctgacagggcagaggtcccaactccttttattatgatcatggggcagaaattgtgatgccgtggggccatgcagtcacaactcttatgccattcagacatyaaggacaagggttttccagttctttaatagaaacaaacaaatcaaagcagagtgatttctaaacagagaaagaaccctgatacggagtgcaaatcaaggagagtgatttctaaacaaagagagagtcttaacgtagcgtgtgtgcgggcaagaaaagaccatggacgtcacgggttgttacatatgctcactggagaaggcaaagtcacggtgggtgtggtcatgggaacctaggactgttgaaagat

SEQ ID NO: 549094 - DNA, 1017 bp, Homo sapiens
tgagaaaagcaggctatgagtttagtgagttgacattttgttctgctcagctggggaaggctttctggtgtagaaaagccaaatttcttaagtgattcgtatgttctatggttgataaaamtaactatcattggactttttttttttttttttttttttgagatggagtctcgctctgtcgcccaggctggagtgcagtggtgcaatatcgggtcactgcaacctccgcctcccgaattcaagtgattcacctgcctcagcctcccaagcagctggaactataggcgtgtgccaccacgccaggctaattttttgtattttcagttgagacagggtttcacagcgttagccaggatggtattgacctcctgaactcgtgagctgcccacctcggcctcccaaagtgctgagattacaggcgtgagccaccgcatccggccgtatccctggacttttttttttttttttttttttttttttttttttttttgagacggagtctctctctgtcccccaggctggagtgcaatggcgcgatctcggctcactgcaagctccgcctcccgggttcacgccattctcctgcctcagcctcccgagtagctgggactacaggcgcccgccaccacgcccggttaatttttttttgtgtgtattttttagtagagacggggtttcaccgtgttagccaggatggtctccatctcttgacctcgtgatccacccgcctcggcctcccaaagtgctgggattacaggcttgagccaccgcgcccggcctccctggacttttattgacagcaatagctgcccccaatttaacagttaatactgcctttgctaccaataagctgtctaatcctgtgccctcagttacatctaactttaatgagggaattatttcaccgatttaaactctgcatgaaaacgattcttctttattagtattttatttacttaattttatgcatacaaaatattttcagcttaaccagaccagggtgctctactctttgcc

SEQ ID NO: 549095 - DNA, 1017 bp, Homo sapiens
tgagaaaagcaggctatgagtttagtgagttgacattttgttctgctcagctggggaaggctttctggtgtagaaaagccaaatttcttaagtgattcgtatgttctatggttgataaaaataactatcattggactttttttttttttttttttttttgagatggagtctcgctctgtcgcccaggctggagtgcagtggtgcaatatcgggtcactgcaacctccgcctcccgaattcaagtgattcacctgcctcagcctcccaagcagctgraactataggcgtgtgccaccacgccaggctaattttttgtattttcagttgagacagggtttcacagcgttagccaggatggtattgacctcctgaactcgtgagctgcccacctcggcctcccaaagtgctgagattacaggcgtgagccaccgcatccggccgtatccctggacttttttttttttttttttttttttttttttttttttttgagacggagtctctctctgtcccccaggctggagtgcaatggcgcgatctcggctcactgcaagctccgcctcccgggttcacgccattctcctgcctcagcctcccgagtagctgggactacaggcgcccgccaccacgcccggttaatttttttttgtgtgtattttttagtagagacggggtttcaccgtgttagccaggatggtctccatctcttgacctcgtgatccacccgcctcggcctcccaaagtgctgggattacaggcttgagccaccgcgcccggcctccctggacttttattgacagcaatagctgcccccaatttaacagttaatactgcctttgctaccaataagctgtctaatcctgtgccctcagttacatctaactttaatgagggaattatttcaccgatttaaactctgcatgaaaacgattcttctttattagtattttatttacttaattttatgcatacaaaatattttcagcttaaccagaccagggtgctctactctttgcc

SEQ ID NO: 549096 - DNA, 1017 bp, Homo sapiens
tgagaaaagcaggctatgagtttagtgagttgacattttgttctgctcagctggggaaggctttctggtgtagaaaagccaaatttcttaagtgattcgtatgttctatggttgataaaaataactatcattggactttttttttttttttttttttttgagatggagtctcgctctgtcgcccaggctggagtgcagtggtgcaatatcgggtcactgcaacctccgcctcccgaattcaagtgattcacctgcctcagcctcccaagcagctggaactataggcgtgtgccaccacgccaggctaattttttgtattttcagttgagacagggtttcacagcgttagccaggatggtattgacctcctgaactcgtgagctgcccacctcggcctcccaaagtgctgagattacaggcgtgagccaccgcatccggccgtatccctggacttttttttttttttttttttttttttttttttttttttgagacggagtctctctctgtcccccaggctggagtgcaatggcgcgatctcggctcactgcaagctccgcctcccgggttcacgccattctcctgcctcagcctcccgagtagctgggactacaggcgcccgccaccacgcccggttaatttttttttgtgtgtattttttagtagagacggggtttcaccgtgttagccaggatggtctccatctcttgacctcgtgatccacccgcctcggcctcccaaagtgctgggattacaggcttgagccaccgcgcccggcctccctggacttttattgacagcaatagctgcccccaatttaacakttaatactgcctttgctaccaataagctgtctaatcctgtgccctcagttacatctaactttaatgagggaattatttcaccgatttaaactctgcatgaaaacgattcttctttattagtattttatttacttaattttatgcatacaaaatattttcagcttaaccagaccagggtgctctactctttgcc

SEQ ID NO: 549097 - DNA, 1017 bp, Homo sapiens
tgagaaaagcaggctatgagtttagtgagttgacattttgttctgctcagctggggaaggctttctggtgtagaaaagccaaatttcttaagtgattcgtatgttctatggttgataaaaataactatcattggactttttttttttttttttttttttgagatggagtctcgctctgtcgcccaggctggagtgcagtggtgcaatatcgggtcactgcaacctccgcctcccgaattcaagtgattcacctgcctcagcctcccaagcagctggaactataggcgtgtgccaccacgccaggctaattttttgtattttcagttgagacagggtttcacagcgttagccaggatggtattgacctcctgaactcgtgagctgcccacctcggcctcccaaagtgctgagattacaggcgtgagccaccgcatccggccgtatccctggacttttttttttttttttttttttttttttttttttttttgagacggagtctctctctgtcccccaggctggagtgcaatggcgcgatctcggctcactgcaagctccgcctcccgggttcacgccattctcctgcctcagcctcccgagtagctgggactacaggcgcccgccaccacgcccggttaatttttttttgtgtgtattttttagtagagacggggtttcaccgtgttagccaggatggtctccatctcttgacctcgtgatccacccgcctcggcctcccaaagtgctgggattacaggcttgagccaccgcgcccggcctccctggacttttattgacagcaatagctgcccccaatttaacagttaatactgcctttgctaccaataagctgtctaatcctgtgccctcagttacatctaactttaatgagggaattatttcacygatttaaactctgcatgaaaacgattcttctttattagtattttatttacttaattttatgcatacaaaatattttcagcttaaccagaccagggtgctctactctttgcc

SEQ ID NO: 549098 - DNA, 638 bp, Homo sapiens
tgcaacggacctgaataaagtcgtttcaccattatttaacaaggatcaatggataattattttttaaaaatttcttttgtggaggaccatatttttcttacttcgctattcctgaaatgcttccagcctccaaatttgagaaatatttaatasatattcctaagtttaagaaaatgctcaagggccgggcgcgttggctcacgcctgtaatcccagcacgtggggaggccgaagcgggcagataaggaggtcaggagatcaagaccattctggctaacatggtgaaacaccatctctactaaaaatacaaagcagttacccgggcgtggtggcaggcacctgtagtcctagctactcgaaaggctgaggcaggagaatcacttgaacctgggaggcggagcttgcagtgaggcgagatggcaccactgcactccagcctgcaatagagcaatactccatcaaaaagaaaaaaaaaagctcaaatatttcatatgtcataatgaatttatctaggagaggattcacaagaagaatatattactaagatgatgaattgcctattattattattataatgtagcagcaggttcattgtgtacagcaatgatctacaaccaagtcattatatagagcccagt

SEQ ID NO: 549099 - DNA, 1014 bp, Homo sapiens
agtgggagttaaacattgggtacacgtggacacaaagacaggaactatagaaactggggactactagaaggggaagacagagagtgggaaatggttgaaaaaaatacctgttgggtactatgctcaatacccaataacaagatcaaacatatcccaaacctctgaaccatgcagtgtatcatgtaacaagcctgcacatgtacctcctgaatataaaataaaatttgaaatcaaaaataaaataaaagatatttagggcatcctttactatgccacagtgtctaaacgtgttaaaatgcattttattaagaaagatttagaaaatacataaaagtgcaaagagtgatgtacttgcattctccaccaaccatgtgatcaatctatgtatgtatgcatttgtctgtcagtatatttatctttcttcaaaattcatactggtaaaacactgatgaaagcccagtaaggaaaaaaatttaccgaaatattaaaggattagaaaatttaactcttatctgaggtgaaagcagcactctgtcatcatmatcttctggtttagaaacaaccaggggtgctcacaaggccagactgatataggtacttgctcacaggcagaaaggctagagggtctgggcctgctgaatcaggcattggttgtcttattctgggtaacattcttttcctcttccatagtaatagtctttggtaatcagtctttgttacaaatgatctttgtctttaataatttccatgaaaatgcctgacttattgcaccaagctaagaggattggcaaataaacacagacagggccaatagtctttgaaactgaatcttgagctcaggaacaaggagagaagacaattgaaacttattttaatgacaactcctaaaaacactctgttaattcctactggcttgttttcttgagcccctcaaaatttttagttagtttttatccctccaacttttgttattttttcttaagtcagccagcattgcctaaatccaagagacta

SEQ ID NO: 549100 - DNA, 1014 bp, Homo sapiens
agtgggagttaaacattgggtacacgtggacacaaagacaggaactatagaaactggggactactagaaggggaagacagagagtgggaaatggttgaaaaaaatacctgttgggtactatgctcaatacccaataacaagatcaaacatatcccaaacctctgaaccatgcagtgtatcatgtaacaagcctgcacatgtacctcctgaatataaaataaaatttgaaatcaaaaataaaataaaagatatttagggcatcctttactatgccacagtgtctaaacgtgttaaaatgcattttattaagaaagatttagaaaatacataaaagtgcaaagagtgatgtacttgcattctccaccaaccatgtgatcaatctatgtatgtatgcatttgtctgtcagtatatttatctttcttcaaaattcatactggtaaaacactgatgaaagcccagtaaggaaaaaaatttaccgaaatattaaaggattagaaaatttaactcttatctgaggtgaaagcagcactctgtcatcataatcttctggtttagaaacaaccaggggtgctcacaaggccagactgatataggtacttgctcacaggcagaaaggctagagggtctgrgcctgctgaatcaggcattggttgtcttattctgggtaacattcttttcctcttccatagtaatagtctttggtaatcagtctttgttacaaatgatctttgtctttaataatttccatgaaaatgcctgacttattgcaccaagctaagaggattggcaaataaacacagacagggccaatagtctttgaaactgaatcttgagctcaggaacaaggagagaagacaattgaaacttattttaatgacaactcctaaaaacactctgttaattcctactggcttgttttcttgagcccctcaaaatttttagttagtttttatccctccaacttttgttattttttcttaagtcagccagcattgcctaaatccaagagacta

SEQ ID NO: 549101 - DNA, 1158 bp, Homo sapiens
tcatctacagsaaggactcctgcctgcctgcctgctctgtgggtttcgttgtaagggtctgatatagctctgtctgcccttggactcttccaggacccttttaaaacactgcagccccctaggctctgtccagatgctcttttttatttattttatttttatttttatttttatttttgaggcagggtttcattttgtcacccaggattgagtgcagaggtgcgatctccgctcactgcaacctcgaccctccaggctcagggatcttcccacctcagcctcccgagtagctgggaccacaggcacacaccaacacacccagctaattattttattttgtatttgtagagacagggtctcactatgttgcccaggctggtcttgaactctcagtttccagcagccttcctgcctcagcctcccaaagtgagccactgtgcccagccagaggctccagttccactggtgttgggtgaggcctagtgagagggtgggcagagggccttgttgaatctgaactgcagcaagggctcgcagatctcaaaggaggcagggaagtgtgctggggtcccgtcagcatcgcatgaactcagggatggctgcatttgaggccagggtcaggctgtcctcacttatcaggggacaagagctggctgatgccgattggaaaggatagaatcctagtgagctgccccagtcccggtaagcatgagtgcctgcatatcctcgctcttcctcagttccacccccttcctgggggtgtcacaggctcctggcagaaccagagcccatgccctgcatttgggctggcacatttagtggaaccagccagagaaatgctgtccctccttcctggggaagtggtggcaaacagaggcgccaaggctctctctgcccactgcccacatcatctctgggactctgcgggtgccctctgccccaaggctactgccagggactcaggtgtggctgggctttccagagcctccctcaaccctcccctcacaggctgaagtcagtacttcgtttgggggagcacacccagagccaggagcctgacttgctcagggcctagggaatgggaccaagagtgatccagcttcttctccagagctgcaccctgcacaaatccaccctctccctacgctttgccctgga

SEQ ID NO: 549102 - DNA, 1158 bp, Homo sapiens
tcatctacagcaaggactcctgcctgcctgcctgctctgtgggtttcgttgtaagggtctgatatagctctgtctgcccttggactcttccaggacccttttaaaacactgcagccccctaggctctgtccagatgctcttttttatttattttatttttatttttatttttatttttgaggcagggtttcattttgtcacccaggattgagtgcagaggtgcgatctccgctcactgcaacctcgaccctccaggctcagggatcttcccacctcagcctcccgagtagctgggaccacaggcacacaccaacacacccagctaattattttattttrtatttgtagagacagggtctcactatgttgcccaggctggtcttgaactctcagtttccagcagccttcctgcctcagcctcccaaagtgagccactgtgcccagccagaggctccagttccactggtgttgggtgaggcctagtgagagggtgggcagagggccttgttgaatctgaactgcagcaagggctcgcagatctcaaaggaggcagggaagtgtgctggggtcccgtcagcatcgcatgaactcagggatggctgcatttgaggccagggtcaggctgtcctcacttatcaggggacaagagctggctgatgccgattggaaaggatagaatcctagtgagctgccccagtcccggtaagcatgagtgcctgcatatcctcgctcttcctcagttccacccccttcctgggggtgtcacaggctcctggcagaaccagagcccatgccctgcatttgggctggcacatttagtggaaccagccagagaaatgctgtccctccttcctggggaagtggtggcaaacagaggcgccaaggctctctctgcccactgcccacatcatctctgggactctgcgggtgccctctgccccaaggctactgccagggactcaggtgtggctgggctttccagagcctccctcaaccctcccctcacaggctgaagtcagtacttcgtttgggggagcacacccagagccaggagcctgacttgctcagggcctagggaatgggaccaagagtgatccagcttcttctccagagctgcaccctgcacaaatccaccctctccctacgctttgccctgga

SEQ ID NO: 549103 - DNA, 668 bp, Homo sapiens
tttttttcttttccttttcttttgttcacactgcaaccatgacagatgaatagattgcctttattagcttaagaaagtttacttttctttatatctcgctatttttgataagaatgaatattaaattttattaatatacccctaatgcataaaatgaatatagtttaaacctagycaaatagtagaatatgtagacctcttagcttacaaagtaaaaattattcatttgaaaagttctttgtggatattttctttacttgttaacaatgttaaagaaacatgacatcctttacctgtaaagcctgtttcaattgctcctgaaggactttgttctcaatttccagacgtgctactttctaggaagtaagaagggggaaaaaaggtatttactttggtatttttaattaatttagttttaccagtattacttttccaaaacccatagatacccaagataagaattgagcatagacattgaactgcacatctctcaagtgtaatggtggataatacctgaagctaaagcttcctattgatttttcacaggcaaattgagcatgaatcggggaaattacaattgcagtaaatcaaacatttcatttctcctttcctctaggcctgaaatatttaaaaagaagaatttcaaattttactaaaagaagaacctc

SEQ ID NO: 549104 - DNA, 505 bp, Homo sapiens
gaaaatttcagacctgaacaacataataaatataattactaaaattactaaaagcaaactatatataagagaaactgaatttgtatagtaaaagacatattaatatgagttataaatctgaaaatctagaaagaatacaaatgtataaaattgattatgaggaattttgaaaaaagtgaaaatacatatccttttttcctcatagtaaaaggtattcctaggagaaagggagagagcagatggggcagaatattaaatgtcgaaaaattgtccaaaactgctgaaagacatgaactcagagattcatgaagaactgtagatcatgtgctgcatgaaaaaaaaaagaaaagaaaaatcacattgaggcacaccataataatattgccaaaagaaaacaaaaaaagagtaaactttgcaggcagccaggagaaaaaagagacttcctttcatgggrgaaaaaaataacaatgacaaataatttgtcaaaataaatgatgaaagaaga

SEQ ID NO: 549105 - DNA, 351 bp, Homo sapiens
attgccaatacagggctggttccacgaactcttaatggtgggccctgaaatttgaatttgcataggtttccacaagtatgaaatactwttcttctaatttctttttcaacacttaaaaagtaaaaaccattgtctgagggctatttaaaacaaaataaaacaagcagctggactagatttgactcacggagctgtagtttgcaaaccattgggctagatgttctctaaactccagctttgtgtctctgttgattaaactggtattgattccttatttagctaacactaggtttatacttcttttacactatcttgcacatttttctacagcctaaagcagtttctcaaact

SEQ ID NO: 549106 - DNA, 351 bp, Homo sapiens
attgccaatacagggctggttccacgaactcttaatggtgggccctgaaatttgaatttgcataggtttccacaagtatgaaatactattcttctaatttctttttcaacacttaaaaagtaaaaaccattgtctgagggctatttaaaacaaaataaaacaagcagctggactagatttgactcacggagctgtagtttgcaaaccaytgggctagatgttctctaaactccagctttgtgtctctgttgattaaactggtattgattccttatttagctaacactaggtttatacttcttttacactatcttgcacatttttctacagcctaaagcagtttctcaaact

SEQ ID NO: 549107 - DNA, 1610 bp, Homo sapiens
  misc_feature 1605: n = A,T,C or G
gtgtttacctttctcaccattccacaagttactttctccttcctttgttctcttctgccttcgcctcttttaaaaagttttaagttgcttcccaatcaggacaaatacagaatatgaggtcccgttccagccaatggaaaccrgacacagcagtagggtggacgcatcaggttacaaatgaccctgtctctttgttcggtgtactctcgtggcaaaactgctggcgaatgtaccctttctgcgggaagtaaaaatggccttgctgagtaaattaaatttatgttcaagtgctatttcttcacggcaccggggaacaagcatttcaaacactttcatgagagattatttaaaatagcacttctttacaccaggcgtggtagctcacacctataatcccagtactttgagaggctaaggtggaaggatcacttgagcccaggatccagcctaggcaacatagtgagacctcatctctgcaaaaaaaattttttttccatcacacacccattcattcaatacaaaaagtcttttaaaaattattcaggcatagtggcacacacctgtagttccagccactagggaggctgagatgggaggattgcttgagcccaggaggttgaggctgcggtgagccaagattatattactgcactccagcctgggtggcaaaacaagaccctgtctcaaaaaaataaaacagcacgtaagaattcaaggaacccacattttaatacaaattgttaatgaaaataagctttattacatcaagtaataaatacatacaaagatgcaaacagttttagtcattttcttccagatgtttttatcaacttacaataaacgcagaactgagatctacttacagtcttagtatgaaagtgttcgggggtccttgttaggtttggtgggttgctctttcttctgtatttataacttgtgcatttttaaaaattgactttgaagcactaatagtcatgcaaatgcttaagcaaaaaagaagttacattaagcagaacctacattgtatggcaaatgggaaccggctactaagtaaagcgtgctgtcaatatgcgttcaaaacaaaatccctacagtggtattagcttatgaaaaggaacaaagaacaccatgggtaacaaatgtatacaaaagagaagattaaagggagacaatggtgtcttggaggcaaactacagtttgctgtaagataactttccgtgcatcttttaaatcaatgcttaaaaaacaaaaaaaacctgggcagttcctaactacttaaaatgcaaatcctaattaactgcaaaatcttttctcaatctttgagactgtaggttcagagccaagtgaaccatgggaggaaaaacgaaactgtaaccattttgaaaacaagggtttcatctgaacaggggagatgaactgtaacttctcatcttgtaaaaagatggaaatccttcaaaaccaacaaggcagctaggatctggcattccgttccgtttctgccaagcactcccgaaccagtcctctagcgtgaatgatgccctgaacagaggcagagacctgaggtcagcaagtgcacaggaccagccagcaaagcccattctgaancagca

SEQ ID NO: 549108 - DNA, 1610 bp, Homo sapiens
  misc_feature 1605: n = A,T,C or G
gtgtttacctttctcaccattccacaagttactttctccttcctttgttctcttctgccttcgcctcttttaaaaagttttaagttgcttcccaatcaggacaaatacagaatatgaggtcccgttccagccaatggaaaccggacacagcagtagggtggacgcatcaggttacaaatgaccctgtctctttgttcggtgtactctcgtggcaaaactgctggcgaatgtaccctttctgcgggaagtaaaaatggccttgctgagtaaattaaatttatgttcaagtgctatttcttcacggcaccggggaacaagcatttcaaacactttcatgagagattatttaaaatagcacttctttasaccaggcgtggtagctcacacctataatcccagtactttgagaggctaaggtggaaggatcacttgagcccaggatccagcctaggcaacatagtgagacctcatctctgcaaaaaaaattttttttccatcacacacccattcattcaatacaaaaagtcttttaaaaattattcaggcatagtggcacacacctgtagttccagccactagggaggctgagatgggaggattgcttgagcccaggaggttgaggctgcggtgagccaagattatattactgcactccagcctgggtggcaaaacaagaccctgtctcaaaaaaataaaacagcacgtaagaattcaaggaacccacattttaatacaaattgttaatgaaaataagctttattacatcaagtaataaatacatacaaagatgcaaacagttttagtcattttcttccagatgtttttatcaacttacaataaacgcagaactgagatctacttacagtcttagtatgaaagtgttcgggggtccttgttaggtttggtgggttgctctttcttctgtatttataacttgtgcatttttaaaaattgactttgaagcactaatagtcatgcaaatgcttaagcaaaaaagaagttacattaagcagaacctacattgtatggcaaatgggaaccggctactaagtaaagcgtgctgtcaatatgcgttcaaaacaaaatccctacagtggtattagcttatgaaaaggaacaaagaacaccatgggtaacaaatgtatacaaaagagaagattaaagggagacaatggtgtcttggaggcaaactacagtttgctgtaagataactttccgtgcatcttttaaatcaatgcttaaaaaacaaaaaaaacctgggcagttcctaactacttaaaatgcaaatcctaattaactgcaaaatcttttctcaatctttgagactgtaggttcagagccaagtgaaccatgggaggaaaaacgaaactgtaaccattttgaaaacaagggtttcatctgaacaggggagatgaactgtaacttctcatcttgtaaaaagatggaaatccttcaaaaccaacaaggcagctaggatctggcattccgttccgtttctgccaagcactcccgaaccagtcctctagcgtgaatgatgccctgaacagaggcagagacctgaggtcagcaagtgcacaggaccagccagcaaagcccattctgaancagca

SEQ ID NO: 549109 - DNA, 515 bp, Homo sapiens
ttaaataggccctcctgctccaattccttgatttgatagctatagatacctgttcctctgttttgaggacagttggagaagcaggggctcagtaggcatgagagttgctctgtgtttgctagcagaagcacatataatcagcagtgtgggrtctgccctccctggaccagtctttatagatgttctcacagcatgcaattctcaccactagcagaacatgcctcagtcagtgactaattgaatctcatctgctttgtcactcgctgggtgattgcagtctttcccttgaatttatgacagattctggccaaagagctctttagaaattgggggatttggggcattttaagagaattaggctctgggtctacacagggttggagacctgacatccttcccagttttcatctctacagatccaacaaaacaatagtcaattaagtgaacaaccaggcttcctgctttatttgggcactgtttccatcattgaaggacttagcagactgaacaatttg

SEQ ID NO: 549110 - DNA, 515 bp, Homo sapiens
ttaaataggccctcctgctccaattccttgatttgatagctatagatacctgttcctctgttttgaggacagttggagaagcaggggctcagtaggcatgagagttgctctgtgtttgctagcagaagcacatataatcagcagtgtggggtctgccctccctggaccagtctttatagatgttctcacagcatgcaattctcaccactagcagaacatgcctcagycagtgactaattgaatctcatctgctttgtcactcgctgggtgattgcagtctttcccttgaatttatgacagattctggccaaagagctctttagaaattgggggatttggggcattttaagagaattaggctctgggtctacacagggttggagacctgacatccttcccagttttcatctctacagatccaacaaaacaatagtcaattaagtgaacaaccaggcttcctgctttatttgggcactgtttccatcattgaaggacttagcagactgaacaatttg

SEQ ID NO: 549111 - DNA, 1503 bp, Homo sapiens
ggaggatttctgattttagattttccgattagggatgctcaacctgttcttctaaaagcttagctaactatatgggtcctcttcagtttaaaacatggattatgtgtccttcagcatgttccattccacctcacatgagtaatgctctgggaggtgtacaagcttatatttcacgctcttaagatctactgatcaaaaatctagcccgaaagtccatgagggcaaggattatgtcttatacctctttatagccctctttgtgcttggcattgttcattttaccctgaacttactcaataattgagggacagagcaggatttatacttaggatgctggacccagagtttatacctgggtcactgcccctaggctgggatggagccaggttttcaccagccagtctagacaaggaatgaagtctcatctgtagatacagtgaaacccctttgtcctaccataagctaattaatgaaatgaaactttttgaaaattaatagaatttagatgcaataccagaatttatagtataaataattaggataaaaacataactttttaactcacgaagtgcatatggtgtggcagagattgttcggcaagtttgctgcttcacttgtctttgtttcctaaagataaatttagtatcatgcaagaaatgcacattacatcctttcggtgcaataatatttcacataaatttgatttgcctgaagccaatactgtaaataaagcaaacatattctgtgtttcattttttaaaaagagtgatgaacgcagttcctgggcttatttaagcttcctgcgttttataactttttcagtgggatgaattagcatgatgtggtgaaacaggctggcagatgccagaggaaattaagacttcctgggcatacaagtaagagaactccacatatagcagagaaataagaacaatctgattttcaaagcagttgctaatcttatttctgctcatatctactctacatgtttctcctgatgtgaaacttttatgaagttccagttttagggttcactgaagaaaagactgccaataatcctgaaccctgccatattttatcaaagcttagacagacaaatggtcataaggaactgaaataaaaggaatttagtatctcagtggactgctgtaagtaggattcctaacccaaagaccaaatactgagaagtcaaacgtaaatatgtrtgtgtttgcatgtatgcgcatagacatatatgtgcatacgcatatatgtgtacgtggagagaggaagaaacgaagaagaaagaatgagagaggggtaggggagattcagagactaaattgggaagagtaaaagtagaagagtagcttcaaatagatttggtctgaaggctaatttgtgaaagtacaattagagaaagacaatgactgcaattataaacctcattatctttaacagttaagcaattgttaaaagacacaaaaagtaatttaagctttatgtgctatcaaccatgcaaaa

SEQ ID NO: 549112 - DNA, 1503 bp, Homo sapiens
ggaggatttctgattttagattttccgattagggatgctcaacctgttcttctaaaagcttagctaactatatgggtcctcttcagtttaaaacatggattatgtgtccttcagcatgttccattccacctcacatgagtaatgctctgggaggtgtacaagcttatatttcacgctcttaagatctactgatcaaaaatctagcccgaaagtccatgagggcaaggattatgtcttatacctctttatagccctctttgtgcttggcattgttcattttaccctgaacttactcaataattgagggacagagcaggatttatacttaggatgctggacccagagtttatacctgggtcactgcccctaggctgggatggagccaggttttcaccagccagtctagacaaggaatgaagtctcatctgtagatacagtgaaacccctttgtcctaccataagctaattaatgaaatgaaactttttgaaaattaatagaatttagatgcaataccagaatttatagtataaataattaggataaaaacataactttttaactcacgaagtgcatatggtgtggcagagattgttcggcaagtttgctgcttcacttgtctttgtttcctaaagataaatttagtatcatgcaagaaatgcacattacatcctttcggtgcaataatatttcacataaatttgatttgcctgaagccaatactgtaaataaagcaaacatattctgtgtttcattttttaaaaagagtgatgaacgcagttcctgggcttatttaagcttcctgcgttttataactttttcagtgggatgaattagcatgatgtggtgaaacaggctggcagatgccagaggaaattaagacttcctgggcatacaagtaagagaactccacatatagcagagaaataagaacaatctgattttcaaagcagttgctaatcttatttctgctcatatctactctacatgtttctcctgatgtgaaacttttatgaagttccagttttagggttcactgaagaaaagactgccaataatcctgaaccctgccatattttatcaaagcttagacagacaaatggtcataaggaactgaaataaaaggaatttagtatctcagtggactgctgtaagtaggattcctaacccaaagaccaaatactgagaagtcaaacgtaaatatgtgtgtgtttgcatgtatgcgcatagacatatatgtgcataygcatatatgtgtacgtggagagaggaagaaacgaagaagaaagaatgagagaggggtaggggagattcagagactaaattgggaagagtaaaagtagaagagtagcttcaaatagatttggtctgaaggctaatttgtgaaagtacaattagagaaagacaatgactgcaattataaacctcattatctttaacagttaagcaattgttaaaagacacaaaaagtaatttaagctttatgtgctatcaaccatgcaaaa

SEQ ID NO: 549113 - DNA, 1191 bp, Homo sapiens
actcgctgcattggtttgctagggctgccataacaaagcactacacactgggtgtttcaagcaacagaaattcattgactcacagctctggaggatagaaatccaagatcaaggtgttggcaggattgattccttctgaggactgtgagggagaatctgttccctgtctctctcctagcttctggtagtttgtggcacctttaatgtttgttggcttgcagttgcatcatcccaaacttcagatggcattctccctctgaatgtacctgtctctgtgtccaaattccccctttttgtaagaacaccagtcatattggattagagcccaccccaatgacctcactttaatttgatcatctacaaagaccctatgtccaaataggtcacattcacaggtactgggggtcaggactttgacatcttttagggaaacacaagttaacccacaacagtaacttaataattcttagactagtggttctcagctgatggtacattatcaattgtggaatgtgaagtttactagattaaatgaamatttttcataaaatttattttcatttgttttctcctatttccaccttaacaataaaatatatccccaataatagtactgaaacttactgtttttgtgttttccaagttatcataacatttaaatgtatactccaaagtattatttcaattttaaaaaacagtaatagagttattattttggtttgtttgtgcattatagtttagcagaaactcccaacaagataactgcaatggtataaattatattcttataattgatatccttataattataaccttacaatttttatccttataattttaaattctttaaaaggcataaattatatctccaatagtagaatgcctctaaacatataaatatccttctagaaaaaaagagatttgctatttgtcatggtgggatccaggttctctgatagaatcaatggtgagttccaatatttgaaaagtaatttataagggcattaccttaagcattgcccacttggtccataactagaactgatgtttcaggacatgagaagctgctctacattacgtccttacttctgtttttccttgctttaaagaagctagaaatatttgaggactatgcaaatactgaacaccatggggattttgttgtaattgttttttaattacttttgagag

SEQ ID NO: 549114 - DNA, 662 bp, Homo sapiens
tgacctggcaaggcaggagttgcagctgggaccacatcacagacctgggaaggctatttgattttatgcaacatgtgtcatcccagaaaccccaaaccaacacattagcttaaagtggtcccagaatgaaaaaaggctgagcttcctgacaaaggcaagtcttaatcttccatgtaggatggcttcctcccaagattctcacatacaaagtcccagtaaccatgacttcacaatccaaacttgcaaaatacatgaaaaaacaagactcacccagacaagggtcaacagaaacaacagcaccatacggaattagactgccaagaatttcagatatcagaattactggatataaactatgaaataactatgtttgaaataggtcaggaataaaagatagaacagcaaacaagacaaaagaacaaaagatcaccttattttttaacattatggcagattccatacactaaatgatccactgattgaaacaactaaatgctggatacaatataaagaaaatatttgagcacattctcgcactagcacaaaagcaaagaatctgcaggtcttcaaaactcattgaacattgaaaccctacaaggagartgacaccaaaaccagcagctattgccctgaagatttctgctgttcctctagacaagctg

SEQ ID NO: 549115 - DNA, 645 bp, Homo sapiens
tgatccgcccaccttggcctcccaaagtgcttggattacaggcgtgagccaccgtgcctggcctgatagagtggtttttatctggaatgttacagatctcacggcagaggagaaagggataatattaagccatggactctctcttcgagctcagaggagagcgttacttccacttgcatttcattgccaaaggaaaccacactgccaagtctgcctcctgtgaggaaaggaaaaataaatctctcacagggaagaagagaaaatatttttgaacaagagtaaaaaatctaccatagtacctagtaaatgtgaatgaaattcaacttagcattattatttagctccacaccccagacttttctgccatgaaggtggggtgaggtaggatgatgtggctacaggatagggaagagagctcactcttgtgtataatatttgcaaagccaatatgtatgctcatctttctgttttctgtttgggcacatttacacctgggagcggtgagaaaakcttcagtgctggattttccttgctcatgtataaggattatccttctcctttgccagggtcatgactgggaagagtccagctatcctagcaggaatagtgaatagtaactttctgattcttccatctccagggctg

SEQ ID NO: 549116 - DNA, 798 bp, Homo sapiens
tcacctgattgttttccagctgttccatattaaaataaattgcacacatttaaaagagccagtaaacagggtagtaatgattcgtatgctctcacatcttaatagtaaactttgtacagaattattttgggtataaataaggcagaaagcacatagagaaattccactaataggttcagaaagtgagaaaaagcctgtatgaaaaacatatgtatatattatttacatataatttttgtatattaatttatatgtataaattatacatatgtatatatatatacacacatatatatatatatatatatatattttttttttttttttttttttttttttttgagacagagtttygctgttgtcacccaggctggagtgcaatggtgcgatctcagctcactgcaacctctgcctcctgggttcatgcaattctgcttcagcctccccagtagctgggattacaggtgcccgccaccacacccagctaatttttgtatttttagtagagacagggtttcaccatgttggtcaggctggcctcgatctcctgacctcaggtgatctgccctcctcagcctcccaaagtcttaggattatggacatgagccactgtgcctggcggagaacgatatttttaactatctcttttatgcaaggaaatataacagttatataaaacagatacattctttttttaaatttcaacctttactttagatacaggggatacacatgcaggtttgttacatatatacactgtgtgatgttgaggtttggagtatggatcctgtcacccag

SEQ ID NO: 549117 - DNA, 608 bp, Homo sapiens
aatccttaaatggtccctatggtttccaaaattactaaagaaagaaacgyttccccaaagtcattgtaattggctgtggtgaatgatttttgttcatggatcaagatccaaaaacatatgaaaaaaatgcaagcaaggttatggtgaagtgattctagtttctataatgtaccattctactggtgttccaacccaaatggattctttgaaagagaatggtgcaaagcccaggagtttcctggtgaggttcaatcccagtgtgagaaggatacaggcaatcagaaacaaatattacaaaattaattctataaaagagaggacaaggagctgctatacaatttccacaaaagaaaaagtcacatgctaagcaagaggatgcaagatgaaactttagtcagcaccccccaacttgtaccttatttgggctcttggcaaaatctgacactttacaatgccctctgtcttcgaattttctcttctcttgaccttcacaatagcaatttcctatctgggttcctactctgttagctttctgcctggaaaatttgattctttcagggacctagatcctcttttcttcccattctgcggactctcccaggaatatc

SEQ ID NO: 549118 - DNA, 534 bp, Homo sapiens
tcctgaaccctggaggtggaggttgtggtgacccaagattgtgccattgcactccagccggggcaacaagagtgaaactctgtctcaaaaaaaaaaaaaccaaaaaaacaaaaacaaacaaacaaacaaaaaaaactagccaggcatggtggcatgtacctgtaatcccagctactcaggaggctgaggcaggagaatcacttgaactggggaggcagaggttacagtgagccaagattttgccactgcactccagcctgggtgacagagggagactctgcctcaaaaaataaaataaaataaaatagataaaatataaaataaaataaaattcgttacggactaaacatccgttcttgcctgactcagggtggaatcctcctaccctcctacctttgttatgctactgccttccttacaaacccctgttaaagatcaagtggaataatatttttaagggtctcaaattcaaayactgtcagggttcagataggcaagtgtgcgaagtggtgtaggtcactgggagtggtgcag

SEQ ID NO: 549119 - DNA, 1524 bp, Homo sapiens
gtcactaggaaagaaaagaaaaaaaatagagatcctctagaggtacagatttagagctagcaagattggtcaagattcatattaattatgaaaataatttgaatctgaaatgtctcagggagactgccaaaatcagagtgaggtaagtgcctgaatgaggcacgtataccagaggctacagcagagaaggaagaacagctgaataatgaaaaggagccataacatagaagagacaaaccaaaagagtgtcatgaattttataaagaaggtcatcaacatcaccatatgttagggaaggagatcttccaatgtgagcatgaagaagagaagcatgtgctttaaccagaactggtatattgtgtgactcatggtcagctcatggtcatgccacaacagccataatcactgcttgcggtcaaccactgctagtctgttttctaacctcatctgtaattgtcaagtctaaaaccaatctgccatgttcttattaggaaatctctagcatcagaattatcatgctgactgtcccaatgaaattaagtactaagtatatattatgctattttctctcttaatgacttccctgaataatgaaacaaggagagaagaatggcattctttttaaataatctatctcaaatatgcaggcattcaaatagcttttggtgggaagagggaagatgcaaaaaaattaaaaatccctagctgagcactgaattttttttatcagtgtttatctactcgcaaatcacttgtcttctccaccctctatcaaatctcttgcttctcaagtttttccaagtgtcattagatatctcaagaaaagtgaaaagataaataactgttatattagtggacatttagagcaacttatctgcctggtgtgattgttcagtttggctaccaaggtcactgagaaacactaggtcttgcttgggttggcaccagctgaacaggcaagcaacataaactatgggtgagaatagaycagcgttgtgctcagtcccagaggacaggcaaccggatggttctgcctcgccagatgaccagccatggacataactctaaataggaaagtgtgtttctcagccttccccagagatactgagatcaatgttccatggacaagcccactgaactgtcattagagcagatggaagccagagttcccatcctccacaggcttcagagttattaaagtcgttctttgggttagtaagacttgaaactctcagtcgtctctatatcctgctcaagccctatctggttggcggggggcgggggggtggggtgaatcacaaaagtaaattaaaatggaaacatttcattaatttaaatagaaaatctgtggtgttcctgctctatacatatagacacccctcaaaatccccatctctttcaatgctcccaatgtctgttcattcttttttctggatgccattagttggttttatcttaatatttcctttattctaggatgcagccaagttagaatatccttttccaattttaaattctaaagaa

SEQ ID NO: 549120 - DNA, 2016 bp, Homo sapiens
acttgaattgtaagaagaggaaatctcatatattcttaaaaagctaccctcctgctcttagaaaagctgcaaatttgttttggaagaaaagagaaaaaaaggaatctttgtcttaaatattatatgcctttgaagaggtaaagattaatcataataatattaatagtaataacaagaacaactaccmtttattatgggttaactgtgttctacccattctctgcactttagagatttgatcacattctttcctttctgtccaacagtttactgtgaatccttgttttcttttttaatgccaaagtgagacttacaataagcaaattacccaactttaggtagcaaataagtggggagccagtaatctgaactgtttgtcctcaaatcaaaaaataaaagaaaaacaaaacacttctttggttaaatctgtcatcctccaaattacttgattatggaaaacttcgtttctctccatctcaatactccatattaacatcttgtagagttagtgtcccatggaacactattcagaacataaaatttgcttttaacttgttcattttgaataaaagtaaacagatgaagatataataggttatttgttcaagctcacaaagttacaaacagaaaagcagacacagtacctaggacacagtatgcgtttaggcatttagaatatatgtttttatctctttttaatttttttaacctcagtctagcaccttcccactataataaaactgtccaaaaataaataaataaataaaagctgatcataaggacttcggattcatttaaaggattttatcttcataacaacaaaagataactttattatttgggatcctattatttcctacttatgtatctaggtccttttatggatattacttaatttaggttttaaaatgattctatataacagtcattatttttcttcatttctcaagtaagaatactgaggccaaaatatattattgtcagaagaaataatttataagtaaaacttttttcatttcaactctgatttgactaaattgtattttgtaatcattaagagctaagaggtagaaagtgagtttgagagtaagagcaaaagttagaagagagacaagtaggaaggtttttccctaaatgggtaatttcctgtctttagataaagtaccaaagtaattaacctctcagcagatacagacaattgcaagagttgttaacacagagggcatactgaggcattatatgtaagactcatgatgttttacatccttagaatggagtcaggaaaacttaaaattaagaaaatgaacaatagtaattaaacaaaattgaaatgaaaataaggtcccatttagtggaatgtgaaggactcttgaacacctgcaggtctgttttactagttcatatttcctcagttcttagcacagtgcctaggacttgccggacattaaaatatttgttattgcttcatttttaacaatttttcttcatagagggcattttgtttggttttgttcattaacgtgttcttcagtaacctttgagagatacacgtgtaatacaggaatactaaatactactactaatattaataataaaataataatggaacatatagctttattctatgtgtgcattaactgttgattaagatcctttatgttcaaaatttctgacacttgttaaagcagtaaagaagactttattcgggactattgtgatagctgtctatagcaatagaaaagaagcattgggatcaactgtgaatacaagaacaagtgagaatttgtggccagggagcagcttgggaaagttggtgggatgaaaattactaaaaggacataccaaggatagagacattgttgctcaactgacctaagagaaattttgttgaaggcaggcagagttatcagagacagagtttaataagatttacaggttcttcggctatcatggcaggattccctgtaaaccttcttagcaggttctttctaaaactgggctatgcagacccaggaa

SEQ ID NO: 549121 - DNA, 539 bp, Homo sapiens
gcagtcagtacacacaggaggtgacaagcagactatttggaaaccaaaaaatatcaaagatgctgtaggagaatgtacaggaaaactttcaagtgtataagttgaaaatgatgcagaaatgtagaggctatatgacatgtctttgcatatttagtaccattaattgaaaatttagcacattccaagagaacgtgttcttaatcaaacttcaaaactgaccmatcaaagtcaatagggcaaagcaccaaatacctgtggatgtactcctgggaactaaaaccaaaatacttttggaggttgcaaagctgctgtactgtgccaatgtcctttcttatacatgtacatatgtgatgacggcttgagtcagctgcagggcagggggctcaatgagagctttgtaaagacagctcttcacttcagctcattagctttggtaataggcaagtttgtttcccattataatttgatcattcttgtgattaattcaatgccagttcttaaagaactcttttatttctgtatatgaagctgatgtttac

SEQ ID NO: 549122 - DNA, 560 bp, Homo sapiens
tcataatttgccatgtcccatacaaacacatacattgtgaatgtgggcgcctattgtaaaccrtaaagtcctaaacagatgttgatgaatgaggacttgtgatttaaattgcaaatacacagtttcaggaaactggctcattttgtggagtgttacaaggtgctttacaggttgggttaggtacccttttattagtaaatactggctgctaatgagattagtgtttgtcctctaattccttttctgttttttaaagaaatcttttgcaatactgccaccaagtctaaagttcccatattagccactgttttgaacaaaggaatgtagggattctgttaagatatggaacctgaatgtttaaattccagtaaggatttttaaataggcaaattacaagtattagaaaacaggtattacctaactttggaaggggagttcttataagcaaaacaataaaccataaaggaaagcagaaatatatttgactcaatatataaatgttcatccacagcctaaagtcaaagtctagagaaatagactaaaaagtaaaactttttcac

SEQ ID NO: 549123 - DNA, 560 bp, Homo sapiens
tcataatttgccatgtcccatacaaacacatacattgtgaatgtgggcgcctattgtaaaccgtaaagtcctaaacagatgytgatgaatgaggacttgtgatttaaattgcaaatacacagtttcaggaaactggctcattttgtggagtgttacaaggtgctttacaggttgggttaggtacccttttattagtaaatactggctgctaatgagattagtgtttgtcctctaattccttttctgttttttaaagaaatcttttgcaatactgccaccaagtctaaagttcccatattagccactgttttgaacaaaggaatgtagggattctgttaagatatggaacctgaatgtttaaattccagtaaggatttttaaataggcaaattacaagtattagaaaacaggtattacctaactttggaaggggagttcttataagcaaaacaataaaccataaaggaaagcagaaatatatttgactcaatatataaatgttcatccacagcctaaagtcaaagtctagagaaatagactaaaaagtaaaactttttcac

SEQ ID NO: 549124 - DNA, 1206 bp, Homo sapiens
tgtggcaaatttaaattctccctcagacccccttcctcacatattcttctcccctggtctcagtgtaagggccccagccccagacttcattcttcctctcaccttatagtctctttgtgcccttccctggtgtgcgttcaccagcccagcctgcagagtacttggtttagcaatgttagggtgcagctgcctgtgcctggatggggtctccttttccctgagtgggagctcccaggggcagggccccatggccccttcttcctgcccctttccatagtatgcaggactggacagagccacaggttgtggagacagtgactgaattatctcccaggatgtcgatgctgcccacatgaccaaagtggagctggaggccaacgtggagaggatgataggcgagatgaacttcctgaaagccctctacgatgctggaagtctctcctcattgccattcctcgggactcacctgccctgcctcctagaggagagggcatttagaagtccagcaggactgtgagtctgtctgtcccgaccagagagacactggcccacctttgtgggtagttctgttctctacctgcaccattcgaacctctgcgtcctcaccttctttcttctgttgtagaagtggccattgccttccagaaaagcctctagtggtggtccctcagtcctgagcacccctctcctgagctggtggcttcccgagctctgttgggaagcctagtgtgggtctgctcaggagggggcatgtttgcttggccctgtgggagctgtcccagatgcagtcagacaccagcgacacgtctgtggttctttccatggacaaaaaccgctgcctggacctggacagtatcattgccaaggtctgcacccagtatgaggagattgcccagaggagctaggccgaggccgaggccctgtaccagaccaagatgggtgacagcatcatgtagctttggagaatcttgctcccccatcaatctgcctagacagtccacacaggagggcagaccctgcctccaagccattcttcccacacctccatttggcagttayctcatcttcccactggtctggtcttattaacagagagctttcttcccagtcagaaagctctgactttgctctaacccagtgcttctcaacagagagtggggaaggtacgattttcccccatgggacatttggaaatatctgcaggca

SEQ ID NO: 549125 - DNA, 504 bp, Homo sapiens
cacataatagctttccatttaaagacaccattgtttctataatccctcagaccatggtcatgtgctactttgtcatatttttgactggacttttcatcacactttcttctttgacctttaccccgagagccttagtcacaactgaaactttgctgtaaggatgttttgctacamaatctagctcactattacgagtcattatacactttcaataagctgatgtgcagtgatgtgaaagtactaattttaccacgaggttactagtgttactagagcatgtactaataaatttggctaacactgaatacatgccacggtaggaggttagacaaaaatggaagagaccagtgatatgttcctttgtggtaatgagtatacataaaggaaaataattaatattagggtcctttaaatgtcatgactactattagagtccattacggatcaaatgcaatcagaaatactagtgtaaatatgactaggaaactagaaattaaaatggaa

SEQ ID NO: 549126 - DNA, 556 bp, Homo sapiens
ttttttaagcaaagtagattgcctgtctaagagtcacaggggcaaactgggggcttgaaaagagtgaataacttttgtatgattcctatgggataaatgaatcctccaaattcattacttctctactccatgacttgagggggaggtggcacatgaattatgttttattgtttaactggggaaaaagaaagaaaatactaaaaatgacaaaagcaaacccggcttagcagtgcacrcctgtagtcccacttacttgggaagttcaggtaggaggatcacttgaggctaggaatttgaggacagcctaggtaatatgttgagatccatctcttaggtaatatatatatatattgagatccatctcttaggtaatatatatatattgagatccatctcttaggaaaataaaaaaaaaaacataaagctttacaactgtcttctatacaagcaactccttctagtgcccaactccttttaggctttactgtgtgtcaaattaggtttggtctttttctgcagcagctggtgtgacaactccttttctggtctaggggca

SEQ ID NO: 549127 - DNA, 599 bp, Homo sapiens
ttactacttaaaatttagaggccaacaaagaacatcccatatataaagttgaccttcaggaccaccaaagtccaccatttattagtgcttctttaacatccacaatggccctgtcatttttccccacctgtcactactgctaggcagcctgtgagagtgggcagatgtcaaatggctcacgtgtaaatgccagtgctgtcagcccatcctcctagacattgttgtgactattaattttgtgtcacctctcatactttcatttctggtttgttctgtgagaatttcctgtttatgtgtcagcttcccctacaatgatagtgagttacttaagaaaagggactatatatgcttggctgtgtgtctccaatgctaaacatagcrtctggaacataatatgccctccatatgtgtttattgtatatgaatgaaaattcattgaatactcacagaaaattcatataaatttattgttatttaaagatgcttaaatctgtgaggctatcacattatctgatttacattttttcaggtatttattttcctctttccttctataattggtggtatttctccctgggagagtgtttgtgtgctacgga

SEQ ID NO: 549128 - DNA, 676 bp, Homo sapiens
aagtgctgagattacaggcatgagctaccacccccggcctacagttcatcttgtgccctaatctatatttcactctctacatgagcaaagtgggagatcactgtcatgaccaaagttacatggccaagataagctatggcctgggagtcccagattcttctgtgtgggcactttcctgggatatgctaaatgatgggaaatctgggtctcatgtttctgtgtggtcctcacctcaagcgacttctctttctgttcactctgggcttccgtgctctcattaatgtagttctcagtcttccattggtccgtatcccattctatctcagatgcctttacttcctgctgcccactgagaagcttcatcaggtggcctgtcctggagatgagcttggcacaggtcacttgcacatgggccccagagcagtccatcttcaakgtccggataacatgagaaatgagccttctcacattgttgttggggataagggactgtagctgctgggttagctgaatttcaaactgagcaatgggtaattgaagcttttgggctcgggggacaggtcagtgcccacgttgttgtattcccattttgtctcagtttgtttaacagttggccctaagttgaatgcagtcccagcggaatctgcctcaggaggatgattgtagtttgtgtttt

SEQ ID NO: 549129 - DNA, 885 bp, Homo sapiens
agcatctctaatctgagggggaatgtctcacgtggtgtccaagaaatggtgacacatctcacagagggtctaggctcaggagggctagagtatgagacgttccccctcgcctgcgaacttaaaaatgtggccaacaatttttgtaaaagatggctactctgtagtgctttaactggacctatttagacaatgccttacacactggaggacgatactgtgtaaatctaataagtctacaagacaatacttctgtcytttggctctctccttcctctccagggtgatgacaaatccgtgagggtggagattatacctctctcatcatttcagcaccaaggaaataaattagtggcagagtaagggtgacttgatgagtacatccaattgttgacatagttttgggtggagaaattttgctattatatcgacttcttaaaatagtctagtgggattaacttggtttcaattcacagagatctggaagcgaggatcttttaaaaatcctgaaatatacactgcaataaaagaacaaagcatacacctcagccttaaatgactgaagaagtatgtcaagtagcagcaggtgggaaagtggctttggttttcagtttgtgagctctgaatccacacaaaaacaggactgcattctgaaaacctgaattaattattgtccttaccacaatgaggcagaaaagtataatcaaaatcattagtatttcagtcacaattaatgccaagatgagtttgtcagtatagccgtatcctggaacttcttttgtgagctaaaaaaaacaaaaaaacaaaaaaaaaacacaccagaatgagagctaactattcaaaaccccagtattccaggtgagtagcttacaggttcttttttatttt

SEQ ID NO: 549130 - DNA, 885 bp, Homo sapiens
agcatctctaatctgagggggaatgtctcacgtggtgtccaagaaatggtgacacatctcacagagggtctaggctcaggagggctagagtatgagacgttccccctcgcctgcgaacttaaaaatgtggccaacaatttttgtaaaagatggctactctgtagtgctttaactggacctatttagacaatgccttacacactggaggacgatactgtgtaaatctaataagtctacaagacaatacttctgtcttttggctctctccttcctctccagggtgatgacaaatccgtgagggtggagattatacctctctcatcatttcagcaccaaggaaataaattagtggcagagtaagggtgacttgatgagtacatccaattgttgacatagttttgggtggagaaattttgctattatatcgacttcttaaaatagtctagtgggattaacttggtttcaattcacagagatctggaagcgaggatcttttaaaaatcctgaaatatacactgcaataaaagaacaaagcatacacctcagccttaaatgactgaagaagtatgtcaagtagcagcaggtgggaaagtggctttggttttcagtttgtgagctctgaatccacacaaaaacaggactgcattctgaaaacctgaattaattattgtccttaccacaatgaggcagaaaagtataatcaaaatcrttagtatttcagtcacaattaatgccaagatgagtttgtcagtatagccgtatcctggaacttcttttgtgagctaaaaaaaacaaaaaaacaaaaaaaaaacacaccagaatgagagctaactattcaaaaccccagtattccaggtgagtagcttacaggttcttttttatttt

SEQ ID NO: 549131 - DNA, 1460 bp, Homo sapiens
tgcctaattaatgaatgagaatcctatattttataagatctccattaccaaagattcaaattatgatcatttactgcaatttatttatgttgaacatcttattacccaataatgttagttaaatggaacagattatgaaaaattagcaatctgtttcagaaagtgcaaaacagtcttagtccttacacaaactggcttggttcagattttcaattctaggtttgaattccggagggacatttaataacaacaaagccaaccccaaaggaatttgctctaattttttcaatatatatgaaaataaaaaaacacaaaaacggaattatgaaattactattctgtggatgggcatatacaaaacctaagcaatatccaaggttactcaagagaagtgaagttcagaaggactgcaatttacctaatgttacaggacgtttgagtagcaatcagggcaaggaattcctctcgaaatttcaaaaacttaatacgaaaaaatacacattgtccctgtagttatgagcaccaagaatctgaatgcccattgggaactctgcaattcagcaagtctttgtagctaccagagttcatcagtatctggaaccttattttactccagcatccaaatgacttctacttaaaatcaatctgaggcattaactccggagccagatcccacctgctctgccagggctaaagagagggtcagatacagggatactagctttggcgttaaacctaagctcagcgcagggtgtgtccaggttgccgtggagccggtcctacagcccattagcgcgaagctaccccttgtttcctggagatgatgtctcccgtgactccttccccgcgtgacagggcgccctggcaggagggacaccccgccccctcttctacctctttccgaggaggccccaagaccggaccccagactgggcctccaagacgaccaccagtctgacgtctgytaagcagtgagtgtagcagggctctcgaccgccacctccagccgccgggggacggtgaaagggattccccgccgggggccgaagaggaggagccacgggggccgggcccctcccccagcgggcttaccctccgccgccgcctactcgctgcagccgccccgcttccttgcgaagcagtccgaagcactgcgtccagcagcagttccccatcgcatgccgcccaggcgccgccgctcctcctcctcctcccgctcaatgcccaaacccaggcccggcagctgcatccgcacggcacgagccgaaatggggttcaaggaccgagggcgggccggccagagcccggcggcgtgagggcacggggcgacgaaagacgaggcgctagggaacaaaggcagtgtttactccagcggccgcagagccaccgctgcgcgagggaggagcaccgggctcaaggctctggactccctcgccgtccgcatggcccttctcgcctca

SEQ ID NO: 549132 - DNA, 1094 bp, Homo sapiens
ggtaagatgctaattaattctatgaccactattaccatcaaataatgcttcttgtaccagaggatgttactagaatcattcccaagaaatgcctttggttatttttctcagccaagtatgtacaacgtgcttgaaagcagtccatgagagaacagacatgctctgctacccaatcggaacagcgtacactttgctctaaagtctcccattatccatggaagtaaatcctgcccaatcagcagcatgatgggataggagacagcatgagacagggagacaagcttgtggggggtcaacccygggccttctccctcccccattcatctttcattctgagcagccccagctccagtccctggaggtgtgggggaggaggaagagccactaacatgcagtgctcttgggcctctcatccaggcaagaggactcggagtccaacacagtggttctccaagttcagtgtgcacaaagcttgtttgcaaagggctgggccccacccccagagcttctgattcagctggggtgggcaaagaatctgcatttatcacaaatcccaggtggtgctgacccctgctgtggtccctggaccacacgtggagaaccagcaatctaggagaggctgagttccagtgaggtggtggaggaccaaagcccaccaaaccagacgtggcttctgccccagagggtgtgcacacgagtagcagatccaaccagcacaggaagccgttctatctggctacccaggtggcaggacaagtccatccctggagaggcaagaaagcagacagctacggcttaggtctagagaaagatccccgcagtgggcctttctctctggcttccccaggaaggcagcagacaatgccagggttgacttctgagtcctctgtgctgatgggcctgatccccatggaccgtgaatccttcttctcctcttcctgctctgcttcttactaagtttgggaatcagtgcagtactttgagtgacttctaagatccactcacagatctaatgtataaacacacaaaggagaaagaaccccagccctccctgcagagccagcgtagccaggacaaaacagaacccctaaggc

SEQ ID NO: 549133 - DNA, 1094 bp, Homo sapiens
ggtaagatgctaattaattctatgaccactattaccatcaaataatgcttcttgtaccagaggatgttactagaatcattcccaagaaatgcctttggttatttttctcagccaagtatgtacaacgtgcttgaaagcagtccatgagagaacagacatgctctgctacccaatcggaacagcgtacactttgctctaaagtctcccattatccatggaagtaaatcctgcccaatcagcagcatgatgggataggagacagcatgagacagggagacaagcttgtggggggtcaaccctgggccttctccctcccccattcatctttcattctgagcagccccagctccagtccctggaggtgtgggggagraggaagagccactaacatgcagtgctcttgggcctctcatccaggcaagaggactcggagtccaacacagtggttctccaagttcagtgtgcacaaagcttgtttgcaaagggctgggccccacccccagagcttctgattcagctggggtgggcaaagaatctgcatttatcacaaatcccaggtggtgctgacccctgctgtggtccctggaccacacgtggagaaccagcaatctaggagaggctgagttccagtgaggtggtggaggaccaaagcccaccaaaccagacgtggcttctgccccagagggtgtgcacacgagtagcagatccaaccagcacaggaagccgttctatctggctacccaggtggcaggacaagtccatccctggagaggcaagaaagcagacagctacggcttaggtctagagaaagatccccgcagtgggcctttctctctggcttccccaggaaggcagcagacaatgccagggttgacttctgagtcctctgtgctgatgggcctgatccccatggaccgtgaatccttcttctcctcttcctgctctgcttcttactaagtttgggaatcagtgcagtactttgagtgacttctaagatccactcacagatctaatgtataaacacacaaaggagaaagaaccccagccctccctgcagagccagcgtagccaggacaaaacagaacccctaaggc

SEQ ID NO: 549134 - DNA, 643 bp, Homo sapiens
tttcctcaccttttaattatatttatatttaatactttttaaaaagtatgacacatatacaaaccatcttctctggtaaatatccatatctcctagaagaaagctttggctaagtgattcttgcctacttttacaacctaagtaaatttgcattaggcaaatttttccagttcaaaaatgaagactttcaaatcccactgaaatgaataaataagcacaaaatgggtgaagtacatgagagtactgaacagagrgaagacagcagagattgtgactagttctagaagatggaagggggatggaattatatcaacagatatacatacatatgtatatatatatatatatatatatatatatatacacacacacacatacatacacaaaagattatctatatggaaagatagagagagacagagtatgagtgtgtgtgtgtgaaatacaatgatccataacagaacagtaattttcttgaggccccaagaaaaatgccttcaataataaagtgacttactgtaacaaacaatataatttagaaattataagacctcagggaaagtgaagccctgttatttttctttcaacaatggaaaaggaagttaatcagaaatccctagaaaaccaaaggctatacaaagaa

SEQ ID NO: 549135 - DNA, 647 bp, Homo sapiens
tttgcaagagttttttcatacccatttcatactagtttttttttatgaaaagttagctgcttataaggattcataaaatctgtatattagttgatttcctagaaaaaatacaacctgtctttagcatgttgtgtttggaggacagcttggccttcagttgtttgcatagacttgtcatacatgtttaactagttttctttttaaagaatgtttagcctactatatatataaagctttatatttaatgctctcattagcctatatattaatattaaaacacccaaacataaagccttttaggcagatattgcaagtttttaaaatcctcaactctagctgaaaagtgttttgytaagaaaagctcagtaatgtgctgttttatattaacaggaaacagaacagcagtagtggtttgaataccctgcaaacaggaagtttgacacatgcatagctcttagcttctgtgtaagaagttgtgagctccttctggaaacatttgcagttacattaagtaaagtgtaaatgcacatgaatggcagcttatagagaaccaccttgtaaccagtatacaggtacaactacagctcttcagaaattggaaggttttgctagccggttatttcatagacactctaaaggtactgcac

SEQ ID NO: 549136 - DNA, 593 bp, Homo sapiens
  misc_feature 9, 10, 11, 12, 13, 14, 15, 16, 17, 18, 19, 20, 21, 22, 23,24, 25, 26, 27, 28, 29, 30, 31, 32, 33, 34, 35, 36, 37,38, 39, 40, 41, 42, 43, 44, 45, 46, 47, 48, 49, 50, 51,52, 53, 54, 55, 56, 57, 58, 59, 60, 61, 62, 63, 64, 65,66: n = A,T,C or G
  misc_feature 67, 68, 69, 70, 71, 72, 73, 74, 75, 76, 77, 78, 79, 80, 81,82, 83, 84, 85, 86, 87, 88, 89, 90, 91, 92, 93, 94, 95,96, 97, 98, 99, 100, 101, 102, 103, 104, 105, 106, 107,108: n = A,T,C or G
aaatatgtnnnnnnnnnnnnnnnnnnnnnnnnnnnnnnnnnnnnnnnnnnnnnnnnnnnnnnnnnnnnnnnnnnnnnnnnnnnnnnnnnnnnnnnnnnnnnnnnnnnnttaatgaaaaccaaaacaaaaatttttcacaggtggcttacaggcctttgagagtgtgtctgtgcccctcatgagttccagggaccccattttgagaaccaatgagaattcttttcataggattatttactcatgcattgcatttatattgagatcttgccccaaatrttatcagtcttctagtgaaaacaatatctgatagatttaaatataagtaaaacaaaaaagtttttgttaaaataacaataagaatagtggaaataagtgaagcataggaatcatgctaggaaattagggtccttgacaccattacctgtttcaaactctggtttgatggggagtgtttttccttcagaactctaggaagaagacaccaggaggggataaataagagtaatggtggctgggcgtggtggctcacacctgtaatcccagcactttgggaggtggatcatgaggtcaggagttcgagaccagcctggcca

SEQ ID NO: 549137 - DNA, 1818 bp, Homo sapiens
tacagaaaatttaaaaaaatgcaaaatgtggacagaatcatgaagagacatggaagatacagtgagaaagtgtagcatgtgtttagtgagtgttctcatagaagaaggcaactgggaagsgacaatatgtgatggtattttggctgaaagttctctagacttttgtaagacattaatccgcatgttcaaaaattccatgcacgctaagcaagctacaatggagataaacctacacctacgcatctcctagagaaatagtaaacaatcaggaagggaaaaatatttcaattagcactagaaaaatcaaattacctttaatcatattgaaatctgaaagaatgaaaggtaaaataaacaatattatttgttaagaataataatgccattctgaaattctcaaccaagaaaaatatttatcaacctatggctaaataacttatttagagacaagaaacaaaacgccaccagcagaattccactaaagaaactacagagaaactctgaaaacatgcttcagaaaggttgaagttctgaaatcaaagaatgaacacagagcaaaatacattgtaaacatacagatagacctaaataaaaaattaggtgttgaaacaaaaagatatttaaaattagataagcacggaaatatgtatgttaggaagcaacttattagggctgaagtattcaaagaccccttaattgtctgacaagagcagaaaggtgagtatgactttggaagtttttttttttttttttttttttgcgtaggagtctcactcactctttcgcccaggctggagtgctgtggcgccatctcggctcactgcaacctctgcctcccaggttcaagcaattctcctgcctcagcctcctgagtaggggggattacagccgcgttccaccatgcctggctaatttttgtatttttagtagagacggggtttcaccatgttggtcaggccagtctccaactcctgacctcgtgatccacacgcctcggcctcccgaagttttgagattacaggggtgagccaccatgtgcggccgactttggaactgtaataaattcactggacattatgcatttctctgttgtatctatgaaaacaataaaaataaaagtcataattaaaaaacaagaagacagaccctgataggaaaaaatgaggcattatatatatatatatatatatatatatatatatatatataacaaattaataaaacaaattaagtataaatgatcaaagattaacttaaacctacgtagacaatgtttttgttaaaatacaaagactggcaaaattaaaaaattccgtctctatcatagttacgagaggcaactaatatataaattttcagaaactttgaagttcaaacaatacagatagtgtgtgtatatatgatatacatgcaaacatactacatgaatataattttttaaaaggttgctatgtagacaaaatagaatgtaagttagaaacatttattaaaattagttagtctaaccagtgtaataaaagttttaagttattaagatgtgatgacttaaatgtgcattagcctgatacatatatacatatatacacacacaccacacacactctcacacacacacacaaacacatatttagagagagagtcaaattatataaagcaaaaatatcagcaagtcagtagaaatggataagcccccaaattattatagacttttcaaacacacatccttcagtaatagataaaagaagaaattaaaagactaagttttaaaagaagctactagattttaaaaagggcaaatgttatataaggaacatgaat

SEQ ID NO: 549138 - DNA, 606 bp, Homo sapiens
  misc_feature 586: n = A,T,C or G
aaggtaatcaattcataaaacttacagatgaacaagtgaatatttcagaattcttctcaatactagggatcagcatgaccttatcaatatttgcattactaaccatacaataagaacctgacttctgactattctaaggtataaatgtgtactttaccttaaataggaaaatgtgtcatgtatccattttgagatttagtacaagattcacagaagagaaaactgatagccctgtatcgattaaaagcatttttttttttttgagatacagttttgctcttgttgcctgggctggagtgataagatcttgactcactgcaacctctgcagcccgggttcaagtgattctcctgcctcagtctcctgagtagctgggattacaggtgtctgccaccatgctgggttaatttttttatttttttatttttatttttagtacagatgggatttcaccatgttggccaggctggtcttgaacttctgacctcagatgayccacccacctcagcctcccaagagatggaatctcactatgttgcccaggttggcctagaactcccaggctcaagtgattctcccacctcangtttgagtgtggctgggaca

SEQ ID NO: 549139 - DNA, 913 bp, Homo sapiens
tggtgaaacccatctctactaaaaatacaaaaattagctgggcatggtggcacaggcctgtagtcccagctactcgggaggctgaggcagaagaatcacttgaacccgggaggcagagcttgcagtgagctgagattgtgccactgcactccagcctggcgacagagcgagactccgtctcaaaaaaaaaaaaaaaaaagaaaagaaagtgtggacagcaagtattctaacaattgtaactaaagaaatgcattaataaataagcttttatattttcctacaaattcctaattttttcctttatcatataagttattttcttaatacttgtcaatattgtatgccataaagctttttttctaaaataacaaaaatagtgttttaaaagtatattttataatgccaagaggcaaatgtgatgtaagagactaagaacaggcttatccagcaaatataatttcatctgtaaaatggggataataatctttcttatcagcttgtctcagagaagtgttatgtgagttaactgaaggaataagacagcatttkgtgaatataaaatctatagtaatgtataatataattgatatttaagtactttttgtgcttctggtcttatgctggaaaaattgttattactttaaataagtaataaatatctgaattttgctctatgttcaggaagcaaattttctcatcttttttacacttacaaattttctataatttttccttctgtgagatgtttgcatttatcttattttggtcaattcctgctctggcaagtacatgcaaaataaaatgttaagatcaacaaacaaacatttttgttgggtgtgtcctcactgtctaaatgtgtttaatttttttcggccagaattatttgtttcaaacgcttttatgaaacatgcgt

SEQ ID NO: 549140 - DNA, 638 bp, Homo sapiens
cttcctatatggttttctttcccctgataggaatatactattttcgagctcagggccacaacatttatttcttttgtaatccttattgtatagttacaggtgccaataaagcttctactttttatttatttgactaggtgaaaatgtagaaggggagaagattttgaaagtggggatatttcatggtgaaaggtaaagctgtgatatggaaggatggtacctggcaccaagcactaggaaacagagtaacacaaattaggattggtcacagagaggaaaagagaagattccacattttattttttattttttttattttttattgatcattcttgggtgtttctcgcagagggggatttggcagggtcataggacaatagtggagggaaggtcagcagataaacaagtgaacaaaggtctctggttttcctaggcagaggaccctgcggccttccgcagtgtttgtgtccctgggtacttgagattagggagtggtgatgactcttaacgagcatgctgccttcaagcatctgtttaacaaagcacrtcttgcaccgtccttaatccatttaaccctgagtggacacaatacatgtttcagagagcacagggttgggggtaaggtcacagatcaacag

SEQ ID NO: 549141 - DNA, 638 bp, Homo sapiens
cttcctatatggttttctttcccctgataggaatatactattttcgagctcagggccacaacatttatttcttttgtaatccttattgtatagttacaggtgccaataaagcttctactttttatttatttgactaggtgaaaatgtagaaggggagaagattttgaaagtggggatatttcatggtgaaaggtaaagctgtgatatggaaggatggtacctggcaccaagcactaggaaacagagtaacacaaattaggattggtcacagagaggaaaagagaagattccacattttattttttattttttttattttttattgatcattcttgggtgtttctcgcagagggggatttggcagggtcataggacaatagtggagggaaggtcagcagataaacaagtgaacaaaggtctctggttttcctaggcagaggaccctgcggccttccgcagtgtttgtgtccctgggtacttgagattagggagtggtgatgactcttaacgagcatgctgccttcaagcatctgtttaacaaagcacatcttgcaccgyccttaatccatttaaccctgagtggacacaatacatgtttcagagagcacagggttgggggtaaggtcacagatcaacag

SEQ ID NO: 549142 - DNA, 638 bp, Homo sapiens
cttcctatatggttttctttcccctgataggaatatactattttcgagctcagggccacaacatttatttcttttgtaatccttattgtatagttacaggtgccaataaagcttctactttttatttatttgactaggtgaaaatgtagaaggggagaagattttgaaagtggggatatttcatggtgaaaggtaaagctgtgatatggaaggatggtacctggcaccaagcactaggaaacagagtaacacaaattaggattggtcacagagaggaaaagagaagattccacattttattttttattttttttattttttattgatcattcttgggtgtttctcgcagagggggatttggcagggtcataggacaatagtggagggaaggtcagcagataaacaagtgaacaaaggtctctggttttcctaggcagaggaccctgcggccttccgcagtgtttgtgtccctgggtacttgagattagggagtggtgatgactcttaacgagcatgctgccttcaagcatctgtttaacaaagcacatcttgcaccgtccttaatccatttaaccctgagtggacacartacatgtttcagagagcacagggttgggggtaaggtcacagatcaacag

SEQ ID NO: 549143 - DNA, 638 bp, Homo sapiens
cttcctatatggttttctttcccctgataggaatatactattttcgagctcagggccacaacatttatttcttttgtaatccttattgtatagttacaggtgccaataaagcttctactttttatttatttgactaggtgaaaatgtagaaggggagaagattttgaaagtggggatatttcatggtgaaaggtaaagctgtgatatggaaggatggtacctggcaccaagcactaggaaacagagtaacacaaattaggattggtcacagagaggaaaagagaagattccacattttattttttattttttttattttttattgatcattcttgggtgtttctcgcagagggggatttggcagggtcataggacaatagtggagggaaggtcagcagataaacaagtgaacaaaggtctctggttttcctaggcagaggaccctgcggccttccgcagtgtttgtgtccctgggtacttgagattagggagtggtgatgactcttaacgagcatgctgccttcaagcatctgtttaacaaagcacatcttgcaccgtccttaatccatttaaccctgagtggacacaayacatgtttcagagagcacagggttgggggtaaggtcacagatcaacag

SEQ ID NO: 549144 - DNA, 670 bp, Homo sapiens
cacaatctcagctcactgcagcctcgatctcctgggttcaagtgatcctcctgcctcagcctcctcagcagccgagactacaggcatgcaccaccatgcctagggctaatttttgtgtttttagaagagacgaggtcttgctatgttgcccaggctgatctcaaactactgagctcaagcaatcctcccacctcagcctgccaaagtgtttggattacaggcatgggccaccacatctgacctccaatgttacttaatagctacaattcttctaaagatatgctttccctcttaactatttggtagtcctggaatataatctstacagaaaaagattaataaatggttgactttttcctttcacttaccaattattttcagaataataaattggtgtatatgagggttttttaaaacaattattatgaattcttgaattactacatttttgtgtatttcagtgtactataatcattacactttttagtatttatttatattaaaatttctgtctttttttttaagagacaggatctcactctgtcactcaggctagagtgtggtggcctaatcacagctcactgcaacctcaaactcctaggctcaagtggccctcccgcctcagcctcccaaggagctgggactacatgcatgagccaccatgcctggc

SEQ ID NO: 549145 - DNA, 1161 bp, Homo sapiens
tgtgacctctctgaacttcaacttctgtctcctcacctaatcaagattaaagggctctgtttggatttcctgcttgttctgcaacttacagcacggaaactgcctctaggtagtaatctggtacaatagtgtttgttttccttctccctgctatcacagtcctgtgctatttctttcccattatctgaaaaccagtttcgtgtattttttatggttttctagttgtttaaagcagatagagtaaacctggtggccctcttactccatcttggctggaagcagaagtaagtccatttatatttaacataattactaatatgcggggatttatttctacgaacttattctgtgctttctactctttctctttgttctgtttttcctcctttcttgatagtgtttttcagacctttcttcaggaagtgctcaagactacttttggcagtgtgtataagagatgtgtatacatgtaggtaggtagtcttayaaaatataatgtttgcaaaaagagtgcatcgcaaataaaaattgaaaaccaactaaccaagacactttgtgataagttatacagctaattcgacagcctactatgtttatccatttaatatttgatgaacatatggatatcaaggacaatgccaatatgtgttagttatttcagggatcacatttctgtaacagatttcaagcacttatttctaacaaatgaaaatttcaggcatgttctttagtctattatcatattggttttctgtgattatattcacctttgtattggagttatttgtatagatctgcatctgtctcctttatgagactcaatgaacgagagggcagagatctaggtaccagcttgtggtagatgctggagaagtatttaactaatcgacttgcacggaactgtggaaataaaattgtaaaaacattgttgaaaaaggaaagcttatggttcctccctgaatttttcaggtcaaagttggctctgcctttgtttcatcactgtagttctgttaaatatagcgctttatagatattaatatggttgcaactatattatctctgttaaatatagttccatattatatatagatgtgttgttatgtatatgaatgttagcttccccttttatagatttgacctgtgcttatacagtatggctca

SEQ ID NO: 549146 - DNA, 1161 bp, Homo sapiens
tgtgacctctctgaacttcaacttctgtctcctcacctaatcaagattaaagggctctgtttggatttcctgcttgttctgcaacttacagcacggaaactgcctctaggtagtaatctggtacaatagtgtttgttttccttctccctgctatcacagtcctgtgctatttctttcccattatctgaaaaccagtttcgtgtattttttatggttttctagttgtttaaagcagatagagtaaacctggtggccctcttactccatcttggctggaagcagaagtaagtccatttatatttaacataattactaatatgcggggatttatttctacgaacttattctgtgctttctactctttctctttgttctgtttttcctcctttcttgatagtgtttttcagacctttcttcaggaagtgctcaagactacttttggcagtgtgtataagagatgtgtatacatgtaggtaggtagtcttataaaatataatgtttgcaaaaagagtgcatcgcaaataaaaattgaaaaccaactaaccaagacactttgtgataagttatacagctaattcgacagyctactatgtttatccatttaatatttgatgaacatatggatatcaaggacaatgccaatatgtgttagttatttcagggatcacatttctgtaacagatttcaagcacttatttctaacaaatgaaaatttcaggcatgttctttagtctattatcatattggttttctgtgattatattcacctttgtattggagttatttgtatagatctgcatctgtctcctttatgagactcaatgaacgagagggcagagatctaggtaccagcttgtggtagatgctggagaagtatttaactaatcgacttgcacggaactgtggaaataaaattgtaaaaacattgttgaaaaaggaaagcttatggttcctccctgaatttttcaggtcaaagttggctctgcctttgtttcatcactgtagttctgttaaatatagcgctttatagatattaatatggttgcaactatattatctctgttaaatatagttccatattatatatagatgtgttgttatgtatatgaatgttagcttccccttttatagatttgacctgtgcttatacagtatggctca

SEQ ID NO: 549147 - DNA, 938 bp, Homo sapiens
ataaagtctgaggaacattgtcaattttgtggttatagagttaataattattaaawattaataattatgaaatattcagacattaaaacatttaaatgtttattgccacattaatgtaaactgaaaagaaaactgaaattttgggatgttttgcgctttgatgtaagagagctcttggtcagctacaagaatttggcttagaatcatttttaaggagttagaaatacgttgaccttgaattgattgaaagtgaatgtagttcaggctcagtttctttctttcttttttttttgtttttttaaagagaccgtctttttctgtcacctggtatggtctcaaactcctggccccaagcaatcctccctcctcagcttcccaaagtgctgggattacaggcgtgagtcaccactccctgcccgggctctgtttctaatgatagaaatatccaggtaaactttatagagggaatgaatttccaccgggaaataatcctagtgaggagctggtgataaatgaatatttctgaatgaagtcatgagggagaaacatctactttatttagatgtgaaacacctcattaaatgttgaagaatactttatttgcatacttactatgtttgtcatttactcttttgaccctcaaagaggaagagctgcttataatttccacatttatccaacatggattataaatgttaattgctttttttggaaaaaaaattgaggtaaaaattcacgtaattaaccattttaaagcaatagttcagtggcatttagtacctttgcagtgttgtgcaaccatcacttctgtctagtttcaaaacatttttatcactttgaagtaaaatctcatacctattaagcagtcattccctgatgcccctagctcatggcaaccacatctgttttctgtttttatggatttacttattctggat

SEQ ID NO: 549148 - DNA, 1387 bp, Homo sapiens
agggaggttttattggtgctgattctgggcctggtgagtcatgttgattgggggcaagggctgacacaccttatcctccagaaagatttggaccatttggtgagtcaccctgattgggggcaaagggtgacacattatcctccaggaagaytggaactttttcaaagagtccagattatgggagcccttcacttagactgaagctttcttttcctgcagaatattcctccttgatgtgcttcttccctaggagtttgggcagaaaggaccctgaagagtcttgatacctactctgtttcaactacagagttcccatctctgtttggaggagttccttcattccttagatcatgtgcaggagctacctggccaacatcagccaatttgatgacctatctaagcttctccccagcttaaagtattagctccttgcatttccccagatgtttactgataattttaaccccacctacttgcaagtagtctccagaatcctatcattacaggttcataatagcctgatatctgacatagcctactgaaagaatacataatttcccctaagaaaagaggagggacttagccttttagctgtaatccagaacaacaaatcagtacatttatagcacaaagatttcactaaatattaatttaaataacatccagggagttaaaaaataaaagacagtcatccaagagtcccaagtcagagggaaaggcaagaaaatgtacagatgagaaacccagagaataggatgacaaacagaatttacattgtggccagttgcaagatcaacatacaaagataagtagcattcctcttagagaacaataactgagaaagaccccattctcagtagcaataaaactataaaatatctaggaataaactcaataatatatgcacagtttctgtatggagaaaataataaaattttactgctggccttaaaaaaataatcaaataaaggaagacatatagcattataaaatgccaattcactcctaatttaatctgtaagttaaattcagggccaatcaaaagcaggtggtaacaaattttatataacatttaattatgagtcagttgctaagcattggagatataatggtgaatagcacagagtccctgctctccagattctaatgcaagggaggagagagaagataagtatatgaagcgaataacaagataatttcagatgatcatgtgttatggagaatagataattgatggagactgacaaaagcactgcagtgggggaggggatgggactctattttaactagagtgaatcagagaaagcctcccagaagaggtgacatgtaaggtcaaacctcaattacgcaaattggtcaatcatgcaaatatctgggaagccccagc

SEQ ID NO: 549149 - DNA, 1387 bp, Homo sapiens
agggaggttttattggtgctgattctgggcctggtgagtcatgttgattgggggcaagggctgacacaccttatcctccagaaagatttggaccatttggtgagtcaccctgattgggggcaaagggtgacacattatcctccaggaagactggaactttttcaaagagtccagattatgggagcccttcacttagactgaagctttcttttcctgcagaatattcctccttgatgtgcttcttccctaggagtttgggcagaaaggaccctgaagagtcttgatacctactctgtttcaactacagagttcccatctctgtttggaggagttccttcattccttagatcatgtgcaggagctacctggccaacatcagccaatttgatgacctatctaagcttctccccagcttaaagtattagctccttgcatttccccagatgtttactgataattttaaccccacctacttgcaagtagtctccagaatcctatcattacaggttcataatagcctgatatctgacatagcctactgaaagaatacataatttcccctaagaaaagaggagggacttagccttttagctgtaatccagaacaacaaatcagtacatttatagcacaaagatttcactaaatattaatttaaataacatccagggagttaaaaaataaaagacagtcatccaagagtcccaagtcagagggaaaggcaagaaaatgtacagatgagaaacccagagaataggatgacaaacagaatttacattgtggccagttgcaagatcaacatacaaagataagtagcattcctcttagagaacaataactgagaaagaccccattctcagtagcaataaaactataaaatatctaggaataaactcaataatatatgcacagtttctgtatggagaaaataataaaattttactgctggccttaaaaaaawaatcaaataaaggaagacatatagcattataaaatgccaattcactcctaatttaatctgtaagttaaattcagggccaatcaaaagcaggtggtaacaaattttatataacatttaattatgagtcagttgctaagcattggagatataatggtgaatagcacagagtccctgctctccagattctaatgcaagggaggagagagaagataagtatatgaagcgaataacaagataatttcagatgatcatgtgttatggagaatagataattgatggagactgacaaaagcactgcagtgggggaggggatgggactctattttaactagagtgaatcagagaaagcctcccagaagaggtgacatgtaaggtcaaacctcaattacgcaaattggtcaatcatgcaaatatctgggaagccccagc

SEQ ID NO: 549150 - DNA, 1023 bp, Homo sapiens
ttctgaggaagtgggaaaaaacctgaatccctaaagcagggctgaataccactgcactcttagctaaactgatttttggctgctccactgtcatttctacccaggcttcaaggtgtcggggtaagtgatcccccacctaacaatggcttctggtatgtttctataggaattgttctgtgtttacttcagtgtcagctctagaaatcagcatttgtgctttcattttcaaatcttcagcctcaatggaaaaagaaaagttgattttttagtgaaatcctatatgcttttcatatgggtgaaaagataactttagaataattcactttggatgcataacactaatacataatagtattaatatataataaataaaatatacaattagcaactgatactcttacacttaaaaaaaggtcagaaaagttttgtttgaaggtttagcataccataaataaaatatttgagaatttacaatcactaataatgctcatatttcaatgttttatgcacttaaatcaaatactttgggaaattrtatctagctggacactcatggtcatcactgataaggtatcacaatagaatgtgcatcatacatagaatcattatccaaacactttacagtgtgtgaaaggaggtgatattaaaaattacgccaggacacaggtgtacaccaaaactttcccaggctaactgggacacagggtaactctagttataaacacatcgatgcaaaaacacttaagattaatgggattgaagtacattcccagttcttaaggggctatcatcaattcttcaattgttcttcccaagctcctacttttggaaagcattagccactagtaagggaaagaagccaaaggattctcttttataattttgtcccttgaactgggataatattttacctttgtaccacaaacattcttatctttacatttatatctcactgaactatgaactttaatgaatactgaatttagcaaaacagattacaattcatcaaatgagaattatgac

SEQ ID NO: 549151 - DNA, 654 bp, Homo sapiens
cttcaaaactggccttcagctttctccttaggagagcgaatgccgcgaggcgatggtagctaggagggaaatgcggatgaggatacagaatgtgtggagagagcagctgttgacagtgtaatggcatgttggttaaaggaatgagaaaaggaagaaagagtgcaataatgataactttatgactaagacccagtttaaaagattcacctgamacctaagttagaaatgagggacacttctgatgtgccagagttcttcacatctgcgtgttggggcacatggctcccatggaggctgtcctgagatgcaagactccacagcatatggcggtcttcatgacagccctccacagcatggctgcagcctgaggctctcgggtcccagtcacagcctagctgtgctgctggtcaagctctggccaactcctctgcctaagcaccagttcctggcattacaaatatcctaccctgacaatcactgtaaacactgtctccttttttaaaaataaagtctatctcaccctcattatcttgtgagcaggtcctaggtgttattgatttattttaaattttttgtttgtttgtttttgagatggagtcttgttctgctgcccaggctggaatgcagtggcgtgatttcagctcactgcaacct

SEQ ID NO: 549152 - DNA, 661 bp, Homo sapiens
gcctctcactctgcttcctcttccagaaagtcatcctaaacatccagaggaagtgtatgctttctggctgaaaggttgacacacctgagctaattcatacgcaagtttaatttgttctataaatggcttcttgtgtgtgagacaatgaacttgaatacatcttgggggtaggagttctgcaacctctcttccacctttctagtaagtacacagtagccatgctttttgcattgaattgaaattacacagaacttctttgtctttgcatggaatatagtgataatctcctttcagattagtagtaacatcccaagccttacctttctgtcttctcmctgcctgaggtaagacatctaagacttaggggaatggactttgaatccactctcccttcatttaaaaactttctccttcactggcaaaaatgccagggtagccagatgttttctcgtcttaaagcattggggtgttattatagtttcagaagtgttgctgaatttttcagagaacctctgagaaaaggagataaggcttgaaagtcctcaacaatttgcctgttccctgtaagaccataagaaactcttaggcacattgaaatgttttcctttaatttttaatttttgctttacgataaagctaattaaagcaacacctgtttgga

SEQ ID NO: 549153 - DNA, 565 bp, Homo sapiens
taaagatttatgtcaccagaaagcacatttcccttcttttcttctcctggcttatgaaagcaaattaccatcttttgcctttatgttctttgaaaatatctggtagacyctgaaaaacactggagaattcccaggttgtaggtccatttgtctgtttataacccattatgacatgaccatgtcttcaccattcctcctagcgtaaaggcagtgattctttttggactcctggttgccattttctgggtgtggtaggactgaggacagggattagaggaaagctagagactgcctagttttctagaacttcctcataatctctgaaagggaaatagggaagtagagaagcagagtccacaacaaacacaaacctaccacctttggtgtcattctcagatcaggaaaacaaaacaaaacccaaaacaaaaaaactaccacctgcccatctcttagtggaggtgcagtttggatacagtcatttcattatcaaacacaaagattatatcctacaacatctgtgtgataggggaagtcaagtttgaagaattaagctctttaaagcaaa

SEQ ID NO: 549154 - DNA, 565 bp, Homo sapiens
taaagatttatgtcaccagaaagcacatttcccttcttttcttctcctggcttatgaaagcaaattaccatcttttgcctttatgttctttgaaaatatctggtagactctgaaaaacactggagaattcccaggttgtaggtccatttgtctgtttataacccattatgacatgaccatgtcttcaccattcctcctagcgtaaaggcagtgattctttttggactcctggttgccattttytgggtgtggtaggactgaggacagggattagaggaaagctagagactgcctagttttctagaacttcctcataatctctgaaagggaaatagggaagtagagaagcagagtccacaacaaacacaaacctaccacctttggtgtcattctcagatcaggaaaacaaaacaaaacccaaaacaaaaaaactaccacctgcccatctcttagtggaggtgcagtttggatacagtcatttcattatcaaacacaaagattatatcctacaacatctgtgtgataggggaagtcaagtttgaagaattaagctctttaaagcaaa

SEQ ID NO: 549155 - DNA, 565 bp, Homo sapiens
taaagatttatgtcaccagaaagcacatttcccttcttttcttctcctggcttatgaaagcaaattaccatcttttgcctttatgttctttgaaaatatctggtagactctgaaaaacactggagaattcccaggttgtaggtccatttgtctgtttataacccattatgacatgaccatgtcttcaccattcctcctagcgtaaaggcagtgattctttttggactcctggttgccattttctgggtktggtaggactgaggacagggattagaggaaagctagagactgcctagttttctagaacttcctcataatctctgaaagggaaatagggaagtagagaagcagagtccacaacaaacacaaacctaccacctttggtgtcattctcagatcaggaaaacaaaacaaaacccaaaacaaaaaaactaccacctgcccatctcttagtggaggtgcagtttggatacagtcatttcattatcaaacacaaagattatatcctacaacatctgtgtgataggggaagtcaagtttgaagaattaagctctttaaagcaaa

SEQ ID NO: 549156 - DNA, 565 bp, Homo sapiens
taaagatttatgtcaccagaaagcacatttcccttcttttcttctcctggcttatgaaagcaaattaccatcttttgcctttatgttctttgaaaatatctggtagactctgaaaaacactggagaattcccaggttgtaggtccatttgtctgtttataacccattatgacatgaccatgtcttcaccattcctcctagcgtaaaggcagtgattctttttggactcctggttgccattttctgggtgtggtaggactgaggacagggattagaggaaagctagagactgcctagttttctagaacttcctcataatctctgaaagggaaatagggaagtagagaagcagagtccacaacaaacacaaacctaccacctttggtgtcattctcagatcaggaaaacaaaacaaaacccaaaacaaaaaaactaccacctgcccatctcttagtggaggtgcagtttgratacagtcatttcattatcaaacacaaagattatatcctacaacatctgtgtgataggggaagtcaagtttgaagaattaagctctttaaagcaaa

SEQ ID NO: 549157 - DNA, 654 bp, Homo sapiens
catctttccagtaagagaacaaaggtagttctgggcagtcacatctttatccatcaatcttaaacaacaatggagacctgagattaatactgacttggctcagggtaattaacactactctgctcccctgcttttgtgtgaaatatgctagaaaaccaatagagaggactgcagatgtttacttacagaaagcccaagggcatttaagtgaccaaagctttttcccmggagccctggaaattatttttctttactacgaacctgcattccactctttctccatgaatgaatgtggtcttgtttgatctaagcattttccagaatatccctctgaaccataaatcaactctaagggaaaggtagtgattaatacaacaaatggatcttgccatggtaaatttttcatacctgacaactatgtcctagagcaagtataaaagaccctagcgttgcaacttttaactatccaaatacttggtaattattctaacagacccagaagacccatgacaaataggtatttttcaatctcttgaggaagaaattacttttgagcacctgaaagctagtatatggtggtgtgtcacccagtgagagagcccagccaaccaccagacattcacatttcaacattgttttattgtaaaagtgcaa

SEQ ID NO: 549158 - DNA, 582 bp, Homo sapiens
aaaataaacaactaaatgtaatttaatttcacctttttctttttacttttttagtatgaccactagaaaattttaaattacatgtgtgactggcattgatggctcacagatttctactcacagcaaattttctgtaagtgcctgacaggaaatattttaggctctggctctgtctatggtgctaaagcasccatggataatatgtaaacaaatgaatgtggctatgttccaatattagttcatcagacagctgaatttggcctgtgtgccctagtttgcctacccagggtctagaacattaacagttccctataaagaagaagatgaacctaccaggtgcctgtgatctgaatttggccagcaaatgtgtttttgcatccagcgtgggttttgcacagatctgaacttgaattacctttatactgggcatgggtattccaggtcctcacagtccccatgactcctgaaatctaactggccttctcataatggccatgtgcacaagcactcctgctgcagagctggtgtcatacaaagaggctctccacagagacagacagtcagaaagtcagaaaatgtgca

SEQ ID NO: 549159 - DNA, 582 bp, Homo sapiens
aaaataaacaactaaatgtaatttaatttcacctttttctttttacttttttagtatgaccactagaaaattttaaattacatgtgtgactggcattgatggctcacagatttctactcacagcaaattttctgtaagtgcctgacaggaaatattttaggctctggctctgtctatggtgctaaagcacccatggataatatgtaaacaaatgaatgtggctatgttccaatattagttcatcagacagctgaatttggcctgtgtgccctagtttgcctacccagggtctagaacattaacagttccctataaagargaagatgaacctaccaggtgcctgtgatctgaatttggccagcaaatgtgtttttgcatccagcgtgggttttgcacagatctgaacttgaattacctttatactgggcatgggtattccaggtcctcacagtccccatgactcctgaaatctaactggccttctcataatggccatgtgcacaagcactcctgctgcagagctggtgtcatacaaagaggctctccacagagacagacagtcagaaagtcagaaaatgtgca

SEQ ID NO: 549160 - DNA, 1014 bp, Homo sapiens
tttggaatcctttgtggccatgtatcttcttttcttggtggacacctcagacttccattgacattcatatacacaaatctatatgtaaatggaccacctttgtcaaaaacagtaagacattcattgtactctaatttcaatcatgmatttgcaatcttgtaggaaaaatattccctatggatatattatgtaacaacatttattcatattcaatatagactcagtgaccctttcatctctctgagagtaaaacttaagaaaaaacatctatgtcacgaatgctgtttcatgtggtattcagaggagccgggctctttgtatgaaaaatgtttagactgcaaattaacacagaagagttaacacagcttgcaagtctttttttccccggaagtcaatatttctgtgaaacactgagagtaaggattacacagaatcctcccgaagacacagttaaggcagatgggatacacatctgcttttttattctggaataaaaacatttattcttataaactatgtccggtggctctgggaaattaaatgaggcacgtaggaaacagttgcgttgatatcttcagtagtaggtgactcttaggacatttttataggaagaaattgggcctttgggtctggaattttttttttttttttttttgaactggtaatagaatttattcaaatgtgccttaatataggcgctggggcttgcccatggtgctctcgatatataaggcccggacattctgccagtttttcttgagcaatgacaccaagaagttgacagccaggtgaatgttatacacaagctcatcggctgtcatcttcacgtgaccaacagctacagccagacataacaccttcttcatttggaacttgattgtggacttcacctcacccactttggccaccatgttttcgttgtgtgtgagcagggaagggaactttcctgccttatttagacctgggccgaggattcgtggaatctgcttgatcagagactctgaggccaaaaac

SEQ ID NO: 549161 - DNA, 1014 bp, Homo sapiens
tttggaatcctttgtggccatgtatcttcttttcttggtggacacctcagacttccattgacattcatatacacaaatctatatgtaaatggaccacctttgtcaaaaacagtaagacattcattgtactctaatttcaatcatgaatttgcaatcttgtaggaaaaatattccctatggatatattatgtaacaacatttattcatattcaatatagactcagtgaccctttcatctctctgagagtaaaacttaagaaaaaacatctatgtcacgaatgctgtttcatgtggtattcagaggagccgggctctttgtatgaaaaatgtttagactgcaaattaacacagaagagttaacacagcttgcaagtctttttttccccggaagtcaatatttctgtgaaacactgagagtaaggattacacagaatcctcccgaagacacagttaaggcagatgggatacacatctgcttttttattctggaataaaaacatttattcttataaactatgtccggtggctctgggaaattaaatgaggcacgtaggaaacagttgcgttgatatcttcagtagtaggtgactcttaggacatttttataggaaraaattgggcctttgggtctggaattttttttttttttttttttgaactggtaatagaatttattcaaatgtgccttaatataggcgctggggcttgcccatggtgctctcgatatataaggcccggacattctgccagtttttcttgagcaatgacaccaagaagttgacagccaggtgaatgttatacacaagctcatcggctgtcatcttcacgtgaccaacagctacagccagacataacaccttcttcatttggaacttgattgtggacttcacctcacccactttggccaccatgttttcgttgtgtgtgagcagggaagggaactttcctgccttatttagacctgggccgaggattcgtggaatctgcttgatcagagactctgaggccaaaaac

SEQ ID NO: 549162 - DNA, 677 bp, Homo sapiens
attcacttatttctttgccctagctacatttcatgtgctctgtagccacatgtggttagtggttactgccttggatgacaatattttgtgttatagaaccttcccatcatcacagaaagttttttggatagccctgctccacaggacagaattcctattctagaggacaaaactagaggcttataaaagaatacagtgaattttacacactcttattttggagtaaagcaaaaagaaacagtgatcaatgttagtcataaacataaagttataaactgtcccttccacctctaaggaatctctcttctgtcagaaaggcatttcggcagcttctcctctgttattatagctgtctgccggtaatgttgtgtaacaatacaatgtwcaccactggcctgtattttgttcagtgatgccatttttaactaaaaagggttacatcttttgggggggatcaattaatttcacatcttgaagcagaaaatgttgagttcgagtcatcctgtttttggaaaaaacaacaacaacaaaatcagcctggaaagaggattcccagttgccaaataataataatttgaaaataagatacaattattacagtcaacagaattaaattaaatcttttgaataatccctgaattaataacacaaaataggaaaagtaacagaggatggga

SEQ ID NO: 549163 - DNA, 677 bp, Homo sapiens
attcacttatttctttgccctagctacatttcatgtgctctgtagccacatgtggttagtggttactgccttggatgacaatattttgtgttatagaaccttcccatcatcacagaaagttttttggatagccctgctccacaggacagaattcctattctagaggacaaaactagaggcttataaaagaatacagtgaattttacacactcttattttggagtaaagcaaaaagaaacagtgatcaatgttagtcataaacataaagttataaactgtcccttccacctctaaggaatctctcttctgtcagaaaggcatttcggcagcttctcctctgttattatagctgtctgccggtaatgttgtgtaacaatacaatgtacaccactggcctgtattttgttcagtgatgccatttttaactaaaaagggttacatcttttgggggggatcaattaatttcacatcttgaagcagaaaatgttgagttcgagtcatcctgtttttggaaaaaacaacaacaacaaaatcagcctggaaagaggattcccagttgccaaataataataatttgaaaataagatacaattattacagtcaacagaattaaattaaatcttttgaataatccctgaattaataacacaaaataggaaargtaacagaggatggga

SEQ ID NO: 549164 - DNA, 1219 bp, Homo sapiens
ctttctccctagtatcttatttttgcttttagctacaactaccatatttatcccaatgactctaaagtatttatattgaatatcacaaatttagagcttcagatcatattctgtttctgagatttagactaatatcttcaagtgcctgccaggcaaatccatttgaatattaaaagtaccttaattcatcaaktacaaatttaaacccaaagtctttttttctctcagaaacaagatattcttccatccatccagtcagataggtcagcaacttagatgtctttctgtaactattatttcctaaataattcccccaggctctttctttctctccatttccactcccaatactctaatgatttcctaatttatatatggtaaccacactgttctttcctcgcatccattgatatcagcgtagccagagatgtattttctagatgtggatatgataattttatgcccctctttgacaaacaaccatcaaagcctgtaatgagtttcttatccctttagcataaaataggaagttcctatgtggtttacaaggctcctcctgttctgggatatgccttctactccaggctcatcatgaactactctgtttttaattttcctttatatatgattaatatatctctaaattatctttcctatgtgtaactggacacttgccctttccagagagaaaacaggtaaagcaaaaatgattttatgtcattattttattgatgatgtgttttatagaatcacaaaatttagaaacataagaaggatttaggtatcacctaaattcaaagaaatgtgtgtttctaggttgctaaatttgaagagaaagtatgatttggtttggttcatttaaaacaggtcagaaacagaattatatttcaaatttagaagacacggtattaaatgattcatcttatcttggacatttttcctcaagggaaatttttctggaaggaaaagtacatttatatgtgggcttattaagagaaagagagaaaggcatgctattttaatcattaaattcttgatgatgactatcatcatcaagatgagatagaaaagaaatatgagccaagagaatctgttgttgccagcaatcagtttaccagaacacctctaggtgaacattttctaaatggagtgacagactaattgcatctatggggatgagaatctgccatagaagaggatgctgttggtcttattttgc

SEQ ID NO: 549165 - DNA, 564 bp, Homo sapiens
  misc_feature 13: n = A,T,C or G
tctaatctctaanaccaacttttctctccaatcttctgccatcactctgggcttactatcaatttccttaaccaatctcttagctaccagacaatctctatcaaatttatcctacacacagaaaagcactttatctaaaatacagacattaaagtcttttttttttttttttgagatgaggtttcactgttgctcaggctggagtgcagtgrtgccatcatggctcactgcagcctcaacctcctgggttcaggtgatcctcccacctcagcctcccgagtggctaggactacaggcacgcaccaccaccaccacaccaggctaatttttgtattttttgtagagatgaggtctcgtcatgttgcccagggtagtcttgaactcctgggctcaagtgatcctcctgcctcagcctcccaaagtgttaggattacaggtatgagctactgtacccagcctaaagtcatttttttactcaaagttatcccctttttggcatgatcaactctttaactgggcatttaaggttttcattaaactggttttgcttttcttttttacttt

SEQ ID NO: 549166 - DNA, 643 bp, Homo sapiens
caaacaaacaaaaaaacccagacaaatagaacccaggaaggccattaagaggattctcatgcacagatgcctgctaacaaaaactgtcacaaaacactgcaaaaccacaaccttgcacaaacgctgtcaaaatcttagacaaaaaatagttcttcaaggacatctccccagcaactccctgtgcagtcttgggctgctgtcacccttgttactgatctttgtagccaaagataattatctcaaaataattattataatcctccacattttttcctttaaaaacctttgtcttcccttacctccctgaatgtgcacatagtttactatggcacacatattcccactggartgctgtattcccaaataaacatcgttttcttctagagagcctccctctgttatttagattgaaagattaatactactgtttttagtttccacttccctgaagcaggaaaaaatttatattcctctacttgtgtaagaatttgcctatgcaaatgttaattggctctatagttactgattattccagtgatatttcagtgcccctttcagataaatgatttgggcaacgccccaactgcttaccttttaatccagatctggttgtggttaaaaaaaagagcaggaatatacaaaa

SEQ ID NO: 549167 - DNA, 573 bp, Homo sapiens
ggaaatgggtgtggaacatgcctcatcctaccctcctcccttttggaattactgatagaatggactctttaagtctgataagaaacatttacaatctattctctctgaagcctgctacctggaggcttcacctacatgataaagccttggtctccacaaccccttatcttaacccagatatttctttctattgattctaagtctttagacaataactaaactctttcagagaaataaaagacaaaagaaataattcaacaatattacaaagaaatgaagggcatgaattcccaatttcaagggacccattgagaacccagcataacaggcaaaataaagatacacaccaaagcacattattattaaatttcagaacattggagacagaaaggacctaacagagaggaaaataaaaycactggaaaggataaagaatcggaatggtatctgacttctcaacagcaactctggtagtagaagtcaataaagaaatgttttttaaaacaaaaatgtttttaagttcacattttatttaggttgaaataagctgtacaaaattggtatttctgacca

SEQ ID NO: 549168 - DNA, 573 bp, Homo sapiens
ggaaatgggtgtggaacatgcctcatcctaccctcctcccttttggaattactgatagaatggactctttaagtctgataagaaacatttacaatctattctctctgaagcctgctacctggaggcttcacctacatgataaagccttggtctccacaaccccttatcttaacccagatatttctttctattgattctaagtctttagacaataactaaactctttcagagaaataaaagacaaaagaaataattcaacaatattacaaagaaatgaagggcatgaattcccaatttcaagggacccattgagaacccagcataacaggcaaaataaagatacacaccaaagcacattattattaaatttcagaacattggagacagaaaggacctaacagagaggaaaataaaatcactggaaaggataaagaatcggaatggtatctgacttctcaacagcractctggtagtagaagtcaataaagaaatgttttttaaaacaaaaatgtttttaagttcacattttatttaggttgaaataagctgtacaaaattggtatttctgacca

SEQ ID NO: 549169 - DNA, 1071 bp, Homo sapiens
tgaggcttaatgggcaaatgggcagagtagaaaactcggggtctagctgggactaccagctgcgttcccaccctggatttccaggggtcgtcatttttgccctttctaaccaaaggtcttgcctctcgtgggggtggggacggggtctccctctgtggccctcttccaaacccttcccgcatctcccctccagcatctgacgccccacttcgaacgctcgcgggctctccctcccctcccagccgatctccctctgcgagtgggagctccacccccgcggctgtggccccccggctcggtggcggttacgtggctgttcagccgctcgctctccgccgcccctgcgtcgcctccccacagtaacgacgccatggctgcgattgctgctcccgcccccagcacgtgcttccaccaccggcgcgaggcggtgctggccccatccgctggccaatgggcttccttagggggcaggcgtccgcgtccgcgcccgcgaccaccgcggtgcggcgcgcaggcgctggaaggctgggtggcgcgcggaaggggcggagggcagagagcggggcggggggcagagagcggggcggagggcagagagsggggcggagggcagagagcggggcgaaagggcgcggaccggagggcagagggggcagcttccgcagagtggagagcgccccccgcgccgccccgcggcccgccgctcacacagccctccaggcgggagccccccggactccccgccgcgctttacgccccgtgtcggtttccctggaaatttccgcctccacatcacaagatgtcagaaaggttagcgaattggttagcaaagtggagacaaaatctgatgaatttgatatgacgaatgacctcgaatgccacagttgcggaaaggaagcagaactgttcaagctctaactgctgttcctgccctagatacctgtgatgttccacataggctttttaaagcttttattctgaaatgtggtctcttgttaaaaacattacctttcggtataacctctacgtcctacatgcgtttgcataatccggtatagatccctggatccc

SEQ ID NO: 549170 - DNA, 633 bp, Homo sapiens
ctcctgctttctactgtcttgccaccttcaggtcctaaaacaggacagtatagttctggcataagaaaagcttgaaactacatgatatggggcatactgcttaatgcacattatgtaacaggtacttagggagtactttatgtgcctgccattgttctatgtgctttacatttattaattcatgtaattttcagctgtgggattatctgcttttcacagatgaataacatgaggcacagggaagttaaataacttgcccaaggttactcagctagtaagtagtggagctgaaattctaactcaagcagtttggcttcagactgagtccctgcttttaaccataaaagagtgatttgatctaaaaaaaaaaaatcacaaaagcagtgttgtgttctctcacacacatataatgtgtatatacgtgcatacatataatttctatgctttaataatttttttttttgagatggagtcttgctgtcacctaggctggagtgcagtggcatgatctcggctcattgcaacctccacctcctgggttcaagcgattatcctgtctaagactccggagtaactggactactacaggtgtgggccaccacgcctggctaatttttgaakttttagtagaga

SEQ ID NO: 549171 - DNA, 667 bp, Homo sapiens
tatattagcatcccgtggcaggattgccaaaaatttagataaaatttagtgagttgtgtcttttctgatgccactttttcaaagttactgtaacttttaccacttcagagtgtttttattcacttcagcacagtcaccaaactcttttttttttttttttactgttttattgtgttatttttatactgtgagattggggagttctggggtttccccccttaatatgtaaaagcagtattaaacatttcagaattttagttgctggattatatatattgactttttacactttcaggatagatttgaacagggaccattaataactttttcctaaagaaattcagttcagtggcatttgaatgagtgcttactaggcacttgacttttgccttagctttggagatacaaagataattaaaactttaaaatcgctatcacagtccacaagggaaatagatacttctgaaatgtgatgggtgttctggttataaagttcttcaaggctcaaggagaaagtgattctacctgggagttggtgkcaggatggtgactgtgtgaaggaaggcttcaggaaagaagtggcattttaagagtcagccatgaatgagagcatggaatgggggaagggtattccaaccaggaagagagggggcagaagacaagcaca

SEQ ID NO: 549172 - DNA, 1374 bp, Homo sapiens
aaaaaaaaaaaccattcattcttaaagcctatgtattaaatcatctactcctttacttgaaaaatgtatcactagttattggcggtggtgaattcagtttacatggctctgaattcatarcaagtttatttctttaggaaaatgcaaatagttattgtggttggcagaattattttaatcccgcaagagtactataaaattaaaaattaacataaaacagtaattcatcatcttactaggcagaaataaccattgtgagtaagtgataaattgttactttagtagctggcattagagatctttcaaggtagggaactatctttatttaggaaagtatcttaattggccacgttgagtgagaaaagagaggcccagaaggcatgaactcaagaaaagaccaagaaactaaagagatcggcctaaaagtagagcaggaagataaatgacattaattccactgagaacaggagctccagaacaagaagccacaagattattagattatagaaatatgcagaaacctcagggagcacattggtcttcccaaagtgtagactaagggacttaaccaaaatttatgtaaacattccagggaggagtaaattcaattgagagaaagatctaggatggtgctcaagagagtagattctggagtaagattgcctggggttcactttaggttccaacacactttctctgtttctgtctttgtgtgttaaggtgtgtgttcctcaggacccacccagtaatgtaggaactcttaagaattaaaaccaagggagtttaacactggctacactgatgatggaaggatggagaagccaaactgcagataatatggcacccagatattgacaataggagaaagttattactacccttaatagaaaggaacaaagggagaagcaattagaggggcccagagatgagagtcatgtttcagaatccagaatcataatagagaaaactaggattgtagcaggtatgtctagtcggagttggagccatggagaaggcacagcagctttccaaaactgcccggggaaaacatcagatactttacctggaaaaaacagtttggtccaacacatccataaaccagatgtaataagaagaaaataatactgaccaatgaggttcagggccagcgcaatgtatgtgtttgcatatatgtatttatgttatcaaatataaatatataggtacttatatatattacatatatatatgcacatacaactatatcatgcaaccaaatggaaccatcatgcacacatttttataatctgatctaatacttaatgtgaacatggatattccctcatgacattaaatataaatataagtctgtagtagcaaaaaatgtggctgaat

SEQ ID NO: 549173 - DNA, 1374 bp, Homo sapiens
aaaaaaaaaaaccattcattcttaaagcctatgtattaaatcatctactcctttacttgaaaaatgtatcactagttattggcggtggtgaattcagtttacatggctctgaattcatagcaagtttatttctttaggaaaatgcaaatagttattgtggttggcagaattattttaatcccgcaagagtactataaaattaaaaattaacataaaacagtaattcatcatcttactagscagaaataaccattgtgagtaagtgataaattgttactttagtagctggcattagagatctttcaaggtagggaactatctttatttaggaaagtatcttaattggccacgttgagtgagaaaagagaggcccagaaggcatgaactcaagaaaagaccaagaaactaaagagatcggcctaaaagtagagcaggaagataaatgacattaattccactgagaacaggagctccagaacaagaagccacaagattattagattatagaaatatgcagaaacctcagggagcacattggtcttcccaaagtgtagactaagggacttaaccaaaatttatgtaaacattccagggaggagtaaattcaattgagagaaagatctaggatggtgctcaagagagtagattctggagtaagattgcctggggttcactttaggttccaacacactttctctgtttctgtctttgtgtgttaaggtgtgtgttcctcaggacccacccagtaatgtaggaactcttaagaattaaaaccaagggagtttaacactggctacactgatgatggaaggatggagaagccaaactgcagataatatggcacccagatattgacaataggagaaagttattactacccttaatagaaaggaacaaagggagaagcaattagaggggcccagagatgagagtcatgtttcagaatccagaatcataatagagaaaactaggattgtagcaggtatgtctagtcggagttggagccatggagaaggcacagcagctttccaaaactgcccggggaaaacatcagatactttacctggaaaaaacagtttggtccaacacatccataaaccagatgtaataagaagaaaataatactgaccaatgaggttcagggccagcgcaatgtatgtgtttgcatatatgtatttatgttatcaaatataaatatataggtacttatatatattacatatatatatgcacatacaactatatcatgcaaccaaatggaaccatcatgcacacatttttataatctgatctaatacttaatgtgaacatggatattccctcatgacattaaatataaatataagtctgtagtagcaaaaaatgtggctgaat

SEQ ID NO: 549174 - DNA, 1374 bp, Homo sapiens
aaaaaaaaaaaccattcattcttaaagcctatgtattaaatcatctactcctttacttgaaaaatgtatcactagttattggcggtggtgaattcagtttacatggctctgaattcatagcaagtttatttctttaggaaaatgcaaatagttattgtggttggcagaattattttaatcccgcaagagtactataaaattaaaaattaacataaaacagtaattcatcatcttactaggcagaaataaccattgtgagtaagtgataaattgttactttagtagctggcattagagatctttcaaggtagggaactatctttatttaggaaagtatcttaattggccacgttgagtgagaaaagagaggcccagaaggcatgaactcaagaaaagaccaagaaactaaagagatcggcctaaaagtagagcaggaagataaatgacattaattccactgagaacaggagctccagaacaagaagccacaagattattagattatagaaatatgcagaaacctcagggagcacattggtcttcccaaagtgtagactaagggacttaaccaaaatttatgtaaacattccagggaggagtaaattcaattgagagaaagatctaggatggtgctcaagagagtagattctggagtaagattgcctggggttcactttaggttccaacacactttctctgtttctgtctttgtgtgttaaggtgtgtgttcctcaggacccacccagtaatgtaggaactcttaagaattaaaaccaagggagtttaacactggctacactgatgatggaaggatggagaagccaaactgcagataatatggcacccagatattgacaataggagaaagttattactacccttaatagaaaggaacaaagggagaagcaattagaggggcccagagatgagagtcatgtttcagaatccagaatcataatagagaaaactaggattgtagcaggtatgtctagtcggagttggagccatggagaaggcacagcagctttccaaaactgcccggggaaaacatcagatactttacctggaaaaaacagtttggtccaacacatccataaaccagatgtaataagaagaaaataatactgaccaatgaggttcagggccagcgcaatgtatgtgtttgcatatatgtatttatgttatcaaatataaatatataggtacttatatatattacatatatatatgcacatacaactatatcatgcaaccaaatggaaccatcatgcacacatttttataatctgatytaatacttaatgtgaacatggatattccctcatgacattaaatataaatataagtctgtagtagcaaaaaatgtggctgaat

SEQ ID NO: 549175 - DNA, 635 bp, Homo sapiens
ttcgcactgagttacttgagataatgggagaaaactaagacaactgtgcagccaccacaggtaactcaggaactggatagtatgcccagttaggattagagacttgagatgtcttatgtagcaataaactgaggctatcagtggcatgcaaagtaaacccaaagaaagcagaaaggaaataaaaagtactaaaggtaaaatcagtaattttaaaaagaatatataacccaatagaatcaaagtttagttctccaraaagacaaataaaatggatgaactttggcataaataaataaaaataattaatactaaggtattaatttaatatagcatataagtctgtattgaaatattaaatataatacaaaatttaaaatgaataaagaacaaaagagaagacacgaattactgatagtagaaataaaaatgagaacataatcatagatcctacagacattaaaaagacaatacatgatgcctaaaatttatatgaaaaggcaagtgacatacctaagacaatattaaaaaggaataaaagagtgggagcaaacattctgctggaattgaaaaaatactgtagagctgaaataatcaaaacagcatcaagtaatactggcagagggatcaacacatag

SEQ ID NO: 549176 - DNA, 635 bp, Homo sapiens
ttcgcactgagttacttgagataatgggagaaaactaagacaactgtgcagccaccacaggtaactcaggaactggatagtatgcccagttaggattagagacttgagatgtcttatgtagcaataaactgaggctatcagtggcatgcaaagtaaacccaaagaaagcagaaaggaaataaaaagtactaaaggtaaaatcagtaattttaaaaagaatatataacccaatagaatcaaagtttagttctccagaaagacaaataaaatggatgaactttggcataaataaataaaaataattaatactaaggtattaatttaatatagcatataagtctgtattgaaatattaaatataatacaaaatttaaaatgaataaagaacaaaagagaagacacgaattactgatagtagaaataaaaatgagaacataatcatagatcctacagacattaaaaagacaatacatgatgcctaaaatttatatgaaaaggcaagtgacatacctaagacaatattaaaaaggaataaaagagtgggagcaaacattctgctggaattgaaaaaatacygtagagctgaaataatcaaaacagcatcaagtaatactggcagagggatcaacacatag

SEQ ID NO: 549177 - DNA, 590 bp, Homo sapiens
  misc_feature 488, 489, 490, 491, 492, 493, 494, 495, 496, 497, 498, 499,500, 501, 502, 503, 504, 505, 506, 507, 508, 509, 510, 511,512, 513, 514, 515, 516, 517, 518, 519, 520, 521, 522, 523,524, 525, 526, 527, 528, 529, 530, 531, 532, 533, 534: n = A,T,C or G
  misc_feature 535, 536, 537, 538, 539, 540, 541, 542, 543, 544, 545, 546,547, 548, 549, 550, 551, 552, 553, 554, 555, 556, 557, 558,559, 560, 561, 562, 563, 564, 565, 566, 567, 568, 569, 570,571, 572, 573, 574, 575, 576, 577, 578, 579, 580, 581: n = A,T,C or G
  misc_feature 582, 583, 584, 585, 586, 587: n = A,T,C or G
cattcaaattaagacctaaagaacaagaagcaggctgacctcagagagtagagaaaggcagtttgtcaagtggaagagttgttttattcagatctgtagccacttgttatttagggcagctgcccaaacaatgagaatcctgggtcatgattataacagcgaactagcattttttgttcatctacaaaatgccatccttagaatatcactccaggcaagcttatcacaaatgaggaaatggagactcctagaggtaaagggagggagtgtagattcagcctgrgcctaaaggcctctagatgtgtgtttcttgctccttgctaatcatacataggtaagtgagcatggctcagggccacctaactccagactctgaaaaactgttcaatgggtatgtcttactgatgcatgtctgcaatcagatcttaacacatcacaactattctacttgtacaatcagagatatacatatagtaacttcaggagtnnnnnnnnnnnnnnnnnnnnnnnnnnnnnnnnnnnnnnnnnnnnnnnnnnnnnnnnnnnnnnnnnnnnnnnnnnnnnnnnnnnnnnnnnnnnnnnnnnnnata

SEQ ID NO: 549178 - DNA, 548 bp, Homo sapiens
taagtaattgattaaatttgcctactggcccttggaagtgaatggcagagaaagttacccagtttggggaaggattcaaccagtgaagtccttggggaagtaagtatttggcaataaattgggaaatagatccatgggactttaccttcctttcttggagatggctgcctcatccacattccattctccttaatgagaaggccatggaatgggatgttgtgaagtaataattataccattactaaaggtcatagaatcaaagtctttcagaaagaatcttaagtcatccagtctgtytgtctgtccctcctagcccttccataatctcactatcaagtgctcaatctttctttacctaaaaaaaaaaagatttcacctttgatcagccaatagatatctccctgtaacttttaccctatagtccagaaggaacaaatctagtccttcttccatagagtccttaaacattttgaaggaattcatcacattcctcctaagctctgtctcttccaggctaaacattgccaatgtgttgaactttttttcat

SEQ ID NO: 549179 - DNA, 624 bp, Homo sapiens
ccagtgagatgttgggaattaagtatgcataggagtaatctaaatttccttctgataatgaatagtaatttagtctgtgtcttccgggtatggccccatgacttgacttaaagcagagtttacaattcataaacacgccatcttaaaagtgtcttccctaagttacaagtttctgctcttcagttctaatgcagtcaaacttgtctcaagtgaaaattcctttaacccgtattccacttttgtttgacactcagtgacacacgatggccctgacaggttttcctcaataactgacagcaggtgaaagggtctgcatggaaacttctgctacttcacagttataaagttcacatggggaggctgattaggggcatgagagggccaaactccacaatccaacaaatcccctgaggctgagatttggattctgaagggattctttcaatgcttgtctgtatacaaagaatgtagccacctgaactctagaagacagatgagaaaaataaaattcaccctaagttatttctaacttcaaagactayggagtaaaagcccaaagatagaataatggggttggaatttaaaatatcttacgtctagaaatttatgcttttactccagtta

SEQ ID NO: 549180 - DNA, 1733 bp, Homo sapiens
agatcacctggagagcttttttgaaatatcacttctccagatgctgcttcaggatgctcaggatgtggtccatctgtgagtatttgaaaaaactctccaggtcggcctgactcagatttgggttaaggttcttggttagaaactcattctgaatagcataataaaaaccctatggggtgccgtggctcacgtagtaatcccagcactttgagaggctgaggcagaattgcttgagcccaggagtttgagaccagcctgggtaacatagtgagaccttgtctctacaaataatttttttaaattagcccagcatggtggtgcacccctgtggtcctagctacttgataggctgaggtgggaggatcgcttgagcccattaggtccaggctgcaatgagctgtgatcacaccactgcactacagcctgggagacagagggagaccctgtctcaaacaaacttagtaacctcacttggttatgttttaacaaatgttttctgaacatctattaggtatgggtcactacactagttactgcaggggaatttaaagatgattgctatccagcccatggattgaagaagggtatgttcctgccaagaatgcaataaaattccaggaacaaaataccaggcaaagcatggatgtttcctgagagaggtataatgtgatgctgcatttcaggaaaggataagttcacatctgtgttgaagtatcccagatgtgttcataataaagtatgatatgtgatttatctgaaaggagtgtaggaatcaaaaaaggatggatattgtgggtgacgagttctgctttggccatgtggttctgagtaygttataatgtattagagggaattcatgagaaatgcagacatagaaaggtagatcaagattatatggtggaaggcctgtaatgacagactggatagtatgtattgaatcccattgaaattttggaatcttcgagaaactttttgactcagaatcaggcacattttggcatggccaaaggtgtgggaaaatatctgtagaatgaattggaatcagatacagaagtgcaagcactagttcaagattatggaggtcattaggagagtaatgaaaacctatattaggttggtaggaaaagtaagaaaaagaataataaaatcactgttatgaatgccatctgaagtacactttgaatatgcatagagcttttcagtttacaaagtactttttttacatccttttccatttgatcgttgcaaaaatcctgataggcatgcataacttatggttgttctgcttttgttgataaatgaatagaagttcagcttcttgccgaagtttgcctagatgacggcttcagaatgtggagccttcagatttcacatttatgagttttcctttctccacagcacatgaagctgggtcgtagggccagtgttaaagagatgacatctatgggtttataacagccacattattttaattgaagactgatgtaaaacacaattctaaagttctaaatgtagttgacaaacatatatagtattattgatgggaacaggagaataaggcgttgctgacttgtcagttgggggaatagaggtcgatataatggacttagattttgaatgggtgaatttaaaattctaatattagcttttctttagttttgatgaggagaatcccaaatgtaaacttagcagatagttacaatccagacaatactggaattcgtgattacctc

SEQ ID NO: 549181 - DNA, 1733 bp, Homo sapiens
agatcacctggagagcttttttgaaatatcacttctccagatgctgcttcaggatgctcaggatgtggtccatctgtgagtatttgaaaaaactctccaggtcggcctgactcagatttgggttaaggttcttggttagaaactcattctgaatagcataataaaaaccctatggggtgccgtggctcacgtagtaatcccagcactttgagaggctgaggcagaattgcttgagcccaggagtttgagaccagcctgggtaacatagtgagaccttgtctctacaaataatttttttaaattagcccagcatggtggtgcacccctgtggtcctagctacttgataggctgaggtgggaggatcgcttgagcccattaggtccaggctgcaatgagctgtgatcacaccactgcactacagcctgggagacagagggagaccctgtctcaaacaaacttagtaacctcacttggttatgttttaacaaatgttttctgaacatctattaggtatgggtcactacactagttactgcaggggaatttaaagatgattgctatccagcccatggattgaagaagggtatgttcctgccaagaatgcaataaaattccaggaacaaaataccaggcaaagcatggatgtttcctgagagaggtataatgtgatgctgcatttcaggaaaggataagttcacatctgtgttgaagtatcccagatgtgttcataataaagtatgatatgtgatttatctgaaaggagtgtaggaatcaaaaaaggatggatattgtgggtgacgagttctgctttggccatgtggttctgagtatgttataatgtattagagggaattcatgagaaatgcagacatagaaaggtagatcaagattatatggtggaaggcctgtaatgacagactggatagtatgtattgaatcccattgaaattttggaatcttcgagaaactttttgactcagaatcaggcacattttggcatggccaaaggtgtgggaaaatatctgtagaatgaattggaatcagatacagaagtgcaagcactagttcaagattatggaggtcattaggagagtaatgaaaacctatattaggttggtaggaaaagtaagaaaaagaataataaaatcactgttatgaatgccatctgaagtacactttgaatatgcatagagcttttcagtttacaaagtactttttttacatccttttccatttgatcgttgcaaaaatcctgataggcatgcataacttatggttgttctgcttttgttgataaatgaatagaagttcagcttcttgccgaagtttgcctagatgacggcttcagaatgtggagccttcagatttcacatttatgagttttcctttctccacagcacatgaagctgggtcgtagggccagtgttaaagagatgacatctatgggtttataacagccacattattttaattgaagactgatgtaaaacacaattctaaarttctaaatgtagttgacaaacatatatagtattattgatgggaacaggagaataaggcgttgctgacttgtcagttgggggaatagaggtcgatataatggacttagattttgaatgggtgaatttaaaattctaatattagcttttctttagttttgatgaggagaatcccaaatgtaaacttagcagatagttacaatccagacaatactggaattcgtgattacctc

SEQ ID NO: 549182 - DNA, 475 bp, Homo sapiens
tgttcctcacaaaggtggaagagtgaaagacagctgctggaaacccattattgtttctgtaatgatgatgatcaaaactactccataaggatgtgatggaactcattcactcattatcttaaagtatcaataactgacacaaccttaagtgtggcctgttcctggacaatgttcatattgagaccaggcttataagtaaaggcttgcagctctaatgtggagtctcagacattagcatgatgggtgaggtgcaaagatcattgccagtcaatttgacttgaattctccttaaattaagcagatgcatcagaattctcactctgtttctacagaatttaaatatctgaaggtaaggccaaggccagcrgaagtttgaaaggcaataaagtatcttggtgctcctgaaaataactaaaggaaaacttggattgtgaatcataccaagtagatatcacctctgtgtgagctcatcctt

SEQ ID NO: 549183 - DNA, 493 bp, Homo sapiens
gctgctgtccctgcttcttccgctaccttgatctcttatatagctctaactctgaatcctgtcagcacctgggctgtgctgcttgggacaacattgtcttcacaagtcctctccacattctcagaggtgggggtattgccaatgatgggggttrctgcctgagtcccgtcaccaggggacaaagctacagcagacaccaccatctgccaacaaaaagagagatcatctcccacccctggttctgctgacgcaatcactggaagcatcgaggcaccactatgtcctcacctgcctcggattcaatttcctcctagccaggtctgttctaaggtctccagaagttgagaaattaattgaaagataacactttcctccctgtgttaaggtttatcacataatgtatccaaatactgggccagtctttcctttggtctcatttctatgagctaatctgaaaatgccttttctgttttccttagaatttttctaaatg

SEQ ID NO: 549184 - DNA, 1062 bp, Homo sapiens
gggcaacggagacctatatggggagcttcagccacccaggctcctgtagtgctggatttaaagctggaagacctgaatctgatctagtttcccccatttactagctgtgtggccttaggcawttttcacaagtctcagttttcttgtgtgtaaaataggatgattatgtaaagttgtaaatgtcaaatgaaataatgtgtgcaaaagctttataaatagccaaaactaataataaaaaaaggcatagatgcacagatgtacaaggtactcaggatcagaagcaaagacatacctgggccaaggttagggtcaagatgggaatcaaagccaggcatggtggcacatctgtagtcccagctactcaggaggttgaggcaggaggatcacttgaggacaggagtttgaaactggcctgggcaacatagcaagatccagtctccaaacatttttttaaaatatgtatatatgggaatcaaggttgggattgctgggatcggcaccagggctgtaaaagcaattgtgatcaagatcagggttggcactggggtcaaacaaagctttgggcgaggacagggaaagtataaggagcaaggtcacagcagggagttgggtggggtttttgggtcaggataggaatccaaactgggaggtgcacactgtctgagccccgagggggtacagtaggactgtgtagtgactcagcggcggctacactgccttggttaaggctctaatccgatgatcttagtttgggggaaagtagagcgtgggatttaaaaaatccttggagatctgcaaaagtacaggcctttggcaagtcagttccattggagtagtgcaaccatctcatttccttcatccttcttccccacccccagtagttaagtcggatcaagtattagcctatctccagggacatcctgcactgtgctggtcctcatggctctgaccatccctcttccatccatcatccattatccatcatccacctagcatcatttatccatcaacccaagatgtactgagtacttactatgtgtccagcactgtgctagactctgg

SEQ ID NO: 549185 - DNA, 1062 bp, Homo sapiens
gggcaacggagacctatatggggagcttcagccacccaggctcctgtagtgctggatttaaagctggaagacctgaatctgatctagtttcccccatttactagctgtgtggccttaggcaattttcacaagtctcagttttctygtgtgtaaaataggatgattatgtaaagttgtaaatgtcaaatgaaataatgtgtgcaaaagctttataaatagccaaaactaataataaaaaaaggcatagatgcacagatgtacaaggtactcaggatcagaagcaaagacatacctgggccaaggttagggtcaagatgggaatcaaagccaggcatggtggcacatctgtagtcccagctactcaggaggttgaggcaggaggatcacttgaggacaggagtttgaaactggcctgggcaacatagcaagatccagtctccaaacatttttttaaaatatgtatatatgggaatcaaggttgggattgctgggatcggcaccagggctgtaaaagcaattgtgatcaagatcagggttggcactggggtcaaacaaagctttgggcgaggacagggaaagtataaggagcaaggtcacagcagggagttgggtggggtttttgggtcaggataggaatccaaactgggaggtgcacactgtctgagccccgagggggtacagtaggactgtgtagtgactcagcggcggctacactgccttggttaaggctctaatccgatgatcttagtttgggggaaagtagagcgtgggatttaaaaaatccttggagatctgcaaaagtacaggcctttggcaagtcagttccattggagtagtgcaaccatctcatttccttcatccttcttccccacccccagtagttaagtcggatcaagtattagcctatctccagggacatcctgcactgtgctggtcctcatggctctgaccatccctcttccatccatcatccattatccatcatccacctagcatcatttatccatcaacccaagatgtactgagtacttactatgtgtccagcactgtgctagactctgg

SEQ ID NO: 549186 - DNA, 1062 bp, Homo sapiens
gggcaacggagacctatatggggagcttcagccacccaggctcctgtagtgctggatttaaagctggaagacctgaatctgatctagtttcccccatttactagctgtgtggccttaggcaattttcacaagtctcagttttcttgtgtgtaarataggatgattatgtaaagttgtaaatgtcaaatgaaataatgtgtgcaaaagctttataaatagccaaaactaataataaaaaaaggcatagatgcacagatgtacaaggtactcaggatcagaagcaaagacatacctgggccaaggttagggtcaagatgggaatcaaagccaggcatggtggcacatctgtagtcccagctactcaggaggttgaggcaggaggatcacttgaggacaggagtttgaaactggcctgggcaacatagcaagatccagtctccaaacatttttttaaaatatgtatatatgggaatcaaggttgggattgctgggatcggcaccagggctgtaaaagcaattgtgatcaagatcagggttggcactggggtcaaacaaagctttgggcgaggacagggaaagtataaggagcaaggtcacagcagggagttgggtggggtttttgggtcaggataggaatccaaactgggaggtgcacactgtctgagccccgagggggtacagtaggactgtgtagtgactcagcggcggctacactgccttggttaaggctctaatccgatgatcttagtttgggggaaagtagagcgtgggatttaaaaaatccttggagatctgcaaaagtacaggcctttggcaagtcagttccattggagtagtgcaaccatctcatttccttcatccttcttccccacccccagtagttaagtcggatcaagtattagcctatctccagggacatcctgcactgtgctggtcctcatggctctgaccatccctcttccatccatcatccattatccatcatccacctagcatcatttatccatcaacccaagatgtactgagtacttactatgtgtccagcactgtgctagactctgg

SEQ ID NO: 549187 - DNA, 589 bp, Homo sapiens
tttaaatcaaaatgtgtactttaatctaaaatgttttaataatctgtatttcttataattttaacactatgagctgcctrtataagaaatcaagtaaccagaatgcacctataaattatggagcattgtagattttaccacatcaattcatagcagtaactttaagagggcattgtgcaatagttagttgttttcttgttcagctattttaaaggctgctttaacttgtttgtttgtctttgtatataactacttctaatctaatcactagagttattatattctgttatgtttgaccagaattatatgacaagaactggtgacagtttagtgcctctgcccattgtccatgatttacactaattgtgagcagtcttcttatgtgtcagctcattatttttgaaacatttgcctttaggctgttctttgaggtatcaatgaagtgattgaatttcaataccttaattcagtgcacataatactaatgtaacagcagatgaaaattgataaaacccaaaagagagtcatctaaatttgtagttcctatttctgtgggtttgcctggccatggttggagagggaatggtgt

SEQ ID NO: 549188 - DNA, 672 bp, Homo sapiens
aagctattatggcatcttagaatcttattgtattttcttttttgccacacaatagtggaattagctgccagtctacatggatatctatgcacacgcctacatgatgagaaatttccattgtattgtcatttgtttccacctcttctatgtttcgtcccccctggctgcaagtttaattaagctaaagccttcacagaggtcaagcatcacagatggataaataaaatctgagggttgtgttaattgatgaaaaatagtrtaatgaattaatgggtcattcattcaagaaatattttctgaggacttacaatgtaatgcattgttctggggatggttgttaaaaaccaacaattcaaaagacacaccctgtactctcaaagtgtaagggtaatctgatcatgccatttgtatgattataatgattctcatcatagtttggataagatctcacacccctaaaatggccaacaaattcttgagttgtcacatcctttctcctctcctgtctgatgggctacccttctctcagttcacagtgatttctttggaaagccccagcctccacagcatttgggtttcctgttacttctggcacattctataccttggttttcaattgccaactcctactcaatctcagaccctggtttccagattaattcttcaggaaga

SEQ ID NO: 549189 - DNA, 672 bp, Homo sapiens
aagctattatggcatcttagaatcttattgtattttcttttttgccacacaatagtggaattagctgccagtctacatggatatctatgcacacgcctacatgatgagaaatttccattgtattgtcatttgtttccacctcttctatgtttcgtcccccctggctgcaagtttaattaagctaaagccttcacagaggtcaagcatcacagatggataaataaaatctgagggttgtgttaattgatgaaaaatagtataatgaattaatgggtcattcattcaagaaatattttctgaggacttacaatgtaatgcattgttctggggatggttgttaaaaaccaacaattcaaaagacacaccctstactctcaaagtgtaagggtaatctgatcatgccatttgtatgattataatgattctcatcatagtttggataagatctcacacccctaaaatggccaacaaattcttgagttgtcacatcctttctcctctcctgtctgatgggctacccttctctcagttcacagtgatttctttggaaagccccagcctccacagcatttgggtttcctgttacttctggcacattctataccttggttttcaattgccaactcctactcaatctcagaccctggtttccagattaattcttcaggaaga

SEQ ID NO: 549190 - DNA, 672 bp, Homo sapiens
aagctattatggcatcttagaatcttattgtattttcttttttgccacacaatagtggaattagctgccagtctacatggatatctatgcacacgcctacatgatgagaaatttccattgtattgtcatttgtttccacctcttctatgtttcgtcccccctggctgcaagtttaattaagctaaagccttcacagaggtcaagcatcacagatggataaataaaatctgagggttgtgttaattgatgaaaaatagtataatgaattaatgggtcattcattcaagaaatattttctgaggacttacaatgtaatgcattgttctggggatggttgttaaaaaccaacaattcaaaagacacaccctgtactctcaaagtgtaagggtaatctgatcatgccatttgtatgattataatgattctcatcatastttggataagatctcacacccctaaaatggccaacaaattcttgagttgtcacatcctttctcctctcctgtctgatgggctacccttctctcagttcacagtgatttctttggaaagccccagcctccacagcatttgggtttcctgttacttctggcacattctataccttggttttcaattgccaactcctactcaatctcagaccctggtttccagattaattcttcaggaaga

SEQ ID NO: 549191 - DNA, 977 bp, Homo sapiens
ggtgaaaaaggaagaattgacccttgaaggaatcaaacagttttatattaatgttgagagagaggtaactgtctgattgttagacattattttaccttcttgtataagcactgtgctaaaattgcagacactaggaccatgtcttggtttttgcaataatgctagcagagtacacacaagaagaaaagtaacagcactagattgtaaagactggggtggacctctttcttaatgtccaatgtcctttgtcttaagatttggtgcaatatctcattagacctaacagaatgaagttaatttttataatttctacgttttgagactgggttatgagactggctaagactggccaattttggtattttgggtagagacagtttcactttcttgaaaccctggtctggttggaactctgggctctaagtgctaggatcccaaagggctgggattacaggcattagcactgtggctggcccagaatgaatttttaactgaagagttggaaaaactaaatgactgttaactttaacttctaaacattacaggaatggaagttggatacactttgtgacttgtacgagacactgaccattacacaggctgttatttttctcaawacgaggcgcaaggtggactggctgactgagaagatgcatgccagagacttcacagtttctgctctggtaagaggtgttctaaaatgtctggatttccactaaagcaggattcagactacaatatagctgctaagtgctgtgttgtcgttccccctgcttaaaataaagttgtttcttaactatacctgtctgctattctcctgtagcagccagggacgcttggtctcatacatgttgattaaaattaaataccgacctgactggtgattcttgaattaaggtttattaatttgcagcatggtgacatggaccagaaggagagagatgttatcatgagggaattccggtcagggtcaagtc

SEQ ID NO: 549192 - DNA, 536 bp, Homo sapiens
ccagaataggcattccaattcatcctttcattggcaatctatggaagtacctgtttctcctcaccttcactatgatcgatattatcaaaactcagaagtttttgccgaaatgatatgtaaaaaacatcatttaattttaattcccttccatactactgatgttgggcatctttttgtatattagtgaatgaagtgtaagtttgacttaagcttgctgcaaagatcaaatgcataggagtaagtaaagcctgccattcccccatcagkgtatctctttatggccatgttctttatcctgattgtcacggctgttaagaatcttagataatccctagatttttctccacccaaatggtatgagtatacaaaagtgatttaaacatttcttcaaaatcccaggggacagacaggagggcatcttgacctatccaatttattggtacaaagcaaaacatttggagaatgaattttccagttaattattctagtgctttctctttgtaccaggaactagaagaagaaaaaatgttgtacta

SEQ ID NO: 549193 - DNA, 1414 bp, Homo sapiens
cagaacttgtgggatttttttgcagtaatgctaagtccagcatttggttataaattctttgcatacatttttttctttaatgtatgcatttttaaaatatatattttgatgttttaaatagaaaacatggattaaataaatatttgccttaataaagaaagagctactttccaggttagagtaatatttatatacgaacaatagatcatgggttctaatagttccaatggtccgaaagtaaaagaaaatgaaacataagattttagcagaatccttccattgctgctgttaaagtcttgggtgaaagtccataaacataaaacataatggtctatggggagttctactgcagaggacaattatgtggcagtttagagaagccagtccttgggctgatgaaagaagrtcatcttgtgaataaagttgttatgagatgtaagatgtatgatttatactcttgtttcatacccaagtgatatgtaagcatcttctcttccttctaaaactcactgagaattcttcagttcaaatatacaaacaattagagtcagcaatagaagcacaataaaaatagctaacctccagtgaatgcttagtacaagccaggcactgttctatacacttacagctattaactctcagtcttcataataagtcggtgcataaggaactgttattatatctacttttacaaatgcccaagtttgtacagctgctacatgagggagtctttgttcagagcgaggcagcggctccagggcctggggtctttttaacacagtgcttcactgcctctatcaagtcctggtcagtggacaggtcttccactccagagacagtagcccaagtagcaagagtgaagtctgctatgtggtaagtgtttgaggaggatctttgtggtttctgccacctcaatgccaccatcttccttaccagagagaacttcctattttgatgggtgagtcatctagttattcttcgtgatcttcagttcaatttcctctttaaggagaagcttattcatgctcagaattagacttgtcttaccggttacctctgaatattctgttgatcattctctgaggttgaataatcttttctctgccaacatctacccttccctaaacttgaaaaataccagtcaatgctcatcttcctaaaatgtaagcccccaaaaaacaggactcacgtctgttgaaaaatgactcacctctgcggccttcttgtctcagcagtcccctagacatctgccctagtatagatcctttcagtcattgaactcagcaaacattcattgtgcagtcactatggaaagaggatgtgaggtcctgcacatggagtgagaacattcatactagaagattcacactttcttcattcatgtatttattcattcactcaattaagaagcatt

SEQ ID NO: 549194 - DNA, 1414 bp, Homo sapiens
cagaacttgtgggatttttttgcagtaatgctaagtccagcatttggttataaattctttgcatacatttttttctttaatgtatgcatttttaaaatatatattttgatgttttaaatagaaaacatggattaaataaatatttgccttaataaagaaagagctactttccaggttagagtaatatttatatacgaacaatagatcatgggttctaatagttccaatggtccgaaagtaaaagaaaatgaaacataagattttagcagaatccttccattgctgctgttaaagtcttgggtgaaagtccataaacataaaacataatggtctatggggagttctactgcagaggacaattatgtggcagtttagagaagccagtccttgggctgatgaaagaagatcatcttgtgaataaagttgttatgagatgtaagatgtatgatttatactcttgtttcatacccaagtgatatgtaagcatcttctcttccttctaaaactcactgagaattcttcagttcaaatatacaaacaattagagtcagcaatagaagcacaataaaaatagctaacctccagtgaatgcttagtacaagccaggcactgttctatrcacttacagctattaactctcagtcttcataataagtcggtgcataaggaactgttattatatctacttttacaaatgcccaagtttgtacagctgctacatgagggagtctttgttcagagcgaggcagcggctccagggcctggggtctttttaacacagtgcttcactgcctctatcaagtcctggtcagtggacaggtcttccactccagagacagtagcccaagtagcaagagtgaagtctgctatgtggtaagtgtttgaggaggatctttgtggtttctgccacctcaatgccaccatcttccttaccagagagaacttcctattttgatgggtgagtcatctagttattcttcgtgatcttcagttcaatttcctctttaaggagaagcttattcatgctcagaattagacttgtcttaccggttacctctgaatattctgttgatcattctctgaggttgaataatcttttctctgccaacatctacccttccctaaacttgaaaaataccagtcaatgctcatcttcctaaaatgtaagcccccaaaaaacaggactcacgtctgttgaaaaatgactcacctctgcggccttcttgtctcagcagtcccctagacatctgccctagtatagatcctttcagtcattgaactcagcaaacattcattgtgcagtcactatggaaagaggatgtgaggtcctgcacatggagtgagaacattcatactagaagattcacactttcttcattcatgtatttattcattcactcaattaagaagcatt

SEQ ID NO: 549195 - DNA, 959 bp, Homo sapiens
gatcatccagatttaatcatcagaatggggttctagtggcttccactgtatataaatttaaataatggcccatcctctcctgaaggaaggaaagtccatagactctgcccatctgttcggtgaggctgttcattttgaatttctgattaggtgcctcctactattcctacacatgccctatctccaaacaatgccatagtgtttgggggcgtttagtaatttatatatagtgcttgttattttggcttcaaatctgattcctctttggctattgacacaagggtttagggtggactgaacatggccagtgtctatttagatacactgtgcataagtggaagacagtgggagactctggggccacacagccactcaagaatgcgtcctgattgggtgtcaggctggatttcatatctgtgagtgtaatgccaatacctgcatggctagtttagctaatcacataagcccaagaaaaactggggacctgccacagggttgctggaaaataaaattaggacacagtgagaaactatctgaaataatatctaattgccttctttggaaagggggtagggctgtaaccataagcccctgttctcgtatcactttccaacgtgctctgactctgtcagttacctcttctctctcccctctacaagttggcttctttgtacccttgccatacctggggacaagagacacattcttttgttgaaaaaaaatattgatgcgattccaggtctgaaaagcaaaagggggaaaaaaaatcccaactcctttttaggcataaagcacagaggcagcctctgaagctttcttaaatattaacattataattaggggacayggggttttgcttcgcttgtgggtttcacactacatcctgccttaacaggatcttttggagcttgtgacgcctccaagcacgagctgttcttccagagggatgttgacttttg

SEQ ID NO: 549196 - DNA, 1602 bp, Homo sapiens
catgtaatatctgaacttttgtgtatggtctttcttttagcttaatattctcaaacttcatctaagttgtagcatatatcagtacttcattcctttttatggctgaataatattccattgtatgtaaaaaccactatttatgtatccattaatcagttgatggatatttggatggtttctgctttttgtctattatgaataatgctgctctaaatattcaaatttctgtgtgaatatatgtttttcttgggtatatactcaagagtggaattgctgctttacgtctgctttaagatggggaaactgaggcaggaaccctgcctgaggtgatttagcttgttcgtggtagagtcaggattggaatctagtccagaccactccaaaaccactttttttacttttgtttttataagaaaagtagtccattcacaggtccatccactatacttagaacttctctggctaaaaattcagtgaataactatttttgtcagaaattactaacttttactctccactcaaacaccctgaggtcgagtcaggattggaatctagtccagaccactccaaaaccacttcttttaaaaagtttttataagaaaagtagtccattcacaggtccacccactatacttagaacttctttggctaaaaattctgtgattaattatttttgtcagagattactaactttccactcaaacaccctgaggtcatatgattaataccactaatttgaactcatggatccaatagtttcatttggttcatgctgagatctgagctttttgtttcccaggaaaatcaatagcagcagactttrtcttgttagatcaaatataacttttatttttaaaagctccaattatgccctaatgcactgtttatgtactcagagggcttaatgagataataaatgaaattttaatttgacaattaatagtataaaagtgttaggatattttgaaattaggaaggcttttgtgtgattttcttttcttattagcccttgttttaggatataattatacttgtgtcacattatgactgggcagcaactcaattattaagaagtagaaaaatgagtaaatttcctactcctgtgccttttgtagcaagttatgaaaacaaaataaaaagtaaaatgtaatcagaaatgctaagaaatggtgtaattctttcatttccaatcattcccgggtaagaaatggctgatcaaacagccaatacctttatcatgaatattcttcaggaatgtaaactgataagacagcagatcctggaagaacttgggttctcggaatgaggcaacggaaaatttaaaatgtgtgaaatatgttacatatacaattacaaagtcatttcctcacacactgtgtatgcacacacacacacatccaagcccaaacacccacacctacagcatgagttttccagggttccaaaaaagcaaaaatacttggaccattatttaatacacatttactcaatatttgagggtgccaagcatgaaacattataaaggagttaaagtagatggaatctcaaaatacaaggcaagcaaaaatcaaattataaaccttaggtttagctaaagtgagt

SEQ ID NO: 549197 - DNA, 2508 bp, Homo sapiens
  misc_feature 1635, 1636, 1637, 1638, 1639, 1640, 1641, 1642, 1643, 1644,1645, 1646, 1647, 1648, 1649, 1650, 1651, 1652, 1653, 1654,1655, 1656, 1657, 1658, 1659, 1660, 1661, 1662, 1663, 1664,1665, 1666, 1667, 1668, 1669, 1670, 1671, 1672, 1673: n = A,T,C or G
  misc_feature 1674, 1675, 1676, 1677, 1678, 1679, 1680, 1681, 1682, 1683,1684, 1685, 1686, 1687, 1688, 1689, 1690, 1691, 1692, 1693,1694, 1695, 1696, 1697, 1698, 1699, 1700, 1701, 1702, 1703,1704, 1705, 1706, 1707, 1708, 1709, 1710, 1711, 1712: n = A,T,C or G
  misc_feature 1713, 1714, 1715, 1716, 1717, 1718, 1719, 1720, 1721, 1722,1723, 1724, 1725, 1726, 1727, 1728, 1729, 1730, 1731, 1732,1733, 1734: n = A,T,C or G
agacagcttgaattagtaaattgtatattattctagagtaaaagtccttattctttaagataactgtgtatattcacttttttgttgcatcaacactgatttgcaataaatacagaaatgcagtagttctatgtatttacaggatgtttcaggagacgtagagaccacaaatgttctgtgagagaaacacacaggactcccacctagtcatccttagagtgctggttatactccgcctctgtggtataggattatcgagacatcctgcccctcaaagctcatttaggccatatttgccagcatagatatacaatctcctttcaaatgcctagaaaccactacacaaagtgcatttcatttaattgattcacaaataatacataattttcttttcttctcacctgacctgcatgcatgtaaaattttgaagcaaattggctattaacaaattggagtaataaacattgtgtagtcaacagtgtagggaagggatatttctagacacctgtgggtgtgtgagattatttcttcagatattttacattggtgataacagtaataataataataatcataacagtgatgtttactatttttgttgagtgtaatctgcagaggacagcatgatattatactcttttccaagaattatctcctttaatcaccatagcagtaggagataggtactgttttctctattctacaaatagaaaatgaaacacacacagcttgagtgaatttccccatgctacccagccagaaagtagcacaggtagaccttgaatcctgaatctggattcagacaatggactgcaactggagtatactgaatgacagtactgtcatttgtttttcaggttacactgccatattttcaaagaattgctaatgtgttttagataatttttaaagtgcaaaatacaaaatatgtcacatttgctggctaagtggactgtcagtcataggtggactttgcaagtactgataaggaatgagattgcagaggcaataaatgcaaatcccagggacatcacacaagatacagtatgcagttgcatttccttctgcttctgtttaaaaattattttatggtaccaaatactgcagggataacgaagtcaagatatgaagactggctgacttcctggcagatgtatcctaaagaaaaattgaaactgagatgacagttgatgaaatatgcaacgtgtgatatatcggtcttactctaaattctagaattactttttccatttattttgtcagcattcagagctctcaacaaactcaaaacttaacctaggacacttaaaaaataacagagttgaaatataagagtacacacacatgctatcatgggaacatcacagcaaagttgctgcttagacattagaagtagaacaccacaccaaaaaggccgaagctggtagtgagataacagcttagaggcttctctcttatttaccagactgggctcccagcttctccctccatttcctttaaatgaactgatatggtttggctgtgtccccactcaaatctcaccttgaactgtaataattccatgtgtcaagggcaggtggagataactgaatcatggaggtggtttcctccatactgttctcatgatagtgaatnnnnnnnnnnnnnnnnnnnnnnnnnnnnnnnnnnnnnnnnnnnnnnnnnnnnnnnnnnnnnnnnnnnnnnnnnnnnnnnnnnnnnnnnnnnnnnnnnnnnggtaggagcttcatacgggaagttcatggaaaaagacacactcttgatgatttgactatgatgcccggattgacgaatgactcagttatctggccatttcaggaaacaaatttacacacagacacacacatataacttgtccaggtatgagtacatacctattagagagcatatatttgctgtacatttatctgccttattacaaagggcataatgtaaacttttctcaaaggttctaagttatcattaagataacatagaatgaaaatttcaaagatctttatcaatattaatgaatgttcactctgtgatatatttgtagtatttgactttgttcaccttgaagatttattattcttatgataaaaatagagataaataaatacatacaaatgagttgggactacgcactaataaactgttttcttaatgtccctcgggaaaatcaatcttattaatgtgtagctatatctttacattatttatgagcttatgttttgtagttgaatagtctgtgtttgttcttattctttcttgctgagtagtagggacaggggaaataagcaactcttccagttagtcacagaaagggtrggtacatagcaatcctggagaaagatggttttagaggaagtctatttgagggctgtttaagaaaaaagtgagggcgagcattttattccacagggataggtgggtttaggagcccctatttcctgctatacttttgtttttcacatttgtcaagttttcataagatatcctgtgtactcc

SEQ ID NO: 549198 - DNA, 687 bp, Homo sapiens
cagagcaaaactctgtctcaaaaaaaaaaaaaaaaaaatagtccacagaccacacactcagtctaaataggagcatgagtaggggagaatgggagtatttagaaatatgtgcgaggatttcaaaaaattaaggtttgaaaaccaaaggaaaaatgcagttaactccaggtagagaaaagttgcctaagaggaattataactgcagtcaaattacagtcaatttttattgtttgctaattgtgtatttgtaaatttgcctaaaatttacaccaaaacttatttgttatcccccagtcaatattcatggcacttttgcaggcattcacagacatgtgaaaagcagccaaaaatttgagatactcaacacgcatatgcccaactgaggtcaagccaagcaacactctgccttcttctttctgctctcaaactatatacaagtgtctttttgctgtctgtttagtgtcacattattttacattttcrttataatttcactgttttaaacggcctgcaaatgtagtgtgtagtttctcagtgcaagaaggctatgatgagcctcatggagaaaatgtgggcactaaataagtttcattcaggtatctgttattgcaccggttggccatgacttgaatgttaataattcaataatctatattaaataaggagttttgtatttattggcaaata

SEQ ID NO: 549199 - DNA, 666 bp, Homo sapiens
agcttgagaatctgcccagcaaacagattggacagaacaaggcatcaaagatggtgtatcttttaaatccaagtcctatgtcctttctcctacaacaccacagtttcccatggctgataggggaattctaggtactgaataggagtgtgagagagctgttttgggatagggtggatctacctggtaccaggcaaatcataccatataagcaacttcctcctctacccacggtgaacctatccctggggagaagttatggccttagcccttttgaaaattcattagtgaattccagggtttggtcctaggctggctgagcagacttaggtgctatcattgcagtcttwcaccctaagttgaatgtaagacatgcacaggtgcatggtggccagagatagatagaacaatttgccagcaagggcaccatcctaactggaaaagagtggtttccctcaggggttgtgttgaatgccaactgatgagtggacatgaactcatgtcctggcagggtggagtctctccaggatgtgaatgctattatcagaataccagaagcagaggatgggcaacagggactaaacagacggggagagatgaataaagagttaatccaaagttggaaactgggtatcatgcattcaaggaccaaatgaagttgtataggca

SEQ ID NO: 549200 - DNA, 1112 bp, Homo sapiens
tggctagtttcccagtgaatactcacttgccttccacattttttttgtggggcgggggcgtttttgtattttgagatagggtcttgctctgtcacacaggctagggtaaagtagcgggatctcagctcactgcagcctccacttcctgggctgaactaatcctcccacctcagcttcctgcatagctgggactacaagtgttcaccaccacacccagctaatttatgtattttttgtagagaaggggtctggctctgttgcccaggctggtcttgaacttctaggcttaagcgatcctccagccttggcctccacaagtgctaggagttacaggtgtgagccaccatgcccggtcctccctcatttttctggatcaaagggggaatacatgttttgcacatccagccatattattgagagtctgtgttgctagttgcacaggatctgcagtgaccagaacagagatacagtccatgctctcatgcagccgatggtctggtgggggtagcagatagtaaaggtgatgagcattcccaaaggagaaggatgacatgccgggggaggaaaactgaggctagaatgttggctaagggtgaagggggcagggattgctgtatcacccaccctctgacaatgcttcttgtyggctcattttgccttatttcctgactcctagtcagatattccctgactgcataccctcttcatcatccttcactctcattcttccagtttttgtcagttctcaccacccagttatgtatttgttttttgtttttcttttttgagatggagtctcactctgtcacccaggctggagtgcagtgatgtgatctcaactcactgcagcttctgcctcctgggttcaggcgattcttctgcctcagcctcccgagtagctgggactacaggcacctaccacgatcccttgctaatttttgtatgtttagtagagatgaggttttaccatgttggtcaggctggtcttgaactcctgacctcaggtgatccacctgcctcagcctcccaaagtgctgggattataggcacgagtcaccacacccagcctgctacattttctttatcaactcattgctcaacgggcacttaga

SEQ ID NO: 549201 - DNA, 641 bp, Homo sapiens
ttagctgggcatggtggcgtgtgcctgtagtccccgctactcgggaggctgagacaggagaatcgcttaaacctgggaggtagaggttgcagtgagccaagatcgtgccactgcaagggactatccagttcatccaagatgcatctatacttattccacgaatttctctttcactggaaggcaaaggaaggcctcagtccttggttgccctattggaactcccaccccaactctacacacacccgctcctctgcagcactgaagcttccatctgcaatcactgggtcacataaagagacccagtagagttcagagacagagcagacccttgggtctagtgccattctgggtttartgccattttgtaggtgtgtgcccttggcaaggtactactccttctcagtttcctcctttgtgaaatccttggtacttggccctaggtactatgtaaatgagaactattaccacctttctgcctggttatgagctacctgaaggtgcgaatatccccaccacttcttggtacacgacagattctcagtaatggttgtagaaccacagatcctcgagaggaaacatactgttcattactatgaagccacatggaaatagcaagtctctcctgagtgctaaatccaacc

SEQ ID NO: 549202 - DNA, 508 bp, Homo sapiens
ctaaaaattgttttgttttgtttttttacaagtagagcttaataattattaatcaatacccattacttattattaaagttaccagatttaccatcatgcttactaatttctctgttyactattgcttcttgtttctcactgcttccttctgggataaattcccgcttattcaagcatatcttattttagtatttcttttggcaaaagtaaactactgtgagcactaaacaattttttttttgaaaaatgttctgatttatctattgttctctatcattcttgaatgttaggtttagcatgggcatataatttttctttttttttttttgagaaaaagtttctctcttgttgcccaggctggagtgcaatggtgcaatttcagctcactgcaacctctgcctcctgggttcaagctattctcctgcctcagcctcctgagtagctgggattacaggtgcccaccaccacgcccagctaattttttttttttttttttttgagacggagt

SEQ ID NO: 549203 - DNA, 508 bp, Homo sapiens
ctaaaaattgttttgttttgtttttttacaagtagagcttaataattattaatcaatacccattacttattattaaagttaccagatttaccatcatgcttactaatttctctgtttactattgcttcttgtttctcactgcttccttctgggataaattcccgcttattcaagcatatcttattttagtatttcttttggcaaaagtaaactactgtgagcactaaacarttttttttttgaaaaatgttctgatttatctattgttctctatcattcttgaatgttaggtttagcatgggcatataatttttctttttttttttttgagaaaaagtttctctcttgttgcccaggctggagtgcaatggtgcaatttcagctcactgcaacctctgcctcctgggttcaagctattctcctgcctcagcctcctgagtagctgggattacaggtgcccaccaccacgcccagctaattttttttttttttttttttgagacggagt

SEQ ID NO: 549204 - DNA, 508 bp, Homo sapiens
ctaaaaattgttttgttttgtttttttacaagtagagcttaataattattaatcaatacccattacttattattaaagttaccagatttaccatcatgcttactaatttctctgtttactattgcttcttgtttctcactgcttccttctgggataaattcccgcttattcaagcatatcttattttagtatttcttttggcaaaagtaaactactgtgagcactaaacaattttttttttgaaaaatgttctgatttatctattgttctctatcattcttgaatgttaggtttagcatgggcatatamtttttctttttttttttttgagaaaaagtttctctcttgttgcccaggctggagtgcaatggtgcaatttcagctcactgcaacctctgcctcctgggttcaagctattctcctgcctcagcctcctgagtagctgggattacaggtgcccaccaccacgcccagctaattttttttttttttttttttgagacggagt

SEQ ID NO: 549205 - DNA, 508 bp, Homo sapiens
ctaaaaattgttttgttttgtttttttacaagtagagcttaataattattaatcaatacccattacttattattaaagttaccagatttaccatcatgcttactaatttctctgtttactattgcttcttgtttctcactgcttccttctgggataaattcccgcttattcaagcatatcttattttagtatttcttttggcaaaagtaaactactgtgagcactaaacaattttttttttgaaaaatgttctgatttatctattgttctctatcattcttgaatgttaggtttagcatgggcatataatttttctttttttttttttgagaaaaagtttctctcttgttgcccaggctggagtgcmatggtgcaatttcagctcactgcaacctctgcctcctgggttcaagctattctcctgcctcagcctcctgagtagctgggattacaggtgcccaccaccacgcccagctaattttttttttttttttttttgagacggagt

SEQ ID NO: 549206 - DNA, 542 bp, Homo sapiens
tgttctcatcattgagtgtgccactggaaaaacctttacacacaaaactgaaactagtaaataagtaggcaaaatggaattttgggatgagcacaaatgttaactgaccattgacggaaatcgaaagtacaatattacattcaagtaaccattttccaaacactatgatactgaatacaaaactgctaaatttcacctatgctctggcataattcacccttaatctctgtactggacacctcagccttagttwcgtccacaattttttaaaaattgcagtttgttcatactacttgatttgtacatcataatatatcctataaacatggtgagttttacgaatatttagataatgacatgttgaagttaggatgtcaacatataggcttgtttccacttgttctcaaggtcaagggaggtagagaggaagggaaaggaaggaaggaaggaagggaagaaacgagggagacaggatggtttatttacttccaagtcatgcaaaatagattggaatttcacacaatatgtttttagaatgccat

SEQ ID NO: 549207 - DNA, 1586 bp, Homo sapiens
acaaacacagtcaaagactactgcaaattggcatttttgaaaatagacacatccacgtgccatgctcggcagggggcatatgggcaacaatccaggctggccactaagtgagaaaccagctctctttggtcttgtttcagggatcaaatttcctttgcggactctgggtaagctttgaggactytgggtaagctttgaggactctgggtaagtcttgcctgcctggctgacctggaaatctataccatgcatcaaaggaactggtaggtgatgagatagggttcagatttttcgtcttctagataggatctctccacttcattccagaaaaaagtcaaagaactcaccctctgcaaaactgacagaaggttttccaagggaatacaaaatccaagttcagcttagattcagaaagtcactgcaccaaagagtccatgaacctctctccctgcagaatcgagggaagcagttctgggccaaccacggtcacatttcctaagcaaaatggcctgccttcctttcaccttcttgtgtttgcagctctgagttcaagagcaagctgatgacaccagtctagaggcatagagggctgttcctattcattgttggcatctaagacagtagatatcagaatggaaaactattaaattcagagatttcacccaaatgtctgttatacgcaaagcacttttaatgacaaaatgctggggaggatttgatgaatgaaaccaaccaactcactaatgcatttttaaatccctctttcattcatattcatttgtacagtgaatacacttgataaattcaagcagaggcaccctgagatttcttagaataattcataaacaagtggttttgctattatatcactattcctgatgacccccagtctaagcctttctttgtatattgtaccccattattatttattctttctattatgtgacttgccttttcagccttttcctccaaataaaacaaactttagcttatggctttggcatctatttaaacacaagttctcattcaggtattaatcaatatgattactcttttctgctaagatgtgaactttagtatcctatcagctgggtatagaaaagaataatcaaaggcagggcccaaaataaccccaaccaagttcaccaatttgcagactgccaactaaatctgtactgaaaatattttgtttggctggcccagttatttttgttttgttttgttttgtcttggttttgtaattgaatttgaatgacttctggcagaagatactttctcaaatttcataggcccaccactctctattgccttataccccatcctggttcaaatatttatgtaaccttcatgaaacttacaggtatttgggtttgtgatgcctgttctatacagtaaggagtggtagcatgtatccatatttcattcccaatcacatgagtaaagctgtcacctctcactttaataagattattttttgtttacatttgtatgtttttgagatgctcattatgagatttaaaaatctttctatttctaatgtactatgtatgagtcactatgaatgtgtgttgaattttaccatgctt

SEQ ID NO: 549208 - DNA, 931 bp, Homo sapiens
aaggatggaatatctattatgaaagttgagaagtctgactggaattcttaataagaagtaggtgtggtatctgagaaaaatgggccataaaggtctccaagttaagtccaaaattcactttattagtcactctgaaattatcccaaccctgagacaatccattttctaattttttttttcacatcgatccattttgcctgttctttagaactggcaactttcacacatagctggtagggatgtaatatggatcaaccactttgaaaaaggttttgccaggttttagtaaaaytgaacatatatttaccttatgatatagtgattctgtttctatttactaaaaatatatatatgaaaatacatatgcaccaaatataataaaatttgtacaaaaagttacaaagaagctttttcgtaacagtctaaacagctgtcaacacaggaataagttatttttgccatatatagataattaattattgctttgtaatacaaggtatgaacaacagatacatgcaaagacacagatgtattatcacatagtcattatgctgaactaaaaaagccaaacataaaatagcatatactacgtaatcccacttttgaggagaacagagatgtcctgtatattaatagtagtgctgattatagaaatagagggaacatcacacaccagggcctgttgtggggtgggggctaggggagggagagcattaggagaaatacctaatgtagatgatgggttgatgggtgcagcaaaccaccatggcacgtgtatacctatgtaataaacctgcacgttctgcacatgtaacctagaacttaaagtatatatatatatatatatatatatatatatatatatatatatatatatatacacacacacacacactatatagatatatatacacactatatatatatgaaa

SEQ ID NO: 549209 - DNA, 641 bp, Homo sapiens
tattttccattttaccttgagataaacacactttgggaaaaaaaaaattttaatatatattgaaccctaaaatagttcgattttaaaaaaattgtcactgtgatggattgtatttttagcagtgtttccttccatttacataattatttgacaggtgacttttagcattaaatttattttatgactattgcctgatatttacaggttaattttctttatgggattactgtttcacaagtggctcatggaggcagtttttaaaaaatctgtcttaagctctaaatgcttaagaaaggctgtgaaatcyttccacacaagtacacacacatgcatgcacaaacacacatttatctatctatatgtctttcttacagattatgaaccagtctagcatcagatagcatcattggattcgaggtaaatgaaataaatgctttgtatgaagcactgaaaatttgggaatgttcatcttcttaataattgcctgccaaattcagcaagaaaaaaaatacaatgggcctataaaaatgcaaaggtaaacttaaggttcatctttaagacgttataaatgaaatattggaagtgattagaatatagagaatgatttaaaaagtctccaattcccagagtttttgcttagg

SEQ ID NO: 549210 - DNA, 641 bp, Homo sapiens
tattttccattttaccttgagataaacacactttgggaaaaaaaaaattttaatatatattgaaccctaaaatagttcgattttaaaaaaattgtcactgtgatggattgtatttttagcagtgtttccttccatttacataattatttgacaggtgacttttagcattaaatttattttatgactattgcctgatatttacaggttaattttctttatgggattactgtttcacaagtggctcatggaggcagtttttaaaaaatctgtcttaagctctaaatgcttaagaaaggctgtgaaatctttccacacaagtacacacacatgcatgcacaaacacacatttatctatctatatgtctttcttacagattatgaaccagtctagcatcagatagcatcattggattcgaggtaaatgaaataaatgctttgtatgaagcactgaaaatttgggaatgttcatcttcttaataattgcctgccaaattcagcaagaaaaaaaatacaatgggcctataaaaatgcaaaggtaaacttaaggttcatctttaagacgttataaatraaatattggaagtgattagaatatagagaatgatttaaaaagtctccaattcccagagtttttgcttagg

SEQ ID NO: 549211 - DNA, 512 bp, Homo sapiens
tgatctgaatgctggcgaatagggtttttaaaaaaccaacttctggtagaaatataagatataagatccaaataattagatagtagatgtctataattaggttctagtatagtcataataagatagtggtagtccattttgcattgctataacagaatataaataataccagcctggattatttgcaaagaaaataaacatacttggcttatgattctggacactgaaaatttatttggcttatgattcaagagcataacaccggcatctgacaagggccttggtgctgtgtcatcctatggcagaaggtggaagggcaagagagggccagagtgagagggcaagagagggccaaactcatttycataacaaatccactctcagaataacaaactcactcctgtgaaaacaacactaattcattcatgaggggatatccctcatgacttaatcgcctcttaaaggtcttacctctcaacaatgtcacaatggtaattaaatttcaacatgag

SEQ ID NO: 549212 - DNA, 619 bp, Homo sapiens
tttttttacagtgtcactatctaattgtagatctcaaaacaccatggcttagtctgttgcctgtttttgaaattkgtatattgaatcatacagtaactttaaagtctggcttcttttactttatattgtaaaggtttattcaccttttgcatgtaactgcatatattgaagtctagcatttttatgaatgaatattcaatagtttgtttacccattctaatgttgatgaacatttgggcatttccattttgagagtataatgaacagccttgctctgaacattcttgtccatgtttcctagttcttatacatacatggaacggagactgctagatcatataatgtgtgtttttaatgtcttccagatagtgtcaagctgctttccaaagtgaccattaccatttcatatcctcattattaatttatgaaagttcgttttgctctacaaattcaccaatatttgatgctttcaactttaaaattttgccaagttgtaagttgtagagtggtatttaggttttttgtttttgttttacacttttagttcttctttcacagtagttacacatttagtttcctctaatgcaacactggaagtttaaatgatgatagcatgcag

SEQ ID NO: 549213 - DNA, 619 bp, Homo sapiens
tttttttacagtgtcactatctaattgtagatctcaaaacaccatggcttagtctgttgcctgtttttgaaattggtatattgaatcatacagtaactttaaagtctggcttcttttactttatattgtaaaggtttattcaccttttgcatgtaactgcatatattgaagtctagcatttttatraatgaatattcaatagtttgtttacccattctaatgttgatgaacatttgggcatttccattttgagagtataatgaacagccttgctctgaacattcttgtccatgtttcctagttcttatacatacatggaacggagactgctagatcatataatgtgtgtttttaatgtcttccagatagtgtcaagctgctttccaaagtgaccattaccatttcatatcctcattattaatttatgaaagttcgttttgctctacaaattcaccaatatttgatgctttcaactttaaaattttgccaagttgtaagttgtagagtggtatttaggttttttgtttttgttttacacttttagttcttctttcacagtagttacacatttagtttcctctaatgcaacactggaagtttaaatgatgatagcatgcag

SEQ ID NO: 549214 - DNA, 1010 bp, Homo sapiens
tggttaggaaagactggtggaacaatctattaggaacctctgcatcatgaatcactagaaactacagtctcactattctctttacattcttctctctgaagaatctcactctttccctagctaggctattgctatgacactgctattattgtttagctccttctcacggcagtaaataaaaacctgcaaatctgcatctagaccaataatatgttccatcacttctttcagtgggttccccagttagatagttttactaaaggaatatgtgtttaacaaactttgacatttaggtttagcgcatgaattagccattctgggcatagctttgatctacatagatgctagctcagcaccgagaggctgtgtggaatgtgattcaccaaggcagttctgggcagagcaaatgaactggaaaatttcttcttgacctttctggccttgggtgtcctcttgttgcacaggggttacaatctcagtgatcagtgcttaacgattctgcaagtatatactgaaatactcaaatcctccttcagattgactctaaatattaacaaaagggtttcccaaaggtaaaaaataattttgcaatttaacaattaatacaagcttgtaaagcagtacaaattactgtatttttccaaaaaggtcgaaagaatttaaaagctatcatagagtggaaaagcttttttaggtctgatgtgtaaaatgtaaggactttaatgtgcgtttattagaggaaatgtagcygtgacatttggagtcagacatatttgggttcagatgcttgttcaaattctaagtcttattttcctcattggtaagatggagatagcaataggaaacatgtaagagcactctgaggaccaaatgagaatgtgtgtgaggtattttgtagtgtcttgctctatccagccacataacagagctagtattagcatcattattaatatacttgtttacaatctatggagttctgccttcctgacgggaacactcaacagtacgtc

SEQ ID NO: 549215 - DNA, 450 bp, Homo sapiens
ttccaaatgttcaccatatgtatttaactctatttcagatcatacagtcaggcacacacacatacacacatatcaatccaaccattaagattcagtccagttttcarctgtcacctcctccagggagcctaccatgcttgccctcccctgccctacagatacctatctcttcagtttatctctttctatcattgccctcaccacatgatgctacaattatctgtgagcttcttgcagagcagaaatgtgtcctattcatttttgtagttagcattgtgcctggcaccaagtagcgtttaataagtattagctgaataaggtgcatatgtgcgtgaatgaatgagggctcttccagaagaacagctgggagccatttgtctatcagacattttgatgaagaattattgtttctgtaaaggtgagcacaaggcttaaaattattccactttt

SEQ ID NO: 549216 - DNA, 915 bp, Homo sapiens
ttttccaaaaaaaaagttcttaaggggtttctgggtaaaagtaaaatcygcttgttaattatatcctgagcccaccatcgcacgaggaattttgttttcttgacatcgaccagatctgattaagtgaatggtcaaggaggtaataacatcccctctttgaagagctggctctggccaggcccgtttctgatcattttaacaactcgactggttcctctaaaaaattaaatgaaagttagcctcgaacctggaggtacttttccattcatttactgtcggtccacgtcaatattctaaagaggtttcaagtgttcctcctttttgaataatttatcatagctaatgaaagctttaaagattggctaacgtgaaagcggaacaggcattcccacaggtgtcccaaatgaagcctttctggatgaagagatgaaaatacccatttcagcttctgcagccctgaagcaattcagttgatggagtttacctcaacttaagaaggattcattgcgcatccattctgaacacatcctgtacaaatgagatgtaaagtagtattaagagggtgccttaaacagggtaggataggttataccgcagtaacaaacaatgccacaaatgtcagcagtttaaaataacgaacacatgtcttactgggtctctgttcatctcaccctcagagagaaagtagtccaggcacagtggctcatcatgcctgtaatcccaccactttgggaggctgaggcaggcagatcacttgagctcaggagtttgagaccagcctgggcaacctggcaaaaccccatttctatgaaaaaacaaacaaacaaacaaacaaataattggctgggcgtggtggcacttgcctgtagtcccagctacttgggaggctgaggtgggaggatggcttgagcccgg

SEQ ID NO: 549217 - DNA, 915 bp, Homo sapiens
ttttccaaaaaaaaagttcttaaggggtttctgggtaaaagtaaaatccgcttgttaattatatcctgagcccaccatcgcacgaggaattttgttttcttgacatcgaccagatctgattaagtgaatggtcaaggaggtaataacatcccctctttgaagagctggctctggccaggcccgtttctgatcattttaacaactcgactggttcctctaaaaaattaaatgaaagttagcctcgaacctggaggtacttttccattcatttactgtcggtccacgtcaatattctaaagaggtttcaagtgttcctcctttttgaataatttatcatagctaatgaaagctttaaagattggctaacgtgaaagcggaacaggcattcccacaggtgtcccaaatgaagcctttctggakgaagagatgaaaatacccatttcagcttctgcagccctgaagcaattcagttgatggagtttacctcaacttaagaaggattcattgcgcatccattctgaacacatcctgtacaaatgagatgtaaagtagtattaagagggtgccttaaacagggtaggataggttataccgcagtaacaaacaatgccacaaatgtcagcagtttaaaataacgaacacatgtcttactgggtctctgttcatctcaccctcagagagaaagtagtccaggcacagtggctcatcatgcctgtaatcccaccactttgggaggctgaggcaggcagatcacttgagctcaggagtttgagaccagcctgggcaacctggcaaaaccccatttctatgaaaaaacaaacaaacaaacaaacaaataattggctgggcgtggtggcacttgcctgtagtcccagctacttgggaggctgaggtgggaggatggcttgagcccgg

SEQ ID NO: 549218 - DNA, 519 bp, Homo sapiens
gggattacaggcactcacaaccatgcctagctaattttcctatttttagttagggatagggtttcactatgtttgccaggctggtttcgaactcctgacctcaaatgatctgcccaccttggcctcccaaagtgttgggattacaggcgtgagccaacatgccaggcccaaatttccttttaaaggcaggattgatgacaatggcaaatattatttgtggaaacattcccaggtttcccataatctacttttgctttctctgttagaagaattggrtgaggatgggattggcttacagcacaggtgcaaaacaagtagctccaaaataaacacaaactatcccaatattcctctcactcagcagaagtgtggaataatgatgtaagcataagtggtcatgaaaactcctgacaactgtttatctggtaaaaggagagataggcaaaatttcctcaccttttgactatgcgatttacacaagtagacagaacacgttccatctacccccaccaataaagt

SEQ ID NO: 549219 - DNA, 637 bp, Homo sapiens
actggaatcctgctggcacagaggatatatctgagtctctgttaatgctggagagacagtgccaccctcctggggcaagcccctccaagccctagattacgcaaaggtgcacacatgggcagcctcatgggcacatcctccaggtgcaggtgttggaaggacatttggggcagcaaaggcaacgtgtcctcaagaaatacgcatggctggtgcctaaaccaacagctcttgacagcatctgtggggtatgaggctgaattctcagcacggtgctaagcctgtgacacactttcaactgtttaattatcatagcagccctgcagggtaggcaattctagctctatttttgaactgaagaagctgaaatatggaaatgctaagtgactcgcccaaggtcacacagagaatgtgaggctgagcaaatytgggccagagcctgctccattctgaagctctcttctttcccatgacaattcaggggcccggtcagggaactctgcttgccttctaggagacaaggctgaacacagggctgagggttggacatgcgaggcccaggaaggcatgacgagtatcatgttttcattatgcttttaaacactgaacacacacacacttaccattaaagaaaaacaaa

SEQ ID NO: 549220 - DNA, 512 bp, Homo sapiens
accattactaatttgaatttcctgtaattaataataatacataatactggaaatggattcatcttaataagaaagctgaactacatctgaaatttttattcatgttttatgatacacagaacaaaatgacacttttgtacctagccacttctaagtaaatggtttattgtctactacaaaaaattgagacctttcttaccgttgtatgttctcaaactaagagggaggtttgaagttggtggatgtttgttattccaagcagtatattgtagtttgtaattctgttgccttctgaggtatttatgaactatcccctacttgttatttaaggaactgattttcagttaatggtccttagattagctgaggcagatactgaaccactkaaaatggacagttagcaaaaattggaaactcttagaatctcagatctcactctgggtaaaaaatcacagataatatgtactaatagagacacctgaaggtctcccatagctctatgccctttcaag

SEQ ID NO: 549221 - DNA, 749 bp, Homo sapiens
aactcaaattgtttacccatttctaggacatgtgaattcagcctatgttttgatactgatcttattcctagtttcatcttttttcctactattattttcatttggctcacttaacttgcttattgtaaacttatttattattattcatgtgcatactatatgtattgtatatatcttttttacattcacaatccaaaattatttttaaatgtaagtatgattaatgagattgcaaaagatcaagaatatagattttgtatgttgaagataagccagcaataaaataaagtaaaattaaagtctcaagggacaacagaatgaaataatcaataggatttatcttggtagagccataggaaatraagaagtgatatcagagatgaaaaatactaaagacttttaaatttttaaatgtaaacaaaataagcaaagggtctttcacctctcaaattggcaatggtgtttttaaattctaagacctaatacttaagaggcagagaaacactctcatatactggtcacaagagagtgaggtaacgcagaaatcacatggaacaatttctaaagcaaatcgataaccttaaaaaaactcacgcttttttacctagaaatttcctttctgagaatttattctgaagtaatatgcataaaggtttacaaagatttagttttaagaatagtcattaaataattttttatgatattaaaaatatataaaacatcctagatatccaaggaattaacaaggc

SEQ ID NO: 549222 - DNA, 749 bp, Homo sapiens
aactcaaattgtttacccatttctaggacatgtgaattcagcctatgttttgatactgatcttattcctagtttcatcttttttcctactattattttcatttggctcacttaacttgcttattgtaaacttatttattattattcatgtgcatactatatgtattgtatatatcttttttacattcacaatccaaaattatttttaaatgtaagtatgattaatgagattgcaaaagatcaagaatatagattttgtatgttgaagataagccagcaataaaataaagtaaaattaaagtctcaagggacaacagaatgaaataatcaataggatttatcttggtagagccataggaaataaagaagtgatatcagagatgaaaaatactaaagacttttaaatttttaaatgtaaacaaaataagcaaagggtctttcacctctcaaattggcaatggtgtttttaaattctaagacctaatacttaagaggcagagaaacactctcatatactggtcacaagagagtgaggtaacgcagaaatcacatggaacaatttctaaagcaaatcgataaccttaaaaaaactcacgcttttttacctagaaatttcctttctgagaatttattctgaagtaatatgcataaaggtttacaaagatttagttttaagaatagtcattmaataattttttatgatattaaaaatatataaaacatcctagatatccaaggaattaacaaggc

SEQ ID NO: 549223 - DNA, 676 bp, Homo sapiens
aaataaaaattttctataatcaatcaatgagattcctgaagatattttttcccttaatattgaagattggtaaaaacactatatgattctgtcctttccttttaaaattgccatcaaagtcttaaagcctgtcttgattacttttttaatttgggggggctaaaatcatattgttgattgataatgtaagcttaagatttcagcattttgatctcctcaaaaaattaaaatgatatttttggtccagacatggcagctcacactcataatctcagcactttggcagaccaaggcaggaggatcacttgagcycggaagttctaaaccatgctgggacatagagtgagattttctctctatgtaaacaaacaaacaaaaaaatttttttagccaggtagggtgggctgtagtctcagctactcaagaggctgaggtagaaagaagggttgtttgaggagactgaggctgcagtgcgctatcattgcaccactgcactccagcctgggtgatagtgaaagtctgtatctaaataaataaataaaaacaaaacaggactttattttcccagggactatccctcatcactgccaagtttggggacattagggatcctgtgcttacttgcaaaagaattttttctctgtcctccagggaaacttttttttttttaatgaca

SEQ ID NO: 549224 - DNA, 676 bp, Homo sapiens
aaataaaaattttctataatcaatcaatgagattcctgaagatattttttcccttaatattgaagattggtaaaaacactatatgattctgtcctttccttttaaaattgccatcaaagtcttaaagcctgtcttgattacttttttaatttgggggggctaaaatcatattgttgattgataatgtaagcttaagatttcagcattttgatctcctcaaaaaattaaaatgatatttttggtccagacatggcagctcacactcataatctcagcactttggcagaccaaggcaggaggatcacttgagcccggaagttctaaaccatgctgggacatagagtgagattttctctctatgtaaacaaacaaacaaaaaaatttttttagccaggtagggtgggctgtagtctcagctactcaagaggctgaggtagaaagaagggttgtttgaggagactgaggctgcagtgcgctatcattgcaccactgcactccagcctgggtgatagtgaaagtctgtatctaaataaataaataaaaacaaaacaggactttattttcccagggactatccctcatcactgccaagtttggggacattagggaycctgtgcttacttgcaaaagaattttttctctgtcctccagggaaacttttttttttttaatgaca

SEQ ID NO: 549225 - DNA, 802 bp, Homo sapiens
cctttctaggactgaactctttcaaactggtttatgcttttgcagtttcaactgagatcttggggttttaacaagttttcctcctcattggcaaacatggtctccattttcttttctctctctccccaagactgagcctccctttgtcccccaggctgaagtgcagtggcgtgatctcagctcactgcagtctccacctcccaggctcaagcaattctcctgtctcagcctccagagtagctgggactacaggtaggcaccaccacacccagctaatttttgtattttttgtagagacatggtttcaacatgttggccaggctgctcaggaactctggaccccaggtgatccacccccgtcagcctctcaaagtgctggtgaactccagtttttgtcacaacatcactgtgactcttcccgaagcttttcttttatttttaacttggtagttgctactttctgttgatttaattttgggcacttgcgtagcttacaattcagcaaatacctcgaagctgtaaaatggtacaaaatgttatattttcgctctactttcttctttctcagatgttgaccctctcagtctggctattgtggtaactctgggctctatttgtctttccagatgtgaacaactgatgaattttggtktgcctttttgtcttttaactgctgcttttggctcagcactatgaatacttgaccctgctattcttaagaataagcaaagactttgaagtaaaaagcatcatgaaaggtcaggctcacatcaaagtgttttttctttcctcctcagcatct

SEQ ID NO: 549226 - DNA, 556 bp, Homo sapiens
tttgagacgcataggatctatacttacatttatttgatcctgatatgcatgtcttaccatttttacattgagatgcatcttacaaagcatcttatattagataagttggtgcctgtgtcttttccttttattttttccaaaaaaagtgtcattataatgataatgcatcttataatctatgaaatcttagctgagaaaacttgatgtkaaatatattcagagaaaaagactggaaaataatgcacaccaatattaatcctggttatctgcgggtaaggggattatgagcaattttatgtttttcttttcctgtttaaatttcataaaatttcaataaggctaggaaaaactaataaatgttattcaaagtctggggagtattcaaaacaaaggatctggctattgaaccagattacagattacaaattgctgacagtcactgaatgtatctatgtcatggcctaggctctggctagacattccccggcgggtggggggaacgacaaaaagagtcacactaattgtgccactgaggagcacacctctaaggtcctgc

SEQ ID NO: 549227 - DNA, 1716 bp, Homo sapiens
tgattctgattcaatgtctggggtacaagtctgggtgtgggaatttttaaaagctttccaagtgactctaatatgtagtcaatgttgaggtccgcagggccagttggagatagagcccaggtgtgcatgctctccaaagccccaactctttaccacacagatatttttactccattatgcattacttgtttttacgctatagttattctatattacgtataaattataatcttctaacctgagtataaatttttgaggtttagcattatagttaagagcatggactctggagctgactgccctgctcaaatcctagttctactacttactaactagaggatctcagacaagttcctgagccctggttaaggagatgataacagggttgttgatgtttaaatatgttgataaattaaagttttcagaatattcctagcatttgggaggtactgaaaaatgtcaactattctttaaaaattattatgatattttaacaccaataatgcctaacacttcaacagagtatatacttaatgtattaaacttaaatccttctggagagtcatatgtatatggagacataaaggttaatttatcattcctgaaattgcatagaaagtatttagtagatagacatttaataaagcagttttctgtaatcctcattacatgtaaaaatcaaagaaaaggaaaaaatggtggtaagaagaacaaatgactctgcattccttttgaaaatttggtatttctcttccagttgacattgtacccctcaaagttattgtatattttctttcctttcctggagttcatacttttctcatctcctttccctccgattttcttttatctcttccagtttctctctcttaatatacctacatttctttctctttctgtgttcaatcagtaagagccataaactatatcatctttcatattttatattaataactatttccacatacacaaacacattcacaattctaacatccctgaagtcatgaatataaaatgcactatattcatctcctaaaaacagaaatcctttcccctaaaattaatataacaccagataccattattagcagtaccactaatcaaagccagaatggacaaagtttttaagttttttcctttctaactcaagaactatctgggtgatatttagctcctcagttttgaagggtaaacatatactagtaacataagcaagatatttagggtaaggagagtgattatcagagaaataattgcatatgttctccaacaaggagagaaataaccactccatatttgttcatatgatgtgctatgttcacactcaattcctgaaacgatgaacaaggaaaaaaaaacaaaaaaattatatttttctaccacattattaatgtatccactcacactaaaagctgaagtgttttgcatgaatgttgttttatcagtaaaacaggaaagatcttaaatgcatagagaatattcatttattttataaacatttgctaaagcttgggacctactttctacctgaactctgttagtaacaaaagatgaatacaatattgcaaatgtgtcttaaatacattattccattacatygttacaccaatcatgtgagaagaactgtacacacctcatctaacagatgaagaaattcaggcaacagctagaaagaggtgaagacattcacacgaaaaaggccatcaatcaaatcaa

SEQ ID NO: 549228 - DNA, 516 bp, Homo sapiens
tatgtcaacattcaaagagtttcaactgctaaagataaatacccctcatttaaaaaggaaaagagggaccaaatgcatagaagtggggcacagagccttccttgagatgctaatgaagacaaaataatgacattttctcaataagttttagatgggtaattaagaaactttgacctctatttctccaaaaggcaagcattaactaggccaaaatgggcagccaggcattgtgaatattaatatcacaaaaagttaattcactttacagaaggatattttgcataatggaacacgctactgatctaattagaatatagttttctttactaaaatctattaacttttaaagcacatttctaagatataaaacagccatgatgaccttttaataatggttgttttaatattttattgtttttattacaaataawacaaaatgtatgtaataaatcactgcatgttctttctaatcttgccccagacatcacagtttggtatatatctatctagcctttt

SEQ ID NO: 549229 - DNA, 912 bp, Homo sapiens
cctgaagtagaaacaggactcactgctgtctgtggagacatccggtttgacgtggaaggaggagaggagtggagaggggaggctccagcgtcttgcacttgccgtggagccgcgtcctcctccacatggcgctcctcactccctctcggagcagggcctcttcctcctctgtgcccgggacctacccgcacttctatgacttcactctagcttggctaaaaacttcctttttacttaattttttgttgtttttaattgacaaatcatgattacatatatttatggggtgcaaaatgatgtttcagtgtatgtgtataatgtagagtgattaaatcaagccagttaacatttttgtcacctcactttacagattcgatttcaacctaatgaccataagactatcaaggaaactgcagacgaattgaaaatattcgaaggcatcaaacaccccaatctggttcggtattttggtgtggagctccatagagtaagccgaccctaatgccactctttgtgtgaggaatcagtgagggcacagaatggagtcctgttctacatcacaggtcttctcatttcagagcacagtaactttgcctaattctcaggaaatctccatgagttacatcatttctgccttctctctgaaactagaggagttcctcctaaaatgtaagttgtagactgtagtcattaacccgacatcataaagcactgaaacccatcctgccattcagaagattcttmtaaaacgccccttacaccacttcttgtgactttttttccgtttttttgctgaaccactgttgagtacactgttaagtaatactggtttttttcttgtatgtatttagggagccattgtgaaatgagagaaaattcaaacctcaaattgagtttcctccttgtgtttag

SEQ ID NO: 549230 - DNA, 653 bp, Homo sapiens
ttttgattacgttacttataaccagtgtttgcaaagcacatgtgatcttacatttaatttccctttgtaagcatgctttacaaaataatttttttttgagacagagtttcgctcttgttgcccaggctggagtgcaatggcgctatctcagctccctgagacctttgccttgggggttcaggctattctcctgcctcagcctccggagtagctgggattacaggcatgcgccactatgcctggctaatttttgtatttttagtagagatggtgtttcaccatgttggtcaggctggtctcaaactcctgacctcacatgatccacccgccttggcctcccaaagtgctgggatgataggtgtgagccaccgcgcccggcccaaactaatttttctctaaaactttattaatatttcaaaatmttttaaaagaactgaactagcaatactaaaaaaaaatctgtttgcagtttgttttcataatatgaatgccataaatgcctttaatgatttgttcaaaattatatgaagttgtagctctgtaccttctgtaaattgatttcctcaggacacatttctagttacataggcagtctctaattgaaacaaatggattagtttccagagtccacttgaataggcagttgtttggga

SEQ ID NO: 549231 - DNA, 940 bp, Homo sapiens
aaaaaaagaaaacaccaaaatctcatttgattttcacaaaaagtcaggccctaaaaatggcattagagaaaggaatatgcccactccaagagattcaatggtacatcatttcatttaagtctcaaaataagcaatgcatttagactcagcaccaacagtcccatcacttttatttacacccagaaaagttgagactcagaaaagttaatttgcccaaagtcacacaacagatagaggaaataaaagaactcagatctgagttcagatttctcatgtaagtgctcttttcactatacctaatgcacttctatactgcaattaattgttctgctgcccatcagtcagaatttcctgcttatccaaaactgtccattttacaaagcaaaaagagtaggccccaaatttccaaaccatctgaatagtttcttcttgatactttcagaagcactaaaaaacatcaaggtttctcatggaaccaagtcagcaaaaaataagcactgtacttaacagacctctagtttgaagattttaaaagggacatctgctattgcttaaccaccacccacctaatccctttagagctctacatctatctacatacacctcagctgtaaagcawtctgaaggtatctgttaatcccgtcatagtcccagataaggatctcacttaatcctataaaatacaactatcactttcttcaaagtttggtcataatattagcaaatattatttgaatcatttgaattagaaaagcactttcttataccatttaagaagatactaccaggtatggttaagtgaaattatatttccagcctttcagtgagggactctgttcgcttcaatccttgaatatctccctcaaataacagagaaatggttaaaggcaggagacaggatctcaggaaaaatattaacactgcaagagaaaagttgatt

SEQ ID NO: 549232 - DNA, 940 bp, Homo sapiens
aaaaaaagaaaacaccaaaatctcatttgattttcacaaaaagtcaggccctaaaaatggcattagagaaaggaatatgcccactccaagagattcaatggtacatcatttcatttaagtctcaaaataagcaatgcatttagactcagcaccaacagtcccatcacttttatttacacccagaaaagttgagactcagaaaagttaatttgcccaaagtcacacaacagatagaggaaataaaagaactcagatctgagttcagatttctcatgtaagtgctcttttcactatacctaatgcacttctatactgcaattaattgttctgctgcccatcagtcagaatttcctgcttatccaaaactgtccattttacaaagcaaaaagagtaggccccaaatttccaaaccatctgaatagtttcttcttgatactttcagaagcactaaaaaacatcaaggtttctcatggaaccaagtcagcaaaaaataagcactgtacttaacagacctctagtttgaagattttaaaagggacatctgctattgcttaaccaccacccacctaatccctttagagctctacatctatctacatacacctcagctgtaaagcattctgaaggtatctgttaatcccktcatagtcccagataaggatctcacttaatcctataaaatacaactatcactttcttcaaagtttggtcataatattagcaaatattatttgaatcatttgaattagaaaagcactttcttataccatttaagaagatactaccaggtatggttaagtgaaattatatttccagcctttcagtgagggactctgttcgcttcaatccttgaatatctccctcaaataacagagaaatggttaaaggcaggagacaggatctcaggaaaaatattaacactgcaagagaaaagttgatt

SEQ ID NO: 549233 - DNA, 602 bp, Homo sapiens
gtattttcttagtgaactttgcaatataggacaaagcttacctgtgtgaggagtgtttccttctctttaattctttttcttttttgtcttcctctccaattttttgatgcttttttgtgaaactccatccatctttccacaattcacataaaacctcttacctcttttcctaccttgtaccccatttagtcattacttgcaaggtacaaaaatacactgaaaatagctcaacagaaagggaagataagtgttgctcaaagcagagaaatccaagacagaaagtagaggtgagctttgtgcagattgaacctgagtataagaaagtcttcggatctagaaaaatggatatctttctctttctgaagctacatggtcttttgcctttgwttctctttgaaagtggtccaatattgcaaccctcggaagagaaatctctacccttgagtatacttggcctgcacagtaatatgattcattttctgaggccagtttccaagaaaaattgaaaatcaaaaacaagtaaagttactttatatatgggccagatttgagttctgatactaacagctggtcccatcagcagtggctggtgagatattcat

SEQ ID NO: 549234 - DNA, 898 bp, Homo sapiens
tcaattccaccagccttttctattattgtactcttgactcaacctgatctccttgatactgacctgcagtacaatgcagcgtcttctcttctaagctttgaaactaaaactgaataaccactcctcctaatattctgctactattacttgatgtgacatagaagcattgtagactgaacagatgacactataaaaccaaaacaatttaatgacataaaggaaacaataatagtggcataggtttttggttttgttggttttacttttaaatatttgctcaattttgtttgttttaaattgacagttatatatattatgtgcaacatgatgttttgaagtatatctatgcttcaaaaatatatatatcaatatacttcaaaacatrttttacatgatgcacatcatgttgcatacacacacacacacacacacacacacacactgtggaatggctaaatctagctaattaacatgcagcatatctcacatgattattttgtggcaagaacagttaatatctgctcttttgcattttccaaggatacaatatattgttattaacttttgttttaatgtaaagcgcatctccctaagcataatatggaacctatcacatttatttctgccaactaataagcttctggtaaaactcatactatatatcaccagtgttttggtatttctaaaaaacttaggttgcaacaaatattagtgagcagaacattaatgtcttataaaggaacttcttcatggacactattaatcatattaattgtcctgcctttgaaatttgggttcttctacactaaataaaatttggataacttaattcaggagaaaccactaaaaatggctagaagaatagaagtattagaaaagtaaacacacagttggaaaa

SEQ ID NO: 549235 - DNA, 530 bp, Homo sapiens
gcattttttacttctcctttaaatacatggagatataaagtataatgtaatccaaatattttgattctcatataaaaggtttttgattctgatgtgaaaattattttgatcaaagagtaaattgttattgtatattaaatcatataaatagacatttatatttaatggatgtattcatatttgttaaaatctctttataaacaagaattggtaataaatgagattacattgtaataattggcatcttgaaagggaatcttggtacttttaaggggaaagcaatacctacttcatggattttcaaacagttatatttagaattcttgacttctatacctggaagtcaccttagaagttaccttagaagttgtctcttgtaccatccacaattataggtgcaatgttaaagcttagagaggctgagtatgtcttgcttaagatcaaataccttgttaccatcaatatgagagctgtgatttccttgcaaactgggtacttttatatcagagaagccaacrtagtcctgtaca

SEQ ID NO: 549236 - DNA, 2100 bp, Homo sapiens
tccccctgcccctcaccaatccatgctaaaaggttaagtcatcaatgggtaagtgcagagttgcatcgatgtgtatatgtatgtgtgggtatgtatggaggttatggcattttaaaacatagaggttttatactgtgtcttagttggaaaacatatggatcagctatagatttcgttttaaaaattataagtagtttataatatgagcttcattggtttcagaacaaaaattacatgtttccatgtttatagctggaaaaaaataagtgttgagcaattacctaactgaattagtaattttaaaaaatcatctatcttatcaaagaaggaagtgtgtttatagtgtagcactctttattgatgcaaaagaaaattttttccctttcacctgctgtcaagttcagtgtttaaggagagtggttgctggttatattacaagtgtgtgccagaaatatgttgtatcagagtaacatgggcagggcctagagaaggtcacagtgccagaataaaatgtccgttttctattttgtaccactcagtaaaaaataactttgggcctagaaaagtggaagaacatacggattgaatttttttttaactacttgtctaaaaaattcttagggtaaggacgtagtcatttctgatttctctcctaacaatgctgcccaaagaaatgacatttttgtttgtattgcagtcttaattttttgtttgttaaaaagcaaaagaaataaattttctcatggccaaattgtaaagtttattggttattaaattttattatattggatgatcttaaaatttaatgctaaatcttataatacaattgttgcttatacaatgtatatattttaacagcattttggtataactttgcagaaattttagttctaagcgaaggtataaaattattcaaacagagcactgttccagctatactcagaagggacactgcatttgcgtggattttctttaaaatatattttatttcacatcctctttttaggtggacaagcaaggctctcagtcattaccattctctgtggagaggtaccgcacgtttgtcacaccatttctcatgcagcgatggacatgcattttactccatctttcttttgtttgtactaaagctttttcttcacaatctgttttcaaatctgttcatgttttgaatttacaattgtagaatttgagttgggggaaaagaaaaagaagcaaaggtcatattgattttcttttaaaaagaagagaaagaaatagcctattccttgataaaaatgaggaaagtggataagtatgaaatatatacatctccactgggaatttctagtaattttcatgttagctgactgtgtcattctaccaaatggaacttgctgaaatcatatagttctttaattataaaatcgatttgggaaaagaaaaaagtactttaatttctgttgcttcaagggattgtccattcagaatatttttctggccactataaattgtattagaaactaagctgtaagaaataaagatagtaaatgtctaacacacatattcctttttcttattaatgttcttttttcatagcaaacctatcccagttctttcaacccttcttcatatgacttacctttcagaacccttattcgtagattgtcagtacaagtgacattgtgccgattctgaacaatttaaaaaagggtagttgttgtaagccaatttgttttggggtggtttgttacataaggggaaagctaactaatagaacaaaggtaattcaaattttgtcttgttttaaatgatcacatcatactgcttatgatggttatgagctgcttatcttctgacacaaacatttctaaagatttttaattgtacaatattcttagtaaaataattttgtatgtgcaccccagacacatatttactaaaattatatacatgtacagatgccaattatatacattaaatatcagtgaagcttgacttctttttttaaaataaaaaataartatagtggttgtagtcattatttcctcattccagtggatcctcatgtgccttctgggttatagtcactccattcaggaccactattctaaaactctc

SEQ ID NO: 549237 - DNA, 615 bp, Homo sapiens
tggccacaccttccaggatatgctcaaaacatttccaaggagactttcctaacccataaggttgagttaaggaccttctcacttgctcccataatcatcatttacttatctgtctccctcactagtctgtgtgtttgggggcataacctgtgtcttattcatttttggatctctgggaactgtctggcccctccaggccactttctggaaccaacaggcaagctcgataaataggtgttagtgattggatagaagaacacatgaaatctgttagtaactctttggatctcaaagaactttgattttcttcttcttcacataggatcagaataaaattcattatatgtaccatagaattattggttatgtagagttttacattcttctgaatccaattatttttattagttatattcagttgaaacaaatgaattaaccagatamtgtcaaccgtagagctagcctggggggcagtaggaagtcttataggaatgtaagtctcaacttttatagttagctagcaacaactatggaggaacctagcactctttttttttgagacgaagttttgctctcgttgcccagactggagtgcaatggcgcaatctcagctca

SEQ ID NO: 549238 - DNA, 1923 bp, Homo sapiens
acagtgagtcggggagtcactgcgtatgagcaaggagctctcacttgattatactcatgctctgctcaggttggctgatttgccaatagatttcatttctatagcagtgtactggataatagggactgcacactcaagtctaaaatgtattcattcgttctacacctgtttagcgcctgctctgggcaaaaccttgtgcagggtgctgtatgttggctcccaaaggagaaggattgctgccaagtttgctctagggcttgagccatgttgactattaaataccagttcagggtgttcagtaaagtctctgataatgctccataactttytaattagtcaagcctttaaatagaaagaggtctgtcattttattgtgatttccagggttactttatcctccgcatttccaaagtttctatgacctatagcaatgagttcataataatatccacgtataattttattttccatatagagcagttgacatcaaatagcagcccatgtgctaaatccagccagctgataaatgttttgtttggctcacacagtactttaaattctttttaaaaataacttgccaagcaacccaagtgcctatagatagatgaatagataaacaaaatgtggtacatacaattcagccttaaataagaatgaagttgtgacacatgctacaacctggatgaactctgaagacattatgctaaatgaaataatccagacacaaaaggaaaaatattgcatgattcctcttataagaagtacctagaatagtcaaattcatggagacagaaaggagaattgtggttaccaggggcgagagggaggagaatggagaactgtcatttaatgagtacatagtttcagtgtaggatgatgaaaaagttcttgagttggatgttgatgatggttgcacaatagcataatgtatttaatgtgactgaaatatgcacttaaaatggttaaaatggtaaatttttgttatgtatattttaccactataaaaaagattgaaaaaaccttctccacttatacaaatgaatatgtgtgcactgtggaaatcaaaactgtaggtaagtttaaagtatataaatccttccacaattttaaaggatcctttaagatttaaatgtttaagacggcaggcacggtggcttgtgcatgtaatcccagcactttgagaggccaaggtgggaggactgcttgagcccagaagttggagaccagcctgggaaacataatgagaccctgtctctaaaaacaaaaaataaattagccatgcatgatggcatgcgcctgtagtcccttctacttggggggctgatgggaagatctcttgagcctgggacatcaaggctgcagtgagccatgattgtaccactgcgttccagtctgggcaatacagcgagaccctgtctcagaaaaaaaaaaaagtttcaagaatatttatctggtgaattatttttactgaaatacttgaattatttttactgaaatacttagatgggacaaggcaaggaggactttgcaacattagaaagatgagaggtagtatactctctcaaccactaggtgagctctttccattcctacagtgcttctttctttctttattatcattattattattattattattattattattattattattattattctgagacacagtctcactcggttgccaaggctgaagtacagtggtgcgatcttggcttactgcaacctcagcctcctgggttcaagagattctcctgcctcatcctccaagtggctgggactacagacatgcaccactatatccagctaatttttatgtttttagtagagacagggtttcaacatgttggccaggctggtctcaaactcctgacttcaagtgatccaccagcctcagcctcctaaagtgctaggatcaca

SEQ ID NO: 549239 - DNA, 1923 bp, Homo sapiens
acagtgagtcggggagtcactgcgtatgagcaaggagctctcacttgattatactcatgctctgctcaggttggctgatttgccaatagatttcatttctatagcagtgtactggataatagggactgcacactcaagtctaaaatgtattcattcgttctacacctgtttagcgcctgctctgggcaaaaccttgtgcagggtgctgtatgttggctcccaaaggagaaggattgctgccaagtttgctctagggcttgagccatgttgactattaaataccagttcagggtgttcagtaaagtctctgataatgctccataactttctaattagtcaagcctttaaatagaaagaggtctgtcattttattgtgatttccagggttactttatcctccgcatttccaaagtttctatgacctatagcaatgagttcataataatatccacgtataattttattttccatatagagcagttgacatcaaatagcagcccatgtgctaaatccagccagctgataaatgttttgtttggctcacacagtactttaaattctttttaaaaataacttgccaagcaacccaagtgcctatagatagatgaatagataaacaaaatgtggtacatacaattcagccttaaataagaatgaagttgtgacacatgctacaacctggatgaactctgaagacattatgctaaatgaaataatccagacacaaaaggaaaaatattgcatgattcctcttataagaagtacctagaatagtcaaattcatggagacagaaaggagaattgtggttaccaggggcgagagggaggagaatggagaactgtcatttaatgagtacatagtttcagtgtaggatgatgaaaaagttcttgagttggatgttgatgatggttgcacaatagcataatgtatttaatgtgactgaaatatgcacttaaaatggttaaaatggtaaattkttgttatgtatattttaccactataaaaaagattgaaaaaaccttctccacttatacaaatgaatatgtgtgcactgtggaaatcaaaactgtaggtaagtttaaagtatataaatccttccacaattttaaaggatcctttaagatttaaatgtttaagacggcaggcacggtggcttgtgcatgtaatcccagcactttgagaggccaaggtgggaggactgcttgagcccagaagttggagaccagcctgggaaacataatgagaccctgtctctaaaaacaaaaaataaattagccatgcatgatggcatgcgcctgtagtcccttctacttggggggctgatgggaagatctcttgagcctgggacatcaaggctgcagtgagccatgattgtaccactgcgttccagtctgggcaatacagcgagaccctgtctcagaaaaaaaaaaaagtttcaagaatatttatctggtgaattatttttactgaaatacttgaattatttttactgaaatacttagatgggacaaggcaaggaggactttgcaacattagaaagatgagaggtagtatactctctcaaccactaggtgagctctttccattcctacagtgcttctttctttctttattatcattattattattattattattattattattattattattattattctgagacacagtctcactcggttgccaaggctgaagtacagtggtgcgatcttggcttactgcaacctcagcctcctgggttcaagagattctcctgcctcatcctccaagtggctgggactacagacatgcaccactatatccagctaatttttatgtttttagtagagacagggtttcaacatgttggccaggctggtctcaaactcctgacttcaagtgatccaccagcctcagcctcctaaagtgctaggatcaca

SEQ ID NO: 549240 - DNA, 617 bp, Homo sapiens
tagattctaaaataaagtctttgtggttctgtgttcacaagccaaatcccacccctcaaaatggcacattgaaaacaaaatgactaaaatctacatgctaaaaaatgacacactgaaaacaaacagcagactaccactcaagaaactaagttttagggtagttatttgaataagtgtttattaagccttctgttctcttcctgacattctgaagcttttattataattgcaaggctctgaagataattttgaattgtatacagctgattatttttaaatatcctttgaccacctaaggagctgaacagtttgttaaaacagtgaacaatcggccgggcgcggtgactcatgcctgtaatcccagcactttgggaggctgaggtgggcgggtcacaaggtcaggagatcaagaccatcctggctaacacggtgaaacyccatctctactaaaaatacaaaaaattagccgggcatagtggtgggcacctgtagtcccagctactagggaggctgaggcaggagaatggcgtgaacccaggaggtggagcttgcagtgagccgagattgtgccactgcactccagcctgggcgacagagcaagactccgtctcaaaaaa

SEQ ID NO: 549241 - DNA, 617 bp, Homo sapiens
tagattctaaaataaagtctttgtggttctgtgttcacaagccaaatcccacccctcaaaatggcacattgaaaacaaaatgactaaaatctacatgctaaaaaatgacacactgaaaacaaacagcagactaccactcaagaaactaagttttagggtagttatttgaataagtgtttattaagccttctgttctcttcctgacattctgaagcttttattataattgcaaggctctgaagataattttgaattgtatacagctgattatttttaaatatcctttgaccacctaaggagctgaacagtttgttaaaacagtgaacaatcggccgggcgcggtgactcatgcctgtaatcccagcactttgggaggctgaggtgggcgggtcacaaggtcaggagatcaagaccatcctggctaacacggtgaaaccccatctctactaaaaatacaaaaaattagccgggcatagtggtgggcacctgtagtcccagctactagggaggctgaggcaggagaatggcgtgaacccaggaggtggagcttgcagtgagccgagattgtgccactgcactccagcctgggcgacagagcragactccgtctcaaaaaa

SEQ ID NO: 549242 - DNA, 393 bp, Homo sapiens
tctcccagccattcaaattttgcagctgaggccccagatataatgaagcagaaataactcattcctgtcatgccctgtcaaaaactaccattgaggtgttttgctatgcagcaattggtaataaaaacacaatctttccagttaaggtctccagcagtgcaatgtgggataacccaaatgacttttgcatttgggcckcaaagtaacaacaacaacaaaaaaaactgattaagggagagagggtctagacacaaataccacctacaaccatatactgactagatggtcttgggttggtcattcaagcactcttgtttccatttttttccctctacaaaacaaagaaaatcatcaacagactacagatgctcctcgacttacaatgggttgctc

SEQ ID NO: 549243 - DNA, 573 bp, Homo sapiens
agtttctatcccatttccaattactacaaattacacaagaaaaaaatgattgtatttatttatctcaaggcagtaggaatataagcatcttttagaatactcttttataccttggagatgttcaacaatgagctagcactactcacataatcaaaaaaaaatattttctgctatttggaactaataacattactactttggctgccttaaatgcaatactgaccaaacaaaaacccctcagagacccacagaactggagagaaaatgccgytttgagaagcaaagaataaaacacagagcagtaaagaatatatcctgtggacgcagccaacatctttggaaagaattactggattctaagcggccaacaaattgcattctaacaagaagagccttgctcttcatggactgaggatacttctaatattcttgtatgtcagtgagtccaaatctgcaatgcagctatgtgaactaactggaagggctagggagagctttgtcactcatgttcctctagtctgcaactgtgttcttctttaaacaagtttgcagtgtctcctctgcctgccagac

SEQ ID NO: 549244 - DNA, 573 bp, Homo sapiens
agtttctatcccatttccaattactacaaattacacaagaaaaaaatgattgtatttatttatctcaaggcagtaggaatataagcatcttttagaatactcttttataccttggagatgttcaacaatgagctagcactactcacataatcaaaaaaaaatattttctgctatttggaactaataacattactactttggctgccttaaatgcaatactgaccaaacaaaaacccctcagagacccacagaactggagagaaaatgccgttttgagaagcaaagaataaaacacagagcagtaaagaatatatcctgtggacrcagccaacatctttggaaagaattactggattctaagcggccaacaaattgcattctaacaagaagagccttgctcttcatggactgaggatacttctaatattcttgtatgtcagtgagtccaaatctgcaatgcagctatgtgaactaactggaagggctagggagagctttgtcactcatgttcctctagtctgcaactgtgttcttctttaaacaagtttgcagtgtctcctctgcctgccagac

SEQ ID NO: 549245 - DNA, 2783 bp, Homo sapiens
  misc_feature 489, 496: n = A,T,C or G
ccgtctcaaaaaaaaaaaaaaaaaaaaaaaaaaaaaaaagaaacctgaatggaaaaacaaatccccctcccactctccatctaataacaagctggcttgattgacagatgactaatctgcacaggtagaaaggtgagtaggagaggagaaagctgttgtcgattacaagggcaacagaaataatcagaaattcctggctttcagtgaaaatattaaggtgagtcaaacaataaattaaatacatgttaccatctactttattattccacatacaaatgacaacctgttaatgacatctgccactcactagaagcacagcatatgcatttcccaatagctgctttaaaactggaaaaatcctaatcccagtaagacaggaaaatgctatcagagttcttgcagcatatactcatgccatatccctgtgtgctaccgcatagatgtgaccagaggttaaatatacacttctggaatttgcataaaatgtanaatcatntaaatgaaaatttatttgcattgctttattcatatacactttgctaaaggttttaaaaataatataaactcaatatctcttatcaactttccccaaaatattttttgtggccaaagttatggtttcaagtcaagtatattttaatatgtattttaataatgttgaaattttgatgtttattcaaaataagaattctatattcttaaaagcatttttagatactctttctctaaacaatttaattaaaaattcctgactagctgaagagctttgggcaagtaattttaacatatttgggtctcaatttacttctctgcaaaagggaaaaaaaatagtgtatctacctcagagagttgaaagcaatatataacatatacacaaggtaacatgatgcactgtgcatggaaaactaccatcttcttttatggcatggcatggccttggcagtgtctatcaggaccttctgcttatccacatgtatgtaagaccaccattcaaaataacttccacgaggaagaaagcaaaagttactgttaacagcttcagaaccccacatataccttgttatcttattcagaatccactttgacttctgattagaaatagtaacttagttatcaaaagataaaatgaaatgacaggaatatatcagggtcccagacaagagaaaaaaaaagaaaaagaaagaaaagaaaaggaaggaaggaaggaaggaaggaaagaaagaaaaggaaggaaggaaagaaagaaggaggaaagaaagaaagaaagaaagaaagaaacaaagagaaagaaagaaaggaaggaaggaagaaagagaaagaaaggaaaggagagagagagaaggaaggaagggagagagagaaggaaggaaggaaggtaggagggagggaggggagaaagaaagagaaagagagaaggaaggaagagagagaaagaaagagggagagaaacagaaagggagatagaaggaaggaaagaaagaaagaaagagagagagaaagaaaaaaagaaagaaagaaagaaagagaaagaaagaaagaaagaaaagaaagaaagaggccttccagaatttagccaatagtgaaatcattcatatacctactggattaagttcagtgacatcccactcaaggtattctgcaacatgcatcatctgactgatgatattttctagctcctggaagagaaagagagataaaaaatatgaatacaagatcttagtgagttttaaatctttcacttgcagaaattgttttgttcaatgtgtagctaaaaaagttaaatgagttctatgggaatatatatatgtacataatcctttttaaaggtctaattaactatataaagaaaaaagaatcctgaatataaatttatcttgtacattgtctagaaattttcaccaggagagggcacaactttacaaaaaatacattttcttctactaaaagagagtgtctgaagaaagcaggaccaaatacataytgtcacatgtgatttttaagacactgaattccctgaacctttggcttgaaaatagatgtgaaagggtggacaaatcatttgaggacaactgagaagtctatttttatcttgatacactgagaatatacattgactgttttagtcatgtattgaataatttgctcttgaaagaagagtgttcagggccaaggtttgcaggacaagtatatgcagcatttattttgtgagaggatgaaattttagtttgaatttccatattattctgctcaattatcaactctttgaagaattgcaagttaatacagatgacctggctaaattaattaaaacattttcctgcctatttatctaatgttttaatttttctctacctacagaaaagattaaacatggctttgtgaaatgcttgtaatttcacatgaaaacattacataatttgaaaagtggtgttttaccgtatgatttaaaatgtaagaagtataaaagaataaagcttgaaagtgcaatagtcaaagagtattctactcaaatctctaatctaatatatgtagtcgatgttcatggaatagagaagaaatacgataaaacagattctcttttgggaagccgtgtttccctccgaggaactaatgaaagctatactccctctctccagaaaaaaaaaatataattatgaatatgttacttaagtaagacaggctgccccagaagtaatacaaagataaatgtatttattacagattaacaaattttaaaacataaatccctttgaattataggttaaaagtgtgcatgtgtatgc

SEQ ID NO: 549246 - DNA, 2783 bp, Homo sapiens
  misc_feature 489, 496: n = A,T,C or G
ccgtctcaaaaaaaaaaaaaaaaaaaaaaaaaaaaaaaagaaacctgaatggaaaaacaaatccccctcccactctccatctaataacaagctggcttgattgacagatgactaatctgcacaggtagaaaggtgagtaggagaggagaaagctgttgtcgattacaagggcaacagaaataatcagaaattcctggctttcagtgaaaatattaaggtgagtcaaacaataaattaaatacatgttaccatctactttattattccacatacaaatgacaacctgttaatgacatctgccactcactagaagcacagcatatgcatttcccaatagctgctttaaaactggaaaaatcctaatcccagtaagacaggaaaatgctatcagagttcttgcagcatatactcatgccatatccctgtgtgctaccgcatagatgtgaccagaggttaaatatacacttctggaatttgcataaaatgtanaatcatntaaatgaaaatttatttgcattgctttattcatatacactttgctaaaggttttaaaaataatataaactcaatatctcttatcaactttccccaaaatattttttgtggccaaagttatggtttcaagtcaagtatattttaatatgtattttaataatgttgaaattttgatgtttattcaaaataagaattctatattcttaaaagcatttttagatactctttctctaaacaatttaattaaaaattcctgactagctgaagagctttgggcaagtaattttaacatatttgggtctcaatttacttctctgcaaaagggaaaaaaaatagtgtatctacctcagagagttgaaagcaatatataacatatacacaaggtaacatgatgcactgtgcatggaaaactaccatcttcttttatggcatggcatggccttggcagtgtctatcaggaccttctgcttatccacatgtatgtaagaccaccattcaaaataacttccacgaggaagaaagcaaaagttactgttaacagcttcagaaccccacatataccttgttatcttattcagaatccactttgacttctgattagaaatagtaacttagttatcaaaagataaaatgaaatgacaggaatatatcagggtcccagacaagagaaaaaaaaagaaaaagaaagaaaagaaaaggaaggaaggaaggaaggaaggaaagaaagaaaaggaaggaaggaaagaaagaaggaggaaagaaagaaagaaagaaagaaagaaacaaagagaaagaaagaaaggaaggaaggaagaaagagaaagaaaggaaaggagagagagagaaggaaggaagggagagagagaaggaaggaaggaaggtaggagggagggaggggagaaagaaagagaaagagagaaggaaggaagagagagaaagaaagagggagagaaacagaaagggagatagaaggaaggaaagaaagaaagaaagagagagagaaagaaaaaaagaaagaaagaaagaaagagaaagaaagaaagaaagaaaagaaagaaagaggccttccagaatttagccaatagtgaaatcattcatatacctactggattaagttcagtgacatcccactcaaggtattctgcaacatgcatcatctgactgatgatattttctagctcctggaagagaaagagagataaaaaatatgaatacaagatcttagtgagttttaaatctttcacttgcagaaattgttttgttcaatgtgtagctaaaaaagttaaatgagttctatgggaatatatatatgtacataatcctttttaaaggtctaattaactatataaagaaaaaagaatcctgaatataaatttatcttgtacattgtctagaaattttcaccaggagagggcacaactttacaaaaaatacattttcttctactaaaagagagtgtctgaagaaagcaggaccaaatacatactgtcacaygtgatttttaagacactgaattccctgaacctttggcttgaaaatagatgtgaaagggtggacaaatcatttgaggacaactgagaagtctatttttatcttgatacactgagaatatacattgactgttttagtcatgtattgaataatttgctcttgaaagaagagtgttcagggccaaggtttgcaggacaagtatatgcagcatttattttgtgagaggatgaaattttagtttgaatttccatattattctgctcaattatcaactctttgaagaattgcaagttaatacagatgacctggctaaattaattaaaacattttcctgcctatttatctaatgttttaatttttctctacctacagaaaagattaaacatggctttgtgaaatgcttgtaatttcacatgaaaacattacataatttgaaaagtggtgttttaccgtatgatttaaaatgtaagaagtataaaagaataaagcttgaaagtgcaatagtcaaagagtattctactcaaatctctaatctaatatatgtagtcgatgttcatggaatagagaagaaatacgataaaacagattctcttttgggaagccgtgtttccctccgaggaactaatgaaagctatactccctctctccagaaaaaaaaaatataattatgaatatgttacttaagtaagacaggctgccccagaagtaatacaaagataaatgtatttattacagattaacaaattttaaaacataaatccctttgaattataggttaaaagtgtgcatgtgtatgc

SEQ ID NO: 549247 - DNA, 1948 bp, Homo sapiens
ggggtgggtatgaaattgccagatggccccagctggtgtgctctggaatccttggcgccaaggccatgctgccaggggcttctccaggctggtgatcaaatgtagtgaggatcctcaggcaggcccattcctggaagacatgggactctcccgatagtgagtttggctcaaggactcctcatggtcctgaaagaaactctctgagacctgtacttcagtggaagcctgtctttcctttgctgtctccttcccaagggttaaacctacattgcagtctaatggtggctctcccggccttctctggctccctcgacattttctctcacaggcatttcctttaataaatctctcgcatatctgatcctgtcttggcttttgcttcttggaggacccagaataacacaagtactgtcataattatatctcctcactttaaatctctcaagtgtaattactaaaattgtgttgtagtggaagtaaaaagcaaggttactaacttgagagtatctatgaaacactcacccattaagtttcattctttagtacatttataataacttttattccaattgtagcatggcctatctccaagggcaagttcctgcctgcgtcttcattgaaaacagtggaactttgaagcaatgggggagtttgttgcttctcttgacaagcggccagccctaattcagagttataaaagttttcatattctgcttttggcatatctgtaaaatatacttgggcatacattttttttttctgtttggatcataagtgtgtgaaacatacgtggtaagagccagttatattccaatcacagaggatgtcttggaacacatcactgccactccagaggtactgaaactttcttcctctagtaaggaacatggctggggtgggggtgagaagagatattcttacatttataaactgtttctcccaccaccagaccagacataaagtttgattttgtcctgaagatttcagttgtcttggagccagtggaactgagttagcccaagaatgagagtggatgtcctttttctctttctgcctttgaaatatcaggttcattggacaggtgctcagtagatccaattttctttaattgcacctacatcagtgtaatataaatgtcttcattcacaatcccacaagggttgtagatatcaatatgccgggggatagtgtatgggaattgagggtcatagtaggtcaatactatataagaaaattcctacagagagtgagtctaaatccctactcctatgggaccagcgactattattgtctatttatttacttatttgaaaatgtaaacaattatttcccagtggactaattacaaagttcctgtgacatcaagatcattccttctcaaggcttttcactatatattgagacgtgtagtcttaatttcattttggtttgccccaagacttccaccaagtctaggggatctgtacggaactatcctttcccaaggtacatcatgcatactttctgctattatttttttttcagtctgtcccttgtggtcaatcaagagaaatgcagacttsaatctctataagaagagcaaaggttctccctttttaaacctttgaactgagaaaaaaaaaaaaaaagcagcagctcctgccatccagaaacttgtctggcgctaacagcgaggccatattgttctcccattgtacaaaaacaatttcagaaaacatcaacatcagataaggtcactcagagaccgtcataaagtaaggcacatacacgatcaccatgcaacccacaaaatactgatcatccttctgttatctaaaatgagtaattgcacgttttagaaaccaatcgcagctttattctcattttatttatgtttgtttttgagacagagtttcactcttgttgcccaggctggagtgcaatggtgcaatctcagctcaccacaacc

SEQ ID NO: 549248 - DNA, 1553 bp, Homo sapiens
aaaagtatagtttatttattccagtagtaaaacattattgaaaaatgtaactcttgtgcagattctctttaatttcttttcagcatgaaaatgaggagatggcatgtcttagttttgtcatcccattttcagactcacatggcaaatgtcatagagttcaggtatcagttctgcctgtggctttttgttacctgttggaactcaagatattttggggagttaatgacattgagctacaagacttaataataaaaaattccactcgaagtgttcttagcatcttctcacaggcacctgacaaagcctcagctaatggtagtaaaacttcaatatggaaagctgcagttacttgcagatatcctctccacagctaattaaaatgactgcatatattcatccacatgcccacacacacaaactacagtagcattgggaatctaggaagtgactagaatggttgacaaaagctgcaagaaccacatagaattaaagaaaaaaaccaacaacttcttagcataaaggcagcataaataaagttaaagaaggtgaggtcactgagagacaaatatttgtaacagactgaacagatacaaaattagaattcagaatatatgagtaatttctaaggataaacagaaaagcaaaaaacagaaaatatttttaaagtatattctcaaacagttcatgaaagatgagatggagtttcgctctgtcgccaggctagagtgcagtggcacaatctcagctcactgcaacctccacctaccgggttcaagcaattctactgcctcagcctcccgagaagctgggactacaggtgctccaaggtgcttgagtttggaaacatgagacaaaaccagaaacagagaccctgggagagtctgtggtccccatttttccgctgagcaaaccacaggcttgtgttctgcctatctcccacttcgcacatgtacagcattgtagaatatttacatggataaggattctatgatatagtagagtgacttcccctattgataacaaacaattatgtcagtccctacacaactcttatgctaaaggtaatggggagggttgaatggtactcatttgggcagcttttttttggctatgtatactttcagaaagaatttacctcacctagatcacatgactaaaatataggaatattaatacccactgtgtctaattggcagattgttttgagattttaaatgagatctattcatgaaaacattttgttaatcttaaagcaccacaccaatatcacctattatattgtacagccatgatcaacacaatttccaatctagaagtccctctcaacttttcctgggactgagctttcaggacttagagttccttctccttctcattctttttctgcgcatmgtctcccggtaaagtgaaaaccagctgagaaaagattcgggctggacaggcctccgtggcgattaagagtcacgaatgtgatgatattattcgcaaacagcagtgtagtcatggttcagaattttggaaacagtgccaggaggatcttggacataattttc

SEQ ID NO: 549249 - DNA, 950 bp, Homo sapiens
gacaaggaggtgaagaggtgaatatcttaaaccsttttgtggaatgttaatgccaagcgaatattcctaagttttcactgaagaaagtgttctgtggtccaacacattttgaaaacgttggcttaagaaaacttccaatgtcttgataatatattcagtttcttagtgaatgtgcatgtacatggagaagtggtgatagcaggtagcatttctttccttttctttttttttaaatgaagcttctattaatattcagggagtctagtgtttcttagcacatggtttaggaaacagcacgttaagaaattgagagcttatcctaaaggatgtgcagaaccacagaaagcttttcagtgagagatgaagtggcatgttaccaagattaatttggtgtagctttcagatgaaatgaaaagggagaaaatgaacacaaggagaagactatggtaatagttcaagggtgaagtgatgaggacctgaattggagcagtgggtgcgtgaccggaaagaagaagaaacatatgggaggcaacacaaaggaaggatcttcggcttcaatagataactgaatgtgatgggtgagggcgaggcaggagtcaaatgttattctgaggtgttgagtcaaggaaacacttgagaccattgatggaaatggacccatacacatagacagtgctagtgagctataaaggatgctgagcttcatgtggctgtggaggtgattatgtacaagagctgctaatgtaggtacaaaagttgaggtgagagtcaaggcggggcatatcagcttgggaatttgtatagctgcgctttgggtggtggagggctggtatgaagagtgtgcaaaccttatgggcagattggagttacaaaagaatacagtgtgtgtagtcagaagacttgatttctagttttatctctgtcagtaattctttgtagttgtggtcaaa

SEQ ID NO: 549250 - DNA, 950 bp, Homo sapiens
gacaaggaggtgaagaggtgaatatcttaaacccttttgtggaatgttaatgccaagcgaatattcctaagttttcactgaagaaagtgttctgtggtccaacacattttgaaaacgttggcttaagaaaacttccaatgtcttgataatatattcagtttcttagtgaatgtgcatgtacatggagaagtggtgatagcaggtagcatttctttccttttctttttttttaaatgaagcttctattaatattcagggagtctagtgtttcttagcacatggtttaggaaacagcaygttaagaaattgagagcttatcctaaaggatgtgcagaaccacagaaagcttttcagtgagagatgaagtggcatgttaccaagattaatttggtgtagctttcagatgaaatgaaaagggagaaaatgaacacaaggagaagactatggtaatagttcaagggtgaagtgatgaggacctgaattggagcagtgggtgcgtgaccggaaagaagaagaaacatatgggaggcaacacaaaggaaggatcttcggcttcaatagataactgaatgtgatgggtgagggcgaggcaggagtcaaatgttattctgaggtgttgagtcaaggaaacacttgagaccattgatggaaatggacccatacacatagacagtgctagtgagctataaaggatgctgagcttcatgtggctgtggaggtgattatgtacaagagctgctaatgtaggtacaaaagttgaggtgagagtcaaggcggggcatatcagcttgggaatttgtatagctgcgctttgggtggtggagggctggtatgaagagtgtgcaaaccttatgggcagattggagttacaaaagaatacagtgtgtgtagtcagaagacttgatttctagttttatctctgtcagtaattctttgtagttgtggtcaaa

SEQ ID NO: 549251 - DNA, 2546 bp, Homo sapiens
ctactatcctgccttctttttctcatgcccactagccaatgtttctgatatcccggaacgaagtcataacattctagtaattagcagagaagaatcttattggccttttcttgaagcacagttggctaatttcagatcaaaagggacagtatggttcattttcagagcatgtgctctaagccattaaatgcacctgtgttgaaaaatggctgtcctgactgtaaaattcagtaattactttactgaagcaattgtgtgtcttcctttgtgagaatcggtagcagttgggggaaatttcactgtggctggtggaaattgaagctgagaaaaaggcagggagcatgtgtgtcaacagctgggaggtgccacatcacctgtacatggggcaggtgggagcgacaggagcccaagcatcatcttcaccactttcccagtgcaataagcatctggggaagggaactcccagggaacagacagatgcaagggaaaaggccaggtgtgattcgttcatcaggcattgctaggcacagtctctgtcattgcagagagggcctggtcagtgagtcccgccaacccatctgttctgcctgttgtggcctgcgctttcttgggcattgcatgagaatgagaatgtctgtgaaacatacagcctctgcctcaatgtcttacaacagagaaccactatgtgaaycacgaaagaagggttgtgcattgagagacagaggtgaggtttgttctaacatttgaaaacggaatactacctttcttatcagctctacaaatacaactgcagaatgtctccatagcatgacatttccttctctcagaacctcaactcactcaccttgattctgaactcaagatatcaaccaatttgaagattccttttccttctgatatcctgcttaacaagttttgagccgggcacaccagtaatcgaaaaccatgttcactttccctaatgaaaaaatcatttgcgaattgtctatgtagtttttctcactgtagtaagtcaatacaactcaattattattaaagcttctttgtctgagaaggggacttttcataatttggaggacctaacaaaattcagctgtgacttcccctaacgatggcatagaccagggctctgggtcagatcacttctcttagtgtcttttgaggcctcttgcatctcttctactggaggctgctggccagaggggtgagtccatgctgggcctctgctctgatttgactgaggtcactaagtactaagctttattgtctcttgagaaaactagatatcacctgtggaagtctatgctctgattgggattgttttcttaaaagtttttggtgaaattgcgtttatctggcctgactttgtcttgctctatatcatcaagaacattgtctaaaagagcactagttagtagagaaaattctcacaaatccattaacaaaactgactctgaggactgaagagtttgtggtcttgtagtgccactgtccctcattgggcaaactttgccttgggtcaccatctcaacacctcagtgtctactttcctccattttgtctttgtatttctgagagttaatttaaaagatgaaatctccaaaactgcctcttctggaaaaagcagattgtcagttctgaggagagaaatggccacttagaattagctggtatgaagcagaaagttcaaaatgacaccttcagccagctgccagcaatgctcactggatgacatctccctagttcttaccctggctggctggacgcctgcttccagtcttgaatttgtatgtccctaatgcttgtgcatgccacaattatcatttcaccaaggataacttgaagaaccttcaatatggctaaattgtccttcttagaagtgcctcagagctaaaaggcttaacaactagtaatatttaataatctgtctgtatcagttggtatgaaaaattatttttaaaaaattcagattaaaaaaatcacttcattaaaatgtgttctgaggaagaatttagcacttaatttcctttaaatgcacaagtgtaattatcttcaagtatcaagaaccaaaatcaccgtcttcttgtagatacgcccgtgcttaacttttaaaaatcaattctgctgggcactgtggctcgcgcctgttatcccagcactttgggaggccaaggtggatgcatcacttgaggtcaggaatttgagaccagcctggccaagatggtgaaacctcatctttactaaaaatacaaaaattagccgggtgtggtggcgggtgcctgtaattccagatactcaggaggctgaggcaggagaatcagttgaacctggaaggcggaggttgcagtgagccaagatcacgccactgctctccagccttgacaacagagtgagactctgtctcaaaaaaaaaaaagaaaaaaaaaatcagtcctaccactgagtctgcccctcttctacagagcgaatgaatgccccaatagtaataggtacctctgatagcttcagacattccctgcttcctagtcaataattgctacctggga

SEQ ID NO: 549252 - DNA, 627 bp, Homo sapiens
ggatctagctgcctcctccatgccacccacctggaaagagactcagaggcctgcctgtgtctgattgggctgttgacaatggtcagggctatgactccaagctgggcgcagttgctcgggcctgtaatcccggcactttgggaggtggtggcagggggactgcttgaacccaggagtttgagaccagcccaggcaacaaagcaagaccctgtatctacaaaacatacaaatcacctgggtatttttttktttttttttttttttgtggcaattgtgaatgggattgcttttctgatttggttctcagtttggttattgttggtatataggaatgctagcaatttttgtatattgattttgtagcccgcaagtttgctgaagttatcagctgacgaagcttttgggccaagaatatggggttttctagatatagaatcatgtcatctgcaaacagagatagtttgacttcctctcttcctatttggatgtcctttatttctttctcttgcctgattgctctggctaggacttcccatactatgttgaatataagtggtgagagaggacatccttgtcttgtgctggttttcaaggggaatgtttccagcttttacccattcagaatga

SEQ ID NO: 549253 - DNA, 980 bp, Homo sapiens
taaaatacaacaataacaacaacaaaaacaaacaaacaaacaaaatactggccaggcgtggcggcatgtgcctgtagtcccagctactcaggaggctgaggcaggagaattgtttgaacccgggaggtggaggttgcagtgagccgagatcatgccactgcactccagtctggcgacagagcaagactccttctccccccactgccccccmaaaaaggaagaggtaattaggacagagacatgcacagagggaccatgtgagaacacagggagaagacgccatctacaagccaaggagagaggccaaagaaaaaccaaccctgcaaacactttgggcctagacttccaacttctagaactatgagaaaataaatgtctgttgtttacgcctcccagtctatggtgttttgctatggcagccctcactaactaacacagcaagggactaggttcctttagctatgtgggcaccgtctctaagagctgccaggcattaatggtactggacctgccattcttgcttaagggacattttcttgacataacaatgctctttggcattctggcttccaccaggatatttagtatgtggttgtttcaattatgtcagtttaactccagttttctttctgactgtttgtgttttttccctcacttatgaggcctagaatccttggagagaaatttagtattttgcatgtcatttttacctttcactcttctgggttttgttcaatgagggcataaaactgagagttgacctgctccattattctgaaaacttactagaggaaggaagcacatgactgcagaggcacagagggattatggagaataagtgggtgacacatacatatgaaaagtcttaagaaagttcatattttttggccccaaattatatttcagcaaatgtatctttaaaataactgaaaatacaaagatccatgtacaagaatggttgtctctgcactgtggtaata

SEQ ID NO: 549254 - DNA, 980 bp, Homo sapiens
taaaatacaacaataacaacaacaaaaacaaacaaacaaacaaaatactggccaggcgtggcggcatgtgcctgtagtcccagctactcaggaggctgaggcaggagaattgtttgaacccgggaggtggaggttgcagtgagccgagatcatgccactgcactccagtctggcgacagagcaagactccttctccccccactgccccccaaaaaaggaagaggtaattaggacagagacatgcacagagggaccatgtgagaacacagggagaagaygccatctacaagccaaggagagaggccaaagaaaaaccaaccctgcaaacactttgggcctagacttccaacttctagaactatgagaaaataaatgtctgttgtttacgcctcccagtctatggtgttttgctatggcagccctcactaactaacacagcaagggactaggttcctttagctatgtgggcaccgtctctaagagctgccaggcattaatggtactggacctgccattcttgcttaagggacattttcttgacataacaatgctctttggcattctggcttccaccaggatatttagtatgtggttgtttcaattatgtcagtttaactccagttttctttctgactgtttgtgttttttccctcacttatgaggcctagaatccttggagagaaatttagtattttgcatgtcatttttacctttcactcttctgggttttgttcaatgagggcataaaactgagagttgacctgctccattattctgaaaacttactagaggaaggaagcacatgactgcagaggcacagagggattatggagaataagtgggtgacacatacatatgaaaagtcttaagaaagttcatattttttggccccaaattatatttcagcaaatgtatctttaaaataactgaaaatacaaagatccatgtacaagaatggttgtctctgcactgtggtaata

SEQ ID NO: 549255 - DNA, 1205 bp, Homo sapiens
tgagtgccaaatatgtgcagtatcagccagaatgattgctggtagggataaaacagcacaataaactcccaagccacggagcgtgtttggtagtgctgccaaaaaccacagtgccgccttatgtgtgcacttacaaaatctaaatacagcctccccatggcacagcaagagcagaagtgagagggacagatatgctcccataagtgctgtcactggagactggagcacaccaagagcatcttagtttaattttgagtaaccactggtgaggatttggcagaatataagaaagaaattaaagaccctttaaaataaaatygatccatttctaacatataaattatttgattaagtacatacagagagttggagagcagggcccagatacatggtgatatcaccccagcttagaatggcatgagtgaagaaaacatgacacagaaatagcagctaagtaataataccttgaaaaaaaagtaagccaaggatttcttaaccattaagtattggaggtcattattacaacctcactatatgttacttgtgtaatcatgattgactctagcaaactagatggaattcttttgttaagtacgtattcagcaatccaaataatctttttcagaatcttcatcatatccagcatgaagctgtgcaaacagctcaggtaattccagagataaccgcaactgccacaattcttctcatcccaattctttcctccctcacttctcttatctaggatttcctggatgcattgcttatcacatttcctgcctaacaaacaaagaaagagaacaaaacagggacctcagtcccatgtttcagaataaaatctctcactacagcggggtggcggaggcggggtggggtttcaacatctttgaagaaagaacttgtaacattctaacctctgattttttagacctgtttaattcctagactaacatatttaattcactttttcatggaccttcatggccacacttttatgttttccttactaggaacgtctttaacactgaaaactaattctgaaatattcctttctcttagcattatctctcctcttttccactgccttactcttagtctttctattttgtaaatacagatgtttccttttgttaaccaagtacaatacctcaactgtgaatttatttacactcatagaagctttaagccaatggcccaaggatgcagcc

SEQ ID NO: 549256 - DNA, 1205 bp, Homo sapiens
tgagtgccaaatatgtgcagtatcagccagaatgattgctggtagggataaaacagcacaataaactcccaagccacggagcgtgtttggtagtgctgccaaaaaccacagtgccgccttatgtgtgcacttacaaaatctaaatacagcctccccatggcacagcaagagcagaagtgagagggacagatatgctcccataagtgctgtcactggagactggagcacaccaagagcatcttagtttaattttgagtaaccactggtgaggatttggcagaatataagaaagaaattaaagaccctttaaaataaaattgatccatttctaacatataaattatttgattaagtacatacagagagttggagagcagggcccagatacatggtgatatcaccccagcttagaatggcatgagtgaagaaaacatgacacagaaatagcagctaagtaataataccttgaaaaaaaagtaagccaaggatttcttaaccattaagtattggaggtcattattacaacctcactatatgttacttgtgtaatcatgattgactctagcaaactagatrgaattcttttgttaagtacgtattcagcaatccaaataatctttttcagaatcttcatcatatccagcatgaagctgtgcaaacagctcaggtaattccagagataaccgcaactgccacaattcttctcatcccaattctttcctccctcacttctcttatctaggatttcctggatgcattgcttatcacatttcctgcctaacaaacaaagaaagagaacaaaacagggacctcagtcccatgtttcagaataaaatctctcactacagcggggtggcggaggcggggtggggtttcaacatctttgaagaaagaacttgtaacattctaacctctgattttttagacctgtttaattcctagactaacatatttaattcactttttcatggaccttcatggccacacttttatgttttccttactaggaacgtctttaacactgaaaactaattctgaaatattcctttctcttagcattatctctcctcttttccactgccttactcttagtctttctattttgtaaatacagatgtttccttttgttaaccaagtacaatacctcaactgtgaatttatttacactcatagaagctttaagccaatggcccaaggatgcagcc

SEQ ID NO: 549257 - DNA, 1205 bp, Homo sapiens
tgagtgccaaatatgtgcagtatcagccagaatgattgctggtagggataaaacagcacaataaactcccaagccacggagcgtgtttggtagtgctgccaaaaaccacagtgccgccttatgtgtgcacttacaaaatctaaatacagcctccccatggcacagcaagagcagaagtgagagggacagatatgctcccataagtgctgtcactggagactggagcacaccaagagcatcttagtttaattttgagtaaccactggtgaggatttggcagaatataagaaagaaattaaagaccctttaaaataaaattgatccatttctaacatataaattatttgattaagtacatacagagagttggagagcagggcccagatacatggtgatatcaccccagcttagaatggcatgagtgaagaaaacatgacacagaaatagcagctaagtaataataccttgaaaaaaaagtaagccaaggatttcttaaccattaagtattggaggtcattattacaacctcactatatgttacttgtgtaatcatgattgactctagcaaactagatggaattcttttgttaagtacgtattcagcaatccaaataatctttttcagaatcttcatcatatccagcatgaagctgtgcaaacagctcaggtaattccagagataaccgcaactgccacaattcttctcatcccaattctttcctccctcacttctcttatctaggatttcctggatgcattgcttatcacatttcctgcctaacaaacaaagaaagagaacaaaacagggacctcagtcccatgtttcagaataaaatctctcactacagcggggtggcggaggcrgggtggggtttcaacatctttgaagaaagaacttgtaacattctaacctctgattttttagacctgtttaattcctagactaacatatttaattcactttttcatggaccttcatggccacacttttatgttttccttactaggaacgtctttaacactgaaaactaattctgaaatattcctttctcttagcattatctctcctcttttccactgccttactcttagtctttctattttgtaaatacagatgtttccttttgttaaccaagtacaatacctcaactgtgaatttatttacactcatagaagctttaagccaatggcccaaggatgcagcc

SEQ ID NO: 549258 - DNA, 1331 bp, Homo sapiens
agaaattaagcttcaaaatccaaagtcaaggatttttttctctcagtttagcagttgatattaaatcaaaggagaagcaatatgaagatgaaaataattcttccactgtttatcagcaatgttgttccactgattcaattatcattcatttttcaaaaaaaaaaacaactttatataggaaataaataaataaatcaaagggccgggcacagtggctcacgtctataaccccagtattttgggaggccgaggagggtggattgcttgaggccaagagtttgataccagcctggccaacacatggcgaaaccccatctttactaaagaaatacaaaacaaattagctgggtgtggtgacatacatctgtggtcccacttacttgggaggctggagtgggagtatcatttgagccccaggaggtgaaagttgcagtgagccgagatagtgccactgcactacaggttgggtgacagagcaagactctgtctcaaaaaacaacaacaacaacagaaaccagttagatatttcataagaaaaaatttcttcatggttcagatttcactgcctcatgttgatgtttctttccagatgacgactgtggggacgggagtgatgaggtgggctgtgttcactcttgctttgataatcagttcagatgttccagtggcagatgcatcccaggccactgggcctgtgatggtgacaatgactgtggggacttcagtgatgaagcccagatcaattgtactaaagaaggttagtaattttataaattaatgaaatctcattttaaaagttgatgcataataatacttagggtattacagagagaatattgtataaaaagaaattgcttattaggcaaraatatacatgtggaactgtgtaaaatcatttgctatctctttcctttccctctttgctttttccctttggtttctcctctcaatacctccttattcctttatgccttctgtggtctttgtttcctacatttactcaatgctttacttactgctttttttcttttttttttttttttttttttttttgagacggagtctcactctgtcacccaggctggagtgcagtggcgccatctcggctcactgcaagctccgcctcccgggtttacgtcattctcctgcctcatcctccaagtagctgggactacaggcacctgccaccatgcccggctaattttttgtatttttagtagggacggggtttcaccatgttagccaggatggtctcgatctcctgacttcgtgatctgcctgcctcggccttccaacatgctgggattacaggtgtgagccaccgcgcccgg

SEQ ID NO: 549259 - DNA, 634 bp, Homo sapiens
taaaaataacataaatatgaagttcctgacatgaatgaraaaaacacagtaaatagcaaagttgctaaaaatattctggaaaacataagaacttcactttgatgaactaaaagagaggaagaaaacaatgttgacttgttttgtaatttatattcgaattacttagaaaacttattttaacagtaacaaatcataacataataacagtagtttctttctattgtatgtattaactgtcaggcactctactaaatgctttacaaaattatctctgatactgagtgaagtttaattttccaactataatatcatagtcaaaaattcctattattaaaaaagactccattttaattttgtaattatacttgtcattcaagataaaataaatacattttaatagtcctgtaacaaatagagcaacatccaatttcttgagagatgatatccgaacttctgcagataatctagaatgtcctaattgtttagaaaacttccatctaaggattatctttatttttaaatgtacataatccaagtttctctaagatactaacatacattcttgaatatcaaatattgttgaatggaggccagtacctcagtgactcactcaaaagagaatccctataaatca

SEQ ID NO: 549260 - DNA, 559 bp, Homo sapiens
aggctgcagggagctgagatcacgccactgcactccagcccgggcaacagggcgagactctgtctttaaataaataaataaataaataataaaataaaatgtctattcattctataaacgagtattatataaaaagcaatataccaaatacaaagaggtataaagacatgattcctgtttttttaactggtgggataagacaaaagtaaacagctatgaaataagcagcaaaaatgtcatttgaataataaagtattacagaaacgcagaaaaaggacagatcattcatttaacaaaactgtatagtagcattcctatctttcatataaagagtgaggttcagggytggacgcggtggctcacgcctgtaatcccagcactttgggaggccaaggggtgtggatcacgaggtcaggagttcaagaccagcctggacatggtgaaaccctgtctctacagaaaatacaaaaatgagctgggtgtggtggcacatgcctgtaatcccagctacttgggagactgaggcaggagaatcacttgaacctgggaggcggaggtt

SEQ ID NO: 549261 - DNA, 559 bp, Homo sapiens
aggctgcagggagctgagatcacgccactgcactccagcccgggcaacagggcgagactctgtctttaaataaataaataaataaataataaaataaaatgtctattcattctataaacgagtattatataaaaagcaatataccaaatacaaagaggtataaagacatgattcctgtttttttaactggtgggataagacaaaagtaaacagctatgaaataagcagcaaaaatgtcatttgaataataaagtattacagaaacgcagaaaaaggacagatcattcatttaacaaaactgtatagtagcattcctatctttcatataaagagtgaggttcagggctggrcgcggtggctcacgcctgtaatcccagcactttgggaggccaaggggtgtggatcacgaggtcaggagttcaagaccagcctggacatggtgaaaccctgtctctacagaaaatacaaaaatgagctgggtgtggtggcacatgcctgtaatcccagctacttgggagactgaggcaggagaatcacttgaacctgggaggcggaggtt

SEQ ID NO: 549262 - DNA, 1397 bp, Homo sapiens
ttctgacatctgcaaaaccatcctgaacacttcccactcaccccacaaggggcacctctgctcctaggtgtggctccttccacacttccatgcagactctggctacaagctgtccaggcctcttggaatgtgagctctcattaggagaggccacacgtcttaatcacccaagggcctcacacagcacatgccacatggatgatgagtaagtgcttgccaatgcaaagatttgaaagagcagacttaactctccctgcatctgagaaccatcggagaagtcaatctagttaacaagcaaacaaacaggaaaaaataattgaaaatgagtggcataaaggttagatagcagatacatgaactgctttctcccttcctcttggttcgtgagctagcctgctgaaataaactgcaggcttccagaaacctctgcatgtctcccttcctaggtgctcaggggcatggcttagggttcattccttttgtgtccctccacagacgaggtgtcttagtttcagttagttcctttagcatcttgtgcttgagaggacaagatgtcatccatggctaaatagcaagtaagttttggttcttagaaaggtaccagcacaactgaagatatctcaagcttcaagaatcccatgcaaataagattttaccggctaaatttgaagtcaatacatccatccagccaaggttccagagccctgctgcagaactggagccagggcccgccccacaggaactaacgtccctgcctcaacaacttcctgttctaggtggcaggcgggaaaatgaaaatgaaacaatttaaaaaagtatctaaaaattccactgggatgaattgaaggaagaaaatggaagcggggtggggctgccatgtgaaatgtggttatcagggaagtcactgtgggaaccatatatttgatcaggacctaagtggggaggagctctctgggcagaggggagcctctgtgcagatcctcgtatgggagtgacccagccgatgtgaggggggatagaaagggtgcatggcctatctatctatctgtctatcaatcatctatctatctatctrtgtatctgtttatctatctatctatctatctatctatctatctatcatctatcatgggggcttctgaggccactgtaggaagtctggcctttacttggagagaaatagaagccactagatgtctgggagcagcgggtacgtggcctgatgtcatttaaagggttactctggctgctgtgtggggtcagcagtgggtggggcaggagggggcagtgctggtgggccaggccagggaggagtggggaacggcggggggttgcaggctgatgccaggcacctgccaaggagggtccccagcacagagggacgtaaaggaggccgg

SEQ ID NO: 549263 - DNA, 1397 bp, Homo sapiens
ttctgacatctgcaaaaccatcctgaacacttcccactcaccccacaaggggcacctctgctcctaggtgtggctccttccacacttccatgcagactctggctacaagctgtccaggcctcttggaatgtgagctctcattaggagaggccacacgtcttaatcacccaagggcctcacacagcacatgccacatggatgatgagtaagtgcttgccaatgcaaagatttgaaagagcagacttaactctccctgcatctgagaaccatcggagaagtcaatctagttaacaagcaaacaaacaggaaaaaataattgaaaatgagtggcataaaggttagatagcagatacatgaactgctttctcccttcctcttggttcgtgagctagcctgctgaaataaactgcaggcttccagaaacctctgcatgtctcccttcctaggtgctcaggggcatggcttagggttcattccttttgtgtccctccacagacgaggtgtcttagtttcagttagttcctttagcatcttgtgcttgagaggacaagatgtcatccatggctaaatagcaagtaagttttggttcttagaaaggtaccagcacaactgaagatatctcaagcttcaagaatcccatgcaaataagattttaccggctaaatttgaagtcaatacatccatccagccaaggttccagagccctgctgcagaactggagccagggcccgccccacaggaactaacgtccctgcctcaacaacttcctgttctaggtggcaggcgggaaaatgaaaatgaaacaatttaaaaaagtatctaaaaattccactgggatgaattgaaggaagaaaatggaagcggggtggggctgccatgtgaaatgtggttatcagggaagtcactgtgggaaccatatatttgatcaggacctaagtggggaggagctctctgggcagaggggagcctctgtgcagatcctcgtatgggagtgacccagccgatgtgaggggggatagaaagggtgcatggcctatctatctatctgtctatcaatcatctatctatctatctatstatctgtttatctatctatctatctatctatctatctatctatcatctatcatgggggcttctgaggccactgtaggaagtctggcctttacttggagagaaatagaagccactagatgtctgggagcagcgggtacgtggcctgatgtcatttaaagggttactctggctgctgtgtggggtcagcagtgggtggggcaggagggggcagtgctggtgggccaggccagggaggagtggggaacggcggggggttgcaggctgatgccaggcacctgccaaggagggtccccagcacagagggacgtaaaggaggccgg

SEQ ID NO: 549264 - DNA, 1397 bp, Homo sapiens
ttctgacatctgcaaaaccatcctgaacacttcccactcaccccacaaggggcacctctgctcctaggtgtggctccttccacacttccatgcagactctggctacaagctgtccaggcctcttggaatgtgagctctcattaggagaggccacacgtcttaatcacccaagggcctcacacagcacatgccacatggatgatgagtaagtgcttgccaatgcaaagatttgaaagagcagacttaactctccctgcatctgagaaccatcggagaagtcaatctagttaacaagcaaacaaacaggaaaaaataattgaaaatgagtggcataaaggttagatagcagatacatgaactgctttctcccttcctcttggttcgtgagctagcctgctgaaataaactgcaggcttccagaaacctctgcatgtctcccttcctaggtgctcaggggcatggcttagggttcattccttttgtgtccctccacagacgaggtgtcttagtttcagttagttcctttagcatcttgtgcttgagaggacaagatgtcatccatggctaaatagcaagtaagttttggttcttagaaaggtaccagcacaactgaagatatctcaagcttcaagaatcccatgcaaataagattttaccggctaaatttgaagtcaatacatccatccagccaaggttccagagccctgctgcagaactggagccagggcccgccccacaggaactaacgtccctgcctcaacaacttcctgttctaggtggcaggcgggaaaatgaaaatgaaacaatttaaaaaagtatctaaaaattccactgggatgaattgaaggaagaaaatggaagcggggtggggctgccatgtgaaatgtggttatcagggaagtcactgtgggaaccatatatttgatcaggacctaagtggggaggagctctctgggcagaggggagcctctgtgcagatcctcgtatgggagtgacccagccgatgtgaggggggatagaaagggtgcatggcctatctatctatctgtctatcaatcatctatctatctatctatgtatctgtttatctrtctatctatctatctatctatctatctatcatctatcatgggggcttctgaggccactgtaggaagtctggcctttacttggagagaaatagaagccactagatgtctgggagcagcgggtacgtggcctgatgtcatttaaagggttactctggctgctgtgtggggtcagcagtgggtggggcaggagggggcagtgctggtgggccaggccagggaggagtggggaacggcggggggttgcaggctgatgccaggcacctgccaaggagggtccccagcacagagggacgtaaaggaggccgg

SEQ ID NO: 549265 - DNA, 1397 bp, Homo sapiens
ttctgacatctgcaaaaccatcctgaacacttcccactcaccccacaaggggcacctctgctcctaggtgtggctccttccacacttccatgcagactctggctacaagctgtccaggcctcttggaatgtgagctctcattaggagaggccacacgtcttaatcacccaagggcctcacacagcacatgccacatggatgatgagtaagtgcttgccaatgcaaagatttgaaagagcagacttaactctccctgcatctgagaaccatcggagaagtcaatctagttaacaagcaaacaaacaggaaaaaataattgaaaatgagtggcataaaggttagatagcagatacatgaactgctttctcccttcctcttggttcgtgagctagcctgctgaaataaactgcaggcttccagaaacctctgcatgtctcccttcctaggtgctcaggggcatggcttagggttcattccttttgtgtccctccacagacgaggtgtcttagtttcagttagttcctttagcatcttgtgcttgagaggacaagatgtcatccatggctaaatagcaagtaagttttggttcttagaaaggtaccagcacaactgaagatatctcaagcttcaagaatcccatgcaaataagattttaccggctaaatttgaagtcaatacatccatccagccaaggttccagagccctgctgcagaactggagccagggcccgccccacaggaactaacgtccctgcctcaacaacttcctgttctaggtggcaggcgggaaaatgaaaatgaaacaatttaaaaaagtatctaaaaattccactgggatgaattgaaggaagaaaatggaagcggggtggggctgccatgtgaaatgtggttatcagggaagtcactgtgggaaccatatatttgatcaggacctaagtggggaggagctctctgggcagaggggagcctctgtgcagatcctcgtatgggagtgacccagccgatgtgaggggggatagaaagggtgcatggcctatctatctatctgtctatcaatcatctatctatctatctatgtatctgtttatctatytatctatctatctatctatctatctatcatctatcatgggggcttctgaggccactgtaggaagtctggcctttacttggagagaaatagaagccactagatgtctgggagcagcgggtacgtggcctgatgtcatttaaagggttactctggctgctgtgtggggtcagcagtgggtggggcaggagggggcagtgctggtgggccaggccagggaggagtggggaacggcggggggttgcaggctgatgccaggcacctgccaaggagggtccccagcacagagggacgtaaaggaggccgg

SEQ ID NO: 549266 - DNA, 568 bp, Homo sapiens
gggctctgtgtcccaggtcctgcgatgcctgacaaaggctgcagccagatcactggggcacatgcgaggaggaaacagaatggacaggccgcaacatgccaagccactaaaaggattgaygctttattcttcagaggagaaataccattgtgggtctacggacctctatctaaggcttgttaaaacaaaacagagatgcttatgctctggaaagacgcccgggatccactgggcagaatggcaaaggaaagatccccagcacggagctcagacagatgtcctcggcggagctgagtgcgggggtacagggtgtgggggtgcatcagttgtgctctgacaggtgcacagggtcccctttccctttggcacctcggctgcctgtgcttctggaccaactgcctgttgagaaagcctctctgtgtccagaagtgaactatgaaaggccctgagtggatggactatatgcaaggcacaggaaggaggccaagccctcaggagtggcatccatgtgcatttggggcagagtgacgactggaaaagactgaccacggcccaggctccctgcctt

SEQ ID NO: 549267 - DNA, 1029 bp, Homo sapiens
gggcacctgcctgcctcacagcatgtcatgtttatttaatttgataggacaaatcttttaaagccttatcagtgttacacatggttgggaaagtattgtatagcattatttctagacaaaatatataaaagaaaattatacattttggaaggatttttaaaatgaggtaatgcctataaattctttagcactttatcaggaatgcagaaaatggttaatagattctaaatttaaaaatttaatatatgagtcaccaactatttttatatttctgtattaaccaaattgaaactgatagtctaaaggagattaagacttttaaaaaagcttttaaagtcagagaaaatgtaataagaaatattttatataataaactgctgaataayaataatgggaaaaatcttaagagaaactgtaggagaagagatactgacaaaatatttagaagcaactaagaaagattattaacatagggaaacaaatacaaaattgttttcttacgattatgtgaaaaaactataaaatgctaataagggatcattctaaaagcaaaaaaggcaacagaaaagaggcaaattatttggaattaaaaattatttggaattaaaaattattttagggcaaaacaagcttatgaaggcctataaaagagccagaagaaggcttttgataaaaaattgaggcacagtgatattgaaaaagtgactaaggaatcagatttcaaatagaaccaaataaaccaaatagaatttcatatatatatatatggtagtgcgaatttattagataggtttactcagaatgtttaacctaagtgaagaaagtatgagtgaattcaaagatagatgtgattaactgatccagaatacagcccagtaattgaacacataaaagtgtgaaaatacatggaaagaaaagtttcaacacagatgtgctttgagttttagaaagacttttttaatatatttaatatattaaatttaatataattctggttaatgtgcaaattgattacttggagggaagttg

SEQ ID NO: 549268 - DNA, 531 bp, Homo sapiens
gaatttcaaaaagcagtaactgaattaactttgtccttcaattttttactgtaatcacrttcttccctatataatcactgattatctctttgcctcatatcttaaccaggtatttagatgtaaaggagacaatgaaagaaaggtgcatataagtttgaactacaaaagataactctgtgtctaatggaaaagacacatgcaaattctaaactaaaacttttagaagttaaccccagggtaaaggatacatgtcattttctcagggaaatactgtaggtctttataggtacacctgactggattttttccaattttcataaatctagcccattccattttcttcctgacctaaaggtcccagatgggtgactagatcctgggattcctgaagtggcctaagtaatcctgggttgacatgctaacaggcactgcaaagcaggcctggtttcactgggcagtgatacaggcaaagcgtgcccccacttccagccctgctccagagcaggagttcttgacctggaggccttggac

SEQ ID NO: 549269 - DNA, 664 bp, Homo sapiens
agatgatttttaacaagggaaaagcatacagatttggtatagtaatttttacacaggcatgggagccctcacaagaaaaacaaagactcacagaagcaattagggctgaaagcttacatactgggttggacaaagagtagtaaatatgaaaatgtgacaaggtctgagcctcactctagaggtcctgactcaataggtctgtggtggattctgagaatttccatttataaagtgttcctgggtgccactcttgctgctgatctagggttcacccttggaaaacccatgtgctggatgaattaaaggaggtgaacatactttctaatgtgctaacatggttttgctgataagattcttcagttattaaaaaaagcaatagattttgcagctagaggataaaccttagcaamtctacagtcctgcccactctgtatcttctctttgtatgatgtgtttaggatttatactgccagatcactcacactgtttgcattttcacgggtttaggttttctcatctcttcactttatctttaatgacagcaggaatcacacagtttgtggctgtttgtccaccttgatacccagggcagaactgctctcacattgtggatggtgggcagggtagctgaatagaatcaccagaggcatatatgctttaaatc

SEQ ID NO: 549270 - DNA, 664 bp, Homo sapiens
agatgatttttaacaagggaaaagcatacagatttggtatagtaatttttacacaggcatgggagccctcacaagaaaaacaaagactcacagaagcaattagggctgaaagcttacatactgggttggacaaagagtagtaaatatgaaaatgtgacaaggtctgagcctcactctagaggtcctgactcaataggtctgtggtggattctgagaatttccatttataaagtgttcctgggtgccactcttgctgctgatctagggttcacccttggaaaacccatgtgctggatgaattaaaggaggtgaacatactttctaatgtgctaacatggttttgctgataagattcttcagttattaaaaaaagcaatagattttgcagctagaggataaaccttagcaactctacartcctgcccactctgtatcttctctttgtatgatgtgtttaggatttatactgccagatcactcacactgtttgcattttcacgggtttaggttttctcatctcttcactttatctttaatgacagcaggaatcacacagtttgtggctgtttgtccaccttgatacccagggcagaactgctctcacattgtggatggtgggcagggtagctgaatagaatcaccagaggcatatatgctttaaatc

SEQ ID NO: 549271 - DNA, 664 bp, Homo sapiens
agatgatttttaacaagggaaaagcatacagatttggtatagtaatttttacacaggcatgggagccctcacaagaaaaacaaagactcacagaagcaattagggctgaaagcttacatactgggttggacaaagagtagtaaatatgaaaatgtgacaaggtctgagcctcactctagaggtcctgactcaataggtctgtggtggattctgagaatttccatttataaagtgttcctgggtgccactcttgctgctgatctagggttcacccttggaaaacccatgtgctggatgaattaaaggaggtgaacatactttctaatgtgctaacatggttttgctgataagattcttcagttattaaaaaaagcaatagattttgcagctagaggataaaccttagcaactctacagtcctgcccactctgtatcttctctttgtatgatgtgtttaggatttatactgccagatcactcayactgtttgcattttcacgggtttaggttttctcatctcttcactttatctttaatgacagcaggaatcacacagtttgtggctgtttgtccaccttgatacccagggcagaactgctctcacattgtggatggtgggcagggtagctgaatagaatcaccagaggcatatatgctttaaatc

SEQ ID NO: 549272 - DNA, 664 bp, Homo sapiens
agatgatttttaacaagggaaaagcatacagatttggtatagtaatttttacacaggcatgggagccctcacaagaaaaacaaagactcacagaagcaattagggctgaaagcttacatactgggttggacaaagagtagtaaatatgaaaatgtgacaaggtctgagcctcactctagaggtcctgactcaataggtctgtggtggattctgagaatttccatttataaagtgttcctgggtgccactcttgctgctgatctagggttcacccttggaaaacccatgtgctggatgaattaaaggaggtgaacatactttctaatgtgctaacatggttttgctgataagattcttcagttattaaaaaaagcaatagattttgcagctagaggataaaccttagcaactctacagtcctgcccactctgtatcttctctttgtatgatgtgtttaggatttatactgccagatcactcacactgtttgcattttcacgggtktaggttttctcatctcttcactttatctttaatgacagcaggaatcacacagtttgtggctgtttgtccaccttgatacccagggcagaactgctctcacattgtggatggtgggcagggtagctgaatagaatcaccagaggcatatatgctttaaatc

SEQ ID NO: 549273 - DNA, 664 bp, Homo sapiens
agatgatttttaacaagggaaaagcatacagatttggtatagtaatttttacacaggcatgggagccctcacaagaaaaacaaagactcacagaagcaattagggctgaaagcttacatactgggttggacaaagagtagtaaatatgaaaatgtgacaaggtctgagcctcactctagaggtcctgactcaataggtctgtggtggattctgagaatttccatttataaagtgttcctgggtgccactcttgctgctgatctagggttcacccttggaaaacccatgtgctggatgaattaaaggaggtgaacatactttctaatgtgctaacatggttttgctgataagattcttcagttattaaaaaaagcaatagattttgcagctagaggataaaccttagcaactctacagtcctgcccactctgtatcttctctttgtatgatgtgtttaggatttatactgccagatcactcacactgtttgcattttcacgggtttaggttttctcatctcttcactttatstttaatgacagcaggaatcacacagtttgtggctgtttgtccaccttgatacccagggcagaactgctctcacattgtggatggtgggcagggtagctgaatagaatcaccagaggcatatatgctttaaatc

SEQ ID NO: 549274 - DNA, 664 bp, Homo sapiens
agatgatttttaacaagggaaaagcatacagatttggtatagtaatttttacacaggcatgggagccctcacaagaaaaacaaagactcacagaagcaattagggctgaaagcttacatactgggttggacaaagagtagtaaatatgaaaatgtgacaaggtctgagcctcactctagaggtcctgactcaataggtctgtggtggattctgagaatttccatttataaagtgttcctgggtgccactcttgctgctgatctagggttcacccttggaaaacccatgtgctggatgaattaaaggaggtgaacatactttctaatgtgctaacatggttttgctgataagattcttcagttattaaaaaaagcaatagattttgcagctagaggataaaccttagcaactctacagtcctgcccactctgtatcttctctttgtatgatgtgtttaggatttatactgccagatcactcacactgtttgcattttcacgggtttaggttttctcatctcttcactttatctttaatgacagcaggaatcacacagtttgtggctgtwtgtccaccttgatacccagggcagaactgctctcacattgtggatggtgggcagggtagctgaatagaatcaccagaggcatatatgctttaaatc

SEQ ID NO: 549275 - DNA, 517 bp, Homo sapiens
acgggaatgtcccgaaactggtttatggtgatggttgcacaaattggtaaatttcccccccgcaaaatcactgaactgtaaacttaaaatgggcaaattttaagtactgcaaataatatctcaattaagttgttttaaaaagtatcatatgctatccagggaacaggagtgagagttcttgtagcagaaatccgttctttagtagaaatgtataacacacctcargaacacaggtagtacctctggggtcctcatacctgcaaatcatttatttcaagccaggcttcacatggagcttttgggatggagagccagcacagcccaggctaacagcaggaactcctgggctcaaatcccagcccctcaaaacttgcttgctgtgtgccctttggaagtgttaccctctctgggctgcaaaatggagatgtaatagtgcccagttcttggggcttctgtgagcctgaaatgagtcaatactcatcaggcccctgaacatagctatacgttatgctctgta

SEQ ID NO: 549276 - DNA, 3410 bp, Homo sapiens
tgcatacacctcacctacacctatgccgatgctttcctaggccatacccaagagccattgaacaagccattgaactgagcttccatagctccagccctgctcagaatccatgcctacaagcagctcccaaccagggcgtgagtgaaataaggagtgaacaggagagggaagcaactgtggtccagtgaatctgggggatatccacaaactcatcctgaccaatgcttgccaccatctttcccagcagctgttctctagcaagaggcagaagcaatggctttgcttctgtccaccctgtgctggctgagctggaggtgctaattagcagtgaagtggcaggctgtgggggagaggaagggagccaacggtctgaactccctggcctagagaatctggaacatgccagaggaaagactggccgctgcagagagtgggtccttggtgagctgagggcagtcaggcagggcaggattagttccagggaatgggtttaaggacttctcccctgttggtgcctctaaagctttgctgatggtcaaattccaaattcctccatcagtctcaaagctcttattagtcactttaattggaatcctgggaagacagagtgggtggaagagaagcgggcagggtgggagagaaacagaaccaagagactgggtctatgtaacagttttcttcaggcagtaaattcctcttacatgctgggaggagcaaagggtgggggaagagggaaggtcacttttctcccagggagaagtggtttgtgggtttctgtgctcaaaacctggggctactctttcttttcgaggaattttatcttacattttataaattaagaagtacttgttcattgttgacagcctagaaaacacaaggaagcaaaagcaaaagcaaaaaagttacttgtatctccccattttagagatactattattaacattttgggctatagcctttcagccttttttctctatgcacaatttgtctcactgtctgcaattatactataaccttgttttgttagctgttttttcatgcgttaatgcgtcgtagacatcttttcatgtccatagatgtggatcatggatttttttttaatggcagtatcgtattccaacgtttagatgtacttaaccccctattgttgaaaatttaggttgtttttcgttgttgttgcagtgttgatgttatcaggctacatccttgtagcttcatcctcatgcacatccttaataatttcctcagaataaatttctagatgcatttccataggatgtatttctatgtgcttttttttttttttttgagatggagtctcattttattgcccaggctggagtgcagtggcatgatcttggatcactgcaacctctgctgcctgggttcaagcaattcttctgcctcagcctcccgagtagctgggattacaggcatgcgccaccatgccaggctaatttttgtatttttagtaagacgaggtttcaccatattggctaggctggtctcaaactcctgacctcaagtgatccacccgcctcagcctcccaaagtgctgggatgagccaccacgcccggcctctatgtgcattttcaaggctttataccagtgctctcaaccaggactgagccctcacccccaagaggcatttggcaatgtctagaaatgtgtttgaatgtcacaactggagggggagattgccgctagcatctagtggatagaaactccccacatcaaggaattatcaagtccaaaatgttaatagtgccatggttgagaaactttgcttagacatgtgggtattttaattctttgtaatatgtgtggggctggagattctaagccttggaagaacacgaggtgggggtactcagtttagctggctgaagctcagccaaaaccaacccaatctcatcctcccctccacttgcagaaggacttgggtggccctgctgatttggagtagcgaaatgactgatgtgtgctacttggagcctgtccctgcatctaggagacaaagagaggcaggatgccctggaaggaggtgcagaagtgagagagaggcagagagagaaggaatggggaggatgtgtggtgtggtgctgaacaatataatccttgttgcaattaaaatccttgttgcaactatgtcgtctttagggacttgaaggccacttcccagcactgaggacccaggcagggaggacacatgcaattgcagaatgcgggaggagggagtgaccagaaagactctattgtacccctygaagctggcatagggagcatgaagtcctgtgtcctggggtgctggccagggcctgcaggatcaggaatgaaaaacatcagtgctccccacaccatgcattgcagttctatgagatctgaaatgttgccctatccattaagtctccttctcaagtaaacctatgactcattgaactagccactttatttgttcatctttggaatgcatcacaatcattcattcataacccatataattactgagcacctactagatgccaggcactatgagaggcaatgaataaaatagaaacactttctgctgtcatggaggaaacagtccctgacagttcatcaagcagcagaaattctatgaagaggacatacagggttcaggggagcacagcgggggagcaccccacctagggcgcatggggtcctacaagaggtgcttctgctcttgtcacggggaacctttctgcctccatgtgagaaagcccaggccagccagtagagagagaggcccagccatccctgctgagactagacatgtatgaggccatcctagaccatccagccatagcgagaccatttcagatgggaagacccaccctgacaacccatagaattgtcacaaatggtgaattgttgttgcttcaagccactgagttagggatatgtttgtaaacaatcaaagctaaccagcacaagtcatgtggctgctcaagagttattgacagaacggtggggtgctataattggccagacctgggtcaaatgcccacttatatgcccaagagactctactctgtaactgaagacatgttgggaaagcttacctggcagatccaaaggatacttgtcactgtctgatgtagtgacgcatggacaaaaatggcctcagcatcttccagtctgttctttctcctgtattctcagtcttggttagtagcaccaccttccatctgattgctaaagccaaaaatctctgtcattctggactcctttctttccctcaactcacacatttattcaatcactaccttctgctgaaatcgccatcaaaattttttttattatatccctggatattctttgcccttcgagactcagcctgggctttacctgaccaggaaactttcctgaaaccccaagttgggctaaa

SEQ ID NO: 549277 - DNA, 1799 bp, Homo sapiens
cccagctgctcgggaggctgaggcaggagaattgcttgaacccaggagacagaggttgcagtgggccgacatgatgccattgcactccagcctcggcgacagagtgagactccgtcacaaaaaaaaaaaaaaaagtcatgtgtcaaatgtctgatcagtcagacacagcacgatgaagtagatgtaggagagatttcacactcagtatgagtaccctgatatttgaggaaactaaagatgccagaacaccctagcagaaacctctctccagtgagtcatggcattgtgtgatctacctccacagagaacaggcagaacttaggcttgcttctaacccatatggtatggcagaggttatgagatgtctttccaatgattgtattgtattctgtaagcctctgtcatagcagactggaaagagacactctctgaaaccttctgctggccttgaacaaacaaccagccatgtgggcattgcctgtgtgagcatcacatggcagggaattgtccacagcctctgggacctgagagcagccttgagccaagagccagtaagaagctgaagccctgagtcacagaggtgctaaggcatgggctctgcaactacctgaaagagctctaaaatatctctcttctcagggagtctcaggtgagaatgaagaacagtctacactgtggcacagtcttgtgaaatccaatgggcaggatccagcaaagccatgtgctgactgctgactcagaaattgagagattataaatgggtgtagtcttaagttgataaatttgcaggtaatttcttacatgtttataacaaactgaacacacattttaagaacaaataatagacctaagagcagccatgccactgacattgaatggagatgggcacaggcttattctcattgtgaccttagggtttccaagcactgtgaaagagaggaaagcttcgatgtgcaagccctttccaatattccaattctgtcacatctgctattatcctattggcctgagcaagacacatgggtaacacctgagtccatttagaatgaggccaaccaaaggatgagtgcagggaagggatttattgyagctaattgtgcaagtagtttatccataatttataaattttttcctgagaaataccctgagaaaagggaaacctctttaaaagtcttaaagtttttcggttatagcttcgttgattatagtgttctgcttgatatccaagtataaataaccgaaaactccttcacactattatttctatgatggtttattttccccatacctttacaggtaattttggtcctgtagtgtgctgtccaagtttactctgcagagctgaccatttgcacaatgtagctgacacatcatcgcaccttgaatgcggacattgactggtgacctatgagaatccgcttcaaaagaatgtatttgtcaccgctttgatctttatcctatctgaatccacacacttctgtattgttctatggctaatccatatcctgtctctattaactcactcttgccataagtgactaagagcatctaacacagaaataataaatacttccagttctgaaaattcaaattagttgaaaagcatggggacattatagaaagaaaatgtataactattttaaagacaaagaaaatgaagtctttgtattttggaatgaaactgtgtgaaaactatctgcaggtttcagcaccagggagggcccctgtctttcctgtgactgagcacattgcctttctcacacctgcaggcaaccagggaagtgactggatggggtgag

SEQ ID NO: 549278 - DNA, 1799 bp, Homo sapiens
cccagctgctcgggaggctgaggcaggagaattgcttgaacccaggagacagaggttgcagtgggccgacatgatgccattgcactccagcctcggcgacagagtgagactccgtcacaaaaaaaaaaaaaaaagtcatgtgtcaaatgtctgatcagtcagacacagcacgatgaagtagatgtaggagagatttcacactcagtatgagtaccctgatatttgaggaaactaaagatgccagaacaccctagcagaaacctctctccagtgagtcatggcattgtgtgatctacctccacagagaacaggcagaacttaggcttgcttctaacccatatggtatggcagaggttatgagatgtctttccaatgattgtattgtattctgtaagcctctgtcatagcagactggaaagagacactctctgaaaccttctgctggccttgaacaaacaaccagccatgtgggcattgcctgtgtgagcatcacatggcagggaattgtccacagcctctgggacctgagagcagccttgagccaagagccagtaagaagctgaagccctgagtcacagaggtgctaaggcatgggctctgcaactacctgaaagagctctaaaatatctctcttctcagggagtctcaggtgagaatgaagaacagtctacactgtggcacagtcttgtgaaatccaatgggcaggatccagcaaagccatgtgctgactgctgactcagaaattgagagattataaatgggtgtagtcttaagttgataaatttgcaggtaatttcttacatgtttataacaaactgaacacacattttaagaacaaataatagacctaagagcagccatgccactgacattgaatggagatgggcacaggcttattctcattgtgaccttagggtttccaagcactgtgaaagagaggaaagcttcgatgtgcaagccctttccaatattccaattctgtcacatctgctattatcctattggcctgagcaagacacatgggtaacacctgagtccatttagaatgaggccaaccaaaggatgagtgcagggaagggatttattgcagctaattgtgcaagtagtttatccataatttataaattttttcctgagaaataccctgagaaaagggaaacctctttaaaagtcttaaagtttttcggttatagcttcrttgattatagtgttctgcttgatatccaagtataaataaccgaaaactccttcacactattatttctatgatggtttattttccccatacctttacaggtaattttggtcctgtagtgtgctgtccaagtttactctgcagagctgaccatttgcacaatgtagctgacacatcatcgcaccttgaatgcggacattgactggtgacctatgagaatccgcttcaaaagaatgtatttgtcaccgctttgatctttatcctatctgaatccacacacttctgtattgttctatggctaatccatatcctgtctctattaactcactcttgccataagtgactaagagcatctaacacagaaataataaatacttccagttctgaaaattcaaattagttgaaaagcatggggacattatagaaagaaaatgtataactattttaaagacaaagaaaatgaagtctttgtattttggaatgaaactgtgtgaaaactatctgcaggtttcagcaccagggagggcccctgtctttcctgtgactgagcacattgcctttctcacacctgcaggcaaccagggaagtgactggatggggtgag

SEQ ID NO: 549279 - DNA, 1799 bp, Homo sapiens
cccagctgctcgggaggctgaggcaggagaattgcttgaacccaggagacagaggttgcagtgggccgacatgatgccattgcactccagcctcggcgacagagtgagactccgtcacaaaaaaaaaaaaaaaagtcatgtgtcaaatgtctgatcagtcagacacagcacgatgaagtagatgtaggagagatttcacactcagtatgagtaccctgatatttgaggaaactaaagatgccagaacaccctagcagaaacctctctccagtgagtcatggcattgtgtgatctacctccacagagaacaggcagaacttaggcttgcttctaacccatatggtatggcagaggttatgagatgtctttccaatgattgtattgtattctgtaagcctctgtcatagcagactggaaagagacactctctgaaaccttctgctggccttgaacaaacaaccagccatgtgggcattgcctgtgtgagcatcacatggcagggaattgtccacagcctctgggacctgagagcagccttgagccaagagccagtaagaagctgaagccctgagtcacagaggtgctaaggcatgggctctgcaactacctgaaagagctctaaaatatctctcttctcagggagtctcaggtgagaatgaagaacagtctacactgtggcacagtcttgtgaaatccaatgggcaggatccagcaaagccatgtgctgactgctgactcagaaattgagagattataaatgggtgtagtcttaagttgataaatttgcaggtaatttcttacatgtttataacaaactgaacacacattttaagaacaaataatagacctaagagcagccatgccactgacattgaatggagatgggcacaggcttattctcattgtgaccttagggtttccaagcactgtgaaagagaggaaagcttcgatgtgcaagccctttccaatattccaattctgtcacatctgctattatcctattggcctgagcaagacacatgggtaacacctgagtccatttagaatgaggccaaccaaaggatgagtgcagggaagggatttattgcagctaattgtgcaagtagtttatccataatttataaattttttcctgagaaataccctgagaaaagggaaacctctttaaaagtcttaaagtttttcggttatagcttcgttgattatagtgttctgcttgatatccaagtataaataaccgaraactccttcacactattatttctatgatggtttattttccccatacctttacaggtaattttggtcctgtagtgtgctgtccaagtttactctgcagagctgaccatttgcacaatgtagctgacacatcatcgcaccttgaatgcggacattgactggtgacctatgagaatccgcttcaaaagaatgtatttgtcaccgctttgatctttatcctatctgaatccacacacttctgtattgttctatggctaatccatatcctgtctctattaactcactcttgccataagtgactaagagcatctaacacagaaataataaatacttccagttctgaaaattcaaattagttgaaaagcatggggacattatagaaagaaaatgtataactattttaaagacaaagaaaatgaagtctttgtattttggaatgaaactgtgtgaaaactatctgcaggtttcagcaccagggagggcccctgtctttcctgtgactgagcacattgcctttctcacacctgcaggcaaccagggaagtgactggatggggtgag

SEQ ID NO: 549280 - DNA, 1799 bp, Homo sapiens
cccagctgctcgggaggctgaggcaggagaattgcttgaacccaggagacagaggttgcagtgggccgacatgatgccattgcactccagcctcggcgacagagtgagactccgtcacaaaaaaaaaaaaaaaagtcatgtgtcaaatgtctgatcagtcagacacagcacgatgaagtagatgtaggagagatttcacactcagtatgagtaccctgatatttgaggaaactaaagatgccagaacaccctagcagaaacctctctccagtgagtcatggcattgtgtgatctacctccacagagaacaggcagaacttaggcttgcttctaacccatatggtatggcagaggttatgagatgtctttccaatgattgtattgtattctgtaagcctctgtcatagcagactggaaagagacactctctgaaaccttctgctggccttgaacaaacaaccagccatgtgggcattgcctgtgtgagcatcacatggcagggaattgtccacagcctctgggacctgagagcagccttgagccaagagccagtaagaagctgaagccctgagtcacagaggtgctaaggcatgggctctgcaactacctgaaagagctctaaaatatctctcttctcagggagtctcaggtgagaatgaagaacagtctacactgtggcacagtcttgtgaaatccaatgggcaggatccagcaaagccatgtgctgactgctgactcagaaattgagagattataaatgggtgtagtcttaagttgataaatttgcaggtaatttcttacatgtttataacaaactgaacacacattttaagaacaaataatagacctaagagcagccatgccactgacattgaatggagatgggcacaggcttattctcattgtgaccttagggtttccaagcactgtgaaagagaggaaagcttcgatgtgcaagccctttccaatattccaattctgtcacatctgctattatcctattggcctgagcaagacacatgggtaacacctgagtccatttagaatgaggccaaccaaaggatgagtgcagggaagggatttattgcagctaattgtgcaagtagtttatccataatttataaattttttcctgagaaataccctgagaaaagggaaacctctttaaaagtcttaaagtttttcggttatagcttcgttgattatagtgttctgcttgatatccaagtataaataaccgaaaactccttcacactattwtttctatgatggtttattttccccatacctttacaggtaattttggtcctgtagtgtgctgtccaagtttactctgcagagctgaccatttgcacaatgtagctgacacatcatcgcaccttgaatgcggacattgactggtgacctatgagaatccgcttcaaaagaatgtatttgtcaccgctttgatctttatcctatctgaatccacacacttctgtattgttctatggctaatccatatcctgtctctattaactcactcttgccataagtgactaagagcatctaacacagaaataataaatacttccagttctgaaaattcaaattagttgaaaagcatggggacattatagaaagaaaatgtataactattttaaagacaaagaaaatgaagtctttgtattttggaatgaaactgtgtgaaaactatctgcaggtttcagcaccagggagggcccctgtctttcctgtgactgagcacattgcctttctcacacctgcaggcaaccagggaagtgactggatggggtgag

SEQ ID NO: 549281 - DNA, 659 bp, Homo sapiens
acaaggcacacactcttaaatgctttccagatagttacctatataatctcttaatcctcagccatgttatgaggtagatttattgtatagatgaagaaactgaggtaccgagagctattgagtggtgaggccagtctatacccagtgcctggactcttattaaactctatgactttaacccctccctgctccactctctctccacctcactgtgcgacttgtaccagcttttctacacaaacagattggggatcattgtctgacaccagtttcaccaaatgaagagagctcattagaatgccttcttcattgattttacattttataatttcattaatatcataacttagagtgattcaaaggctacttatcttttccctcacagcttttctcaaaagggatttaaggactttggcttagtttaatttaaggctgcttaatcccagaatggagccagtcrgtgaggttgggagaagcagcagctgatgaattgatctaattcaggctgttatgtgatgtttgcaaacttaccgctatgatctctgagaatatgactgaaaatgccggctgaagccccccattggcaatggcacatactgttcccacgacaaagtagggccattctgttttattcagtttcaggaccttcagaaaggaca

SEQ ID NO: 549282 - DNA, 562 bp, Homo sapiens
aaacacaagctatatgacatcatcttaattccacgtgggtgaccttgaggatccagaatgggagaactggagaatgcagctgacacagagctacaatggaagccagtgagatctggacagagaaaaatcctcccatgagcctaacagtttctggacwcagacaacaatcctcttttcacatcagaagacacaaatatgatccacaaaatgtgcagatacctgggagagaagccactgagtgctgcagggacatttctgcaacagaaattcatatgtggagtgaagatcagttacttatccaagcaatgttgggtacgccacctagtactgtagaactgttatattcaaggaatcatcagtctttgatcttaaggacttcaattaatgggataagggccactcacattatggaggggaacctgctttcctaattcaacggatcacatatgttcatcatatccacaaatatcttcacggcaacattcaccttagtgtttgaccaaactatctggcatcatagcttagccaagtctgttgataaatttatccatcacaaatacaa

SEQ ID NO: 549283 - DNA, 562 bp, Homo sapiens
aaacacaagctatatgacatcatcttaattccacgtgggtgaccttgaggatccagaatgggagaactggagaatgcagctgacacagagctacaatggaagccagtgagatctggacagagaaaaatcctcccatgagcctaacagtttctggactcagacaacaatcctcttttcacatcagaagacacaaatatgatccacaaaatgtgcagatacctgggagagaagccactgagtgctgcagggacatttctgcaacagaaattcatatgtggagtgaagatcagttacttatccaagcaatgttgggtacgccacctagtactgtagaactgttatattcaaggaatcatcagtctttgatcttaaggacttcaattaatgggataagggccactcacattatggaggggaacctgctttcctaattcaacggatcacatatgttcatcatatccacaaatatcttcacggcaacattcaccttagtgtttgaccaaactatctggcatcatagcttagccaagtctrttgataaatttatccatcacaaatacaa

SEQ ID NO: 549284 - DNA, 562 bp, Homo sapiens
aaacacaagctatatgacatcatcttaattccacgtgggtgaccttgaggatccagaatgggagaactggagaatgcagctgacacagagctacaatggaagccagtgagatctggacagagaaaaatcctcccatgagcctaacagtttctggactcagacaacaatcctcttttcacatcagaagacacaaatatgatccacaaaatgtgcagatacctgggagagaagccactgagtgctgcagggacatttctgcaacagaaattcatatgtggagtgaagatcagttacttatccaagcaatgttgggtacgccacctagtactgtagaactgttatattcaaggaatcatcagtctttgatcttaaggacttcaattaatgggataagggccactcacattatggaggggaacctgctttcctaattcaacggatcacatatgttcatcatatccacaaatatcttcacggcaacattcaccttagtgtttgaccaaactatctggcatcatagcttagccaagtctgttgataaatktatccatcacaaatacaa

SEQ ID NO: 549285 - DNA, 999 bp, Homo sapiens
agggggttacacagctgggaagaaatgtaaccgtgtgcaggaaaacagaaactagggaagggcaaggaagcaatcatggtgaatgagggctctgccatstcactgtcagcatgcagtgatctggtgagtttcagttctttgatgctttttgagaggtctaaaggtcctttcctgggaaggaactcagataaaacttatataagtttcaagagctaaaaccagtaggatcaatttctatgtttatcaaaaagaacagtctatgggacaattggctcagtttcaggttgtgtgatgctactggaaaattatctaagaagaacactacatactggcttgtcatactattagaaacattctcttttattctattcatcctatcatgactttattgggattagaaatcacattacctatatatttcaccagtaatagcaaagaacattgaggcttccaaagtaatttgaggcaattaacctgatttgccagtaaaataaaaacttcaatttttttgtttaataatattctatatttcaaaatcaacacaatgtttatggaaaataagttttgttattcaaataattaatcttataattttatttctgagattactgtgatttggtatcccatgctagtttccctccaattttaacaaaatactgtaatgagacaagatattttcattcattgttaaactgcacatttaaatgagtttataatagccactttgtttttctagctttctgtttattcaaatggttttttaaatttaaatgggcttttagaggctacagtgtcaggcattttatcccataatatatatataattttatattatacataataatattaactaattcattataattcatctattatatattatatgtatattatatatttcatgtatatctacacatctatatgtgtatgtatacatgtatgtgtatatatgtgtgggtataatatgtttataaaaacatttatatattttatatgtaa

SEQ ID NO: 549286 - DNA, 999 bp, Homo sapiens
agggggttacacagctgggaagaaatgtaaccgtgtgcaggaaaacagaaactagggaagggcaaggaagcaatcatggtgaatgagggctctgccatgtcactgtcagcatgcagtgatctggtgagtttcagttctttgatgctttttgagaggtctaaaggtcctttcctgggaaggaactcagataaaacttatataagtttcaagagctaaaaccagtaggatcaatttctatgtttatcaaaaagaacagtctatgggacaattggctcagtttcaggttgtgtgatgctactggaaaattatctaagaagaacactacatactggcttgtcatactattagaaacattctcttttattctattcatcctatcatgactttattgggattagaaatcacattacctatatatttcaccagtaatagcaaagaacattgaggcttccaaagtaatttgaggcaattaacctgatttgccagtaaaataaaaacttcaatttttttgtttaataatattctatatttcaaaatcaacacaatgtttatggaaaataagttttgttattcaaataattaatcttataattttatttctgagattactgtgatttggtatcccatgctagtttccctccaattttaacaaaatactgtaatgagacaagatattttcattcattgttaaactgcacatttaaatgagtttataatagccactttgtttttctagctttctgtttattcaaatggttttttaaatttaaatgggcttttagaggctacagtgtcaggcattttatcccataatatatatataattttatattatacataataatattaactaattcattataattcatctattatatattatatgtatattatatatttcatgtatatctacacatctatatgtgtatgtatacatgtatrtgtatatatgtgtgggtataatatgtttataaaaacatttatatattttatatgtaa

SEQ ID NO: 549287 - DNA, 606 bp, Homo sapiens
tgcctgaatcagcctcccaaagtgctgggattacaggcatgagccaccacgctcggccaagaattgtttcattttaaaggagaatgtctgttgccatccaaagggactcttggtagagctctgtggaagaggccaaggaatgagaggacatggtaagtctaggagaggcatcctagagttttcaaatcactctgcagaggaggataactaattatcacatgggacaggacagtcctcaccttgactgggggcaaaaaaaaaaaaaagagctttgctgaaaagcgaaagctagaaataacttatcagtaagacaatgaatatattaagttatgtagtggaattctatatagtaatgcaaataaatgcgttaaagctaaatgatcaacacaaatttcaaaaatataatgggtgaaaacacaagttgtagtacatatatactttatrcacatattgtatgtattataatatagtaattcatacaatataccataaagtttaatatatattttaaaataataaaattaatgctacatattgtttatagatacctacatatgtaggaatagcattaaattattgagaataatgaacaaatacagaaggtca

SEQ ID NO: 549288 - DNA, 651 bp, Homo sapiens
gagaatatccatttggggcaagaggatttccatgcacaatactgagaggtatattagggtaaataaaactagctgctgaaacaatctccaaatctcaatagcttaacacaataaatctttaaaactttaamtaataatttaaaggcactggaattctttctttagagagtttcacatactgaaatattccatttcccatgctctttttactcctgctggttttcacagttacacacttttgacattgtagatacactaatagcaacagacaataatgtcataattaatagagctattcacatcccaattcgatatggtaggggtgagcatcaggagaaaataaggggttcatctccacccagctctacccagttattcagggccctaggctcatttcatgttttgacatggtcatcttctgcatatggcttccaagtttaccacagaagaaaatgactgaacggagaattgtgaatgggaggttcttatgggccagccccaacaatggtgtaaattgcttctgctgtccactgtccagaatgcagtcagccagccccaacctaacggcaaggaacctgagaaatatattttatctgtgtgcctgacagcaaacttacttgctgaaccaagcattgtttttgttgcaggggg

SEQ ID NO: 549289 - DNA, 645 bp, Homo sapiens
cttttgcataatttccataaaatattttaatcttatgattaaaatactagtaaaaatctttaataactccctattttttaaaataaaagaaatgctctgctttaaattgatattaaaagtactttatatttggatgctaaacatttatctcatactatggtgcaggggctgattttctgcaaccaaactgatctttccacgtatctcaattatgccctgctcaggccacatctatttgctcatgtggttccctttcctgaaaaaaaaaaagtgttagtctactgttatatattctttttacttttcatgaaatcctcttaaactactctgttaaacatttctagaactgaaggaatcatgtattatgttcatttggtatctcacctatatttatcctactacatgatctataagaaatcatgttgaatttaattagacagtgatagaagctagtttragggatttcccctgagttgctccccagaacagcttgctttggtctcagaattaacaaaattgcataattattttctgtgttctttttcttttttttctttttgccacgatgctttgccattatatttttcttgttataaacattcttctcaaagttctgcacgaatacatacataatgaagttttttt

SEQ ID NO: 549290 - DNA, 385 bp, Homo sapiens
atgtaagattcatggcatatataaaaggcagtacatttttttyttaagcatttggttcaatcagtttattattttcctaatcatgagtacttctttggaactttcggggagggaatgagaagtaaaatttaaaaagaaacaaaactttgataacagaacaacaacaaatgattaaattagagataaaatccaccatctattctagcactcctgacattcctttgatagattgctactggcaattctatacatagtgacttgcatttctctcatgcccccctccccgctttcgctctcaatcattcattctgcatataacatacacaaccacatagctatatcactgagaaaggatcaatcattttttccctatgctgctgagaca

SEQ ID NO: 549291 - DNA, 1468 bp, Homo sapiens
  misc_feature 921: n = A,T,C or G
catcctctcctatacagaatctcactttggtccctgggagaaaagtgtctcctttctgcaaaagagcaaactgaggctcagaaaggagaagtgataaaagaaggccacccagttcaatgagccattaactaaycagcaatattgtcttaaaagcaaacctcaagttgtaatatcaaacatttcaaggctcatgcttgatcaagcaacccagcaatagattagagattcaggggaaatacagtccatgctacccacaaataaactgatataccaactcataaagaatactcaagggccaggcgcggtggctcatgcctgtaatcccagcacattgggaggccgaggcgggcggatcacgaggtcaggagatcgagaccatcctggctaacatggtgaaaccccatctctactaaaaatacaaaaaaattagccgggcatggtagcagatgcttgtagtcccagctactcaggaggctgaggcaggagaatggcgtaaacctgggaggtggggcttgcagtgagctgagatcgcgtcactgcactccagcctgggttagagcgagactctgtctcaaaaaaaaaaaaaaaaaaaaaacccaaaaaactcaaaacccctaactttagtcaattgacaacacaaagtccctgtttgacatgctgcaacacattacacaaaatgttcacagtcagatacagaggctcatgcctgtaatcccagcactttgggaggctgaggcagaaggattgcttgaggccaggagttcaagaccagcctggtcaaaagagtgagaccctgtctctacaacatttttttgagacagagtctcgctctatcgccaggctagagtgcagagacatgatctcggctcactgaaacctccgcctcctgggttcaagcgaccctcctgcctcagcctccanagtagctgggattacaggcacatgccaccatgcccagctaatttttatatttttagtagagatggggtttcactatgttggtcaggatggtctcgatttcctgacctcgtgatccacccaccttggcctcccaaagtgctgggattacaggcgtgagccaccacacctgaccaaaaaataaattttttttaattagccaggcaaggtggtgtgcacctgtagtcccagctacttgggaggttgaggtagagggattgcttgagcctaggaggtcaaggcagcagtgagctatgattgcaccactgcactcctgcctgggtgacagcgtgaccctgtctcaaacaaaaaaaaccagttcagaagacacactgaggacaataactatataaaaaataaaaccaaacctcaatcccattctgaatgccatactcacttgcataattaagctcatcacagaccaaaagtagtagggatttttggggacaatcttatatagagccatgccagcctaaaagagaaccataaatattttatttagaaaacacca

SEQ ID NO: 549292 - DNA, 826 bp, Homo sapiens
agttaatattttggttttagttattaatttacagacaaggaaactaaggtttcttaattttacagacaaggaaactaaggttcacggaagtttcagtatctccacacccccttcaatgacaacagctgagcagagtcagggtgaccctggtcctgcctggttccaaagaccatgattttctcactatttccctatttgcaaggttgtgctggaaagctgtctaaataataaaactaataaaagtcctggccggatgcagtggctcatgcctgtaatcccagcactttgggaggcccaggtaagaaggatcgcttgaggctaagagagttcaagaccagcctgagttgacagcaatagcttatctctacaaaagcaaaaaaaaaaaaaaaaaaaaaaaaaaaaaaaaaaaaaaaaawttagctgggcatggggcaggagcctgtagttccagctactcaggaggctgaggtgggaggatcacttgagtccaggaaatccaggcctttgaggctacattgagctaggctcacaccactgcaccccagcctgggcaacagagtgagatccagtctcaaaaaaaaaaaaaaaaaaaaaaggcctgacttttaacacttaccaatgtccatggggtaaatattcccacaatacccaattttaagctaccactgtgagctctccgagcactaacttgaaagagatgtgcacaatcagctctcatgagcccgggggaatccaactccagccaaccattgaaaaagggggcacgggctcaaacccggtctttgatgctaaaacatggtttcctttctccccctaccggggcttt

SEQ ID NO: 549293 - DNA, 1325 bp, Homo sapiens
atagtatgacaatcaaatctggattgtatatcttagtttgtatatctaacacacattattttgatttaagtaactgggaaaattagtatttttttaatgtcccaagtatacataatgattaggataagttttttaaatggggaattatgacctaaaataattttttccatggagaatggatgccttggtattaagtaatcatagctttatgtttgtaccaggatgttattgataactgtgagggaagtggtttgggcacctcaccattagcaagagcaatatttacactggaagaacaagtgaagtctacaaggaatgttaaggtccaggaaactatagggtcattatagagatgtggtattcaaattagcaagaccttcagcataggcatcacctaggagcttgttagaaatgcagaatctgaggcagtgccatggacctgctgaatctacagtttagtcagctcttaaggttgttggtgtgcatgctaacatttgaggaatgctggtcaagagtctcaaatggaatggagccagtaattgaaattggaaaacagagtacaaagagtgagggatcatgagcctggggtgctgaaataaatcaaagggatcaggatcaaaggaagttatgagtttttgtttgttttaatgatgggagggtggggtaagagaatggatggttggtatcttgagtgatggccatagttagaaccaccattgatgcttcgagttttatgaagtgtgcatgagattacctcatttatgattatgggtggaacagacactgggtactgtggaatctggcagctattaaacatcgaaatagatcacaaacttggaagcctggtaaggtggaagacttgagctgagtcaagtctggggaagtgattgttgttgtctgaagatgaatcagtctcctggggttgcaaaacctatcaaacctttccctaagagcaaaggcattgtattgatgggatgattataaagttgggcttagctgtatycatttctgaagtcaggtgagtattgcatgtgagtgttctttccagatggcagtgacagattatgcaggcaggcctaaagatggaaacactagtaaaaagaatgagattttgctaagttgagatttgaggagcagttagactcacattctgttggaaatcactgggaagcccaaccatctcacagttgaagaaatgtcagtaattatgttttaatttctaaaatttaaattaacttttttactaacactaaatattttaacattaatttttattgattttacttattttcctctaaaaaacagaaatacactcataaaaagtc

SEQ ID NO: 549294 - DNA, 518 bp, Homo sapiens
ccgggtttaagtcattctcctgcatcagcctcccgagtagctgggactacaggtgtgcaccagcatgcctggctaatttttgtatttttagtggagatggggttttactacatttgccaagctggwtttgaactcctgacctcaagtgatcctcccacctctgcctcccaaagtgctgggattacagggatgagtcagcccgactggcccctactcctaaatagtttttgaagccatcaaggtctctctgccactgctgcctgttttattaaagcacttctgttacgttcctggctaacactcatcagtggagcctccgtctctaacatggctggcctgtttctccatagtgtgctttctctgtatatttccagcctcaataatacctgtcctccactcactcaagccacactgatttttcagttccttaaacatgttatgcactccagggtctcagagattttccatatgtgttctctcttcctaaaacctttcccccaataccaacacatttctct

SEQ ID NO: 549295 - DNA, 518 bp, Homo sapiens
ccgggtttaagtcattctcctgcatcagcctcccgagtagctgggactacaggtgtgcaccagcatgcctggctaatttttgtatttttagtggagatggggttttactacatttgccaagctggttttgaactcctgacctcaagtgatcctcccacctctgcctcccaaagtgmtgggattacagggatgagtcagcccgactggcccctactcctaaatagtttttgaagccatcaaggtctctctgccactgctgcctgttttattaaagcacttctgttacgttcctggctaacactcatcagtggagcctccgtctctaacatggctggcctgtttctccatagtgtgctttctctgtatatttccagcctcaataatacctgtcctccactcactcaagccacactgatttttcagttccttaaacatgttatgcactccagggtctcagagattttccatatgtgttctctcttcctaaaacctttcccccaataccaacacatttctct

SEQ ID NO: 549296 - DNA, 518 bp, Homo sapiens
ccgggtttaagtcattctcctgcatcagcctcccgagtagctgggactacaggtgtgcaccagcatgcctggctaatttttgtatttttagtggagatggggttttactacatttgccaagctggttttgaactcctgacctcaagtgatcctcccacctctgcctcccaaagtgctgggattacagggatgagtcagcccgactggcccctactcctaaatagtttttgaagccatcaaggtctctctgccactgctgcctgttttattaaagcacttctgttacgttcctggctaacactcatcagtggagcctccgtctctaacatggctggcctgtttctccatagtgtgctttctctgtatattyccagcctcaataatacctgtcctccactcactcaagccacactgatttttcagttccttaaacatgttatgcactccagggtctcagagattttccatatgtgttctctcttcctaaaacctttcccccaataccaacacatttctct

SEQ ID NO: 549297 - DNA, 813 bp, Homo sapiens
atcaggagaccaaaaccaccaagtgtgacatctgggttcagcccatgtcctaaatacagatggctttggtctcggtctaacagtaaatttaggaagtcacctcagggcctatatttcttctatgaacacattcctctcccaaaatcatattagaaattgaagattccactgtcactcacatgaaacagaccctgcatcctgagtaacttagaattcctgggctttatttatcacttctttcaggtttttggtcaagtatctgagttcaaattttctcttcattctgtctaaaagaacacacacaacccttcactctctatcacctcatcagaatatatttatctttttagcgctcatcatgagaaattatatgtttactttttattttctgactcattttacaatgtaagcaccacgaaagcaaaaagattgtmatttttattcactatatctcatacagaatgaggtggtactacttttgagtgaatcaatgaattgatcaattaaagaatgaatctgtgaacaaagcccctccaaatcaggctatagcaactgctaaaagaaactgctttctctcccttctgtcttcactgagacagtgatcagtcataattcagtcctctctctgagaccccttataaaatggcagttgggtaacaagtacagacttgacggaagagctcagtagagtgatttccacaatctctctttacccagaaccagatgaaaagaaagtagagatgatgtcaaggatggttttgacaatagcaaggagttgtactgcatccagcaatgaatcagagaagaagtgaa

SEQ ID NO: 549298 - DNA, 538 bp, Homo sapiens
tgaatttgtttaacatgtatacacaggaagcttcagaatgaagacccaatcccctagtggggtgcagaagcttatgcaccaccttgaggttgcagagagaatgtgggctcagagcatggccccagacaggtttcagtggcaacacaggttgtgggaggaagaaaggaagtggcttggctagcaaaggcagtcctgttgtgtagatgaaacctcacggggagcaaccctcagaaasagcagatggcggatgcttcttttcagacctgcaggtgtcagaatctcagttaatctttccagacaagggaagggctggctgcattaatgcagagtctctacagatctacaggtgcaaatttctcccgcaaaagacaaccttacaggccacttcagaatatgtcaaagaaatctgttttggggtaaagtattaatattttgatttccttcacctgcatactcaagtcctgaggggaggtggacgacaggatggacaccacacaggcctctggatctctttctctgtcagcctctcccccagcct

SEQ ID NO: 549299 - DNA, 538 bp, Homo sapiens
tgaatttgtttaacatgtatacacaggaagcttcagaatgaagacccaatcccctagtggggtgcagaagcttatgcaccaccttgaggttgcagagagaatgtgggctcagagcatggccccagacaggtttcagtggcaacacaggttgtgggaggaagaaaggaagtggcttggctagcaaaggcagtcctgttgtgtagatgaaacctcacggggagcaaccctcagaaagagcagatggcggatgcttcttttcagacctgcaggtgtcagaatctcagttaatctttccagacaagggaagggctggctgcattaatgcagagtctctacagatctacaggtgcaaatttctcccgcaaaagacaaccttrcaggccacttcagaatatgtcaaagaaatctgttttggggtaaagtattaatattttgatttccttcacctgcatactcaagtcctgaggggaggtggacgacaggatggacaccacacaggcctctggatctctttctctgtcagcctctcccccagcct

SEQ ID NO: 549300 - DNA, 538 bp, Homo sapiens
tgaatttgtttaacatgtatacacaggaagcttcagaatgaagacccaatcccctagtggggtgcagaagcttatgcaccaccttgaggttgcagagagaatgtgggctcagagcatggccccagacaggtttcagtggcaacacaggttgtgggaggaagaaaggaagtggcttggctagcaaaggcagtcctgttgtgtagatgaaacctcacggggagcaaccctcagaaagagcagatggcggatgcttcttttcagacctgcaggtgtcagaatctcagttaatctttccagacaagggaagggctggctgcattaatgcagagtctctacagatctacaggtgcaaatttctcccgcaaaagacaaccttacaggccacttcagaatatgtcaaagaaatctgttttggggtaaagtattaatattttgatttccttcacctgcatactcaagtcctgaggggaggtggacgacaggatggacaccacacaggcctctggmtctctttctctgtcagcctctcccccagcct

SEQ ID NO: 549301 - DNA, 668 bp, Homo sapiens
caattaaagtgagccaattaccactgaatttgatcaattttaattcaagtttctagtttccacgatgatgcagatggttctttctgaaatataaacctgatgtcacttcagtacaccaatttagtgaattttagtgaattattttcagcttgaaaccaaagcatattagcacattatttatctaattccgatacatttttatctcttgtaatccccccctaccctggtgccttatttatacacaatgaacactctggagtaccctgaatatgcttataaagatgcttataaatttgtctagaatttccttttatcctttctttgtcccaaactctcattaaatctttagagtgttacacagaggtcacctttatgcatccatccactcagccactcattcagcaaatattaagagtattgtatgtacmataaaataggcgttgtataggttgaagagacaaggcaaagccatcgatatcataaaacttacatgctagtggaaacagataaacaaacaaaaattaaatatgtcaagttctagggtggaaaaaataagatgagggattatggatagaataaggtattttatacatataagcagggatgatctttctgacgaggtgacttttgtgcagcaaactgaataaggtgggagaacagataaatgc

SEQ ID NO: 549302 - DNA, 1193 bp, Homo sapiens
acattgcacagctgagccattagaagtcttcaggtgattcgctgaaaatctatctccttggaccttcaccgcacagagacctagtgcatcacagaaattcaatgactggcgacctgcagtggctcacgcctgtaaccccagcactttaggaggctgaggtgggaggattacttgagcccaggagttccaggctatggtgagccatgatggcaccacggcactccagccgggggcaacagagcaagaccttaatacacacacaaacattttaaaaggaaaaaaaaaaaaaaggccgggcgcggtggctaacgcctgtaatcccaacactttgggaggccaaggcaggtggatcacttgaggccaggagttgcagaccagcctggccaaaagggcggaaccccgtctctactaaaaatacaaaaaattcgccggaggtggtggcgggcgcctgtagtcccaaccactcgggaggctgaagcaggagaagcgcttgaaccgggaggcggaggttgcagtgagccgagatcgcgccactgcactccagagacagtctcaaaaataaataaaaattaatttttttaaaaaaagagcttcaataacagaatcttctccttccacccgactgtccrtcaaacacgtataatcaaatgatgcccactctccacagatgtcttttctggagaaaataatacgctcgttcctctaattagcccatcggtttcaggttcatcactctgctatcttctcctggagtttacaaaagcccttcagagtgtaaacaccgatgtggattcaatcccacttccggagagaggatcaaaccaggaatctaatacaactgaaaacggagcctgagccaggtgtatcacgcgatgcactgggctccagcaggattacccctggaatcggcgtctgcacccactcccagccctcgtgctaactgcgtacgcttagcagaatttctctgatccttggacccagctgcgtaaaaataaacttcctctcctgccacgggcgcgaataactgtgttaacatcaaataaaaacgtctgggagaaataccaagttagggtcgctgtcattagctgctttcaagagagaggcgcccctaccgctctgctgaaacttttaaacgctccagctgggtcgccgttaaagtcacaaaaccagaaccggagccccattactaaccc

SEQ ID NO: 549303 - DNA, 1193 bp, Homo sapiens
acattgcacagctgagccattagaagtcttcaggtgattcgctgaaaatctatctccttggaccttcaccgcacagagacctagtgcatcacagaaattcaatgactggcgacctgcagtggctcacgcctgtaaccccagcactttaggaggctgaggtgggaggattacttgagcccaggagttccaggctatggtgagccatgatggcaccacggcactccagccgggggcaacagagcaagaccttaatacacacacaaacattttaaaaggaaaaaaaaaaaaaaggccgggcgcggtggctaacgcctgtaatcccaacactttgggaggccaaggcaggtggatcacttgaggccaggagttgcagaccagcctggccaaaagggcggaaccccgtctctactaaaaatacaaaaaattcgccggaggtggtggcgggcgcctgtagtcccaaccactcgggaggctgaagcaggagaagcgcttgaaccgggaggcggaggttgcagtgagccgagatcgcgccactgcactccagagacagtctcaaaaataaataaaaattaatttttttaaaaaaagagcttcaataacagaatcttctccttccacccgactgtccatcaaacacgtataatcaaatgatgcccactctccacagatgtcttttctggagaaaataatacgctcgttcctctaattagcccatcggtttcaggttcatcactctgctatcttctcctggagtttacamaagcccttcagagtgtaaacaccgatgtggattcaatcccacttccggagagaggatcaaaccaggaatctaatacaactgaaaacggagcctgagccaggtgtatcacgcgatgcactgggctccagcaggattacccctggaatcggcgtctgcacccactcccagccctcgtgctaactgcgtacgcttagcagaatttctctgatccttggacccagctgcgtaaaaataaacttcctctcctgccacgggcgcgaataactgtgttaacatcaaataaaaacgtctgggagaaataccaagttagggtcgctgtcattagctgctttcaagagagaggcgcccctaccgctctgctgaaacttttaaacgctccagctgggtcgccgttaaagtcacaaaaccagaaccggagccccattactaaccc

SEQ ID NO: 549304 - DNA, 676 bp, Homo sapiens
attatatgaaagatattaacacaataggctatccatatgggggaaaataataaccttgtgtaaacagtactaaaacacaaaccgaaatataaaaaacaaaaacttcttaacaaaataacaaaaatagaaaactatctttatcatccatgcatagaaaggtatttttaaataatacaccaaaagaaaaagttatgaaataaaagatcatctcattctacctttatgctaactccatgttaagaagaaaaaaaaaagctttgttgcatctgttttttgttagtttgttttttgtttttgttttacttcttaggaagtcccatataacttgctctaggtgacacagatgagactttattccaggtctcttgaccaaaattccagtgatttgggaaawctgttgctatttcctccactcctcttaaccatatgaccctttcagtcgcttagtcttgagagctcactgatctcatgtgtttgagtatttgatgatgaccatcttagagaagttggaaaggttcctgaagcaaggtcccagactgtgttccaggaagaatgatccagaaaggctgaaagcagagaggagaggaaagcaggctcttgtgtcttaggtagcgctaatgcttgctaacacgggttttcttgccacatcagagaagggacacctgccaagaccacc

SEQ ID NO: 549305 - DNA, 651 bp, Homo sapiens
tgttttgatacactgttgtgccagtgctaacaaaatgagttttcaagcaataatgttttcccaaaggaaaaaatggtcggtttttgtccgtgtgggaagtgtgtgggcaggactctcaactttcaggaaaacttctgtctttttagaaagagattttccagatactttttgaattacttctctgaaaataatgagaagtctatgaaaacagaattgtcacaactacttgcttgttggtgggggtgacctgtggctgcttccacctctctaggtgttgagagcagaaaccaagacgaaggagrgagaagatgcccacagtgaggccagggagcagtgggcccatggctgctttggatcattatctgattaaccagatctccacaagggatatagattgtggatatataatgtttgtgtcccaccaaatttatatactgaagttctaatcctactcttaatttctgaaatatgataatttttatgttgaaataccgtatgtgtcagtgttagaagataaggcctttgggaagtgattatgtcatgaggggagagcactgatgaatgaggttagcgcccctatgaaagaggccccagagagacccttgccccttctaccatgtgaggacacagaaagaaggcaccatctacgaa

SEQ ID NO: 549306 - DNA, 662 bp, Homo sapiens
ttgaataatatcaacataagaaatgcctgcagttggttccaccragctgtatatgggaagttgttttccccctggaacaagcagtcctcagcatacaaatgggtcatattccaaaaatgcatttgtaagttgagttgtttggatctcagaaaacactttcccacagaagtaatattagaaaagagggttccattcctctgccaaaacacaaacctgatttagaacactctgtctctgaaatagcatttcagatggcctacacggacatccatgggaaatgtgactgggtcccacccaacttggaactggggaagatgggagcactgtgacttcttggtgaggctgggctgtgccagcaacagggacttgccttagttctcctccctcccctaacacacacacacacacacacacacacacatacacacagtggctactggtcatgtgatggaaagagaaagttgccactccaagaagactacttgtgttccaatgaaacctttcctcccttcaattgtacattcaagagctgccccagacttgcagctcagaggtccacatttcaggaatagatcacccagaatgctgtaccctaacctctgatattttcttacctgaattttggaaacattacaccatctgtagtttcaattttagagcaa

SEQ ID NO: 549307 - DNA, 1300 bp, Homo sapiens
ttttaacctttaaatctcgagagttatactaaaggtttttggacataagctatttttagaagggagggggttcaatgattaaaatcacatataccaaaattactgtgcttttttagtaagaaaataactgaaagaactgtctaaactctcacttctatgcttatcgtgaatttacgtttttaattaagcacttaattaaatacttaattgtaggtgtttttggaatctcaacccctttcacatatgaatgtctattttaagagatcaatgaacaattttccaacattatgctttgttatttcatattctattcacatgtgttagttggccagtttctttttggttaccttaatgtctttctttttttaagattacagatataatcttagtcatttttgccattatttataaaacccaaaaataacatgcataaggtcttttccctttgccattgttttactcaaataagattaaacttaagtttctaaatgtgggaaaccttaactagaatagcgtctcaaagagaaacaaaggttctttttttccccttaaaatctgtgtataattttcatagttctgtacttgatttggtgtttcattaactcatctattaagatttgatttagactattatgactgatgtggataatataccagacccctgtcccataacagtaactcaagttcaaaataacatttttttattattctgttgccaggtaattaaaagcatataaaagcacccataaaattatcagatacctgaaaaactctctctttgattactcattggtcattcacctctattgttctttgtgcaaagaacctgattttgtatgggtatgggacagtcatatgcttaagatgagatgggacactctccactctcatctcatgaagtttgctaggaccagtggctgagttttgattagtgtgagtcagtcatcaggaatcttgtctccttgaccatggttgttcaagaacaggcatgcaatggaattctgactgacrggctgtagaaaaagacagtacttgataaatctcttataaagagacatcagaagaaacattttcccatctagttcttgaaactgtattgtgagagaacatgatacttggagcttttgtagccattttatgactataacaaaataaattcgaggtcaaagccagcataatgaggatgtcagaactgagttatgaaacataccttggcggggaggagccaagatggccgagtaggaacagctccggtctacagctcccagcttgagcgacgcagaagacgggtgatttctgc

SEQ ID NO: 549308 - DNA, 623 bp, Homo sapiens
gcaaaataagaagcttttaattattctatataacttgattctgaaccccactccatagccccttgggaagacacttggtaaaatatgtgttaatactttgctccagaagcaggtctgggaaaccccaaaagtggtccaacatttgagattctaatcacaaatgctgtggaaaatacccatttaaagagtaacttgaagtgggctaagcaaatacgccctccccaaaacacacatactatctatagatagatatatacactctstctatattaaaatatatattgacaacacacactatatatatagtgtgtatgtgatgtgtttatttacaacagttaataattttctgtttattaacaacaattctctaatgggattctgtgtttttacttttttataccattgtatattttcaaatttctacaatgaatatattgataataagatgaacgatggcattgattaaagtattacatttgccaagctcaatgataaacttctatacatatagctagtttaaacctcaaaacaggacaatgagatagaaactatgactaacttcattttaaagatggaaaaactagtacctagaggttcttcattgcacagcgaggaagacagaa

SEQ ID NO: 549309 - DNA, 1456 bp, Homo sapiens
tgggtgattggcaggacatgagtgcctgaggaaagttagttgctgggactgcagggtgacagctagctgtcactcaaaaacttccccctgaccaaagagctgtttgctttctcagactaattacagcactgccctcaggaagagtcccatgccggcatttgaaaatgaatcaattttccaaggaagtgttacgcagagagttcccctgtggccagaggagcagctgctctcatttagagggcacaggctccatcaccaccagaatgtgtaagcatggcaagtggaggctgctcactgtggctcagagcagggcgtgagcagctgcccacgaaagcattctctggctggtgccctgcccataattggtccaatcatttatgttctaagttttatttatctgcagagagacaggggcttagctggtcaaagcaaatgaatcagaagctgaggggactgccccaccagatacaggaaagaagttgcaggcagtattcacgctcactctgccttgctgcttgaccttagagaaaacacactgagcctcagtcttccacatgaaatgtacttgcagtgagagtttgattagaggcaccaatgcctggaagtcactgttcataaattaatttgatgctcttggctccatttcataaatctatgaagtcacctgctttgtcccatcccaatatttatgtaacgaacatgcactttcttcggggctgaaggaagcactggtcatttagatgatgcagactattcttgtgcttgtctctgaagctcagtacgaatgtttagaaaatccccaggatgtggaaaccatttataatagcatttactatttcccagatacatagatcctacatttcatccttctctgaggggcggttgttctcgtcctcgctgttatgccatcgtctcagtgtgtaaaggtggtggttctggggaggccatgcaggggtcctggtgacaatgcggaagccactgtcatttctatggtgctcccttgatctgaacggcagcctgtagaagaggatcgcaatgatgtgtgtgcacaaacccgacagcatggacagagcccaccgagcatggtactcagtgtggtggtcaaccacaggcctgtctacaccatgtaaacagttaagatgcttctctgaagttggacagctagaaagtggaggtgtcaagctctaaccctggagatggggcccaggagcctcggctcacaaccacctggggccatccctccaggaagggrcatccttaacctgatagccacctctgcagacgccctccctgctgccacagggagaaactgccttacagttcttgtactcattaggctttgagacccgtccttgacaggcatcggcatggcatgctatgaactgcctatgattgactgttttctcttaattgggtgggtagactaagctatagtggagtaatgaatcaaagcttc

SEQ ID NO: 549310 - DNA, 1017 bp, Homo sapiens
aaaaaaaaaaaagaaattatctctcttttccatagttgtacagcatttcattatgtgagtctgccataacttgtttacccagttaccttttcatggacatatagattgttttcagctcaataagtcaagtaggacttattgagcatccttgtacatatgtctgtacacatgtttgcaaattcctagtgatagaatttctgagtcaaaagttatatgcattttaacatttgatgggcattgttaaattatcccttaccctcaaatttggcagattctaataatctctaggaaatgtaatgacttaaagtaaaggaattcttcattttgtaatcagcctactgatttccatgaaaggtgcataatacattgtctgtgttcaccgtctatgtagaactcattgctcagagcaaacatctgaaggaagagagataacggtacagaaagtaaatatgactggaggggagaaaatgtgtgattgtggtgtgtgactttttgtgggaaaccatagttgtaagtgtgagtggttcatgtggttaagtattaactggttattggtgatattagtgaagatggatcatgattagggagttgaagtaggtttagagtgtgattttgcagagaatgcagaatgggttcctaagtaagaagatgacagggacatggttcagagttgaagcagtagctccacaatgaatggattagcctccaagcatgagagaaatcccactgcttagtattatacacaaaagtatagctgatcgcgtggggttagtttgaacttcctctgtgtttwcccaatgttcagttccttaaatatgtattcagattatagtaacaatgccctcctggggaaagtaccagctttttacttgtgactgaaaacggcgctttcaattttgatttgttttgacattttagttgctgttattaaaatttgtattttaattttggcttcaatttactaaatctacatagctgaagaaaactggagaaacctttataaaaccttttgaaaac

SEQ ID NO: 549311 - DNA, 2312 bp, Homo sapiens
tggaaacaccgacaaaagtactatgcactgtccaccagagaaaagaaggaagctgtatcccctgagtgggcatttcactgctgtgagctaagaagactgtcctctaaaatacctcagccatggcattcactctggcaatgcccaagcatatcactgccttctgagaacaagacaaaagaaaccaacatttcctggctctcggtgttccacagttaattttgaaaagtttggaaagaatttaaaggaaaataatattggcaacatgagcaattgttcccacattacaacaagaagttattgagaactgcccatcccaactacagataatgtggccataaagctatgacaggggaaccattattttagaaatacattcaaggatctgcaaaggaaaataattgttagaacacaataatacattatagacaataaataaactaaatgtccatttaaaaattcatttccacacatgtgaaattagaatgtcagaagtaacagaattcaagaaagtcctcaatcattctaacatttaggtttccaaatgttaactaagcaagcatttttacccctttgatccatgagtcattgtcttgcggtaaaccggtcacctacagctgctgaaatgtcacgttttgccctgtccagacatgtcaacattccaccttctcattctcctttctaatgcaaattctaggaacccatatgttggccaaaagttcatcaatttcacatggttagtttgaattgtcttcactgaagaaacttttttttttgagacgcagtctcgctctgtcacccaggctggagtgcagtgatgtgatctcggctaactgcaacctccgcctcccatgttcaagcaattctcttgcctcagtctcccaagtaggtgggactacaggcatatccaccacgcttggctaatttttatatttttagtagaggggggtttcaccatgttggccaggctgatcttgaactcctgaccttcagtgatctgcccacctcagccacccaaagtgctgggactacaggcgtgagccacagcacccaaccttgaagaaacatttcaaaacattggaattttgtttgggatacgctcagaggctggttcttggctaagacaataaatatagagttcaaataaattaaaagcccataattctcattttggtagaagtctgggaacacatcagtgttcaataataatgctcaatttaattagttaattcatacaactaattgataattaagtaatgtaataattaagcaattccttcaaaaaatactggtacatgctctgtacctgccaacttctaggatacagaaacacagtttaaatcagacaagtaaagaatacgtcctctgctgcttatgttgtagctgggggagaaagaatataataagctatgactaatgtattcataaattcctataaaatttttttgaatctattgtaaactcactcagacattttccaaaatgtatgctaatctatgcctactgatgaaaggttcagaagacttaatgtcactttcccagggaaaattaatctgttctttatttttcttgagctgaaaaaaaaaaaggtactctatatttactgaaacttgcagaatagctgtctcatgaaaagagaaaattttgactttcaagtaacattttctacatgggtaattctgcccaatgtaaaaagtgattagatcttcactatagagattctcataaaactgatttcaagaaatatgccttccaaagataagagcctctgaaattcacatgaagtgtgcatgcagctagagatggaacacatctcatgcagacagttacttcaatccccaaacatgcaaaactttcacaattcagaaagcaaaggagaaacacaatcacaattgtacagacatattggggcctcaaagaacattaaagtctctgtaatatatacaaaaccagatattaacctacaaacctcttcagtttgtctaaagtttttatgaaatagatagttggggccaggtgcggtggctcatgcctgtaatcccagcactttgggagactgaggcgggcaaatcatgaggtcaagagatcgagaccatcctggccaacatggtgaaaccccgtctctactaaaaatacaaaacttagctgggcgtggtggtgcacgcctgtaatcccagctactcaggaggctgaggcaggagaatcgcttgaacccgggaggcrgaggttgcagtgagccgagatcgcgccactgcacttcagcctagcaacaaagtgagactccatctcaaaaaaaaaaaaaaaaaaaagagaga

SEQ ID NO: 549312 - DNA, 516 bp, Homo sapiens
ccagttactctaagatccaagctagccgtatgctgaagcgtgattctaagggattgtgactgaaactccaggagccacctcaaaagtttgtactgtcctcaagctgctacatcatatgagacaaagggcaccagctccctaatgaggacacaggaaacattggtagctcctagacaaggtatcaattatgaggcccactgcaatctactacagtctgttccatgagcacagcttggttccttccaggtccctactagggtatcccccgaataacatccscaattcctagtttgcttcactccagccggtggggcaagagctgatacagtgctctagaatgagccagataggaatagcaagcgatggcccttacttttctgaaatttgcatctctccatttctccacatgaataataattacattttctgtctgcagaagatgaaatgtttttctacttggtgaaattcagacagtgtacatggctctgaggcagccagtcactttatttctgcttt

SEQ ID NO: 549313 - DNA, 481 bp, Homo sapiens
cattattgtttattctagagatatgttagttaaaaaaaacacaatgtcctattaaagagatgtaagtggtaagatatgtaaataaattcagtagtgatatgcgataaatcgggttagtgtgagagccctggtgatcaagaaaggcttctctaaggagcagaataatctgtatattttatagatggggagacagaagccagaagaagagataggatggggctgaggtaacacaactggattttagtctaggatattccacatgcagrgttatctgggggctctgtgtttgagtccagctttgcccagttctggaaccaaagaaaccctgatctggatggacattgcctgactgccagtggagcattttcttattcttagagttctgtcaactcccatatcctacagagcatcagcccagagcatgtgggaagtagaaaatggagtgagggcggtggagaaatcgactgggcacggtggagcc

SEQ ID NO: 549314 - DNA, 1365 bp, Homo sapiens
  misc_feature 670, 671, 672, 673, 674, 675, 676, 677, 678, 679, 680, 681,682, 683, 684, 685, 686, 687, 688, 689, 690, 691, 692, 693,694, 695, 696, 697, 698, 699, 700, 701, 702, 703, 704, 705,706, 707, 708, 709, 710, 711, 712, 713, 714, 715, 716: n = A,T,C or G
  misc_feature 717, 718, 719, 720, 721, 722, 723, 724, 725, 726, 727, 728,729, 730, 731, 732, 733, 734, 735, 736, 737, 738, 739, 740,741, 742, 743, 744, 745, 746, 747, 748, 749, 750, 751, 752,753, 754, 755, 756, 757, 758, 759, 760, 761, 762, 763: n = A,T,C or G
  misc_feature 764, 765, 766, 767, 768, 769: n = A,T,C or G
taaagctccacaaagctaatgcttgcctcttctcatgctattaattgttccttagaaaataaaaaaaaaaattaagcaacaacaacttcaattaaataatagaagctaccacttcccgtggtaattagagagatagatcgcatgtaattaatccggagcccccagaagctactttcacccttcggaaattggctttcagccgttccctttgcaatggaatgttggggatttttagttgccttttatgttcagtgtgttattaataaccaaaacacctctgtgtaaaatattaattgcctgtctgccagctttcacctgaatttgaatacttggtctattgaaaccaaatccattatcatgctttgctgggtaactgacctcactggcagagctttaatggaatccttgatgaatctgatgcacacactttatcccatatggaagatttgtcaatataactatcatcctcaagaagaaaaaaatacattttaaaatagaaagcagatgaaagcaggctccatcccacttgcgggtgctacttatttgtgagcaagcatcccagggagcaaattaaagagataatgactttggtaaaacttgacttgaaatggaagtttggaaggggagccctgttaatagcttgtcactgcctttgttagaggaagcccannnnnnnnnnnnnnnnnnnnnnnnnnnnnnnnnnnnnnnnnnnnnnnnnnnnnnnnnnnnnnnnnnnnnnnnnnnnnnnnnnnnnnnnnnnnnnnnnnnntccaattgactatgagtgcctgcatccaggtgaccattgaatgcctgcatccaaatgactattgagtgcctgcatccaggtgaccattgaacacctgcatccaggtgaccattgagtgcctgcatccagctggccattgaatccctgcatccaggtggccattgaatgcctgcatccagatgaccatagaatgcctgcatccaggtgaccatagagtgcctgcatccaggtgaccatagaatgcttgcatccaggtgaccattgagtgcctgcatccaggtgaccataaagtgcctgcatccaggtgaccatagaatgcctgcatccaggtgaccattgagtgcctgcatccaggtgaccattgaatgcctgcatccaaytgactattgagtgcctgcatccaggtgaccattgaatgcctgcatccaattgactattgaatgcctgcatccaggtgaccattgaatgcctgcatccaattgactattgagtgcctgcatccaggtgaccattgaacacctgcatccaggtgaccattgagtgcctgcatccaggtggccattgaatgcctgcatccaggtggccattgaatgcct

SEQ ID NO: 549315 - DNA, 1198 bp, Homo sapiens
tcagatgttatgctaaattttatgttaagcccctgggggattgtgagcagggaaaggacatgawctaatctctctctctctctctcacacacacacacacacacacacacacacacacacacacacacatatgcacatatgctccccaaacatgcctgtgttcctgtttccaaaacacaaagatgtttggcagcccattctctccttgagcatttgttactgccaatttctaccctccagtccttgaagtcccatttcctccaacaaagacagtgctacaatagagagggtcaaaggaaagaacactaatacagttcacattttctagcagcttctcacatgccccatatggacctccccacccccaccaaggaaatcctgttggttatgtaaggccactatggtatcctcattttatagagaaggaaataaaggttaaatttctttaaacaatgaatggctcattagtaaaaggtgaaagagtgaagcctagaactcacatctgctgccaagtccaaggtgtattcccatatacaacactatttctcaaaagaaaattaaattaagttattgttccatctccttccacagctcactcagaaagagctgaaataaaatcgggcagaagatagaagaaaatagaaagccctgcacagaagaagtgaactcaatgccaaatgagagtggaaagaggagagcaggtgtattgtattgctcttctaaaaccagaaactatgacatcttaaaatatgtcttaaagcaccttgcaaagtcctcagcaaacaacacatcatgaatacaaccagttgattggttcagaaaaagagaaagaaaataggagaagaattagaaaattttatatcaaggaaaaaattttattcattatctgcataaactccttcaagacttcacagagctaaaagtagcatatatgattaaatatttttatatgcttcaactttaaatagttgtcattttttgtaaggacacctcatgtgacactatttgggaattaaaaactctagttttttataagatctacattcagaagcattcttttaagaccaggtaattgttgcatcagtacaaaatgtattcagcaccaattatgtccttgattacactgttggatgcttggactacaaatataaattagataccagccatctagtatcggaaatgtgcagtcatactaata

SEQ ID NO: 549316 - DNA, 1198 bp, Homo sapiens
tcagatgttatgctaaattttatgttaagcccctgggggattgtgagcagggaaaggacatgatctaatctctctctctctctctcacacacacacacacacacacacacacacacacacacacacacatatgcacatatgctccccaaacatgcctgtgttcctgtttccaaaacacaaagatgtttggcagcccattctctccttgagcatttgttactgccaatttctaccctccagtccttgaagtcccatttcctccaacaaagacagtgctacaatagagagggtcaaaggaaagaacacyaatacagttcacattttctagcagcttctcacatgccccatatggacctccccacccccaccaaggaaatcctgttggttatgtaaggccactatggtatcctcattttatagagaaggaaataaaggttaaatttctttaaacaatgaatggctcattagtaaaaggtgaaagagtgaagcctagaactcacatctgctgccaagtccaaggtgtattcccatatacaacactatttctcaaaagaaaattaaattaagttattgttccatctccttccacagctcactcagaaagagctgaaataaaatcgggcagaagatagaagaaaatagaaagccctgcacagaagaagtgaactcaatgccaaatgagagtggaaagaggagagcaggtgtattgtattgctcttctaaaaccagaaactatgacatcttaaaatatgtcttaaagcaccttgcaaagtcctcagcaaacaacacatcatgaatacaaccagttgattggttcagaaaaagagaaagaaaataggagaagaattagaaaattttatatcaaggaaaaaattttattcattatctgcataaactccttcaagacttcacagagctaaaagtagcatatatgattaaatatttttatatgcttcaactttaaatagttgtcattttttgtaaggacacctcatgtgacactatttgggaattaaaaactctagttttttataagatctacattcagaagcattcttttaagaccaggtaattgttgcatcagtacaaaatgtattcagcaccaattatgtccttgattacactgttggatgcttggactacaaatataaattagataccagccatctagtatcggaaatgtgcagtcatactaata

SEQ ID NO: 549317 - DNA, 1480 bp, Homo sapiens
gatattcactcaacagactgttacatagtcattcaaaagagatgtgtgtatatatatgcatacataggtatatacatatatatatcttttaaaatatatatctctctgtacacaaaatttaatatattttttataaaaatactgtgatacacattgcattttaaatattactctaaaagtataaattttttaaagactggtcatcaagttacaggccagaaaaagtaatatttttgttggttatctttaggtagtgagataatggaagatgttttatttacttttcattatccgattcttcattttgcatttttttctttaatatctatactttttaaacaatgagaatatgaagaaatgatttacaaatgctttccttttaatgccaaaatgtattgcataagtttttatttatttatttattttacagcctggtgtcattaatttattaatgccagtttatttaacctatctttaacttaagctataaaaatagagatacaagggaaaggggaaaatagaagtggtagaaaaggcatttacaatgtataagtactagtgcctcacttaaacaaaatcaagtgctcttcaaatatttagctaattaactaatttgaatagtgttctcagaaacataaaaataaagaaaagaattttaattctttgtaaaaatgtactctgccattatatattagagcctcacacttacaatattttaaatgtttttactttctcccattttttttttgcttgagcttttgtagatttgatattatgccaagaggaacatcttccagctgaaaaaataggattcttcttagttcgttggagcattgaagtgtctgctgaaaataatttgaaaataatttacagttttggcccaaacactaaataagattctttttttgagcacttgccaattcctctgtacctggttaatcactttttggaagacacagcatttcattaatggtttcccattgcccttggaatacataaatcagagaaagattaattcagttcttaaattttttggcatgcatataaagaaattaagctatgtgtgggatcattattattcttgcactctatatcattctggaatgggaaatcactctaaatatgtaatcactagaatctcctattttgactttcagccttaaaaatggttctattctataatatataatcagtcacatggtttaaaaagcaggtttagctaaaaaarttaaaagtttgccagaagtacatctggaaataatgttagaggcatgaatttctatgtgcagaatcttataagagaggtatattttcaaatgaaaaagcatacctttaatctattgctgttcaatttaataatcaattctaagttttcaatgttcagtaacaatttaatatccattgtaactttgggggaggaaagtattgccattgcataatcaagttaattacagtgatggatcttggatttcatttcttg

SEQ ID NO: 549318 - DNA, 1480 bp, Homo sapiens
gatattcactcaacagactgttacatagtcattcaaaagagatgtgtgtatatatatgcatacataggtatatacatatatatatcttttaaaatatatatctctctgtacacaaaatttaatatattttttataaaaatactgtgatacacattgcattttaaatattactctaaaagtataaattttttaaagactggtcatcaagttacaggccagaaaaagtaatatttttgttggttatctttaggtagtgagataatggaagatgttttatttacttttcattatccgattcttcattttgcatttttttctttaatatctatactttttaaacaatgagaatatgaagaaatgatttacaaatgctttccttttaatgccaaaatgtattgcataagtttttatttatttatttattttacagcctggtgtcattaatttattaatgccagtttatttaacctatctttaacttaagctataaaaatagagatacaagggaaaggggaaaatagaagtggtagaaaaggcatttacaatgtataagtactagtgcctcacttaaacaaaatcaagtgctcttcaaatatttagctaattaactaatttgaatagtgttctcagaaacataaaaataaagaaaagaattttaattctttgtaaaaatgtactctgccattatatattagagcctcacacttacaatattttaaatgtttttactttctcccattttttttttgcttgagcttttgtagatttgatattatgccaagaggaacatcttccagctgaaaaaataggattcttcttagttcgttggagcattgaagtgtctgctgaaaataatttgaaaataatttacagttttggcccaaacactaaataagattctttttttgagcacttgccaattcctctgtacctggttaatcactttttggaagacacagcatttcattaatggtttcccattgcccttggaatacataaatcagagaaagattaattcagttcttaaattttttggcatgcatataaagaaattaagctatgtgtgggatcattattattcttgcactctatatcattctggaatgggaaatcactctaaatatgtaatcactagaatctcctattttgactttcagccttaaaaatggttctattctataatatataatcagtcacatggtttaaaaagcaggtttagctaaaaaagttaaaagtttgccagaagtacatctggaaataatgttagaggcatgaatttctatgtgcagaatcttataagagaggtatattttcaaatgaaaaagcatacctttaatctattgctgttcaatttaakaatcaattctaagttttcaatgttcagtaacaatttaatatccattgtaactttgggggaggaaagtattgccattgcataatcaagttaattacagtgatggatcttggatttcatttcttg

SEQ ID NO: 549319 - DNA, 1285 bp, Homo sapiens
tggcctttaaggccctgagtgacctgggtcctccctgcctttacccacctctccagccacacttgccccttctcatctctctccttccaggcctttgcatacactctgttctctctctggaatatcctccctcctccacagcggtaagcgctagtgcgcaygtgcacacacacaaatatatacacacacacaccattacctaattactcctctttatttattttttattttatttatttatttatttatttatttattatttaatttatttttttgagacagaatctcgttctattgcctgggctggagtgcagtggtgcaatcttagctcactgcaacttccacatccttggttcaagcaagtctcatgcctcagcctcccaagtagctgagattacagtcatgtgtcaccatgcctggctaatttttgtatttttagtagataaggggtttcaccatggtggccaggctggtcttgaactcctggcctcaagtgatccgcccacttcagcctcccaaagtgctgggattacaggcataagccaccgcgcccagcctcctctttattctttagactgtaattcaaacatcatttcctcagagaaagcttccttaattccccagtctggggcaagtccctctgtcattcactctgatagagtcatttttttttttcatagcacttatggtttgcaattagatatttgtttttttcatttttgaattgaggtctgtcttccctgttcgacagtaagctccatgagggcaggtccatgatgtgttctccactgtgtcaatgagtaaatgcaagaatgaagaagcaagggatttggagacagatgacctcattccagcctccagcccacttcttgctctccctaagacttgaataggctggtgtggctcagttttctcacttgtcagatgggaatgaagttactcaaacctgcttatttcactgggttgtgtgaggatcccatgagataacaattgaaaaccatgaagcattacacagacatgaggggtggctggaatgaagaaagggatatagaaaaagtcagaaaccactcagcacacactgctaaagagaaggtctgggtggggggcgctgtatgcttggacagagggttcaggactgagtgcagctctgtgtgtgtgtctgcttgggcacctctccaggggccctctgtgtatgccctttgacactttcctcatcccccaattacttgaacaagatgaagatgggaaagaatgttagaagaataagcatttgtttgaacaagca

SEQ ID NO: 549320 - DNA, 575 bp, Homo sapiens
gaatctccttgctaaaaactgtaaaatgatttaaaatggcaatcaaatatgacttctatcatttaagtcaggctaagataagctatgatgagtttttcttcatcttgaatgaatgtggatatactttttctaatagtttgacatttttagtcatgtttcagtaaaagcttatgaatcctggtttgttttcatcaaggcattgaattccctgtctttgcagctgtgaagacaaaggcaagaggataattcggtagaatgttggataaatggttgaactaggagacagaaacatagatgaaatcatcattaaccttccaattccagaaagaatctgtttttctaagtattatatctatatttttattgaaacagattacaaatwtggttcaacagttcaaggacatgatttttccaaactagatcagtaaattttttgaaaatttataataaaaaatggtatgaataaagttggggaaaggatttggaggtttataaatggctggatattaatctttcacttaaaatattcaagtctggagaacattccttgtggttataattggtagagtcaaatt

SEQ ID NO: 549321 - DNA, 529 bp, Homo sapiens
aaataatgaacctcaagtttcctcacattatggacaaaaactaactgcataaataataaatcctgttaatgttaaaatataaaatgctaaacctaaatttaagagaaaagtgtttgtaccactgagttaaacaaagatctcatactgaacacacacacactccccacataccacaaaaaattttttttaaatatagacaataaaaattgaaatatttttattttcaaaagacactgttactatatatatgtaacagactggggaaaaaccattagcgactcrtgtaacaggcatggatcttgtatatggggtatctaaaacaaaaacttataacttgatgatgagagacaacatctttttaaaatttgacttgggtaaaagaacattatatatgtgtgtgtgaatatgaatatatggcaaataaacataataattgatattttggcatcatcagttatcagtgaaatgcaaattaaatccaaaaataaatattagtgcacacatattaaaatgggtaaaatgaaaaata

SEQ ID NO: 549322 - DNA, 1971 bp, Homo sapiens
  misc_feature 538, 572, 573, 574, 575, 576, 577, 578, 579, 580, 581, 582,583, 584, 585, 586, 587, 588, 589, 590, 591, 592, 593, 594,595, 596, 597, 598, 599, 600, 601, 602, 603, 604, 605, 606,607, 608, 609, 610, 611, 612, 613, 614, 615, 616, 617: n = A,T,C or G
  misc_feature 618, 619, 620, 621, 622, 623, 624, 625, 626, 627, 628, 629,630, 631, 632, 633, 634, 635, 636, 637, 638, 639, 640, 641,642, 643, 644, 645, 646, 647, 648, 649, 650, 651, 652, 653,654, 655, 656, 657, 658, 659, 660, 661, 662, 663, 664: n = A,T,C or G
  misc_feature 665, 666, 667, 668, 669, 670, 671: n = A,T,C or G
gcagtgccaagctcccatgctccttctcccatctcatgggaacctgccgtttcctcataggcctttccccttttcttctttttccagatcaatgatgatggaattgctactaggaggcagggagaagactgaaaacacatcaatttaatattcccaaatattccttttgtatgagctatggcacacataatgaatcatctttctttgcaccctttctcagaatcctgtttttgccgtgcaatgcaaaaaatgtactatttgccttaatttcccctgacttatgatgcctctgaattaaatacttgccaaagtggaggaaaaagcctttctaaaactttgcaaatagatgaattgctgactcaataattgaaggaatctcttggttgcttcattgtgtggtcacagtaataagaaaaagaagttatagttaaatttctcagaaattgaaatattcatacattgaactatttctgatataattgtaaagagtactttttaaaaattttattattattatactttaagttttagggtacantgtcactaatgtgctagtgatgaactaattggtnnnnnnnnnnnnnnnnnnnnnnnnnnnnnnnnnnnnnnnnnnnnnnnnnnnnnnnnnnnnnnnnnnnnnnnnnnnnnnnnnnnnnnnnnnnnnnnnnnnnacagaccataatgccttacatgtattcatcacttcagaatattccaactgctttcacacatattctctcatataaaaatcaaccttattacctaaataggacaagaatcttgtctcaattgatcagagaaaatggaaatgcagacatatgtagtcattcattttagttaaataactattaataatagacacagatgtttcagcccaggactctcctcatcatttaattgcaggtttattacaggcacaaactggtatacaattagcctctctttataggtggcttaccatgtgcctggtaccgtgctaagggcatgaattagcccatttattccttacaatgactctaataggttgatatgatttttatctcacttgcttgataaagaaagtgaggtgtagtgaggttcagtatcattgatttagcttaagtctgtattaatgatagctttagaccaagatctgtttcatgccaatatccatattttaatcattatactatactaccagcattattcaatatggtgtttctatggctattttggtaactaatacaatgattgaaatagccactgcacatccaattttatgtattgatgttctgattttcacaaaaatcttttaccctttttagcccttatttatagccgatgctggggagaatggaggccacaggttaacataattttctttttcttccttctacatttatccagtaatttctatctgatttccctccctcagtattcctacacttacccattcactctaacctacccaatgcagcaggggtaggctttttaggaaaggtatctgattgtgtcattacttagaagcctttaatggatcactcataacttcagacacaaggtactgcatgatccactccctgctttattgcaattttatgtcttgctagttcacttcagactctgttccagccaccstggcagtttagtatctcctcaagctcggtgtgtgtgcattttcatattctttgaattacctctccacactgccccctgcctccttcctctgccccagtgtagccctaattcttttgttctttaaagctccgtttaagaatgttcatgtcctttgtagagacatggatgaagatggaaaccatcattctcagcaaactatcgcaaggagaaaaaaccaaacaccgcatgttctcactcataggtgggaattgaacaatgagaacacctggacacaggaaggggaacatcacacaccggggcctgttgtggggtgtggggagtggggaggggtagcattaggagatatacctaatg

SEQ ID NO: 549323 - DNA, 920 bp, Homo sapiens
taggtatgcccattttttaagtcacttcttgaagtgcatggaaagtacacagcctcttccctcctgtcttagaatcctccttcccttagatgctcatgtcttgcccccgcgtctaacttgcaatgacaggctctgctttctctttcactttgctccctaaggagccccttgttccttccactaagacaacttctgttgagacaccctcacccctcagatatgcctgaaatatgcccagatccttatattggccagggtttgggctctcttccaaggttgttcctcagcctctatggagctgcaaatggataggactgtttcccatctccacccactggaagtgatctgaagcccagcttctgctcagccaagagccctgctacaaagtccagggctgggcaccacctgggcccttggaggttaatttgttttccacctaccttgtttctatcatgaccttgaagacaggacttcagagcactgggactagtccatgctgtattctttgtcgccttcatccatcttgccagtgcctgttcccttttcagtttaataacacaacatcaaagaacggatgggggcttgatttcccaataaatagccattgcataagtgcctgctactttgcattgtgggaatattcaggcggaattaatgatactgttgagtggctactgtgaagatttacgtgtggatctagggagggttgcttttcgtctttctattttccctccccttaaagtaataataaagattacaaaagagaaataatcagggaaagttaatttgaaatgaatctttaatcaggtttcatctgttcgaagcaaacgtctcctttgtctgagcagagcctcagaggtggagcctggagacacmattctgtagatgtatcctcaaagtcaaagccattctgacagaaa

SEQ ID NO: 549324 - DNA, 688 bp, Homo sapiens
aaaagatcaagactccttcagcttgatggttcctagctgtgatgcaaacctactgtgtcagctgcatccacagtgactgttccacatcggtcccttgggaattacggacaaaagaaataggcataaaaatgaagccacgaataataaagttattcgtctctgattcaagagttttgtgtcttttatcggcacctataaaactgtagccaacttgttagtatgaagttatttcaaaatctcaaaccgttaatagttcttgrcaataaattgtgcagcagaagagcaaaagatttcctttgtttcatggttcagtacacattttacatactgtgatgggtcctaagcaaattaacatattcagattcccaggatatattttctacataaaaatgaaggatgtatgctattgtatcctaatcgggctaagtatctcatgtacagtcattttgattttacgtatatgtttggatataggatgtctctggaatgatatgaacaactgacaacaatggtagcatctggcaaaggaaactacatagtacaacaatgggagtaagatttccttttcaacaccatacatgtttgctcttactgaacgctattcgatgtgaaaggcagtatattataacggtcaataaaatcaagctctccaggttcacagacttaactgactgtgttatattgattc

SEQ ID NO: 549325 - DNA, 1202 bp, Homo sapiens
ccatgatggcaccactgcactccagcctgggcgacagaacaagaccctgtctcaagaaaaaaaaaaaaattgagaatgaaaggtagaggtatcacacttcatttcatgagataaagaattttttttttttttttttgagacagagtctcgttctgttgcccaggctggagtacagtggcgtgatctcagctcactgcaaccttgcctcccagtagctgggaccacacgcccgtgccaccacacccggctaatttttgtatttttagtagagacggggtttcactgtgttagccaggacggtctcaatctcctgacctcgtgatccacccgcctcggcctcccagagtgctgggattacaggcgtgagccaccgtgcccagygagataaatgattttttcttaagtatcattccatagttcaggttttaaaagttgccagtaaagtataaatgttatgatggtcttgcctggaggctaagcaaaatgaaccagatcttccctgcaatctgaaggtttttcaccataatgaaatatacgaactatggcggctattgattttgtgtgcccaaagctatccccatccctcttttccataagcaaagtctatagtcccttggacagaagaatgggcatgtgtcctaagattggctaatcaagcacctcacatcactggcatagtctaagtagggccaaccagaatcctctctgggaactgtgtgacacagatgctgcgaaaaataaacaccctccctgtttcccaccatgtggagagcccaagaccaacattcaaagagaaacagacaagcagaaatgagagaaagcaagagaatctggcagtgtcagctccttggttctcattcctgagctagtttctttgtaaattaatcctgtatctgtatcaactacagaggccagaaaattccttttttgcttaaaatagtttgaattgggtttttgtcccttgcaattccaaaatcctaatctatacttaccccaagagagagggctggatatacattgcccttaatgcagggaaatcaatacatttttgttaaatttttaaaatttggacgcctctagacaggctctctattatgtcttctatctatcacttccaatatcctacacccaccaacttcactatttctattacataaaccctgaaagcatctgattttgccagtgcttccccaggatgtccc

SEQ ID NO: 549326 - DNA, 1370 bp, Homo sapiens
aataaacacgcatcccagcttcctatatcttttcatcctcttcccatctccgcagggtcaacatctcaatagtgctttgcagagcttaggcagaaatcctttatttcttttgtaagtacttttgtaagtacacataatatttagctgggtttcacaaagtgaatgttccttaagtttggttgactaaatgatcattagcataaagaatatattaaaatatcaaactattttccctggtaatatttactttattatgagtgttgttaatgctacaaagactgttcaggccccacaatccaaggagtgccttcatttgtatttttggttttctatcactcagatgtcacattcaaaacataacagctctgcccacaggtttggaaaagcyaacaggcataaatggttaagagggccatagagtcaaacacccccaccccaccccactggtgtggctctcactctcaccctttctagctcttcatcctcgagccgattgttaatgctttgagactaggtgttcacatctgtaaagtgaggaccatggtacctgcctcaaagggtatgtgaaggattgaacattatctgtttgcagcatgcagcacagagcctggcttatggtgaatattctttaaatgattacccctaccattattaatagtattatcattacaaaacaaattatttaaagagggattcgctcacaaacttagattgcaggagaaactggaagatctatctgtaaggaattctaagattctttttttttttttttgcttgttttctaaagttcgttaaatctcatttaaagcaaaccagagaaactatttcccgagtcttctgatgtattaattagttcatctaggcctttctttcatctccctatctctttttccctattcagaggacagatgttgttggcctacctttatgcacttcctactacccagtcactcatcacctttccacatatattcagaaacatcacaggtgtgaaaaaaatcagactgataaaaatgcaggctagtcatttgttcaaaaacaagtcacctttctgaataaagatgagagattttactagtaatattcttcttgaaaaaaaaatcatgttttcattcatatataagaaagagaaggcaaactctttgcaaggggcaagtcttattcttctttgggttcccattgtttctttatatatatatatatattattatactttaacagtcatttgcatctactaggaggagaatatcttgctgaaacaataaatggttcctgaagaactcaaagaccccgaggaaattgttattaatttttcaatcaccattttaacaatgaaaaatttcagattcaaaaaattaaaatgcaatccc

SEQ ID NO: 549327 - DNA, 1370 bp, Homo sapiens
aataaacacgcatcccagcttcctatatcttttcatcctcttcccatctccgcagggtcaacatctcaatagtgctttgcagagcttaggcagaaatcctttatttcttttgtaagtacttttgtaagtacacataatatttagctgggtttcacaaagtgaatgttccttaagtttggttgactaaatgatcattagcataaagaatatattaaaatatcaaactattttccctggtaatatttactttattatgagtgttgttaatgctacaaagactgttcaggccccacaatccaaggagtgccttcatttgtatttttggttttctatcactcagatgtcacattcaaaacataacagctctgcccacaggtttggaaaagccaacaggcataaatggttaagagggccatrgagtcaaacacccccaccccaccccactggtgtggctctcactctcaccctttctagctcttcatcctcgagccgattgttaatgctttgagactaggtgttcacatctgtaaagtgaggaccatggtacctgcctcaaagggtatgtgaaggattgaacattatctgtttgcagcatgcagcacagagcctggcttatggtgaatattctttaaatgattacccctaccattattaatagtattatcattacaaaacaaattatttaaagagggattcgctcacaaacttagattgcaggagaaactggaagatctatctgtaaggaattctaagattctttttttttttttttgcttgttttctaaagttcgttaaatctcatttaaagcaaaccagagaaactatttcccgagtcttctgatgtattaattagttcatctaggcctttctttcatctccctatctctttttccctattcagaggacagatgttgttggcctacctttatgcacttcctactacccagtcactcatcacctttccacatatattcagaaacatcacaggtgtgaaaaaaatcagactgataaaaatgcaggctagtcatttgttcaaaaacaagtcacctttctgaataaagatgagagattttactagtaatattcttcttgaaaaaaaaatcatgttttcattcatatataagaaagagaaggcaaactctttgcaaggggcaagtcttattcttctttgggttcccattgtttctttatatatatatatatattattatactttaacagtcatttgcatctactaggaggagaatatcttgctgaaacaataaatggttcctgaagaactcaaagaccccgaggaaattgttattaatttttcaatcaccattttaacaatgaaaaatttcagattcaaaaaattaaaatgcaatccc

SEQ ID NO: 549328 - DNA, 565 bp, Homo sapiens
cagtttgcttcgaggttacatttgagactatggagaaaagagaaaaaggaaaaaaagttttaaaatgcattttgaagctaaactgcttagttacagacccttctctaatatgattgcagtctttataaaaagaggaaatttggacacagacatggacagagggatgatcatgtgaagacacaagaaggaggtggtgatctacaagccaagagagaatgcgggaataaatgcttctttcacagccctcagaagaaaccarccctgctgacgccttgatcttgaatgtctaaccttcagaactgtgagaaagtaaatttctgcttaagccacacagtctgagaactttgttagagcagccctagcaaactaataaaaccaatgagcagctgatattcagctggtaagtagcctccaggatatgttggagctatgacctgtgtctatactgataaatcagcatatgctatgatgttgttaatattttgaatattaccccctgagaatgcctacaatgtagagcctcgtaaggtacctggtacagtacctaccatattatagacactca

SEQ ID NO: 549329 - DNA, 1454 bp, Homo sapiens
agcaattatcaagccattagtgtctcaaagcactttctgaacgttaactaaaaacgattgtattttataaatgcacacactttgtgcatataaacattgaaaataatgtaatcatatgcaatgtcatataattgtgattgtaaagatatttccacttccagcgcsggagggaatataagagcttgctaattttgtttgatatggtagcaacttttgccaattggcttgtctccagaactattacttgttaatgttcctaaatgtgctactatcactactgtctaataacagcacattctgcagcgatatgaagcatctaaattgaaccaagaaaatacatgctgtcctgacttttgaactattttgtttttttctatagaggggaataaaataaccagactgagttatatttattatttatttaagtatacctaatgggctatagaggacattggcaattaacaggacactgtcctatagaggacagtggtttctcataaagaaaattttttggaactggttttccagtgaaaacttactaaatcctagaccacttccattaacctacatttttggaatatatttatcattttgaagagttttgtctcatcccttatattttatatggctcatatatgaaataagtttttaggtagggccctcttctttttcagaagctgtcttcagtctgcactaaaacccagctactaagaaaaagaatgttcataaagtcttcagagttcttctgggaagacacaatgtaaatgtgaaatagtcattatcatgggaatatttaaatctttttctttggttgtcatggttctgttgcagggaatgtccactattatctattaagaagttcacatttagctatttcatagaatttcaaatgattggtagtcttcacttaaatttacataattactttttttgcaagactcatgttaacctttcacaatggcagatatctctctctctgcgtcctaaatatttcataaatctaagttttatttctgccacactacaggagtatcttatggaacaatcacagaaaattaaacttgctgaggtattgttgatttgatgtttaatagaagtatatttaacaaactgtcttcaatgactactttctcagaggtcatagatcccagcttttgtaatgcatatcatcaaatattttttctcatattacttggtaaaatgatatatttcagataagggagataagatatagcttattgaggccaacttgatcagactgcaaaaggtaattcaggtacataaatacgtgtttcaaagttgttgctttatagtcagactaagtattaagaatatatatttatccaattgtacacagcagggacaggatacaatgcacatagggctaacagcagtgggggaaatcaaacaaaatccaggaattatagcatcatacttaatggaaaaaaatagca

SEQ ID NO: 549330 - DNA, 1454 bp, Homo sapiens
agcaattatcaagccattagtgtctcaaagcactttctgaacgttaactaaaaacgattgtattttataaatgcacacactttgtgcatataaacattgaaaataatgtaatcatatgcaatgtcatataattgtgattgtaaagatatttccacttccagcgccggagggaatataagagcttgctaattttgtttgatatggtagcaacttttgccaattggcttgtctccagaactattacttgttaatgttcctaaatgtgctactatcactactgtctaataacagcacattctgcagcgatatgaagcatctaaattgaaccaagaaaatacatgctgtcctgacttttgaactattttgtwtttttctatagaggggaataaaataaccagactgagttatatttattatttatttaagtatacctaatgggctatagaggacattggcaattaacaggacactgtcctatagaggacagtggtttctcataaagaaaattttttggaactggttttccagtgaaaacttactaaatcctagaccacttccattaacctacatttttggaatatatttatcattttgaagagttttgtctcatcccttatattttatatggctcatatatgaaataagtttttaggtagggccctcttctttttcagaagctgtcttcagtctgcactaaaacccagctactaagaaaaagaatgttcataaagtcttcagagttcttctgggaagacacaatgtaaatgtgaaatagtcattatcatgggaatatttaaatctttttctttggttgtcatggttctgttgcagggaatgtccactattatctattaagaagttcacatttagctatttcatagaatttcaaatgattggtagtcttcacttaaatttacataattactttttttgcaagactcatgttaacctttcacaatggcagatatctctctctctgcgtcctaaatatttcataaatctaagttttatttctgccacactacaggagtatcttatggaacaatcacagaaaattaaacttgctgaggtattgttgatttgatgtttaatagaagtatatttaacaaactgtcttcaatgactactttctcagaggtcatagatcccagcttttgtaatgcatatcatcaaatattttttctcatattacttggtaaaatgatatatttcagataagggagataagatatagcttattgaggccaacttgatcagactgcaaaaggtaattcaggtacataaatacgtgtttcaaagttgttgctttatagtcagactaagtattaagaatatatatttatccaattgtacacagcagggacaggatacaatgcacatagggctaacagcagtgggggaaatcaaacaaaatccaggaattatagcatcatacttaatggaaaaaaatagca

SEQ ID NO: 549331 - DNA, 1312 bp, Homo sapiens
aattttcccaatatatcagcattttttccgttaaaaaaaaaaggatctcaactaaaagtggcttacactacaaagacatgtattatctcccaagcacaagtgttgggggataagatgcttccaaggctggtgcaactacctaataatgtcatgaatgccccagctcctctcatccttccactcagccatcaccagggttgacttttcatgatcacaatgggcctgctattgctccaggcatcatatccttaatactcttatacaaaggcagaagaagtggtagtttctcctcatacagctgtttttttatcaccagggaatcattgccagaagtcaccaasctgattacagtcagaccctattctcacatttcccttcaggtcccattgtgtcaaatgcctattattacttggccacaggggcttcagaaaacatcgagtatttcatctttcatccttatagttgaggatagctctgctggcaaagaggaaccttcttggtgggcaatcaactacatccacaccagttttcacaattaaaatttaaattgttatactgaattaagagcaatgaaaagcctttatcctgtaattaaagcaaacttgattccaattctcaacttttttcttatcctttaaagagacacagatgttaagtgtactaacttttgacatatgtatgcatgcaaatttgtgatgcccagatgtagaaactggcttataaatgagtttctaaagatagcagaaaatacgtggcttgaaagttgacaaactcttcactttgagttgaatcagaacaaaataaaagctttctatctctagagaatataatatcaaaatagcaaaattatagcagttggggtaaattttaattctacctacaacttgtagatctatatgacttatttaggccttaaaagaaaaaaaatagcaatgtctggattaccactcaaaggactaggaaatggcagaggttctgcatagcatgaagagtctattggtttgctcctagaaatctattttgtgtttaccacttccaggaggtcagagcaaaattcctccctccaatggtgagaggaattaatggttatgtagaggactttttttttttttttttttttttggagatggagtctcactaggtcacccaggctggagtacagtcgtgtcatctcgccccactgcaacctctgactcccaggttcaagcaattctcttgccttagcctcccaagtagctgggactacaggtgcatgccaccatgccctgtattttagtagagatggggtttcaccgtgttgcccaggctggtc

SEQ ID NO: 549332 - DNA, 1128 bp, Homo sapiens
tgcacacgtatgtctattgcattgcagcactattcacaatagcaaagacttggaactaacccaaatgcccatcaatgatacactggataaagaaaatgtggcacatatacaccatggaatactattcagccataaaaaacggatgagttcatgttctttgcaaagacatgaatgaagttggcaaaccatcattctcagcaaactaacacaggaacagaaaaccaaacaccgcatcttctcactcgtaagtgggagttgaacaatgagaactcatgaacrcagggaggggaacatcacacattggggcctgtcagggggtggggggctaggggaaggatagcattaggagaaatacctaatgtagatgacgggttgatgggtgcagcaaacccccatagcatgtgtatacctatgtaacctgcacattctgcacatgtattccagaacttaaagaagaaaaacaaattgtgaaaagtaattaattttattttgtaaattgtcatttcaattcttattaaaatatccaaattacaagcctaataataataacaaaaagtagacaatgctgagatcaacagatgattgtttaatttcttttaatactttgagaatatggagttcctaaattcaaaattctatactaatatctaacttttcatcattctttttcttttttcttttcttttttttttatgatagggaatctctctctgtcacccaggctggagtcagtggcgcgacctcagctcaccgcaagctccgcctcctgggttcacgccattctcctgcctcagcctcccgagtagctgagactaaaggcactcgccaccacacccagctaatttttttttttctttttttttagtagagatggggtttcaccgtgttagccaggatggtctcgatctcctgacctggtgatcggcccacctcggcctcccaaagtgctggtattacaggcgtgagccagccgtgcctggcctcatcattctttttacagtgtactggtgaaaaactgctaaagacctgcagtgttcttctctactagaggtaaaagaccctgtgaatataagtatgctagtaaaagtgaaaagattggatatgaccatcattctcctgtaattagga

SEQ ID NO: 549333 - DNA, 1560 bp, Homo sapiens
gaggctttcatggctacaccatccaaagaaaccctcccctaaccccaaacaaatgactgttaagtatactaaataatttgaaatggttgctaaatataagctcagtatataaaaaattaattgtgcatagtgtatttctttgcactagcaatgactgatttaaaaataaaaactataaaacaatgttacagtagaatcaaagtaaataaaatacttagaaataaatttaaygaaagtgcaagatatgtacaatgtaaactacaaaacatattgaaagaaattaaagatggcaattatccccaaattaattatctaattaatcacagtcgttaccaaaaattcaccttatttttaaaattaatgtgattcctttataactgacagataattgcacgtattagggagggagagtgtgatgtttccattcagttatacattttataatgattaaatcagcataattttactcattactttgtaaatgtatcatttctctgtgatgataacattcaaaatcttctagctatcttgatatatatacaacactgttattagctgtagttaccttactgtgcaatgtagaacatcaaaacgtattcttcctattcaactgtaactgtgcctgttgaccccactctcctggttccctcacccttccacagactctgataactactattctactctctacttctatgacactaacttttttagtctccacgtatgagtgagattgtctttctgtgcctgactttgacttttttcacttaacataatgtcctctagctttatctacatttttgcaaatgacctgattttcttccctttaatgaatgaacagtattaaattcagtattcacattgtgtgtgtgtgtatgtatgtatacatgtattacattttctttattcatctatagatgggcatttagattgattccatatcttggctattgtgaattgcattgtagtaaacttgggagttcagatacatcttccacatactgatttcatttcctttggatatatatggagtaatggattgctagatcatatggtagttccattttcaattttttgggggaagctccatactgtttttcataatggctgtatttatttacattcccatcaactgtgcataagaaatcctcctaacttttttaaaaaagattgacaagcttattctcaaattcatatgaaaatgcaaagaaaccaaagtgactataataatcttgaaaaagaacaaatttggaagacttctttccaatttcaaaacttactacaaaactagagtaacccaaatgcagtattgaaattagaatatacatggatagcaatgtttccatttttgaaacattttatagaaataaaccaatagatttatagtcaattgattttttatgtgtgccaagaaattcaatgggcaaccaatattacaacaaatctacattcataggagacagctattttacctagtagtaggaataagtagacttcaagagatgtgttgttggagtagcaagaggttataaattgatgcaaagagggaaagccagatca

SEQ ID NO: 549334 - DNA, 2039 bp, Homo sapiens
gggccattcccggaactgaagggtcctcccctttttagaccatatagggtaacttgccgacgttgccatggcatccataaaatgtcttggtgctggtgagagtgtcttttagcatatataattagcatataatgagcagggaggacgaacagaagttactctcagcgccatcttggttttggtgggttttggcctgtttctttaccacatcctgttttattagcaaggtctttgtgacctgcaccttgtgccagccttctatctcatcctgtgacttagaatctgtaacctcctgggaatgcagcccagtaggtctcagccttattttacccagcccctattcaaggtgaagttgctgttgttgaaatacctctgacaaaatgagaaaagagtttgaataagagggccaaagtttcacaactaagtaacaacagaccagagacttaagtctatatctcatgaccccggatccttttttcactaatgtgttttaaatctaaaccagtacctgaaacattcatgctgtgcaacacagttcaaactttaataacttttgtgcactgtacctgctgattaaaaggcctctgtatgttagtagtctctagaactgcacagttaattaaatgtgaatttaatactttggtctggtactcatacttttaaagaaaaaggcaaaatactacactaaaaccattcatcatctaaataaaagtaaaaatcttgtttaacacagcttgtgttacaatatgaaataaagtaaccmatagtacagttaagtctttgctagcattcatttgttttggtaattttgcacagtcttgatatttggttcataaaaggtacatgtcaacagaatgaatatctcaagttcttacagaatttgcctaaattttatgctattttgaggcttagggacatttctaattgaagtaaaaatatatcgggatatatctagaacaagaatcaactgagaagtcaggctgactagaaacatcattggtgatctctgagactggacagtaagtggcaaactctcagaattgcagtgacaccagagataagggtactggtttcactgtcgctgcttcccccctacaggcttcagggagcataaattacaggatttttgtttgtttttttgtttgtttttgtttttttccatgtgtgtatgttttctcctcagaaagtatttgttttgttcacttatgtgacagtgttttagcaaaagacagagatacttctaacactcaatgcatcttcctcacccccaaaacatattttgctattcaggtttctgatactttaaattctgattttgtggcttatacagataagaacattgttctagtaaaatcagaatgcttatcttcatctcccaggaaaactttcagttttcccgtctatagtcatttcaagtttattgttttttaatcaactatttttcaataactctatctctatttctaattttataatatacaaatttctatcatactacaatttaaggattccctttgtcttaattacttttgggctattgctaataagggcttaaagcggtatttctctctctctacctttcttcctccctccacacccacatttcttttctcacctctcacaacttggcaattgtgttccccaacccaacagagcctggaggctaactctctggagaggttaaaccaaaataagagattttggggcatcagacaaacaagaaggtaagatgtcaataagaaaatgaggagattaaggaaaagtctatactgaataacgagccctgtagacatctttttggtgtcaattattctgcctatcacaattatattttggactttgaaatctctattaatggaaagtccagataagaatatttgttaatattgtttattatcaagactgaaatgatacctgataaaactacactctacttgaaaaattagttacctgattttatgccagacttcttgagtcaaaaaaatctgggacacccagtacaaatatttaacagtatttcaaggcattctctacactgg

SEQ ID NO: 549335 - DNA, 533 bp, Homo sapiens
aatgtttytattttcatactttttatcatgatttgagatatttaactttaattctgtacatgttgaagagtctaataacaacaactgacatttattaagcatttactgtgtccctgacatagtaattattaatgcattgatgcacttaatcttttcaaatcttaatgtcaatgtcattatcagccagttatactaatagaagagtttcaagaaggatatagtcatgataggtcaacttaaatttcttataaaataaagaggtttgagtacctcctccctgatccctaatacaacaggattagacattatttctaaattatctaccatcataatattggcaggtaaacatctgtggggagatgtaacttccaattttaaaacccagtgtataactttttgaaactgaaataggtcactcatcaaataatcattctccattcttcaatggcctagccagtcaaagagtcgcgtttcaaaaagcaacatataaatacatggctttgttggccaatttaaaaactaatatttatctc

SEQ ID NO: 549336 - DNA, 416 bp, Homo sapiens
gttttatgtgtaaatctgtatctcacatactatcaaactcttcctcactgtcatcagtctmctgcattgaatcaacataacaaagctaaatgactcctgagggctgaatcagaaagaagaaaagaaagagatacaaaactttagtcggcccggtggctcacacctgtaatcccagcactttggaaggccaaggcgggcggatcacgaggtcaggagatcgagaccatcctggctgatacagtgaaactccatctctactgaaaatacaaaaaattagctggacgtggtggtgggcacctgtagtcccagctactcaggaggctgaagcaggagaagcttctaaataactcataaacactaattactgttgtgacactttaattttatacaatatttataagtatacagaataacat

SEQ ID NO: 549337 - DNA, 592 bp, Homo sapiens
caaactcctgacctcaagtgatccgcctgccttggcctcccaaagtgctgggattacagctgtgagccactgcaccaagccttcatagtttaattctactcaattgcatcaatgattttggagcaactgctggggaaggcattatggggggcatgtgagaagttatttaggaagatggattaaatttgactgcatggtttgctgcatgtgagaagttatttaggaaaatggattaaatttgactgtatggcgtgttgctcattcatcaaatactcaatgagtatgtgctagacactgtgctaagtaggtgttgtcactgagtcctctgagttgggctgcctctacgatcacctcacagtcagatgtgatacaatcctcatctccgtcccccataaaagtgaaaataaaagcttcacacttcattaacagccaatgctggactgaaacctgtctcaggatatgtgtaatttcagggttgctcaaagatgactagccctgttaggattattttagaatttcctagcaccaagcaccaagtaactatcacatagtagatgttcaayaaataattattgggtgaatcctgatacat

SEQ ID NO: 549338 - DNA, 500 bp, Homo sapiens
tgtcattacttgtgccatatgctcactgctagttcaagggagtggatattggagtggaattattgtttgtttatttgttggatttcatttaagagtaatgtcctaccaaataaaattatgattctgttcatagaggaggaaggcaatggatctgacagttcaccatggtggactacgtgatctctaaagtcccttctatatatatcaaaataaaaacaaacaaaatcttttcctctgtcaattgaagaatgtcaaggttcataaatttggaaacaagagatttatttttcataaagggttgcaacctgcatggtggacaytctgacaggcggagaagcatagctccttgccaaaaacctgaaacagtcaattggaaggtgggggtgggggggcagtggaggaggaaggtgaggaataggaattcatgctgagcagggtggctgaatatctacatttaataacctataggagaaatcatgaatatttttggaagaagaaac

SEQ ID NO: 549339 - DNA, 606 bp, Homo sapiens
tgagacttgtatcatagaagagactaagagggctgatgaagatgcaaaagagaaagcctgatgccaagggaatgaggttgaaagcttaatcagggtggttgtccttagtcaaaataaaggatgctccctcatgcagactagaaaaaaaggaaattaagaccaatttgattgtatatacatttgtggggaaaacaggaagctgagagagatggtggttttcttgattttctcagtaagcaggaaaaagataaacttgcttagagtagggaagaatgtgggcctccagggggtaagtaaaactttatagtcaaaagggaaggagccagtatgactataactagtggagatttgtaaaaggattgaggaacagtgctgaagatcttgatgctatagaccatatgttgctagtggttcacatttataaagttgactgatacctttagaaagtgtattcttacagwtttagagcagaaaagtttaactttagcattgatcaattcaagttttgcttcacaggtgtggttgaaggcggaagatactaagcaattaaggatgttggtgagaatattgttttagaatattgtttcacctaaattatcaaatttg

SEQ ID NO: 549340 - DNA, 583 bp, Homo sapiens
aatattgaatggggctgggtgtggtgacacgcctgtaattccagcactttgggaagccaaggcaagaggatcgcttgagccaaggagttcaagaccagcctgggtaacatagtgaaaccctgtctctacaaaaaatacaaaaattatccgggcgatgtggcgcatgcatgtagtcccagctactcaggagactgaggcagccttgagcctgggaggttgaggctgctgtgggccaagattacaccactgtactccagctgggtgacagagtgagaccctgtctcaaaaacaaaacraaacaaatctcaaaatgttaagttatttgcaaaaacagtatatttggtactgtcttactttttgttaaacatcttactttttgttaaatctaccaggtagagctagatcaatgctgtgtaatataactttctatgatgctctatatctgtgccgtcccgtgtggtagccactagccacatggaggtattgaacacctgaaatgactaattttggtatccaagatgtttaaaaaaaaaaaagaaagaaagaaataataaaaaaaggaaaagggaaaaataaatttaaa

SEQ ID NO: 549341 - DNA, 606 bp, Homo sapiens
gctgccagcgaatataaagcaggcagaaaaacctgaaaaggcgagactggcctagcctcccaagctacatctttctcctgtgctggatgcttcctgcccttgaacatcagactcctagttcttcagttttggaacttggactggctctcgttgctcctcagtctgcagatggcctagtgatcgtgtaaggtaatacttaataagcatccatccatccatcccatccatccatccaaccatccaattagttctgtccctctagagaaccctaatacaaacaggtagtggaatattgaaagaaattttattggagcagcccaaaaaagcatatgtaccttagagtaatagtaattaaataagacagtgaaattaaagaagaagaacatatttagacagagtaacagaccaagtttagtttcgggagaattaagcagctrctctaaagactgtgtgtatgtgctggcggaagacacagactccgtatcagttgtctccatgccttctccctcttcccgggttacagtgtgcatgtctagaagcgggaggtctgtgtttctcctttctcgaaggttcttcaaagattgttgagaggaaactgggcctatt

SEQ ID NO: 549342 - DNA, 609 bp, Homo sapiens
aaaaaaacttactcatcaaacttttaactacgttagtcattttaatagcagctataaattaattgctactagctaagataaacygttagataacacagctcataatatagtactacttattttttattaatttagagtagagggccaaactactgctaaatactggccaaaattaaaagactagattctagaaatttttcaggattaggtatttcagattgctgcatacttcttgaaacacacttgctgaaatctgcttggtagacatcctcaatcactgcccttatacctttacctctgcagcttcttaattgttgctgctcacacctacagtgctcatacagttaagagcccagaatccagggcacggaactaatcaattacattgcctagcaagactttcctgtttgctgataaactgtaaagtgttattttttctgagacagggtctcactctgtcacacaggttggagtgcagtggcacgatcttggctcacagcaacctctgcctcccaggctcaggccatcctcccacctcagccccacaagtagctgggacttccaggtgcatgccatcccgcccagataatttttgtacttttaatagag

SEQ ID NO: 549343 - DNA, 647 bp, Homo sapiens
cctttgttgattctttggcatatattaaattcttctgaagttgcttttttaccctaataagtgaccgatagctgctaatgctccagtgacaatatttcccatgggaaaccaaaacaccatcaacttgctactaaaatactgcatcatcatggctgacatttttccatttcttcctggaagcagaatggaagatactgggtacggctgaactaaaactccaactaattgtaaatgtgaaagcaaagaagctatattggttatgcaattctacacattcagtgccgcttgagtgtttctaagttccttgctctagctaatgtttctatttaaaaagtagacaaatttgatgactaacaacggagaacacgaaacaaatctggtgaataccagaattaagacatgtgtcagccaggcgcagtggctcatgcctgtaatcccagcactttgggaggccgaggcgggtggatcacgaggtcaggagaccgagactatctgagggagaatcttcaggttttttcttctcttttgctgtaacaccagtcaaaaaarttgacaaagataaggtattaagtattgacgttaatactctacctgaaaataaaaaccatggaacctatctataggttaaaacagcatactgataaaaa

SEQ ID NO: 549344 - DNA, 1293 bp, Homo sapiens
tctcctcccccacaatctgaaggaagagttagaacagtggaaagtaatgttgcatattacaagaaatggttaaacacaattagtcagatcatataatggactatgacgtattaaggcagtatcacggctaccaggagtatagataccaactatggccccaaataatgctaaacactgttgcaagaacttcatccaccagttcacgtgtctcaagactgcaagatttaaatttgccctactattcgtgaaaattcacctttcttttccaaatctggaataccccccattgtttaaatccagtctgggtttctcttgtcagtagcagtcttcaacgcctacttcagagaatgaaaatgtgtgtatgtgcactcatgtgcttatgtgcacgcacacaccctccttagaaagataaagtcaataaacttcctgtcagtatcacagaacatgcaaaktcaattgtgcaatatttccttgcattatccatcctatatgcaaacattctaatgaaatagaactggaaattacacatggaaaccgcagctaggtttggccacctaatggactcagggtactccggtaatggcgcggagagaagaaggttggccgagcggggatgcaaggtccccaactgaagtatctgaaacctactatgggttccacgtagagtcttcagttgtgatttctcgtaggacactaggaaagttgcaatttgcagctatggccacggggtagtgcaataattctgcaaatagctgaccccacccccaacactcctatccccccaaccccagccctcccaaagacagaatggctaggagagaatggggacatttggtctgaatcctgggcatccacaggggttactgagagattctccacaaatccaaaagtgtctgtaagactatccagttactctcagcattcgagcccgatacaacagaaggtcccgggctttgaaggaatgatgagaactgagaggctataaaaagtgattagcctatttattacaaattgtgtttacttaggtttttatgtttacttcccaccatatctccaccagaatacaattaaccaccccctcactcatcagaattgtattagaaagactcacaaaaataaaataaatactgcatctaaacgcaaccgtcaagctttatggaactggactgttattacacaaaggtgtccccaaaacagggagaaggaaatgcaaattttgaaagggcttcttttcaaaggaaatttttgtccatttagtccttacaagtcaaagtttggtctgtggacaaaact

SEQ ID NO: 549345 - DNA, 2099 bp, Homo sapiens
acatttggttaaaaacctatccacacattaaggtgcacactccctgggttcctcctccctggtatcctctggggccccagcccagctggagtccccaagttctcggcgccctgaactaaccagtctctccacccagctttctccaaaacacgccccacacragggctgagctcctccacagcggatgcaacactccactgcttcccatcgaggccccctgcctcctccaggctgatgagcagccccttccccactgctgcccacagccctagccctggaagccactcttctgagaaggctttgcctcctcgtacctgccgaggcccctccaggcccatgctgagggccaatgagagccacgcagtcaactacacggtgaccttcggccagtgtgagtacacgcagctctgcagagctgctgtctaccaatcagctccaggacacctggggctcagacaggtgcactctccttctgccctttctttgtactctgttttgacccataaggactgaccaaaaggataggaataggccttaaaatgtttgctttactgcagctggaggaaagggtagaggcacctgaaggtcaagatcagggatctgtagcattttctggcaccatgaagtaaagtctaaaaaggcctggaggaagccgcccactggcctgcgcatgtcccctggcagttgatttgaagacaagcaaaagcatcagcgggcactactgggcagcatccttagggagactaaactgctagtgcctctgcatccctccctgcctgtgttagcctaccttcaccaaacaagatccacactttattccctccatgtttctattcacagtcttcccaccacgtgtctttcctcctttccatttcctcctgaaattctactccaggacccatttcaaatgccaccccaccatgaatatcttactttcaacaggatgtgcccatgccccctcaagcgggcagtgtcagccttggattgcaggtatttatgggtatggcttattctcctattaagttcccaaaaaacacactgtcctttgcatcctgtacagcagggtttcctaaactgcaggtttcagcctatgaatgggaaattttaaaaaaaagaaagagaaagaaagaggacaggaaatatccaagtgtatcacacatagtaataagcgttatttcatgatgctcttgtttcacttacgtgtatgcatgttcaaggggtggtgggtggcagtgttaaacgtgtatttgttactgggggtcatggtctgaagcatttgaaagtcactgccctgatggtacctctcctctgtctaatattctgtgaatgcttattgaattgaacaggttgatgagtatgaaatgatccatgtattataacttcaaaggctccaacttaaaggaatataaagaataatgcctatctgaacaaaagtgtgtggattctggcttatatgaagctgtggaggaatggggtgagtggtagggaagatcagaatatttattatactattgtatgttgatagactttctctccaatgattaaaatgtgttaacatttaaggaagatgaaatacaagttcattttggaaaacttttctcattcactgaaactacctcatgactacaaagttctgcatctttaaaagagacagtataggtaattccaccatgatgcataaaatgatcttttagagacaccatgaaagcccttgttcaagttttctttgcccaagatgtctccctgtactctcaatacccccacccacaccatctgtcttccaagacttagttcaaaggccacctatttcatggaagcctttgttttttaattcaatttttcctctttccatcctccacccaagtcccaaatatggtctcttttctgaatcaccagtgttgaaaacttcctttttcatgtgtgttcttgtcttaatttcctcatttgacaataacactaatatgtacaacctacgccttactcatccttgcatctcccacagaaaccagcacaaggtcttctacttaagagatgatcaataaatatttgttaaacgaattaaatgaaagcaacagttagcctgttaaaagggatggtca

SEQ ID NO: 549346 - DNA, 2099 bp, Homo sapiens
acatttggttaaaaacctatccacacattaaggtgcacactccctgggttcctcctccctggtatcctctggggccccagcccagctggagtccccaagttctcggcgccctgaactaaccagtctctccacccagctttctccaaaacacgccccacacaagggctgagctcctccacagcggatgcaacactccactgcttcccatcgaggscccctgcctcctccaggctgatgagcagccccttccccactgctgcccacagccctagccctggaagccactcttctgagaaggctttgcctcctcgtacctgccgaggcccctccaggcccatgctgagggccaatgagagccacgcagtcaactacacggtgaccttcggccagtgtgagtacacgcagctctgcagagctgctgtctaccaatcagctccaggacacctggggctcagacaggtgcactctccttctgccctttctttgtactctgttttgacccataaggactgaccaaaaggataggaataggccttaaaatgtttgctttactgcagctggaggaaagggtagaggcacctgaaggtcaagatcagggatctgtagcattttctggcaccatgaagtaaagtctaaaaaggcctggaggaagccgcccactggcctgcgcatgtcccctggcagttgatttgaagacaagcaaaagcatcagcgggcactactgggcagcatccttagggagactaaactgctagtgcctctgcatccctccctgcctgtgttagcctaccttcaccaaacaagatccacactttattccctccatgtttctattcacagtcttcccaccacgtgtctttcctcctttccatttcctcctgaaattctactccaggacccatttcaaatgccaccccaccatgaatatcttactttcaacaggatgtgcccatgccccctcaagcgggcagtgtcagccttggattgcaggtatttatgggtatggcttattctcctattaagttcccaaaaaacacactgtcctttgcatcctgtacagcagggtttcctaaactgcaggtttcagcctatgaatgggaaattttaaaaaaaagaaagagaaagaaagaggacaggaaatatccaagtgtatcacacatagtaataagcgttatttcatgatgctcttgtttcacttacgtgtatgcatgttcaaggggtggtgggtggcagtgttaaacgtgtatttgttactgggggtcatggtctgaagcatttgaaagtcactgccctgatggtacctctcctctgtctaatattctgtgaatgcttattgaattgaacaggttgatgagtatgaaatgatccatgtattataacttcaaaggctccaacttaaaggaatataaagaataatgcctatctgaacaaaagtgtgtggattctggcttatatgaagctgtggaggaatggggtgagtggtagggaagatcagaatatttattatactattgtatgttgatagactttctctccaatgattaaaatgtgttaacatttaaggaagatgaaatacaagttcattttggaaaacttttctcattcactgaaactacctcatgactacaaagttctgcatctttaaaagagacagtataggtaattccaccatgatgcataaaatgatcttttagagacaccatgaaagcccttgttcaagttttctttgcccaagatgtctccctgtactctcaatacccccacccacaccatctgtcttccaagacttagttcaaaggccacctatttcatggaagcctttgttttttaattcaatttttcctctttccatcctccacccaagtcccaaatatggtctcttttctgaatcaccagtgttgaaaacttcctttttcatgtgtgttcttgtcttaatttcctcatttgacaataacactaatatgtacaacctacgccttactcatccttgcatctcccacagaaaccagcacaaggtcttctacttaagagatgatcaataaatatttgttaaacgaattaaatgaaagcaacagttagcctgttaaaagggatggtca

SEQ ID NO: 549347 - DNA, 2099 bp, Homo sapiens
acatttggttaaaaacctatccacacattaaggtgcacactccctgggttcctcctccctggtatcctctggggccccagcccagctggagtccccaagttctcggcgccctgaactaaccagtctctccacccagctttctccaaaacacgccccacacaagggctgagctcctccacagcggatgcaacactccactgcttcccatcgaggccccctgcctcctccaggctgatgagcagccccttccccactgctgcccacagccctagccctggaagccactctwctgagaaggctttgcctcctcgtacctgccgaggcccctccaggcccatgctgagggccaatgagagccacgcagtcaactacacggtgaccttcggccagtgtgagtacacgcagctctgcagagctgctgtctaccaatcagctccaggacacctggggctcagacaggtgcactctccttctgccctttctttgtactctgttttgacccataaggactgaccaaaaggataggaataggccttaaaatgtttgctttactgcagctggaggaaagggtagaggcacctgaaggtcaagatcagggatctgtagcattttctggcaccatgaagtaaagtctaaaaaggcctggaggaagccgcccactggcctgcgcatgtcccctggcagttgatttgaagacaagcaaaagcatcagcgggcactactgggcagcatccttagggagactaaactgctagtgcctctgcatccctccctgcctgtgttagcctaccttcaccaaacaagatccacactttattccctccatgtttctattcacagtcttcccaccacgtgtctttcctcctttccatttcctcctgaaattctactccaggacccatttcaaatgccaccccaccatgaatatcttactttcaacaggatgtgcccatgccccctcaagcgggcagtgtcagccttggattgcaggtatttatgggtatggcttattctcctattaagttcccaaaaaacacactgtcctttgcatcctgtacagcagggtttcctaaactgcaggtttcagcctatgaatgggaaattttaaaaaaaagaaagagaaagaaagaggacaggaaatatccaagtgtatcacacatagtaataagcgttatttcatgatgctcttgtttcacttacgtgtatgcatgttcaaggggtggtgggtggcagtgttaaacgtgtatttgttactgggggtcatggtctgaagcatttgaaagtcactgccctgatggtacctctcctctgtctaatattctgtgaatgcttattgaattgaacaggttgatgagtatgaaatgatccatgtattataacttcaaaggctccaacttaaaggaatataaagaataatgcctatctgaacaaaagtgtgtggattctggcttatatgaagctgtggaggaatggggtgagtggtagggaagatcagaatatttattatactattgtatgttgatagactttctctccaatgattaaaatgtgttaacatttaaggaagatgaaatacaagttcattttggaaaacttttctcattcactgaaactacctcatgactacaaagttctgcatctttaaaagagacagtataggtaattccaccatgatgcataaaatgatcttttagagacaccatgaaagcccttgttcaagttttctttgcccaagatgtctccctgtactctcaatacccccacccacaccatctgtcttccaagacttagttcaaaggccacctatttcatggaagcctttgttttttaattcaatttttcctctttccatcctccacccaagtcccaaatatggtctcttttctgaatcaccagtgttgaaaacttcctttttcatgtgtgttcttgtcttaatttcctcatttgacaataacactaatatgtacaacctacgccttactcatccttgcatctcccacagaaaccagcacaaggtcttctacttaagagatgatcaataaatatttgttaaacgaattaaatgaaagcaacagttagcctgttaaaagggatggtca

SEQ ID NO: 549348 - DNA, 2099 bp, Homo sapiens
acatttggttaaaaacctatccacacattaaggtgcacactccctgggttcctcctccctggtatcctctggggccccagcccagctggagtccccaagttctcggcgccctgaactaaccagtctctccacccagctttctccaaaacacgccccacacaagggctgagctcctccacagcggatgcaacactccactgcttcccatcgaggccccctgcctcctccaggctgatgagcagccccttccccactgctgcccacagccctagccctggaagccactcttctgagaaggctttgcctcctcgtacctgccgaggcccctccaggcccatgctgagggccaatgagagccacgcagtcaactacacggtgaccttcggccagtgtgagtacacgcagctctgcagagctgctgtctaccaatcagctccaggacacctggggctcagacaggtgcactctccttctgccctttctttgtactctgttttgacccataaggactgaccaaaaggataggaataggccttaaaatgtttgctttactgcagctggaggaaagggtagaggcacctgaaggtcaagatcagggatctgtagcattttctggcacyatgaagtaaagtctaaaaaggcctggaggaagccgcccactggcctgcgcatgtcccctggcagttgatttgaagacaagcaaaagcatcagcgggcactactgggcagcatccttagggagactaaactgctagtgcctctgcatccctccctgcctgtgttagcctaccttcaccaaacaagatccacactttattccctccatgtttctattcacagtcttcccaccacgtgtctttcctcctttccatttcctcctgaaattctactccaggacccatttcaaatgccaccccaccatgaatatcttactttcaacaggatgtgcccatgccccctcaagcgggcagtgtcagccttggattgcaggtatttatgggtatggcttattctcctattaagttcccaaaaaacacactgtcctttgcatcctgtacagcagggtttcctaaactgcaggtttcagcctatgaatgggaaattttaaaaaaaagaaagagaaagaaagaggacaggaaatatccaagtgtatcacacatagtaataagcgttatttcatgatgctcttgtttcacttacgtgtatgcatgttcaaggggtggtgggtggcagtgttaaacgtgtatttgttactgggggtcatggtctgaagcatttgaaagtcactgccctgatggtacctctcctctgtctaatattctgtgaatgcttattgaattgaacaggttgatgagtatgaaatgatccatgtattataacttcaaaggctccaacttaaaggaatataaagaataatgcctatctgaacaaaagtgtgtggattctggcttatatgaagctgtggaggaatggggtgagtggtagggaagatcagaatatttattatactattgtatgttgatagactttctctccaatgattaaaatgtgttaacatttaaggaagatgaaatacaagttcattttggaaaacttttctcattcactgaaactacctcatgactacaaagttctgcatctttaaaagagacagtataggtaattccaccatgatgcataaaatgatcttttagagacaccatgaaagcccttgttcaagttttctttgcccaagatgtctccctgtactctcaatacccccacccacaccatctgtcttccaagacttagttcaaaggccacctatttcatggaagcctttgttttttaattcaatttttcctctttccatcctccacccaagtcccaaatatggtctcttttctgaatcaccagtgttgaaaacttcctttttcatgtgtgttcttgtcttaatttcctcatttgacaataacactaatatgtacaacctacgccttactcatccttgcatctcccacagaaaccagcacaaggtcttctacttaagagatgatcaataaatatttgttaaacgaattaaatgaaagcaacagttagcctgttaaaagggatggtca

SEQ ID NO: 549349 - DNA, 740 bp, Homo sapiens
cgatggagtctcgctctttcacccaggctggagtgcaatggcgcagtctcrgcgcactacaacctctgcctcccaggttcaagctatccttgtgcctcagcctcccgtgtagctggaattaataggtgtgtgccaccacgcctggctctttgtttttttttttattatttttagtagagactgggtttcaccatgttggccaggctggtctcgaactcctgacctcaagtgatcagcccaccttggcctcccagagtgttgggattacaggtgtgagccaccacgcctgtacctggcctatctttcataggttatataaattccttggttcccagtttttgcagtcttttccaattcagtttaattaatggttaactgtttattcattatcaaaaaaagtacagtgtaatagataagaccatgttactattagaagtatgggtatcatcaaattaagatttttgattctaaaattattaggttccaagaccaaagattaaattaagagaaggtaaagctggacaaaatctgctggaaatgatggcctgtgaccgactgagccaatcaggtaatagtaatattaaactaatttaatttaaaaagaaaaaggaatttctgttaaggcatatcttatgataaaatcttcatctgttcaggagataatttgtcaaaattatttctttttgccgtatcagttaagagcaataggtatggaagagatgcgaagaaatagcacattc

SEQ ID NO: 549350 - DNA, 550 bp, Homo sapiens
aaagacttgcaggaaagaagtaatcatgttgcactagggaactcagcttgagcaatgtttgaataatgcatatacgatatataatattattataaacactgaatattcattcaggaaaattgttttatattgggaggttggggaaaggaaaagaagtatatatagagaaataaatcctctttttttctactaagaggtcacaagatagtatctatagtgaaaacaacagcaaaggcagtattagcacagcatttggaagtaccatgtaaatattaagcaaaaacaaagtgaaatagcaaaatgcttgcaaactgctgcctttggagagcagggttagagaggtggtgtggggtayggagtatttgtaactttgattgtaagcttcacagtatcacagtactatttgcatttttaatctatttaactgtattactttggcaaacaagaccagtacatacaggctgctactgctcttatgaaataaagggctgttcatacatgcatacacagaggagaatatccctggaagcagacacagaaactgataata

SEQ ID NO: 549351 - DNA, 1456 bp, Homo sapiens
  misc_feature 282, 285, 291, 292, 298, 342, 351: n = A,T,C or G
tgactattcttgcatgtgtttcttcatatgaattttcttttgtttaactatgatggaaaacatatataaaagtgtagttgtgtaactatgatggtcaaacatatataaaagtatgaatcattgaacttctgttacccaacttaagtgattatcagtatttcgctattttgtgttttagttatttctcctttcctcatttttttggagtattttacaactatctcacgtatcatttcattcttaagttttttagccctgtgtctctaagagataaagatttanaanaattannaaacanaaatttaaaaattaagaaattttgctagatgggtcattatcccnatctagcanaattaatattaatattaatcagtagttaatagtcataatccagtattatccacatctagtttagttttcyctgatttttttctcaggggtcttggtttgttcaaatcaggatccacacaaagtcctcactttgcatttgattgatatgccctctaaatctttaatttgtaacagcctcctccttcccaacttctgtgttgttttcttcactttttcttgttctgtatgttttttactatgatttctgtgatgtctgttttcccttttgctccttgtataaatgtctcagtcttgctttcttaaataaatttgtatttttctttacttttgtgagttctgtcacttcctgtttcatattcttttgctatttggctatcactcactctggtttgggccatccagtcctctgttcttttggtactgtcattgtgttcttaagtgttttagtttagtttagtttttagcatgctgttttcatctgctttgcggcaatatttctttggtgagctttcattatctactggaaagatatactgcttgttttcagttttttccttatggtttttttgtattgagagatgagttgacttttcagttacttaggtttgaatgagattgattttgctgggggttcctgtgcagggaaatgggcaggggttagctttacaagcatcattgtgttaagggctccctcctaaggtccacttctctggctcttaaagcctaccctggattaggaagaatcccactacctctgtacctgtgcttccctgaattcctcacagcctttgcatttcaagttgatgcatctacttttagggtttatattttgctggcattttctgagtgcttatgccctttcttctccctccctacttttctgttctctctttctgctccccctagcaaccctgtctttttagttaatctgtctacttctttttctcaccagctctcttgggatgaggcccctcagcatcacatttttttctgtggtcccctggtggcatgataggggccagttggctttgcctttaccgtcacctggcaaggttttctcatcctgttttgttgttttcagatttgcttaaagtaattttaactt

SEQ ID NO: 549352 - DNA, 1001 bp, Homo sapiens
caagttgacaacagaaaatctagcaccctttttaaggttttggcatcagtgatttcttggtgctctaaatagttcttatgattattccatgggtgcttaaaaagaatatgtattctctgatttaagaatatgtaattgatttaactattgattagatattaataaaatagatttttaaattaccttattaatttggttaagtcctccatgactacttattttttgactatttgtyatggaaaggtgtagctaaataaatatagaactactctatatgtgtttctagttctctatgtattctctacattttgctttataattgttttctttcttagagacaggggtcttgctgtgttgcccaggccagagtgcagtggcatgatcataactcactgtagccttaaactcctgggctcaagcaatcctcctgcctcagcttctcaagtagatgggactacagaagtgcatcaccacaccctgctaatttttttcttatttttatttttagtgatggagtcatgctatgatgctcagagtggtcttgagctcctggcctcaagcaatcctcccacctcagccccctgagtagctgggattataggtgagaggcaccatgcctggatttgctttataaattttgatatgttacttggtgcatagatattcattgctgttagaccttcattatgtgttgtaccctgcccttctttggttcacttttccttgaattcagtcttgtctgatattaattttcagctgtctgctttcttcttatttccatttttctaatatgcttttgcctactcatttgctttcaattttttctgagtcatttcattctagatgagtatattacagtcagtacttaattgggtttttctttgtcactgaatatgagtgtctcttttcctgtgtattgatagggtagatatgtgtagtatgagtgttacaattttttaaaaaactttgatttctctcctttgttttatttggggtctccg

SEQ ID NO: 549353 - DNA, 1676 bp, Homo sapiens
tatatatatatatatatayacacatatatatttaatacatgtatatataattatttctacaataatattccaaggttacatctaagtcatctaaatgaagcaagctggagaaaagaattccatttggaaattattctacttgatcctgtttccactgccaattctctgaaggcatattaattctctgggctatttggaagcacttgaattatttgaagaattgccagatcactcatcttcaacatttcttcatgtagcatccaggaataatggctgagggagttacattttgttccctttattcagcacattcattcagtttctcagtagcatatgaagtattcttgaaactcgtggcaaattactgggcttttcacatagcatttaaaaagatcagcaaaatccagtattttagcacttgcataacaatgtatttttaccagaactggctttaagggtacaattaaaattttttattaagcaccttaaggaatttcaaatactacatcaaaaatttcagttcaaagacagttttccaaacaatagtaattaatgtttgtgatatgggaagtgggcagggaagtgctgggtatagaagtgggaggctccaccctcaggcctatgcccacagacagaagtgagaacaggcactcctgtttttacgcccaaatgttgcattttcaaagaccactcaggcccaccacaccccgcctcctgtgcccatataaacctgaggacttagtgggcacacacacaagcggctgaacgttgagaccagcagaccagcagaccagcaatggtggaatgatgtgacagagaaagagagaagaggagggatgtccagatgccaagaggagttcagctggaggcgtttggagaagagtccggctgctgggcggcccgactccaggggaaaatcaccttcccacttcataccccacttgccgctccccatcaatctcactgagagccacctccaccactcagtaaaaccttgcactcttccttcgagcccacgtgtgatctgattttttcaggacactgagcaagagctcgagatacagaagactgtcacactggccctctgcccttgcaataaggcagagtccattgagctgattaacacacaagccatctacagatggcaaagctgaaagggctttgtaacactggggttgcaggcaaccaaccagcccctagacactaccgcggggctgagagcctgaagcactcaccctggcctgtgcacctgcccatctgcatgctccccctagggggttgagctgcagggctaccaagcaggagagtcactcctctgctgcatgttctgtgaggagaatcagggaactctcctatttcatttgcattaatagtctgagagcttttaaatattgattctttctaaacttatttgctggaaagatatttataaaaagttgaaagtaaagaaacatcagcacttcaaaatcttaataattttgtcattctgagcagagtaataataaaaactccctctactacagtagatgtgatttaattttcgtaatgatattaaacaaatccctatttaattcatctgtgcactcttggtcaagctacttaatctctctgcacctgaaattttgattgattaattttgtgaatatttatcaagtatttacaatgtactacacaag

SEQ ID NO: 549354 - DNA, 646 bp, Homo sapiens
ttaaaaaaaaattacctccatccaggaggtctgtttgaacagtagaaattccagcgggagagaaaggtggaaagagtaggaatggtatcatccataaagaaatacagggaaatcaccctacattgaggggcaggagtgtttgcattccaagatgccactcagtgcccagcacactacagccacacacaccttcataaagttacgggacttcaggaataaagagaatggcctcaacactgcccacccaaaaggaagaaagtgaacttacacccraaggtcagcaatcagaactataacaacccctaccctggcagctaaaagacaatggagaaatcattccctttgcaatttttaaaatttctaagataaaaattacttccaaacttatattctttttgcaaacataagttcttaaaaatgttcttctcatgcatcctttctcagaaatgatggatggtatgtcccgctgaaaggagggagaaaaaaagacatgggaaagcacaggatttaggaaataggaaatccagcataggggagacatgagaagaatacttaaggtggcagccccttcagattggaggctggtagaggggctcctggagctgtctctgctggaaaaacaaaatagaataaattccctgacaaa

SEQ ID NO: 549355 - DNA, 660 bp, Homo sapiens
ttacccacttacgttaaataaggctttagggcgtatcatttcagaagaactygaacctttgattgtcttaagcattttttgagatgtttacaggaatgaaggagttgacattaactgagtttctgtgcgtaaacccatttaagcctagcgtttcattattggaacgctaagcatgtggcaattatttatttcctgctgctcaaggtcattgccaaggtctgattgcaaaaatttaaaaaattgcaacctcaggcataaatgggttaatttgacctcctttgtctagtccttcatttctcaatttatctcatcttgaaattgatcaacattttaaaacataaaataaggttgaaaagtaggatcttttaattatgagaggaacaggtaagtccagggtccttgggtacagtctcaactcaggagtcctgtggaactatcaagggacaacaaggacacagctaagtcattagagcaccaaatatgtcagccctgtggtaacaaggaatcattttaactgctccctaacttgccactgtaccccacttgctaccttatgccaccaaaggtttccatgtcatatggattaaatggtttgttcatgtccttcaatgggattaatggatgtgcttctgttaaaataggcaaatgtttaaatacaat

SEQ ID NO: 549356 - DNA, 1890 bp, Homo sapiens
cttacattttcataataaacagaaaaattcataagccaaaaaacaaaaacagggagtgctggtcacagtggttcatgcctgtaataccggcacttcgaaaggctgaggtaggtggatcgcttcagctcaggagtttaagaccagcctggacaacataatgaaatcctgtctctctgaaaaatacaaaaattagccgggtgtggtggcatgcacctgtggtcccagctacttgggggtctgaggtgagaggactgcttgagcctgagcggtcaaggctgcagtgagccatgtttgccccactgtactccagcccgggcgacagagcaagaccctttctcaaaaaacaaacaactacaaaaacagggggaaacttatattgctaaatacaatctcagcgtcaacactggaacagagaaaggaattaaaacaccttaattaaaaaaaaaagggtggatgacaggctggcacagtggctcacgcctgtaatcccaacactttgggaggccgaagtgggaggatcatttgagctcaggagttcaagaccagcctgggcaatgaagtgagattccatctcatttttttaaaaaataaaaaataaaggaatggatgagtgttaaaaaccaaaaatttaaaactatttaaaacctgacatggctgcttgttcagaaactacagatggatgatgggtggtggtgaacagcagaaaggggttatagtacgtgaatctgcattgttctagctgttccccatgccactcatcctaaggtgagccggacattgattagccattgagccaggctaatgctggcagcagatccagtgatggtaacctgcctatcaatagatccttccactgggttcacaattttgatctacgctgcagacatctgatagatctcatttattctggtgccttgacacctgattatgcagccagtatcatttggaatggtgtttatgagaagtggtctgagcagatgcatccaaacctgcactgaaccccagcgttgctatctactgtaggaaaactagattgttgcattgtcaactggtgcagcttggtcaactctagaagtggtccctccaggtcacagttgaggcacatggacgaagtggtgtggagaaagcaagctcacactgtcgctgcctgtgctgtacctgtcctgatcacctgcaaagatcaccggagaattggacagcttggaccagtatgggatggccatgcgtttgggggaagactccaacaccacacagacttgtccaacacactcaatgatggactgcggaatcccagcgatagtgatggctcagtcagcagcgttggggagcatatcccctgccacctggacctgagccctgtactctctcgtattgccttgatcttgcaaccaccttttccaatgagccacagtgactagcagggaccaccagcatcagggtgaccagggggtccactggcagctgtgctagtggtcacagagctactgatatcctcttccaatcttgctttgaagatggcgctagtgggtccagccaagatgataattctctcagaacaactcccttctgagatgctgatacatgcaccactctcctcatgcatcttaactgattctcctctttctgatgatactgccaacytcctttccatgcataagtagccaggtggtgagaatgacatttaatccaatttcaatcataccagtgtccatatcaagcagggctatggggagctggacttggagtggtcaagtctttggccagtggggatgaaaaccaagaactccaggcaggaggcaactcagggaaaaaggagagcaggcagggtggggcaggggtggaacaacaggggtgggcagaaaggcaacgagaaggaggagaaaaggtggt

SEQ ID NO: 549357 - DNA, 543 bp, Homo sapiens
ccaacaaacagcttaagaaattttaacttatgtttaattataacatgcctccgttatacaggaaaataaaaagaaaaaaattatcattgtgtaatcaggcaaaaacatcatggcttgttgatcctcacaataatattgttaggagaaatagctattaaagatataattcccatggtaatttcctgttgaaatgtttggccagtgacactaaaaccaagccaacttaaataaatatattgcccgtttaagttgatttcacttaaaaataacccacagtaatatcataaatgcctaaaaccatacttatccataataggtagctgttttttcctccttactattcaaatagattcgacatgaaatgaaagtaaaatctcacaatggtgaaagacttctggaaattttaaaatagatatttgctaatttgtaagtcstgcaagatcatgaggagtttgtgcttttctgcagatgcacctgcatgtttacttttcccattaaatgacatttcttctgtttctaatcttctagagatgcagaagaatt

SEQ ID NO: 549358 - DNA, 540 bp, Homo sapiens
aaagtttttcctttagtccaatttttaaaacacaaaatgttttcaaagtatacccatgttgtagtgagtaaaaattctgaaaaattctctatattaaaaaataaaaataaaaaagttgagtctagaaggggcagagagcaaagaacagtgtgaaatatctacagatgacaaagacagtcattagctttattattttgggtgctaggcacgtgttttcaatgtagttatactctcccacagctataagggcataaagctacatgttagaaaaagtgcttctgacactacataagtgtacaatagctacgtttagaactgttcagtgtggtcatattttaaaattatgaaatgtagggaagaaatgcaattatgtgaataaaaagactggaaatggtcttcatttctatgcaaggatggccacaaaaaaggtgacatggagccattytcatgtacaaataaatgagaaataatctcacaaggaggtgagaggctgcacttgctcttccccccggagtggtgttgccatggtaattatagtga

SEQ ID NO: 549359 - DNA, 1675 bp, Homo sapiens
tctatctaggtcatattgagaattttgaatgtctttaggtaaaaactgcgaagtcatccaataaatttgcactaggaaataacatgctcagattcagaattggaaaaaggaattgtgacagggatgtggacaacagactgggagttgagcctggcagtgggaaggcttctgacttggttttgattctccaggggaggacctgaagcaaggcaatggcattgggtgtgaaaggaaggagattaagaagacattgcattgggaggccgaggcaggccgatcacttgaggtcagaagtttgagagcagcctggccaacatggtgaaaaccccatctccactaaaaccacagaaattagcctggtggggtggcgggtgcctgtaatcccagctactcaggaggctgaggcaggagaatcgtttgaacctgggaggtggaggttgcagtgagccgagattgcgccactgcactatagcctggcgacagagtgaaactccgtctcaaaacaaacaaacaacaaaaaagacattgcagagagctcttgtgacatgatgtcactttgctcatttatttcctctgatcatattaccctttcctgcctctgattcatcaggtaaaattcttctcttcctgcaagccagggctagctatgtgttccaagcaaccatctctggccgtatgtttgagtgacacccagtccgcgctcctgcactgtgctgtgcacatcattgctgtgtcctctgtcacatcacacagaagggtgacattgtctagtgtttcctgccttccctggaacttctgggtatgggtttggagcgtacgtcatggtccctttgtggttaagacatggaccagaatcttatgacagattctggctcgtgatttgtgcttggagcgtttacctgcctatgtcagcgcctcagagatttctttctctttgtcatgaaacctgcctgggtccttcctggagtgaagatagcatggcatgtactaccacatactcacaatgagcatgatcgtgaaagaaaaataaaaccattggttgttgtatggttgttgtaaatcactgaggtttcaggcctgtttgtgatgccccctaactcagcatctcttgattgatgtgattcagaacctggctcagagcttggtgtaagagtagtgctctatgtttatttgtggtaaaaatgaataaatgattaggagaggaactataggtagcttgaaggcttctggtcagaaggcagcagattttgttagatcgtaagctaaatcagaacacaggaaaagagggagacacaagtataaatgtgtttgtgggcacattgaatgcgaagtactggagaggtcttcytgagtacgcagatggtggtaagctggaaatataggactgacggttctctaagattgtcaggatagagataaaaaatgcgaactctttaatttcagatgatagttacattataagaacagattcaatgatccacagagatagtgaagaatattaagagataaaggaagaatattgggaaatgcctacatttaagggtgggaagcagagggacaagaagcaacaaagaataaaaaacatgataatggaagctaagagaaggaggattttaaaagcaaattgctatctagtagcgtcactatatgctacagtgacatgaaatagggaggg

SEQ ID NO: 549360 - DNA, 2771 bp, Homo sapiens
ccctcaatgtggcattttacctctgcttctgggctccctcaataaactcaaatggcctgtgtctctgtcgtgagatggagcattgcctccctggatgcggatgataagcaaaatgtcaagttcctggtgcaggaggttatcagcttggcctgtctcaggggctttgttccttctagccagagagagagagagagagagagagagggagaataggaaagaaaatgaaaatgaatgaatatgagtatagtattcaattcccagcctcaaaactctggttttagtgaagtgactgggattggacccaaggctccggaggtagttggagcacaggtgcaccacaccggagcttcgctggacaggatgacctcttcaaacttacctttggtttcccaggtaccaggcaatgcccattacctcactcagggttggtggtgagagttggagctcctggattcctctgtcaaactcctcctaactttcctgccttcagcttctctctgcatgtaaaaaaaaacaatctttctctgtttcttcttgtctattcctttgtgtgtgtgagagggggagatgattacagaggtggatttaccatgaaactaagcctttcgtacattctcagttgcacgggtcccttctaagtctccacacctaattttgtatttgcaatttctttttcttaaggactcccaaatatcataagcaacaggtcccacctctgtggatccgcctctgttaacacaacttgttgctgtccgtgacagcaatgttgctctgggtgtatgtgtgatttcatttttttcttctaaccagtgaccattcatcacagacacattttctacttcataaccaccataggtggacgaatcagagctagggagtacaggagggtgcagggaatataggaatgtcatttgggaaggtgtggtgggaagaggagatgtctaggatatccactgggaaaagggaggaaatgtttggaaatatttgcagtagatttagaggaacaaggtggtatttagacagagggatcactctagtcatcctcctgagggttttttccctgctgaagttgggaggtttagtttgctgtggctcacaaggtaagggggagtggggggtttgctgggaactgtgttgcaggtatcaggctgtggctggcagaggaggacaaagtatggctctgcaggcctgtctccctggtctatttgggaactgacattgccagtgggttgtcattattgctgttgttctccagaaattgatgtctttgagtgatctatttaaaaacaatacgggactccctttaaatgtgtcatcgtctatatccgctctcaaaccttgactgtggccacaatgttcctaaataatgtattttccaaagtttttttcttttttttttttttaaatcctggaactggtaccagtagcttttaaaagcaagctgacctcatagtcatccagagaaactacccagttgcactctgtgacaaaacttactttgcatctagtcctagaaattgtgaactctttggctctttgggggaaaaacagtgcaccatccaaaggtatgcaagggcataaagaaggtaaagatgaaagagagggagggacaagaactgtaggcaatgtaaagctcctggctcaagttttctggctgtgaaatgcatataggatccttttggttttactgagagccttatttaagtacggtgtctttgtagctaagaaaatgactctggggagttttcctttaagtttctcgatgagatgctattcatccgatcctctcctgacacttttgcctctgatctgctagcttggttctcttgaagttgttctgtttgcccgtgtgaagtccttagaagacggagtcccaacagtcctgtggttgattgctggtaatgtaggactggtgtctccactgtagcaagcagtacatttcaggcaattctgcaatctctcctccaggtatgattggaaatgtgttgcctgcagctcttggagaatagaaaaagtacagtgagagtgtgtacagcttatttacttaataggttgctttcaaatagaaaggagtacccacttgcgaggagggatacgctggaaagcaaagctgagatcacttctttgtgatccacatcatggggaaagggctggacaggctgggagtttaccacacactcagtttcttccttcctcctcattctctcaggcttcttttctttccagacggggccctgtatcttgcatggttagccttgagagttaagagaatgggaaagagtgggcttgaagggcactgagctctgacctgtggaatccttgaaagacaaatcctcccacagtatgtttgctctgtctgggccagaaaagacaaggctggagtttaggcagaggtgttgtacaatcacatgatgtgctttgactcrcggcttagttttaaggaaacacactgaaatttggggagattctggtgttgcaggagaagtctgtgaaggatgaagtgtggatcatgtggccctgttagaggatgctaagacatttattataatgtattactttctagctgtgactttgccctaggtaatgtactggaaaccaaggtacattataaagtatcatgggagtctgggcgctgtggctcacgcctgcaatcccagtactttgggaggctgatgatggaggattgcttgagcccaggagtttgaggcctgcctgggcaacatagcgagacatcatctgtacaaataattaaaaaaattagccaggcaaag

SEQ ID NO: 549361 - DNA, 603 bp, Homo sapiens
ttgcctgtgagtacctgtagtgggctgaatggtgaccccacaaaaggatatgtccacatcctaattcctggaacctgtgaatttaatttcatttggttcaaaaaaaggtattttgcagatgtaattaagaaccttgagataaggagatttacctggattatccaggtgagccctaaatctaatgacagttgtcctgcaagaggcacagaaggggaagcaacgtgactatggaggcagaaattggagtgttacaaccacaagccttggaatgctgataaccactagaagttataagaggcaaggaacagaatctcttctagtgcctctggagggagtgtggccctcccaacatgttgattttgggcttctggtcttcagaactatgagagaataaatttttgttaagttaccaagtttttagtaatttgttgcaccagycataggaaacttaaatacctttgtcctctggagtaaaaaggatactctgttttaatctcttatttagaactagtcattgctaaaataatgtaagagggatgctgccaatgttagttttctgtgggttaaaacatggcattcgttatctcacagtttccacaggtc

SEQ ID NO: 549362 - DNA, 624 bp, Homo sapiens
cattatttttgtaccaagaaaaaaatgctgccagtgaaacgacacaattctgataccatcaattaggatgcaaaccaacttgagagatgtgaaaataagtgcatatcagaactgatgaaacagattgtggttcagagttcacacttacaagagatatgttcaaataagcaggagsgaaagggggacagggctttgctcgtcccccagcctgtgcttccttgtgtccttggttcttgttcacggagggactgaagacagagtggtacctcgggccaagctgccaattctcacaggcctgatacagaccttgggggagtatgccaggctcggaggtgccagggcccttcctgcctggtcttctgggcattcctgacaatcagggctgcagcgccatgccaggagcacggttacactcagaggggcaggcctggctgcttcctggctgccaggctgagggtggagactggccagtactagaagttgaaggtctggctgaaatgttgctttgtgagtgggactgacttgtcggcttcctgtctatgatctctttagagatcgcctccccagggcccagctcagtgcttggcatcactaggtgctcatgttgtggctggaaatgttgtc

SEQ ID NO: 549363 - DNA, 624 bp, Homo sapiens
cattatttttgtaccaagaaaaaaatgctgccagtgaaacgacacaattctgataccatcaattaggatgcaaaccaacttgagagatgtgaaaataagtgcatatcagaactgatgaaacagattgtggttcagagttcacacttacaagagatatgttcaaataagcaggagggaaagggggacagggctttgctcgtcccccagcctgtgcttccttgtgtccttggttcttgttcackgagggactgaagacagagtggtacctcgggccaagctgccaattctcacaggcctgatacagaccttgggggagtatgccaggctcggaggtgccagggcccttcctgcctggtcttctgggcattcctgacaatcagggctgcagcgccatgccaggagcacggttacactcagaggggcaggcctggctgcttcctggctgccaggctgagggtggagactggccagtactagaagttgaaggtctggctgaaatgttgctttgtgagtgggactgacttgtcggcttcctgtctatgatctctttagagatcgcctccccagggcccagctcagtgcttggcatcactaggtgctcatgttgtggctggaaatgttgtc

SEQ ID NO: 549364 - DNA, 567 bp, Homo sapiens
ccatggtaaacatctacaagcaccttgctcttcccatattctgtgctgtmgtcttaggtagagtctcagaggtgagtagggtatgcacattttaatgggaaaatatctgtgatcagataatatctgccaaatagactataccaatttccttcccacctaaactatgtaaggaggattatttcaccacatctttgccagctttggggatcatcttacaattttgtgtttaaatgaataactaaaaaaattattatctgagaattttacttgcatgaccactgagtggtctttatccccagtgtcatggacatctgttaactctgagaatgggttttctgggctgtgggagatgctaagccgattccctccctgtttcagccatcaacgtggggctcacgtcactggatctgagctggaataacttccacacaaggggagctgtggccttgtgcaatggtctccgggtaaggcactctccaggagtgatgtgtggagcccagttgaggacagccagggcctcccatcctgccatcctaagcctcttcctcatggtcaccatcaatgagg

SEQ ID NO: 549365 - DNA, 625 bp, Homo sapiens
tgaaccacgcttttgaaatactataatcgagatcattcaatgaaacttgtttgcttaaattttttttactttattgaaaagaggggctgagaggaaggaaggcatgaactgctatttcacaaattagcataattacatccactgtatatgctattatggaaattcaatttaagaaattatagctaaaacacctagcacggcgtctggcacctgttaagggatcaataagactcaggtgtcacagtttttattattattgctgttattatcattgtgattattatagagggggatctgtgagttacaaggagattgctggtagttggataactgacccaaatcattccaaattctcatgttgtatttyatggaccatgtacagaaaatagaatgacagttccatttttgtgtcaaattgtaattagttaacgccatgccctcaaaagaaaccttgatttttatattattatccaaaatgaatttcattcccaaactcttgaatgtgaatatctttgacctgtaggagatgaaaatatgcctgtttggcataaggattattttgaggtattttgagaaattgcagacacaggagaagctctgaaaacagagtaaaagttaccctttt

SEQ ID NO: 549366 - DNA, 979 bp, Homo sapiens
tcctacacactctgtgctcggcatgggtccccaggaagaagatgctgtctctggaagctgagtgtgtggaacttccacatggaactctcccagcgcagtcccttgtgcccctgtgttattacaagggagtgtgtctgacctccactttaatccctcatttggagaatcagcctaataagaaacctgggccaagtgagtcagagctagaggcacctggttggaagccttgctgggctttaaaaagcccaccccgccccaggattcctgccacctgtccatccccctgaagctaaggggtactcctggcctgataccgctgaccctgggtgatgaggccttctctttgctgatgtccttaaccctccctgctccctgggtatcacgcactgggaattgtgatgggagactgttcagaaacatttaagaactcagcaaacttgtagctatgatcaacgaataaggctagaagctagagtggtatctgcaatccacatggctcaaatmccatattgagagttgcatcaatcctgcctgcattcgagggttctcagggcaccctgtttcttgctgccagcaggggttcctatgctggccactgtctacaggagtgagagtttgttcccactcgctgtgtgcttcccctaactgcaggggctggaagcctgggaaatacatttcccagcatccctgtccatagcgctttggaagtagttgagatctgaccagtgatagctgggacgggcaggtgggcgaggcaagagccttccttcctctggcagtggtagaagctgctgtgtagctgccccagaatctggactccagaacctgccttcttctacctccaggcagcggggcagctgcagattctgccctgacttcctgaagcttcgtggcctgtgggcctcaacctgaagcattgcagcccaaaccctggaggtcccccattctcactgcccttccaagaacttcataagcacct

SEQ ID NO: 549367 - DNA, 665 bp, Homo sapiens
tgcccaatgtgagaaattgaaattattacttaagtattgcaactgttcttttaggatattttgtttgcaaatttcagagtaattataaatattcttgcatttttattgtaatcagtatttataaaacagtgtatttcatcacattaacctttacatattttgaataaaatagtattgaaccattttaaatagtaagtggaaatttttccacattaaacagtataacgggctaacagagttaagcattgcattatttaactaataattttttcctgaacttcagattattatctgtatgtgtcatataacttgacaattttttttttttagtgctttttaaaaagagtgggatactttattcagtttagccctcaagcaattaggcaagtcagttaccatggtaacagtaggtattaatttccttacctagttrgaggttttatgaacaaagaaatctctgagttcatccaccaaaacccaactttctcttgagactggcctcttgagactggtgttaaatttgtctattttctagaagatgacactattctaagtggaaaatacggttctcttgaggtgaatttctactctatcaagagtgaagtagagtatggcttaaaagttaagtgattaaaaagctaccctttcttagctaatttgtaatg

SEQ ID NO: 549368 - DNA, 1003 bp, Homo sapiens
tgatagttttaagtgtatacaataatgatgggtaaaacaggtaactcatgctggtcctgataactttgttttaacattttgttttgttttttgagaaagagtctcgttttgtagactagagtgaggtgcggtggtgcaatcacagctcactgcagcccccaaatccctggctcattatcttcccatctcagcttcccaggtagctaggactacaggcgtgcactaccatgcctggctaattttttgtgtttttggtaragacagtgttttgccttgttgcccaagctggtttcgcactcctgggctcaggcgatctgccggccttggcctcccaaagtgctgggattacaggtgtgagccaccgcactggcctgtttaatgagctctcttcgctgccctctctataggatttgctctttgcttaataggtttgaaactagccaactttaggcatgactcatttctaagacaactggcaaaacagttgtatttagtataggatactaaacaacagtgttcttccttttcttagaatcttatgtataaatttctaagttggtatggcacaccgagtggagaggatggacctgagcctgctgtcagaagttgacttaagcccagcgtgtccaacccacaacctgcatgcagcccaggacagttttgaatgaggcccaacacaaattcatatattttcttgaaacactatgagattttttttgttttttgttttttgttttttttttttagctcatcacctgtcagtgttagtgtattttatgtgtggcccaagacagttattcttccagtgttgcccagagaagccaaaagatcagacacctctgccataggctatacttgcggggaaagagaaaggagtagacccaagaattgtttggaaaactgtaactcatataaactgccagctggcgtcacactatgtttgctaatggcaggcactgggaaataagagtctgaaagaaaagaaaaaccaaggatctttttc

SEQ ID NO: 549369 - DNA, 1413 bp, Homo sapiens
tgaaccctttgaccaagatctccccattcccaccccagcctgcacccccaggctcccacaaccacccttctaccctctgcttctatgagtttgggttttgagataccacatgtaagtgagatcatcagcatttgtctttctgtgctgtggggcttgtattcatgaggaatctcctggtggcagcatggtgcagcctccatgtgggccactggccagggtgagaccacttagcaggctcctctgcatctgtgggagtgggtgggcccagggctcggagcagttccacccctggcagagcacctcagtgtaagcactcactctgtgagcctcacagccccactggggggtcctggtgggagcaagctcatggggacactgtgagagtggcatgggacagggagccccagtgggtggtggctcctgagactgctgctaggggcagctgggtatgaaggcactgagggcaggtgggggtgaaggcagcccataccctgcctgccaaggaggtgtcccaccaggatcccctccccatgtgcacaaagggcctgtacaggctgggaacctaaaggaccagagcagggaggaagctgggcagaggcacaggcagagggcccagcttcctatgtgccgttggcacctgtgccactgcacctgctggcacctgaagaattttcctcccttttcccagtcctgcccagtactagcttcgtccctgaaaagtcaaggcagctataaggctcgcacatcaagyttcagtccggagggccctggcctgtcgtctcagactgggagcgctggctggcggggctgtgtgggttatttctggctcagtttcctgaagatgttggccaccccttctttatacggatgagaaaatgaaggtctaagaggccagtgacttactggaagccccacagtgagttcagaagagccaggatttgagctacagcccttacccaatggcaaagccagcttctgctctccactcagagtgatgggtgggggatacccctttcagagggcttctgacaatggttctcaaggctgtgagagcatcgtgcactggccctgcagctctagatgtttaaaaaggtgacaagggctcatgcctggaatcctagcactttgggaggccgaggtgggtggatcatgaggtcaggagatcaagatcatcctggctaacacggtgaaaccccgtctccattaaaaatacaaaaaattagccgggcgtggtggcgggcacctatagtcccagctactcgagaggctgaagtaggagaatggcatgaaccagggaggtggagcttgcagtgagccgagattgcgctactgcactccagcctgggcaacagagcgagactcagtcttaaaaaaaaaaaaaaaaagtgacaagggtgctggataaagaggcca

SEQ ID NO: 549370 - DNA, 1413 bp, Homo sapiens
tgaaccctttgaccaagatctccccattcccaccccagcctgcacccccaggctcccacaaccacccttctaccctctgcttctatgagtttgggttttgagataccacatgtaagtgagatcatcagcatttgtctttctgtgctgtggggcttgtattcatgaggaatctcctggtggcagcatggtgcagcctccatgtgggccactggccagggtgagaccacttagcaggctcctctgcatctgtgggagtgggtgggcccagggctcggagcagttccacccctggcagagcacctcagtgtaagcactcactctgtgagcctcacagccccactggggggtcctggtgggagcaagctcatggggacactgtgagagtggcatgggacagggagccccagtgggtggtggctcctgagactgctgctaggggcagctgggtatgaaggcactgagggcaggtgggggtgaaggcagcccataccctgcctgccaaggaggtgtcccaccaggatcccctccccatgtgcacaaagggcctgtacaggctgggaacctaaaggaccagagcagggaggaagctgggcagaggcacaggcagagggcccagcttcctatgtgccgttggcacctgtgccactgcacctgctggcacctgaagaattttcctcccttttcccagtcctgcccagtactagcttcgtccctgaaaagtcaaggcagctataaggctcgcacatcaagcttcagtcyggagggccctggcctgtcgtctcagactgggagcgctggctggcggggctgtgtgggttatttctggctcagtttcctgaagatgttggccaccccttctttatacggatgagaaaatgaaggtctaagaggccagtgacttactggaagccccacagtgagttcagaagagccaggatttgagctacagcccttacccaatggcaaagccagcttctgctctccactcagagtgatgggtgggggatacccctttcagagggcttctgacaatggttctcaaggctgtgagagcatcgtgcactggccctgcagctctagatgtttaaaaaggtgacaagggctcatgcctggaatcctagcactttgggaggccgaggtgggtggatcatgaggtcaggagatcaagatcatcctggctaacacggtgaaaccccgtctccattaaaaatacaaaaaattagccgggcgtggtggcgggcacctatagtcccagctactcgagaggctgaagtaggagaatggcatgaaccagggaggtggagcttgcagtgagccgagattgcgctactgcactccagcctgggcaacagagcgagactcagtcttaaaaaaaaaaaaaaaaagtgacaagggtgctggataaagaggcca

SEQ ID NO: 549371 - DNA, 1413 bp, Homo sapiens
tgaaccctttgaccaagatctccccattcccaccccagcctgcacccccaggctcccacaaccacccttctaccctctgcttctatgagtttgggttttgagataccacatgtaagtgagatcatcagcatttgtctttctgtgctgtggggcttgtattcatgaggaatctcctggtggcagcatggtgcagcctccatgtgggccactggccagggtgagaccacttagcaggctcctctgcatctgtgggagtgggtgggcccagggctcggagcagttccacccctggcagagcacctcagtgtaagcactcactctgtgagcctcacagccccactggggggtcctggtgggagcaagctcatggggacactgtgagagtggcatgggacagggagccccagtgggtggtggctcctgagactgctgctaggggcagctgggtatgaaggcactgagggcaggtgggggtgaaggcagcccataccctgcctgccaaggaggtgtcccaccaggatcccctccccatgtgcacaaagggcctgtacaggctgggaacctaaaggaccagagcagggaggaagctgggcagaggcacaggcagagggcccagcttcctatgtgccgttggcacctgtgccactgcacctgctggcacctgaagaattttcctcccttttcccagtcctgcccagtactagcttcgtccctgaaaagtcaaggcagctataaggctcgcacatcaagcttcagtccggagggccctggcctgtcgtctcagactgggagcgctggctggcggggctgtgtgggttatttctggctcagtttcctgaagatgttggccaccccttctttatacggatgagaaaatgaaggtctaagaggccagtgacttactggaagccccacagtgagttcagaagagccaggatttgagctacagcccttacccaatggcaaagccagcttctgctctccactcagagtgatgggtgggggatacccctttcagagggcttctgacaatggttctcaaggctgtgagagcatcgtgcactggccctgcagctctagatgtttaaaaaggtgacaagggctcatgcctggaatcctagcactttgggaggccgaggtgggtggatcatgaggtcaggagatcaagatcatcctggctaacacggtgaaaccccgtctccattaaaaatacaaaaaattagccgggcrtggtggcgggcacctatagtcccagctactcgagaggctgaagtaggagaatggcatgaaccagggaggtggagcttgcagtgagccgagattgcgctactgcactccagcctgggcaacagagcgagactcagtcttaaaaaaaaaaaaaaaaagtgacaagggtgctggataaagaggcca

SEQ ID NO: 549372 - DNA, 1413 bp, Homo sapiens
tgaaccctttgaccaagatctccccattcccaccccagcctgcacccccaggctcccacaaccacccttctaccctctgcttctatgagtttgggttttgagataccacatgtaagtgagatcatcagcatttgtctttctgtgctgtggggcttgtattcatgaggaatctcctggtggcagcatggtgcagcctccatgtgggccactggccagggtgagaccacttagcaggctcctctgcatctgtgggagtgggtgggcccagggctcggagcagttccacccctggcagagcacctcagtgtaagcactcactctgtgagcctcacagccccactggggggtcctggtgggagcaagctcatggggacactgtgagagtggcatgggacagggagccccagtgggtggtggctcctgagactgctgctaggggcagctgggtatgaaggcactgagggcaggtgggggtgaaggcagcccataccctgcctgccaaggaggtgtcccaccaggatcccctccccatgtgcacaaagggcctgtacaggctgggaacctaaaggaccagagcagggaggaagctgggcagaggcacaggcagagggcccagcttcctatgtgccgttggcacctgtgccactgcacctgctggcacctgaagaattttcctcccttttcccagtcctgcccagtactagcttcgtccctgaaaagtcaaggcagctataaggctcgcacatcaagcttcagtccggagggccctggcctgtcgtctcagactgggagcgctggctggcggggctgtgtgggttatttctggctcagtttcctgaagatgttggccaccccttctttatacggatgagaaaatgaaggtctaagaggccagtgacttactggaagccccacagtgagttcagaagagccaggatttgagctacagcccttacccaatggcaaagccagcttctgctctccactcagagtgatgggtgggggatacccctttcagagggcttctgacaatggttctcaaggctgtgagagcatcgtgcactggccctgcagctctagatgtttaaaaaggtgacaagggctcatgcctggaatcctagcactttgggaggccgaggtgggtggatcatgaggtcaggagatcaagatcatcctggctaacacggtgaaaccccgtctccattaaaaatacaaaaaattagccgggcgtggtggcgggcacctatagtcccagctactcragaggctgaagtaggagaatggcatgaaccagggaggtggagcttgcagtgagccgagattgcgctactgcactccagcctgggcaacagagcgagactcagtcttaaaaaaaaaaaaaaaaagtgacaagggtgctggataaagaggcca

SEQ ID NO: 549373 - DNA, 627 bp, Homo sapiens
caggactgtgggctgcggggccttgccactgtggagactggcactgaaagcagcccagatggccaagagggggcctgacacagaaaagaccatcttgtgtaagggaggtctggcccaaaatgcccaaaaatgggcaccagccagttctcaacaatcacagaaagaaccccagtagcaatcacagctaatgtttgctgcacctttacaggctaggcaccattccacatgctccacagacaacagcaaacctcagttcacaatcatgctattcacacacaccaggaaactgaggcacagagcactcaggaacttgcccaaggtaacacagcaagaacgtggtgggcctgagctcaaacccttcacagcaccacagcctcatgcccagtaggccatccaccctcaggaaccagtcccagctctcagcagctgtgtgtccaactcctgcatggatgggggcttygggagggcggaaacgatcccatttgacagtgtgtcccagtgcctggcacagggcttggggtaggaaggatcagaaaagtgctttctgtgcctcaactcatgtgaggagggtacattatccactccatcattgagaggtagaaatggaggcccagggacacaaattga

SEQ ID NO: 549374 - DNA, 627 bp, Homo sapiens
caggactgtgggctgcggggccttgccactgtggagactggcactgaaagcagcccagatggccaagagggggcctgacacagaaaagaccatcttgtgtaagggaggtctggcccaaaatgcccaaaaatgggcaccagccagttctcaacaatcacagaaagaaccccagtagcaatcacagctaatgtttgctgcacctttacaggctaggcaccattccacatgctccacagacaacagcaaacctcagttcacaatcatgctattcacacacaccaggaaactgaggcacagagcactcaggaacttgcccaaggtaacacagcaagaacgtggtgggcctgagctcaaacccttcacagcaccacagcctcatgcccagtaggccatccaccctcaggaaccagtcccagctctcagcagctgtgtgtccaactcctgcatggatgggggctttgggagggcggaracgatcccatttgacagtgtgtcccagtgcctggcacagggcttggggtaggaaggatcagaaaagtgctttctgtgcctcaactcatgtgaggagggtacattatccactccatcattgagaggtagaaatggaggcccagggacacaaattga

SEQ ID NO: 549375 - DNA, 795 bp, Homo sapiens
ctgggtttggggttagttttggggatgtacctagaactcttcagttaatgtagtctactcttatttcttagttatcagtacatgaggggaccagactaaataacctcagagctcattcctataattgttttcatactccatattataactctcctagaattatcttcccatcatgaataccattgttttgggtttctccactatcacatttctaagtcttacagatataaatattttatgtttgagatttgtcaaccaggattrtttgaataaatgtataattctctacaactgttaagtttactaatttatcaaaattgtttccatcactttttctggagaaaataatgaattctaaagtttagtttaaagttaaaataatgaattttaaagtttaatgaagtttaaggtttaaaaaatgatgtaatagtttactatgtaaatactatgtaaactattacatcattttttaaagcttgtcattttccaaataaacttcttatacattattgaagtcttcatagtgaactacatcttgcatgtgatgggtgctcagaatatcttaatgagtgaatcaatggatggatggataaatgaatgactatctttcatttgataaatatccgcaagctattttggtttttgacaaattagatgaaacaggtattatgaaaagacttgggaaaattgaggacaaattagttaactagatactatgaaaagacttgggaaattcatatttttaaaattattgaaatgtattaattaatatgcattttaagacattgtttaggc

SEQ ID NO: 549376 - DNA, 795 bp, Homo sapiens
ctgggtttggggttagttttggggatgtacctagaactcttcagttaatgtagtctactcttatttcttagttatcagtacatgaggggaccagactaaataacctcagagctcattcctataattgttttcatactccatattataactctcctagaattatcttcccatcatgaataccattgttttgggtttctccactatcacatttctaagtcttacagatataaatattttatgtttgagatttgtcaaccaggattgtttgaataaatgtataattctctacaactgttaagtttactaatttatcaaaattgtttccatcactttttctggagaaaataatgaattctaaagtttagtttaaagttaaaataatgaattttaaagtttaatgaagtttaaggtttaaaaaatgatgtaatagtttactatgtaaatactatgtaaactattacatcattttttaaagcttgtcattttccaaataaacttcttatacattattgaagtcttcatagtgaactacatcttgcatgtgatgggtgctcagaatatcttaatgagtgaatcaatggatggatggataaatgaatgactatctttcatttgataaatatccgcaagctattttggtttttgacaaattagaygaaacaggtattatgaaaagacttgggaaaattgaggacaaattagttaactagatactatgaaaagacttgggaaattcatatttttaaaattattgaaatgtattaattaatatgcattttaagacattgtttaggc

SEQ ID NO: 549377 - DNA, 1573 bp, Homo sapiens
ggttttgtgcctggtcagattaaaagccaaagcgtgtgctcagtctttctgctagaggatttgtgtgtagaatcttggccttggatacttggtacacaacctcccagtgggagatctcaagtatgtttgcagcatgattaatgcccagagtgcagccccctctccaagaatttctactgtctgcagttctgaagagaggctttgaactttcayaagtgaaggttttctcttccaggtgtgtgtttgtagttgaagaacaaagaaaactgtgcgatactagtaatgcaagttcccttgggaaggcatgtatgttgttcttaactgctgaacctattattgcttatctttaccttcagggtggcgttgacagagttaactatgacgaaaggagtccaaacccctctctgaaggaagtagctgtcctctgaccatctctacccgatagcggagttctctctgtgatgcccttctctggtataccctaaaactgaaatcttagaaaagaactatgtgcctctttcctcctccttcctttcactctcccctcttaattcaccttctgatcctttctttaaattttgttcatgtactccttcaaactctcaccaacaataaggtctgaattttgtctgatggtatgtaattttcacggtgctttcccattttgtccccatgatgcagacattatcttcattttgcagattggaggttgaggctcggaggtcttagccaagatcacagcaaaggtaggatgaaagagagagtaaataggtaccggaaaaggaaagaagaaatgcttttctcctggaatttcctccttctagtcttttggaaagtcctcttaccattttttctcaggccttatgaagcctttctccactagctgatgcctcatgctgctactgcctcttcattttcattacaaagtataaaatcattatttcacttaggtacaaagagctctcctccttttacagtagatacttgtcatgtttctcctgaaagccattaacaatttctgtttttctgtttccggcatgctctggggtgtgcgtttgtgttgccagagtgaatgtgcagcttctcttcaaccctgtctgcagtggttcccagagattaaagggagcacaccttgaggttatttgtatgattaaattgagcagctgtggctaggacatttcaagattggactggggattcagggtgactgtgactaattgaaaaactcaacaaaatgatgttgaataaggacaagtggacaataccatcatgagaggaaaaaagccacccaatctcccagtgggtatttataggacaattatgctttgctcattattgtgctgagtactgaggttgactcagaaaaagctgagaggttgtctctactctccaagagtttaaaatctagttggagagcaaagacctaaacacacgaaacaaataaggaaggaataaatggctataaacagtggcctttgtaatctatggtgctcagagaaatagacttaaatgccgcaaaatccagaggatgaaagattcaataagaaacaacctctgaccaaaccaaggctcc

SEQ ID NO: 549378 - DNA, 578 bp, Homo sapiens
aatccttccaactaactgaactaggagagaggaataaaggagatgaactctacgtgcaaacatacatataatttcttttttcctcatctgtctcttgctctgtttcccccagttccatctgcaatagcagccatacagcacctagactgttgagagatactgaaacttgaaagaaaagggaatgtacaatgtgcaaatgcaatatcattattcaataactttgcaagtaattttattacctgagacaccatggtttctttgtctcctttttctgtgtcccattctctgcctctagctgtgggtctgtctctctcytacacatacatactcacctagaggggcatacatattaataatgtgtgggaatttcttacttaaagctacttcctcttcaaaccaagaatagcagaatacctggatccaataaacaaatgatcttgtctcgacatctaaaataaattatctggcagaacactgtaaatgaatacttaatagcaaaacttaataataagggaacacacaaagaagtgcaagagtaggaagctttcttgtatcacttcctcatgccaaaaacagaa

SEQ ID NO: 549379 - DNA, 635 bp, Homo sapiens
ggagattgagacgatcctggctaacacgatgaaaccccgtctctactaaaaatacaaaaaataagctagccatagtggttggtgcctgtagtcccagctactcgggaggctgaggcaggagaatggcgtgaaccccggaggcggagcttgcagtgagccgagatcgcgccactgcactccagcctgggtgacagagcgagaatccgtctaaaaaaaaaaaaaagaaagaaactttgcaaatctcaatctctatatcaasgttttccccctagaactcatgtctctacagttcttttgaattatttcagaatctgtaaaaccccatgaaataaactcatataagagcaattcactgtgtctaggaaactgtatccagtaagggtccttggcataccagggaatatattgggcttggaattaagaaacttgggtttacttctactcctaattaactggttaaacttcaacaggaccctttcacttttctgggccccttccttatttattgaattagggtgttggaatggataatccataggttttcctagccttaattaaggatgggagccagttgtcaatacagcatagttaggtattagaagcaattataattagaactaaaatgcctctgctca

SEQ ID NO: 549380 - DNA, 576 bp, Homo sapiens
tgtgactctacctctaagccttgcttcctgctcttgtgccattttttacatctttctctaatcttacggattraattatatccatttgaacgtctgggatgaaatctgttttctgatgcatcccttacaaatataaggacatttcaacaaatatttaagggaggatatctcagaggaggctgttttggacagaattaacaccaagatctaataatgaaatcataccttgcctggatctttgaaaaacagtacgaccagtgtgaatgaatggagcaaccaagaggttaggcagtaggagatgaggccagagaagaaagagggtgtggtagccccctaatcctggcacttacttccactggatctaaaatccagcacggaattatgctgaccacatcagcctaactaatattgatctaagtaacatttatgttctagcacctaaatcaggagtctgcaaaggatagcccactgccaaaatctggcccactctccagtttttgtaactaaaatgttatcagaactcagccaagtccattcatttacaaactgtctacggtggcagagacaatacggctc

SEQ ID NO: 549381 - DNA, 576 bp, Homo sapiens
tgtgactctacctctaagccttgcttcctgctcttgtgccattttttacatctttctctaatcttacggattaaattatatccatttgaacgtctgggatgaaatctgttttctgatgcatcccttacaaatataaggacatttcaacaaatatttaagggaggatatctcagaggagrctgttttggacagaattaacaccaagatctaataatgaaatcataccttgcctggatctttgaaaaacagtacgaccagtgtgaatgaatggagcaaccaagaggttaggcagtaggagatgaggccagagaagaaagagggtgtggtagccccctaatcctggcacttacttccactggatctaaaatccagcacggaattatgctgaccacatcagcctaactaatattgatctaagtaacatttatgttctagcacctaaatcaggagtctgcaaaggatagcccactgccaaaatctggcccactctccagtttttgtaactaaaatgttatcagaactcagccaagtccattcatttacaaactgtctacggtggcagagacaatacggctc

SEQ ID NO: 549382 - DNA, 576 bp, Homo sapiens
tgtgactctacctctaagccttgcttcctgctcttgtgccattttttacatctttctctaatcttacggattaaattatatccatttgaacgtctgggatgaaatctgttttctgatgcatcccttacaaatataaggacatttcaacaaatatttaagggaggatatctcagaggaggctgttttggacagaattaacaccaagatctaataatgaaatcataccttgcctggatctttgaaaaacagtacgaccagtgtgaatgaatggagcaaccaagaggttaggcagtaggagatgaggccagagaagaaagagggtgtggtagccccctaatsctggcacttacttccactggatctaaaatccagcacggaattatgctgaccacatcagcctaactaatattgatctaagtaacatttatgttctagcacctaaatcaggagtctgcaaaggatagcccactgccaaaatctggcccactctccagtttttgtaactaaaatgttatcagaactcagccaagtccattcatttacaaactgtctacggtggcagagacaatacggctc

SEQ ID NO: 549383 - DNA, 612 bp, Homo sapiens
tgtattctttgcttttcatagagggagagagttaagttacaagggaatggtgaaccacaacaaatgaaaagtcgttttgtgagtagtgtacctttgcattgctgtatttcgaaaggtttgcaaaaaaaaaatgaaaaagaatgtcaattatttttctctaaaattgtgcctaattatgttatatgatattaagttaactaatgtttaaagagaatacatagtatgcaaaatacttcacacttcacacatatcatttttaattgaattgttaaaaaaaaataagcacaattgcccctgtttcaccaatgattaaattaagatggccataatctatggaagctgcccaaagaaaaacagtgatggagtsagatataaatgagtcagactccaaatcccaatccctttttcataaagtgtttagtaaatattttgatctaaaatgtaagagtgtggctataaaaatgccaactatataatagtttgattcttgtttctatttatttgaaacctaattagtgtatttccacagtatataacataatgctaaaagagaaatttggtattttcagtttcctttaaattttctgacctgattttattttataaacaatt

SEQ ID NO: 549384 - DNA, 947 bp, Homo sapiens
cagtgagcggagattacaccactgcactccagcctgggwgacagagtgagactctgtctcaaaaaaaaaattactataaagctacagtaatcaaaacagtgtggttctggcaaagggatagacaaatagatcaatggagcaaaatgagaccataagtatgcccacacaattaggggtcaattgatttttggcaaagatgcaaaagcaatttagtggaggaacaacaaatgatgttgcaacaatggtacatcgatatgcaaatgagaaaacaaaacaaaaagccctcaagcttaacctcataccttatacaaaaattaactcaaaatagaccatagaaataaaaatgtacaatgcacatttatatgcagaaccgtattctcttataccacttgaatttttaaagtaacaaaaggagagtcgtatacatctatatatgctcatgaatgagttaatactctggaaggatagacttgaaaccattagcaatttcctcgtggttgggaagagaatgaatgattttactttacattttatctgtttctgggatatttccttctattaaaaaagcatctttttctcttatagcaagaaagaaacatcttaaaatttttaattaacaaacaataataatagtatacattatacatttatggggtacaatatgatgttttaatttttttaaaaaaaattgacaatatcaagtgctgggcaactgggtctgtcatacattactaggggaataaaaaatggtgcatccactctgcaaaatggtttggtagtttcctacaaagttaaacatagacttaccatgtgactcagcaattccattcctgagtttctgtcctagagaaatgaaaacttatgtctgaacaccaatgcttatacctgcactattcataattgccccaaactagaaagaatccaaatgtccttcaataagtgaatac

SEQ ID NO: 549385 - DNA, 634 bp, Homo sapiens
tacctccactttttgggccattgaagggaagggaaatggatgacaagatagggcaggagaaaccagtgttttgaggaccaggggatgccarcatcgatgattcttgtgtgttctctcaggtttcaaagtgtgtctgctgagaggcttgctcagcaagtgtgaattcctgtcttttcaccctatccacccatgggtgactcagtccacaggacagccagccactaaggcttctgcaggctgcatctgaaagataagagagtgagacttgacacagaagtaggcagagcttctgaatacctgtgttagctaagtttcttcagcctatgaaaatgagctgccctttctataaggcagtgatttgctgtcacctaggaagatacagagattacttactctagactaagaccacttttcccttgaaatgctcttgtaaggggaagaaaggtagcaggcctaggttagtccaaatcacaagggttctcagttctcttaagccctagaatatttatcggccctctccacatttcccagtgtcatatcttgcattttcattcattcagggtggcctactgcaaattggtgtatggtacctgctctgacaataccagtgaagtcctcacttgaaggaagtata

SEQ ID NO: 549386 - DNA, 634 bp, Homo sapiens
tacctccactttttgggccattgaagggaagggaaatggatgacaagatagggcaggagaaaccagtgttttgaggaccaggggatgccaacatcgatgattcttgtgtgttckctcaggtttcaaagtgtgtctgctgagaggcttgctcagcaagtgtgaattcctgtcttttcaccctatccacccatgggtgactcagtccacaggacagccagccactaaggcttctgcaggctgcatctgaaagataagagagtgagacttgacacagaagtaggcagagcttctgaatacctgtgttagctaagtttcttcagcctatgaaaatgagctgccctttctataaggcagtgatttgctgtcacctaggaagatacagagattacttactctagactaagaccacttttcccttgaaatgctcttgtaaggggaagaaaggtagcaggcctaggttagtccaaatcacaagggttctcagttctcttaagccctagaatatttatcggccctctccacatttcccagtgtcatatcttgcattttcattcattcagggtggcctactgcaaattggtgtatggtacctgctctgacaataccagtgaagtcctcacttgaaggaagtata

SEQ ID NO: 549387 - DNA, 1765 bp, Homo sapiens
tgaagtaccccggtgtacgtgtggactgacgaatggtcttatttggtcagtgggttgggtgtgtggggcttggcagtgagagaggagactagaagggaatggggttcagctgtgaagagccttcagggccaagctctggaggatagacttaatcttagaggaagccactgaaggattttaggatgacaagtgccaaaattgtttgggaagacaatattctatggctttcctaaaaagtaacaaaagcacggatcatcatctttgtcctacagatgcctgaaataatgtcaaacaaacacccaagacaaggagttttagtatctcttggggtggacccaaatgcctcccacatggctctgctgagagagacagagagcctcatctacccaaaagcaaccaactggcaacctctcctatctggaatcaggaagaaagcaaaaagacactgagacttcaaaataaatatggctgttctcaactctgcctttgtgacacatgaaaatgtcttgattttttttaaaatgaaaaagagttgtagctccaactggggaaaattacgcataatgcagtgtatgcccacgagagtgagtcttgcatgtgtcacagtagagaatagttggaaactgctattttccccacagagaagctcccaaggccttcactcagagttttttttttttcaaacatatatttccaaaaagtttgatatcttcttttcaaacccagaaggatagaaatcacatttagaaggtgcacatgaggctgctacagacgggccctctgagcgctggacaacggtgagaactgtagctggggctaacacacattgagcattgctgactgccaggtacatgctgaagtgacttttacatggtgctttcctcacaatcactccataaagtagacttgattatttcctgattttatagatgaggccattcaggcttagagatttaaggaactgacctaaggtcccagcatggcaaggttgcaaagcaaggtttgaaccaggactgtgggactccagagcctggattcttacctgtaactttcctgcgtttctaatgagttggagcaagtaaggaaacacagtagttcttaaaagcagaagaaatattttttttaaacgatagcagtcgggaagcatttggtggagtggcaaacagctgtctagttttctattacaccagaacgcagcacagcaaccgacattcttaatggtaagtcccatcaacaaaaagaggagagatactgccgcagaggaattcaagatgaaaagaaaatgtattctcatattttatattcactaaaataaaagaaagacaccacactaatggagtaccaatgctattgtaaacatatcgaattagtaattgtgactattataccattactttccatttgccatcccttaactgagagaaacttttcaagagttcctctcacacaatttcaatgatgttctyataatgtgtttggctttgtcgcacatgatatgcatacaaagaggcattttttctgtgtctggaatttggaaaagattgtgctttgcatatgcttaatttgaatgatgcctataggaagtaagctagacttcaaagggggaagattggcatttggagaagtacagcatgcactgcatttaatgtgtatatcaggacaaaaaatattaatgagagaacacacacagttttcttcctccccgaccagccaaattctccaccctccagccccattcaaataaaggagagaagagtctttcttg

SEQ ID NO: 549388 - DNA, 449 bp, Homo sapiens
aaataaggatattcatttctaaagaccctgattccgaaattgttaatgccaatggcacttacttaagcacccccagtagatgaggccattggtggagtaagcgtctgtaaggcaggaactcctgttgggtggaaagtgatcactcagacctgtaacagatayagtgtgatgggtccagatcatttagtctatggaggttaaaaatgtataacatcccctcaaaaggctgaactgtgaattgcctatctggtaatgcttaaggaaaccagggtagtccaggctgcttggattgcactgcaagtccccgaagacggttagggaggcatctcatcagtaacaaccaaatgctttctgcatggtcttatccaagaaacagcagctgtacttagaagtttctggtatgtttcacctgtgtcttgttccttcctctcttcacagtgtgtgctatc

SEQ ID NO: 549389 - DNA, 639 bp, Homo sapiens
gcaataaaattaacaaatgctatataaaaatatatatatacataagtactatatctgacacaaatttataaatgtgatattcatcacaaataatacattctctttattcaaacacacatatttaagtcataaagcaagaatcatcaaagccaaagattaatttcttatacccagtattctttgaatacaatgaaatgaagttagaaaacttaactaggtcaacccatattgaaaattaagaaaacctcttaagtaactaatggatcaaagaagaaatcataaaggaaattagatggtattattaatgtagaaaaatacaaaataaaaaaaaattctatatactaaaaattgatccttttacatgtgtggctataatggctcttcaaggaaaattggtgagctttatttttttttcatcagaaaggaacagaggctgaaaattagtgaactaagcatccaacataagatgtcagaaaaaagacaacagaaagaacytaaagaaaatggataaataaaataataaaaataattccagacatcaacaaagaaaaaaataaaataaatataataaatataatagtttgctctttaaaaagcaaagaaaatagatacacatctcacaagactgatcaagaaaaa

SEQ ID NO: 549390 - DNA, 1297 bp, Homo sapiens
agagatgtgctggcttcttcagaactatcccatcgctcatggatgtgctcaccttcaggacaagggcaccagatgtttatccagccaatgtcaccagccagagaccccaggggaccccctgcagttgagcaaggtggcttcattgcttgctggagaaaggagactcagggaaactttggggtgcctcagtaagagggtgccaaaaagaatgtacaggattcaggcttggattcgagggctgtggaggggtcccaggaagcagaagttggctcttggtaacaagtagggatctttcctacgatcagacatctttttaaaaatggagatacaggctgggcacagtagctcacacctgtaatcccagcactttgggaggctgaggtgggcggatcacctgaggtcaggaattcgagaccatcctggccaacatggtgaaaccccatttccactaaaaatacaaaaattagctgggtgtggtggcacacacctgtagtcccagctactcgggggtctgaggcaggagaatggcttgaacacaggaggcagagattgcagtgagctgagtttgtactagtgcactctagcctgggcgacagagcaggactccgtctcaaaaataaaaaattgagatacaattcacatgccgtaaaatgtacctttgtaaaatacaactctgtggctttttgcrtattcatgaagttgtgaaaccatcaccactatctaattgcagaagcttttcattaccccagaaaggagctctgtgacggtcttcagtccctctctcgatgctcccctccacccatggccaccccaaatctactttctgtctctatagttttgcctgttctcagcatcgcatgtaagtggggtcacacacaatgtggtcttgtgtctgcttctttcactaagcgccatgttgcaaggttgattcacgttgcagcatgagacgaaatcctgttcctcctttggactgaattactgtctcttgcgtggatggaccacattctgtttctccagtcatctatcgagggacatttgggttgtttccacctttgggttcttgcgaattatgtggccttgaacctttttggacaggttttggtgaggaggtgcgttttcaaagcacgtgggcagatgtccaggagggggttgctgggggtgggggctggtaatgatttatttgtgttctctttgtgcatctgtcttggaaggcagcctgaaatgaggatgaggctgggaggatacagctgccatgtcactgagaggagctgggaagagggcacttggcaccttgtgt

SEQ ID NO: 549391 - DNA, 525 bp, Homo sapiens
cccaaggaactccctgctcttgggcacctcctttatttactgttcttgaggaagctccaatcagacctgactggggtcggtgagtttatttttaccatctgtgtggacgatccagatgggcccagctccaggcctgaggaagagcctcccttacaatctatccatacgtctcatggtttccagttccaaaacatggatcttccgtcatgtaactccttccagcatgactgactgacccgctccagcaccgcaagccatcagcatggactcagccatgacggtgtccctcccatgcccaggcctgctcgcccaccatcccttcgccacrcagcttcctaacccatcgagtcctgtttacattcccctcctgagcgaggctgtgttttctcaccattctctccagttggccctccctgggttccaactcagggaggccatcccctccctgcagggcaaggcatcttcacattgactcattgactgccttgtccttgttctctgtaccctcccccggttcagacaatg

SEQ ID NO: 549392 - DNA, 676 bp, Homo sapiens
tattagttggctgggcacggtggctcacgcttgtaatcctaacaccttgagaagccaaggcaggaggatcacttgaaccgaggagtttgagaccagcctgagcaacgtggtgagactacagctctacaaaaactacaaaaattagccaggtacagtggcacacacctgtggtcccagctactcaaaaggctgaggcaggaggatcacttgagcccaggaggttgagactgcactgacccttatcacaccaacaccactgcattccagcctatgtgtagatcgagaacttgtctcaaaaaaagaaaaagaaaaaaggaaratcctactagtttaagccaatatttaacaaatcactccaagacattatgctgcaatttttaaaaggttccagtattctcaacttctctcaaatgatgatagcaaacacttctgcttcttaaaaggatagcagtcccttatatatgaatagggttttacattttaccaagtaattttatacatattcacttttgcatcaaccttgtgaagcagataagattatttccattttacagatgaagttatagactaagagaaggtaacaggcctctctctcaatgagcacccagatggtagacgtatctattgactcaacgccttctccactataccatgctgaccctgagttgctttgaaa

SEQ ID NO: 549393 - DNA, 1191 bp, Homo sapiens
tttcctgtgacccactgtgatagttaacctaaagttcccaatgtcaattcaatttccaaaggtaaacttttaattttttccttaatacgtgttaatagttgagatactggtgtaaacaaaaccatctcatgtttgaagtaaaaactaatgcattttaaaaaattaacagatgtgctacacttgtatcagtggagagagtgaatattgagaataagatggatactatggaactggacctgatgatatcatctcaaggtttagaagcataaggaaaggatgtgtccagtgcttctgccaggtgcaacgccttttaggttgcccacagtaattggccattaaactaaatctctaaagtcagctgaaacttcatggaggtagttgaaattccagggcttctggaggttctactatttgtcaaacacgggattaaatcatttaaaatagccatatgctttaaaatattgataataaacctaaataaatgtatcctcttttcccatacctctgacattttcaggcatccaccattctaggcaatggtgataaagacatgaacgttttcacagtccttgcctccaaaggtatcagctccgaaagtattgactacaacagtagaaagcctaacacctgtgctaactagagtttcaaccttgttctttaggctgtgtttttcaagccattttttttattatgtcaagtaatatggaatgattgagttattgtatctattacatgtatctaytacattagagtgacagtttattgcagcattaccaaaaagctgtattctgacagaatgcatatcaacacacagcagcaaagatgaaacaactttttcctactcaaaaaaaatttacacaagaggtatgtgaaattcacatatgtatttaagtttggataaaaacttagctcacataaggaatatactgaaattgagcaaattatatatcacttaaaataatactacaagaagctaaaaaaaagtaagggtgtttgtacactcagaaaactgccacaaaacataccccagataaatcaacaaacctctttatgcctattttataaactattaccaactacgttgtactctgtttactcttctttcttgtgaggacaaaccttctcatcctactggctttgtcaccctgtctcgtaagcaagcccaaatcgcttctatcttttttttttttt

SEQ ID NO: 549394 - DNA, 1191 bp, Homo sapiens
tttcctgtgacccactgtgatagttaacctaaagttcccaatgtcaattcaatttccaaaggtaaacttttaattttttccttaatacgtgttaatagttgagatactggtgtaaacaaaaccatctcatgtttgaagtaaaaactaatgcattttaaaaaattaacagatgtgctacacttgtatcagtggagagagtgaatattgagaataagatggatactatggaactggacctgatgatatcatctcaaggtttagaagcataaggaaaggatgtgtccagtgcttctgccaggtgcaacgccttttaggttgcccacagtaattggccattaaactaaatctctaaagtcagctgaaacttcatggaggtagttgaaattccagggcttctggaggttctactatttgtcaaacacgggattaaatcatttaaaatagccatatgctttaaaatattgataataaacctaaataaatgtatcctcttttcccatacctctgacattttcaggcatccaccattctaggcaatggtgataaagacatgaacgttttcacagtccttgcctccaaaggtatcagctccgaaagtattgactacaacagtagaaagcctaacacctgtgctaactagagtttcaaccttgttctttaggctgtgtttttcaagccattttttttattatgtcaagtaatatggaatgattgagttattgtatctattacatgtatctatyacattagagtgacagtttattgcagcattaccaaaaagctgtattctgacagaatgcatatcaacacacagcagcaaagatgaaacaactttttcctactcaaaaaaaatttacacaagaggtatgtgaaattcacatatgtatttaagtttggataaaaacttagctcacataaggaatatactgaaattgagcaaattatatatcacttaaaataatactacaagaagctaaaaaaaagtaagggtgtttgtacactcagaaaactgccacaaaacataccccagataaatcaacaaacctctttatgcctattttataaactattaccaactacgttgtactctgtttactcttctttcttgtgaggacaaaccttctcatcctactggctttgtcaccctgtctcgtaagcaagcccaaatcgcttctatcttttttttttttt

SEQ ID NO: 549395 - DNA, 534 bp, Homo sapiens
tgagcaggcattcaggtctactcagcagaaaaaatttttttgaagaaatgtaatctagtagcagtcatttatagacatcctgaatacagacatttatccacactccagtcacaccgaatcagtttcagatgggagttctagaatcctcttattagtattattttaatctttctctctttttcctcctcactcttctgcccaaggtccggagtctagtctccttgtatcccagagggacgtggttaggtttattctgcagctgaagaagctcatgcttcagggcctgtcactaactgaagcctcttccaagccctgcacctccttttgtrtttgaatttatgagttctactccttcaaaatgacctcccgagttaattacgctctagatcacacaaaacatgacccctcccctgggagatgacaggtattgctggtcccaaagggaaaccatgggtagctccctgtagtcttttcccatcttcaggatggagcatctataagacaacccttcctcatgttaataatgatggattt

SEQ ID NO: 549396 - DNA, 283 bp, Homo sapiens
agccttcttagcaccagtgcattttttagatttagaacctaaaaatcattagaaccacatattcaaattattgctgaaagasttcaacctgattttccccacaaacctacattggttaagagtactaaactaaatagctctcataaaagcttttaatcactctttgtaaagagcttattgtgtaatcagcacagtactgagcactccggatatataaaagaaatgtaaaacagtcttactcctagatctgctcctgtctagttatgagactttggctatgtcc

SEQ ID NO: 549397 - DNA, 1354 bp, Homo sapiens
tggagttacatacattcttcatcccatttatgaaatccaaaacccacggttgggcataaagcaggagatttaatactcttctgctggtgggttttgttgatttttactgccccctccacccacccctaccttatcccactccatcccctctgctctttttgttcttcatagttttgtgctaacttcagagctgcaaatgtgtcattgatcacagatttatatatatgagctaagagcaggaatgctaaaataatttctttctcaggccttaaagataaatgataggtcaagatgctttacttcatagccaaacatactaaggcacagagcaacatggcaggaatttgagttgtgagcgccagaagtgcttgttcagcactaacaagaaataggagaataggatcagtataatctcatattcttattaaattaaaaaaagacagagagtaatgccaaggttatgacatgaactgacaagaccaaaaaaaaaatcagtttttctgatgcttcagcctttgcaagcataggaaagaattaaaaaaaaaaaaaaaaaaagccctgtggcatgagttatagatgaagtatctgcctttagcttggaatttcctggcatttttcagcctgtgacacagacttgatgtgattaaacaaaggcttttctccaaatttaaagctcttaaaaaaaaaagctgaatctaatactctaacttgtttttaaatgggagcagatgcctctgtttcttgagctgacttccagattctgagaaataaatgaagagtggaggcttgttttggtagaggctgagaaaaggagttggccatatttgcccttcagaacttcgtgtcatcccccagctccccaacggcagggccacattctttcacaggacggagttggggcagattatggcttcctctggattggatttcccttggcttccctgagggcaatcccccgaggaagcacatcctggagccaaactcacccaatgaaccacagcaacagctcctaggagaatgaagagtgtgaatggagtaagtacatgcgtatgggtggacgtggtggccaacttggataatctctgaggttctttctaggcctgacatcctaggatgctctaataaaggacgacccctgagatgaggcagaacacaagaccctgggctggcagggggtttggaaatggcactgagccttagcaaaactcagttttytactgaaaaaaaaaaaaaaaacaaaacaacatagctccttgaaaaattatttttgattggaatctatagttatttatctatcaatcagacatgttcttttaaacttattatttataagtaagtaccatccacagtttgg

SEQ ID NO: 549398 - DNA, 2189 bp, Homo sapiens
tgatagtggttacctgtgtgtagaagaggataaaatatatttggcaacatatacgggggtttaaactgaattggtcatgttttattcttaacatgggtagtgcatatgtgtaaccttgcattattttttgctttctatgtatctgaatattttataataaaatttaaaaagtttacctaccaattttcctaattagtaattttctcaatacttatttatctttagtgaaaatttctttggatttcaaaatatcatttgttcaaattagtagtctagatattttctccttagtcattattgtttttcaaaagacatcaatttcattatttagcatcatatctagaatatctaagaggaattgctatagttttaagaaataaatatccagtatatccagttaaagcttttttattagtagttgtatacatttaaggggtgcaagtgcagtttttatatatgtgtatatcatgtaaaggtgaagtttgggmttttagcctaaccatcacacaaataatgtacattctaccattaagtaattcaagttcttaaagttagctttacttatccttttaaccttttaaccttttttatcattattatatctgctctagatcacgttttctgttctttatgaaaaaataataaaatgttactgttaaagggactgatttgtaataaccataaagacaaatcaagcacaattaagtgcatataattgacactgattgtaataaatggttatataaaattattttagcatacatattatataatgtgacataagctattcttttttttctttctctcttttggacgttaattttcagttagtcattggcttacatcttatctcccactgtaatggtagaaattaataggataaaagtactctattcaaagacaaattatcttttcactgatatacttcagtaagtgcaaattccctctgcacttactaaaaggcttagaatagtagaaaagtgctagttaactgaaattgtgcttcctttcttagaccataaaactttcgtttatttcatctgttaaacctttttgtaaatacagaaattttgaagctatttggtattacgtgatacatattttggcattgttgctattctggatttcttccttggtactttaattttgtggttcagtgagcaaaactaagtgttctgcaggaggactcgtacttaaaacagtcaggggcgtactgcctgatgagacattcaatcttttcccttgatgagggtgtccagtcagaaaagcccttttgtttttaaacccaggaaaggttttagagaaaattaccatccaaacagtaaaaagcaactcaggattttgcaattacatatagcgtcacaatcaaatacgtgttaggtaaatgtgttgggaaacttgattgtaatgataaaatagagatttttgttttcatcatttaactttgccaattcaaacagaataatgttatggaattccatgtcagagaataagttaacaatgacatattttatgctattaagtcctcaaaacaactaaataaagtaggtcttagtaattttcatgtttagatgagaaacttgagcattaggaaagtgggctaatatctccagtgacacatagatgttaagaggtgcatttgggattcaaactcatgtctttctgatccacaagtcctataataaaacaaatattctaatacagtaagacagaatttataattcaattaatcaaaaatatttattaagtgagtagtatttgggaggtagcattcctggtagagaagtagatataaataataaactcctaaataataaactactattcttactacaattctttagtttttgttaccataaattagttgtcccagatattttcttagctatccccaggccagcttttcatacaggattttttctggaccacgttagagaaatattttctttacaaatacaaactgaaattacattaaccaataaagttatattattaaaacatacaatcaagactaaatatacagcataacagaatatacagtgatattacaagtaatatcttacaaattgaaaatgtattaaccaatacattataaatatataaattatatatcacataattatgaactaataaattatactaaccagtctacaaatagaaattatattacccaataaaattgttattaa

SEQ ID NO: 549399 - DNA, 2189 bp, Homo sapiens
tgatagtggttacctgtgtgtagaagaggataaaatatatttggcaacatatacgggggtttaaactgaattggtcatgttttattcttaacatgggtagtgcatatgtgtaaccttgcattattttttgctttctatgtatctgaatattttataataaaatttaaaaagtttacctaccaattttcctaattagtaattttctcaatacttatttatctttagtgaaaatttctttggatttcaaaatatcatttgttcaaattagtagtctagatattttctccttagtcattattgtttttcaaaagacatcaatttcattatttagcatcatatctagaatatctaagaggaattgctatagttttaagaaataaatatccagtatatccagttaaagcttttttattagtagttgtatacatttaaggggtgcaagtgcagtttttatatatgtgtatatcatgtaaaggtgaagtttgggcttttagcctaaccatcacacaaataatgtacattctaccattaagtaattcaagttcttaaagttagctttacttatccttttaaccttttaaccttttttatcattattatatctgctctagatcacgttttctgttctttatgaaaaaataataaaatgttactgttaaagggactgatttgtaataaccataaagacaaatcaagcacaattaagtgcatataattgacactgattgtaataaatggttatataaaattattttagcatacatattatataatgtgacataagctattcttttttttctttctctcttttggacgttaattttcagttagtcattggcttacatcttatctcccactgtaatggtagaaattaataggataaaagtactctattcaaagacaaattatcttttcactgatatacttcagtaagtgcaaattccctctgcacttactaaaaggcttagaatagtagaaaagtgctagttaactgaaattgtgcttcctttcttagaccataaaactttcgtttatttcatctgttaaacctttttgtaaatacagaaattttgaagctatttggtattacgtgatacatattttggcattgttgctattctggatttcttccttggtactttaattttgtggttcagtgagcaaaactaagtgttctgcaggaggactcgtacttaaaacagtcaggggcgtactgcctgatgagacattcaatcttttcccttgatgagggtgtccagtcagaaaagcccttttgtttttaaacccaggaaaggttttagagaaaattaccatccaaacagtaaaaagcaactcaggattttgcaattacatatagcgtcacaatcaaatacgtgttaggtaaatgtgttgggaaacttgattgtaatgataaaatagagatttttgttttcatcatttaactttgccaattcaaacagaataatgttatggaattccatgtcagagaataagttaacaatgacatattttatgctattaagtcctcaaaacaactaaataaagtaggtcttagtaattttcatgtttagatgagaaacttgagcattaggaaagtkggctaatatctccagtgacacatagatgttaagaggtgcatttgggattcaaactcatgtctttctgatccacaagtcctataataaaacaaatattctaatacagtaagacagaatttataattcaattaatcaaaaatatttattaagtgagtagtatttgggaggtagcattcctggtagagaagtagatataaataataaactcctaaataataaactactattcttactacaattctttagtttttgttaccataaattagttgtcccagatattttcttagctatccccaggccagcttttcatacaggattttttctggaccacgttagagaaatattttctttacaaatacaaactgaaattacattaaccaataaagttatattattaaaacatacaatcaagactaaatatacagcataacagaatatacagtgatattacaagtaatatcttacaaattgaaaatgtattaaccaatacattataaatatataaattatatatcacataattatgaactaataaattatactaaccagtctacaaatagaaattatattacccaataaaattgttattaa

SEQ ID NO: 549400 - DNA, 2189 bp, Homo sapiens
tgatagtggttacctgtgtgtagaagaggataaaatatatttggcaacatatacgggggtttaaactgaattggtcatgttttattcttaacatgggtagtgcatatgtgtaaccttgcattattttttgctttctatgtatctgaatattttataataaaatttaaaaagtttacctaccaattttcctaattagtaattttctcaatacttatttatctttagtgaaaatttctttggatttcaaaatatcatttgttcaaattagtagtctagatattttctccttagtcattattgtttttcaaaagacatcaatttcattatttagcatcatatctagaatatctaagaggaattgctatagttttaagaaataaatatccagtatatccagttaaagcttttttattagtagttgtatacatttaaggggtgcaagtgcagtttttatatatgtgtatatcatgtaaaggtgaagtttgggcttttagcctaaccatcacacaaataatgtacattctaccattaagtaattcaagttcttaaagttagctttacttatccttttaaccttttaaccttttttatcattattatatctgctctagatcacgttttctgttctttatgaaaaaataataaaatgttactgttaaagggactgatttgtaataaccataaagacaaatcaagcacaattaagtgcatataattgacactgattgtaataaatggttatataaaattattttagcatacatattatataatgtgacataagctattcttttttttctttctctcttttggacgttaattttcagttagtcattggcttacatcttatctcccactgtaatggtagaaattaataggataaaagtactctattcaaagacaaattatcttttcactgatatacttcagtaagtgcaaattccctctgcacttactaaaaggcttagaatagtagaaaagtgctagttaactgaaattgtgcttcctttcttagaccataaaactttcgtttatttcatctgttaaacctttttgtaaatacagaaattttgaagctatttggtattacgtgatacatattttggcattgttgctattctggatttcttccttggtactttaattttgtggttcagtgagcaaaactaagtgttctgcaggaggactcgtacttaaaacagtcaggggcgtactgcctgatgagacattcaatcttttcccttgatgagggtgtccagtcagaaaagcccttttgtttttaaacccaggaaaggttttagagaaaattaccatccaaacagtaaaaagcaactcaggattttgcaattacatatagcgtcacaatcaaatacgtgttaggtaaatgtgttgggaaacttgattgtaatgataaaatagagatttttgttttcatcatttaactttgccaattcaaacagaataatgttatggaattccatgtcagagaataagttaacaatgacatattttatgctattaagtcctcaaaacaactaaataaagtaggtcttagtaattttcatgtttagatgagaaacttgagcattaggaaagtgggctaatatctccagtgacacatagatgttaagaggtgcatttgggattcaaactcatgtctttctgatccacaagtcctataataaaacwaatattctaatacagtaagacagaatttataattcaattaatcaaaaatatttattaagtgagtagtatttgggaggtagcattcctggtagagaagtagatataaataataaactcctaaataataaactactattcttactacaattctttagtttttgttaccataaattagttgtcccagatattttcttagctatccccaggccagcttttcatacaggattttttctggaccacgttagagaaatattttctttacaaatacaaactgaaattacattaaccaataaagttatattattaaaacatacaatcaagactaaatatacagcataacagaatatacagtgatattacaagtaatatcttacaaattgaaaatgtattaaccaatacattataaatatataaattatatatcacataattatgaactaataaattatactaaccagtctacaaatagaaattatattacccaataaaattgttattaa

SEQ ID NO: 549401 - DNA, 1549 bp, Homo sapiens
gaacaagtcccagttgttgaaacattttaagagtcctgtaaaaatttcaaaaaaatgcttttcttactcatggcctaagttgtattaaagaaagcacagtggcccttcatcacttatcacatagggttttagtcctgtttggattatatataacttcactctacccttccaacataatatcctttcatttcccaacatgtggcctttctccatgcacaccagtaccctcagtaatctcttcttattcaccatgttgggttctgtatgggctttggaaattccagtcttcccctttgtataacccctccccaaccctttctcaatcttctgcaatcagcttctacttacgttcagggtccagctcaagtctttccttcgccatgtctaattccctgacaactcttgacttcctatttgttcttttgctgagtcctagtacacatattattagtgtcacagtcacaaccttatttcatctctccttgccctgttttattaattttatgtacacatgtaaactctttgagggaagtgattgtgtcaaaacctctgagtcccctgcaaaaccaaataaaatgctaagcacataaaaggatactcagcaatattgcttatgagaaaataataaaggtttattttttaatgttttatagacctcttcactgataccgtttatactcatttttttctcattttgtcttctccaaaaattaaaaatatttgtcaaacttcttatgacctttcatatcttcatgctatgtctttaccaaatgatatcctaagttgtctgaaaggacattttgtcttcctgtttggaaacttcctccacattcttccccgagacatcaacacttcttttggaaacactctttgtatggtttcccttctcggcatgcaaaaagcacagtctgtatgttaaagggttttcacaacttttacattgtggtatgtctgaaacccaggaaactatatagccacgatgaaatagataaacaaggagtatactgaagatactcttagtggagagactattttcccaacttttcatttagagataaaaagtgaaatgagtaaaggactgaaagataacctgtaagtttcaaccagcacttttccaggtataagagagaatgtgaaattgctgacattggtttttaaaagtttaaacaaataaaaggaaatagtacctgtaatagtggcttttaactgaaattaagatcaaagctcatccttcccaagtataaagtgcaagctttcaagattgttctaatttttatataagacaacttactaattattgtctgctttttactggctcatacctctctgtgcagttacatccatttgaaatgtctgtatatgtgggggaaaagcatattttaatagcttttgcttgtaacttggtagtatgactattttcagttatttccatttgtttagcagccgaactgctttaatattaattagaaagktcagtctattattcagatccccacatggctttatacaccgcaccttctaacatgacttactgtacttctcatctatc

SEQ ID NO: 549402 - DNA, 648 bp, Homo sapiens
tgagttcatgtgtttatctcttattctgtaacattgctgaactcattagttctagggttttttttttggtttgttttatagattctttgggattgtctatgttcacaatcatagggatggttttatttcttcctttccaaactatctgcttttattttattttcttattttattgcactggcagaacttccagtaggaagttgaataggagtggtagagtggtcattcttgcctctccttgatcttatgtggaaagcattcagcctttcatcatcaagtataatgttagctatagggttttatagaygctttttagtaagttgaggaagtccccctctattcctatttttctgagaggttttctaatgaatgggtgttgaattttgtcaaatggggcaagagggtggtaattcttcattattccttactgtaattagtctgtcaatgttaatgagcatgctattattaagcacctattggatgttcagtgttgtgctaggccctgtgagacatataggaacctaaaaatttgagccttgccctcaagcactaaggaaacacactttctaaaccacaatttagcatataccataagtgctgcagaaggccccaggcagcggaggccagtgttgccctggctagaaggtg

SEQ ID NO: 549403 - DNA, 538 bp, Homo sapiens
cacctttttaaatctctgggcaaatgcacaggaccgttcagtactgtggggcttcttggaattgtgatcatttcctcaatctttaattcctagcacatgctgtcagaatctgcccatctcccctcgtcascaccaattcggtgtgtgccagaatgacctccaacctccagcacctgtatttcatggcttgagaacattctctgactgccaaagcccagagacaggctccctggggatgaggcaaggagtgttaattccctggcagttccagactctggtaagggcagacaatgtggacttcagtacttgatttatgccccctgccagagtcccccagggcactctgggctggctccagttcagaaaaccacctgacttccatcggatcagtgtgaatcccaaaggggctgcacagaggctggaaacaaacattaattctggaactctcccagcctaaaggttggcctgagtctgagagatccgtgcctcaccattcatacaggatgctttcagaagagttgcaacccctgcttagaag

SEQ ID NO: 549404 - DNA, 720 bp, Homo sapiens
aaagcactattatacatattcagcctatgagaaaaaaggaaatgaaatgtacagcttaacttggagactgcctaataaagggatttcaacatagtgttaataaaactgcattgtaatttcaaatgagggaaaggcattccacatttgagttcctaggcaatgctcaagttgttgtaaaatctttactcctttctccccacagaattactgcccaagttctgtttactaaaccacattggattcttcactaacttttccagcttctgcactcccagcaattcccaggaattgtctttcagcatctatagccataacgcttataattttgatctctttctggagggagcaggggctgctacatgtaaacaagtcctgtggcactctgcctattccttggagttattatgaagggaggtaagctgaggttcaggtttttttaatataaaattaatacttacaaataaaggttaattacaaatatacttggaagaaatgactgacattgatttatattacaatccaaataaacaggttggggacaaacaccaggagggttgagacctattaccaaagagtaaaatgaagtttgagtggagactgttgtgcctatgataaaggtgacctgytccacagtatcggttagggtcagtccatcatcctttcttttagtaatgtgtatcatgttcctatatctcagacttcatgtgagactcttggaca

SEQ ID NO: 549405 - DNA, 720 bp, Homo sapiens
aaagcactattatacatattcagcctatgagaaaaaaggaaatgaaatgtacagcttaacttggagactgcctaataaagggatttcaacatagtgttaataaaactgcattgtaatttcaaatgagggaaaggcattccacatttgagttcctaggcaatgctcaagttgttgtaaaatctttactcctttctccccacagaattactgcccaagttctgtttactaaaccacattggattcttcactaacttttccagcttctgcactcccagcaattcccaggaattgtctttcagcatctatagccataacgcttataattttgatctctttctggagggagcaggggctgctacatgtaaacaagtcctgtggcactctgcctattccttggagttattatgaagggaggtaagctgaggttcaggtttttttaatataaaattaatacttacaaataaaggttaattacaaatatacttggaagaaatgactgacattgatttatattacaatccaaataaacaggttggggacaaacaccaggagggttgagacctattaccaaagagtaaaatgaagtttgagtggagactgttgtgcctatgataaaggtgacctgttccacagtatcggttagggtcagtccatcatcctttcttttagtaatgtgtatcatgttcctatatctcagacttyatgtgagactcttggaca

SEQ ID NO: 549406 - DNA, 792 bp, Homo sapiens
tatatatttttttattatattttaagttctagggtacttgtgcacaacatgcaggtttgttacatatgtatacatgtgccatgttggtgtgctgcacccattaactcgtcatktacattaggtatatctcctaatgctatccctccctcctcctcccaccccacaacaggccctgtgtaagaactttggttaaagtttagttaacatagtccagaatcacagagctgttatgttttggggctggaactcaaacttgcctcacttcaatgtttacttgtgcagcagctttgcctgtgagcagtgtgtggggtaagtgggaagatgaaatgggcttaaataaccctttggaaaaatgctgccaataagagaagactttacagcttgaatgtagattgagatgggctttataacttaggtagccttttaatatatggaatgggtaggggttgcatttcaattttggaaaagaaaatcataagaacaatatttaaagtgagattgacataatctgtccaatatatattatttagggagcttagctatttttttatgatttatgctagtgaataaatatcaagaattatgtcttgctttagtgcagtggttctaaactgggaaacaattttgcctcctggtgcacactgggcaatattctagagacatttttgtcaaaatcgggtatttctattggcatctagcagctagaagtcagggacaacaccatagagcaaagagttacctggcccaaaatgtcaatagcattaaggttaagaatctctttttaatgaaaaa

SEQ ID NO: 549407 - DNA, 1212 bp, Homo sapiens
gcatttttttgtgcttttattgagtactttaatgaaacttgggatatgacaagtcaggctgataacctgattatcattaatagtctttaaacagaaatctaatttataaatactaaaagtctccttcttttaaaatgtgtggttgtcatagtgcctacctattcaatcaacttagtcaaaacaagaaaatttgtagccatttttgcatccaaggcatatcaatagctgagacagcataggtatacctggcttcggagctgcgtatatgtgcacttttatagttatctaatagtaataccctgtactctggtggctttatgcatttctagctgtgatattgctttaacaatgtaacaatgtgtatggtaaaagccacatcgaagcaatctaataatatttgagctctgacaaggataagtctaggcttatatatgaaaggataagtcaagaatgcctacgttaaagaaatataggggtgttgtagcatttgtaggaatcttgtggttatttttataacatctaatgtcatattcttattttgacattttccaatcttactatagaataatttgcaggacattcatctatgatgttgcctgaagttagagctctattttcaaagtacagattcctgaaataagtattgtacaataatttcctttctgcacataaatcgtacatacttcgtggaataattactcatttgtctatacataccatgtgtttctgaaattatctgtaaatacaagatttatatgtacaaacacattaaaatgagatgtttaaataaaagagatttctgggtttggagcattttcttggacagggaggtaattggtacaaatttaagttaaattgctttatttttattgtaattactagaagttttaatcaaaactgacagtaatttaagcacttgggaacaaagtacacttaaatcttcaactaattttaaygtctaaagctgcttctctcaatagctctgaaatcagtttggcccttgattgccagaaactgcacaaacaaaatggaaactcttaatgattcgtaccgtgtggaatgaatactgactgaagatggcaacaaagaagctgaggaagagatgtagtgtgatctgcaaatcatacttaaagcaagtcagagaagttaaaaaaagtcctctcttattactgcagaaaatgatgcaagccactttaactgcttctattcaac

SEQ ID NO: 549408 - DNA, 599 bp, Homo sapiens
tattattagtttcctgtgtaataccctgtattctactttattagtataaaatatttatgatgagaagggatcctgagacttcatcagactaccaaaaagatgatggtccaagcaaggttagaaaccgattctaagagctgccaccccrggcccagcagggcagaacaggagtacttttttgcaaacgaactggaaaaggctcttcttgtggatacatattcctttctgttgtcttccaagctgtttcctatcctcctgtaccatatgtacccctgaggattatcttcaatgggtcttggaaatgtataaaaattgtcaatacctatgaggagaaaatgattccaaaattggaactggatctcaaacttcattgccaggcatcatcttcatggctggtggggagggagtgtgaagtgggctcagctatgtgtgccttcagcccctgttgagacacagggagagagatggctttccttcaccacggtgaatggttacaggactttgtcttccaagagagggcccaggaggctgttttaaatgtaagttttattagtattcaggtatagtgaggtcaacagatcaagagacaacaactattg

SEQ ID NO: 549409 - DNA, 656 bp, Homo sapiens
tcagctgtcagctccctgagggatttgccttggctgagagccaactagctcaaggtcacaccgctttccctggcagtttatctaatacctaatcaatgcagaaacatgaaagtccggcccctcacctcaactcaggayggctgtgaaaggtcaacccatcttcagaactcaggtaggctgaggcctccattgggacagcatcacagctcaactttccctttgcccaatcctgcctcctttctttccttcccatccacagttgttgatttcaagatcacccataacaaccctctcgcacaccagtctccatctcagagctagctttctggtgaacccaacctgtgaaaactttgaaaaaatgaatttaaagaggttgaaatttatgttgaacttatataacaggatatatttgtagttaatattcaacattcattggataggcttcaacaaggctttgcgaactcctggtacacctgggttcctcccctgcaaacacgggcatccagtaccttttcccaggatggcattgggggacctgaggagcctgctcttcttattcagactcttggcgtttcctggcctgagtcagggtgcactttttggagaaggtcttcttctaaagcctccttggtgagcaaatggattttccattagca

SEQ ID NO: 549410 - DNA, 656 bp, Homo sapiens
tcagctgtcagctccctgagggatttgccttggctgagagccaactagctcaaggtcacaccgctttccctggcagtttatctaatacctaatcaatgcagaaacatgaaagtccggcccctcacctcaactcaggatggctgtgaaaggtcaacccatcttcagaactcaggtaggctgaggcctccattgggacagcatcacagctcaactttccctttgcccartcctgcctcctttctttccttcccatccacagttgttgatttcaagatcacccataacaaccctctcgcacaccagtctccatctcagagctagctttctggtgaacccaacctgtgaaaactttgaaaaaatgaatttaaagaggttgaaatttatgttgaacttatataacaggatatatttgtagttaatattcaacattcattggataggcttcaacaaggctttgcgaactcctggtacacctgggttcctcccctgcaaacacgggcatccagtaccttttcccaggatggcattgggggacctgaggagcctgctcttcttattcagactcttggcgtttcctggcctgagtcagggtgcactttttggagaaggtcttcttctaaagcctccttggtgagcaaatggattttccattagca

SEQ ID NO: 549411 - DNA, 656 bp, Homo sapiens
tcagctgtcagctccctgagggatttgccttggctgagagccaactagctcaaggtcacaccgctttccctggcagtttatctaatacctaatcaatgcagaaacatgaaagtccggcccctcacctcaactcaggatggctgtgaaaggtcaacccatcttcagaactcaggtaggctgaggcctccattgggacagcatcacagctcaactttccctttgcccaatcctgcctcctttctttccttcccatccacagttgttgatttcaagatcacccataacaaccctctcgcacaccagtctccatctcagagctagctttctggtgaacccaacctgtgaaaactttgaaaaaatgaatttaaagaggttgaaatttatgttgaacttatataacaggatatatttgtagttaatattcaacattcattggataggcttcaacaaggctttgcgaactcctggtacacctgggttcctcccctgcaaacacgggcatccagtaccttttcccaggatggcattgggggacctgaggagcctgctcttcttattcagactcttggcrtttcctggcctgagtcagggtgcactttttggagaaggtcttcttctaaagcctccttggtgagcaaatggattttccattagca

SEQ ID NO: 549412 - DNA, 656 bp, Homo sapiens
tcagctgtcagctccctgagggatttgccttggctgagagccaactagctcaaggtcacaccgctttccctggcagtttatctaatacctaatcaatgcagaaacatgaaagtccggcccctcacctcaactcaggatggctgtgaaaggtcaacccatcttcagaactcaggtaggctgaggcctccattgggacagcatcacagctcaactttccctttgcccaatcctgcctcctttctttccttcccatccacagttgttgatttcaagatcacccataacaaccctctcgcacaccagtctccatctcagagctagctttctggtgaacccaacctgtgaaaactttgaaaaaatgaatttaaagaggttgaaatttatgttgaacttatataacaggatatatttgtagttaatattcaacattcattggataggcttcaacaaggctttgcgaactcctggtacacctgggttcctcccctgcaaacacgggcatccagtaccttttcccaggatggcattgggggacctgaggagcctgctcttcttattcagactcttggcgtttcctggcctgagtcagggtgcactttttggagaaggtcttctyctaaagcctccttggtgagcaaatggattttccattagca

SEQ ID NO: 549413 - DNA, 521 bp, Homo sapiens
atttttctctctctactttcagctgtgaaatgcagttcaattcctctacataaaagcacctcccaagtaatatgtgctgtgactggcaacatgatttaggctgcctggtgcctgcaaatactaagaacaatattcctggcagacctccaggatattctgtcttctaattggctcaaattaattccctctactctgagcatttggaggagcaaagattttccacatagttgtattacattttttctactttttctatatatcctcatgactatgaatacaacataaatctaatgttgaatttactgaaactgactgtattctattaaagtataattatarttataattatacagaaaagaggcagacatatttgctttctaaaacaaaaacaagattattttaaaattgagacataatttatgtaccttaaagtttacccttttaaagtcagatctaccaatctacaatttggtagattttaagatattcataaggttgtccaaccatcaccaatatctaat

SEQ ID NO: 549414 - DNA, 1740 bp, Homo sapiens
ccatcatgcctgactaatttttctattttttgcagagatggggggtctcactatgttgcctaggctggtctcaagctcgtgacctcaaacaattctcccatctcagtttcccaaagtgctgagatagattacaggcatgagccactgcacccagccaaaactagatttttggaaaccaaacctagagcagattctgtacatttctagcatgcaagggccctcatcacataaagcatcaggggctgcagagcctgcataggtgttcaacaagaaaaacagtaaaggtcaccaagcccactgactttccctggccccatgcacctctcacctgtgaggagccttccgaggaaccaaaccggccacactttggaccccagagtcctgaccgtaaacacagaatagaatgtgtttctcacagttttgtcccagccagagagcctatggagacaggtcaggcacagtcaccataacagcagctgagttaaagagcccttctttgctgtcatttattatctgcattgttttttcacttttgcattaaataaatgtgcactttttggggggatggtgcttgaattttttagaagcttgggaatgatgccgtatcccaggattcttccagcccagctttgagcggcgtagaacggtcggatggaggtggggcaggtaagtcaggccattgccatcacccccttaggaaaagcgcttaccttctgattgcagagtcacatgattgacagaagaaaaatttaaacagggaggcaagaactgatctctttgttgtgtgttctcagctatcatctgaaagaccatatcccttcacctgccttatcttcccctggggcacatcctgccccactgtagcattgtgcctggacagggcactttttgatttcccaaagggaggaaattctgactgttttttcattgcaaactcctcagctttgagcattttggaaaagttgggggtgggggcagcatacaggatcatggctgatgtatttaagaataagccatgcatgacatatggaagatgggtggctgtcttgtttggtatgaacaatatgcttcgcttgcagcttgaatatgcatgaaatccaatatcccttgtccctctgacttcttaggtataataaaataagaaaataccttagatgaaaactagagagtaatgcgttaactgtgtgatagaatcctcactttgctatttgagagtcttatgcatagctacagtatcttggtgcagtaagagttggatgataaatcacattttatgggcttatttttgccagttgtcttgttaaattaaggcagcagtatggatggaggtgggggatgagatgacatttctggagctgttctcactaaacatgagattgcagccgtcagcatcaccctcctcactcagaacctgtagccagagccctaactgcttattgtccagaaccaaggcacttacattyggttatacctgtaccttgtgccagatctgagaaagacccaaatatttcaagtgcatgaagaaccactgttttccttgtatgtgattacggcactgtacattattaaatataaaagcttgtcatcgctggaatagtcaggggtgatcagaaaacaaccaaaaagtttattgcttttctacaaagaacgtcactcttcctccagcatgttttgattttaaaacatgctagaacagcatattcttaaaatactcttaaaacatccgtgatgagaaacgat

SEQ ID NO: 549415 - DNA, 1272 bp, Homo sapiens
gcagagatgttgatcaaagcctctcctgacaatatacattgctatgctttgaatatcatgcaagttttcatatcacaatcacacttttcctgtaaaataaaaaaatattttctatcaatcacattatacttgtagagtacctgtatatattggttgtgccaaagtatggtaaactcattagatgattacactcttgcttacattgtaagacgcaaatttatcaaataagaataattgtgttttacaaaaggaaaagctagaatacagatcaaaagttctctctttattaatgtctttcacgtaggatttttttctaagtatgagaaggggaaatgtgggcgaaaaagtaagattctatgagtagacaaataatttgacttatactgtgattgtaagagtaaagttagctcaggaagggagaaaagagggcagacaggggaaaggaagggaaagagaagaaaaaatggtataggacaacccagagatgaacaacagtgatctttttaaaaacagggccctaactttattcaaccttataatactatgaataaataaaaatgtattatttactgagtggctaatgtggactttcagagttgaaaagggattaggtgatccctgaatttcccagctcagtaatcactggcatcatttggcattattttaattatttaacagcaatataatcaaccactccagattaatatctttatttactccacttcttattctatgtaatcactcttctaacagaagaacatgtttttcaggtcatcgatgcagaattaaatcaacagccaaaacgtacaacatctcattagcttacaagacatttctatccctatcaaatcaattgggaaaaaagaattaatggttgggaactctagttatttgactgtgatttcctctcataataaaccatctactcaaaatgtcctgcattcttataatgggaaacttgtttcaccccaaagtatctacaaggttatacttaagaagtgtttgtacagagtgtgtctgcatttgttttatcaatagagttaacaktaagactgatatttaaattgagggttctggattattgagatatttaaatgacaaaatggttaaaacacttgtgggaagtcatctgtataagaaatgtaaagccctgatttgaggcaagcttaccttcaaagattgcctccagtcacctgagcctctccttacttttcctcatctattatgctatcttctctgatccagcttgctcatcatcacaatatatatatc

SEQ ID NO: 549416 - DNA, 553 bp, Homo sapiens
cagaaaaccacccacaaacctccttgagcctatcatcttatttcttcttcttttatattttcttctcttcttcttttttccttttgtcagggaactagggagtatggcaaggaggaggagatgggggtggatattagtagtaaagaggggatgagaatatttcacttctccccctctggttgaacaggatatggcatattatattgttgagagtaagacccaaaacagcctgacctggcaatgtcaaattaggatgctggggtcatgaaacatatatagagttatggtataggatggggaagatggtacagtgaggttcaagtagcattaactttgatgtcaaagatacctgggttcaaatcctggctcmcacatttttaaattctggaattgggcaaacgctaagtattctgagcctctgtttccacctttataaattaggaataatcatcatgcctaccttaaatactgcttagagtgtggatcttgaggggcatgggcaagggcaagcttgagggacaataagtactcctgatgctttttacttactaag

SEQ ID NO: 549417 - DNA, 622 bp, Homo sapiens
aggttcacaccattctctggcctcagcctcccaagtagctgggactacaggcacccgccactgcgcccggctaattttttgtatttttagtagagacggagtttcaccgtgttagccaggatggtctcgatctcctgacctcatgatcygcccgcctcggcctcccaaagtgctgggattacaggcgtgagccaccgtgcccggcctggtttggttttaagtattcctttaagttgctggtttggttatagagcgaagtattgcttttatttttttgtttgtttgagacagagtttttgctcttgttgcccaggctggagtgcagtggtgtgatcttggctaactgcaacctccgcctcccgggttcaagcaattctcctgcctcagcctcctaagtacctaggattacaggtgtgtgccaccacatccagctaattttgtatttttagtagagacagggtttcaccatgttggtcaggctggtcacgaactcctgatctcaagtgatccacccgcctctgcctcccaaagtgttgagattacaggctttagccactgtgcccagcctgaaatattgcgtttaaaaaagacattgaaaatagctgggcgtggtggcatgcgc

SEQ ID NO: 549418 - DNA, 904 bp, Homo sapiens
tggtcctaaagtacatttataagtacttacttataatatggtcctaaagtacatttataagtacttacttataatatggtcctaaacatttcagtgtgtatgttctaaaaatagatattcccttacatttacacagtatcagcttcaaaaatttacattgatacatactgttatctaatctgtccagagtacttccacagccagcaaaacctgattactgattatggtgtccttatgagaagaggtgtctttataagaagaggactgctggtgggctggattattaggatcctgcacactgtaagtctctggttcaagcccaatactatggaaaagattaggttgggactacagagctatagtaccctcttcagtgatgggctcagagatctggggactaacattaacctttcactcagtcaggagttggagaaaggctgagcaaagatgaaaagtgacaaatgtaccacatgaccaggggatactaagatatagttaaatcatatgctgagtttgctctaagggcctattctacagcatgctccattgaatactgctataggagaaggccactccttaccaggaaggtagcacagggcggaacagtgactaaaaggaggtacacaagatatcaaataatacctctcccctctttcaagtcatttatttttatttattttaatatgagaggcaaggtctcactattttgcccaggctggagtacagtggctattcacaggtgtgatcacagcacactacagcctcaaacttttggtctccagtgatcctcctgtctcagccttctgartagctgggtctacaggcatgtgccatgttgcctgtctcaagtcacttttgctggtgcccagcaaagtgcaaagcacacaaaaaagcagtcaaccca

SEQ ID NO: 549419 - DNA, 898 bp, Homo sapiens
atttgctaagtgaataaaaactgaataaataaattcctgctcccaaagcctcacagagccttagaaatctatcataacagcttttcagttcaggaaactgaggcccagaaggagtcgttcagaggcacctgccagagggccaggctgaaagaatacaggtttccttgattaaacagctaactttttctcaaagatctaccaaaatgggctggggagggagggagagcaaagggctgcttaatccggcattagaattcacacagtcacgtgtcaaccgatgagcggtatttaacccttcccaatcatgaagtcagtctctgcagagcactgttcacacatacgccgtgacactggtgtcagggtcccagtttcacagatgaggcatctgaggcccagcaagagtgggctcttgagcaaagtcccctgtcgggatatggtggggcctggcatggaatcagatctgaactccacactcgttacctgccacccaagctgcaacccaagccaccaaggtataaggagcttcagtgggacaagagatggggcactcggcccctaagatgtatctccagcagtgaactaggtcccgggttttttctgtcgaatcctctgtgagccaaagacacaaaacgaacccacacacygtgctcacgcaccactttgaaagcaggaagagcttcacttaaagtgcagaaagtcaaggcaccaacccgacataatctcttttttttttttttttttgagatggagttttgctcttgttgcccaggctggagtacaatggcacggtctcggctgactgcaaattccacctcccaggttcaagcgattctcttgcttcagcctcccaaatagctgggatcacaggcatgcgccaccacacccagctaattttgta

SEQ ID NO: 549420 - DNA, 1136 bp, Homo sapiens
gacccaggccaggcagggtggctcacgcctataatcccagcactttgggaggctgaggtgagcagatcacttgagcccaggagttcgagactagcctgggcatcatagggagaccatgactttcctaaaaatacaaaaattagctgggcatggtggtgcatgcctgtagtcccagctacttgggaggctgaggtgggaggatcacttgaacccgagaggcagaggttgcagtgggccgagatcacaccactgcaccccagcctgggtgacagagcaaggccctgtctcaaacaaacaaacaaaagatgacccatgttgcttatgatcctatgttggatcacctggcaggatggcagcagctgaagcagagaccccagtgaacactggcatgcctctactgctgttcacagtgactggcactgagagccacctttccctccacagcctttggaaagtctcacatttccccatgggtcctacttcactcccygctcactggctagctttctccttccccacaggtacttttgactttggcttaccctatcaatcatgagaaaataaacattaggaatatgtgacccaaaagatacctttatatagaaaagatacctttatatttacatatgtgatacattgtttttaaggtaaaattccaaaatctcagtatagtaacaatgataataattatagctgataactcttgagcaccttttatgtgccagacactattctaagcattctacatatatcaattcattgttctaccaatgttactctattataagctaaataatgatactccattatttaaagtctttttttttttttgagacggagtttcgctcttattgcccaggctggagagtaatgacgcgatctcggctcactgcaacctctgcctcccgggttcaagcaattctcctgcctcggcctaaagtcttcaatttatatagcatcccagaaagcactagtgatatgttatctaatattctttgtatagggtaactgctaatatgcccagttgatatgtgaaaacatcaaaacccatagaaatgtgaaaatctgtccagtgctccacaaaaatcagcagaacatccaggcccatgtcaaagactggccctgacagcaaacaa

SEQ ID NO: 549421 - DNA, 1321 bp, Homo sapiens
ggctagatttcagaagagaaaacaaaaacataaacaaaatcacattagccttgtcccatagacttgatcatctcacattaggtggaaatataaaagycagaagttaggatgaaattcttaatagaatttctaaaataatcagagattagctatttttttcaagatctaattttgtgcaagaggggagatgtatcagttagaattttccatagaaatagacccaataatcaattatgtatgtatatttacacacaaatcatacacgatttgtattaaggaattggcttacgattgtaggggctggcaagtctaaaatttgtaaggcatggcggaaggctggaaactcatgcaagatttgatgttgcagtctcgagtctaaaataaaaggcaggctagcaggctggaaacctaggcagtatttctaccttgaggcagaatttcttcttctccaggaaacctgttttttctcttaagactttaactgattttatgcggtccacccacattatcaaagaaaattttctttacttaatgtcaactgattataaatattaaccacacctccaaattaccttcacagcaacttctagcctagtccttaagcaaactgggtgcagtaacctggtcaagttgacacatacatttaaccatcacgcaaagaaaaaattaccaagcaattaaaaaaagtagctgtaacacaagtatggggtacactggggtaatgatggtgatgcaggctaagagaggaataaaaacaaacaaacaaaaaacaccccaaaacctaagttatattaagagaaagattgtaaatcttaatagctatgttctaatgaatgcaaaaactatgttgagggcttacataaattagctcggttaattctgacaattcagtaaggtagctacaaaaattatcctcttttacagaggaagaaatcaagatttgaagagtttctgtgcttatcctgatatcacacaattcataggcgacaaacctgcatctggaagtcatatctatctgactatgaaatctttgttttagtcactgtgaagagtctcagagcaacaaattgaaaagatttgcattccagacttaataataaagattgcagctccatgggctgttgctttgcagcttaccatattctagacactgttctaagaactttacatatattagatccttagaacccagcaataaccctgtgagatagtcacggttattatgcctgttttgcagatgagaaaactgaggctcatgccttgcctacgtagcaagtaacaggaatgttcagagcaaaatgataaaatagaaagatgtttc

SEQ ID NO: 549422 - DNA, 597 bp, Homo sapiens
ccaaagtgctgggattacaggcatgagccactatgcccggtccacctttcatctttacraaacaatgacaacacaaaatgatcttgatttcattttcacattagcacagagaaacttcttcaccatgactagttttctacagtttgaaaaatgcacaaaattgcctttaaaatgttatttatataatcacagctgaaatcctgggcagtgtttgggagtgaggaggagaaaaatccagcttctctggtggcagaatctctcttctccttgccccataatctctctccttcctgaccttgccactgggattccatttggtactcccattttgttattcaaaagggaagggaaatttgttgtactgatggttgcacaactctgtgaatatactcaaaactactgaattgaaccttttaagtggatgaattgtatggtatgtgaattatatctcaaagtggtttaaaaaggggggaagggaagaaataagaaacaggaaaagaatattttagaatgaatatttagaatattcattctaaaatattttgtgaacaaaattagttccctatagtggaatttaaaaattttctgtttttgtat

SEQ ID NO: 549423 - DNA, 569 bp, Homo sapiens
ccttgttttgaaggttggaaggcatgaagacattaaaaaattaaagtgctaccatatactatgggaataaggaatacaatcctgcacgttttggtccatgaaaccagagagtactaggggctatgcaatgtatgtttttgtattcttagacatagacacttacatgacatcaaagctgsaatcatggaagattcctggcactgataattcaaaacagtttacccaattatcactcagattttggataaaccttacaagctatgttatttctactgtgcagagaaggtaacttagtctgttggtgactcttttacatcaaagtgtttcacttgcacttgtaaaagtaaaatgggctaacccaaatccttttgtcatggaaatgctcgagactcccaaaatatacctcagtaggaacctagaatgaaacattcataggagaattgctagaaagccgtgatgaccagagtcatggatacacccttcctccagacaaagaggtctgctgtcctccctgagatgtattctagctactaaatcaggccctcactgaactgcaacacccaggcctt

SEQ ID NO: 549424 - DNA, 535 bp, Homo sapiens
gcacataaaaacctaatttcttagctttttgatgaaatagctgtttcctcaccttttctatcgtctagaggtaacctacattccttggctcatggcccattcctctatatttaaagtcagcagtggagtatcttccctttgacttctggcctccctcttatatggacacgtgtgattgtgtcagctcacttgcctaatccaggataatatccccatctcaagattctgaatttmatcacatctataaagtccttttgccatgtaaagtaacgtataatcacaggctccacagattagggtgtgatcatttgcatcccagggaaaaagcctaccatgatcccttgtgtcccagggataaagcccacgatgatcaagtaggctttatccctgataggaaaggttggttcaacatatgcaaatcaatacatgtgattcatcacataaacagaaatgaaaacaaaaaccacatgattatctcaatacacgcagaaaaggctttcaataaaattcaacatcccttcatgttaaaaaccct

SEQ ID NO: 549425 - DNA, 535 bp, Homo sapiens
gcacataaaaacctaatttcttagctttttgatgaaatagctgtttcctcaccttttctatcgtctagaggtaacctacattccttggctcatggcccattcctctatatttaaagtcagcagtggagtatcttccctttgacttctggcctccctcttatatggacacgtgtgattgtgtcagctcacttgcctaatccaggataatatccccatctcaagattctgaatttcatcacatctataaagtccttttgccrtgtaaagtaacgtataatcacaggctccacagattagggtgtgatcatttgcatcccagggaaaaagcctaccatgatcccttgtgtcccagggataaagcccacgatgatcaagtaggctttatccctgataggaaaggttggttcaacatatgcaaatcaatacatgtgattcatcacataaacagaaatgaaaacaaaaaccacatgattatctcaatacacgcagaaaaggctttcaataaaattcaacatcccttcatgttaaaaaccct

SEQ ID NO: 549426 - DNA, 1779 bp, Homo sapiens
gtactgaaagcacagctttgctctattctccctacaaaaaagcatttgcaataggttttgataatcaataggcttaacctatttcacatttatattttattgtacattaatacagtttggatcactacactaagcctgaaagtaactttgcatcctttagttacgctgctctgaaattcttcttctaactgctaggctcatgctattaataataacaacagctaccaattatggagcatttaatccatcccagacagcatggtaagagataaatatgtgttacttccattgattttcacacagtccggtgaagtaataactattatattttcattctaaagacacatctgaggttcagaaaaattaaacaatttgcagttacaaagctagtgaacgagtcaggatttttacccagactgtatggctgagaagcaaacactaaactgtacttactgactttcaaacatttcagcggctcctgccgggtgcagaggccgaggcgggcagatcacttgaggtcaggggttcaaaactagcctggccaacatggtgaaaccgcatatctactaaaaatacaaaaattagccagacgtggtggtggacacctgtaatctcagctacgcagggggaggctgaggcaggagaatcgcttgaaaccagggtgtggaggttggttgcagtgagctgagattgtgccactgcactccagcctgggcaacagagtgagactcaatctaaaaaaaaaaaaaaacatatatatatatatatatatatatatatatatatatatatatatatatacacacacacatatatatatatatatatgcagtgcctcttcactgactaaaacttcaaataggaactctccatggcccaactgcttaaatarttatctttccaatgatcccactttgacctagtttccccctaaatgccatgctaatatccatctgcacaagcttgtaaaaactattaatattgacaaacaactttttttgtcatcaggtatcacccttcctataaaattatctattgtatgataacataatggctatgtcattccactgtgaaatcttcatattttcaaacatatatggaagaacttagaagtcatatcccatatggtatttttatggacatatatattcaatattaactaaattgcagactctcaaatgtgtagatcatattgtatctgatctctacacaattcaggagaagttgaagcacacagtatatgctcaatcagcattcctttaatagaattggcaaaagggttaaataattgacttaaagcagttgacttgcatttaattactaaggttgttaggtacaaaataaatggacagagtatcttgtgtattttgttcattttgttcaagacaccacacacacacacatttatgtaaaagaacagtgatctggtgaagtctttctcaacatagtaatgtggcttaaattatcatatacaagaagtggtaaaatttagatctaccaagagctcatttctaaagccagattttcaatatctataatttactagcattctaaaaatgaacacacacacatgacaattgatagcatttatacagacacgttcataccctgtgctgaaattacatcctcaacactctgacaccctgcctctgctccagtaatgtattagtctattctcatgctgctattaaacacatacctagaactgggtaatttataaaggaaagaggtttaattgactcacagttccacatggcttgggaggcctcacaattattg

SEQ ID NO: 549427 - DNA, 1779 bp, Homo sapiens
gtactgaaagcacagctttgctctattctccctacaaaaaagcatttgcaataggttttgataatcaataggcttaacctatttcacatttatattttattgtacattaatacagtttggatcactacactaagcctgaaagtaactttgcatcctttagttacgctgctctgaaattcttcttctaactgctaggctcatgctattaataataacaacagctaccaattatggagcatttaatccatcccagacagcatggtaagagataaatatgtgttacttccattgattttcacacagtccggtgaagtaataactattatattttcattctaaagacacatctgaggttcagaaaaattaaacaatttgcagttacaaagctagtgaacgagtcaggatttttacccagactgtatggctgagaagcaaacactaaactgtacttactgactttcaaacatttcagcggctcctgccgggtgcagaggccgaggcgggcagatcacttgaggtcaggggttcaaaactagcctggccaacatggtgaaaccgcatatctactaaaaatacaaaaattagccagacgtggtggtggacacctgtaatctcagctacgcagggggaggctgaggcaggagaatcgcttgaaaccagggtgtggaggttggttgcagtgagctgagattgtgccactgcactccagcctgggcaacagagtgagactcaatctaaaaaaaaaaaaaaacatatatatatatatatatatatatatatatatatatatatatatatatacacacacacatatatatatatatatatgcagtgcctcttcactgactaaaacttcaaataggaactctccatggcccaactgcttaaataattatctttccaatgatcccactttgacctagtttccccctaaatgccatgctaatatccatctgcacaagcttgtaaaaactattaatattgacaaacaactttttttgtcatcaggtatyacccttcctataaaattatctattgtatgataacataatggctatgtcattccactgtgaaatcttcatattttcaaacatatatggaagaacttagaagtcatatcccatatggtatttttatggacatatatattcaatattaactaaattgcagactctcaaatgtgtagatcatattgtatctgatctctacacaattcaggagaagttgaagcacacagtatatgctcaatcagcattcctttaatagaattggcaaaagggttaaataattgacttaaagcagttgacttgcatttaattactaaggttgttaggtacaaaataaatggacagagtatcttgtgtattttgttcattttgttcaagacaccacacacacacacatttatgtaaaagaacagtgatctggtgaagtctttctcaacatagtaatgtggcttaaattatcatatacaagaagtggtaaaatttagatctaccaagagctcatttctaaagccagattttcaatatctataatttactagcattctaaaaatgaacacacacacatgacaattgatagcatttatacagacacgttcataccctgtgctgaaattacatcctcaacactctgacaccctgcctctgctccagtaatgtattagtctattctcatgctgctattaaacacatacctagaactgggtaatttataaaggaaagaggtttaattgactcacagttccacatggcttgggaggcctcacaattattg

SEQ ID NO: 549428 - DNA, 527 bp, Homo sapiens
aaagggcagggtcccagccagcgtcccagggcctagatctcctctcctcctccacggagaagcctggcccaccgggggacccggaccccatcgtggcctccgaggaggcatcagaagtgcccctttggctggaccgaaaggagagtgcggtccctacaacacccgcacccctgcaaatctcccccttcacttcgcagccctatgtggcccacacactcccccagaggccagaacccggggagcctgggcctgacatggcccaggaggccccccaggaggacaccagccccatggccctgatggacaaaggtgagaatgagctgactgggtcagcctcagaggagagccaggagaccactacctccaccattatcaccaccacggtcatcaccaccgagcaggcaccaggtatgcagcccccaactcctgaagccatcctgaaacagccatgaggcactcactatgttcagggcatgtgggtagaggaatctcaagawgccccggccccaccatcagttaccgtccat

SEQ ID NO: 549429 - DNA, 887 bp, Homo sapiens
tctgttctgattccaagaatctgatgattatccaatcacacaggataatgtgtgccaggtagtaggagttcagagatgaataagccagtgtcttccttccagaggtttatggtcttgtcatctaagctggtattctagcagcataaaacaaaggattttttcctrtttgataaatcagagagatattgttctgcccacatatcagcttgtcattaggcaattgacttaccctttgagggtctcagttacttcatctataaaatgtaggccagtatacttactcccaaggggcttctgatgaatgataaaatacatgaaattgtccaacctcatgtccaatacatggcagatgctcaacaaatattagttacacattttatttgtaaaataaagaattctatttttattgaaaaccaaggagataaagtggcatgttctagcattggggaaaaagagaggtgaagataattaataatcctgttacctcttgcattttttcccacccagcccaactcacagaaggaaagaacatgtgagggggaaaggtggtcaacactagaccaggatccagacaatgggagagaggagaggtctatgtttgctcaacatatatccccagcatctagtataattcctgactcaaagcaggcgctctgtaaatctttgttgaatgtattatctgcaaattggaatctgcattaagcaactatataaagaaagatgtgtagttctggaattgaataatgcacatatccagtggccaaaacccaccaagatggttgaaggaactaaggatgtttaagcttgggaaagaacccacagagatgtgatttctgccatcaaatatttaaagcatcatcttgagaacaactgaattgacttgatcc

SEQ ID NO: 549430 - DNA, 887 bp, Homo sapiens
tctgttctgattccaagaatctgatgattatccaatcacacaggataatgtgtgccaggtagtaggagttcagagatgaataagccagtgtcttccttccagaggtttatggtcttgtcatctaagctggtattctagcagcataaaacaaaggattttttcctgtttgataaatcagagagatattgttctgcccacatatcagcttgtcattaggcaattgacttaccctttgagggtctcagttacttcatctataaaatgtaggccagtatacttactcccaaggggcttctgatgaatgataaaatacatgaaattgtccaacctcatgtccaatacatggcagatgctcaacaaatattagttacacattttatttgtaaaataaagaattctatttttattgaaaaccaaggagataaagtggcatgttctagcattggggaaaaagagaggtgaagataattaataatcctgttacctcttgcattttttcccacccagcccaactcacagaaggaaagaacatgtgagggggaaaggtggtcaacactagaccaggatccagacaatgggagagaggagaggtctatgtttgctcaacatatatccccagcatctagtataattcctgacycaaagcaggcgctctgtaaatctttgttgaatgtattatctgcaaattggaatctgcattaagcaactatataaagaaagatgtgtagttctggaattgaataatgcacatatccagtggccaaaacccaccaagatggttgaaggaactaaggatgtttaagcttgggaaagaacccacagagatgtgatttctgccatcaaatatttaaagcatcatcttgagaacaactgaattgacttgatcc

SEQ ID NO: 549431 - DNA, 972 bp, Homo sapiens
gagggacggctggaaaataggacagatgagaagaattattgaactgcaccagaccaaggaggattcatcaagagaataatgattatttatgaggcaactctcaagtactcccacttttcacctactagtagtatataaatttaaggtaagtcacctcactgtggacatagaaaaacaaagaacattttattgtcaattggacatacttgaatacgtattcatcataatttactctaagttcatatctcacatacatttttaaggaaaaaatgtagatgtttataaatttatttttataaataattttgcttttctcattacaggtagtagatattaattgtaaaattaaaaacatgtatatttacaataataaaacttagttattaagctcaataatattttagagccattacatctagtctttttataatatattcacagaggtatgcatatacatgcatccacacatgaacatatattatttaaatgttattaaaatgttataacttgctgtttagggtctaacatgatatttttagtatttcccaggtcattggaaattctaagtaacattgtgatgaatatatacaagaccataatataatatcacgggttctttacccattcttctactgttggatatctaacttgcttctcaattttctattgtcaacactgttgttgttacaattttggtatattaattattttatgtttctgattatttatttaaagtattttcctccaaatwactgatgtcgtttttaaggtttctgactgatctcagctttgcggttatgatacgaagctcaggtattaagctgatttgctcacattttcagtatgcttccaccaaatcagcttaggctactgtggccaaaagacctaggtttcagccacaggtatggttaaatgcatgacttttagcaattgttttttgtaattgttttagattgataattctttctccct

SEQ ID NO: 549432 - DNA, 647 bp, Homo sapiens
gtttgatgtgttgccaatcaggtgacatgttaaaactgtggaaaaagggatattgggatttaggcaagagacttcttaaatgtaatggcccatgggatctaagctggttaaggaagaaagtaaccagcaatgtctgggtggtttaagaacagaggagtatgttacagagcaaattagaaaaatattacgctgaagagaatgtgttattttagttcaatatttcaggagttggggaatttcaggagataacaaggtctagggtgtggctgttaagtggtgactgaagtagaatggaggtgaaaataattcaaratggaaagctaaaacaaccgagaggcttggaagctgaagaattccttcatataacaggctccctgtttttaaatgtgtatgaacacgatagaaccaagacataacgtgtaacaaactgagttgaatattcaacaaattgagccttattaatcttctttacaggagggatatagctctgtctttttcatattcaagtttgttattgaaaacatatcagaaaacaatataattaattactataaggtttcttaacattgtgtgctttttcacattctttcacttcaacattcagggatgtggacatttatagctagaagtgaatgattccaagaatc

SEQ ID NO: 549433 - DNA, 647 bp, Homo sapiens
gtttgatgtgttgccaatcaggtgacatgttaaaactgtggaaaaagggatattgggatttaggcaagagacttcttaaatgtaatggcccatgggatctaagctggttaaggaagaaagtaaccagcaatgtctgggtggtttaagaacagaggagtatgttacagagcaaattagaaaaatattacgctgaagagaatgtgttattttagttcaatatttcaggagttggggaatttcaggagataacaaggtctagggtgtggctgttaagtggtgactgaagtagaatggaggtgaaaataattcaagatggaaagctaaaacaaccgagaggcttggaagctgaagaattccttcatataacaggctccctgtttttaaatgtgtatgaacacgatagaaccaagacataacgtgtaacaaactgagttgaatattcaacaaattgagccttattaatcttctttacaggagggatatagctctgtctttttcatattcaagtttgttattgaaaacatatcagaaaacaatataattaattactataaggtttcttaacattgtgtgctttttcacattctttcacttcaacattcagrgatgtggacatttatagctagaagtgaatgattccaagaatc

SEQ ID NO: 549434 - DNA, 647 bp, Homo sapiens
gtttgatgtgttgccaatcaggtgacatgttaaaactgtggaaaaagggatattgggatttaggcaagagacttcttaaatgtaatggcccatgggatctaagctggttaaggaagaaagtaaccagcaatgtctgggtggtttaagaacagaggagtatgttacagagcaaattagaaaaatattacgctgaagagaatgtgttattttagttcaatatttcaggagttggggaatttcaggagataacaaggtctagggtgtggctgttaagtggtgactgaagtagaatggaggtgaaaataattcaagatggaaagctaaaacaaccgagaggcttggaagctgaagaattccttcatataacaggctccctgtttttaaatgtgtatgaacacgatagaaccaagacataacgtgtaacaaactgagttgaatattcaacaaattgagccttattaatcttctttacaggagggatatagctctgtctttttcatattcaagtttgttattgaaaacatatcagaaaacaatataattaattactataaggtttcttaacattgtgtgctttttcacattctttcacttcaacattcagggatrtggacatttatagctagaagtgaatgattccaagaatc

SEQ ID NO: 549435 - DNA, 1840 bp, Homo sapiens
aggaggattgctcaaacccaggaggcggaggttgcactgacccagatcagccactgcactccagcctgggtgacagagcgagatcctgactccaaaaaacaaagaatacaatgagcatattatttgctaacaactaacattgtttaaagataaatgtatcccctgtctctcagctctttgggcactgtaaatattttgtaatttagtctttaagcccctcccccctgcccacttccacccgcccagctcctctggggccaggcctcttcctttctgctctcacaccacccctctaaactggtctgtcagtctgtccggttgtcagggctgactggctgacttgataaacttgttccaccaaaggcgtttccccctgggcaattcgtttctttcccaactctctcccsgcagaccctggaggatggtttgtgtcttaacaggagcattccaaggacaaaatctaatgacgcagtggtggcaggagttttgttcatggacacaggtcagtggggaagagcattttaatgtagggcctttcccagcagtcaccaaatcttcatagtaatccccacgagttgagcacctccatgtgccagacactatgatatgcacttacagtggcacagcctcacaaacaccctaaaagatggacattagcatctgcattttgcaaataggagcagagggtcacagagcttaaacaatgttcttcctcaaggcagcaaaacaaataagaaccagccctgaggtccaaacccggagtcttttctttcaacccgtgcaacctccctacccctccttatatcccattggcctctcaccgtgttctacgagaccacagcccttcgagagtagacatgcatgtccccagccagcccagaaggagatcacagtagctacttccaggtggcggaggaagggccctgtcagccacaggccttctgcagtctccctccttgtctctcatggacagtccctggaggaactgctgcgtccatggccacatcccaatgtcccatctgcagttaccaagagaagacttgctaagatgttcagggaagaaaggacatcattcagtgctagaacagattcgccaacaccacagctcttctcctgcctctgtgtctcaacattcagactgaaactctgagttctgcagcccaggaagagactccaggaaactgggggccactgtgcctgcaggctcgttttcagtcccacccctcagccctcccaagaaaatccatagagagtatccttcagcatttgtgacaggggaaccaggggaccctcagaatcaaaaacccgtggccaggctgaaacctcacacttcactttccctagaaatacctacattgaaagaagttttgcaaatcaaatcataagtatgttggaattaatgatatactattaaatccactgtggtggcaaagtcttggaaaatgaactttgtgtaatttttaaaaacacacttcaactcatctctttcttttctttcttttttttcttttccttttttttttttttttttaggcactggcacgatctcatctcactgcagcctccaccaccagggttcaagcaattctcctgcctcagcctccctagtagctgggattataggcgtgcaccaccatgcccagctaatttttgtatttttagtagagatggggtttcgccacgttggccaggctggtcttgaactcctgacctgaggttatctgcccgccttggcctctcaaagtgcttggattacaggcgtgagccaccacaccgggccgtcacctcattctctttactttctataccatcctctgaatgtttgaaggtgaggcacatt

SEQ ID NO: 549436 - DNA, 1840 bp, Homo sapiens
aggaggattgctcaaacccaggaggcggaggttgcactgacccagatcagccactgcactccagcctgggtgacagagcgagatcctgactccaaaaaacaaagaatacaatgagcatattatttgctaacaactaacattgtttaaagataaatgtatcccctgtctctcagctctttgggcactgtaaatattttgtaatttagtctttaagcccctcccccctgcccacttccacccgcccagctcctctggggccaggcctcttcctttctgctctcacaccacccctctaaactggtctgtcagtctgtccggttgtcagggctgactggctgacttgataaacttgttccaccaaaggcgtttccccctgggcaattcgtttctttcccaactctctccccgcagaccctggaggatggtttgtgtcttaacaggagcattccaaggacaaaatctaatgacgcagtggtggcaggagttttgttcatggacacaggtcagtggggaagagcattttaatgtagggcctttcccagcagtcaccaaatcttcatagtaatccccacgagttgagcacctccatgtgccagacactatgatatgcacttacagtggcacagcctcacaaacaccctaaaagatggacattagcatctgcattttgcaaataggagcagagggtcacagagcttaaacaatgttcttcctcaaggcagcaaaacaaataagaaccagccctgaggtccaaacccggagtcttttctttcaacccgtgcaacctccctacccctccttatatcccattggcctctcaccgtgttctacgagaccacagcccttcgagagtagacatgcatgtccccagccagcccagaaggagatcacagtagctacttccaggtggcggaggaagggccctgtcagccacaggccttctgcagtctccctccttgtctctcatggacagtccctggaggaactgctgcgtccatggccacatcccaatgtcccatctgcagttaccaagagaagacttgctaagatgttcagggaagaaaggacatcattcagtgctagaacagattcgccaacaccacagctcttctcctgcctctgtgtctcaacattcagactgaaactctgagttctgcagcccaggaagagactccaggaaactgggggccactgtgcctgcaggctcgttttcagtcccacccctcagccctcccaagaaaatccatagagagtatccttcagcatttgtgacaggggaaccaggggaccctcagaatcaaaaacccgtggccaggctgaaacctcacacttcactttccctagaaatacctacattgaaagaagttttgcaaatcaaatcataagtatgttggaattaatgatatactattaaatccactgtggtggcaaagtcttggaaaatgaactttgtgtaatttttaaaaacacacttcaactcatctctttcttttctttcttttttttcttttccttttttttttttttttttaggcactggcacgatctcatctcactgcagcctccaccaccagggttcaagcaattctcctgcctcagcctccctagtagctgggattataggcgtgcaccaccatgcccagctaatttttgtatttttagtagagatggggtttcgccacrttggccaggctggtcttgaactcctgacctgaggttatctgcccgccttggcctctcaaagtgcttggattacaggcgtgagccaccacaccgggccgtcacctcattctctttactttctataccatcctctgaatgtttgaaggtgaggcacatt

SEQ ID NO: 549437 - DNA, 2780 bp, Homo sapiens
caaatgaattctctccagtaaaagacattattccaaaggttacagtttactgccgggtaaggcattagtcagctttgtttctaatttagaaaatttattctaacatttgtttatttaattatctataaatacccttaaaaccagctttattgtagttttcccctgactaataaaattattaaatctttgacatgtgctcgttctacgtttgcaaaaaaagttatgattttagtttgcaaaaaaagttatgaaaattacacttttacactccagacatgggtaaaccatttacaagaattcttctgacatagtatttttcacagtcaattaagtctggggagaagtgcttacttggtgccaactactgctccaaaataactagcagcatgatgccaacgaaagggcrtggactgaagctaaatgggtctatttcctttttttttttttttttttagacaaggtcatgctctgtctcccaggctggagtgcagtggtgtgatcatagcacactgcgcacactgcagcctctgactcctgggctcaagggatcctcccgcctcagcctctgagtagctgggataataggtgcaagccaccatgcccagctgtcctccaaagtctatgtggtacttccttaaatttttagctggtactcacccctcccctgaacactgatgcagaaagttgctcaaatcagtctcacgtgaaagtaaaacattttctgatggctggaggaccacagcacaggggcaaatttcctgatagaagtcacctgcctacttgagtcccaaggactaaaatgtcactcaacttcttcaaggctgatttccatcagtgaattgaatgttccagtgccagccactgcctcagttgaaggtaagcttgccacccatgtactgtgactcaaatatcagcctctgtaattaagagttctccagggtctcctttgttttttgctttttgatcttttttcttcttgtggagacagcatctccatatgttgcccaagctggtctcagactcctgggcccaagccatcctccctcctctgcctttctgagtgctgggattacaggcatgagccaccatacctggcagagtctgctttgaacttgagtccacataccaattttgttctctctgcatatgtttcctaccactacggatacttaatgccttctccttaagttacaggttaagatcaacatttactcagtttgactcttccagagaaataatttgcatttgtaactacaaatatttatccatggtcacaattagaatctcccctatctaaaggtatattttttttctgagagaagattttaaaatatgaaattgatttaaatgtaagaaggtattattactattaattaagaacctgggccaggtgtggtgactcacacctgtaatcccagcactttgggaggctgaggcaggaggatcacgaggtcaggagttcaagacaagcctggtcaagatggtgaaaccctctctctactaaaaatacaaaaattagctgggcttggtggcagccacctatagttccagctactcaggaggctgaggcagagaattgcttgaagccggggggtggaggttgcaatgagctgagatcaagccactgcactccagcctgggtgacagagtgagactccatctcaaaaaactaatttgtatgagaggtcagttaggtatgcatgcaagtcacctaagaaagcaggcaaagataagccttcatattcttgagacttttcaaatgtctcatctgacactgcagaattctttctggcatttttgcaatttcaaccatttagcattagtatgagcgaagtttgaccagcaggccatatgctaccaaccaaagcttgcaatgcagcttagaatttaatttcaggaatcctttaatcctaataatggagaaattgagattcacttaggtaaactcagcctagacctaatttgacccttgacagtcaatgatttctaattaggtcttgcagacagggaaggaccaatcaagtgcagcaggctgaactgctgtgtgtacagtttatggcaaggagtaattggaaaatccagtctgagcctgtacttgggcctttataaggggtcatggttcaagctgaagccgacagtttctctcagagcagcagctatgagtcttgcacctccctggttgagaatgaaacacagttcccaagaacaattcgtaatcccattacattttaaaaatataattaaagggaatcttggtgggtgggtggcaagatgacagagtaggaacagctccggtctgcagttcccagtgagatcaacgaataaggtgggtgatttctgcatttccaactgaggtacccggctcatctcattgggagtggttatacagtgggtgcagcccacggagggtgagccaaagcatggtggggcatcacctcacccgggaagcacaaggggtcagggaactccctcccttagccaagggaagccatgagggactgtgccgtgaggaatggtgcactttggccgagacactacacttttcccacagtgttcacaatccgcagaccaggagattccctcaggtgcctacgccaccagggccctgggtttcaagcacaaaactgggcggccatttgggcagacaccaagctagctgcaggaggtttttttttttttttttttcataccccagtggagcctggaatgccggcaagacagagccattcactcccctggaaaggaggctgaagccagggagcccagtggtctagctcagc

SEQ ID NO: 549438 - DNA, 1026 bp, Homo sapiens
cagaacacaaacctgggctttaaaattcacctgtagctttctgtggttgctgaaatgacactccagttctttctcccctcactgagtaactcaggtggcacctatgaaagggtgttcagaaacatggcttgttctgttgacttcctgccatggtttattagctggacatgggaaggcacatttaggcaccagtcttccgtaaaatgtttatggtctccagaatgtccacctgaatttctattttaaaaaagagttgaaaagaaatccagctgacataaggaaggcagaaatgcaggcatgtgcaaatcctattacccgcaacaggtcgacaagtttattttaataaaagtatttctgggtaccttttaatgactcacaattaaatgcaatttttgcaactgcaagtaatttaatgtagagtgatgatggtttcctcaattcttaatctagaaaactaaatgaaacctacacaccccctccaggttctaatcctatactttaaaaataasgtatcggcagaacgtaaatacctgtttgttttgcatgtaacaaacacactatttgctgaagtcgggaggcagcctagaccaactttctttttgggttaatgcccagcagctcaaggttctccgccggtatctgaggagatgcttgaggatcccagggcctttagaatcatctccaaaatcaaagggtattactataatgagcttggcttctgttaaacagtcacgttgccgttgatgaaccacatggctctataaaagccagcttgattgacctgaactaattggtctgtgatgggggtagaagtttattccacagtgagagggaaactaaaagcaaatgggtccaggagcaactcctgactaataaaggctcgctgcaccaggaagatttccttacccacaaatgactgttccacttgttcactaatgcttggaaaagcttttatggagaaggtactgcgtcctgttttctatatttagaagaaataaaatcccttaaaaaaaaaaaaccctacct

SEQ ID NO: 549439 - DNA, 1026 bp, Homo sapiens
cagaacacaaacctgggctttaaaattcacctgtagctttctgtggttgctgaaatgacactccagttctttctcccctcactgagtaactcaggtggcacctatgaaagggtgttcagaaacatggcttgttctgttgacttcctgccatggtttattagctggacatgggaaggcacatttaggcaccagtcttccgtaaaatgtttatggtctccagaatgtccacctgaatttctattttaaaaaagagttgaaaagaaatccagctgacataaggaaggcagaaatgcaggcatgtgcaaatcctattacccgcaacaggtcgacaagtttattttaataaaagtatttctgggtaccttttaatgactcacaattaaatgcaatttttgcaactgcaagtaatttaatgtagagtgatgatggtttcctcaattcttaatctagaaaactaaatgaaacctacacaccccctccaggttctaatcctatactttaaaaataaggtatcggcagaacgtaaatacctgtttgttttgcatgtaacaaacacactatttgctgaagtcgggaggcagcctagaccaactttctttttgggttaatgcccagcagctcaaggttctccgccggtatctgaggagatgcttgaggatcccagggcctttagaatcatctccaaaatcaaagggtattactataatgagcttggcttctgttaaacagtcacgttgccgttgatgaaccasatggctctataaaagccagcttgattgacctgaactaattggtctgtgatgggggtagaagtttattccacagtgagagggaaactaaaagcaaatgggtccaggagcaactcctgactaataaaggctcgctgcaccaggaagatttccttacccacaaatgactgttccacttgttcactaatgcttggaaaagcttttatggagaaggtactgcgtcctgttttctatatttagaagaaataaaatcccttaaaaaaaaaaaaccctacct

SEQ ID NO: 549440 - DNA, 845 bp, Homo sapiens
taagtctttgaatcttgagcgttgatccaaggtcaaaaggaacaacggctggggatttgttgttgttgttatggtggttgtagcaatgtcttaatcagccttttcctgtcatcagatgcccgtggatttattcattcagcagctatccccggagctccacttggagccaggcaccaggcagggggctcaggtcccggaagtgcccacaacaggcagctccctgctcccctcattccagtccttccagagcctccctgagacctgcctctcctgagcttactcctccagcctcctgttggttcagagagcccctgtgctccttctagtacattcccctctgcttatgtcagccagggctgacttggctgctgacgatgagggaggcctggctaattccaggccatggtgggcttgaaccttacgcttctctgtctcccatgcctgggctcttcctgccatcatcctccctcctggtacccacagtcatctctatgcctgagccctgtagacctcaaggctgaccttggtgggaccaaccaagtcacaggatttrtctgagaagaaccggggtatgaagagttttgtgggtttgagatgccataaaactgtccaacaacaatgacttccaaactacctccctctgagctgtggtgtctgcagagatccctcatgggctgtcaggatttgagagtgcgttggggcagttgagtacaagggctcactcccttccctacccccacacctattttaaccagagtggctttacctagcacagtattcaagaggcatgccctctgggaccacgctgcctgggtttggatcccatctccaccacgcatgagcta

SEQ ID NO: 549441 - DNA, 537 bp, Homo sapiens
cggtctctactaaaaatacaaaaattagccaggcgtggtggcaggtgcctgtaatcccagctacttgggaggctgaggcaggataatcgcttgatcccagaaggctggaagttacagtgaaccaagatggggccactgcactccaccctgggcgatggagtgagactccatctcaaaaaaaaaaaaaaaaaaaagcaattmaaagaaaaagaaacaatgaaacttgaagatctgagttttctctctgtccccattagttcatcacgattacagccttttgattttcatagttaattgttcttcggcattctatttcagggttttgaaatcaaattgctcgatcttttctctctcctgtgtgattaggttatcttttataatacagctgcaataatcctttcaagaacacagcgctttagctcagcagtgtcaaagacaatatcctaagtggcctctgaaattcagtcttgtaggagtgagaaaacaccaccagcccctattatgaacccagaagtgccaccacacatcacccatcat

SEQ ID NO: 549442 - DNA, 419 bp, Homo sapiens
gaccgaaaagtgttcccacaaataaacccacctcattctagtatagtcaaagggacctctatttaaagttaatgccacgcaaggggccgtggacggtgttgtcttacactttattccctgacacaaactaatcctgggattttaaaccttcctagcttttaggtgcactgaaggcggtcatgaacacaagtaacaagctttcaaaacatcatctgtgaatacgacgtgttgggargcaggcaggataagccactgggtgaccgactaaggctgcaaaatgctgtttgaatttaagtccctgacttgtaggagttaagtctcactccttataccgcgatgacgtaatcttccacactacatttatcttggacttaaaggggaggaaaaacaaacgaacaaagaaaattcccccccgataa

SEQ ID NO: 549443 - DNA, 691 bp, Homo sapiens
tgcctgtaatcccagcactttgggaggctgaggtgggcagatcacaaagtcaagagatcgagaccatcttgcctaacatggtgaaaccccgyctctactaaaaatacaaaaaattagctgagcgtggtggcgggcgcctgtggtcccagctacgcaggaggctgaggcaggagaatggtgtgaacccgggaggcagagcttgcagtgagccaagattgcgccactgcactccagcctgggtgacagagcgagactccctctcacaaaaaaaaaaaaaaaaaaaattatcaaagaagaaaaaggtcaggcaaaagttggaaagataatttaactaactctataaagcactgtagtcctggatttatatgatcagtgggtatccgagagtctttttctagttatattttatttcatattctagagacagttatatggaggcatatacttgggaattctcaaaagtcttttatcctctagaatatcagatgttttcagtagaattgacaagcgttggtctataattttcaagtcaatacttttcttatgtttttgaagatggtaacaacaaatttgaagttatctaatgtaggttctataaagcaattacagaataaagagcttggcttgagatagttaatctagtatcctggtccagtctttcaaagtacctgccactgatcagagcatatct

SEQ ID NO: 549444 - DNA, 564 bp, Homo sapiens
tgaactcatataagtaacaattgcaggtaaaaattaggatttagactttgcatttgtaggctctgttttcttatatttattaagtttaatatatttgatactargtagtaaaatgtttactaccgaaaaaaaaaacttttgccaaaatgtgtcaaattttttattttatagcaaatactcttctagttaacatatattttatcttcagtgcccagttatttcagcttcattaagagaaaaaaaaaagggaatcaaagagtaatatagtgcctttttgattttaagactagctcttattacccttggcaatagattatagaaatcatacaagcagtatatacaatttcaaagtcacacacaaaagtatattcttgaattatttaaaaagtttcaactcacaaatattcactgtagaaacatacaaaacatcgagaatttaaaggacatatgaaaacaaccagaaaagagttaaagcatggattacgtttagttttacaatgaaaagcaacagagactttgaaattaaagatttactatggattgtgaaagctgaatgctaaatct

SEQ ID NO: 549445 - DNA, 599 bp, Homo sapiens
aaggtactgtcaatagctgtgtatgtaagacagatcaatgtttcattaatcctttttgcctcactgcttcttgcaatcattctctaattcacatctctgtatgtccatactcttatgcctatttataaaaatggattcttcaatgagaatgtccataatcacactattcataagtaatcatttatgattgatttgtaccatgctttataactttcttgatattttatagtagttgtacgcatatacatatgtgtgtgtatctgttctctgacttagagttgctgtctcataaaaagcaaagagaacataggtgttcaacaatgttgagttataagcaattaaaaacctaatgttaaaaaaagttgctcaatatcatattactattctatcgagtcttacttcctccaaagctaactgataagtacattacattcatccatgattagattsaattactcaaatgccttctatctctttattgtgattctggctttatttaaactgaaatgtcaatgttttctaggtatttttaccatttttgcagatattgggataatcactttcactaacggtcctccagaatttttagacatttctcc

SEQ ID NO: 549446 - DNA, 609 bp, Homo sapiens
cccatccagcagccarcagagggaaacaaggagccctctgatggacttaagaacaggagaatcccaaaagagccagcaggtattcacgaggaagcaaggagggacaactggagacagcagcagaagctgggagggtctcgcccagtccgggagcaggtgagagtcagcaaggactaagggactgcagcggtagagccttgagaaccctcaacactgacccacttggcttcccttccaggacaggatcacatagcactgagcatggaatcaaaatggagcaggatctggacaatcaaaaggaaggaaggagaaggccaggcgtggtggctcatgcctgtaatctcaacactttgagaggccgaggcaggcagatcacttgaggtcaggagttcaagaccagcgtggccaatgtggtgaaaccctgtctgtattaaaaaaaacaaaaattagccaggtgtggtgacaggtgcctgtaatcccagatacttgggaggctaaggcaagagaatcgcttgaaccagggaggcagaggttgcagtgggctgagattttgccattgcattccaacctgggtgacagaacgagtctctgacttaaaaaaaaaaaaaa

SEQ ID NO: 549447 - DNA, 609 bp, Homo sapiens
cccatccagcagccaacagagggaaacaaggagccctctgatggacttaagaacaggagaatcccaaaagagccagcaggtattcacgaggaagcaaggagggacaactggagacagcagcagaagctgggagggtctcgcccagtccgggagcaggtgagagtcagcaaggactaagggactgcagcggtagagccttgagaaccctcaacactgacccacttggcttcccttccaggacaggatcacatagcactgagcatggaatcaaaatggagcaggatctggacaatcaaaaggaaggaaggagaaggccrggcgtggtggctcatgcctgtaatctcaacactttgagaggccgaggcaggcagatcacttgaggtcaggagttcaagaccagcgtggccaatgtggtgaaaccctgtctgtattaaaaaaaacaaaaattagccaggtgtggtgacaggtgcctgtaatcccagatacttgggaggctaaggcaagagaatcgcttgaaccagggaggcagaggttgcagtgggctgagattttgccattgcattccaacctgggtgacagaacgagtctctgacttaaaaaaaaaaaaaa

SEQ ID NO: 549448 - DNA, 1524 bp, Homo sapiens
cattttgtggctccagagtgggtgctaattacgtggtctaccccatctttctttctattgagcaatgccactctcctggtccatggggattctggtggaggttttagccaaagaccccgctcttctggcccagactggccagtaaaaaacccatgttcttggacacagaggttggtccgggatgagctgatcagaatcctcttttgattatcctgttgagtttggaggaggagacactcttgagattgcaaatagcaaagaccaaaaagctacagttttcatcctggcatccctcctgtttttgtatggctctgccttagtcctttggtcctgttttgtaaaatttcctatcttctcactggttctaatatagagatgatatttttttttttctcaagacccaagcctgattgattggcagagactgctgctggagtaatgtgttaagaaagagaccgggtcatgcctagggtcaaggtaatatgtagggtcagcaggaagagattgtgatctattagttatgtcttacatgggcacaggagtggttgtaaacaaaccaggtgtttgccatcctttatctagtgacatatcctatttcttctcagtgattggtatgagtcctggatttgggcaacamcctatttctatcacttgtcaaatttgtcaccaggaaagccacagtggccacctcatgaaccaggtcaaccagacttttgcccttcagactttaacattaattctttgggtcctcgaaggctgaagtcagtcagaagaataaatgacgctacattctgacaaattcaaggagtgtgcagcataggctgggaggcccaagattgtaggcccagggcagtccatgcagcaaattcacttacattagctttccaattcaatgttcaattgattacttttgtgtaatcatggtccactggggattttgtatgatcatttgtgaccagagaccatgcatgcgttttttttgctattgcatctcctatgcctggtacacagtaagtgctcaataatgtgttgaatgagggaataaataaatcagcaaattaatgtacaaactctctagctcatatcagaagtcaaaactgattcagaattgatatttatggaatactatttgagctgaagtagaaggatctagaaaggatacattcagtttttatatttaggatgtagaaccaataggatttggtggtaaaaaaagataatgctaggagaaagggaagagggcaagaagtctcccagatttatgactggagcaatgagtggctggtagtggcattcattgagatgctcttccaaagcacctgtgttggccttgtcataagaacttctcatactctatttttattggctgagtatttctcttcctttcaagccaggtagtacattgagggaggcactgtgcctatcttgtatagaattgcattcccagaacctagttcagtgctgggacatagcaggtcagtaataaatactgagtaccacacgtgtgttggtaccaaatagcca

SEQ ID NO: 549449 - DNA, 1524 bp, Homo sapiens
cattttgtggctccagagtgggtgctaattacgtggtctaccccatctttctttctattgagcaatgccactctcctggtccatggggattctggtggaggttttagccaaagaccccgctcttctggcccagactggccagtaaaaaacccatgttcttggacacagaggttggtccgggatgagctgatcagaatcctcttttgattatcctgttgagtttggaggaggagacactcttgagattgcaaatagcaaagaccaaaaagctacagttttcatcctggcatccctcctgtttttgtatggctctgccttagtcctttggtcctgttttgtaaaatttcctatcttctcactggttctaatatagagatgatatttttttttttctcaagacccaagcctgattgattggcagagactgctgctggagtaatgtgttaagaaagagaccgggtcatgcctagggtcaaggtaatatgtagggtcagcaggaagagattgtgatctattagttatgtcttacatgggcacaggagtggttgtaaacaaaccaggtgtttgccatcctttatctagtgacatatcctatttcttctcagtgattggtatgagtcctggatttgggcaacaacctatttctatcacttgtcaaatttgtcaccaggaaagccacagtggccacctcatgaaccaggtcaaccagacttttgcccttcagactttaacattaattctttgggtcctcgaaggctgaagtcagtcagaagaataaatgacgctacattctgacaaattcaaggagtgtgcagcataggctgggaggcccaagattgtaggcccagggcagtccatgcagcaaattcacttacattagctttccaattcaatgttcaattgattacttttgtgtaatcatggtccactggggattttgtatgatcatttgtgaccagagaccatgcrtgcgttttttttgctattgcatctcctatgcctggtacacagtaagtgctcaataatgtgttgaatgagggaataaataaatcagcaaattaatgtacaaactctctagctcatatcagaagtcaaaactgattcagaattgatatttatggaatactatttgagctgaagtagaaggatctagaaaggatacattcagtttttatatttaggatgtagaaccaataggatttggtggtaaaaaaagataatgctaggagaaagggaagagggcaagaagtctcccagatttatgactggagcaatgagtggctggtagtggcattcattgagatgctcttccaaagcacctgtgttggccttgtcataagaacttctcatactctatttttattggctgagtatttctcttcctttcaagccaggtagtacattgagggaggcactgtgcctatcttgtatagaattgcattcccagaacctagttcagtgctgggacatagcaggtcagtaataaatactgagtaccacacgtgtgttggtaccaaatagcca

SEQ ID NO: 549450 - DNA, 1524 bp, Homo sapiens
cattttgtggctccagagtgggtgctaattacgtggtctaccccatctttctttctattgagcaatgccactctcctggtccatggggattctggtggaggttttagccaaagaccccgctcttctggcccagactggccagtaaaaaacccatgttcttggacacagaggttggtccgggatgagctgatcagaatcctcttttgattatcctgttgagtttggaggaggagacactcttgagattgcaaatagcaaagaccaaaaagctacagttttcatcctggcatccctcctgtttttgtatggctctgccttagtcctttggtcctgttttgtaaaatttcctatcttctcactggttctaatatagagatgatatttttttttttctcaagacccaagcctgattgattggcagagactgctgctggagtaatgtgttaagaaagagaccgggtcatgcctagggtcaaggtaatatgtagggtcagcaggaagagattgtgatctattagttatgtcttacatgggcacaggagtggttgtaaacaaaccaggtgtttgccatcctttatctagtgacatatcctatttcttctcagtgattggtatgagtcctggatttgggcaacaacctatttctatcacttgtcaaatttgtcaccaggaaagccacagtggccacctcatgaaccaggtcaaccagacttttgcccttcagactttaacattaattctttgggtcctcgaaggctgaagtcagtcagaagaataaatgacgctacattctgacaaattcaaggagtgtgcagcataggctgggaggcccaagattgtaggcccagggcagtccatgcagcaaattcacttacattagctttccaattcaatgttcaattgattacttttgtgtaatcatggtccactggggattttgtatgatcatttgtgaccagagaccatgcatgcgttttttttgctattgcatctcctatgcctggtacacagtaagtgctcaataatgtgttgaatgagggaataaataaatcagcaaattaatgtacaaactctctagctcatatcagaagtcaaaactgattcagaattgatatttatggaatactatttgagctgaagtagaaggatctagaaaggatacattcagtttttatatttaggatgtagaaccrataggatttggtggtaaaaaaagataatgctaggagaaagggaagagggcaagaagtctcccagatttatgactggagcaatgagtggctggtagtggcattcattgagatgctcttccaaagcacctgtgttggccttgtcataagaacttctcatactctatttttattggctgagtatttctcttcctttcaagccaggtagtacattgagggaggcactgtgcctatcttgtatagaattgcattcccagaacctagttcagtgctgggacatagcaggtcagtaataaatactgagtaccacacgtgtgttggtaccaaatagcca

SEQ ID NO: 549451 - DNA, 537 bp, Homo sapiens
gtaagtaaagattgaattgcctctaagataggttacaacttcatcatctgtcacctagattggtttaaaaaacaagccttttaatgggattccctttctccagttcacccttcttcaaacctatcctctatacagttatcagacagatacagttaaaaagcaaaactrcttcttccacttgtcttcctgaaattattcaatggtttttcataaatttcaatccaaacagcctaatcatgtctccaaagcctcctgtgaaccactgatggttttcccttatctccccagttcactatttattctcctgcaacaataaactatctataggtcatcctgtacaccatgttgtttcttatcttgatgctgggatgcactgctttgcttctttacctggctaatttctatttttcatttaagtgttggcattaaacatttaagttccctctcctccaggactttctccttaatcactacccctccattaaaagaagggttagtatcaacatctccagtgtggtatgtagtttgaaagggata

SEQ ID NO: 549452 - DNA, 2081 bp, Homo sapiens
ccctctgccaggaaagcttgttccccactcggtgcagaagccgcttcgagaaagggaggctttgtggttctcagagcatgggtagccccccgcaaaggagtctggacccaccttccacacacatgcagtcatcgaagcatttgttgttgaggcctcggttgtggggtgtgcagagatgctcccgcaggtcgcagcaagtccctgccaacacagagagcacacgcagtcagccaagctgagccgcccctccccgcagccctgcactcggtcccactggacaagagatccatcatctctgtggcaggccgcgccctggcggggtgggccatctggtgtgcaaggctcctgagtggaacsacagggagatgtcatggccgaggcccccaagggtcggtggcagagaccccagctgcctcagatggggtactgattgaccatgggaagagcgaaggtggtgtgaggtctcctcccagacagagccagtagaacagctgggggctgccaggtgtggagtcagctcagagctgggaggggcctcaggatccccaaaaccaatgtcctcttttgacagatggggaaactgaagtcctgggcacctgccatggagccggctcccagagcgactgtccagtcggcccaaatgcgggccttttctttgtgcccagggtgaaaacaatggtttgggaatgaagcagcctgtcagggagctggtggtttgccttatacaatgctaattgctggtttggttgctgttttgtagaatattctggtcactgatctaacaatcgtggtgccgtggaggtgtgccgctccgatctctcttggggaaagcacttgctggcggcctccagctggtacagcttcagggccaccttggcccatggcaggctgttcccagcagcccctgccaatgacgggcatgggggttctggggcccagccatttctgctcagcacgggcctcgtctaacaggccacctctgtactggagcgcccatccggtgcatgatgtctgaagcttcctccatgcttcctccacctttcgtcattcacaagtgtttcccacccctagcccaccccaaaataaatctgttgtgctttttgttttgttttgttgagacagggtcttgctctgtcacccaagctggagtacagtggtgcgatcatatctcgctgcagccttgacccccgaggctcaggtgatcctcctgccttagcctcctgaatacctggaaccacaggcgcacaccaccaagcctggttggttaattttttattttcttattttttttaattttgagacagagtctcgctctgtcagagtgcagtcgtgcgatctcgggtcactgcaacctccacctcccaggttcaagcaattctttgcctcagcctcctgagtagctaggattacaggcacctgccaccatgcccggctaatttttgtatttttagtagagatggggtttcatggccaggctggtcttgaactcctgaccttgtgatccacccatctcggcctcccaaagggctgggattataggcgtgagccaccgcacccagccaagcctggttatttttttaaattattactatttttggagatggagtcttcccgtgttgcccaggctggtcctgaactcctgggctcacgggatcctcccgcctcggcctcccatagtgctgggattacaggtgtgagccactgcacccggtctcacacttctaacttacctcagtatctgcttcctggaaggtccgacggacccccaagggcccccagggtttaggacattagttacaacgtccggcttcttgtttttagactgtctccatggagacggctgccgaacagtgaggatgtcaccaaaagcatctccagaatgcctggcagtgttgcgatgggacaaggacagcattaagccctgcctggtgtcaggaggaagagggcaagagaggatcatcccgatttaaggcagcatggggctgtggtgaagaggctttccagccaggccaggttggagccacttcttaaccgtgtgaccttgggcaagacagcctctctggggctcaatcacctggctt

SEQ ID NO: 549453 - DNA, 2081 bp, Homo sapiens
ccctctgccaggaaagcttgttccccactcggtgcagaagccgcttcgagaaagggaggctttgtggttctcagagcatgggtagccccccgcaaaggagtctggacccaccttccacacacatgcagtcatcgaagcatttgttgttgaggcctcggttgtggggtgtgcagagatgctcccgcaggtcgcagcaagtccctgccaacacagagagcacacgcagtcagccaagctgagccgcccctccccgcagccctgcactcggtcccactggacaagagatccatcatctctgtggcaggccgcgccctggcggggtgggccatctggtgtgcaaggctcctgagtggaaccacagrgagatgtcatggccgaggcccccaagggtcggtggcagagaccccagctgcctcagatggggtactgattgaccatgggaagagcgaaggtggtgtgaggtctcctcccagacagagccagtagaacagctgggggctgccaggtgtggagtcagctcagagctgggaggggcctcaggatccccaaaaccaatgtcctcttttgacagatggggaaactgaagtcctgggcacctgccatggagccggctcccagagcgactgtccagtcggcccaaatgcgggccttttctttgtgcccagggtgaaaacaatggtttgggaatgaagcagcctgtcagggagctggtggtttgccttatacaatgctaattgctggtttggttgctgttttgtagaatattctggtcactgatctaacaatcgtggtgccgtggaggtgtgccgctccgatctctcttggggaaagcacttgctggcggcctccagctggtacagcttcagggccaccttggcccatggcaggctgttcccagcagcccctgccaatgacgggcatgggggttctggggcccagccatttctgctcagcacgggcctcgtctaacaggccacctctgtactggagcgcccatccggtgcatgatgtctgaagcttcctccatgcttcctccacctttcgtcattcacaagtgtttcccacccctagcccaccccaaaataaatctgttgtgctttttgttttgttttgttgagacagggtcttgctctgtcacccaagctggagtacagtggtgcgatcatatctcgctgcagccttgacccccgaggctcaggtgatcctcctgccttagcctcctgaatacctggaaccacaggcgcacaccaccaagcctggttggttaattttttattttcttattttttttaattttgagacagagtctcgctctgtcagagtgcagtcgtgcgatctcgggtcactgcaacctccacctcccaggttcaagcaattctttgcctcagcctcctgagtagctaggattacaggcacctgccaccatgcccggctaatttttgtatttttagtagagatggggtttcatggccaggctggtcttgaactcctgaccttgtgatccacccatctcggcctcccaaagggctgggattataggcgtgagccaccgcacccagccaagcctggttatttttttaaattattactatttttggagatggagtcttcccgtgttgcccaggctggtcctgaactcctgggctcacgggatcctcccgcctcggcctcccatagtgctgggattacaggtgtgagccactgcacccggtctcacacttctaacttacctcagtatctgcttcctggaaggtccgacggacccccaagggcccccagggtttaggacattagttacaacgtccggcttcttgtttttagactgtctccatggagacggctgccgaacagtgaggatgtcaccaaaagcatctccagaatgcctggcagtgttgcgatgggacaaggacagcattaagccctgcctggtgtcaggaggaagagggcaagagaggatcatcccgatttaaggcagcatggggctgtggtgaagaggctttccagccaggccaggttggagccacttcttaaccgtgtgaccttgggcaagacagcctctctggggctcaatcacctggctt

SEQ ID NO: 549454 - DNA, 1548 bp, Homo sapiens
ccagacaggaagaagagagacaaggacagacaagaaatgtacatgcagattctgccagggacagagggttctcttcgtttcacttgtccttaacccrctatgctttttcttgctcagacttaacaattctattccagagctctacacacacagatgtagaaacaaaaatgggctgataacacctggcaagaatgtctcccagacagaattctttctgacatatggcaacagcctcccttatccctcccccaaaataagctccccaatgccaggtgagtctgaaagctgtgcccatttactagatcgcaagcctaggtttaagtctgatgtgaaaaatgcatctctgctcagtaatcatctatcattcaagccccccgcctttaacttaggacctcaagatagttaaaattgggaaactgggcataaaaaataatgctcccaagtagtaagtattaccgctttttgccaaaggctactaaaaaactttcagagggaaaagtacactgcaaacatcaaaataagacgccaaatgtagaactgaacaaaagcagttattttcagtcttcaaatacgtgatactgttccagagttgacttaacatggagtcatcaaatcagagccttctcatgatgactactgaaataaaaagaaagtctatgtggcttccaaagcaacactgccacaatccatggtagacaggcttttctaaatgcaatctgacacttatgctccaggaattcggggaaaaaaaaaatgtctattctggagcctggaaaaaaaatgtgtgtgtgtgtgtgtgtgtgtgtgtacacacacacacatatatacatactgatatggtttggctgggtccccactcaaatctcatcttgaattgtagttcctataatccccatgtgtcatggcagggagctggtaggaggtaattaaaccacaggggcagttaccctcatgctgttcttgtgataatgagttctcatgagatctgatggttttacaaggggcttttccccctttgcttgacacttctccttccagccatcatgaaggacacatttgcttcctcttctgccatgattctaagtttcctgaggcctccccagccatgcagaactgtgagtcagttaaccctctttccttcataaattacctagtctcaggcagttctttatagcaagcagcgtgagaacggactaatacacatgcaaacacccttttatataacagaatggatttaaagtagatttgctaaaagtcaatgctgtctttgcctgaaaagctatcgtagttcctgagtttcagacatctagaacaatccaatcctgaatcactgaaaatcagaatgactcaggattctagaaactcaagaaacccaaaatttaaaaacctcttttctgaaacagtcaccgaatctggttacatggtacactgaagtttgtcaactcaggtagcaaagtcttatgaaaacagaggaaatgtgaccagctttgccagctggaagtactgctccccctgccatatctgcatgaggacaggacaaagccaaca

SEQ ID NO: 549455 - DNA, 1658 bp, Homo sapiens
tgattaaaatgagaaaaaaagaatacaggccaacaaggcctgcagcacaatccatagaccaatgaatggcatactaagcaaacaaaaagtattttatattaagaaacaaaaagtgaaagggagagtaaggaggccatgctttcagatctatttcacatgtcatttggaaatactatatcatagctcatcttccttctcagtaagaaattaaatgggtcattagacactttgcctatattctagttttccaaaagctttagaatatgtatgcttaaaatttgtcttgatatgawtttggaataactatggtggcaggagtgaactaagatggaaaataatggtttccctcaagaatgacattactaattaaaacatgagttttcttttttattaactgaaaggggctctacagatgtagaaggactaggatgatatttggagtcagagatcctggacatagacattgaatctttcccttctccactcttcccacaaaaccttgtgagaaatgctaccacagagacagaggtacagtgctgcaattcacctgcagaattgggtctaacctgtatccagaactgcttaaagcctgcttgtgatggtaactattacagttgtagggtctccattaaatgatgcttacatcctcaacagcagaaagtccttggttacttgcctcacttctagtgaattgggctgtaaagaatattgatatagatgctaccttctcaaatatggaattctgttttttttttaatcaaccttttaatggtacataaataattcttaatgggtgacagaaaaagaagaaattatttttaccagaatgtaggaatttaaactgagctcacctgttaatatggaatatatagtaggctaaatagacaccaagaaatccagattatagagttaacactgccattaactaactataacttaaagaacatccttcttagtggttttctaatgcttagaaaaaagagaggtaaacttggtaatctgtatcttccttttcaactatgaaaacaatgattcatattatctgtcatcaaaggattattgtgataattaaaatttatacttttaaaactgctttgagaaaactttggtttatttaatcttgagaatgttgagagaataaggcctgattgggtcatatggtttgcctcctgcatgtactcaaaagcaacagactcaaaaaccaagtttgctgaccccagaatcctttccattacattcattcaacgacaaacatttattaagtgcctactatgtggcagatactcttttaggtgctgggaattcagaggtgacaaaactaaataaggaatctgcttccatgcagtttgtgccagagactaaataaatacatgagatcatttcagatactggtaagtgtataatgaaaacagtaatgtatcacttgaggccaggaggagaggaagggctctgttagatttggaggtcaaagaaggcctctctaaaaaggtaacacttgagctgacacttaagcaacatgaaggagccacacttgatcagatctggggacaagatttccattccattgatggagtaagtttggtttgtcccaggaacagaaaggtcagtgagtcatgcatgtgggagcaagacgaagaatgacagggactaaagtaaag

SEQ ID NO: 549456 - DNA, 593 bp, Homo sapiens
ctgggagtgtaattctgcagtatagaggaaaggatgcagaaataggtctcaatctccatttgcttggcctcctgacctcgagtaaataatttaactgttttcagtctcgggatgataatacctgtttttctaaacttctaaggttattatgagggtcaaatatgataatacaacagtgctgtgtggatgtgttagcatgaagccagagcatctgatgcattcttgttttatcttgccagcagtggtgtcatctctttgaaggtggacaaagcagtggggagaattgcaattctatatcttgaaataactaacaaagatatcttggtcataaggtcttaaagaaattctgggaaaaggtgaccatataagagtttataatatcaaagcaaggcagcattgggtatcatttttttaaaagtagattttaagaagcttagaaacaaagtagatattttagaagggattgtgactcatgaggatggtacrtaagaagaaaatgaaattctgattatttacttacgaatgattttttggtttctttttgagacagggcctctctctgtctctcactcaggctggattgcagtggtgca

SEQ ID NO: 549457 - DNA, 1213 bp, Homo sapiens
ttttttttttttaatcaactgtagaatttctaggacttaaaattttctcaatgcaactgctcctgcaaagccatgcgctccagtggaatttacaagaatgtgaaagttcagcaatactaaaattatctctcacttcctatagattagcttgtttactttgagatttccttaaaattcgacccccaagttgacttggctaacctttctaccatttactcagcttgaaagtttatgccatatctcgaaactattaataaatagactgtacaaaatgaaaaaaatttaaaacacaaaaatctccattttttcccccagatcattaacttttctatgaatgaaatatgcaaatgtgtattgtagggagtcacagctggggtggtgcttctgagatcatgacttttttctgagtactttttgggtacaatatgatttttattatattcactattcaattagtcgcatactgagattcctatggtaaaaggaggtggtctaaagttttagcagtaattaaaggttaataaactgggagcacttgagggggcttgtaatagttggctcagataatcccaatggagtgataaatgaatggaaatagtgggaaggactaacttttaaggcaaaatcaggtaattggctctattgctttctaaatttacttttcttacaatgtgggtgtggaggatatggcaaaattttgcactttttcctggtaagaagaaagtgcacagaaaatcttaactccaaaaatttaccagcaagaaatcttacgtagtggaaaaagtaaaaatgaaagggagtttcagctgtcatttggtttttgctccgcaagttattctgatggggaagattcataatcatcatctttaaatagttgctcagaatcttgaaaagccatgagagctttaaaaattgacagtaacaaccgggcgcggtggctcacgcctgtaatcccaggactttgggaggcygaggtgggcggatcacgaggtcaggagatcgagaccatcctggctaacacggtgaaaccccgtctctagtaaaaatacaaaaaaattagccgggtgtggtggcgggtgcctgtagtcccagctacttgggaggctgaggcaggagaatggcgtgaactcgggaggcagagcttgcagtgagccgagatcgcgcctctgcactccagcctgggcgacagagcgagactccatctcaaaaaaaa

SEQ ID NO: 549458 - DNA, 1213 bp, Homo sapiens
ttttttttttttaatcaactgtagaatttctaggacttaaaattttctcaatgcaactgctcctgcaaagccatgcgctccagtggaatttacaagaatgtgaaagttcagcaatactaaaattatctctcacttcctatagattagcttgtttactttgagatttccttaaaattcgacccccaagttgacttggctaacctttctaccatttactcagcttgaaagtttatgccatatctcgaaactattaataaatagactgtacaaaatgaaaaaaatttaaaacacaaaaatctccattttttcccccagatcattaacttttctatgaatgaaatatgcaaatgtgtattgtagggagtcacagctggggtggtgcttctgagatcatgacttttttctgagtactttttgggtacaatatgatttttattatattcactattcaattagtcgcatactgagattcctatggtaaaaggaggtggtctaaagttttagcagtaattaaaggttaataaactgggagcacttgagggggcttgtaatagttggctcagataatcccaatggagtgataaatgaatggaaatagtgggaaggactaacttttaaggcaaaatcaggtaattggctctattgctttctaaatttacttttcttacaatgtgggtgtggaggatatggcaaaattttgcactttttcctggtaagaagaaagtgcacagaaaatcttaactccaaaaatttaccagcaagaaatcttacgtagtggaaaaagtaaaaatgaaagggagtttcagctgtcatttggtttttgctccgcaagttattctgatggggaagattcataatcatcatctttaaatagttgctcagaatcttgaaaagccatgagagctttaaaaattgacagtaacaaccgggcgcggtggctcacgcctgtaatcccaggactttgggaggccgaggtgggcggatcacgaggtcaggagatcgagaccatcctggctaacacgrtgaaaccccgtctctagtaaaaatacaaaaaaattagccgggtgtggtggcgggtgcctgtagtcccagctacttgggaggctgaggcaggagaatggcgtgaactcgggaggcagagcttgcagtgagccgagatcgcgcctctgcactccagcctgggcgacagagcgagactccatctcaaaaaaaa

SEQ ID NO: 549459 - DNA, 517 bp, Homo sapiens
gaaaggttgcagggggaatgaattctaccacttctggtagaatttaccgattttcataagttacagagtattaagtattaaggtattctgaaacaattaaaaattgttaaaaaatacaactaaaagaatctatatatataaacatgcaattcaaaacaccaaatgatagggttttttaattagtcttaccaaatgaggaaaytgtggtccaaagaatttaagttctgtttttcttttcttttttttttttttgagacggagtttcactcttgtcgcccaggctggagtgcaatggcgcaatctcaggtcactgcaacctctgcctctcaggttcaagtgattctcctgccccagcctccctggtagctgggattacaggcatgtgccacaactctcagctaattttgtatttttagtagagagggggttttcaccatgttggtcaggctggtcttgaactcctgacctcaagtgatccacctgcctcggcctcccaaagtgccgggattacaggcgt

SEQ ID NO: 549460 - DNA, 517 bp, Homo sapiens
gaaaggttgcagggggaatgaattctaccacttctggtagaatttaccgattttcataagttacagagtattaagtattaaggtattctgaaacaattaaaaattgttaaaaaatacaactaaaagaatctatatatataaacatgcaattcaaaacaccaaatgatagggttttttaattagtcttaccaaatgaggaaactgtggtccaaagaatttaagttctgtttttcttttcttttttttttttttgagacggagtttcactcttgtcgcccaggctggagtgcaatggcgcaatctcaggtcactgcaacctctgcctctcaggttcaagtgattctcctgccccagcctccctggtagctgggattacaggcatgtgccacaactctcagctaattttgtatttttaktagagagggggttttcaccatgttggtcaggctggtcttgaactcctgacctcaagtgatccacctgcctcggcctcccaaagtgccgggattacaggcgt

SEQ ID NO: 549461 - DNA, 517 bp, Homo sapiens
gaaaggttgcagggggaatgaattctaccacttctggtagaatttaccgattttcataagttacagagtattaagtattaaggtattctgaaacaattaaaaattgttaaaaaatacaactaaaagaatctatatatataaacatgcaattcaaaacaccaaatgatagggttttttaattagtcttaccaaatgaggaaactgtggtccaaagaatttaagttctgtttttcttttcttttttttttttttgagacggagtttcactcttgtcgcccaggctggagtgcaatggcgcaatctcaggtcactgcaacctctgcctctcaggttcaagtgattctcctgccccagcctccctggtagctgggattacaggcatgtgccacaactctcagctaattttgtatttttagtagagagggggktttcaccatgttggtcaggctggtcttgaactcctgacctcaagtgatccacctgcctcggcctcccaaagtgccgggattacaggcgt

SEQ ID NO: 549462 - DNA, 1291 bp, Homo sapiens
ttgtaataatgttgtgagctagtcactaagctcaacttgtctgataatttttattctcagataatgttctcttgaatttttggtgttagaatttcctttatgraaataagatatagtggttttaaatagcagaattgttgtttttacttttcttaataaaatagcaatttaataccagtccctcaaatattttgaaactgaaatcccagtgcctgggaaccactggttgacaattcatcccaagcaggccatgacaattgtcccctctggagacctcctgtaactttgtagaactcattggccattcagtgaggctgtgtggctctttatgctcttacatatttccctgtacctgcagctaatttagagcctcattttatacttatttcttcttctttgtggcacctatttatgattacagtgttgacagcaaatctcaaaaatatgcttgttgaaaaattgagtattcagaattattccaaatttggggagctaaaagaaatcatggatttggatggattagtttatattaaggaaactaagattgtgtatttcagacagtaaaaatagcaaaattatgataaactctaaattatacgttagactgtgtttatggaaaggtatcaaaaaccatattgatttgacaaatcctttgtaatatccttctataaatgcttaatgaaagaaagaagagtatttttgcaggacagtatcattttctagtgaattctgtgactgtaaaaccttgttgtggttccagtgcagagttctttttattccttattaggcatataaaatagtacttttttcctgtgtatgtaaacatagttttaacataattttttcaatcaagaaatacttttctattttcttcaatttgtgtctagctatcagttccattcttacaaatattcttagtccatggaacatattttctgctgagcactgtgaaatttaattcagaagtagtcctttattgatgcttcgtttttgtgacctttccagtcctgtgttggtgacatattggtcctctgtctccagtgctttgtgaagctaatagataggatggaatgggtcagataatgaaagtccctggtacattaactttcaatttcatgaatgtctgaatattgcagagaagatgaatagcaagacttcctttgcgtttacattttaacatttataagctagttaaatttcccttgtattatcagcagcatagttccagtctacaacattaacacacacatttatatttttgagcagtggcataagagtttaaaataattta

SEQ ID NO: 549463 - DNA, 1291 bp, Homo sapiens
ttgtaataatgttgtgagctagtcactaagctcaacttgtctgataatttttattctcagataatgttctcttgaatttttggtgttagaatttcctttatgaaaataagatatagtggttttaaatagcagaattgttgtttttacttttcttaataaaatagcaatttaataccagtccctcaaatattttgaaactgaaatcccagtgcctgggaaccactggttgacaattcatcccaagcaggccatgacaattgtcccctctggagacctcctgtaactttgtagaactcattggccattcagtgaggctgtgtggctctttatgctcttacatatttccctgtacctgcagctaatttagagcctcattttatacttatttcttcttctttgtggcacctatttatgattacagtgttgacagcaaatctcaaaaatatgcttgttgaaaaattgagtattcagaattattccaaatttggggagctaaaagaaatcatggatttggatggattagtttatattaaggaaactaagattgtgtatttcagacagtaaaaatagcaaaattatgataaactctaaattatacgttagactgtgtttatggaaaggtatcaaaaaccatattgatttgacaaatcctttgtaatatccttctataaatgcttaatgaaagaaagaagagtatttttgcaggacagtatcattttctagtgaattctgtgactgtaaaaccttgttgtggttccagtgcagagttctttttattccttattaggcatataaaatagtacttttttcctgtgtatgtaaacatagttttaacataattttttcaatcaagaaatacttttctattttcttcaatttgtgtctagctatcagttccattcttacaaatattcttagtccatggaacatattttctgctgagcactgtgaaatttaattcagaagtagtsctttattgatgcttcgtttttgtgacctttccagtcctgtgttggtgacatattggtcctctgtctccagtgctttgtgaagctaatagataggatggaatgggtcagataatgaaagtccctggtacattaactttcaatttcatgaatgtctgaatattgcagagaagatgaatagcaagacttcctttgcgtttacattttaacatttataagctagttaaatttcccttgtattatcagcagcatagttccagtctacaacattaacacacacatttatatttttgagcagtggcataagagtttaaaataattta

SEQ ID NO: 549464 - DNA, 533 bp, Homo sapiens
aaaaaaaaaaaaaagaagtttacggataaaaaaaaaaaaaamcaaaaaaaaaacaatatattctagagatcttttctgtcagtccatctagagcttcttcactgttttttacggcttcaaaatactcctctgtgtagtttatcacagtttatttgaccagatccctgttgctggacattgggttgtttctaatcttttgttacagtgcataagcatgtattttctatatatacaagtatatctgaggataaattctccaaaatgggattccagggtgtatcagtcagggtcctggaaggatactcatggatagatcctgtgagtctctaaggttaagatgactaaactcttaatcttggcatggttaaactaaggaatctttctttctttctttctttccttccttccttccttccttccttccttccttccctccttccttccttcctttcttgatagagtctcactctgtcacccaggctggagcacagtcatgcgatttcggtcactgcaacctctgcctcctaggttca

SEQ ID NO: 549465 - DNA, 653 bp, Homo sapiens
ctgccactttaatatgctagttcctggacaatttctctgacatttgaaattttcttaatgcttattcatcatcaaatttatatcaaatcctccagtgtgtgaaactgtcatagttacttaaaatccacaaactcaaatggatgaaatttaattatttgggcatataacttgtatcttttccagtatcttcaaaaattgaccatatctttaaggaaatctgagtatcttactacatattttacaaaaggctcattgtttcacagtgtgttattagaattctgagaaatgcaataaaattctagaaactgtaatcatctgaagactaaactggatccactgtgtaaaccaaaattataaatattgacagttttggcagggacaggggagaaaagatgaaatcactccctgcagcatcatttcccactgtccgtgtgtgtgagaattgaaacgtccaaggttagcagatgccattgagtacatataggcccaagtcttggatatgctacgtgtttctcccacggattttgattctaaattaataaacacgtttagccatgggrgcgcatgttgagaagtttcatgagcctcgtattttctgccattggacgtagatatttataaggtttcgatttttgagaatatcctcctactcc

SEQ ID NO: 549466 - DNA, 633 bp, Homo sapiens
ctatttctatccaaaaaataatgccattaagattttggtaaggaattacattgaatctccctatcacattggataatattgtcaccttagtaatattaagttttccaatccatggctgtaggaagtcttttaaataaagaggtatatctatatttacataggtttgttttcaatatttatataattttatatgctttactggtatataaataaatttgatttatatttaatattttcttttataatagaaaataatatatatatttatgaggcataatatcaagttttgacagatatatgtacctcaaaactatttatatatttcatacacagcatatatattatgtacaacataatgtatattatatattacatayatttatagactataaatatatatactaatatgtaactatatataaataatatataactacatattcatagatatatataactatatacaaatatataaaagtataaaaataaatctatatattatatatagtggaattattaaattaagctatatagtgaatgattgaattaaactgattaacataatcatcacttcacatgcttatcaattttttttggttaacagactgaaatttcctcttcgtaatttgtaaa

SEQ ID NO: 549467 - DNA, 633 bp, Homo sapiens
ctatttctatccaaaaaataatgccattaagattttggtaaggaattacattgaatctccctatcacattggataatattgtcaccttagtaatattaagttttccaatccatggctgtaggaagtcttttaaataaagaggtatatctatatttacataggtttgttttcaatatttatataattttatatgctttactggtatataaataaatttgatttatatttaatattttcttttataatagaaaataatatatatatttatgaggcataatatcaagttttgacagatatatgtacctcaaaactatttatatatttcatacacagcatatatattatgtacaacataatgtatattatatattacatatatttatagactataaatatatatactaatatgtaactatatataaataatatataactacatattcatagatatatataactatatacaaatatataaaagtataaaaataaatctatatattatatatagtggaattattaaattaagctatatagtgaatgattgaattaaactgattaacataatcatcacttcacatgcttatcaattttttttggtkaacagactgaaatttcctcttcgtaatttgtaaa

SEQ ID NO: 549468 - DNA, 975 bp, Homo sapiens
cttagtgtccatgtgttcttgttgtttagctcccacttataagtgagaacatatggtatttggttttctgttcctgctttagtttgcttagaatagtggtctccacctccatccatgttgctgcaaaggacatcatctcattattttttatggttgtgtagtattccacggtgtatatttaccacattttctttatccagtctgcctctttttaaatatagtcatttttctcatttttaattatcaaacatttataaaatgcttattctgtggaaggttctctgcctcaagagttacaaacattaggctgggcacggtggctcacgcctgtaatcccagcactctggaaggccaaggcgggtggatcacctgaggtagggagtttgacaccagcctgaccgacatggagaaaccccatctctactaaaaatacaaaattagctgggtgtggtgrcacatgcctgtaatcccagctacttgggaggctgaggcaggagaattgcttaaacccaggaagtggaggttgcagtgagccgaaatggtgccactgctctccagcctgggcaacaagagtgaaactctatcttcaaaaaaaattaaaaaaaagagttacaaagattaatgatatacaatctctggccttaaaaatctctgaaaaactagaaataattctaaagcccagaaagagtgagttcccttccagtatcctatacaagttcaaggtcctccaaagcattattaaatcttcctagccttttgatcctctgccttttctcctgcctcactaatgttctaagtctctgttatgacacagattctagaaccttcacaggccacactcccatcatttgcttaggtctgatcaatctgctccacgcaatttctcagtgatcctctgcatctctgcctacaagggcctccctgacacccaagttcatattgctcagaaacagtgaacttgagtttttcgtttta

SEQ ID NO: 549469 - DNA, 563 bp, Homo sapiens
tttagaaggagcagagaagctcactaactgccttgctgcaagctcccccttccccactcggkctgggtctcagaggtgagcctgccatgacctgtacctgccatggcagctgccctcactgaggtgtcattcccacagctacctcgggctcgggctgatgtcggcacgcctggcgatcctgggcggcgtggaggggcagcctggtgagtggacatgttgccccgggcccactttcacagcctctgccctccattctcagtgggaacgaggagcccctcgggagggcaccagcttggccctgcaggagaggtccctctgcccctcccaccccactgctgtcccgctgcatgctgggcacccagccaggccagggcatgcgagtggaggggtgtgctgcagatcttgttggtggcaccctgatggggcaggaacccagggtggtgttgtacctgtccaccttccaaggtatttctttctttattttgagacagtgtctcacttgctctgtcacccaggctggagtgcactagcatgatcccagctcactgcagcctctgcctgcc

SEQ ID NO: 549470 - DNA, 551 bp, Homo sapiens
attaaggagtaatatatttgcctcaaacactatattaaatatttaaattttgttaaaraaaataccactttcacaactgcaactaaattgtctaaatagaatgctagccccattgggtgaaagatatacattgacatcatgctataaatattgttttgaaaacactcaatgtgttgttcaaatttaattaatataatatcatatttcattatatgccattatatgaggaagaatgcttaaatgaaacaagcaataaatactcacttggtataaagtttatttgcatgtgtaaaaagtgtatataacaggaaacctcttaaaataaaaacatagtaaagttttaggaaaaatatgaatttagaaaatgggttgctttttcagatcacaaaaatactgatatatgtgtactaaattaccttaaactgttgaggtgttagagaaacatttttcaaaaaacaaaaaaagttggaggttggaggagacacaaaatatagaagaatgaaggtactgatatatgtcacacatgttttaaaatgaccacacaggcagaa

SEQ ID NO: 549471 - DNA, 527 bp, Homo sapiens
ccaccccccgggctgttgaaaatccacgtataacttttgattccccaaaaacacaactattcatagcccactgttgaccagaagccttactgataacataaacagttgactaatatgtattttgtatgttacatgtgttgtatactaagacaatgtcatttagaaaatcataagaggaggaggaggaggggtggcagaggtggaagaaaacccacatgtaagtgagtggtgcggctcaaacttgtgtccttcaagggtcaagtggacattaatcaaaggtcaccagagtccagcaaagcaattccagtggaaagtatgactctcagtgctgaatcctayacccttagacgggagcacacacgtgcaggaggattgctccattttcatctaagaaacacggggttgtacaaacatgggtgctgccacccaagcaaatccactgcttcagatgccgtgagcatgtgcagtttcacactgagtgtctcgtagccatgatataggtgcacactcactgacttctgcacagg

SEQ ID NO: 549472 - DNA, 670 bp, Homo sapiens
atttctgactattgctcttccctggaaaacgggtaggtacagtcatcctgtacttcgatcccaaatcagtctctggagactacttatttatttatttatttatttatggacttctttctttcaagcgttcgaactcatttccaccacaagagggcagccatctctaaaaaaaaaaaaatagggccaaaatttatgtaagttgtgcttggaacaagcattcagtagttcctcagaaatcatacaccctacataaaagagattctgcaatgggcagcactaacatgaaacagtgttcagaagtacccattttccctcagattctaaactgacaaggtttccacttaycaggttatgaagttctaaagctgcaagacatccttgaggtcatcacaggatatttatttattttttcttcgggtgcatccaatagttatcaacttttcctcctctttaaaagctacttaaatctcattgaagttttgttttgttttgtttttgaaatctaagtaatgagagaaacaattgttaacttctcaattaaacttgataggaaaggaaataatttcagaagccctgtgtccatgagtaggatatgttttattgcctccttgtttgcggtgcaatgactctgagtgacaatcaacttctatagcacctttttttttttttt

SEQ ID NO: 549473 - DNA, 524 bp, Homo sapiens
tggctgcccctcggccgccgactggacgcgcgggccttgccagcgagcaccctcatcgggctgtcgcctgacagcatacctcaaaaggccctagctaataaacctgtaagcccagcatttgagagaaggtagggtgtgtatatataaaaggttgtgtacaactccacgaggtgaaaaatattcagtaacttgtttrcatagcatttgtgtaaagactatgatctcatcccaataaaatgatatattaaaccttcagattaatgactggctacagagtaacaaaaaataaagaatttaatgtacagtaaattctctcccatacaaaggtctagtctgatgttttgtgtacaaactcacatctccaattaacagtatttattgagggtgactttgtattgcactaacgtctattgctattacctgttgtgattgataagtaaagccactcattgaaaaacccaattccaaacaccacagtttgtgacacatgaagtaatgaatgactcttggtatgaaaacgtggc

SEQ ID NO: 549474 - DNA, 524 bp, Homo sapiens
tggctgcccctcggccgccgactggacgcgcgggccttgccagcgagcaccctcatcgggctgtcgcctgacagcatacctcaaaaggccctagctaataaacctgtaagcccagcatttgagagaaggtagggtgtgtatatataaaaggttgtgtacaactccacgaggtgaaaaatattcagtaacttgtttacatagcatttgtgtaaagactatgatctcatcccaataaaatgatatattaaaycttcagattaatgactggctacagagtaacaaaaaataaagaatttaatgtacagtaaattctctcccatacaaaggtctagtctgatgttttgtgtacaaactcacatctccaattaacagtatttattgagggtgactttgtattgcactaacgtctattgctattacctgttgtgattgataagtaaagccactcattgaaaaacccaattccaaacaccacagtttgtgacacatgaagtaatgaatgactcttggtatgaaaacgtggc

SEQ ID NO: 549475 - DNA, 524 bp, Homo sapiens
tggctgcccctcggccgccgactggacgcgcgggccttgccagcgagcaccctcatcgggctgtcgcctgacagcatacctcaaaaggccctagctaataaacctgtaagcccagcatttgagagaaggtagggtgtgtatatataaaaggttgtgtacaactccacgaggtgaaaaatattcagtaacttgtttacatagcatttgtgtaaagactatgatctcatcccaataaaatgatatattaaaccttcagattaatgactggctacagagtaacaaaaaataaagaatttaatgtacagtaaattctctcccatacaaaggtctagtctgatgttttgtgtacaaactcacatctccaattaacagtatttattgagggtgactttgtattgcactaacrtctattgctattacctgttgtgattgataagtaaagccactcattgaaaaacccaattccaaacaccacagtttgtgacacatgaagtaatgaatgactcttggtatgaaaacgtggc

SEQ ID NO: 549476 - DNA, 523 bp, Homo sapiens
ggatttatataataaacagattttaactttttttttttcaaatagcagttacactgtacatgtacttttgtttttccaatactcagaatgtctggccacactgtattgattttattgtggtaaaatatacatgacatgaacgtttcaaccgctaatgggccctagctaataaacctgtaaacccagcgtgtgagagaaggtagagtgtatatattaaaacgtttcaggccgggcgyggcggctcacgcctataatcccagcactttgggaggccgaggtgggtggatcacctgacgtcaggagttcaggaccagcctgattaacatggtgaaaccccatctctactaaaaatacaaaaattagctgggcgtggtggcaagcatcttgtgaccccagctacttgggaggctgaggcaggacaatctcttgagcctgggaggtggaggttgcagtgagccgagatcatgccattgcactccagtctgggcaacaagagtgaaactccgtctcaaaaaaataaatt

SEQ ID NO: 549477 - DNA, 1406 bp, Homo sapiens
aagctttcaaagtcaacaacagtatcatgtagtgacggacgtagatgagaagctgctgctgcagcttgcagctcctggaggccagttttgtccatgacttagcaggaatgcactacctttccatgaggagacactgcccaaagaaaccaaggccattctttgaggacaaatatgttttaatagcttttatattatgtaatagtgtaatacaaatactaatttattaatcataatgtgaaattatttacattgttatgttaagacttttgtacagaaatttacacctagatattctgaagttggtggtctgtgagtggcatcgagtgatgactgacacattctgacctggggtagaacaacacgtgtccctgcagtttgctgaatttcagggcatcaccaccttttttcaagagtgtgttttcctatcctctagagttttgcccacttaagcaatggctttgctgtaataaaraattacactatttatcaaaatattactttggagaatactggttcacatagttcactttcaagttttcttaaactatcaggcccatagctaatgccagtggctccaaggatgagaaggtaaaaaggtcttttttttttttttttttttttttggccaagacaaaaaaactccacatttcaaactttactgtctcatgctagtccctggaaaattagaagtgaacacactcccctcccagcccaatcacagctaatgaataaccaagatctcctgcaggtgcctttgccttgggtttgtgagcctggagttgctggttggcactgggcagcaggcagcagagctggtcccatttctccatgcttttccaactctgtaggggacacaggcacattgaacaaactaggtcctggcctggcactggctgggaagctatttgatgtcaggctcaatgtggacttctgagttgaaaagagagtatgggtcacccagccccacttactcattttaccaagaatgaaaatggggatctatttcagacatgagattacacattgtaagactgtgcaagcttgccacacttgtatccgctcagcacacactttctgagtgccgagtgtctccagcaggagaggggctctagttcccgggatcccaccctccacagaggacagcagcaccttgagggacagatgtgcaaagggcaaggtgggggcccttctgctggagaggcagctggggaggtccttagaggaagtgacacctgagctcttctctgaagggtgaagctgaattacttgaagcttagggtgaaggggtgtccagggaagtggagcctgtgagccgaaagcaaaatgacttgtccagagaagtgtaacaagttccatattgtttcagtgccaaatctgcacaggagtcaccaaacgaaagagcagga

SEQ ID NO: 549478 - DNA, 1109 bp, Homo sapiens
ggggctcagctggcggttagtaccttgcctggttttgtcaagaggctttgtgaagacctattagatcttgcgtttgagtttggaaagggcatcttacggaaggaccaagagagaaggcccagcagttctggtgcctatcactttctcgttccacccaatcaatccaagctccttcagactttcaccttttccttcttcagttgtaaaacaaagtaagtaaataggtaaaaaaaaaaaaaaaaaaaaaaatatatatatatatatatatatgcacacatacacacacaattaaaatacgtatgtataaaatattatataattatatttaatgtayagatatgagttatatatatttttatataactcacatatataaattatatatgtaaatatataattttatagaattatataattaatataaatattggcctaaatatatatatttatatataataatataacatatataataaatattctatgtaaaataaaatacagttgaccctggaacaacatgggcttgaactttgtgggtccacttatacacagattttttcttctgcctctgctacccctgagacagcaggaccaacccttccccctcctcctcctcctcagccactagctgtgaagagaatgaagatgaaaacctttatgatgatctgctttcacttaatggatagttaatacattttctcttcctgatgattttcttaataacattttcctttctctatcttactttaagaatatagtatataatacatatgacctataaaatatgtgttcatagactattgatgttataggaagggcctctagtcaacagtaggttattagtagttaagttttgggtgagtcaaaagttccacatagttttttgacttcagggatgttggtgttcctaagcctcacattgttcgaggcccaaatgtatagatatgtaaaatttaggccagtatatgcttaatatcatttaaaatgtgttgcatccctgtcttttcaatagaactattcctcgatattaggttgtagtcatttatactattatttttttgagtcagggtctaactccaggctggggtgcagtgtgtaatcatggctca

SEQ ID NO: 549479 - DNA, 554 bp, Homo sapiens
ctactgcatttaaaattttccacaccaggaaagatatttaaactgaaaggccacaataaaccctgtcataaaaacgaagcaaaaataaatctaaaatctaattgaaagccaagagaataaataaacctgagaatacagaaaagaagaatctagctacttaaagtatactcaagttgaagctgaggatacaggggaatgggccytaaggttctaaccacaaaattaccatctatgatctaagaaatggcagaagcaggggaggactgataatagaccgatttgcaaacacaataggaacccacatggtctcctagagatagctcttttctaaaagaaagacaggccattcaaagtaacctcacatcctttataaagctccccaaatagtagattaggaaatagacattttgtgtcccaatcccaacacattacttgacagtctctcaacacatgcctagaatcaggatgaagaaaagctaacatttgccttttagaacgatgttctttcgtatctgtttgatagtataaaataagccttataaaagggggctctg

SEQ ID NO: 549480 - DNA, 554 bp, Homo sapiens
ctactgcatttaaaattttccacaccaggaaagatatttaaactgaaaggccacaataaaccctgtcataaaaacgaagcaaaaataaatctaaaatctaattgaaagccaagagaataaataaacctgagaatacagaaaagaagaatctagctacttaaagtatactcaagttgaagctgaggatacaggggaatgggccctaaggttctaaccacaaaattaccatctatgatctaagaaatggcagaagcaggggaggactgataatagaccgatttgcaaacacaataggaacccacatggtctcctagagatagctcttttctaaaagaaagacasgccattcaaagtaacctcacatcctttataaagctccccaaatagtagattaggaaatagacattttgtgtcccaatcccaacacattacttgacagtctctcaacacatgcctagaatcaggatgaagaaaagctaacatttgccttttagaacgatgttctttcgtatctgtttgatagtataaaataagccttataaaagggggctctg

SEQ ID NO: 549481 - DNA, 886 bp, Homo sapiens
ttgaagtatttaggggtaaagggatataatgtctgcaacttaaatggttcagaaaaaatgagagacagtgtgtgtgcacgtatttgtgtgcatgtatgtgtacgtgcatgtatctgtgtgtgtgcacgcgtgtgtgtgtgtgtgtgtgaagagagagaaagaagaatgaggcagatgtggcgaagtgctaacatttgggaatctgagtgaagggtagatatttctttatgatatttttgcaactttcctggaaatctgaaatgatttcaaaattaaaagttaaaaatgtgtgaaatgtgtttctgttccgagttaggaaacacctttgggtgtgggaggcgttattcttccctccttcattgaatggttkcccagtggagtagctttcttggctaatactaaaatgaccagtaccataaatccagagatgcgggctgaaggctatttatataataataactcctctgctttgtcaatagcagctttttgacctcacacgtttgcacattctcatctgagccccttgggttctgctgcagcatctacgcataaaatgatgacaccttaattttattccatttgggaagccaatgggtccacttacatataagatcagaaatagttaagttaggccaggcatggcggctcatgactgtaatcccagcactttgggaggctggggtgggcagatcacttgaggccaggggttcaagaccagcctggccaacacagcgaaatcccatcactaccaaaaatacaaaaaattagcttggcgttgtggcgcacacctgtaataccaactactctggaggctggggcatgagaatctcttgaaccctggaggcaaagcttgcagtgagccgagatcctgccactgcactccagc

SEQ ID NO: 549482 - DNA, 1022 bp, Homo sapiens
ggcccttagatcgatacctctgaggtacgtgttctatgctgtagggccctgaaaggctgtgctttgtttaccacattggtaacttgcttgtggtaggcatggccgcccctgccccaggcccatctcctggctggcactgcaaggccaggctctatgggcttgcagaccatgcctgggccrtttcccagagaaggcagaatgccatattggcttccaccttgctgacctccctgccccgcaccccaactggtattgcttgtgatgacctcccagataaactacttgaacttgaaagcttgcctcagggtctgctttgggggaaaccaaaactaaacactggatggagggcttgattgcggcctgtttgaacattccttgtatatgattcatgtattatgtccaaatgtatgtatgcacgtgaatattttccctgagttggggtgggctcccaagactgagaaatgggtacaaaccagtgtcaagcattttccgcggccaggttgcaaggctgcggctgtctcatcccacagtccacgctgaggagtggaggggaattacaccgcaggacgaagaggtgatgaatgtgcgagaaatgagaccaggaaggggagacgcatggaaggcaaacagagagagggagaggaagggacgtggggaggggtctgtgactgtgagggagagaaagggggtgggggggttatttgtgaagctccaagagctgccttcctgcattgctgagtcagcgctgcctagactcagaaaccctcattgtccgtccattcagtgaccccttggagcttaagagctctgttaggatctgaaatgtgtccagcagatctttagagccattcagttttcatcccatgtaggacctggacacatgtgcatgcaaacgaacatccttacacataggcacacacatacatacacatgcccccatgcacaccacacacatgcatacatgcactcacacaggcattctcatatgtgtacacactcacacacatgcacatgcatatgta

SEQ ID NO: 549483 - DNA, 1022 bp, Homo sapiens
ggcccttagatcgatacctctgaggtacgtgttctatgctgtagggccctgaaaggctgtgctttgtttaccacattggtaacttgcttgtggtaggcatggccgcccctgccccaggcccatctcctggctggcactgcaaggccaggctctatgggcttgcagaccatgcctgggccatttcccagagaaggcagaatgccatattggcttccaccttgctgacctccctgccccgcaccccaactggtattgcttgtgatgacctcccagataaactacttgaacttgaaagcttgcctcagggtctgctttgggggaaaccaaaactaaacactggatggagggcttgattgcggcctgtttgaacattccttgtatatgattcatgtattatgtccaaatgtatgtatgcacgtgaatattttccctgagttggggtgggctcccaagactgagaaatgggtacaaaccagtgtcaagcattttccgcggccaggttgcaaggctgcggctgtctcatcccacagtccacgctgaggagtggaggggaattacaccgcaggacgaagaggtgatgaatgtgcgagaaatgagaccaggaaggggagacgcatggaaggcaaacagagagagggagaggaagggacgtggggaggggtctgtgactgtgagggagagaaagggggtgggggggttatttgtgaagctccaagagctgccttcctgcattgctgagtcagcgctgcctagactcrgaaaccctcattgtccgtccattcagtgaccccttggagcttaagagctctgttaggatctgaaatgtgtccagcagatctttagagccattcagttttcatcccatgtaggacctggacacatgtgcatgcaaacgaacatccttacacataggcacacacatacatacacatgcccccatgcacaccacacacatgcatacatgcactcacacaggcattctcatatgtgtacacactcacacacatgcacatgcatatgta

SEQ ID NO: 549484 - DNA, 3112 bp, Homo sapiens
ggctctctccaactcaaatagtcatgggttttcctctccacctcctcaattcacccccaccacctccgtgatggtggctattcctgcccaggtgctcaggccgacatggccagctcctctcccctcctggcacccaccctctgaccgctcagcacctccatccctctgctgtccacatggactgattcctgcactccgcccacctgcctgctcctgcctggctgctctcgaaggatgatcacaccatgggcctccctggtctccctgcctagcctccaccacagtctattctattcaatgattcagattagccatgccctgcaccgagcccaggtctgcagcctcactctgtcagccacagcctttccctggtcaacagggccctgagcctctggtgccttccacctgctggtctctttcctgcttctctcctgtgtccccttgctctggtcacatggcctcttggtcttcctaggacaggccaggagctccccacctcgggatcttacccttagtcctggccgccctgggatgctcctctccgggacatccacccgctgagccctcaccgcctgggcagctgctgcaaggcccccttcttggggggctcctcagatgtccatgagcaatcacagccccccaaccaccaccccctcccttcccagctttgtctttttccagtgcacttcccaccatctgacatagtttgcgtgtcacacatggccttcggttggattcttctggaagctgactctgagagtgggcatgactcagttcacctggagaagtccccaggaagctcgggcaagacggtggggagggaaatgggaaggaaaaaatgccctttctggtgggataagtaggaggtgcccacggtgggctgctggtgctcagctgcactggagacctcatggagacgcttaggagcagcatcagaggactgcactggagaggcggggaagccaggtctgctccccgccagcttccgttcacccagggcagcttcccaggactccactcccaggccacacaggctcctgcagcctgaggaggagccgcaggagagcaggggcagcaagaagccatcgcagggcaaagactctgaggcctgcgggacccaggcggcaccaccagcttctgctttgtgcactgtcttgggctgtcacctgcttgtcctctgtccctctgtgggtcgtgagctccctgaagccaggggtctttgttttgttctttgctgtggccagagactacaatcgttcctggtgcacagtcggccctgcttaaatatgcactgagtgagtgacgcctcctgggtccacctctgcagccttctgaagtgaatatttggcatctctaaagaacccagatcccaggcaaagtcacccctaatttggctgttgcagactccacctcctgctgcttctgggctgactctgaagcctgttgctactgtctgcagccaagttggcttttccaacagcagcagcaatggagaggggctcagactactgataaaagctccctttacaccaggtgcttttccaatgcttctacagcgccttttgatgttgcagtcacgaatcctgatggcagagtgacgatagtggtccctatttcgtccgatgtctcacttgataggacgaccaagagtccacaaatcgttcctgagtatacctctaacaacagattttttcctaaacggttccacctggtttgatcaggaagaagaaacaacagatacgtgtattttcatttcttccttcagtggaggagtcacagttgttttggaagctgtccaagtgccagagaccccggacacagattcctgagcatccttcccatccttcccatccttgaaggcaaatcatccatctctgtatctgtaactccagcacaggtctggacggggcagagctcaaagcaaggagtgtctgtggaccagtgtctgtaccacccaggtgaagtgagacgagcctgtgtcgctggcctgcagaagggccacagtctgcccgagtctgcttcttccctggggaggtgcaggccgaatgccgtggccaggattgctacagagggaggctctgcccagctcattacagccggagtgaggcttgagatgtctgttcactgctcgtgttgagcttgagcacttggttaaagtgctggccatcagatttctctattgcaaaggatcatttttcccttgtgtaattgccaagcaacatatgcggtgatgctttgggaccttatggatatcctgttcttcaaaatctgtcccccaatggttttggcatccacagatggtcctcaaatgagtcaattgtaacattttcaaattccgtcattcttcatatatatcagctgctgttattctgtaaagaattcttcctggctccaatcagctttttttagtatcactatgaactcatagatccttttttaaaaaattcagtgtgttcattcttgctcccatatatttttgatgctcaaatacttctacatttgtccattgaaagtcctctgactatagcttctgtttccttttgaccaatttccatcatcttttgagcacttcttggctttctggtacaatacractggctggaatcttcaaagaagtcaacatcccaagagatgaaatgatggactcgctgcttgacattgcagggaatgaaagaatcatgtcaagccatgcagtgtggtcctagattggatgctaaattgaaaataaaagctctcactttggactgtattttagattatatcactgcatcaacatgaaatgtttgggtgtgaaaatggcattgagattatgtaagaaattatttttttctttaggagatatacactgaagtgtttaggggtgaactatcatgacccctgcaccatactttcaaatagttttgccagaaaaggaaacacacacgcacaattgtgtgcacacatgcatgcacacacacacagtcacatgcgcacacacaattttctttaaataatgctcgtggagataggtgacccacacacatggtgttatcagttgatgaagctatttgaagggtatgtgatcactgtactactctgtatgtttctgaatagttgacattttttaaagcta

SEQ ID NO: 549485 - DNA, 633 bp, Homo sapiens
tctccactttttgtttctttatttgagstactgcctgacatcatagtccttctgcctaattaatttctttaacttttcttttttcttgtaggcaaatctgctggcagtgaattttctcagtttttgtgtgagaaagtctttttgtttctcctttcacttcttgaaagatatttttgctgagtgtagatttctgtgctgacaacactttttctttcagcactttaaagatgacactcctttgtttcctggcttgcacagttttttaacaagcagtctgcttaaattctcatgtgatcctctatgtggaatgtgtcatttcccaccaccctctgtccccagtcacttctaagacctttttttaattgcctttgggtttcagctgcttctatgatatgaacctaagttttttgttttgttgttttgatcccccttgatattctctgagcttcttgcacctatcctttgatcctttggtgtgtgttgcaggatgaatgacggcccccaaaaatacatccagaactgtaagataataaatttgtgttgttttaagtaatgagttttctggtaatatgtttcagcggaaataagaaataaatatagcatgtgtcattaattttgcaaaatacttggcca

SEQ ID NO: 549486 - DNA, 633 bp, Homo sapiens
tctccactttttgtttctttatttgaggtactgcctgacatcatagtccttctgcctaattaatttctttaacttttcttttttcttgtaggcaaatctgctggcagtgaattttctcagtttttgtgtgagaaagtctttttgtttctcctttcacttcttgaaagatatttttgctgagtgtagatttctgtgctgacaacactttttctttcagcactttaaagatgacactcctttgtttcctggcttgcacagttttttaacaagcagtctgcttaaattctcatgtgatcctctatgtggaatgtgtcatttcccaccaccctctgtccccagtcacttctaagacctttttttaattgcctttgggtttcagctgcttctatgatatgaacctaagttttttgttttgttgttttgatcccccttgatattctctgagcttcttgcacctatcctttgatcctttggtgtgtgttgcaggatgaatgacggcccccaaaaatacatccagaactgtaagataataaatttgtgttgttttaagtaatgagwtttctggtaatatgtttcagcggaaataagaaataaatatagcatgtgtcattaattttgcaaaatacttggcca

SEQ ID NO: 549487 - DNA, 667 bp, Homo sapiens
aaatattaaataaatcagctggggaagggatggaggagtccagagaaggaaaactgacaggtatgagtgggagcgtaccaatgaatcctcagggctaccatacttaaaagaggtatgagcagacgtggtcctgccccagaaatgtgagtccctggctccctggcctgtccatgattctcctcactccctgcccagttgacccaccagccagtgaaaagacagattcttccttgtcagggcagtcgctggggaaagagtgaataccttaggttctcacgtcacaaaagggctgccaggagcctgcacagatggggtcagccaggatttggccgccagkttcctccgagccacatgggatgctcagccttctgcggggaggccactggcacagccagcgactgtttgcccacttttgcctccttctccctccactcagtggccactcattcactcagcaaccatttcctgagcaccagccaagtgccaggccctgtgtcaggcacagggtcccaaacaggaagcccagcccctgccttcaaggagatagcagaggtctcaggcatgcaaatagaccctgatgaaatggagggacttgcaacgatagaaagaataacagggagtcaggtcagcccagggagtggccctgaaccccctcgaggagctcagg

SEQ ID NO: 549488 - DNA, 667 bp, Homo sapiens
aaatattaaataaatcagctggggaagggatggaggagtccagagaaggaaaactgacaggtatgagtgggagcgtaccaatgaatcctcagggctaccatacttaaaagaggtatgagcagacgtggtcctgccccagaaatgtgagtccctggctccctggcctgtccatgattctcctcactccctgcccagttgacccaccagccagtgaaaagacagattcttccttgtcagggcagtcgctggggaaagagtgaataccttaggttctcacgtcacaaaagggctgccaggagcctgcacagatggggtcagccaggatttggccgccagtttcctccgagccacatgggatgctcagccttctgcggggaggccactggcacagccagcgactgtttgcccacttttgcctccttctccctccactcagtggccactcattcactcagcaaccatttcctgagcaccagccaagtgccaggccctgtgtcaggcacagggtcccaaacaggaagcccagcccctgccttcaaggagatagcagaggtctcaggcatgcaaatagaccctgatgaaatggagggacttrcaacgatagaaagaataacagggagtcaggtcagcccagggagtggccctgaaccccctcgaggagctcagg

SEQ ID NO: 549489 - DNA, 667 bp, Homo sapiens
aaatattaaataaatcagctggggaagggatggaggagtccagagaaggaaaactgacaggtatgagtgggagcgtaccaatgaatcctcagggctaccatacttaaaagaggtatgagcagacgtggtcctgccccagaaatgtgagtccctggctccctggcctgtccatgattctcctcactccctgcccagttgacccaccagccagtgaaaagacagattcttccttgtcagggcagtcgctggggaaagagtgaataccttaggttctcacgtcacaaaagggctgccaggagcctgcacagatggggtcagccaggatttggccgccagtttcctccgagccacatgggatgctcagccttctgcggggaggccactggcacagccagcgactgtttgcccacttttgcctccttctccctccactcagtggccactcattcactcagcaaccatttcctgagcaccagccaagtgccaggccctgtgtcaggcacagggtcccaaacaggaagcccagcccctgccttcaaggagatagcagaggtctcaggcatgcaaatagaccctgatgaaatggagggacttgcaacgatagaaagaatracagggagtcaggtcagcccagggagtggccctgaaccccctcgaggagctcagg

SEQ ID NO: 549490 - DNA, 1507 bp, Homo sapiens
tggggcttcacaggtgtggatccctgtttttccccactccagaggtgtcagttgtaaaaatgakcctgaagccatatctgatgggaggctttggctcttcaaagtacgcttacaggggaagtgactttgagtgagcaaggagttcgatcttgggaggaggaggatagtttctgttttagagaaaaggggaagaagcctgtgtgtgtcaagcggggggtgcagggccttagtgtgctcatactgcaggaacagtgacatgcagaaacgcagctgggaggaggaggggtatctcttttttctgtccctagtctggggccacctcttgggagaagggagtggaggagatgtagaaacactcacaccaagaatacatctcctctcctccttctgagcagcagccacctgcacatgaaatcacattcagagcctctagccatgagctcatcacttctgtggacccagtgccagacactgcctcctgtgactcagtttccccactgctccccacccctgcctccttaccagtggctgaccggatgttggtgatgagaatggtgatgagaaggggtggaatgaaaggggccaatcagcgatgagatttgattgctctgtagcatgatgagtgtccctctcccctcgacaccttattctagcttgttaaacattttttctgagagggatttcttgacaaggaactggccagagtgttccgtttagcactctttgttctaactctaatccctgtcttcactgatgacagattctattttctagagctgactgcaacaaggtccctcttcactcatgctcttcgacactcttcccatggagatgtaggcatatgttccctccccctgagtttgggcaggtctgtgactgcaacagaagggatgtgatgtgacttctgaggctagaccataataattccctgcatttctacctggctttcttgggatgctaatttttggaaccttgccaccatgctatgaggaagcccaaactagcatgcatgaagagatcacattgcagggacacatgtaagagttctaactgacatcccagctaagatgcagccaatatccattatcaatcatcagacatgtaaaagaagaagcttccagatgacccagcagttgagtcatccccaggtgagtttcccaactgagaccccaggcaacatatagcagagataagtcattcttgtaccctgtctgaattccttacccacagtgtcattgatcataataagatggttgtttttttgaccttgtgttttggggtgttttgctatgcagcagtagtaactagacagcacccttggcaacatcttccccacccccactgaccacactaaaattaaacctttgtcattgttttagtaaattgttgtaatggatgctttcattactgggtttcaatcatttttatttttctgatatagggatttaaggctataaattccaagtacagcagtaactacatgcctcaagtttaatgtgcagtattt

SEQ ID NO: 549491 - DNA, 1507 bp, Homo sapiens
tggggcttcacaggtgtggatccctgtttttccccactccagaggtgtcagttgtaaaaatgatcctgaagccatatctgatgggaggcttyggctcttcaaagtacgcttacaggggaagtgactttgagtgagcaaggagttcgatcttgggaggaggaggatagtttctgttttagagaaaaggggaagaagcctgtgtgtgtcaagcggggggtgcagggccttagtgtgctcatactgcaggaacagtgacatgcagaaacgcagctgggaggaggaggggtatctcttttttctgtccctagtctggggccacctcttgggagaagggagtggaggagatgtagaaacactcacaccaagaatacatctcctctcctccttctgagcagcagccacctgcacatgaaatcacattcagagcctctagccatgagctcatcacttctgtggacccagtgccagacactgcctcctgtgactcagtttccccactgctccccacccctgcctccttaccagtggctgaccggatgttggtgatgagaatggtgatgagaaggggtggaatgaaaggggccaatcagcgatgagatttgattgctctgtagcatgatgagtgtccctctcccctcgacaccttattctagcttgttaaacattttttctgagagggatttcttgacaaggaactggccagagtgttccgtttagcactctttgttctaactctaatccctgtcttcactgatgacagattctattttctagagctgactgcaacaaggtccctcttcactcatgctcttcgacactcttcccatggagatgtaggcatatgttccctccccctgagtttgggcaggtctgtgactgcaacagaagggatgtgatgtgacttctgaggctagaccataataattccctgcatttctacctggctttcttgggatgctaatttttggaaccttgccaccatgctatgaggaagcccaaactagcatgcatgaagagatcacattgcagggacacatgtaagagttctaactgacatcccagctaagatgcagccaatatccattatcaatcatcagacatgtaaaagaagaagcttccagatgacccagcagttgagtcatccccaggtgagtttcccaactgagaccccaggcaacatatagcagagataagtcattcttgtaccctgtctgaattccttacccacagtgtcattgatcataataagatggttgtttttttgaccttgtgttttggggtgttttgctatgcagcagtagtaactagacagcacccttggcaacatcttccccacccccactgaccacactaaaattaaacctttgtcattgttttagtaaattgttgtaatggatgctttcattactgggtttcaatcatttttatttttctgatatagggatttaaggctataaattccaagtacagcagtaactacatgcctcaagtttaatgtgcagtattt

SEQ ID NO: 549492 - DNA, 750 bp, Homo sapiens
tgcatattaggaagggagcacagccccagaacaagaaaattatttaacaattttttatagaacgctcactttgctattaaccaaagaaatgtaaaatgctactggagcacacatggaacaaataaattatatagtgagaaggagatgtcagggaagagaatataataacattaatgttaataaaattagacaaaaagaaaaatggaaaaagataactttatcacaaaaatagaatatctaaagaattaaatgtacattctaaatataaaaaataaaatatctgaaattaagaattcatcagacagatggtttaacagccaactagaggtcatagaggaaaagattaatgacctcaaaggcaggtcattagaaattacctacatttttttaacttttattttaggtttggagttacatgcaaaggttcattatataggtaaacttgtgtcatggggggtttgttgtatggattatttcatcacccaggtattaagcctagtacccaatagttattttttctgcttctctccctcctcccgccctccactgtcaagtagaccccagtgtctgttgttcccttctttgtgttcatgagttcgtatcatttagttcccacytataagcaaggacatgtggtatttggttttctgttcctgtgctagtttgctaaggaaaatagcctccagctccatccatgttcccacaaaagacatgatctcattctttttttatggctgcatagtattctat

SEQ ID NO: 549493 - DNA, 645 bp, Homo sapiens
aaaaacaaaatgaaaacccccacacattgtgtttatatgtaaaatagaattcggtccttggctcagataattaaaaacaaggtttttacctacactaattaccaaagggagatttgaaaatcatgacttgagatgcactgcaggatgtctgcacccttgctcccctcctgcatggccggggcaccccctggtcactgggaactctccaacactcttggtgacattgcccccttgaggatctctgcactggatctttgctccctctcctgcagaacccacaackgctgacttactgatcttgggtgatgtctgattaaaaagtctccccaggcttaggaaactcaaggtgccactgtggacacagctcccacatttcagcttccagaaatcctgcttcaaatccagatcccagcactccctcattatgtggacttgaatgagtcacatcaatttattgagcttcagtttccccattgatgggaaaaagggtgattgataatacctgccatactttatattcataatgaatataatgagtatattcattaactcagtaaatatatattgaacacctactgtctgtgctgagaattcaacagcgagcagaacaaacatctctgccttattggagcttatggtctcgtg

SEQ ID NO: 549494 - DNA, 645 bp, Homo sapiens
aaaaacaaaatgaaaacccccacacattgtgtttatatgtaaaatagaattcggtccttggctcagataattaaaaacaaggtttttacctacactaattaccaaagggagatttgaaaatcatgacttgagatgcactgcaggatgtctgcacccttgctcccctcctgcatggccggggcaccccctggtcactgggaactctccaacactcttggtgacattgcccccttgaggatctctgcactggatctttgctccctctcctgcagaacccacaactgctgacttactgatcttgggtgatgtctgattaaaaagtctccccaggcttaggaaactcaaggtgccactgtggacacagctcccacatttcagcttccagaaatcctgcttcaaatccagatcccagcactccctcattatgtggacttgaatgagtcacatcaatttattgagcttcagtttccccattgatgggaaaaagggtgattgataatacctgccatactttatattcataatgaatataatgagtatattcattarctcagtaaatatatattgaacacctactgtctgtgctgagaattcaacagcgagcagaacaaacatctctgccttattggagcttatggtctcgtg

SEQ ID NO: 549495 - DNA, 569 bp, Homo sapiens
ttgagatagcgttgatattggtggtgtcagggtaaaggccccgttttaggactgaagaaaagggcatggggccactatagagacattgatagagtcttccttcctttgcatgagaggagtacctttaatttaaagggatgtatgtgtgttttgacattatttgggatcttttgagggtctgacatgcctgatgtttgctggcttataaagctacctggatttccgcattggctggttttcagcctgggttcatagattcatacctcgttagagtacttagaattgtacagtaggcggctctgctgtaagattttcatttggaatgcaccagaagaatcggaggattttttgattgttgagtacttaatagcttactcctgcaaataaaaataatagggwgatactaagcacctaccaagcctaaccccaccatttttcaaaactagatttcacctcccatattggtaattaagatgctgctttgactggagccatttttaggtgtgtgtcacagatgcactgcagcatcttttctggctcaccccaaatgcattgatcccctaaaaaat

SEQ ID NO: 549496 - DNA, 541 bp, Homo sapiens
ccctagcctccaacttttcaagaaggctgatttgagtaataataaaactcctgtctcccatttagctgkctccatgtatatgaaattatttctctcttgcaattcccatcttgataaattggctctatctgggtagcaggcaagaagaacctgttgggtggttcttacctgtaattcttcctgtccagcaaaaaccatttattcttcttgtccagttttaggaaagcatgcctgttgagattggatcacctttcttcttggagacagtcaaggcagtgcctattatgttggcctcccaggcaagagggtttgccaactggggtgatttccatgagcagagctttagaatgattcattccaacctgacttagaacaatttgctttatttcttcttttttaaattaataatagaggcagggtcttgctatgttgcccaggttggtcttgaagtcctggactcaagcagtcctcccaccttggcctcccaaagtgctaggattacaggcatgagccaccacacccagccagaataatttacttt

SEQ ID NO: 549497 - DNA, 1161 bp, Homo sapiens
ttttttttttttttttaaacgtagttttgctcttgttgcctaggctggaatgcaatggcgcaatcttggctcactgcaacctctgcctcccaggttcaagcgattctcctgcctcagcctacccagtagctgggattacaggcatgtgccaccacactcagctaactttttgggtttttagtagagacacagtttcaccatgttggccaggctggtctcaaactcctgacctcaggtgatccacccgcctcggcctcccaaagtgctgggattacaagtgtgaaccaccgcacccggccagcatggattttaatgtggtcttgttacctaagtttttaaggcaattattaactaccgtggggattgctaagtttttcttggtgtttttttgcctggtgtgtatttcacctaccttgttcatttgagcatgtatttttaacatttattgtacagttataaactgtcttatttaaatgttagaaattaagtttccttgtttgtaagccatgatttaactaacaactgataaccgtatattatcagagtcccagcctgtataaatcagaaggctcaatcatctcatttcagagagtagaaagcagccctggagggrgtatatggcgtgggctgtggtaggccaggggttggcatacaggtcacttgagtctaacttcatgccagcaaattgcaaattcagtcatcagttgcttttattttgagtgacagctgtgacattggtctttcccatgcagggagattctggcttaatacctcggatctgtgaaggactcttcagtcggataaatgaaaccaccagatgggatgaagcttcttttcgaactgaagtcaggtagggcctgtggcctgggtaactgtgtgtgagcttgattagagtcaatgctggttggcctgcatttaggtgctggaaatggataaggtctttagattcctaaagaaaaagtcttcccttttcccctcctgtgattatggtttggggataaagcttaaaacacataagtttttagtgattttcttgggtacagtttggataaagatttgggagctggcagaaataacagcttgggcagaaactaatgtgggatgttcatctcaaatggagtgagcttctgacttttaagtgtataccaattacttgcttca

SEQ ID NO: 549498 - DNA, 557 bp, Homo sapiens
tgtctccttaattgtacctacttagtttttcagtactttagcgtggtagaatcatgcactatacatcaaaagtaaggtgcaaatttaatgtagaaaagttaaattgaaaaaccactctttacagatatcagctgtataagttatattttacagactacttcaactatatttcctttttttctgtgtgtcttggtaaataatcagcacaaaaggggaagctgaactctttatgttctatattttatctttttctaggaattttctactcatttataatccaaatgcatagatacatttcaattataagactcattaaataacagatataaatgcaaattagtcataaaccaacctaaagtagttttaatattatctacccaaacatatacatatacacacacacacatgcatactggtttggggtaatatgaatttaatcaagcagttcttatacactrttactaaaacagtttctaactactttttttaattcaactgatatcttcataataaatgaatggctgaacttatattttccaatgtattcatttgtatag

SEQ ID NO: 549499 - DNA, 1553 bp, Homo sapiens
gggcaagtcggcttctcccccttctggagttacatttaagaaattaatatctttggcgtcaaagatactggccctgctcaaaatgcaacaaacattgtgtaatacaacttgacagctgaaatttatgttccttaaaaaagaattgacgtttcgggaaaatactaagagaggcatgttaattattcctagcatctccaggttggcctctgtccaccaccaactcatttgggccatcgaagcaggtatggctaactttccagcctcagttcttacctataccaatgttcacccttgctaaacttgcctaaaatgacctgcgctttacttttactatgcttttgctcagcctatcacattttcttataaactaatactagtttacatttcaacagcaatttacgtagcagctttacaaatactgtattttacaaatgccatatagagcctctcctcactgatctggtcttaaacaacaagcaagcgtgtatacatttcttatatgtgctatgagcatttattaaaaagtaaatccttattattacataatgtgttcataagtaaatcagtaagcaccttgagaatcagaaggccatatgcttcattttataccctgagttcagaacagtgtcttataaaaattaacatctcaaaatgcatcttctgttttgatcttgttgatatgaaattctaatttcacatgaatttcttttctgaaatatacatttaaatgcttatttaaataaaaattaagttagcattcttattaaaaccataaactgaaagtgttttgctacacaaacttaaatgcaaagggattatcttgttatgaacataaattattttaaacccttatatcatttaaacccttacattttcttttagtttttaatcagctgctaataagcacacagttgttgaatgtgggttaaggtaacagacgaggctattgaatttgttttctgtcccttccaagattccactgaattaaagcattaaaaaaaatccagaagaggaataaatatataacagaaatgaaacttaggggtgwaggggacccatgactgagatactttaatttctggagtagggaagaaggcagttggatgaaacaaagcaagcctcagacttcacaattataaaagaaaacttctgtgaaggtggaagccaatctccacctgaacatcacagaggccctggactcaaggttagcagagtggggagtagggagggggctgaagtcatgtactagttgaatatttacacatgggacatctgtaacttatcacaatactcctccatcgtctctaacaacaaagctccaggcaaaactcccaaggacttaaaaattcagaggctaaaaatagactctgagaaagtagaccacaaataaaaaaaaaaaagcatagtagataaaaggaaaaaggcgtagaaaatgaatttatgattaacacatccagctaatgtagtctcagaaagagacaatgaagtaaagtggacaaaatataattataagaagagaatttcctaacattgaggaaagcaaaatgtcttca

SEQ ID NO: 549500 - DNA, 1553 bp, Homo sapiens
gggcaagtcggcttctcccccttctggagttacatttaagaaattaatatctttggcgtcaaagatactggccctgctcaaaatgcaacaaacattgtgtaatacaacttgacagctgaaatttatgttccttaaaaaagaattgacgtttcgggaaaatactaagagaggcatgttaattattcctagcatctccaggttggcctctgtccaccaccaactcatttgggccatcgaagcaggtatggctaactttccagcctcagttcttacctataccaatgttcacccttgctaaacttgcctaaaatgacctgcgctttacttttactatgcttttgctcagcctatcacattttcttataaactaatactagtttacatttcaacagcaatttacgtagcagctttacaaatactgtattttacaaatgccatatagagcctctcctcactgatctggtcttaaacaacaagcaagcgtgtatacatttcttatatgtgctatgagcatttattaaaaagtaaatccttattattacataatgtgttcataagtaaatcagtaagcaccttgagaatcagaaggccatatgcttcattttataccctgagttcagaacagtgtcttataaaaattaacatctcaaaatgcatcttctgttttgatcttgttgatatgaaattctaatttcacatgaatttcttttctgaaatatacatttaaatgcttatttaaataaaaattaagttagcattcttattaaaaccataaactgaaagtgttttgctacacaaacttaaatgcaaagggattatcttgttatgaacataaattattttaaacccttatatcatttaaacccttacattttcttttagtttttaatcagctgctaataagcacacagttgttgaatgtgggttaaggtaacagacgaggctattgaatttgttttctgtcccttccaagattccactgaattaaagcattaaaaaaaatccagaagaggaataaatatataacagaaatgaaacttaggggtgaaggggacccatgactgagatactttaatttctggagtagggaagaaggcagttggatgaaacaaagcaagcctcagacttcacaattataaaagaaaacttctgtgaaggtggaagccaatctccacctgaacatcacagaggccctggactcaaggttagcagagtggggagtagggagggggytgaagtcatgtactagttgaatatttacacatgggacatctgtaacttatcacaatactcctccatcgtctctaacaacaaagctccaggcaaaactcccaaggacttaaaaattcagaggctaaaaatagactctgagaaagtagaccacaaataaaaaaaaaaaagcatagtagataaaaggaaaaaggcgtagaaaatgaatttatgattaacacatccagctaatgtagtctcagaaagagacaatgaagtaaagtggacaaaatataattataagaagagaatttcctaacattgaggaaagcaaaatgtcttca

SEQ ID NO: 549501 - DNA, 1553 bp, Homo sapiens
gggcaagtcggcttctcccccttctggagttacatttaagaaattaatatctttggcgtcaaagatactggccctgctcaaaatgcaacaaacattgtgtaatacaacttgacagctgaaatttatgttccttaaaaaagaattgacgtttcgggaaaatactaagagaggcatgttaattattcctagcatctccaggttggcctctgtccaccaccaactcatttgggccatcgaagcaggtatggctaactttccagcctcagttcttacctataccaatgttcacccttgctaaacttgcctaaaatgacctgcgctttacttttactatgcttttgctcagcctatcacattttcttataaactaatactagtttacatttcaacagcaatttacgtagcagctttacaaatactgtattttacaaatgccatatagagcctctcctcactgatctggtcttaaacaacaagcaagcgtgtatacatttcttatatgtgctatgagcatttattaaaaagtaaatccttattattacataatgtgttcataagtaaatcagtaagcaccttgagaatcagaaggccatatgcttcattttataccctgagttcagaacagtgtcttataaaaattaacatctcaaaatgcatcttctgttttgatcttgttgatatgaaattctaatttcacatgaatttcttttctgaaatatacatttaaatgcttatttaaataaaaattaagttagcattcttattaaaaccataaactgaaagtgttttgctacacaaacttaaatgcaaagggattatcttgttatgaacataaattattttaaacccttatatcatttaaacccttacattttcttttagtttttaatcagctgctaataagcacacagttgttgaatgtgggttaaggtaacagacgaggctattgaatttgttttctgtcccttccaagattccactgaattaaagcattaaaaaaaatccagaagaggaataaatatataacagaaatgaaacttaggggtgaaggggacccatgactgagatactttaatttctggagtagggaagaaggcagttggatgaaacaaagcaagcctcagacttcacaattataaaagaaaacttctgtgaaggtggaagccaatctccacctgaacatcacagaggccctggactcaaggttagcagagtggggagtagggagggggctgaagtcatgtactagttgaatatttacacatgggacatctgtaacttatcacaatactcctccatcgtctctaacaacaaagctccaggcaaaactcccaaggacttaaaaattcagaggctaaaaatagactctgagaaagtagaccacaaataaaaaaaaaaaagcatagtagataaaaggaaaaaggcgtagaaaatgaatttatgattaacacatccagctaatgtagtctcagaaagagacartgaagtaaagtggacaaaatataattataagaagagaatttcctaacattgaggaaagcaaaatgtcttca

SEQ ID NO: 549502 - DNA, 1553 bp, Homo sapiens
gggcaagtcggcttctcccccttctggagttacatttaagaaattaatatctttggcgtcaaagatactggccctgctcaaaatgcaacaaacattgtgtaatacaacttgacagctgaaatttatgttccttaaaaaagaattgacgtttcgggaaaatactaagagaggcatgttaattattcctagcatctccaggttggcctctgtccaccaccaactcatttgggccatcgaagcaggtatggctaactttccagcctcagttcttacctataccaatgttcacccttgctaaacttgcctaaaatgacctgcgctttacttttactatgcttttgctcagcctatcacattttcttataaactaatactagtttacatttcaacagcaatttacgtagcagctttacaaatactgtattttacaaatgccatatagagcctctcctcactgatctggtcttaaacaacaagcaagcgtgtatacatttcttatatgtgctatgagcatttattaaaaagtaaatccttattattacataatgtgttcataagtaaatcagtaagcaccttgagaatcagaaggccatatgcttcattttataccctgagttcagaacagtgtcttataaaaattaacatctcaaaatgcatcttctgttttgatcttgttgatatgaaattctaatttcacatgaatttcttttctgaaatatacatttaaatgcttatttaaataaaaattaagttagcattcttattaaaaccataaactgaaagtgttttgctacacaaacttaaatgcaaagggattatcttgttatgaacataaattattttaaacccttatatcatttaaacccttacattttcttttagtttttaatcagctgctaataagcacacagttgttgaatgtgggttaaggtaacagacgaggctattgaatttgttttctgtcccttccaagattccactgaattaaagcattaaaaaaaatccagaagaggaataaatatataacagaaatgaaacttaggggtgaaggggacccatgactgagatactttaatttctggagtagggaagaaggcagttggatgaaacaaagcaagcctcagacttcacaattataaaagaaaacttctgtgaaggtggaagccaatctccacctgaacatcacagaggccctggactcaaggttagcagagtggggagtagggagggggctgaagtcatgtactagttgaatatttacacatgggacatctgtaacttatcacaatactcctccatcgtctctaacaacaaagctccaggcaaaactcccaaggacttaaaaattcagaggctaaaaatagactctgagaaagtagaccacaaataaaaaaaaaaaagcatagtagataaaaggaaaaaggcgtagaaaatgaatttatgattaacacatccagctaatgtagtctcagaaagagacaawgaagtaaagtggacaaaatataattataagaagagaatttcctaacattgaggaaagcaaaatgtcttca

SEQ ID NO: 549503 - DNA, 1553 bp, Homo sapiens
gggcaagtcggcttctcccccttctggagttacatttaagaaattaatatctttggcgtcaaagatactggccctgctcaaaatgcaacaaacattgtgtaatacaacttgacagctgaaatttatgttccttaaaaaagaattgacgtttcgggaaaatactaagagaggcatgttaattattcctagcatctccaggttggcctctgtccaccaccaactcatttgggccatcgaagcaggtatggctaactttccagcctcagttcttacctataccaatgttcacccttgctaaacttgcctaaaatgacctgcgctttacttttactatgcttttgctcagcctatcacattttcttataaactaatactagtttacatttcaacagcaatttacgtagcagctttacaaatactgtattttacaaatgccatatagagcctctcctcactgatctggtcttaaacaacaagcaagcgtgtatacatttcttatatgtgctatgagcatttattaaaaagtaaatccttattattacataatgtgttcataagtaaatcagtaagcaccttgagaatcagaaggccatatgcttcattttataccctgagttcagaacagtgtcttataaaaattaacatctcaaaatgcatcttctgttttgatcttgttgatatgaaattctaatttcacatgaatttcttttctgaaatatacatttaaatgcttatttaaataaaaattaagttagcattcttattaaaaccataaactgaaagtgttttgctacacaaacttaaatgcaaagggattatcttgttatgaacataaattattttaaacccttatatcatttaaacccttacattttcttttagtttttaatcagctgctaataagcacacagttgttgaatgtgggttaaggtaacagacgaggctattgaatttgttttctgtcccttccaagattccactgaattaaagcattaaaaaaaatccagaagaggaataaatatataacagaaatgaaacttaggggtgaaggggacccatgactgagatactttaatttctggagtagggaagaaggcagttggatgaaacaaagcaagcctcagacttcacaattataaaagaaaacttctgtgaaggtggaagccaatctccacctgaacatcacagaggccctggactcaaggttagcagagtggggagtagggagggggctgaagtcatgtactagttgaatatttacacatgggacatctgtaacttatcacaatactcctccatcgtctctaacaacaaagctccaggcaaaactcccaaggacttaaaaattcagaggctaaaaatagactctgagaaagtagaccacaaataaaaaaaaaaaagcatagtagataaaaggaaaaaggcgtagaaaatgaatttatgattaacacatccagctaatgtagtctcagaaagagacaatgaagtaaagtggacaaaatataattataagaagagaatttcctaacattgaggraagcaaaatgtcttca

SEQ ID NO: 549504 - DNA, 556 bp, Homo sapiens
ggcccactgtttctaagtgcattatatcattaaattcaaataacctataagttagatactgtcattgtccatattttataagtgaaatggaggcccagagagttaagtgtcttgccaagaccacgcagctagtaaatggcagagctaaaattttaagctgtctgattttagttcaagctttaactaccacgctctgttctccctcccacagagtaagttaactgatcatgctgttcttactcaaacatcttacatagttcacttcaaacacgacactactttttagtcttatattctgtatsctttttgaactgaccacatttcattatttctgttactttttttttctatgccaagctgaatccttctgttatctaactattcatattcttcccagtaattttattcattttattttttctgcctggccttgtttcccatcaagttgcctgtgtttatctccctctgatagcatgttctctaactgctctgtgctactgaatgcatttatttcatattataattatggtttgatgttttatctttcctgtgagcc

SEQ ID NO: 549505 - DNA, 556 bp, Homo sapiens
ggcccactgtttctaagtgcattatatcattaaattcaaataacctataagttagatactgtcattgtccatattttataagtgaaatggaggcccagagagttaagtgtcttgccaagaccacgcagctagtaaatggcagagctaaaattttaagctgtctgattttagttcaagctttaactaccacgctctgttctccctcccacagagtaagttaactgatcatgctgttcttactcaaacatcttacatagttcacttcaaacacgacactactttttagtcttatattctgtatgctttttgarctgaccacatttcattatttctgttactttttttttctatgccaagctgaatccttctgttatctaactattcatattcttcccagtaattttattcattttattttttctgcctggccttgtttcccatcaagttgcctgtgtttatctccctctgatagcatgttctctaactgctctgtgctactgaatgcatttatttcatattataattatggtttgatgttttatctttcctgtgagcc

SEQ ID NO: 549506 - DNA, 594 bp, Homo sapiens
gactctaagaactccatgagacatctagtcatatagtcagctaacacagattgcatgtctactgcatggcaccactgttcctcatgctggggatacagcagatgacaaaacggaaaagaatccctgccccgatgaggcccacatctggtggggcagcctaccagactattctctgagctgtcaagcactgtgcacatttaagaaattactctattcaaaggtaatggtgagagtgacccgtgtaaaacagatggggaaactaagtcacagaggttacaatggtagtgtgtccggaattggtgggttcttggtctcactgacttcaagaattaagccgcggaccctcacggcgggtgttacagttcttaaaggcrgccgtgtcaggagtttgttccttctgatgtctggatgtgttcggagtttcttccttctggtggggtttgttgtctcgctggctcagaagtgaagctgcggacctttgcagtgagtgttacagctcttaaggcggcgcgtctggagttgttccttcctcctggtgggttcgtggtctcgctggtttcagaagtgaagctgcagactttcgcagtgggtgtt

SEQ ID NO: 549507 - DNA, 594 bp, Homo sapiens
gactctaagaactccatgagacatctagtcatatagtcagctaacacagattgcatgtctactgcatggcaccactgttcctcatgctggggatacagcagatgacaaaacggaaaagaatccctgccccgatgaggcccacatctggtggggcagcctaccagactattctctgagctgtcaagcactgtgcacatttaagaaattactctattcaaaggtaatggtgagagtgacccgtgtaaaacagatggggaaactaagtcacagaggttacaatggtagtgtgtccggaattggtgggttcttggtctcactgacttcaagaattaagccgcggaccctcacggcgggtgttacagttcttaaaggcggccgtgtcrggagtttgttccttctgatgtctggatgtgttcggagtttcttccttctggtggggtttgttgtctcgctggctcagaagtgaagctgcggacctttgcagtgagtgttacagctcttaaggcggcgcgtctggagttgttccttcctcctggtgggttcgtggtctcgctggtttcagaagtgaagctgcagactttcgcagtgggtgtt

SEQ ID NO: 549508 - DNA, 2715 bp, Homo sapiens
ggcttcccccgacgcaaggaagctttgtatcgggcactgggccgagtgcttgtggaaggaggtagtgatgagaagcggctctgcttgcaacttctctcggacgttctccggggtcagggggaggcaggccagcttgaagaggcctttagcttagcacttttgcctcaactagttgtctcgttacgggaagagaatccagccctgcggaaagatgcgctgcagatccttcatatatgtctgaaacgtagtcctggagaggtgctgagaacgcttatacaacaaggactggaaagtaccgatgcccgacttagagcttccacagcactactgcttcccatcttgcttactactgaggacttgttgcttggtctggatctcaccgaggtgataatatccctagcccgaaagcttggtgatcaggagacagaagaagaatctgagacagctttctccgcacttcaacaaattggggagcgacttggccaagacaggtttcaatcttacatttctcgtctgccctctgccctgaggakacactacaatcgccgcctggagtcccagtttggaagtcaggttccttattatttggaacttgaagcctctggatttcctgaagatccccttccctgtgcagtgactctttccaacagcaatcttaaatttgggattattcctcaggagctgcattcacgattattggatcaggaagactataagaaccggacccaggccgtcgaagaactaaagcaggtgctgggaaaatttaaccctagttctactcctcattctagtcttgttggcttcattagtttgctatataatttgttagacgattctaacttcaaagtggtgcatggcacacttgaagtcctgcatttactggttattcgccttggagagcaggtacagcagttcttgggaccagttatagcagcttctgtcaaagtgctggcggacaacaagttggtgatcaaacaagaatacatgaaaatcttcctcaagctaatgaaggaagtaggacctcagcaggtgctttgtttactcctggaacatctcaaacataagcattccagagtgagagaggaggtggtgaacatttgcatctgctccctgctgacctatcctagtgaggattttgacttgcccaaactgtcctttgatcttgccccagctcttgtagatagcaaacgcagggtacgccaagcagctttagaagcttttgccgtattggcatcatcaatgggctcaggtaaaaccagcatcctttttaaagctgtggatacagttgaactgcaagataatggagatggagtgatgaatgctgtgcaggccagattggctaggaaaaccttaccaaggctcacagagcagggatttgtggaatatgcagtactgatgccatcttctgccgggggtaggtcaaaccatttggcacatggagcagatacggactggcttttggctggtaacagaactcagagtgcacactgtcactgtggtgaccacgtgagggatagcatgcacatttatggatcttacagcccaactatctgtacccgaagggtattaagtgcaggaaaaggaaaaaataaattaccatgggaaaatgagcaacctggaatcatgggagaaaaccagacctccacttccaaggatatagagcaggtatgcttctctaattttcttgagtcgaaagtgtgaagaatttaaatgaaaatatgcccgtgatgacttaagggtcagcctgcttgagggaaacatgttatgctttgttttaaattgattttaaatccatctgaatgttggtactcattataatggtacagatcacaaaggaccatttaataggcttcctgcttgatagatttaattaaatttgagacacatgtgatatagacaataccaagattcagttttagttactgtagcatgtcagtttatctcattcatacaacaaacattgaatacctagtacgtgccagataaagagctaaattctgggaatgaagatgaggccagtttcacacagtataggaaaaaggtcagacctgggaattagcagttaacaaattcgttaagtgctaaagtagaaatataaagagtcctgcaggaatactgaagacagaaaaactaattccactagaaaagtaaaaaaaaaaaaaaaaaaaaaaggaaaaagaaaaagcctccacagaagatacaacatttgaactgagattttccccccaaagcttttatttaaaaaattccaaatctataggtaagagtacaatgaatacccatatacttcatctatatttaccagttgtaacatcttgacatatttcctccatatttgctgaaccatttgaaagtaaattgtggatatcttgagatttcactcctaaatatctcggcatatatctcctaagaatgacattcttcttttataaccataaatcattattgcacctaagactatcagtagtaattcaataatatgtaacagacagcctgtatttaaatttcccaaattgtctccaaaagtgttttatatttcttgttttacttttatcatccaggatctagtcagggttcatgtggttaatgtcccttgtaattttatctagaataatatcctacttgtttgtttctttgttttttcatggcattggccttttataaaaagagtttggggtagttttgtagaatgtcccaagttttacatttatatgt

SEQ ID NO: 549509 - DNA, 1473 bp, Homo sapiens
gctcccagcagctcctggagctgcctccttacttatgcactactagtcagaaagaggaaccattccccacttcccccgcatctccaccctcactcaaagaaaggacctagacttgagtattgttggtcccaattggtctgactcaggtcatgtaccagtgcctaagcaatcaatgtgatcaaggacatgggatatacaacaggtttaaactcatcagagcccattcttgcaaacagtcagagcccactgcatatggctgagaagctcagggcacttctaggaaagaaaagaaggcatgaaattgatgctggaaggaacaagacatgtccactgaagtccctgtccttacagagcaaaaagcttctaaagagttggcagaataatgggaactcaccaaccctacacacacatgaatcatttctgatagatgagggctaacaagtgcatagtcttgggaatcttcccacagcaacaggatgcagtccaagtgttctgttaaaaactaccaccgagcagccagcatatgctcaacactgctggcctctggcagtgatttagaggtgaaaccttttgtgtccaattagtctacgccttgactcatgcagtgcctaagaattcacctttatttatgaagttcagggtctcagataaatttgacaagagctgctgaaagttcaagtgtttgcaaggatattagttttctcatttaatcataatttaattttgattaacaagtggacctagttagagaaaactgaaaatagctccatttgaacctcatgttagtagaaatattccttctcaatcttgttttccaccttgaatgctggatttatttctaagcttatatgttatacctcatcaatctaatgctctaagtcagtggttctcatcctcggccacttggggagctttaagaaatatgaatacctaggtctcaaccccaaaacatcaatgcctggatatcgatagattctgttgtaattggtccagggtgcaaccaaggttaagaaccactgctcttagtagaaccacgttagagacaaagataatgtctcctaggaagcatgtcaaatttgcacaagcaacaaatttaaatgctgtagccagttaggaaacagttaaagttgacccaggattaaatcaaatttggaaatagggggaaatgttctccacatggacagcaagtcacccatttgtgcatgcttttgccccagctagacacatctcccacatctctactgctaccacctggtctaagctaccatcatcttttccctgggccactgtaatatgctcccaagctataaaatataaaagctctgcaggccattatctgcttactcccctcattcactacactccagccatattgacctttctttttgtttgtttgttttgttttgtttgagacagggcctcactctgtcatccaggctggagtacagtggcccgaacrtggctcactgcagc

SEQ ID NO: 549510 - DNA, 890 bp, Homo sapiens
gaaggagcagtgtgcaagaagataagagggagaaggaaaagggaggaaactagaacattgtaaaccatgaggactgcatgtgtaaaattaagtaattataaaaaacatggcttatttgtcaaatggtgagaaattcagtatggctagaagatagattgtgtttgcatgggaaagaagtgagagaggaggaccaggagaggaatgaggagtgaatggagatgagtgtgagagttgggttggattttatcctagagaaaactcgtgagaaggagagttctcagacaggaagcagcataatcagatttggtttttaggamgatgactttttaataacttggaggatagattagtagggggcagattggaagatggaaatatgttaagagatatgaggtttggccaaggtgtggcagtggtgatggtgccagatgtggagctagtctgttatataggaatgaggtcttggtcactatgaaaggtgaggaatcaacaggtgtgacagatgactccagagtttatagtttaagagactgaataaatggcctgccatcaactgataaaagaaatattagaaggaggaggtttggtgataacaaataattaagatatgaactttttaagtttcagatgctagtggaataagtagttggagatattcaggaagagttgagaatatgtatgcggaatgcaacaaggagatcaggtccataaatatatattggagaatcgccagcatgtaaaagttagttaaagcttttaacatttttagttgtgaaacattctaaatataagtttgaatattgtgtagtttagatcatgactattgtagtagacagaataattctaagccccaagattccctccttatggtgtgcatgccctgtcttatc

SEQ ID NO: 549511 - DNA, 890 bp, Homo sapiens
gaaggagcagtgtgcaagaagataagagggagaaggaaaagggaggaaactagaacattgtaaaccatgaggactgcatgtgtaaaattaagtaattataaaaaacatggcttatttgtcaaatggtgagaaattcagtatggctagaagatagattgtgtttgcatgggaaagaagtgagagaggaggaccaggagaggaatgaggagtgaatggagatgagtgtgagagttgggttggattttatcctagagaaaactcgtgagaaggagagttctcagacaggaagcagcataatcagatttggtttttaggaagatgactttttaataacttggaggatagattagtagggggcagattggaagatggaaatatgttaagagatatgaggtttggccaaggtgtggcagtggtgatggtgccagatgtggagctagtctgttatataggaatgaggtcttggtcactatgaaaggtgaggaatcaacaggtgtgacagatgactccagagtttatagtttaagagactgaataaatggcctgccatcaactgataaaagaaatattagaaggaggaggtttggtgataacaaataattaagatatgaactttttaagtttcagatgctagtggaataagtagttggagatattcaggaagagttgagaatatgtrtgcggaatgcaacaaggagatcaggtccataaatatatattggagaatcgccagcatgtaaaagttagttaaagcttttaacatttttagttgtgaaacattctaaatataagtttgaatattgtgtagtttagatcatgactattgtagtagacagaataattctaagccccaagattccctccttatggtgtgcatgccctgtcttatc

SEQ ID NO: 549512 - DNA, 615 bp, Homo sapiens
ccctgttaataagtgttggggtgtccctgacccctgcacttttaatcagtaggtaatatgtagtacctttctctggcttgtaaatgttttcttgcagagaaaatgggaagcaactatctagattggaaaggttaaaacgaaggaatcggaaagcaacagttaaatagagttaaatggctacttttccctctcagagttttggaatacctatgagctttcagccataaagccaagaaggttctggctggcacgacattgtccccgactaatgctaggatggtgttgtcaaacagaggcagaaacagagccctatcctgtttctgctcagttgcccatttcagtctccrtcctgatgcaacacgaacttctacagacagactcagggtctccagaaagcaaagcctttaggaattaaagtcatctttgcttttaaatacttgtttctcccatgttaaggacacttttctaggcaaaaacctcctgattgcctgttgctgtggcatatcttcacaaattcatttttcataaatgtcccaaatacatctgagacattttttataacttgtgtaagcttccagagacaaatgttaaagatgacagtttggaaatgaagac

SEQ ID NO: 549513 - DNA, 615 bp, Homo sapiens
ccctgttaataagtgttggggtgtccctgacccctgcacttttaatcagtaggtaatatgtagtacctttctctggcttgtaaatgttttcttgcagagaaaatgggaagcaactatctagattggaaaggttaaaacgaaggaatcggaaagcaacagttaaatagagttaaatggctacttttccctctcagagttttggaatacctatgagctttcagccataaagccaagaaggttctggctggcacgacattgtccccgactaatgctaggatggtgttgtcaaacagaggcagaaacagagccctatcctgtttctgctcagttgcccatttcagtctccgtcctgatgcaacacgaacttctacagacagactcagggtctccagaaagcaaagcctttaggaattaaagtcatctttgcttttaaatacttgtttctcccatgttaaggacacttttctagrcaaaaacctcctgattgcctgttgctgtggcatatcttcacaaattcatttttcataaatgtcccaaatacatctgagacattttttataacttgtgtaagcttccagagacaaatgttaaagatgacagtttggaaatgaagac

SEQ ID NO: 549514 - DNA, 1443 bp, Homo sapiens
ccgcgcctggcccacaatcacttctaaaattgasagagctctctccgatcatcacacaaacattgttcactgtttttgaaaatgagtctccaaatctcagacacatctgtaaaaagctagtttaactatttaaacaatgaaattaagtagaatggtggggccaagagcctggcctggaccttctcgctgatcctcttcctgcaagggacaaaacgacaccttcatagaccagtgctttggatttgccggtcaaaaaatcaccctctcctgtcctgcatccgcactgattgtagactctccctccaggctcagctcacagcccacccatctccctttcagccagggccctgcagtcagctacacactccatccatgccaggatgccctcacggctctattctctcacagtagccacccatcctcaggcctagggagccccctccaccatcatcctccaatcctggtcccacgtggtctgacgttgctgaagatagtgatgtagcagagccagctgccttcatggcatgttcatgctgcctgacccgagttcagaggccttgtcactgtcgtccacagctcttgcaaatatctccatttccactctgcagaagccacctctagcccaggcattctctgggtaggcccatgctgtcacctgcaaaagaaccacctgaaaatctcattggaaaactggttcctgggcctcaagctaaaaacaactctgttttggcatatctgaagtggagcccgagaatgtttatttctaacaagctcccgggaggagggtggtactgctgctagcctagactttgttgagaatagtatggatgcagaagggtctcgtgcctcctggactctaaagaccataagagccacctgaggactctatgaacatgcagactctgcttctgtgagcctggggtgagcacaagcatctacatctgaaccagcatccccgctgctgccactgctgcttgtcaggtcacactttgaagctcaagacgggagatgacttcaacctcctgacaaacccctttcctgtcctctcccccacctccacatttcaatctatttataccaactcctttcagcctcctctccaacctgattctattacgatattattggcttagcacagcataaggacggcgattacaggatatgcatcttcccttctcacatctgaggcagacgtcgctaatccatcctggtactattttgtgctgagcccagacatagagacataatccctcttgctgtagtgtgccaagcagctccctccagtctccccagcctgtcacatgccttccctcgggatggtgcttgggactgttgtgagctctccatggctttatcctgcctcgtgggccatgcatgccggtgaagccagacggtgtgctgccttaacccacaatccaccaactgtgacaggctgaccccaac

SEQ ID NO: 549515 - DNA, 1443 bp, Homo sapiens
ccgcgcctggcccacaatcacttctaaaattgagagagctctctccgatcatcacacaaacattgttcactgtttttgaaaatgagtctccaaatctcagacacatctgtaaaaagctagtttaactatttaaacaatgaaattaagtagaatggtggggccaagagcctggcctggaccttctcgctgatcctcttcctgcaagggacaaaacgacwccttcatagaccagtgctttggatttgccggtcaaaaaatcaccctctcctgtcctgcatccgcactgattgtagactctccctccaggctcagctcacagcccacccatctccctttcagccagggccctgcagtcagctacacactccatccatgccaggatgccctcacggctctattctctcacagtagccacccatcctcaggcctagggagccccctccaccatcatcctccaatcctggtcccacgtggtctgacgttgctgaagatagtgatgtagcagagccagctgccttcatggcatgttcatgctgcctgacccgagttcagaggccttgtcactgtcgtccacagctcttgcaaatatctccatttccactctgcagaagccacctctagcccaggcattctctgggtaggcccatgctgtcacctgcaaaagaaccacctgaaaatctcattggaaaactggttcctgggcctcaagctaaaaacaactctgttttggcatatctgaagtggagcccgagaatgtttatttctaacaagctcccgggaggagggtggtactgctgctagcctagactttgttgagaatagtatggatgcagaagggtctcgtgcctcctggactctaaagaccataagagccacctgaggactctatgaacatgcagactctgcttctgtgagcctggggtgagcacaagcatctacatctgaaccagcatccccgctgctgccactgctgcttgtcaggtcacactttgaagctcaagacgggagatgacttcaacctcctgacaaacccctttcctgtcctctcccccacctccacatttcaatctatttataccaactcctttcagcctcctctccaacctgattctattacgatattattggcttagcacagcataaggacggcgattacaggatatgcatcttcccttctcacatctgaggcagacgtcgctaatccatcctggtactattttgtgctgagcccagacatagagacataatccctcttgctgtagtgtgccaagcagctccctccagtctccccagcctgtcacatgccttccctcgggatggtgcttgggactgttgtgagctctccatggctttatcctgcctcgtgggccatgcatgccggtgaagccagacggtgtgctgccttaacccacaatccaccaactgtgacaggctgaccccaac

SEQ ID NO: 549516 - DNA, 1443 bp, Homo sapiens
ccgcgcctggcccacaatcacttctaaaattgagagagctctctccgatcatcacacaaacattgttcactgtttttgaaaatgagtctccaaatctcagacacatctgtaaaaagctagtttaactatttaaacaatgaaattaagtagaatggtggggccaagagcctggcctggaccttctcgctgatcctcttcctgcaagggacaaaacgacaccttcatagaccagtgctttggatttgccggtcaaaaaatcaccctctcctgtcctgcatccgcactgattgtagactctccctccaggctcagctcacagcccacccatctccctttcagccagggccctgcagtcagctacacactccatccatgccaggatgccctcayggctctattctctcacagtagccacccatcctcaggcctagggagccccctccaccatcatcctccaatcctggtcccacgtggtctgacgttgctgaagatagtgatgtagcagagccagctgccttcatggcatgttcatgctgcctgacccgagttcagaggccttgtcactgtcgtccacagctcttgcaaatatctccatttccactctgcagaagccacctctagcccaggcattctctgggtaggcccatgctgtcacctgcaaaagaaccacctgaaaatctcattggaaaactggttcctgggcctcaagctaaaaacaactctgttttggcatatctgaagtggagcccgagaatgtttatttctaacaagctcccgggaggagggtggtactgctgctagcctagactttgttgagaatagtatggatgcagaagggtctcgtgcctcctggactctaaagaccataagagccacctgaggactctatgaacatgcagactctgcttctgtgagcctggggtgagcacaagcatctacatctgaaccagcatccccgctgctgccactgctgcttgtcaggtcacactttgaagctcaagacgggagatgacttcaacctcctgacaaacccctttcctgtcctctcccccacctccacatttcaatctatttataccaactcctttcagcctcctctccaacctgattctattacgatattattggcttagcacagcataaggacggcgattacaggatatgcatcttcccttctcacatctgaggcagacgtcgctaatccatcctggtactattttgtgctgagcccagacatagagacataatccctcttgctgtagtgtgccaagcagctccctccagtctccccagcctgtcacatgccttccctcgggatggtgcttgggactgttgtgagctctccatggctttatcctgcctcgtgggccatgcatgccggtgaagccagacggtgtgctgccttaacccacaatccaccaactgtgacaggctgaccccaac

SEQ ID NO: 549517 - DNA, 542 bp, Homo sapiens
gaggcaagggaattgcttgaacccaggaggcggaggatgcagtgagccaagatcacgccattgcactccagcctgggtgacagagcaagactccgtctcaaaaaaaaaaaaaaaaaagagtctgaaaatctagacctggaactgtcactaaactccctgtatgttccttcccctcccagagtaggccttgactctctaaagccctctaccattctaacttcctggttggaaaaaatatatctatcacttagacacgaaggtgcagctcaaaggaagaaatatggcagcatttgcagcatragagtcagtcattttatttttttggtttaaagtgaattttcatttagttcaactccaaccatcctgatggaaccacagtttggctgaagggtaaaacaatgtgtgcactggagtgactcgtgtagatgtgacctaattctcagccgccccaccaatattttattcttcaaaactgacctactagacaactggcgtttgacattgctgttgctaatgcatgcgagtatgcctcagcctcttcc

SEQ ID NO: 549518 - DNA, 516 bp, Homo sapiens
atgaaggtttcttcccatggttcctaaaggtgctaaaaggcttagaaaaggatttgtttcaccccatagcttattctacccctcccacatgggcacacaaggtgtgagtacccaggcagggaaagtggaaagcatcacagtgatagttaacatttctgagagttcatggaccctcctgaaatcatctggcacaaatatttttgcatagggttctagaatgttcctcaaccttctgaagcatattcatgaacatatgaatatattcccaggctaggaatgccgatataaaraaaaatcccctggatggacagcccaatgtactagcttgccagtgatttgcaggcagccttaggaaggttggttcactcctctgactttccacattcttggcacagtgctaagattctgagagtctttgattaatggcattgattcacaaagcaaaccagttcatatgggcacctagaaaataattttgaataaaactgggccttgattgtgttcccagcactctaa

SEQ ID NO: 549519 - DNA, 516 bp, Homo sapiens
atgaaggtttcttcccatggttcctaaaggtgctaaaaggcttagaaaaggatttgtttcaccccatagcttattctacccctcccacatgggcacacaaggtgtgagtacccaggcagggaaagtggaaagcatcacagtgatagttaacatttctgagagttcatggaccctcctgaaatcatctggcacaaatatttttgcatagggttctagaatgttcctcaaccttctgaagcatattcatgaacatatgaatatattcccaggctaggaatgccgatataaagaaaaatcccctggatggacagcccaatgtactagcttgccagtgatttgcaggcagccttaggaaggttggttcactcctctgactttccacattcttggcacagtgctaagattctgagagtctttgattaatggcattgattcacaaagcaaaccagttcatatggrcacctagaaaataattttgaataaaactgggccttgattgtgttcccagcactctaa

SEQ ID NO: 549520 - DNA, 572 bp, Homo sapiens
tggagttgcccaccagccaacaagcaaattttagcagcatcaccatctttcctgagtggcaatagtgtgtagtgttgaattttcccccttctaaaaatgactagaaatacaaaattagaagcattgatgctagtgataaggaaytgaggcatcatataacttatcttaataaaatccagaataaaataaaataaaataaacaaaaaaagttaaaacatgtggaaaaaggcaataaaataaaataaaatttaggtaagtggaaattattaggcatggcaaaaaatggcagagtttcctttcaatacaatgcataacatttttagattatgactcaaaaagagctcaaaatggaagaacatgtacaaaatattgtgataaaaggtgaggtgtcattaaggagtttaactttttttggtattattagtggtttgggctgaagtttcattattgccaccaagtccattgtgtggctttctcatcttggatttttgtcttaatgatcagtaagctttctagaaaacctggctggagccctgtggtctccagcagatcacggagaggcagatgagtga

SEQ ID NO: 549521 - DNA, 610 bp, Homo sapiens
aataatacaaacttccacaaaaaaattttgtgctacaaattagatctttattatttttcaaaagatagaagagatcatcttgttctcaaacaaaaagtaaaacaataatgcccaataatatacagaagaaacacaaacaaaaaccccacagagtttgaatcacccacacaggtcatatttcatatcatattctgccagtggagttaaattctgctgctttattactggctccttccaggaaatgagtcagcgaggcattaagtcttcctccaggcagcccayctaaatcaatcctcccagagggaccaggattgtcctgcctttgacaacattcaggaaactgggtggcccatttctgtgctgggccctgtaacatggacacgttgatctctttccaagaggccatgccttatcctgtgtccccaaggaggccctatgctgaccgcagcactggccacactgagctacttgccctgtactttcctcgcccctcctctgattaggcctctctgtaactttctctgggggagtcctctaatgcccatctttttcttctcctgtatcttgtgttctcctgctcggcctgactcacagcaatgcctgtgaaaga

SEQ ID NO: 549522 - DNA, 439 bp, Homo sapiens
ctgtctgtctgatggctcacatgggcaagtctgcaatacacaacaggacaaygggtactacgatagagtttatgtatatagaagcttggaatgtctatgaccctctgtgtagcaaaatggcaacttgaagaattgttttaataggatttattaaaattttgacatttatgctttctggggaagatgagttatgtagacagcaaaatggatttactttttaattggcttttctaaaataattcgtctcattttgcatttagtcttcagctgttgctccgatgcctaaaattttatgtttttacattttctgaggcagatattattaaaatattcactgctacttgatatttcagtgctttagtttcagtttcatttttaggaaattgataatattttcaaattatataccagagtgattgtgtcaatgcaatttcctttt

SEQ ID NO: 549523 - DNA, 580 bp, Homo sapiens
agtgtgaaacaactgaaaagttgaaaggagtatattagtaagtggagagggaggcaatttgatggggatatttgaaaaagttggaggatacatggattgagagaaagaaaatccaggatggaggaaaactttaaaaacacttgaaaaccacatagaaaacacgcaagaaaaatacgaaagaaaatataaaaccacaactgagaactataactgaaattataatcatttttcacaatataataatatatgtttttaccaacccttggaataaagtttaaaatttgaatttatttatatagagaataatacacaaccttacaacaaaatatataatttaaaaatcctacctatttgatttgaaagacttgtagaaattaacaaaattattacataggtttgatttctcatattttttacwtaacattaaactcaattattttctaacagttttgtacatcaaaagtccaggcagactccaccagtttttttacttaggaactcacagggtgatactgaagatatggctaactttaagtttttatctggaaactaggggaaaagtcacctctaagctcattca

SEQ ID NO: 549524 - DNA, 580 bp, Homo sapiens
agtgtgaaacaactgaaaagttgaaaggagtatattagtaagtggagagggaggcaatttgatggggatatttgaaaaagttggaggatacatggattgagagaaagaaaatccaggatggaggaaaactttaaaaacacttgaaaaccacatagaaaacacgcaagaaaaatacgaaagaaaatataaaaccacaactgagaactataactgaaattataatcatttttcacaatataataatatatgtttttaccaacccttggaataaagtttaaaatttgaatttatttatatagagaataatacacaaccttacaacaaaatatataatttaaaaatcctacctatttgatttgaaagacttgtagaaattaacaaaattattacataggtttgatttctcatattttttacataacattaaactcaattattttctaacagttttgtacatcaaaagtccaggcagactccaccagtttttttacttaggaactcacagggtgatactgaagatatggctaactttaagtttttatctggaaactaggggraaagtcacctctaagctcattca

SEQ ID NO: 549525 - DNA, 570 bp, Homo sapiens
tatctatatgaaggtccaactttgattctgctttgttttggctttcttttttgtattacttttctccaaagagtaaaatacacacttgttttattctcttattcctacagcacctaacataattcttactaaaaaatatwatttaatgaagaaaattattatataatacattttgttgatacattattttctacatattatgtgtcaattttgttccttactatcctcagctggaatccatttgaagagacagaactgtattgtgtagattcaagcaatacatagtaggataccatacatactgtagggtttggctctgtgtccccacccaaatatcaccttgaattgtaatctccataatcctcatgtgtcaagagcaggaccagatggaagtaagtagatcatgaaggtggtttcccccatgctgttctcattatagtgagcgagttatcttgagatttgatggttttataagcatctgacatttcccctggttgcactcattgagtcttgccaccctgtgaagaaggtacctgcttctcttgcattctgccatgattgtaagttttc

SEQ ID NO: 549526 - DNA, 710 bp, Homo sapiens
agacctaatgttcccaagatttggggttctgctaacttagtgatcttggtttccaagggaggaatgcttccaccagagatgctttaatatggttccattaaactggaagctgagcccacacgtggccacttggagctccccatgctagtaaatcaacaggaaaagaagaaaatgaatgttatggctgggaaattaattctgactatctggaggatatggattgctactacaaaaagcgctgaaatagaagtaggtctaatccacagtgagttggttgttatttaatctgtccagtagatggtgccaaagtaayattcgtagatgattaggcattctcacaggctattccaagatgaagatttgttcccacagccaaccatccttttttgccttggaaaggtgaagtctacatttgcaattgctaatgccagctggacagccccctgcctatatattgaaactggatggtagtgctagttttacttttggtattgaaagaacaaaggtcaaaccattatcttagagcttttatagccctttactgataagtttttacgaaatcataaaataaacatattctgaaattaaatcagaaagtgttgtgaacatgaagtcaacaatttacagtcatatatcatatttttaattttagaggctatttgaaaggtgtgctctattttaaattcacactacatacactgttttttccc

SEQ ID NO: 549527 - DNA, 516 bp, Homo sapiens
acaaaatttagccaggcatggtggcgggcgcctgtaatcccagctacttgtgggggctgaggcaggagaattgcttgggaggcaaaggttgcagtcagctgagattgtgccactgtactccagcctgggcaacagagagactccatcttaaaaaaataaaataaaataaagaacagtaatagggaggccaaggcaagaagattgcttgagcccaggagtttgagaccagtctgggaaacatagtgaaatcctgtctctacaaaaaatgtaaaaattaggcagtcatggtggtggcgcacacctgtagtcccagttactaggaaggctgaggcaggagaagcacttgarcccaggagttccaggctgcagtgagctatgatcccaccactgcactccagcctggacaacagagatcttatctctttaaggaaaaaaaaaaaggcagtaagaaattttaatttgaagttactgatttatttaaagtcaaaatatagaaaagaaaaatatgatgttttt

SEQ ID NO: 549528 - DNA, 490 bp, Homo sapiens
gtttccccccaaaaactagtatattatgcaatttctcatgattaattaaaacaataactataataaaagaagcccattttgtgattctgacctaattgctttttaattgcactgcttttcatgtttattttcaaaattcacttctctgaagtagtcacgagggaaaacgagtgtctgttgagcactttctctgaaggtgcggccattgctgtgaaattgctggtcattgtttggcagctgctagaccatccactttagttcttaactccttaaatgtttttagcgatggctgagttccawatatatatatttttaatctatctccttcgtccactgatttcccatctgagatattatctctaattttgggggcagataattcatggctctggcaaacaatattaagagctacagtgggcttatattagggccaggcacagtggctcacgcctgtaatcccaacactttgggaggccaaggcaggcagatc

SEQ ID NO: 549529 - DNA, 545 bp, Homo sapiens
gggggcatcagcgacctgtcagccattccatcatccarcttgccttccttctctcatcttactcccaacccccactgctctttctacaagactagaggtcggctacagggcagggtggctcagaggaagtggggtctcctcccacgggagcccagccttggctgttctcatggttgggttcatcccatggtggagaggtatagatagtggagttgatcagcagctctttcctaataagcaacaggaaagaaggcatcagtgggactttcccagaggaaagaacttgggtcaaagcagtgcttttcaactggagcctattccccacccccctgctcccaccccggggatattaggcaatatctggatacatttttggttgtcacagctgggatgggggtgtgagtgttactggtatctagtgggtagaagccaggaatggtgctaaacatccatggcaaacttgtccaacctacaacccatgggccacatgtgtcacaggacagctttgaatgtggcccaacacaaatttgtaaactttcttaaaa

SEQ ID NO: 549530 - DNA, 2045 bp, Homo sapiens
ggtataaaagcacttaagattattctggaagatgcttttgctaaaagcaagattattttatttaaaacaaaaatatatgctatatagttacaatgtaataagaaatatatggaaactataagaagaaaattattttaaaagattttttaaagtcttgcaaaaaatgaagtagcacatacttaattcatcacatcacaacaagcacaactaaacattagaggaaaaataaaaactattaagataatattgatcaatcttactactttaatttttaaaataatctgtatttccatacttaccttggacacatttaaaatgaaaaaaaccctaaataaagaaaacagatgatggggtatttataaggtactcttaaaatgactaatcagaaggtgaaaacacaactggaattattaacaaagcctataataggccatttactaaaataaataaaaatggcaagtggacatgggcataaatattcaaactcactagcaatcaaaaaatgcaattttagcatgaatgcaaaccaattttttgcctattgaatttgaaaagaatttctaaaatctaattcactaggtggaaggtgagaaaaaatgagcacattcaatcactgctgacaggcatgttaattactagaaacttactttagttcaatttagaaatatttattagaagctctgaaaatgttcatgccattttacttagaaaaaattaccctaagggactaataaaaaatatgtgcaacaatttggtgtaataggaaatggtatataatacaaaaaaatagaattaaatttgttaatgtttaccaagaagagaggtaaaatgatttataggtagaattccaatacaaaatatattttaatttccatagatataaactaataaaatgagaaatgcatgggtaatagtaaaaaaagacccaatgattagtaaacactttaattatctaatcctgtccaccataatgaaaaaaataattttttcaccttgtgttattaaggaagtaaagaaatagatgacttgcatactttcaatatactaaaagctaatatctattaaacaatagtaatagattacatcgtaataagtaacactgctaatttactccctgtaacagccttctaaaatcataatgctttttatctctgctgataagtgaggaaattacccattaatcattcatgaaactgagattaaaaacttggtggattgtttcctatatatgactgtgttcatgagcaaaaggactgtctgttgcactaaaaaaaaaaattatctaaacagagaaaaaaagcaaatattctttaaaagcacaaatggtcartcacagaatttgaccatatattagctaacaaactatgcctgaataaattccaaggaattaacaccataagactatgttctaagctgataataaaataaaaatatcacatataaaggaatgtcttttacaattctatatatttggaaaataaacaatgatctactaaattacacttaagtaattgagaataaataataaatatcttaaaatttttaaatattcaccatgaatgaaaattatacaaatgcacatatatttaaatttgtaaaatacatacattaaaacagtatttgcagagaaaatggaatacataatcaagaaacgtgaaggattaattgcaaactagatgagaatttacatctagcacagaaaaaaagttcaataaaattcaaaaaatacagaacagattaagagaaacaaagagtataaatttctgacacagaggaaaaaaacaaaacagaaaaatttaactacaaactatttttatttttaatattagtaagattgactctagcagaaaagataaaatttaaaaatgaaagaaaacaaaaaagatagattataccattaaaaggcatactgataaaggaatattatgatgatcatactatataatgctatataatgcctatatatagtaaaaaaaaaaaacccaagttgacactgtaaacttatattcgcttctacatttgcctgtaaattttaaagatagttt

SEQ ID NO: 549531 - DNA, 2045 bp, Homo sapiens
ggtataaaagcacttaagattattctggaagatgcttttgctaaaagcaagattattttatttaaaacaaaaatatatgctatatagttacaatgtaataagaaatatatggaaactataagaagaaaattattttaaaagattttttaaagtcttgcaaaaaatgaagtagcacatacttaattcatcacatcacaacaagcacaactaaacattagaggaaaaataaaaactattaagataatattgatcaatcttactactttaatttttaaaataatctgtatttccatacttaccttggacacatttaaaatgaaaaaaaccctaaataaagaaaacagatgatggggtatttataaggtactcttaaaatgactaatcagaaggtgaaaacacaactggaattattaacaaagcctataataggccatttactaaaataaataaaaatggcaagtggacatgggcataaatattcaaactcactagcaatcaaaaaatgcaattttagcatgaatgcaaaccaattttttgcctattgaatttgaaaagaatttctaaaatctaattcactaggtggaaggtgagaaaaaatgagcacattcaatcactgctgacaggcatgttaattactagaaacttactttagttcaatttagaaatatttattagaagctctgaaaatgttcatgccattttacttagaaaaaattaccctaagggactaataaaaaatatgtgcaacaatttggtgtaataggaaatggtatataatacaaaaaaatagaattaaatttgttaatgtttaccaagaagagaggtaaaatgatttataggtagaattccaatacaaaatatattttaatttccatagatataaactaataaaatgagaaatgcatgggtaatagtaaaaaaagacccaatgattagtaaacactttaattatctaatcctgtccaccataatgaaaaaaataattttttcaccttgtgttattaaggaagtaaagaaatagatgacttgcatactttcaatatactaaaagctaatatctattaaacaatagtaatagattacatcgtaataagtaacactgctaatttactccctgtaacagccttctaaaatcataatgctttttatctctgctgataagtgaggaaattacccattaatcattcatgaaactgagattaaaaacttggtggattgtttcctatatatgactgtgttcatgagcaaaaggactgtctgttgcactaaaaaaaaaaattatctaaacagagaaaaaaagcaaatattctttaaaagcacaaatggtcagtcacagaatttgaccatatattagcyaacaaactatgcctgaataaattccaaggaattaacaccataagactatgttctaagctgataataaaataaaaatatcacatataaaggaatgtcttttacaattctatatatttggaaaataaacaatgatctactaaattacacttaagtaattgagaataaataataaatatcttaaaatttttaaatattcaccatgaatgaaaattatacaaatgcacatatatttaaatttgtaaaatacatacattaaaacagtatttgcagagaaaatggaatacataatcaagaaacgtgaaggattaattgcaaactagatgagaatttacatctagcacagaaaaaaagttcaataaaattcaaaaaatacagaacagattaagagaaacaaagagtataaatttctgacacagaggaaaaaaacaaaacagaaaaatttaactacaaactatttttatttttaatattagtaagattgactctagcagaaaagataaaatttaaaaatgaaagaaaacaaaaaagatagattataccattaaaaggcatactgataaaggaatattatgatgatcatactatataatgctatataatgcctatatatagtaaaaaaaaaaaacccaagttgacactgtaaacttatattcgcttctacatttgcctgtaaattttaaagatagttt

SEQ ID NO: 549532 - DNA, 2045 bp, Homo sapiens
ggtataaaagcacttaagattattctggaagatgcttttgctaaaagcaagattattttatttaaaacaaaaatatatgctatatagttacaatgtaataagaaatatatggaaactataagaagaaaattattttaaaagattttttaaagtcttgcaaaaaatgaagtagcacatacttaattcatcacatcacaacaagcacaactaaacattagaggaaaaataaaaactattaagataatattgatcaatcttactactttaatttttaaaataatctgtatttccatacttaccttggacacatttaaaatgaaaaaaaccctaaataaagaaaacagatgatggggtatttataaggtactcttaaaatgactaatcagaaggtgaaaacacaactggaattattaacaaagcctataataggccatttactaaaataaataaaaatggcaagtggacatgggcataaatattcaaactcactagcaatcaaaaaatgcaattttagcatgaatgcaaaccaattttttgcctattgaatttgaaaagaatttctaaaatctaattcactaggtggaaggtgagaaaaaatgagcacattcaatcactgctgacaggcatgttaattactagaaacttactttagttcaatttagaaatatttattagaagctctgaaaatgttcatgccattttacttagaaaaaattaccctaagggactaataaaaaatatgtgcaacaatttggtgtaataggaaatggtatataatacaaaaaaatagaattaaatttgttaatgtttaccaagaagagaggtaaaatgatttataggtagaattccaatacaaaatatattttaatttccatagatataaactaataaaatgagaaatgcatgggtaatagtaaaaaaagacccaatgattagtaaacactttaattatctaatcctgtccaccataatgaaaaaaataattttttcaccttgtgttattaaggaagtaaagaaatagatgacttgcatactttcaatatactaaaagctaatatctattaaacaatagtaatagattacatcgtaataagtaacactgctaatttactccctgtaacagccttctaaaatcataatgctttttatctctgctgataagtgaggaaattacccattaatcattcatgaaactgagattaaaaacttggtggattgtttcctatatatgactgtgttcatgagcaaaaggactgtctgttgcactaaaaaaaaaaattatctaaacagagaaaaaaagcaaatattctttaaaagcacaaatggtcagtcacagaatttgaccatatattagctaacaaactatgcctgaataaattccaaggaattaacaccataagactatgttctaagctgataataaaataaaaawatcacatataaaggaatgtcttttacaattctatatatttggaaaataaacaatgatctactaaattacacttaagtaattgagaataaataataaatatcttaaaatttttaaatattcaccatgaatgaaaattatacaaatgcacatatatttaaatttgtaaaatacatacattaaaacagtatttgcagagaaaatggaatacataatcaagaaacgtgaaggattaattgcaaactagatgagaatttacatctagcacagaaaaaaagttcaataaaattcaaaaaatacagaacagattaagagaaacaaagagtataaatttctgacacagaggaaaaaaacaaaacagaaaaatttaactacaaactatttttatttttaatattagtaagattgactctagcagaaaagataaaatttaaaaatgaaagaaaacaaaaaagatagattataccattaaaaggcatactgataaaggaatattatgatgatcatactatataatgctatataatgcctatatatagtaaaaaaaaaaaacccaagttgacactgtaaacttatattcgcttctacatttgcctgtaaattttaaagatagttt

SEQ ID NO: 549533 - DNA, 2045 bp, Homo sapiens
ggtataaaagcacttaagattattctggaagatgcttttgctaaaagcaagattattttatttaaaacaaaaatatatgctatatagttacaatgtaataagaaatatatggaaactataagaagaaaattattttaaaagattttttaaagtcttgcaaaaaatgaagtagcacatacttaattcatcacatcacaacaagcacaactaaacattagaggaaaaataaaaactattaagataatattgatcaatcttactactttaatttttaaaataatctgtatttccatacttaccttggacacatttaaaatgaaaaaaaccctaaataaagaaaacagatgatggggtatttataaggtactcttaaaatgactaatcagaaggtgaaaacacaactggaattattaacaaagcctataataggccatttactaaaataaataaaaatggcaagtggacatgggcataaatattcaaactcactagcaatcaaaaaatgcaattttagcatgaatgcaaaccaattttttgcctattgaatttgaaaagaatttctaaaatctaattcactaggtggaaggtgagaaaaaatgagcacattcaatcactgctgacaggcatgttaattactagaaacttactttagttcaatttagaaatatttattagaagctctgaaaatgttcatgccattttacttagaaaaaattaccctaagggactaataaaaaatatgtgcaacaatttggtgtaataggaaatggtatataatacaaaaaaatagaattaaatttgttaatgtttaccaagaagagaggtaaaatgatttataggtagaattccaatacaaaatatattttaatttccatagatataaactaataaaatgagaaatgcatgggtaatagtaaaaaaagacccaatgattagtaaacactttaattatctaatcctgtccaccataatgaaaaaaataattttttcaccttgtgttattaaggaagtaaagaaatagatgacttgcatactttcaatatactaaaagctaatatctattaaacaatagtaatagattacatcgtaataagtaacactgctaatttactccctgtaacagccttctaaaatcataatgctttttatctctgctgataagtgaggaaattacccattaatcattcatgaaactgagattaaaaacttggtggattgtttcctatatatgactgtgttcatgagcaaaaggactgtctgttgcactaaaaaaaaaaattatctaaacagagaaaaaaagcaaatattctttaaaagcacaaatggtcagtcacagaatttgaccatatattagctaacaaactatgcctgaataaattccaaggaattaacaccataagactatgttctaagctgataataaaataaaaatatcacatataaaggaatgtcttttacaattctatatatttggaaaataaacaatgatctactaaattacacttaagtaattgagaataaataataaatatcttaaaatttttaaatattcaccatgaatgaaaattatacaaatgcacatatatttaaatttgtaaaatacatmcattaaaacagtatttgcagagaaaatggaatacataatcaagaaacgtgaaggattaattgcaaactagatgagaatttacatctagcacagaaaaaaagttcaataaaattcaaaaaatacagaacagattaagagaaacaaagagtataaatttctgacacagaggaaaaaaacaaaacagaaaaatttaactacaaactatttttatttttaatattagtaagattgactctagcagaaaagataaaatttaaaaatgaaagaaaacaaaaaagatagattataccattaaaaggcatactgataaaggaatattatgatgatcatactatataatgctatataatgcctatatatagtaaaaaaaaaaaacccaagttgacactgtaaacttatattcgcttctacatttgcctgtaaattttaaagatagttt

SEQ ID NO: 549534 - DNA, 1282 bp, Homo sapiens
tgtggaactgatctgggtgtagggggtgaggtagggattctgttttattttttccagatggccgctacccacttatctctatgccttactttgaacaatgcacctttcccctccgatgtgaaattccttctctcattcacgtgctgaaatcctacatatttccatccatttctgcactcgcgtctggatggaactgtctacttcttttccagggctaaactttaaaagttattgtactttcctaagatgttttaacatctggtaaagccagccctcctccactacttttgtttttcctcagaatttccctggctggtctcgcacgtttatttttccagatgaaatttggtatcatttcgtcaagttccaaaaaataaaagaaaataaaaaccctgttggtttaaggcttttcttaccagccagtgtagtgttttcacagattattgatattaaccctttgccattcatttggttgtcaatttagttcccctctacccccattagttttttattctgtggtatgggagatttgttttttgtttttatatagtcgtcaatcacttttgcttctcctcaaaaaaaaaatctccttaatgattttaaagctcgaagacttcccattcctcctgagatctggttaatattcacttatatttttgaccagccctcctagggtttgctttgcttgataaataatttatttttttcagcatctgtgaaagatatgaagaaggcatccaagctgatttttttttttttttgagatggagttctgttctttttgcctaggctgagtgcaatggtgtgatcttggctcactgcaacctccgcctccccggttcaagcgattctcctgcctcagcctcccaagtagctggaattgcaggcatgcaccaccacgcctggctaattttgtatttttagtagagacggggtttctgcatgttggtcaggctggtctygaacacctgacctcaggtgatccacctgcctcggcctcccaaagtggtgggattacaggtgtgagccactgcgcccgacccccaagctgcttttatattggctactccttccattgttctttgcccactgaagacagcttggtcatgtattaaattcatgtacatgagaacatttctctgctctctggtcagttccattcatgccagctctgctgtttaatcagagacttaatcatctatttgaacatctgagagggctgattgcgcacatttctcaaaatattctttggatttctcacccttttatttcccaaaatacc

SEQ ID NO: 549535 - DNA, 1282 bp, Homo sapiens
tgtggaactgatctgggtgtagggggtgaggtagggattctgttttattttttccagatggccgctacccacttatctctatgccttactttgaacaatgcacctttcccctccgatgtgaaattccttctctcattcacgtgctgaaatcctacatatttccatccatttctgcactcgcgtctggatggaactgtctacttcttttccagggctaaactttaaaagttattgtactttcctaagatgttttaacatctggtaaagccagccctcctccactacttttgtttttcctcagaatttccctggctggtctcgcacgtttatttttccagatgaaatttggtatcatttcgtcaagttccaaaaaataaaagaaaataaaaaccctgttggtttaaggcttttcttaccagccagtgtagtgttttcacagattattgatattaaccctttgccattcatttggttgtcaatttagttcccctctacccccattagttttttattctgtggtatgggagatttgttttttgtttttatatagtcgtcaatcacttttgcttctcctcaaaaaaaaaatctccttaatgattttaaagctcgaagacttcccattcctcctgagatctggttaatattcacttatatttttgaccagccctcctagggtttgctttgcttgataaataatttatttttttcagcatctgtgaaagatatgaagaaggcatccaagctgatttttttttttttttgagatggagttctgttctttttgcctaggctgagtgcaatggtgtgatcttggctcactgcaacctccgcctccccggttcaagcgattctcctgcctcagcctcccaagtagctggaattgcaggcatgcaccaccacgcctggctaattttgtatttttagtagagacggggtttctgcatgttggtcaggctggtcttgaacwcctgacctcaggtgatccacctgcctcggcctcccaaagtggtgggattacaggtgtgagccactgcgcccgacccccaagctgcttttatattggctactccttccattgttctttgcccactgaagacagcttggtcatgtattaaattcatgtacatgagaacatttctctgctctctggtcagttccattcatgccagctctgctgtttaatcagagacttaatcatctatttgaacatctgagagggctgattgcgcacatttctcaaaatattctttggatttctcacccttttatttcccaaaatacc

SEQ ID NO: 549536 - DNA, 1282 bp, Homo sapiens
tgtggaactgatctgggtgtagggggtgaggtagggattctgttttattttttccagatggccgctacccacttatctctatgccttactttgaacaatgcacctttcccctccgatgtgaaattccttctctcattcacgtgctgaaatcctacatatttccatccatttctgcactcgcgtctggatggaactgtctacttcttttccagggctaaactttaaaagttattgtactttcctaagatgttttaacatctggtaaagccagccctcctccactacttttgtttttcctcagaatttccctggctggtctcgcacgtttatttttccagatgaaatttggtatcatttcgtcaagttccaaaaaataaaagaaaataaaaaccctgttggtttaaggcttttcttaccagccagtgtagtgttttcacagattattgatattaaccctttgccattcatttggttgtcaatttagttcccctctacccccattagttttttattctgtggtatgggagatttgttttttgtttttatatagtcgtcaatcacttttgcttctcctcaaaaaaaaaatctccttaatgattttaaagctcgaagacttcccattcctcctgagatctggttaatattcacttatatttttgaccagccctcctagggtttgctttgcttgataaataatttatttttttcagcatctgtgaaagatatgaagaaggcatccaagctgatttttttttttttttgagatggagttctgttctttttgcctaggctgagtgcaatggtgtgatcttggctcactgcaacctccgcctccccggttcaagcgattctcctgcctcagcctcccaagtagctggaattgcaggcatgcaccaccacgcctggctaattttgtatttttagtagagacggggtttctgcatgttggtcaggctggtcttgaacacctgacctcaggtgatccacctgcctcggcctcccaaagtggtgggattacaggtgtgagccactgcgcccgacccccaagctgcttttatattggctactccttccattgttctttgcccactgaagacagcttggtcatgtattaaattcatgtacatgagaacatttctctgctctctggtcagttccattcatgccagctctgctgtttaatcagagacttaatcatctatttgaayatctgagagggctgattgcgcacatttctcaaaatattctttggatttctcacccttttatttcccaaaatacc

SEQ ID NO: 549537 - DNA, 608 bp, Homo sapiens
tggtgtcttcaccgtccttaaatctccaagcactagcgaagcccagtgtgtgcaccatgcacatacacatgtacacacttgcacacacagcctgctctcaggaaacggctgtgccttcttggaggaaataacgccattggccttctcaccaccaaatctgtgccaggatcagcctcaatacccatctcttttgccctcctgttttgtcccaagggaagagggacccttccctgcctccagagctcagctctcccgtgctcctgccctttattcccatagcctcactaggctcacctcttattggccctttcctgttagcatttaattatgcttagatccttctcatcttaaaacaataggagcagaagctcttcctaacccatatttttcctcagctgcacttccatcttcattttccctcaccacaaaattcttgaaaggattatggcgattcaygtcttcacatcatcaccaaccattcacattgtgttctgtctacgctaccccagtgtacctcagcaaatgcttttgccaagattctctttgacctctgtatcctcaaatccaactcatttactgtcagcaggacttcacactgttctccactt

SEQ ID NO: 549538 - DNA, 996 bp, Homo sapiens
gggatatataatgatactaatattctatattatgcactataatatgaaataatactgtaagatacaacttacattttttataaccaagtccagcagttttcatactaatgggtcatagtccattaatatgggtcatgatgtccatttaatgggatgctaccagaattaaattaaaaatgtggaaagatactctatgatagaattgaaaataccaaagtatattgcatgtagcgaaaatgaatagtgttctctgagtctttttgttcataaattatgtgtaagtatttcttactcaaacatctgctacctttgtcctatttacaggcaccattctcagcctatcaacccgcattcccctactgtgaccatttcttcacccaaaggtctgggcagagaatgctaagttgattccttcatgctcctccttccttttgtgtctcttttgaaaagttcttgtgtaggatgacctttaagacagggcttgcgagttctttttccttgtttaagaaataaattgctgtatatctaaaccatcatatttccatttcaggccaaccaactcaaacttgaagacatgaaatccccaaggagaaccactttgtgcctcatgtttattgtgatttattcttccaaagctgcactgaactggaattacgagtctactattcatcctttggtgagttatatccatatctgctataatttttcttgtcacatttttctgatttcctgactgacaatggttcttacaaraagtttaaggagaaaaaactttagggggagaaaaaacattcttcccatagttgcaacataagaaaaaatgttgcaaatgaggagaaggggtgaatgtaaactcaggtcagtgtatttgctgggctaccacttgctatattctgaaataagtggtggtgtcaagggaacaccaatgtagcttcaagagagacctcccagggttccttccttcactaaattacaaccactaggcctaagtcttcc

SEQ ID NO: 549539 - DNA, 737 bp, Homo sapiens
tgaggcagagaatcgcttgaacccaggaggcgaaggttgcagtgagccaagatcacaagatcacgtcactgcactccagtgactctatcccaaaaaaacaaagcaagttctagagacctaatgtacagcacagtaactgtagttaataataatgcattatatgcccgtaatttgctaagagaggaggtcttaagtattctcactgcacgagcacgcacgcacacacacacccccaaaaaggtaactatctgaggtgatgaatatgttaattagcttgtgataatcatttcacaatgtatacatgtatcaaaaatcatgttgtacaacttgaattatataattttttataaattatacctcaataaagttaaaaaaacaaggttcaagttataaaacatagatatgtataaggatgtgaatatgtatataagcaatcaatataggaaaaatacatatacacaaatatatgcwcatatacatttcctattgaaaagatgatggcaccacatccctctgtcttgtcaaggcagtgcttagttaagaacacaccccatctaccaccaggcaattcagtaaaaacaatgagtgctttgtttttatgatgagaaggtaatgtatatagtctgccacaataattttctgctgtctgcttttttcatacttaacaactactctgataactctttctagaacattctcagaattagctctaaccaagctctagcccaaatgccact

SEQ ID NO: 549540 - DNA, 2246 bp, Homo sapiens
tggcaactgcaaatctgtttcctgtctctcctggtttgcctgttacagacatttcccatcagtggaatcacacaatatatgttgttttgtgtctagcttctttcatttaacaaaatgttttcacggctcacccgtgtggtagcatacatctgtgcctcattctttttgatggcggcataatattccattgcacagaggagccacattttgccagcccgttcatcagtagacgggcagtgccttgtttccacttcttgactatcatgaataatgttgctatgaacattcatgggaaggttttatgtgaaggtatgttttcatttctcttgggtacatacctagaattggaattgttagataacatggtaattccatgtttaaccattttgagaaacttccaaactgctttccaaagcagctgcaccatttcatatccccaccagcaatgcatagattctgaacttctctttccacaaacttttgttattaaaaataaattgtttaaagaagggaaaaaacagctctccataataaaacacactgctcttctgaaatctcccttggcgtgtgtctatgagttgatttacagtgtgggtgcaagtccacaagccagcagacacacagggccacagaagggacactgccatgctggcccactaccacgttcacaccgaaggtgactttgcctggctgtggactcagcgaagctgggacaccctcagaggcgactgtccacccaaccctcaccatgcagagacagagaccagcacacttggtctcctccacccagataagctcttggagaggtggccctggcacctgtgaaaatgtaaatggctgtcggcctttgacggtgctgctgacgggtgaccagagttctctcgcggctgcacgttttcccatgagcgccgaggcaggttcaatatggacagctcctccagcccctgcaggtaacccagcccgagctcccacttcctttgtaccaagcagaaacaagggcatggaaaagggaggggtgttttcacatctgaatggcaacattcccgtccaacaccccggactatatcttcaaacagatctgtctgagaagacagtgattgcattgagcccagcgtgctgtcagctgcttgaagccagtttcggcacacgggtattaggttatagaagaaaccttgttgtaaggatcgtcagggaggaagtcactgtatttacttgaagtttgcacagcttcatcagtttcagtggaaataactaaaaatagttaaagacattagttaaaattaaagaaaaggggacgagaaaacaagctacagcctgagagaaaacatttacaaaccacatgcccgacaaaagactcacagaatatattccttaaactctcaaaactcaacagtaaaaacaaacaatcaatccagtgagaaaatgggcagaagagacatttcaccagagaggctgtacacagggaaataaacacaggcaaagacatctaatgtcctctgccagggggaactgcacatttgactcacgatgaaatgtcactacgcacccatcagcatggcggaaataaaaaataacggcaacattaaatgctaacgaggtcatgaagaaacgagatcactcatacactgttggcgggaatctaaaacggggcagccacggtggagacggtgtagcagtgttttgcaaaaccaagcacgtgctcacctacaacccgcaactgcattcctgggcatgcatcccagagaaaggaagactttcattcacacaaaaccctatcacgattactcatagcaactttatttgtaaccacgaagaaccagaaacaaccacatgcccaacaatagatgaatggctatacacgctggggtgctgcacaccctgggactccactcagctgcagagaaagarccggtgaagcacacaacagctctggcgggtctttggggaaagaccaccgtctaccgccacgcgagggaaagaagccggtctccaaaggtcacaccctgcgtgatttcatttctgtgacattctcaaaatgacgaatttggaggaggttggagtggggaaagagctggaggctgtgactaaaaaggatagcaggaggaagatctttgcagccgcagaggggccctatatcttgactatagtggtcacgcgtgtgataaatggcaaagagcagagacgttgtcggaggcacgtcctggttgcgaggccgtcctctagtggagggatctgggtgaaggatg

SEQ ID NO: 549541 - DNA, 2246 bp, Homo sapiens
tggcaactgcaaatctgtttcctgtctctcctggtttgcctgttacagacatttcccatcagtggaatcacacaatatatgttgttttgtgtctagcttctttcatttaacaaaatgttttcacggctcacccgtgtggtagcatacatctgtgcctcattctttttgatggcggcataatattccattgcacagaggagccacattttgccagcccgttcatcagtagacgggcagtgccttgtttccacttcttgactatcatgaataatgttgctatgaacattcatgggaaggttttatgtgaaggtatgttttcatttctcttgggtacatacctagaattggaattgttagataacatggtaattccatgtttaaccattttgagaaacttccaaactgctttccaaagcagctgcaccatttcatatccccaccagcaatgcatagattctgaacttctctttccacaaacttttgttattaaaaataaattgtttaaagaagggaaaaaacagctctccataataaaacacactgctcttctgaaatctcccttggcgtgtgtctatgagttgatttacagtgtgggtgcaagtccacaagccagcagacacacagggccacagaagggacactgccatgctggcccactaccacgttcacaccgaaggtgactttgcctggctgtggactcagcgaagctgggacaccctcagaggcgactgtccacccaaccctcaccatgcagagacagagaccagcacacttggtctcctccacccagataagctcttggagaggtggccctggcacctgtgaaaatgtaaatggctgtcggcctttgacggtgctgctgacgggtgaccagagttctctcgcggctgcacgttttcccatgagcgccgaggcaggttcaatatggacagctcctccagcccctgcaggtaacccagcccgagctcccacttcctttgtaccaagcagaaacaagggcatggaaaagggaggggtgttttcacatctgaatggcaacattcccgtccaacaccccggactatatcttcaaacagatctgtctgagaagacagtgattgcattgagcccagcgtgctgtcagctgcttgaagccagtttcggcacacgggtattaggttatagaagaaaccttgttgtaaggatcgtcagggaggaagtcactgtatttacttgaagtttgcacagcttcatcagtttcagtggaaataactaaaaatagttaaagacattagttaaaattaaagaaaaggggacgagaaaacaagctacagcctgagagaaaacatttacaaaccacatgcccgacaaaagactcacagaatatattccttaaactctcaaaactcaacagtaaaaacaaacaatcaatccagtgagaaaatgggcagaagagacatttcaccagagaggctgtacacagggaaataaacacaggcaaagacatctaatgtcctctgccagggggaactgcacatttgactcacgatgaaatgtcactacgcacccatcagcatggcggaaataaaaaataacggcaacattaaatgctaacgaggtcatgaagaaacgagatcactcatacactgttggcgggaatctaaaacggggcagccacggtggagacggtgtagcagtgttttgcaaaaccaagcacgtgctcacctacaacccgcaactgcattcctgggcatgcatcccagagaaaggaagactttcattcacacaaaaccctatcacgattactcatagcaactttatttgtaaccacgaagaaccagaaacaaccacatgcccaacaatagatgaatggctatacacgctggggtgctgcacaccctgggactccactcagctgcagagaaagaaccggtgaagcacacaacagctctggcgggtctytggggaaagaccaccgtctaccgccacgcgagggaaagaagccggtctccaaaggtcacaccctgcgtgatttcatttctgtgacattctcaaaatgacgaatttggaggaggttggagtggggaaagagctggaggctgtgactaaaaaggatagcaggaggaagatctttgcagccgcagaggggccctatatcttgactatagtggtcacgcgtgtgataaatggcaaagagcagagacgttgtcggaggcacgtcctggttgcgaggccgtcctctagtggagggatctgggtgaaggatg

SEQ ID NO: 549542 - DNA, 2246 bp, Homo sapiens
tggcaactgcaaatctgtttcctgtctctcctggtttgcctgttacagacatttcccatcagtggaatcacacaatatatgttgttttgtgtctagcttctttcatttaacaaaatgttttcacggctcacccgtgtggtagcatacatctgtgcctcattctttttgatggcggcataatattccattgcacagaggagccacattttgccagcccgttcatcagtagacgggcagtgccttgtttccacttcttgactatcatgaataatgttgctatgaacattcatgggaaggttttatgtgaaggtatgttttcatttctcttgggtacatacctagaattggaattgttagataacatggtaattccatgtttaaccattttgagaaacttccaaactgctttccaaagcagctgcaccatttcatatccccaccagcaatgcatagattctgaacttctctttccacaaacttttgttattaaaaataaattgtttaaagaagggaaaaaacagctctccataataaaacacactgctcttctgaaatctcccttggcgtgtgtctatgagttgatttacagtgtgggtgcaagtccacaagccagcagacacacagggccacagaagggacactgccatgctggcccactaccacgttcacaccgaaggtgactttgcctggctgtggactcagcgaagctgggacaccctcagaggcgactgtccacccaaccctcaccatgcagagacagagaccagcacacttggtctcctccacccagataagctcttggagaggtggccctggcacctgtgaaaatgtaaatggctgtcggcctttgacggtgctgctgacgggtgaccagagttctctcgcggctgcacgttttcccatgagcgccgaggcaggttcaatatggacagctcctccagcccctgcaggtaacccagcccgagctcccacttcctttgtaccaagcagaaacaagggcatggaaaagggaggggtgttttcacatctgaatggcaacattcccgtccaacaccccggactatatcttcaaacagatctgtctgagaagacagtgattgcattgagcccagcgtgctgtcagctgcttgaagccagtttcggcacacgggtattaggttatagaagaaaccttgttgtaaggatcgtcagggaggaagtcactgtatttacttgaagtttgcacagcttcatcagtttcagtggaaataactaaaaatagttaaagacattagttaaaattaaagaaaaggggacgagaaaacaagctacagcctgagagaaaacatttacaaaccacatgcccgacaaaagactcacagaatatattccttaaactctcaaaactcaacagtaaaaacaaacaatcaatccagtgagaaaatgggcagaagagacatttcaccagagaggctgtacacagggaaataaacacaggcaaagacatctaatgtcctctgccagggggaactgcacatttgactcacgatgaaatgtcactacgcacccatcagcatggcggaaataaaaaataacggcaacattaaatgctaacgaggtcatgaagaaacgagatcactcatacactgttggcgggaatctaaaacggggcagccacggtggagacggtgtagcagtgttttgcaaaaccaagcacgtgctcacctacaacccgcaactgcattcctgggcatgcatcccagagaaaggaagactttcattcacacaaaaccctatcacgattactcatagcaactttatttgtaaccacgaagaaccagaaacaaccacatgcccaacaatagatgaatggctatacacgctggggtgctgcacaccctgggactccactcagctgcagagaaagaaccggtgaagcacacaacagctctggcgggtctttggggaaagaccaccgtctaccgccacgcragggaaagaagccggtctccaaaggtcacaccctgcgtgatttcatttctgtgacattctcaaaatgacgaatttggaggaggttggagtggggaaagagctggaggctgtgactaaaaaggatagcaggaggaagatctttgcagccgcagaggggccctatatcttgactatagtggtcacgcgtgtgataaatggcaaagagcagagacgttgtcggaggcacgtcctggttgcgaggccgtcctctagtggagggatctgggtgaaggatg

SEQ ID NO: 549543 - DNA, 1759 bp, Homo sapiens
aagtggaatgtaattagcactccttgttccagtgaatttgcagttctaactgggaacaatttgcagtgagtttgtgtgtggctgtaattaacttcgcaagcacacaggcagcacagagcccatgggaccacagcccgggctgtgacctgcaggctgatccctctgagtcgcccctgagttcccaccggctgctcccgtgcgcgggtgcccctctctcagcctggcatgtgactgcctcctccaaacacccacctggtgtccaccattctggccctgccagcagctccttcattccatcatttatcccagtgttttccaagcacccaggatgcaccaggctgggacttgcccccagtcccacaaagctctgcactcctgggttccccagtaccccccaggaagactccatgccacacaggtggcaccaccytgctgggctcacgtggggaaaggatgagagagccgcccacctgggcagacaggtgcctgagccgggtgggaggtgggaacggagcccaggaccacacagggggtgccgaggagcttgcacacccaggaggctccctggaagaggaaggtttcaagcagctgccctcaggcaccccacgcgtgttgacagccaagcgtgacttcttgtcaagggcatcgttaaaggagaacatgaggcctgctcgggggctgagaggagagaggtgccagggcaggcgccccccgcacataccctgccactgccatgggatcccggcactgcagcctcctggtgaggcccatgtccagctggggttgcagagggtgcggtggcttcacaccccggattgaactcaccaccctcctctttccctcaagctttggtggctggagaatgacagtcgatggccagtgcctggtttgcagaggccgctcatcagcgtgaatccccctgcgtggtcagggccacctcccctttattgatgagaaactgaggcacaaatacattcagtgcctttagtgagtgtcacgcccagagggtgaccacctgccaaggtggggcataatgcacttggcttcccagcctgcagatgctggactctcacacagatggaccggacggaccggagcccgaggtccccagcgtgagacccattgttgttcttggcagtttattttcacatctttcccggaggcccagattcagcggttcttagacttaacctaagaatctctcaaaaccatgtaataaaatactccatctgcatagattaatttacttgcaatgaatacacagacttggagggcacaatcctatggccttttacaaatgtttacagccatgtgacaacaccccactcaaaatacgcaacacttcatcaccctggaaagttccctcatgccccttgcccagccgccacctaacccccaacaaaccaggcaatgacgttctgatttttatggtcagggagtagctttgcctattctagaacctcaagtaaaggtgattacgtagcgtgcacttctttgggtctggcttctctcactcaacatgatgtctgagagacgcctgttctggggtgagacgtggttctcgccttgttcttgctgagtagtattccactggacggacgtggcacaatggtggcgtttccattcaccatcagagaacacggagcttccttcccgattgaggataccacaaataaagctgctgtgaacatccacgtacaagtctttttgtgggtatgtttttattgctgttgcatgaacacctaggaatggaatcgct

SEQ ID NO: 549544 - DNA, 626 bp, Homo sapiens
taaatataaatatataaatatatatttaggaactgaaatattttagaaagtgtcccaaaagataaaaaagttccaattatcatctccttccacaaagacttttgagtctgtgatgtgggccaggcaccrtgtcaggcacgcaattccttcagcaagcagcctagcagctgcatacacccacccagcattgtcccgagggcagcagccgcctctggggatccgtgtccctggaatgtgcatcctctggtgttagtactgcatggcacacacattgctcacacctacataaaataacagcacactgaattctgagtcctttaaaagaaaaaaaagaggctgggcacggtggcttacgcctgtaatcccagcactttgggaggccgaggtgggcgaatcatgaggtcaggagattgagaccatcctggccaacctggtgaaacttcatctctactaaaatacaaaaaaattagctgggcatggtggcacgtgcctatagtcccagctactttcaggaggctgaggcaggggaatcgcttgaacccgggaggtggaggttacagtgagccgagatcacgccactgcactccagcctgggcgacagagcaagactgtgtctcaaaaaaaaa

SEQ ID NO: 549545 - DNA, 698 bp, Homo sapiens
cagatgatagtttgcatttttaacaataaagtatttttcatttaggtttgtacattgtttttagacataatgctatcgcacagataatagactacaatatcatgtaaacataatttatatatataccaggaaaccaaaaaaatcatgtgactccctttattgtaaaatttatattattgtggtggtttcaaaccaaactcccagcatctctgatgtatgtctatatcctctcatgcctgttagaatggcttttaccaggaagatgaaaaatarcaattgttggggagggagcagagaaaaggagactcttgtgcattgttggtgggaatataaattcgtacagcaattatgaaaaacaatataaagtttcctcaaaaacctaaaattagaactgccacatgatccactaatcccattattatttttttttaaagaaaaggaaattagtatatcacagagatatctgcatcccctatgtttattgcagcactgtccacaataacaaagatatggagtcaacccaagtgttcatcaacagataagaaaaaatctcttctcaacttctcccaaagtggtccttttcagtgatttcttgatatattgtcaacattagaatgaatttcagtgataacttttaagacccctctccctggggaaatcgggatgagagggcatgtagtatacagggccagtaactc

SEQ ID NO: 549546 - DNA, 670 bp, Homo sapiens
agatgtctgccctcctctttgctgcagcactgtttacaataggtaagatttggaagcaacctaactgtccatcaacagatgaatgaataaagaatatgtggtacttatacacaatggagtactattcagctataaataaggatgagatccagtcatttgcaacaacatggatggaagtggaggtcattatcttaagtgaaataagccaggcacagaaagacaaacatggcattttgggattgaaaaatcaaaacaattgaagtcatagatatagagagtaaaaggacggatactagaggctgggaaggttagtggcggggggaggaggtgggaatagttgatagatacaaaaaaaatagaaagtatgaataagacctactatttgataacacaactwgggtgacgatagttaataacaacttaactgtacattttaaaatagcttaaaattctaattggattgtttgtaactcaaaggataaatgcttgaggggatggataccccattctccatgatgtgcttatttcatattgcatgcctgtatcaaaacaagtcatgtacaccataaatatatacaactactatgtacccataaaaactgaaaataaaaactcatttacaaaaataaaaaatatcaagtaatatttgaagatacagaaatgggaaaaa

SEQ ID NO: 549547 - DNA, 575 bp, Homo sapiens
ttctagtcacaggtggcaggattcttttcttctctccactcaatggttatatttttcactaaaggttatttgaagatcttatctttttttttttttttttttttagacagagtctcgctctgtcgcccaggctggagtgcagtggcgcaatctcggcttactgcaagctccgcctcccgggttcacgccatttctcctgcctcagcctccagagtagctgggactacaggcgcccgccaacacgtcccgctaatttttttgtatttttgatagagacggggtttcaccgtgttagccacgatggtctcgatctcctgacctcgtgatccggccgccttggcctcccaaagtgctgggattataggcrtgagccaccgcgcctggccttgaggatcttatcttcaacttcttaatagaaaagagaattgtcaaccatagagtcatttgtggattgccccacctcatggcatatttatacactgtttggtggtgttgatgacagataccatgtttgaacttttcagtttctgacatgatcatatttttgctttcctgaattatacagaaaagttacc

SEQ ID NO: 549548 - DNA, 679 bp, Homo sapiens
ttgaactcctgacctcaggtgatccacccgccttggcctcccaaagtgctgggattacaggcgtgagcctccgcgcccggccaaatgttcttaaagaacaaaaacttaccaattttaccttttaatttttttaagtagattaactcttgggaagttggaccccatccctcccattctcagacgtcactcctgaagctctgctctcctgcgtcaacagtgtcgccctctttcccagatcaatcctgtccgccattcaaacacgctctggcatcttctatgaacaaaaataaaccctctctttatcctgtggtgtctccttctagctcatgccccatttctctgttcccctttacactgaascttttcaaaagtgtgttctatactcactgtctccaaagcttcacctcccatggactcttcaacccactccaaactggcttctgcccccttgcccgtgaagctgctattttgaaggtggtagatgacctccatgcagccaaatccattgccacatctctggcctcatcttacccgacgtctgagcagcactggagtgatgggccccatctgcccaagcactgtcctgtcgcagcattgatggcactgccttctcttggtttcccttctactgcatgggctctttatttcaaactcttgtctgactcctctgcccacttcc

SEQ ID NO: 549549 - DNA, 679 bp, Homo sapiens
ttgaactcctgacctcaggtgatccacccgccttggcctcccaaagtgctgggattacaggcgtgagcctccgcgcccggccaaatgttcttaaagaacaaaaacttaccaattttaccttttaatttttttaagtagattaactcttgggaagttggaccccatccctcccattctcagacgtcactcctgaagctctgctctcctgcgtcaacagtgtcgccctctttcccagatcaatcctgtccgccattcaaacacgctctggcatcttctatgaacaaaaataaaccctctctttatcctgtggtgtctccttctagctcatgccccatttctctgttcccctttacactgaaccttttcaaaagtgtgttctatactcactgtctccaaagcttcacctcccatggactcttcaacccactccaaactggcttctgcccccttgcccgtgaagctgctattttgaaggtggtagatgacctccatgcagccaaatccattgccacatctctgkcctcatcttacccgacgtctgagcagcactggagtgatgggccccatctgcccaagcactgtcctgtcgcagcattgatggcactgccttctcttggtttcccttctactgcatgggctctttatttcaaactcttgtctgactcctctgcccacttcc

SEQ ID NO: 549550 - DNA, 534 bp, Homo sapiens
cctcccacccatcaatcattcacttattgacaaaaaaaattgctaaatgctttacatgtactaggcttgggacactgagtgaaaaactgtcaagttgctcattgtttttggcacatcatggaggggaaggccccaatagggttaaatcgtaaaaacacatagcccttcactcagcctgggagtcagagaagacttcctgaaaaggcagtaactgagctgtgtttaaaaatgggttgaagttagctaagtgtagaaggagagacagaaatgtactgtaggctgaagggctatcacaggcaaagtcccaggaaaagagaagtaaagagctctgggactgcaaacagactagagtggatagatgaagggtcagagatggggccgaagatgcggctggcagggccttgaatggcaggctggggactttgaacttgccctgaagtctttggragagtctgaaatgatttgagctgaaggtgggagagaaaatgaattcttttcactctgcgtctttggttgtgtaaaagaagaaaatat

SEQ ID NO: 549551 - DNA, 682 bp, Homo sapiens
aagtctgtataacaagtaagcaacactcatggtttcaggaatggatctcttgcctcatccaagttttcttctttgacattcaacctgaggatctctgtacttgagaacagtaggcatagttcaggttaagggcatcatactggaaaacagggagaattaaataaaaatctgcatgttgatctgagagttattcccagtctctttttccctcccagttctgagaatactggctgacaagttcttgccccatctagctgtgagattaaaagattcatcctgtgacagcaaactgctgagatcaggaaaaatatctaactgataacagatgtggcccagwttgataatcctacagtatgtctactcattaagacagaatccctaggcaacttttaagtgcctcaatcttaaatatgagattaaggatcaccaaacatttgaggataaccttaatatgaaagagaagagggaaatggaaatacttcaagaagaagacaagtttttgtaaaaagttaactgatttcttcagaagtaaaggtattgcatctttgaaacaagaaaggatgctatgaaaaagcagtgcccagaaaacaagagcttctagaaatttagaatatgaaacacttcatagaagagttggaaattcagaatattaaattcttagagggttggaagataaagttga

SEQ ID NO: 549552 - DNA, 525 bp, Homo sapiens
atgcaacttttacatgacttcaaaagtaacagcttcagtatgacagatcaaataataacaactgttattcagtattcagttggggctacacaaatagtaaaaaamaacaacaacaacaacaacaaaaaaaaactaatattttgtaaaactaaaatctctagctttgtatttaaaaattatgcatcccttactttgaatctgaaaacattttctacagagaaaaaaatgccttttacagcagtgatttaaatggttttaccacttaatattcggtatccatgaggatgcgttgaaatgggtactctcatacactctgtgggagtctaaattagtatcaaaaattttggaagtcaattttacaataattatcaaaatgcaaaatgtgtaaaccctttgacccatatttcaatttctaggaattggtcccaaagatactcttccacaggcacccaaagatacataaaagaatgttctctgcagcacggtttgttacggaggaaaattgaaaacaacctaaaaatttgt

SEQ ID NO: 549553 - DNA, 1007 bp, Homo sapiens
tgccagcctgtatccatcaccctgctgtggccattctttggaatttctcccccttggaataagcagggattgctttactatgaatcttacaacacagactccattcatgttacccataagggctttctctgatgttcactgccaggcataaggaattagaaggagtgtcagaatgcttaaacaataaataatgaaaataaaaaaaatcccaattgttttctagcaatgaaaggaatcatgtaaaaccacactagttaccttaatcccagttagaaaacactagaggaattcgttatgaaacccaaagacatgatgaccttcacaattctccaggcaagttcttcatgtaccatgacaagtgggactgagagttttgggaaatgcagaagaaatgtgtcattttgaagagttctatgtggaagattgggattctagtggcttaaaatgatgtggagtgaaattgttttcaatgaaaatatttatcaaagttatatcatgagtatatctaaccctatgtttactgtatttgtgctatcatatgaatatattttgatttagtatttgatcagtctttactgattgttgagaatctactaactcagtgcttctcaaagtggtaaagggctagtttttcaaaatttcttatctctcctggattggtgcatagtcttaccacatatgactcatctccrgcttgcaccacttgctaatcaccacgtaagtgtggcagcatctaaacaaatctgtcttcatttcaaggaagagaacgctgataatgcacatggatgttgcaacaatgtcaaattgctatgaaaatttctaaatgaattttctgctcaattgcctaccttgttgcaaattaataacaggcagttaacataactggtagtgttctgcagaccacattctgagtaacactacacaatttactgcctgcatccctagaggggatgggggaagaaataggctaaatcctaaaatgccatgatgccatattcaaatagtgt

SEQ ID NO: 549554 - DNA, 1007 bp, Homo sapiens
tgccagcctgtatccatcaccctgctgtggccattctttggaatttctcccccttggaataagcagggattgctttactatgaatcttacaacacagactccattcatgttacccataagggctttctctgatgttcactgccaggcataaggaattagaaggagtgtcagaatgcttaaacaataaataatgaaaataaaaaaaatcccaattgttttctagcaatgaaaggaatcatgtaaaaccacactagttaccttaatcccagttagaaaacactagaggaattcgttatgaaacccaaagacatgatgaccttcacaattctccaggcaagttcttcatgtaccatgacaagtgggactgagagttttgggaaatgcagaagaaatgtgtcattttgaagagttctatgtggaagattgggattctagtggcttaaaatgatgtggagtgaaattgttttcaatgaaaatatttatcaaagttatatcatgagtatatctaaccctatgtttactgtatttgtgctatcatatgaatatattttgatttagtatttgatcagtctttactgattgttgagaatctactaactcagtgcttctcaaagtggtaaagggctagtttttcaaaatttcttatctctcctggattggtgcatagtcttaccacatatgactcatctccagcttgcaccacttgctaatcaccacgtaagtgtggcagcatctaaacaaatctgtcttcatttcaaggaagagaacgctgataatgcacatggatgttgcaacaatgtcaaattgctatgaaaatttctaaatgaattttctgctcaattgcctaccttgttgcaaattaataacaggcagttaacataactggtagtgttctgcagaccacattctgagtaayactacacaatttactgcctgcatccctagaggggatgggggaagaaataggctaaatcctaaaatgccatgatgccatattcaaatagtgt

SEQ ID NO: 549555 - DNA, 1316 bp, Homo sapiens
gatcctgttgatccccccaccaggtacctttacttgatgttgaatttattgggaaatgacgtttattcactgagatcaaagagtaatttagtactttccagtttgggttaacagttcctcttgaagagaaacttaaaaagttaaaaagtgattagatcattaatgatcaactttaccttttcatattgtctccaccagatactcatcttctttgctctattggtacaaaatcttttcaagttacagttttacaaacaatagtaataacagacaattattgctaagaagagtcattattttctaacacattttactgtttcaaatttaatctctacagatataaccatttgacagcctctggagacagagaagtaggggaagtggtacaccaggaaggagaggtggcagtggagcaggcagacagcatagagccagagcaggaaatgtcactgtgctgtccatggggcttaccaggcagtcatctaggcaattgactcttaccagaaccatgagaatgcactacttcctcaagcttctctttcattccagggactccaagggcttatcagaatctccccaaacaattcatctactgatatacacaactttacctttcatttgtcaaataggagtaactgtcaagacagagctgaccatacccaactagctttctaaagctgatacttgtacacttgatacaagataaaaagatagtgtgtagaacaaacggctcttatcaggtaatacaagtaagaatggcctaggcagaagaggaatcctgcagtgaatagtaaacaattagataaccatgtgtggagtgccaatgtggaaagcacctcaagccattccagatccaatgcccaagtggaaaagaacagcctccattartcttgcatatacaactcaaaagtcaagggtcgccaatggtgttctcatggggccatatagacacagggtgattcacttcctggaactgaaggactatgaaaccagagttgcttgtttcaatgcagaaagacagccttcaaaaaataacaagaactcacttggaaaaaattatgtaccaggtagccaatctgaataccaagaatatttaatatgtcttaaaaaattatgttttcgaagagcttcaaagagactagcctagacacagtgggctaaacaggcagacattggagttggtacttttcagaaaagtagatctatttcagaatgctgctagtatcaatcacccggaatcatctatagttctagtacagatgacacatcatgttctcagaaagagcttttccatttagcttttattgatcccttaa

SEQ ID NO: 549556 - DNA, 577 bp, Homo sapiens
cctttcttgctcctcactggcccttccttactagtatctggaggagctgatgtcctggagcaggccctgcagttcccctgtctgatgtggttcctctgttcccttctgtttcaggaggaggaggacactagggccctagctgccggcatgcctcttggccagcttgttcagtatccttgggccctgtgcrtgatgttacctatagtcagggctaagctcttgttcagatgccctcatagtgaggccagctgactgtgccatgttcagagaacattctgggcctctagctgtgacttgcactaagcagaaataatcaggtcctactttcatgggaattccttttcatgtgatgttctgaatttagagttagagacatttggggaccagcccttgctgggtgtgtaactctggtcaaggcacagggcctttctgaactttagcagcttcttctgtacaatagggatactggcacttggatcaatgctcagtacagggttttaaaagaatgtgaaatgcagttgctactaggactaatttccaggcagtgtgttggtaggatcacattcgtccctattat

SEQ ID NO: 549557 - DNA, 438 bp, Homo sapiens
ggtattctcctaatctaccaactcccatcaatgttcctgcttgcccagggtgcctgtctcagycctcttcttttctccctaacccctgggaagatctcatcaaattccctgcctctcgttttccttatcgatttgctgagggcttactcacaagtttctccagctgagaccctttactgatgagagtaataacaactggtggaagtgttctcctaggtagagaacaggaatctcaatttttaatgttgggagggactttatgcatctttttgctttcaaaagcaatttctgcctgggcgtggtggctgatgcctgtaatcccagcactttgggaggccgaggtgggtgaataacttgaagtcaggagttcgagaccagcccagccaacatggtgaaaccccgtctctactaaaaatacaaaaaattagctgggtgtgg

SEQ ID NO: 549558 - DNA, 438 bp, Homo sapiens
ggtattctcctaatctaccaactcccatcaatgttcctgcttgcccagggtgcctgtctcagtcctcttcttttctccctaacccctgggaagatctcatcaaattccctgcctytcgttttccttatcgatttgctgagggcttactcacaagtttctccagctgagaccctttactgatgagagtaataacaactggtggaagtgttctcctaggtagagaacaggaatctcaatttttaatgttgggagggactttatgcatctttttgctttcaaaagcaatttctgcctgggcgtggtggctgatgcctgtaatcccagcactttgggaggccgaggtgggtgaataacttgaagtcaggagttcgagaccagcccagccaacatggtgaaaccccgtctctactaaaaatacaaaaaattagctgggtgtgg

SEQ ID NO: 549559 - DNA, 438 bp, Homo sapiens
ggtattctcctaatctaccaactcccatcaatgttcctgcttgcccagggtgcctgtctcagtcctcttcttttctccctaacccctgggaagatctcatcaaattccctgcctctcgttttccttatcgatttgctgagggcttactcacaagtttctccagctgagaccctttactgatgagagtaataacaactggtggawgtgttctcctaggtagagaacaggaatctcaatttttaatgttgggagggactttatgcatctttttgctttcaaaagcaatttctgcctgggcgtggtggctgatgcctgtaatcccagcactttgggaggccgaggtgggtgaataacttgaagtcaggagttcgagaccagcccagccaacatggtgaaaccccgtctctactaaaaatacaaaaaattagctgggtgtgg

SEQ ID NO: 549560 - DNA, 438 bp, Homo sapiens
ggtattctcctaatctaccaactcccatcaatgttcctgcttgcccagggtgcctgtctcagtcctcttcttttctccctaacccctgggaagatctcatcaaattccctgcctctcgttttccttatcgatttgctgagggcttactcacaagtttctccagctgagaccctttactgatgagagtaataacaactggtggaagtgttctcctaggtagagaacaggaatctcaatttttaatgttgggagggactttatgcatctttttgctttcaaaagcaatttctgcctgggcgtggtggctgatgcctgtaatcccagcactttgggaggccgaggtgggtgaataacttgaagtcaggagttcgagaccagcccagccaacatggtgaaaccccgtctctactaaaaatacaaaaaattagctgggtrtgg

SEQ ID NO: 549561 - DNA, 1432 bp, Homo sapiens
ttataccctagcagcatacttgcaggggtgtgtgtgtatttattttaaagtaacaacacattactaacygaattcaacatatgactgtcaagtattttatttctctatttttatctgattagttctctgtttccctagaaagttaaattagacctaataaaattggcttttttcttgtagatggttttagattatttggttctaatatctttccaggaatccatgtttaactgaacaatgtctgtcaagatcaattctcccactcccatctcaccttaaaacatatatggagtaggggccgggtgcagtggctcacgcctgtaaccccaacactttgggaggccgaggtgggcggatcacgagatcaggagatcgagaccatcctggctaacatggtgaaaccccgtctctcctaaaaatacaaaaaattagccgggcgtggtgtcgggcgcctgtagtcgcagctacttgggaggctgaggcaggagaatggcgtgaacccaggaggcggagcttgcagtgagccgaggtcatgccactgcactcaagcctgggtgaagagcgagactccatctcaaaaaaacaaaacaaaaaaacaacatgtatggagtatacagatgttttctattttagaaatttttttttcgtgacagagtctcgctgtgttgtccagactgcagtgcagtggtatgatcatggttcactgcagccttgaccttctggactcaagcaatcctcccatctcagactcccaagtagatgggactacaggtgcgtgccactgcacccagcctccttttgatatctcagaaattaatgattaggttatcttgatgtctgctaggacttgaggtgtctcaaaatgcatgcctcagactcgggaaacttttatatagcaagttaaaaaataatctctggctttctattgttacttttcattttttttttctgttaagctggaatttgctgaggtcaaatgtggcctccttaattccttttctcccttttattatagttatttctgtgatgtccccatccctactagatctttacatgcagctcttttggtaagttgagatgcatatttagaggcaggtatggtagaaatgtcatcataattaggtacaaagggactttagactctttaaaaattaagtcacttggaagtaaaaatagaattaatattgaattctccctttgaatttggtgcacatgtaatgtgttggtggtgagactattttaaatttcgaagagttagtggatgggagtgagaaagaaaacaagaaaaacaagaaaccacaagagtggaaagcagagatttttatttttgtgattcattacctatcatcactgcttcctttcttctccacagaatgatagtgtagaaagtgatgagatatattctaattcttgaagccttaattaacagaaa

SEQ ID NO: 549562 - DNA, 1432 bp, Homo sapiens
ttataccctagcagcatacttgcaggggtgtgtgtgtatttattttaaagtaacaacacattactaaccgaattcaacatatgactgtcaagtattttatttctctatttttatctgattagttctctgtttccctagaaagttaaattagacctaataaaattggcttttttcttgtagatggttttagattatttggttctaatatctttccaggaatccatgtttaactgaacaatgtctgtcaagatcaattctcccactcccatctcaccttaaaacatatatggagtaggggccgggtgcagtggctcacgcctgtaaccccaacactttgggaggccgaggtgggcggatcacgagatcaggagatcgagaccatcctggctaacatggtgaaaccccgtctctcctaaaaatacaaaaaattagccgggcgtggtgtcgggcgcctgtagtcgcagctacttgggaggctgaggcaggagaatggcgtgaacccaggaggcggagcttgcagtgagccgaggtcatgccactgcactcaagcctgggtgaagagcgagactccatctcaaaaaaacaaaacaaaaaaacaacatgtatggagtatacagatgttttctattttagaaatttttttttcgtgacagagtctcgctgtgttgtccagactgcagtgcagtggtatgatcatggttcactgcagccttgaccttctggactcaagcaatcctcccatctcagactcccaagtagatgggactacaggtgcgtgccactgcacccagcctccttttgatatctcagaaattaatgattaggttatcttgatgtctgctaggacttgaggtgtctcaaaatgcatgcctcagactcgggaaacttttatatagcaagttaaaaaataatctctggctttctattgttacttttcattttttttttctgttaagctggaatttgctgaggtcaaatgtggcctccttaattccttttctcccttttattatagttatttctgtgatgtccccatccctactagatctttacatgcagctcttttggtaagttgagatgyatatttagaggcaggtatggtagaaatgtcatcataattaggtacaaagggactttagactctttaaaaattaagtcacttggaagtaaaaatagaattaatattgaattctccctttgaatttggtgcacatgtaatgtgttggtggtgagactattttaaatttcgaagagttagtggatgggagtgagaaagaaaacaagaaaaacaagaaaccacaagagtggaaagcagagatttttatttttgtgattcattacctatcatcactgcttcctttcttctccacagaatgatagtgtagaaagtgatgagatatattctaattcttgaagccttaattaacagaaa

SEQ ID NO: 549563 - DNA, 847 bp, Homo sapiens
tttatgtaaaagaaagaaaagctgctattataatcacttcccataatgtctacttttttatttctatttattggaagatttaaaaattttgttgaaagacataattttgccatatattcttcttgtgcatacacataaaagtatatataaaaataaattgcttaagctattcattggttaagctatttattaaacttccccacatacaaattccaactcttctgaatttcttcacattatgtaattcttatagtatccgttacataatcaagagcatttcctatagagtgctttactattttccctgggatttgcttcctaattgttgacaattattctgtgagttttgttgctggtastttattgatcttactagaaatatgctactggatttttttggtcaacaaacaggatttctatttcttcctcagatggtcctacaagtttgcagactgaaacatggagaatgctatttccttgtcactccactgggaataacaattgcttatatgcagatcatggcaattatgtcatctggccaacgataattagaagtcgttgttgattacaagatacagtttgatttcagagatattaaaatatgaaaaaatatgtgccttaggttagacatttagacacaaggtcctgttccaagaattaaaaatttttttaattcaattttttttttttttttgagacggagtctcgctctgtcgcccaggctggagtgcagtggcgggatctcggctcactgcaagctccgcctcccgggttcacgccattctcctgcctcagcctcccaagtagctgggactacaggcgcccgccactacgcccggctaatttt

SEQ ID NO: 549564 - DNA, 978 bp, Homo sapiens
ttgaacccagaacaacactgaatctagtgatttttaagttgcacaggcgggtcgaagattcttgagggattatcttggaactcagggaggtgtaaggcaggtgagtaggcagggcatcacactggaggttatgtgagggttttgtaccccattataagcctagcacttagcacagttgacacattggaataaatgaatgaawaagtttacccaccctgcatccctgctttaacctgaaagttcatttttcacatttttttattgttctcagagtaagttttccagagtttagtagagaatttcagaaacgatgtaaactcttctctgggggctgctaatctgttgctgctactgacatacattagtatactggctattttctctccatgacctgccttcttttccctatccctccacatcattcttcctaagcctctagcttccctgtaccatttgcccccataggagttggtatcctaaagtgctggttgagcacagtctccattcccacattcaactggcagcatgatcagaaagactgccaactcatcatggagatgggcaagttcccccaaaactctcatgcactgtataaatgcaaggtagtagtaatagtttaatatagaagtttattgatttgtcaaagtaattgatatcaccttgccagaattggacaacctcagatatcctggactttggctctctggtacgccttcgctgacctctctctctctccccgcttggtttgatgatgctatatttaaatgtaatcacactcagtagactatttgactgttaatactctgggacagcaaaaattattagtcctctcacagtgtccttaggtgacacatgataataagagtaatcagtactttcatgatgggccacgtagatattgtgtatgatttcattttacaatgaacggcagacttcttttctaggatgtcagctataaatctaagagctttaaagaca

SEQ ID NO: 549565 - DNA, 978 bp, Homo sapiens
ttgaacccagaacaacactgaatctagtgatttttaagttgcacaggcgggtcgaagattcttgagggattatcttggaactcagggaggtgtaaggcaggtgagtaggcagggcatcacactggaggttatgtgagggttttgtaccccattataagcctagcacttagcacagttgacacattggaataaatgaatgaataagtttacccaccctgcatccctgctttaacctgaaagttcatttttcmcatttttttattgttctcagagtaagttttccagagtttagtagagaatttcagaaacgatgtaaactcttctctgggggctgctaatctgttgctgctactgacatacattagtatactggctattttctctccatgacctgccttcttttccctatccctccacatcattcttcctaagcctctagcttccctgtaccatttgcccccataggagttggtatcctaaagtgctggttgagcacagtctccattcccacattcaactggcagcatgatcagaaagactgccaactcatcatggagatgggcaagttcccccaaaactctcatgcactgtataaatgcaaggtagtagtaatagtttaatatagaagtttattgatttgtcaaagtaattgatatcaccttgccagaattggacaacctcagatatcctggactttggctctctggtacgccttcgctgacctctctctctctccccgcttggtttgatgatgctatatttaaatgtaatcacactcagtagactatttgactgttaatactctgggacagcaaaaattattagtcctctcacagtgtccttaggtgacacatgataataagagtaatcagtactttcatgatgggccacgtagatattgtgtatgatttcattttacaatgaacggcagacttcttttctaggatgtcagctataaatctaagagctttaaagaca

SEQ ID NO: 549566 - DNA, 978 bp, Homo sapiens
ttgaacccagaacaacactgaatctagtgatttttaagttgcacaggcgggtcgaagattcttgagggattatcttggaactcagggaggtgtaaggcaggtgagtaggcagggcatcacactggaggttatgtgagggttttgtaccccattataagcctagcacttagcacagttgacacattggaataaatgaatgaataagtttacccaccctgcatccctgctttaacctgaaagttcatttttcacatttttttattgttctcagagtaagttttccagagtttagtagagaatttcagaaacgatgtaaactcttctctgggggctgctaatctgttgctgctactgacatacattagtatmctggctattttctctccatgacctgccttcttttccctatccctccacatcattcttcctaagcctctagcttccctgtaccatttgcccccataggagttggtatcctaaagtgctggttgagcacagtctccattcccacattcaactggcagcatgatcagaaagactgccaactcatcatggagatgggcaagttcccccaaaactctcatgcactgtataaatgcaaggtagtagtaatagtttaatatagaagtttattgatttgtcaaagtaattgatatcaccttgccagaattggacaacctcagatatcctggactttggctctctggtacgccttcgctgacctctctctctctccccgcttggtttgatgatgctatatttaaatgtaatcacactcagtagactatttgactgttaatactctgggacagcaaaaattattagtcctctcacagtgtccttaggtgacacatgataataagagtaatcagtactttcatgatgggccacgtagatattgtgtatgatttcattttacaatgaacggcagacttcttttctaggatgtcagctataaatctaagagctttaaagaca

SEQ ID NO: 549567 - DNA, 978 bp, Homo sapiens
ttgaacccagaacaacactgaatctagtgatttttaagttgcacaggcgggtcgaagattcttgagggattatcttggaactcagggaggtgtaaggcaggtgagtaggcagggcatcacactggaggttatgtgagggttttgtaccccattataagcctagcacttagcacagttgacacattggaataaatgaatgaataagtttacccaccctgcatccctgctttaacctgaaagttcatttttcacatttttttattgttctcagagtaagttttccagagtttagtagagaatttcagaaacgatgtaaactcttctctgggggctgctaatctgttgctgctactgacatacattagtatactggctattttctctccatgacctgccttcttttccctatccctccacatcattcttcctaagcctctagcttccctgtaccatttgcccccataggagttggtatcctaaagtgctggttgagcacagtctccattcccacattcaactggcagcatgatcagaaagactgccaactcatcatggagatgggcaagttcccccaaaactctcatgcactgtataaatgcaaggtagtagtaatagtttaatatagaagtttattgatttgtcaaagtaattgatatcaccttgccagaattggacaacctcagatatcctggactttggctctctggtacgccttcgctgacctctctctctctccccgcttggtttgatgatgctatatttaaatgtaatcacactcagtagactatttgactgtyaatactctgggacagcaaaaattattagtcctctcacagtgtccttaggtgacacatgataataagagtaatcagtactttcatgatgggccacgtagatattgtgtatgatttcattttacaatgaacggcagacttcttttctaggatgtcagctataaatctaagagctttaaagaca

SEQ ID NO: 549568 - DNA, 978 bp, Homo sapiens
ttgaacccagaacaacactgaatctagtgatttttaagttgcacaggcgggtcgaagattcttgagggattatcttggaactcagggaggtgtaaggcaggtgagtaggcagggcatcacactggaggttatgtgagggttttgtaccccattataagcctagcacttagcacagttgacacattggaataaatgaatgaataagtttacccaccctgcatccctgctttaacctgaaagttcatttttcacatttttttattgttctcagagtaagttttccagagtttagtagagaatttcagaaacgatgtaaactcttctctgggggctgctaatctgttgctgctactgacatacattagtatactggctattttctctccatgacctgccttcttttccctatccctccacatcattcttcctaagcctctagcttccctgtaccatttgcccccataggagttggtatcctaaagtgctggttgagcacagtctccattcccacattcaactggcagcatgatcagaaagactgccaactcatcatggagatgggcaagttcccccaaaactctcatgcactgtataaatgcaaggtagtagtaatagtttaatatagaagtttattgatttgtcaaagtaattgatatcaccttgccagaattggacaacctcagatatcctggactttggctctctggtacgccttcgctgacctctctctctctccccgcttggtttgatgatgctatatttaaatgtaatcacactcagtagactatttgactgttaatactctgggacagcaaaaattattagtyctctcacagtgtccttaggtgacacatgataataagagtaatcagtactttcatgatgggccacgtagatattgtgtatgatttcattttacaatgaacggcagacttcttttctaggatgtcagctataaatctaagagctttaaagaca

SEQ ID NO: 549569 - DNA, 612 bp, Homo sapiens
aaataattatagaaaggactgtgctaaatagttgtttgccaagtactcacaagctcattgaacatattaggcaaagtgttaatttgcctgttttattgctgtctctgctatcaattgccttcaagtcttctgggatcaaggtttggtttctagtcacttgctaattgccatttgaattatattttcacaaattacaaacagaagattaagtctcaggctctaaagcccattttttttttttttttgctccatgaaaaaattaatttatttctgtgaaaagagtgacattaccttttacactgattttagtttcttaggataaatgaaactggaaggagttctgtttcctcattaggccttaataccccctgttcaaaaaccayggccatattacattttacattccttttgctgctttgccttgttaaggtttctgtgaaatgatttcaagggctgattgcatttcagagcatgttttaaatggaaatatgagtcctcaagcgaatttatgttatcttggagtactttaaaagagcgaagaggaaacaaagatataggggaggggaaagcagataaaaggaccctttctatgaagaaaggtgcacatttagg

SEQ ID NO: 549570 - DNA, 623 bp, Homo sapiens
atccgtctcaaaaaaatttgtttttcattttctaattcatctgtagaaatacagttgctgtttttttgagrtaggatctcactgttggccaggctggagtgcagtggcacaatgatagctcaccacagcctcaaacttttgggttcaaatcatcatgtctcctcagccttccaagcagctgagatacaggcacgcaccaccgcacctggctaattttgtttgtaaagacagagtttcactattattcaggctagtcttcaaactcctgccctcaagtgatcgtcccatctcagcctcctgagttcctgagtagcttgggactacaggctcaccatacttggcattttttgtttgtttgttttgttttttgttttgtagagaacagggtcttgtttttttgcccaggctgatctcaaacttgtggtttcaagcgatcctcccacctcagcctcccaagtactagggttacaggcatgagccactgtgcctggcctgtgttaattttttatttttcttttttatctggctgtactttgtagaacttattgggaatgcttttcagaaagaacctgcatttatttctggtgggagctagcagtttttattaaccttggaacactttt

SEQ ID NO: 549571 - DNA, 623 bp, Homo sapiens
atccgtctcaaaaaaatttgtttttcattttctaattcatctgtagaaatacagttgctgtttttttgagataggatctcactgttggccaggctggagtgcagtggcacaatgatagctcaccacagcctcaaacttttgggttcaaatcatcatgtctcctcagccttccaagcagctgagatacaggcacrcaccaccgcacctggctaattttgtttgtaaagacagagtttcactattattcaggctagtcttcaaactcctgccctcaagtgatcgtcccatctcagcctcctgagttcctgagtagcttgggactacaggctcaccatacttggcattttttgtttgtttgttttgttttttgttttgtagagaacagggtcttgtttttttgcccaggctgatctcaaacttgtggtttcaagcgatcctcccacctcagcctcccaagtactagggttacaggcatgagccactgtgcctggcctgtgttaattttttatttttcttttttatctggctgtactttgtagaacttattgggaatgcttttcagaaagaacctgcatttatttctggtgggagctagcagtttttattaaccttggaacactttt

SEQ ID NO: 549572 - DNA, 623 bp, Homo sapiens
atccgtctcaaaaaaatttgtttttcattttctaattcatctgtagaaatacagttgctgtttttttgagataggatctcactgttggccaggctggagtgcagtggcacaatgatagctcaccacagcctcaaacttttgggttcaaatcatcatgtctcctcagccttccaagcagctgagatacaggcacgcaccaccgcacctggctaattttgtttgtaaagacagagtttcactattattcaggctagtcttcaaactcctgccctcaagtgatcgtcccatctcagcctcctgagttcctgagtagcttgggactacaggctcaccatactyggcattttttgtttgtttgttttgttttttgttttgtagagaacagggtcttgtttttttgcccaggctgatctcaaacttgtggtttcaagcgatcctcccacctcagcctcccaagtactagggttacaggcatgagccactgtgcctggcctgtgttaattttttatttttcttttttatctggctgtactttgtagaacttattgggaatgcttttcagaaagaacctgcatttatttctggtgggagctagcagtttttattaaccttggaacactttt

SEQ ID NO: 549573 - DNA, 919 bp, Homo sapiens
aatatttatgactatatcctaagacttctcagaaagtagctctaaaatttgattttatattgcatgtagtcattttaaatttacatgtgaaaagatattctacttacaatgattcttatttctcttcaagatatctttattttgaattccttttattcttattttacgttgattcttctttttctccaggagattttctcttttattgattacattactagatgttctttgttccaatatgtgtgataaatattgtttgatttcgttcactgatacctacaaagaaaaagactgttgctcattttgttcatgtgtgagtttttttcaaatgaaacaacaggaaagtgaaaattcatatattcatggcaaaaatacaagcttaatgcaattactctaattcttgcttttttcaaatcaaaatgacagatggcttacttcactttagaaatccatatgttttatgaataaaaaccttttaaatctattatattgtcatctgaactacagagccaagcattaaaagctaaatgttataaataaaatagtaggagaatttaaccaatttaccttccactggtaagttgtcatggtaatgtcaatcgtgttagctaaaaaaatgaagrcgttgatattgccttacacattacaacaaatttataatgggtggaaagtacagaaaatcttctgactggctttaaaaaaacaatatttcccaaaagtccttttcagaagttatataattacaattaatcttttttaagtagggtaatagttttagcaggttatttctgagtagtagaaaataatgcaggaattaaggtagaaaaagctttatggaagtaaatattcatgatttacctacataattttctgggtaaattatactgaaacattaaaatttttcctttgtcaattatta

SEQ ID NO: 549574 - DNA, 481 bp, Homo sapiens
ggccacatatatataactatataactgttctctatatatgtagaacatttatatatgtagaacacataratatgtagaacacatatgtatgtagaacacataaatatgtagaatacacatatgtagaacacatgtagaacacacatgtatgtagaacacacatacatagaaaacacatgtagaacacacatatgtagaacacacacgtagaacacatatgtagaacacacatatgtagaacatacatacatatatatgtgcatatatatatatgttcatcttggtaatctagaaatggttgtgtcctgtggagaatcacaaggatggttcttagtacaaaaaccaacacccactcctaatagttttctttctagttgttaatgattgactatttagttacgtctttattccttgataaagttttttttgcttttgttttgttttgtttttagcaacagggtctcctctgtcacccaggctg

SEQ ID NO: 549575 - DNA, 481 bp, Homo sapiens
ggccacatatatataactatataactgttctctatatatgtagaacatttatatatgtagaacacataaatatgtagaacacatatgtatgtagaacacataaatatgtagaatacacatatgtagaacacatgtagaacacacatgtatgtagaacacacatacatagmaaacacatgtagaacacacatatgtagaacacacacgtagaacacatatgtagaacacacatatgtagaacatacatacatatatatgtgcatatatatatatgttcatcttggtaatctagaaatggttgtgtcctgtggagaatcacaaggatggttcttagtacaaaaaccaacacccactcctaatagttttctttctagttgttaatgattgactatttagttacgtctttattccttgataaagttttttttgcttttgttttgttttgtttttagcaacagggtctcctctgtcacccaggctg

SEQ ID NO: 549576 - DNA, 481 bp, Homo sapiens
ggccacatatatataactatataactgttctctatatatgtagaacatttatatatgtagaacacataaatatgtagaacacatatgtatgtagaacacataaatatgtagaatacacatatgtagaacacatgtagaacacacatgtatgtagaacacacatacatagaaaacacatgtagaacacacatatgtagaacacacacgtagaacacatatgtagaacacacatatgtagaacatacatacatatatatgtrcatatatatatatgttcatcttggtaatctagaaatggttgtgtcctgtggagaatcacaaggatggttcttagtacaaaaaccaacacccactcctaatagttttctttctagttgttaatgattgactatttagttacgtctttattccttgataaagttttttttgcttttgttttgttttgtttttagcaacagggtctcctctgtcacccaggctg

SEQ ID NO: 549577 - DNA, 481 bp, Homo sapiens
ggccacatatatataactatataactgttctctatatatgtagaacatttatatatgtagaacacataaatatgtagaacacatatgtatgtagaacacataaatatgtagaatacacatatgtagaacacatgtagaacacacatgtatgtagaacacacatacatagaaaacacatgtagaacacacatatgtagaacacacacgtagaacacatatgtagaacacacatatgtagaacatacatacatatatatgtgyatatatatatatgttcatcttggtaatctagaaatggttgtgtcctgtggagaatcacaaggatggttcttagtacaaaaaccaacacccactcctaatagttttctttctagttgttaatgattgactatttagttacgtctttattccttgataaagttttttttgcttttgttttgttttgtttttagcaacagggtctcctctgtcacccaggctg

SEQ ID NO: 549578 - DNA, 1174 bp, Homo sapiens
aattgtggcttagaaatgtcttcacaacaggaaacctacaattagtggtgtattagagccaacttataccaggccactagaaccaattgttaaattctcaaaatttttagcaagctggttgttaaacacagtcattattaaaagttaaattatataaacaaaattaaaataaatcatactaaaaacaaaggtaataaatactcaaatctcatcacttcctattattttactgttaagcatgctcttgaggtgatttgtaactactgtatctggttggtagaaactatataatgctgtgctactacataagacttcccagcctcgctttcagtgacttttgctggtagtttaaaatgagccagccacagcagtggtacttacacaatggaaacctgcaaacatgacaacccctccttctgacattgccagcttgttaacatctacctgcagatactacctataatgttaatcaccacagcttggcaataggtaaggaacttgagctggccaatcttttgagatagaataaaggcctatagattataaatcatgacacaaatataaggaagaaaagtaaatatgatttattgtgccagtaactatactgtgccagtcatagcacaaagtactttccacaaactttaattttatgagagatagtatcaaatccaatatacagatgagttgactaaggttctgagaggttgagtaactactaaaaagcacaagagcaagagtgaggcctaggattgtctgactcaaaaatatatgatctttccactaagctaccccacttactaacattattgttatcacagtgaaaccaaaatcaaccatatgtaactgtcagataattagcaaacattaatagcctctgatgtacataaaagtagcatacatgaagagggatatggagaagatgtagacaaagaactcaattttaatcatattcaccaaatttgttcatatttacttcaaaatatgcccacagaaaaaaatacstgagtgagaaatggagcccaaggaaaccactaggaccaaaaatatctgcatatcctaagggttattccaagcttaatttaaatgctgaccatgtgcagggaattctcttaattcttcaaatacttatgctctgtccaccaaattgacacactcaacttaaaatgacacaccc

SEQ ID NO: 549579 - DNA, 523 bp, Homo sapiens
aaaatcagttgttcatatacgtgtggttccatccatttctggattcttgattctgttcccaagatttagaatctatcatgtggtatgaatcctgtaactgtaagttaataaataatttatgtcaattatcttttacgtgtttggcacatagtggacccttagtgaatgctattttactgtcttcttttattggacatttttgctgtgactgtgaaataattactcccaactcctttaagttctctaagtcaacaattattaaatgattctcattgtgatctacccacctgagtgcttttgccgagaatcattacagaaacaatattctctgctcttaagaaccttatggcctataagagatggagataaaaatatattttttaagtaaacattttctttcttatgttgtatttccagttcatatcaaataaagcaagacatgcttgackgtagaatttgctttctgtgactccttctaaatatacatgattattcactccatgctaaaaacacaaagacatca

SEQ ID NO: 549580 - DNA, 789 bp, Homo sapiens
ataaaggcagaggttataatgtacaccactttattcccaatgcctagaagattgcctgacacatggtagatccccagtaaacatactccaaaagtactgcttcactacaaagtgctggccactgtgacaggaacagaggtagaaatagacatatgatggggtatactttaaaggagtttggcttgtgtttggagagaccaaatggatatgttaagtttgcagggcagggtgaaaaaagtaccatattggaaataggttatgtaagtagaagtgatatgtgtgtcatcacagttgtatcagaggggtggtctagccccactcatatcctctgtcctgcacccatcaaggcacactggcctgactcctggctcccaccagtcatcacctacatttctttacccgataatctctctggccatcagagcctacttttctttcttgcacaggccagaagtaccagaatatgaatccccccgctactccctccaggagcagccctcagccaatgactaatgggagttggtgtataaataacccactgtcttggttctcatcccagatggatgacactgaggtgtgttctactgtggctctcagaattcccaatgagattaagctcctgttacccttagataacttgcttgaaaatgtatatcctgtgatcactccaaaataaatgactggttggtgaatttttgtcttagcatctgcttccggcagaatccaaacaaagacatgagaattamatttttggtttcattcttgttttattttcttaacatacatgct

SEQ ID NO: 549581 - DNA, 1491 bp, Homo sapiens
agtgagggttctgccacatagtgggtaacggttccaagaactgacttggagacacacttgctgtgtgaccttggtcacgttgaccaaacgccccgtttgtcatcatgaagaaacgtctcgtttcttcatctattacatggcagcaatgatacccaaaatgagtttgcagaagactgtttgaaaagtgcctagcaaacgtgcgtgacccagggaaggtgcccggtgacacagtggttgggaatgtactcttgtgttctcctgacatcaggcaactggggctccttaaaggagttgaccgtggtgaaaaagccacactagccactgacttgctgtgtggctttgggtaagtaacttaacttctctgaggctgagtctatatctggaaatggggtgatcattttagctatcacttgttgtaagggctcagtacaaagttgccagataaaatacaggacaccaattaaatctgaatttcagataagcgatgattttttttttaaattcataagtcccaacttttcatttgctccacctggcagccgtatttcagtaagaagattcatgtggagcgtctggctcagtgcctggtctgtcatgggaacttaaaaggtagtccttttacattctgattttgcatgttatcagcaaatggggttatgtctctcactccttacctaccctgatcgttgtgagaattggaccaagtaaggtcccgaaaccaaggccctgtagtccagcttcctgctccctgacagccattcttattcttatttttattattccttgttctccccatccttgaatgccattggcgcacaactgaataaagccagtttcccaggctccagccctccctctctctttctgttgaaggctccctcctgcttctgaaagggggtttccggcagaggagcacccctcaggctgagtaggaggggcagccccctctcaactctgcctgctttggagggtctggcttcaaagacctggagatggcactaaaggtaagagagttttgaaaatacttgttcccatagattctgttttatctgagaaaatcctccctcctccaccctcgtattcccgggaccgtcctcttcccacaatctgcctcttcttgggatccgtcttccttctcccactccagcaccagccacctgtagcctgcaaagcagcagagattctacttcattttccattctttcrtattggtttattttatttcacttaatttttttggttaccttttcatttaattcatgtatcttttaaacaaaaaaacacaggcacacaattttaaaagtcaaaaatactcaaaatttataacaacaggaccaacagaacattttcctgtttctgccctccccagtcccaattcccattccctagaaccaactaaggtggactccctttgccgtttcctgtggatggtcactttctaacataacctatactgctattttatgctctctcgggtttaaacattgtctt

SEQ ID NO: 549582 - DNA, 536 bp, Homo sapiens
gacactgtcggtccaagagcgggaggccccggaggaccaaggagggaccgtggaacttgccagaagaaaggaaasagacctcagaaagatcctgttccaaggtcatgctgctggactgttggagacctttcccaaatgatagaaaatcattcgactcacaggaggtgaagatgctggggtcccctgaaggcaaagtttccctaacagtgaggggcatgcacggggcagagcatacactcacctttccctggcaacacacctcatgtcccctcaggacatacgtggagtgtagacaagcaacccgtcttctgcccttctgacaaactggtgtatggcaccatttccaaatccccacagacctctgtgtaccacggtttcccaacactatgctgctggaccgaggcgggagccttctccgctgtggggctgtcctgtgcactgtagaatgttaagcagcatccctgactcctacccactcaatgccaggggcaacccccacccccaggttgtgaaattatttatttatttatttagcg

SEQ ID NO: 549583 - DNA, 536 bp, Homo sapiens
gacactgtcggtccaagagcgggaggccccggaggaccaaggagggaccgtggaacttgccagaagaaaggaaacagacctcagaaagatcctgttccaaggtcatgctgctggactgttggagacctttcccaaatgatagaaaatcattcgactcacaggaggtgaagatgctggggtcccctgaaggcaaagtttccctaacagtgaggggcatgcacggggcagagcatacactcacctttccctggcaacacacctcatgtcccctcaggacatacgtggagtgtagacaagcaacccgtcttctgcccttctgacaaactggtgtatggcaccatttccaaatccccacagacctctgtgtaccacggtttcccaacactatgctgctggaccgaggcgggagccttctccgctgtggggctgtcctgtgcactgtagaatgttaagcagcatccctgactcctacccactcaatgccaggrgcaacccccacccccaggttgtgaaattatttatttatttatttagcg

SEQ ID NO: 549584 - DNA, 539 bp, Homo sapiens
ttttagaaagaccattttgacagcagaatagaatgggttgagtgggagcaagcttagctgtagcaccaatcaggaggtcattggaatagttcagataaaagatgctgagaacctagaagtagacagtgtaggtggggatagaaagggacatatgattttctctggatagaattaattgcacttttggaataactgagaataagggttgcaaagactagttttctgagccaaccttcaaagcccgtgtgtattactaaaatgcaaaatgtgtgcaataaagaaaaataatagaatttaatgttagaatttaaagttgaattcaaaataattttcaaatgtatctttaatgtttgaacttacagraaaacagatatcattagttgagaataaattaataaaaatctttatggataatctgaaggaaacttggcaacagtctagactaaaggttaatagtactggccacttgtttgttttcatttcaatttttaaagtatggctttctcttttgttgtttcaggatatcactcatggtacat

SEQ ID NO: 549585 - DNA, 641 bp, Homo sapiens
aaatacttttggactaaggcttcccctgtgtgatgggtactacataaattaataaacttctgcttgtttttcttatgttaatttgacatctgttttcaggagagtttctcacctaataacgtaaaaaggaaaagaaaggaaattatgttttctctcccacaactgcaagttgttgaaacatcttgcgggatgggattggaggaggcatatatgggaattttctgtactttctacctaattcatctgtagacctaacgtttctcaaaaatgaaattataataatttaaaaaggatacttgaataaccccaaagaaaacaggaaaagagaactgaaaggaagggaaggaggaggaggtggargaggaaggtaggaaaggtagaaaaagaaccgaataacaggcctaaccccaataaatgctgattctatctacgaatacttctaaaacaggccaaacaaatctgtggtgatagacagcagaacagtgtttgtctatggggtggaacttgattgcaaggagcataggaaacttactaggggtgatggatagttacacatcttgaccaaagtgatggttacaatggtatatacatttatcaaaatgcattaaattgtacagttgggattcgtacctttctctgca

SEQ ID NO: 549586 - DNA, 500 bp, Homo sapiens
tcatccaatagataaatcaaaatgaagatgaagaatggaggaaccaatggtcaaaggcactgataggaagcaacgaaaaccagaaaaaaaaagtattatgtttattaatacaaatatagtctagatacaaatagaaacactgaaaaaaacagaccatgaaagaagagtgtaataataaatcaataacctcggatgaaaatccccacacatcaaaaactcaaggaaattctgaaaacaaatatcctcctacatacctattgggacagttaaaaaaaatttaaaaaagcaataattataaacttctagagaatctaaatagaaataaaatgtgtaagatgctgccaaattcatattcaaaggaaaatgtatagccttaagwaatttcattgttatataaaaagcctaaaataaactttttaaaatataaaaaagaataaggaaataagacatgcagacgttaatattttgaaacaagataaatataagatttgaaggcacaa

SEQ ID NO: 549587 - DNA, 1604 bp, Homo sapiens
gactcagctggctgctgtagggtttgtgcaccacagatgaggagagaatgcaaagtccattggccgcaaagcagcgactgagcctctgaaatgtcgagtgagcctgtcaggttagacagaattagatgggtgcacccaggctctccctggcctgccacttcccgccccagggcccttcagcagctgccccctctgcctggctcttccctggctctctagatggctgattcctctccttttagctctcagctgatgtcaccacctccaagaagcctcccctgatcactctctaaagaaccctccaggtcacttgctatcacatctttggttttatttccttcattgaagaacttagtgcaatctcaagtttatattattcatttgtgtgttcgcatgttgagcgcatgtcccactgctgacccckggcacttagctcgtaataggtttgtataataggtgttcaaggtgttgaatggattttgaccatggacgtgatgcccaacagagtccctgcctcccattgcactctgggaggggaggcaagcatctccagcagcttggcaggtagaaggcctcttggataactatgtgaattatgcccatttcaaagattggatgccgagtcccagaggcagaagtctcccagtccaggggtccatggtcaggatgacctgaagtcttaccctgtggagatccaaggtccattaaggcgtggaggcaggatcgcagtgctgggcactctatctggcaagggctgctggcagtggggttcccagcgcaggcagctgcccccggcctccccagccgccggtgcagtgtgggctgcaaagcagacagacctgggtaagaccccagcatgccccgggaacacccaccccatctgccctcccaaccccactgtggccacagagagccaggcagggctgtcccgcaacctccatcgcagccccgtccccagggtgccccagttctggagacagtgatgggttccccatattgaggatcctagaatcagcctccccgacgcatctcctcctgggttcccagatgtgatcaccctagaatccaagcctcctagatggagcctgtcccagattctggggctgggaggcctctgagaattgtacacgtggagcagactcttagaagcccagaccttccacgggctcatcagccgtggctgagtcctgcctgctggtggctgaaggacccacgctcctggacaaagggcactctggactcaggacccaaggtgctggggacagtggggccctagcctatccctagagcagaccactcccctccaccaaggagccctgggggctgcttggcctctcccggcacacagcaggcccctcgaggccactcgcttcaggtctcacctggtgctgggcacctgctatctactcggtgctcagcgagcgtgtggcaagggaaagagcgcatggccgctgcagaggcccgggccgaggtgtgaggccaaacaatgcaggccctgcccttcttcagggctccgtccctaagcccagacaccagggggaggaattgggctcagggcagaaggtgactggaagatggacacgggaagcaggcgctgcagcaca

SEQ ID NO: 549588 - DNA, 1604 bp, Homo sapiens
gactcagctggctgctgtagggtttgtgcaccacagatgaggagagaatgcaaagtccattggccgcaaagcagcgactgagcctctgaaatgtcgagtgagcctgtcaggttagacagaattagatgggtgcacccaggctctccctggcctgccacttcccgccccagggcccttcagcagctgccccctctgcctggctcttccctggctctctagatggctgattcctctccttttagctctcagctgatgtcaccacctccaagaagcctcccctgatcactctctaaagaaccctccaggtcacttgctatcacatctttggttttatttccttcattgaagaacttagtgcaatctcaagtttatattattcatttgtgtgttcgcatgttgagcgcatgtcccactgctgacccctggcacttagctcgtaataggtttgtataataggtgttcaaggtgttgaatggattttgaccatggacgtgatgcccaacagagtccctgcctcccattgcactctgggaggggaggcaagcatctccagcagcttggcaggtagaaggcctcttggataactatgtgaattatgcccatttcaaagattggatgccgagtcccagaggcagaagtctcccagtccaggggtccatggtcaggatgacctgaagtcttacccygtggagatccaaggtccattaaggcgtggaggcaggatcgcagtgctgggcactctatctggcaagggctgctggcagtggggttcccagcgcaggcagctgcccccggcctccccagccgccggtgcagtgtgggctgcaaagcagacagacctgggtaagaccccagcatgccccgggaacacccaccccatctgccctcccaaccccactgtggccacagagagccaggcagggctgtcccgcaacctccatcgcagccccgtccccagggtgccccagttctggagacagtgatgggttccccatattgaggatcctagaatcagcctccccgacgcatctcctcctgggttcccagatgtgatcaccctagaatccaagcctcctagatggagcctgtcccagattctggggctgggaggcctctgagaattgtacacgtggagcagactcttagaagcccagaccttccacgggctcatcagccgtggctgagtcctgcctgctggtggctgaaggacccacgctcctggacaaagggcactctggactcaggacccaaggtgctggggacagtggggccctagcctatccctagagcagaccactcccctccaccaaggagccctgggggctgcttggcctctcccggcacacagcaggcccctcgaggccactcgcttcaggtctcacctggtgctgggcacctgctatctactcggtgctcagcgagcgtgtggcaagggaaagagcgcatggccgctgcagaggcccgggccgaggtgtgaggccaaacaatgcaggccctgcccttcttcagggctccgtccctaagcccagacaccagggggaggaattgggctcagggcagaaggtgactggaagatggacacgggaagcaggcgctgcagcaca

SEQ ID NO: 549589 - DNA, 485 bp, Homo sapiens
gcccttcaagggggttctggagaaggagagtggagatggctccttcccrtggtatcctgcatgtgatcttggcccagagattgaaaacagtcatcccctggagaccccagccccccagtggcccctagtgccagcctctctgctcctcttcaaacagtgcagcctgagtcagcaaggggccaggcagtagcggggacaggatgggcttgaagcttctccgaagctaatgatgaaaatgtcactctcctccccaaacccccatcccttggtgaggacagaccgtagttcccacacccaatggtcacagcccctgggaaggggcacatgctcacgatgacacaaagaaacagggctccagcccccagctgctccacccctccaggaggtgagcgggatttcacagaacaaacaagaaaatcattgagggggccctcactgaccacccccaggtgttgttattgcttcggagctctctctctctttat

SEQ ID NO: 549590 - DNA, 1112 bp, Homo sapiens
tctaatttctaccttttgaagagtttgagattctctttgtagtttacctggttatattttgtaagtgttctatggacatttgaaaggaataaatcaaaagagtgaattgcgtyattcagatcctcaatcctcactcatttctatctgactgatttgcccattttatttatggttttatactaacagttttttacattttatatttctgtggttttatcaatttacataaaaatttgtcatttcttcttagtagatttatatcatttattgacttaagtgttccttttgatattttttagtgcttttttgccctgatttgtacttaatttgtaattaattttgccactctgctttttgttggcctgatacatctatctatctatctatctatctatctatctatctatctatctatctatttattttaagatggagtctcattctgttactcaggatggagggcagtggcacaatctcagctcactgcaacccctgcttcccgggttcaagggattctcctgtctcagcctcctgagtagctgggattacaggcactcgccaccatgtccagctaatttttgtatttttagtagagatggagtttcaccatattggccaggctcatcttggactcctgacctgaggtgatctacccaccttggcctctcaaagttctcggattacaggcgtgcgccaccatgctcggctggtgtctatttatttttatcttacaggtcattttattttaggcatgtctattataaaccatatgctgtatgtattttaataaaaatattttgtcttttaataaagcaattgaaatcattcgtattatgttatgaatatttagtcttaatgctgccattttatgaatattctttattatgtttgatagttcactcctgttttctttgcagatttttctagattgataaagttctgttttcttctactttctttggttcttccaatggtgtaaaatttttgcttttccttaaaattataacaaatatttaataaattaattcatcaaagtttcagggcaagatcagtatggaaaaatcactggtgtttctgtaaaccaacaatgaacaacccataaaggaaactaa

SEQ ID NO: 549591 - DNA, 537 bp, Homo sapiens
ttgctgatgtctttyatcaccattttccagttgggtcatctttgctcattgatgtgtaagaaatctttgcaaattagaggaattggccaactgggtgtttacaatatacatatacaactattcacatatatcgattgcctaccacgtgtcaggcactgttctagccatttattgcaagtatctaaatcattaaaactttttgtaagcatcatttaatatggctgcctgataatgctatagacagagcataattgaatcttatcaaggcagatacataaatatgctcacatttttaaaaaattatttttcagatgacgctatcttacgttttcaagtttttatatttcatccacggtgaattttagtcatatctatttgaccattttcctactggggtgcttatgtttctctagttaatttgcgttcttcattgtatttactcaaggtatttttcccccagcgcttgcccttgaaatctacacatgactttttttttttttttcccttagacggagtctcctgttgcccaggctggag

SEQ ID NO: 549592 - DNA, 1374 bp, Homo sapiens
tgatgaagattaacatcaataaaataaacaatcacagtaatgaaacttgccgccatttaaccatcacttaatctgtgccaaggcttgcctactttatcccatttaatccccattctttccctaggaccctggcagctttgttatgcccagtttgtgtaacttgctgaggtctcaaggctcgtagtagcaggaatgtgcatttgctgtagatctgtcagttaccgtggcgcggtggttgggatcatggtccctgggctgagattcccaagcctatcacctaccagctttcaaaccacaggcaagtcctctgactgctgtgagactcatgtcttcatattaaaatggsgcttggaagggcacagtggctcacgcctttaatcccagcactttgggaagccaaggcgggcggaccacctgaggtcaggagttggagaccagcctggccaacatggtgaaaccccatctctactaaaaatacaaaaatgagccgggaggggtggtgagcacctgtagtcccagctacttgggaggccgaggtaggagaatcgcttgaacccaggaggcagaggttgcagtgagcagaggttgcagtgagtggaggttgcgccactgcactccagcctgggtgacagggtaagactctgtcttaaaaaataaaaaaataaaaaataataataataaaataaataaataaataaatggggctaacttcagctttagagcatttttgcaagggttctactatcagctagaaatacctaaagaacttaaaacagtgtctgacacacagtttgtgaggattaaaagcaccaattcatgtaaagcgcttagagttgggcttggcacagaataactgctatctaactgcttgttatgattattgtttttgttgatggggatgatcctgggaccacccagattgcagataagactctgcttatcaatgtgaggatgtcaccgtgggcttggggagccacagaaccagttcagtcatgatctgagtcctgagtcagagcttcagcagcacacaatcttcttccagcctggatgtctttgggggaaaaatagactttacacaaaaatctgaatatccagtttctcttggaaagctagatctggcagccctgggcccacatcctgtaggggacaatcagttttctctttaaggctagcatgtgtgggtcttccctgccagcctcagtagggaggcatcacttacctggtccctgtgggcagtgcagttggtgacccatgttggaagtctctcaggaatgcagaagagggtgtgacttcttcgttttttgttttttgggtgttttgttttgtttttttttagacggagtttcactctgcagcccactctggagtacagtg

SEQ ID NO: 549593 - DNA, 581 bp, Homo sapiens
ctcggcctcccaaagtgctaggattacaggcatgagccactgcacctggccttcaaccaagtttagacaatcataaacacagtcataaaataagtattccttacacttttcctcttgctgagggctcttctcaccacacagactaytcctttcttaggagctgtgcttctcactctgtgagcaattctttcctcccagggagaagcaggaagagctagcaaggaagcatgcaaggtttgtcctgtcactcaaccaaactatggagaaaaaagccaccaccactgtttacataaatgagacttataccaaaataaacttgaagagagaagacatagcattgcaaaaaaaatgtattcaagaggcagaggagctaatggaaaaagaaagggcagaatatctaataagaaaacaagagttgactgcacaggtaagtggcatgatttattctttaaaatacaataatgtatagaatctggagcaggaaatgggaaataatttatttgtcctcaaggctggcaagcagcctctgtggtatcttctgtgaacgcgctgggaaaacgggatgagcgggagactcaagg

SEQ ID NO: 549594 - DNA, 581 bp, Homo sapiens
ctcggcctcccaaagtgctaggattacaggcatgagccactgcacctggccttcaaccaagtttagacaatcataaacacagtcataaaataagtattccttacacttttcctcttgctgagggctcttctcaccacacagactattcctttcttaggagctgtgcttctcactctgtgagcaattctttcctccyagggagaagcaggaagagctagcaaggaagcatgcaaggtttgtcctgtcactcaaccaaactatggagaaaaaagccaccaccactgtttacataaatgagacttataccaaaataaacttgaagagagaagacatagcattgcaaaaaaaatgtattcaagaggcagaggagctaatggaaaaagaaagggcagaatatctaataagaaaacaagagttgactgcacaggtaagtggcatgatttattctttaaaatacaataatgtatagaatctggagcaggaaatgggaaataatttatttgtcctcaaggctggcaagcagcctctgtggtatcttctgtgaacgcgctgggaaaacgggatgagcgggagactcaagg

SEQ ID NO: 549595 - DNA, 628 bp, Homo sapiens
gaacccgggtggtgggggttccagtgagctgagactgtgccaaacagtccgtgggcggccagagtccyggagtgcagtgaccaggctgttgtctagcataaaggcggagcccagaagaaggggcgtggggtggaagaaacctccctcactccccccgcaatgcggcatccgctggtcctgctgctgctcctctctgccctggtgacctccttcactgcagcctctatccacgatgctcatgcccaagagagctccttgggtcttacaggcctccagagcctactccaaggcttcagccgacttttcctgaaagatgacctgcttcggggcatagacagcttcttctctgcccccatggacttccggggcctccctaggaactaccaacaagaggagaacgaggagcaccagctgaggaacaacaccctctccagccacctccatattgacaaggtgaccgacaataagacaggagaggtgctgatctccgagaaggtggtggcatccatccagccggcggaggggagcttcgagggtaactggaaggtacccaggatggagtaggcggcggccctggtgtccatccggaaggctatggacaacttccatgcagagctccatccccggg

SEQ ID NO: 549596 - DNA, 628 bp, Homo sapiens
gaacccgggtggtgggggttccagtgagctgagactgtgccaaacagtccgtgggcggccagagtcctggagtgcagtgaccaggctgttgtctagcataaaggcggagcccagaagaaggggcgtggggtggaagaaacctccctcactccccccgcaatgcggcatccgctggtcctgctgctgctcctctctgccctggtgacctccttcactgcagcctctatccacgatgctcatgcccaagagagctccttgggtcttacaggcctccagagcctactccaaggcttcagccgacttttcctgaaagatgacctgcttcggggcatagacagcttcttctctgcccccatggacttccggggcctccctaggaactaccaacaagaggagaacgaggagcaccagctgaggaacaacaccctctccagccacctccatattgacaaggtgaccgacaataagacaggagaggtgctgatctccgagaaggtggtggcatccatccagccggcggaggggagcttcgagggtaactggaaggtacccaggatggagkaggcggcggccctggtgtccatccggaaggctatggacaacttccatgcagagctccatccccggg

SEQ ID NO: 549597 - DNA, 636 bp, Homo sapiens
aaaaaagtattttgtaatcagaaatgtacatttaaggaaataaatacctgcttaaaaacacagcttgtttctaaaaattatagttaagaaaatcaactaatctcataatccatggctctcgtacattcacagatgagagatatgatcttgttcattcacttaacactgggtgctaggaagagaagtaggttagacagcagtcttgccgtcaggatcttccagtcaatttggagggcagatgagtaataaaatcacgtccaaggctaggtgcagtggcccacacctgtaatcctagcactttggaaggccatggtgggaagactgcttgaacccaaaagttcaagaccagcttgggcaacatagtgagaccctgtctctacaaaaaaaawtttttttttaattagctgggtgtggtggtggatgcctgtagtcccagctacttgggaggctgaggtgggaagattgcttgagcctgggaggttgaggcttcagtgagccatgtttgtgccactgcactccagcctggtgacagagtaaagactctctcaaaaaaaaaaaaaaaaatcacatacagtgtgatcagccctactatacagagaagcatgggcctctaggaacccagagaggcctctctcc

SEQ ID NO: 549598 - DNA, 532 bp, Homo sapiens
aaaaattaaaaagaagggccagatgcggtggctcatgcctgtaatcctagcactttgggaggccaaggtgggcggatcacctgaggtggggagttcgagaccagcctgaccaacatggaaaaaccctgtctctactaaaaatacaaaattagccaggcatggtggtgcatgcctgtaatcccagctactcgggaggctgaggcaggagaattgcttgaacctgggaggtggaggttgcggtgagctgagatcgtgccgttgcactccatcctgggcaacaagagtgaaactctgtctcaaaaaaaaaaaaaaaaattaaaagaaggatccagaatatattcttggtgaagcctttcctgactgctttagaagtagtcattcttggccaggtgtggtggctcactcctgtaatcccagcactttgggaggcygaggcaggcagatcacctgagatcaggatttcaagaccagcctggccaacatggcaaaaccccgtctccactaaaaatacaaaaaattagccaggcgtggt

SEQ ID NO: 549599 - DNA, 588 bp, Homo sapiens
tcagaggcactaaaagaggctgtgggtgatggggtggcatcagctagtggggtggggtggcagagggcacgtggcaccagtccccagcagaacctcccatatcctgctgctgcccgcctcctctggggccacagacggtatttctcctgcgggtaggtgagtaaaatgtatggtttagaaatgaggatgaawagcaaagagaaagtccttgagcatctagctgagggtggctgccaggggtgagggtgtgggagatgggcatcatggttaagaggaaccctgaaataaaacatgccgtcttgctttgcttgctaattatttctcctctgtgactcccaaactagtatgttgtccctgaggtcaagagtcatccgactgatgcttgagcccaggagtttgaggctgcagtgagctatgattgcaccactaccaccacactgcagcctggataacagagctgagacctcatctctaataaataagtaaatatttttttaaaaaattattttaaagagtcatctgattgacagtcctcttttctggagctgcaaagggcaggcccaggcagcccatcttcccccagagtga

SEQ ID NO: 549600 - DNA, 1377 bp, Homo sapiens
aatttctccccatacttgagtaatccccaccaaattacttcaagaagggctgttggaatcacagcctagaggagttctgatgagttcagaattggaaatcattaggtccctctaaccactacttaagcatttactgttagaaatcctttgccccagacacaaatggtgggttataaattatttatggacccaattagggacataattggagwgatctggctgtttgccatagcactaatgcatctaaagtttttcatctttcagttaaacttttttctgctttctgttacactttgatatcctaatctgctctccagaggtctgcaaaaataaaaataaaataaaataaggaaaagtgttcatgactctttcataaatgcatataaacttgagcttcagtgaagagtcattgaatatcagcaagttaatcatgcttttgcttcattatgctcccacaagtattagcaaaaatcactgacctcaaatcacttataaagaaatggctttgatgtgtttatgcaacctccttcctctttcagtgtcactgcaacctctgcctcccaggatcaagagattctcctgcctcagcctcctgagtagctgggattacaggtgcacattaccacgcccggctaattttgtactttgtagtagagatggggtttcaccatgttggccaggctagtctcaaactcctgaccttgggtgatccacccacctcggcctcccaaagtgctaggattacaggcatgagccccatggcgcccagcctgacatttctttatttaaatgagctcagttgcgttttggtttcttgcattagactgtttctaaaacacagaataagattggttaatcccttcaaaataaatgtgcctacttttccttatttggtcctgccccattaaaaactcaagctccttcatcttttaatgctcagttccacgctgacacagcgtgatattgtaaaacacatatttggtcttcaacctccttttctggcatacaactcctaaaatccttcgaatctccccaaagtgatggtttttgtatgctaatgattgactggtggctggcagcccctaacatagattcagggtggggttggtcactggtcactgggaaaccaaagcagggttagagagcttgaattttcagctgtatgggaatcccaaacctctggggagggaagaggaactgaaggttaagttgatcaccaatggccaatggtttaatcaatcatgcctatgtaatgaagcttccattaaaaccctaaaggatggggtttcaggagcttccagatagctgaacatatggaagttcctggtggggtcctacaagctctatctggagggcatggaagccctgcacctctcc

SEQ ID NO: 549601 - DNA, 537 bp, Homo sapiens
actccacctcagcctaggtgacacagccagaccttgcctcaaaaaaaatttttttttaaaagaaaagagacaatcatgtgatggttgccagaatggcctccagagagggcctccctaggctgaatcctggctctgcctcatccttgccgtatgactctgggccaaggaccttgcctctttgagcctcagtttttacatctgcaaagtgggggtcataattgtccctgtcttattggcttgttgtgaggattaaatgactttatattggagaacagggcccagcatgtcaaaagtactttctgtttgttaaatacaatgaaaaagggtgaggacatgcagaagcaagattaatcctttttcaatctcttccagtyctgattcctgcaaggagagtcagggttggtggggatgtgtatctctaacaccagcccaatctggaggaagttagtaacaaggttatatttatgttgtttatatttacagctacctttatttgtgccacatgatacaatttttttttttttttgagatggagtc

SEQ ID NO: 549602 - DNA, 1134 bp, Homo sapiens
ctgcccacagcctggaaaccccttcccttccgattttcctgcctttccagacgaaaccagtgtacatcttacatgtattgattatgtcttagatgtattgatgtcttatgtccccctagaatgtataaaaccaagctgtagcctgacaccttggtcacatgttctcaggatctccttgggctctaactcaggccactgatcactcatatttggctcagaataaatctcttcatatattttacagagttggactctttttgttgacagataaaataggaaaaggagtgagggaggaaggaggaggtgttcaggggcgggtccatccgggagggaattgttttatcctggcttctccctccatccttcatggtagagtgttggtctttttaaatgtaggaggtttagaagaactgtgtgctcagggccaaagaacacagggaagggcacaggtggaacccctggaaatctcaggggaagagactccaagtccctgaatctctttccctcttcaccccactaggccccttctgcttcatgctcatctgccccactggggcctttggagcagggtcccacctatcgagaagcctggggtggggtagccccaatgtctcttacaaagaaacatgctgtttcagaacttcagctctgcattcttccacatttcccctccatgccaggagattaaaattccacactccagttactataaaactgacccatgggatttaataggcttttataaattgttgatagacctgacctccctgtcgcctcatggttccaggaaatgaccatttaaaacgaattcttcaagtaaacgggggctctctttctgcagagcagagatgttcrccatgatttttcttatactagtttgtattcatttctggctgagacgagatcttccttataataaatgggattttctattcacatggaatttttaatttctctggtttagttttcattccagacgaattgtgaaatgctgtgaataaacactcaaaacactggcgtggagcaaaggcttgtgttgtggccttcctggttttttaattttgccatttttaaaagtcaaatgtcacttttttaggagccaccaaaatgtaattgaattttgggaggctttgg

SEQ ID NO: 549603 - DNA, 546 bp, Homo sapiens
ggaacttctgggacctcggagggccctgtggggtacaaagaaggaaagcgaggcccagagacaccacctgagttgccttgctagtgcctgggactgtattcctggccccccaaccactacaactcctgggattccccttctccatttccttacagccaaaaaccagcgtcggagcatctgggtcctgactcagagtagagtttggacttagaacatcactaagtcaaaaggtagaaatgtccacaaggaaattataagtaacttaaaagagaaaataaggccatgtgggtgatcccrcgagagcaataatggtagtgacgggaggatttatcttcttggatcatcacaaatctgtaaaaaggagactgagccatattccttgcaattccaggtccagctcagaaagatgtctcagtgagaggattggagggtgtttgatttctggctcagttctcacctaaatccagccagttttatatagcaaatgctgtgtcctgtgtgtcaaagtgataccaggcattcaaagcacagattaaaaaaaaaatc

SEQ ID NO: 549604 - DNA, 655 bp, Homo sapiens
aagacaccctctatggttctggtcaagcctccatcttaagtagacactgtccctggattctggtgggtgggctgtctcgggatttctgctctcctcccsctgtaggtttcagcgtggaatttatttttctcctttctcaggggtaaaaggcattttctgttttcttccttcagcagttccagtgccttgcggggaatgtcttcaccagtgctctaaaaggcaacaggattttctgccctgtatccagcagcttaaggcttttgtttcaaaagggaataagagagaaaaatctctcctatcatgcttttcttgcggtactgttgcctgtttttaactttttgtataaatggaatcattcagtatgtacattttgtatctgttttctttcactctacagtatgtttgaaatgtttttatgttgctttgtatatagttttcttcagatttctgaaagtatgaccgacaaataaaaattctatatatttagggcataccatgtgatgtatatatttacatatatatggaggcataggggaatgattaccacaatcaagctaataaacatatccaacacctcccaacatctctcgtagtcactttttatttttttatttttatttttttggtgaaaacacttgtgatctagtctcttaaa

SEQ ID NO: 549605 - DNA, 677 bp, Homo sapiens
ggaatttaaacacagacgaatatattttatatggtttcatctttatgaaatgtccaaaaaaagccaaatctagtaaaaagcagattaagggtacttaaggctgagaatgaaagcaggcattaactgcaaactggatgacagaatttggaagttgacagacgtgttctatacttggcatgtgatgatggttgcatagttctataaacttactaaaaatcattaaattgaacaattaaaatgcatgaattttatgktgtataaattagttgtctcaataaataagtcaaaacatactaaacatccacattttaattttaccaatatggtaaaaagtcgaattccttcatttcagcccaagaagaaaaaagaagctttaaaattagttcaaccattgtggaagacagagtggtgactcctcaattatctagaaccagaaataccatttgacccagcaatcccattactgggtatatacccaaaggattataaatcattctactataaagacacatatgttttatgtgctgcacacgtatatttattacagtactgtttacaatagcaaagacttggaaccaacccaaatgcccatcagtgatagactggatagagaaaatgtggcacatatacaccatggaatactatgcagccataaaaaaggatgagttcatgtcctt

SEQ ID NO: 549606 - DNA, 944 bp, Homo sapiens
gaccaccaggactttggaaatgagggatcaagtctcagctatgctacccgctgggtgatttccagggagccattcaacctccatgaacctcagttctctcaaytataaaattagagaagggtgttaagtgatcacaaaggcttcttctagtttcatcgcattaaattaatcttccccaaatagaaagatttagtcacaatcaggactgccatataagtctaaaacaacaaactccacaagagtcaggtggattcttcctgttgttttaatgactggtgtagataaaggtgtaaatcctgatcaaacagtctgcccagtaaggtagacccattggagaaagaaatccaaatttagaggctcattctgattcattccttagaggtctagaattgaaagtttttttctctgcttttgaattggtttatgtacatccattcttcaaccatttgttaagagtctataatgtgtaaagtgccaagaatgccaagatgagctaaacaaagtccttgctttcaagtagcccggcttaatttttacctaaacttaaaacacacattttaaaaagatgtttcaccttgttttctagcttgcagttccctgagaagcttttctttcacaactttaattgctgctgcagtggcctcagctatggtattttctactaatgtttcacgggctttatcaaaacgtggctgaacaagttgggcatagtcgactacctgcaaagaatatttgagaaaatcgacataagcaggagttattgtgactattaaacacattgttcatctatctatgtatatctatctatatttctatctctattccaaaaatattaatactgcttgaggtatatttggagttatgttcagaattcacctatttttgagtacttgctttaatagaaattcagccatatttttcatgtaggatatatgtctatatat

SEQ ID NO: 549607 - DNA, 629 bp, Homo sapiens
aagaggcagataactgcgtgtcacccaaacctaaactgatctaaggaaaaataacaaattacaactttcacatgtcatgttttgtagagtttytgaaaatccttgaggattttgtcaggagacaggtttgtggctattctcttagcacacagatgagaattgttctactaattaagatgaaacaataattttcattggccttacagagctggcactgtaggtgactatatggtacattgaggggagagaaggggacctatatgcctcctctgctctataagctgtcatcttggtggacagagaaggtggtgggccagtccttgtgtcctttccacctcccatgcccgccgtacattacccatctgttcaaaaggagaggaagaggcattaagggatggagggtgactatgtattacttacgcatttctgagtaaattgacaaagtgtctttcgtaactctctaaatcataatcattataaataaatgaggccttaattgtttgctgccaatttccagatgttttctagaatatatagatttatataaattgttaacagtacaaatatactgtaagtctaaaggaaatcacatgaaaagtccatctctgtgatcactcacagtaaataaa

SEQ ID NO: 549608 - DNA, 1171 bp, Homo sapiens
atttattttattttctgaaacaaaaataaataactatcctttaaaaagtctctattttctgaaactgtggaaccaagaccaaaccgaacactgaaataggctccacatcaggcacaaattaatatttttattgaatttttgggataatgtgcagaacatacatattggcattttgtaacttctgttagctataaaaataacagcacatccctacctttcttttctgacttgtttagtctgagacaaaccagagaagaaaaggaataaatttagcccttggcccactattaggtgggttctgagattaatcttgtacttaatcttttaatcttagaccygtactcctgtgctcatgaaaggtgagattaatacatgtactaatattactactactgtatcaacacagaaatagttgtaatgctactgattgcatgagagtaattttagtgttccactttcaattatggtggtgcctcttactttaagatagatatttttaaatcatggaaaaagccattaaaagtggctttccaagtcttctatgaaattgtatggtgttaacattttttaaatgtcctttcaaattttattgatgttattaaatattagaaaataaatagtatttaattattgttataattgctagaattatatatatatatataaattaaaacaatgttctggtggagtctgggaagttggcggtaatggtgccataactcttgaatctacccaaatcccacagaagctacatatcaaaaacttaagctcgtgggtatacagtcatgtacctgataaggacattttggttagtgacgaactacgtatgtgaccgtagccccataagattataatattttattttttctgtatattttctctgttaaaatatgtttcaatatgcaaatacttcccattgtgtttcaacaactgcccacagtattcaggacagtaacatgctatacaggtttgtagcctaaaaataatcggctataccagatagcctagatgtgtagtaggctataccagctaggtttgtgtaagtacattctaaaacatttgcacaatgacacgattgcctatcaatgcatttctcaggacatgtccctgtggttaagggacatacaactgtacaataaaatgattcttaggcaaccccatgaaactcacc

SEQ ID NO: 549609 - DNA, 1171 bp, Homo sapiens
atttattttattttctgaaacaaaaataaataactatcctttaaaaagtctctattttctgaaactgtggaaccaagaccaaaccgaacactgaaataggctccacatcaggcacaaattaatatttttattgaatttttgggataatgtgcagaacatacatattggcattttgtaacttctgttagctataaaaataacagcacatccctacctttcttttctgacttgtttagtctgagacaaaccagagaagaaaaggaataaatttagcccttggcccactattaggtgggttctgagattaatcttgtacttaatcttttaatcttagacccgtactcctgtgctcatgaaaggtgagattaatacatgtactaatattactactactgtatcaacacagaaatagttgtaatgctactgattgcatgagagtaattttagtgttccactttcaattatggtggtgcctcttactttaagatagatatttttaaatcatggaaaaagccattaaaagtggctttccaagtcttctatgaaattgtatggtgttaacattttttaaatgtcctttcaaattttattgatgttattaaatattagaaaataaatagtatttaattattgttataattgctagaattatatatatatatataaattaaaacaatgttctggtggagtctgggaagttggcggtaatggtgccataaytcttgaatctacccaaatcccacagaagctacatatcaaaaacttaagctcgtgggtatacagtcatgtacctgataaggacattttggttagtgacgaactacgtatgtgaccgtagccccataagattataatattttattttttctgtatattttctctgttaaaatatgtttcaatatgcaaatacttcccattgtgtttcaacaactgcccacagtattcaggacagtaacatgctatacaggtttgtagcctaaaaataatcggctataccagatagcctagatgtgtagtaggctataccagctaggtttgtgtaagtacattctaaaacatttgcacaatgacacgattgcctatcaatgcatttctcaggacatgtccctgtggttaagggacatacaactgtacaataaaatgattcttaggcaaccccatgaaactcacc

SEQ ID NO: 549610 - DNA, 1194 bp, Homo sapiens
ttgaaaagtacagtatttaatgcagcgtggattgccctttccctgatgcacattctgggtctgttgccgtggctctgagtagcctttcagctcctaccaatagagawgaagagattttgagggccacaactgacgtagaggaaaagtggtctctgggcaggggggtctttccaataaggcttggaaaacagggtttcacccacacacaccatgttgtaaaaaggtgccatgttttgcttctctgtttcccaaccctaccccatccccagccatctttcgttgaacactgcttcatgctcatcactatgccgttaccaaggcttgctgagctccacacaggctcacaggctgggccaagagactccggggattcattgtctgggtctaacacagtgctctgggccctggcccaggggagctgaacaaagtcgtctcaagattacaagccatttcagccctatcaggggttatggcccctactttttaacatcctgcttttatttgcaggctatgaagtgtaatagttcaccattttggtttaagtatcaccataaaagtcagtgagatggaacaggcaataagtagttcttttacatagtgtggctgaggctgggagcttacatcttcattaacccacagaaacggctctggaataaaatgctggggtgggcgctccttaacgtcaacatctgtgaggacgaggccccctccttctaactccgtgtgccacactttgccccttgctggctctggtgctgaggaagttggaaaaacaggaaggaaaagagcagatcaatttcataagagcgattctgagtgtgtggatgaaacaccaagctttgcaatggaaagtgaaaaactcttctcaacacagatgtgtttgattagtaagacacccccagcaccatcctccaggcaccaagtactctgattagctgaagttccttatctcacaaaataagcatttccactaaaattagattaacaaataatacaaataattgtaggcttttgctgatggaaaatataagtgctcatgtcttccatccagaatctgtcccagagagatagagttggtaggcatagtacatacaataagacaactttattttacttagcagggtggcatgatatttgcctatatcagagtttctggtaagatttcctgcataacacccattctatggttttatg

SEQ ID NO: 549611 - DNA, 1194 bp, Homo sapiens
ttgaaaagtacagtatttaatgcagcgtggattgccctttccctgatgcacattctgggtctgttgccgtggctctgagtagcctttcagctcctaccaatagagaagaagagattttgagggccacaactgacgtagaggaaaagtggtctctgggcaggggggtctttccaataaggctyggaaaacagggtttcacccacacacaccatgttgtaaaaaggtgccatgttttgcttctctgtttcccaaccctaccccatccccagccatctttcgttgaacactgcttcatgctcatcactatgccgttaccaaggcttgctgagctccacacaggctcacaggctgggccaagagactccggggattcattgtctgggtctaacacagtgctctgggccctggcccaggggagctgaacaaagtcgtctcaagattacaagccatttcagccctatcaggggttatggcccctactttttaacatcctgcttttatttgcaggctatgaagtgtaatagttcaccattttggtttaagtatcaccataaaagtcagtgagatggaacaggcaataagtagttcttttacatagtgtggctgaggctgggagcttacatcttcattaacccacagaaacggctctggaataaaatgctggggtgggcgctccttaacgtcaacatctgtgaggacgaggccccctccttctaactccgtgtgccacactttgccccttgctggctctggtgctgaggaagttggaaaaacaggaaggaaaagagcagatcaatttcataagagcgattctgagtgtgtggatgaaacaccaagctttgcaatggaaagtgaaaaactcttctcaacacagatgtgtttgattagtaagacacccccagcaccatcctccaggcaccaagtactctgattagctgaagttccttatctcacaaaataagcatttccactaaaattagattaacaaataatacaaataattgtaggcttttgctgatggaaaatataagtgctcatgtcttccatccagaatctgtcccagagagatagagttggtaggcatagtacatacaataagacaactttattttacttagcagggtggcatgatatttgcctatatcagagtttctggtaagatttcctgcataacacccattctatggttttatg

SEQ ID NO: 549612 - DNA, 1194 bp, Homo sapiens
ttgaaaagtacagtatttaatgcagcgtggattgccctttccctgatgcacattctgggtctgttgccgtggctctgagtagcctttcagctcctaccaatagagaagaagagattttgagggccacaactgacgtagaggaaaagtggtctctgggcaggggggtctttccaataaggcttggaaaacagggtttcacccacacacaccatgttgtaaaaaggtgccatgttttgcttctctgtttcccaaccctaccccatccccagccatctttcgttgaacactgcttcatgctcatcactatgccgttacyaaggcttgctgagctccacacaggctcacaggctgggccaagagactccggggattcattgtctgggtctaacacagtgctctgggccctggcccaggggagctgaacaaagtcgtctcaagattacaagccatttcagccctatcaggggttatggcccctactttttaacatcctgcttttatttgcaggctatgaagtgtaatagttcaccattttggtttaagtatcaccataaaagtcagtgagatggaacaggcaataagtagttcttttacatagtgtggctgaggctgggagcttacatcttcattaacccacagaaacggctctggaataaaatgctggggtgggcgctccttaacgtcaacatctgtgaggacgaggccccctccttctaactccgtgtgccacactttgccccttgctggctctggtgctgaggaagttggaaaaacaggaaggaaaagagcagatcaatttcataagagcgattctgagtgtgtggatgaaacaccaagctttgcaatggaaagtgaaaaactcttctcaacacagatgtgtttgattagtaagacacccccagcaccatcctccaggcaccaagtactctgattagctgaagttccttatctcacaaaataagcatttccactaaaattagattaacaaataatacaaataattgtaggcttttgctgatggaaaatataagtgctcatgtcttccatccagaatctgtcccagagagatagagttggtaggcatagtacatacaataagacaactttattttacttagcagggtggcatgatatttgcctatatcagagtttctggtaagatttcctgcataacacccattctatggttttatg

SEQ ID NO: 549613 - DNA, 897 bp, Homo sapiens
atcccagctttttctgcagaggaaacatttattttcaatttcctcaaagtctcatgaagcacaagagaatcccagaaatagactaagagttgtgacagaaaaaagaaattttaagatagaaactctagagacaatctgaaggaatattactacatatgttcaagagtcataagctgaagggactggttattttaattgtatttcaaaatgtatctctttcctttttcttgtaaatcacagaatcatctagttggtacaagaatgacattaaaatgaacatatttccatctggatattttaacaggcacctcaagtttaaagcatatgaaactgaacttgattctttctctacaaacctacagctatcagttttcctcattttcctgttctccaggccaaaaaccatgaaaccacccttgactcctttctctcttacatcctatagcacacaggtaaaagcaactcctgaggtcttttcctccacaatgtacacaatatagccagagtccagccacttctcatcacttccactgcttgcaccctagacaccaagctgtcaccatcttcccttgcctgattaccgctatctcctaaattgtgtcctgttttgtctcgccttcttttggcctatyaccattaggagagccagactgatccagttaaaaagcaggctcaaatcatgtcactcctccattcaaaccttcgattggcttttcatctaagtcaaagaaagtctgacactgcctcctgttactatcctaccactgctacctttccctgccaaatttgctaactaattctattccaggtatttgcctgctattctagtaaaagcaggtcctgccttagggctctacatttgctgtttgctgtgccttaattttccttctggatttg

SEQ ID NO: 549614 - DNA, 548 bp, Homo sapiens
tcgaatggggtgctcataatatgcaactgcatcgatttacaatatagactgggcaagattcgtccttgtgattgttttgatttgccccctgaggtacaaacgttgctagtcttgtgtatttgtgtatattcctgtaagttaccctgaggtttgtaatagccsaggccccctcgtgtctgagtctggtctcaccgacagggatgccccctagcagcgtctgagcccaggcagacacgttgtccccgcccggcgcctaagccctgggacgtgtggttgactgggcttcaacccggtgcagcccccgcctgcaaccctcggggcgcgccggtgtggctggagaggaaagaggtgtgggccgggacggggacgccccgcgatggcgaggctgggagacctgccccgtggcgcaggaagagcttgagcgagacggggagcggagggatgggggatgctttctcccctcgccacagcctagacgcctccggccctcgctcccctgcccaaactgcggctggggaagggacgccaagagaggcttcccggtcgcg

SEQ ID NO: 549615 - DNA, 548 bp, Homo sapiens
tcgaatggggtgctcataatatgcaactgcatcgatttacaatatagactgggcaagattcgtccttgtgattgttttgatttgccccctgaggtacaaacgttgctagtcttgtgtatttgtgtatattcctgtaagttaccctgaggtttgtaatagcccaggccccctcgtgtctgagtctggtctcacmgacagggatgccccctagcagcgtctgagcccaggcagacacgttgtccccgcccggcgcctaagccctgggacgtgtggttgactgggcttcaacccggtgcagcccccgcctgcaaccctcggggcgcgccggtgtggctggagaggaaagaggtgtgggccgggacggggacgccccgcgatggcgaggctgggagacctgccccgtggcgcaggaagagcttgagcgagacggggagcggagggatgggggatgctttctcccctcgccacagcctagacgcctccggccctcgctcccctgcccaaactgcggctggggaagggacgccaagagaggcttcccggtcgcg

SEQ ID NO: 549616 - DNA, 1020 bp, Homo sapiens
ccactcatcaattgatgggggttggttccacgattttgcaattgctgctataaacatgagtgtgcaagtatctttttcatatagtgacttctcttcctctgggtagatacccagtagtgggattgctggatcaaatggtrgctccacttttagttctttaaggaatctccacactgttttccatggtggctgtactagtttcattctcaccagcagtgcagaagtgttcgctgctcactgcatccatgccaacatctactgttttttgattttgtgattatggccattcttgcaggagtaaggtgatatcacattgtgattttgatttgcatttccctgatcattagtgatgttgagcattttttcatatgtttcttggccatttgtaaatcttcttttgggaattgtctattcatgtccttagcccactttttaatggaattattttttgtatttttagtagagatagggtttcaacatgttggccatgctggtcttgaactcttgacttcaagtgatctgcctgcctcagccttccaaagtgctgggattacagatgtgagccactgcacccagccaccatccttaattctttccactgtgatgccttccttgtgttttgggcatcttctttccctcacagggaaagacttttatctctgcctcctgatgactcagggaatatcttgatggccaaagattcattcatgcaacctccttgaacagcaaacagttaccttaggtgtgattccctgcccttccagtcttttataagggaaaggagttaatggtattaagatttaatttattcatggatttaagttatatcacacactttctcatcccttcccactcctgccctgacccttagaagtaatttctgagtaactacaaccagttttggttttaagccacatatatttgcattatatgcagctgtacttaacagtctgtatgtgtagtttcttgtcttagatcataagctcatctaggcaagggttgtacctcatttagatgcct

SEQ ID NO: 549617 - DNA, 2750 bp, Homo sapiens
tcatgggtatttttaaatgcgtgtcttaagagccaacttctctgctgtgtgcaggcttttcatgatgccgggagagttgccacgtggatttgcaggcgctgagggcagaaacaaggaacaggcagcatcagctcaatgggtgggacccactgtcctttcagcccttggtggggcggccttggaggaagggtcattctccaagcagggcagaactcagttccaggttggccagaaggccaaatggactgtggggcaggtctgaggccaggtagtggggcgacccagaagcaggaagatggtgtgtcaaatgtagagtgagacagaaatggcaggggctgaggagttgttgagtcctgttttttcacacttgtgtggggatcttgaggagtttcgtagaggtgccgcagggtctgcctgttgaggagcaaaccaagctgaccgggttacaggtgccatccactgtcccctcccatctgattggtttggatactaggatgttgtgtggattctcctggagtccagacatagccagtgaaacaatattgaaccccctgcaatagtccagccccatcattccatttcataaaggaaactgaggccttgccagggatcccaaagtggtaatccctcttgtagagttccaggggagggcaccaacctctacctagctactgaagccagaaacctgggcattcacctgccctttccattttcctcctcatccccatccctgccacatccctgtatcctggcatctccagccttcagcacctctccaattcatctgcttctcattacccccagccacaccaggaaggtccaggcccccttgtctgtgcgctgggaggatacagatgcatcctgagccttccagcttcctctgttgggcccatctaattgggtttctgctgggcgatgggagtgatcatttgaaacttcaaatctcattatgacagtctatatcccttcctcaatgttcccatcttgtttcacatctttcagtggttgctcatggcttgtaaaatcaaaacaaaacaaaacaaaacacccaaattcctcaccaagccccctcctgcacctctggcctcatgatggcatgattctttgagtctggggacctgagcagatggtctgagctgtgctagaactctaacccacaccaccgcctaccatgcacaaacacagatgtttgctggctgactccagctcatcctctcatcttagcctcagcatcacttctgcaggaaggccccttccaatctcaccagggcccatcacgtcatcctgtctgatgccctttggcactctgggctaatcctttggggccctcagacgccgtccccactgtcttagttgtctggtttgctctctctcttcccctactggattgtcaacttcctgagagccaaggtcacatatagctttagcctgtgtcccaggccttcagcatggtgcttctttgggcacaggaggtgtgtgcagagtggaaggagaccttcrtttggtggggagactgtattatagagaagtagtttcatgttccaaagaacaagcaggaaatatcttccttctcctcctctttctgctagtaaatcctccttcctcctcactggctggatgaagcatctcatggtggaatagtttcagatccagggttcccaggaaagggaaccacctccagttccccatcccctttcctttcctgggaggtctctggtgcttatgctactaataatgaacatttaactaatgagttgctacctgttcatattaccaaagcctccctgccaaaggccaccagagacattcctggggtcaaatcagattagatttatggagcttcctgcatcacagggtaacacagtattgagggccatgacaacatcccaatatacaggactgggagaggcttttttacagggcttgagtatgatctggatgattctagaagaaatgaaagaagcaagggccagctctatctgatactatcaagaaagaggcctcccactataggatatctcagtggtctttgttcaggaggttggaggaactagttgaggctgggtaagtgcaggatccctgcccgtggaggggacatcagtcacgtttgtagcttccatgtggcctcgggtgtcctggcggagaccttggctctcctgtcagaagcttcctctgattgtcaacagggatgattttattttactctttatgctttcatctttcatatttaaaactttgatcagtctagaatttcttttgatataaaatgtgagggacagagccaacctacttttctattttagattgccatcaattgtcccaactccatttattgaatgataatcgcttttctctgattttcttgcctcctttataaatatattagattctatacaattttgtgtctatttttggacttttcattttgtcccattgaattgtgtctatccttgcaacaaagccacattgttttaattattatcactatattatatgttttaataacagaagtccctttccctcataccttattcctcttgcagctttttctagttcttcttgtttattttttatataaattttatcttatttgctatatgtcttttaaatatctgataactttagcaggattttagttgtgtaagaattacagaattttaatcctggaaggatgctgaggaggtttctaactctctcattttctggagaggatatgattttatcaaagtgatgctgtgagtttatggcag

SEQ ID NO: 549618 - DNA, 545 bp, Homo sapiens
ccaaacatccccccacctccagaagacctgtcaactcctacaacagtgttctgtttcttaggagaaggaaagacagtcctgcaacctgtaatattcactgatgtcagacctgctgtttctttctctccagytgatgtgactctggacccagacacagctcatccccacctctttctttatgaggattcaaaatctgttcgactggaagattcacgtcagaaactgcctgagaaaacagagagatttgactcctggccctgtgtgttgggccgtgagaccttcacctcaggaaggcattactgggaggtggaggtgggagacaggactgactgggcaatcggcgtgtgtagggagaatgtgatgaagaaaggatttgaccccatgactcctgagaatgggttctgggctgtagagttgtatggaaatgggtactgggccctcactcctctccggacccctctcccattggcagggcccccacgccgggttgggattttcctagactatgaatcaggagacatctccttctacaacatgaatgatgg

SEQ ID NO: 549619 - DNA, 597 bp, Homo sapiens
ggttttcaccttgttagccaggatggtctcaatctcctgacctcttgatccgcccgcctcggcctcccaaagtgctgcgattacagacgggagccaccgcgcctggccatattttttatttattaaatgcactttgtattgtatttcatggcatagaaaatggacacatttattagattccaaaaataaaaacttcaaacataagtagaggacaaaaattgaaaatataaaataagttctgtatataaagaaagctttgtttattatacacatgatttgttagaaaattggagaagcattttcacgtttggaaaagctaatatgtaaatatgatacgtgtttggttttgacttcttacaacattcgaacttccaagaattttcytactgctgagaaatgaattttccaaatggaaatttttatatttggacaaaatataccagcattttatgaaatcatttttttcatatacaaacaagatacagcatttctgtgagatatttgaatgtgtatattgtgtggttatttttccataaagcatgtgttgaaaaaaatgaaaatctgtaaataaaacattttaggatacccaatttttta

SEQ ID NO: 549620 - DNA, 597 bp, Homo sapiens
ggttttcaccttgttagccaggatggtctcaatctcctgacctcttgatccgcccgcctcggcctcccaaagtgctgcgattacagacgggagccaccgcgcctggccatattttttatttattaaatgcactttgtattgtatttcatggcatagaaaatggacacatttattagattccaaaaataaaaacttcaaacataagtagaggacaaaaattgaaaatataaaataagttctgtatataaagaaagctttgtttattatacacatgatttgttagaaaattggagaagcattttcacgtttggaaaagctaatatgtaaatatgatacgtgtttggttttgacttcttacaacattcgaacttccaagaattttcctactgctgagaaatgaattttccaaatggaaatttttatatttggacaaaatataccagcattttatgaaatcatttttttcatatacaaacaagatacagcatttctgtgrgatatttgaatgtgtatattgtgtggttatttttccataaagcatgtgttgaaaaaaatgaaaatctgtaaataaaacattttaggatacccaatttttta

SEQ ID NO: 549621 - DNA, 751 bp, Homo sapiens
actctcatcttcagtgcagagggcacattgcagtggttagcaacatgggtcctggagagagtgcctggatttgagttatgactctgccacttagtagtcatgaggttatcttatagttatcctttctgcacctgtttcgacatctgtaaaatgggcttgatactagtacctgcctcatagcattgtggtatgcagtcattgagttatataggtaaagtacttagaatagtacatagaatgtagtaaatactcaatctgctataattgcatacccatttttttcctaaatagaactcatgctgggatatgrtagctgaattcttaaacctcactctattgactgctctctgaggatcaaaacagagtatattctgtgttttcactaactcttaatgaataacatctatgtcaaggaaccagatgtgtatagaatctttaatgatttaaattttctctacttttttttatttaaagctcttcctgtgctcattcttgtacaatgagttttttttttaaatctggaattttttctgtggagtacataatcacatttttagttgctgtttttagtgactcatattgatgctttttttgcaattaaatgtcctagtttcagtgaaagtcacaaaatacagtatttttttcagtatttctctatagcattccaatttttatagtattttttcacattagaaatctgttaggtcatttataaggcatttgtgcatttgtcttcaacagacccattaaa

SEQ ID NO: 549622 - DNA, 1493 bp, Homo sapiens
tgcaaaagctttctatcataacaacaatgaactatgtggtggaaaaagcatgtactttgatataaaaatcatgcagcctcctcagtatgtgtataatatctgtgtatgtttattgtggaagtcgtgtagtttttttctgtttctctgtatgtccgtcttcatgcacatacagagaaaatagaaagttgaaaaagtttagataataaaatattcttttaaatctggtagaatattggagaaatctggctaattaacatgggttatagttaaagctcttggtcttgatgaaggtaaaataagagatattataaagagatacactggtagtttggcagttctatttttaatataggtaagcatgaagccagagttagcatggagccaaatttcacataaatgcttgcattgctttgtttcacactatatttgctattctgcgtagatagtactgacactaaagtactcactggtcacgtgcctgaagttaatttcttaattgcacaaaatgtgtagtggtgctggtggacttaaagacattaatgtgtataccaggaacataatacccatcatgtgttttgtagggctctgggtaacactgtagcctgcaaggtaaactgagtagggaaaaaagtaggggttggcttcctgtttgtttttgcttttgcttttaatttttatttgctatttgttctcttttaggttttacttatatacacagatataaaaccattggtgttttttagtttctaatggaaggcttttatttggttctatgagtagtcattttgtttccaatgccttaccagcaatttatcatttgctctgtttatctaaaatttctaagcaaagatagctccaaaaaatgatagaacacaccagacatttaaaattggattggtcttgcctacctctgatgacctagagagctataagaactttaaggttcctcrtcaaaaatgaaagacttcttataagttctgaacagggatagtacagtatttattttgttatttagaaaagtaaagagtaaaaatatttcaatggtatttacttccaaggtaattcagttcaatcagtaatttgaattggtttcaactcttttttccttagggtaatgaggaaaaactattacatgggtacaaagttttaatgttcaggaaatattggccttgcccttaaggaaattatattggctgagatttctctcaaactagtttgtttagcattattaaaattaagtgacagtcacttggattaaatagcgataaaaagcatgagactttctagtgatttttgatgccaagcttcttatcactgttgggccttcacgtgtgtacttgaaaaaaaaaaatgtacaagcattgcactggtttgaagattctagtagtgaaagttacctaaccagttatcggtactgtatctagaaaccaatcttggaaatgtgtgatgacactcttttaaaatagttaaaagaaattatcatgtgctcgttc

SEQ ID NO: 549623 - DNA, 533 bp, Homo sapiens
gatcctcccacctcagcctgccaaagtgctgggattacaggcatgagccaccgcacccggccattttttgtgttttaaacctaaactaaatgaggccacttctgccttatgagagaggaaggaatgagaagcttgggcagttgcaggggggtgtggttccaatcaatttagcaggggatcaagaagagggagaaaggaggccacggaggaattccaaagctgcttgtcagaaatgaaggtgatttaaatatgattttaaattgtttgtgtttttctgtgatacaaaacaactccattgttccaactcattcagtaaagtctattacatgtrtacacgtctcatgtgagtgattctgagggaagccagagaaagagcccatatctcaattgacaggaaaagaacacggaggagggggaaagaattgccatgaaatggggtgcaagtgatctcagtgcttctgaagacacaggaactcagagctgagagagaatctgagggtgtcagtcccctggaatgtgcaggaatcttttca

SEQ ID NO: 549624 - DNA, 533 bp, Homo sapiens
gatcctcccacctcagcctgccaaagtgctgggattacaggcatgagccaccgcacccggccattttttgtgttttaaacctaaactaaatgaggccacttctgccttatgagagaggaaggaatgagaagcttgggcagttgcaggggggtgtggttccaatcaatttagcaggggatcaagaagagggagaaaggaggccacggaggaattccaaagctgcttgtcagaaatgaaggtgatttaaatatgattttaaattgtttgtgtttttctgtgatacaaaacaactccattgttccaactcattcagtaaagtctattacatgtgtacacgtctcatgtgagtgattctgagggaagccagagaaagagcccatatctcaattgacaggaraagaacacggaggagggggaaagaattgccatgaaatggggtgcaagtgatctcagtgcttctgaagacacaggaactcagagctgagagagaatctgagggtgtcagtcccctggaatgtgcaggaatcttttca

SEQ ID NO: 549625 - DNA, 574 bp, Homo sapiens
tcaaaatgtccaaaatgatttattatcatccccaaagaatccaacttctttaattcactttctactaagagaagaaaaaagagataaaaccaaaatttattttgaaaaaatgaakaaaaaaggaaaaagaattttattattattatttttttgagatagagtcccactctgtcgcccaggctgtagtacattggtgcactctcagctcactgtagcctccgcctcccaggttcaagtgattctcctgcctcagcctcccgagtagctgggtttacatatgcgtgccaccacactaggctaatttttgtatttttagtagagatggggttttgcaatgttcgccaggctggtctggaactcctgacctcaagtgatctgccctcattggcctcccaaagtgttgggattacaggcatgagccaccacgctcagccagaattttttatgtggactactaaaatccttataaattgaccatgagataaagcaagaaatatatgtttgtataatgtatctattacttgtttgtgtgtgtatattgtaaactttagataccaacaagttgaaaacaaca

SEQ ID NO: 549626 - DNA, 574 bp, Homo sapiens
tcaaaatgtccaaaatgatttattatcatccccaaagaatccaacttctttaattcactttctactaagagaagaaaaaagagataaaaccaaaatttattttgaaaaaatgaataaaaaaggaaaaagaattttattattattatttttttgagatagagtcccactctgtcgcccaggctgtagtacattggtgcactctcagctcactgtagcctccgcctcccaggttcaagygattctcctgcctcagcctcccgagtagctgggtttacatatgcgtgccaccacactaggctaatttttgtatttttagtagagatggggttttgcaatgttcgccaggctggtctggaactcctgacctcaagtgatctgccctcattggcctcccaaagtgttgggattacaggcatgagccaccacgctcagccagaattttttatgtggactactaaaatccttataaattgaccatgagataaagcaagaaatatatgtttgtataatgtatctattacttgtttgtgtgtgtatattgtaaactttagataccaacaagttgaaaacaaca

SEQ ID NO: 549627 - DNA, 574 bp, Homo sapiens
tcaaaatgtccaaaatgatttattatcatccccaaagaatccaacttctttaattcactttctactaagagaagaaaaaagagataaaaccaaaatttattttgaaaaaatgaataaaaaaggaaaaagaattttattattattatttttttgagatagagtcccactctgtcgcccaggctgtagtacattggtgcactctcagctcactgtagcctccgcctcccaggttcaagtgattctcctgcctcagcctcccgagtagctgggtttacatatgcgtgccaccacactaggctaatttttgtatttttagtagagatggggttttgcaatgttcgccrggctggtctggaactcctgacctcaagtgatctgccctcattggcctcccaaagtgttgggattacaggcatgagccaccacgctcagccagaattttttatgtggactactaaaatccttataaattgaccatgagataaagcaagaaatatatgtttgtataatgtatctattacttgtttgtgtgtgtatattgtaaactttagataccaacaagttgaaaacaaca

SEQ ID NO: 549628 - DNA, 627 bp, Homo sapiens
tttatattaatacattctcttttttcttaagtccaatgaagcctaatttcggagatataatcaagatgagctgagctgatttaggttgatcacaggacaaaatgaaggaaataggaaaaatctctagttttccttctcttcaaagcttagactcactaacttcagaagaggtgttaaatgtcctaagattgttaatttggatatctgttgacctaggctcactcccaaatagaattggatcaaggaaaaatgaatcaaacctgtcctgaggtttttctctcctcctccccgagagtgccccatgcctcccaggaagccctacagtggtccatctggggccactggagtggggatttgctctttggctcccctgactcaccaagcacttgcagcttgatcttccattcttgctcattcccagtctttttcaacaccctcatgatgtaggtgctgttgtcctctttctggaccttagagatgtacagtgcrccactctgaggatcaagtctgaccctgcctttaaatttggattcaaagtacttagattttctggaatcccattctacaatcttctggtcgaaagtataaaaccaggttagttgtttgtagttctcaggcaggctctca

SEQ ID NO: 549629 - DNA, 1479 bp, Homo sapiens
gcccaggctggtctcgaactcctgagctcaaagtgattcgcctgcctcagcctcccaaagtgctgggattacaggcgtgagctgctgcgcctggctggtgatgtttcctattagaacatggcagtatagttttctgcacattttgattttttccccctagtcaagattcctataagtgaaactactgaatcaaagttacggatgctttaggactcttgatatgttgctaacctgtaccaatccagtttatccaccactgaatgaatattcatcttagtgtcctatactgttaaggaatattagttttccctcttaaatttacaaataaggtgggtgtggtggctcatgtctgaaatcctagcactttgagaggccaaggtgggcagattgcttgagctcaggagtttgagaccagcctgggggccatagcgaaaccacatctctactaaaactacaaaaaattagccggttgtcatgaccgtacgcctgtagtcccagctactcaggaggctgaggtgagaggatcacttgaacccgggaggcaaaggttgcagtgagccgagatcatgccagtgtacttcagcctgggcaatagagcaatactcttttctcaaaaaaaatttttttttacaaataaaagagtggtttcttattgtaagttacttttctttcattgtaaatgatagtttttctgcacatttgctcttcctttcttttgaaatatgtatgtctgtttattagggtctttgtgtttctcttattgatttgtgtaggataaagatagttcaactaccttacactttcctaaacacagtaggactaagagttttgcaggaataccataaactggttccttcaggggctgagttctcagatttttgatgactttaaatgagaagataataggaggagacaaaataagtaccaagctctgtggccatccttgtggattttacaaccgtggctatgatcagcatgaaaaaacccttatagcaataggggaaacctaaataaaaggaaagctttaccatggattagagattcagtatgttgggggtggcagttctcccacattaatccacagaaccattgagatgccatcaaaatcctggtagattttttgtgagactggatgtgctcattttaaatttggcgtgggccctatattgtgagaatgggcaaaatactctagaaaaacattgccttctagatatcaaaggactatctagaagatatgagtagaaacaaacccatgattctatgaacattgatcaatgagaggaagtcttacagagcaatggggaaatgttaggaaatgttgctgggacaagaggtatccatggggagaaatgaattagaaatcggaccctacccacaccacacaaaagcraattcagagtaaacacctagatgcaggggagggaggattgcttgagcctaggagtttgagaccagcctgggcaacgtagcagaccctgt

SEQ ID NO: 549630 - DNA, 1559 bp, Homo sapiens
cagaaaactggtttactaaaatcaccaccaccacctccaccccatccctgctcctactgtgagaacagttctactgtcctgtgtgacaaaatacagcaaatgccagtttttctcactggtgacccctgatcactttgtggtcattctttcccatggagctgacttggatgggccagtttctgcatcccagggtaggtgcagccctgtggccaatgccaccactgctgagtctatcttaaaccctatccctctaaaataaaacactctggatggtttaatttccattccaatagcttttcaaattttccctaaacctctttcacctcaaaacacacacacacacacacacacacacacacaattcacaattctttccacctgtggaatttgcttatttcctcaaacaatgccccctaatccagtgactacaacttttcttcctggaagtcatgatgatttgagctctagaaatgtccctgaatggagagctatgtagaggacttcgcacaagagaatactgaagttacaaacagtagcttgtcatctttggagaagttttatttaagtcaacaaatacaagttgggcatctgctctgtgccaggcactgtgctgtgacttgcagctggcatgacagggaggcagtcagcaggtaactgaacataaaaccatgtgcaatgagagtccagagaacacccgttcttcattctttacaagaatgtaagagatagaatcatgaaggccatgccatggagaacaggctgaaaagttctaggcactaatatacacttcaaagtcatactggaagcatacaaatatgagtacataatgctttatgagtaaagaaaaggtacctagcactactatttcttatccatgaattcggtttgaatattcaaaattcatccctcactagagaagcttttattcttgaaagcagaaagttttgttttttttttttaaacacaaattcatgttttcatataggaaaatgcagtccttgagaaaaagtgacttattcaaggctaggcaaagttggtgtcccaaaggctgaaggtggacaagctggggcagctctcagaattcccatcttctgcattaccatcagaccaccctgccataataaaaccaaccccatgtcttggttttgagcatttgaaaaatggaaagaaatgtgacattttccatttgaaaatggaaagaaatgtgatagggaatcttagattccctggctttctgattacttgcaaatccacataaggctcacatatcaccctcctctcatttgtcagcatctgaatttttttggtcatcatgtgagtkatgaaaacttaaaagctacgttgatatgtatagcatgtggaaaaccactcccaggttccttctgccctggaagagtcagaggcacatgcgcacatttcttatacacccaaacagacctattcgtccactcgtgaacacattcaacatcatcagacactcgttcaaaaaatagcatgctatgtgctgactcgatgggaagccacaggctaagttctcagaccctggccaagaagagatg

SEQ ID NO: 549631 - DNA, 582 bp, Homo sapiens
tatggccatgttggtatatactggtgcggaatatcagcccagccctagacattggctttttaaaaatttatgagatatgtatatacatatattttatagtgggcggctttacagtaagacatgataagtcagtgaattctggtcaataaggtaatctattgttcaagcatatccactttggcttccaaacctggattggtaaacctaatagtagtattgcagcagaccaacatctaaaccagaacaggatttcatcttttattgttttccccaggtccctgttagtattttttctgtattcctcatattctcttagaggtcaagtttcacgaattttggcatacttcaatagctgcatctgcaccattgtgtgctggagctggctctcattggctcatagagctggctgtgcgcatctcttccaactttgtgttcagtgactttacattgaatgcttgaaatcagtcatggagggagtattcatatctcagagattgacaaatgytacgaataaggttattattttccagagagtgggttgttaaacaataaccaacacaattccacctacaataactagtc

SEQ ID NO: 549632 - DNA, 1609 bp, Homo sapiens
gcccttctttttaggttagaatgaaaggtattaaagtaaaacttggatataaaagtgattgaggtgaaagaaatatttttgagtgtatcttttgaataaaaaaagtatatggttgattatagaattttgatgagtaatgtttaacatttcaaagaaaaggtattttctttagatttttaaaggaaggataggaaactgagtagtaccctagttgtgtgtgttgttcacaggatttcattcattagtttaaaattattttaaattcctaaaatattttacatttccttcttatatttaactagcaagtagtttatattactgaaattyaatgaattatgccattggcacttcttcagagtagaatattgagttgatagtaccagtgaagtgttaaatttatattcttgctgcatatagtataatttaagttcagtctggatgttggcttgatgtttttcatgactgatataccattttcccaaatttaataatggaaacaaatgaaatggtaggacctagaagcttgatgtgttgcttttttttttttttttttttttttttggtgagatgaagttttgctgcgatgcccaggctggagttcaatggtgtgatcttggcttaccacaagctccgcctcccgggttcacgccattctccttcctcagcctcccgagtagctgggactacaggcgtgcgccaccactcctggcttatttatttatttttttttgtatttttagtagaggtggggtttcaccttgttggccaggctggtctcaaactcctgacctctagtgatctgcccaccttggcctttcaaagtgtggggattataggcatgagccactgtgcctggcccttgatgtgttactttaaatatatatgatggtttttgtgtgtgtgtgtttttttttttgagatagagtctagctctgtcgcccaggctggggtgcagtggcacgatctcggctcactgcaacctctgcctcctgggttcaagcaattctcctgcctcagactcccgagtagctgggattacaggtgcgcgccaccatgcctgcctaatttttgtatttttagtggagatggggtttcaccatgttagccaggctggtctcgaactcctgacctcatgatctgcccacctctgcctcccaaagtgctgggattataggcatgagccactgcacccgaccaagatatgatatttttaagtcatatcatcaggtctcctttcacagtgtaatttctattattaataggcccacccaaattcaatgggaaggtacataaacctcaccttttatcaggagaggtgtcaaagaatttctggctatcttcagtctacacagtctgtaaaaacacatctctcttccatatccatgcccgtcgcactttcgtgcttttcctaaggagatgacttattttcttataacatccatgaaagtgattgaccttagggaatgctttctaagcaataggtaatgtagtgtgtagaatacaaaatatttactgccatactgcaagacttcttcagtagtttgtcttgttcttctcaaagttcatgaagaagggaagatatccatttaggactccaaatgtgttttcc

SEQ ID NO: 549633 - DNA, 1609 bp, Homo sapiens
gcccttctttttaggttagaatgaaaggtattaaagtaaaacttggatataaaagtgattgaggtgaaagaaatatttttgagtgtatcttttgaataaaaaaagtatatggttgattatagaattttgatgagtaatgtttaacatttcaaagaaaaggtattttctttagatttttaaaggaaggataggaaactgagtagtaccctagttgtgtgtgttgttcacaggatttcattcattagtttaaaattattttaaattcctaaaatattttacatttccttcttatatttaactagcaagtagtttatattactgaaattcaatgaattatgccattggcacttcttcagagtagaatattgagttgatagtaccagtgaagtgttwaatttatattcttgctgcatatagtataatttaagttcagtctggatgttggcttgatgtttttcatgactgatataccattttcccaaatttaataatggaaacaaatgaaatggtaggacctagaagcttgatgtgttgcttttttttttttttttttttttttttggtgagatgaagttttgctgcgatgcccaggctggagttcaatggtgtgatcttggcttaccacaagctccgcctcccgggttcacgccattctccttcctcagcctcccgagtagctgggactacaggcgtgcgccaccactcctggcttatttatttatttttttttgtatttttagtagaggtggggtttcaccttgttggccaggctggtctcaaactcctgacctctagtgatctgcccaccttggcctttcaaagtgtggggattataggcatgagccactgtgcctggcccttgatgtgttactttaaatatatatgatggtttttgtgtgtgtgtgtttttttttttgagatagagtctagctctgtcgcccaggctggggtgcagtggcacgatctcggctcactgcaacctctgcctcctgggttcaagcaattctcctgcctcagactcccgagtagctgggattacaggtgcgcgccaccatgcctgcctaatttttgtatttttagtggagatggggtttcaccatgttagccaggctggtctcgaactcctgacctcatgatctgcccacctctgcctcccaaagtgctgggattataggcatgagccactgcacccgaccaagatatgatatttttaagtcatatcatcaggtctcctttcacagtgtaatttctattattaataggcccacccaaattcaatgggaaggtacataaacctcaccttttatcaggagaggtgtcaaagaatttctggctatcttcagtctacacagtctgtaaaaacacatctctcttccatatccatgcccgtcgcactttcgtgcttttcctaaggagatgacttattttcttataacatccatgaaagtgattgaccttagggaatgctttctaagcaataggtaatgtagtgtgtagaatacaaaatatttactgccatactgcaagacttcttcagtagtttgtcttgttcttctcaaagttcatgaagaagggaagatatccatttaggactccaaatgtgttttcc

SEQ ID NO: 549634 - DNA, 611 bp, Homo sapiens
tattctggaagtcacagatttgtaacttccccaattactcctgtaaataatatcactattgtagaacctaaaaaaggccttttgagatgtcttttcagacttttgcatttcggatgactccaactggtcctctggcccccacctctgtaactgcatccccaaccaaccaggagcacccattccccagcccccagcctaccaaactatccttgataaaccctagactctgcatgtttggggaggctgatwtgagcaataataaaactctgctctcccatttagcagctctacataaactccttattgcaattctcctgtcttgatagatcagctctacctgggcagtggggaagaagaacccactgggcagttacaatatgcttatatgcagacactttcaaatcctatgatcacatgagcttttgaattaagccctactacttaattttgctacttgttcatgcacttttgagtaggcaccaaatttttaagaaaaattcaacttgagaacattttatccattagcctttcaaaatccattcaccataaattgagaaatgcccaattagtccattttaagagaattcctctttaagcatagtttgaaaaac

SEQ ID NO: 549635 - DNA, 611 bp, Homo sapiens
tattctggaagtcacagatttgtaacttccccaattactcctgtaaataatatcactattgtagaacctaaaaaaggccttttgagatgtcttttcagacttttgcatttcggatgactccaactggtcctctggcccccacctctgtaactgcatccccaaccaaccaggagcacccattccccagcccccagcctaccaaactatccttgataaaccctagactctgcatgtttggggaggctgatttgagcaataataaaactctgctctcccatttagcagctctacataaactccttattgcaattctcctgtcttgatagatcagctctacctgggcagtggggaagaagaacccactgggcagttacaatatgcttataygcagacactttcaaatcctatgatcacatgagcttttgaattaagccctactacttaattttgctacttgttcatgcacttttgagtaggcaccaaatttttaagaaaaattcaacttgagaacattttatccattagcctttcaaaatccattcaccataaattgagaaatgcccaattagtccattttaagagaattcctctttaagcatagtttgaaaaac

SEQ ID NO: 549636 - DNA, 611 bp, Homo sapiens
tattctggaagtcacagatttgtaacttccccaattactcctgtaaataatatcactattgtagaacctaaaaaaggccttttgagatgtcttttcagacttttgcatttcggatgactccaactggtcctctggcccccacctctgtaactgcatccccaaccaaccaggagcacccattccccagcccccagcctaccaaactatccttgataaaccctagactctgcatgtttggggaggctgatttgagcaataataaaactctgctctcccatttagcagctctacataaactccttattgcaattctcctgtcttgatagatcagctctacctgggcagtggggaagaagaacccactgggcagttacaatatgcttatatgcagacactttcaaatcctatgatcacatgagcttttgamttaagccctactacttaattttgctacttgttcatgcacttttgagtaggcaccaaatttttaagaaaaattcaacttgagaacattttatccattagcctttcaaaatccattcaccataaattgagaaatgcccaattagtccattttaagagaattcctctttaagcatagtttgaaaaac

SEQ ID NO: 549637 - DNA, 317 bp, Homo sapiens
atctttctgattccctttgaaagtcatcaagaaaattacttatgggggacaagagcaaaccctttatggctggtttcctttgggggaagggcagaacagttcttgcctttcagaatatatgtctaaggacytaacatgttcaaggaactttagagatacaaagatacttgaaagattcttcttttccttgccaggtggtggaagagagatgtgaagagaactaccatttactgcctaccgtggcggggcctttacatgacagtgtggagctactgccacttattacctgtgtattatactatgtgtctggcactatg

SEQ ID NO: 549638 - DNA, 610 bp, Homo sapiens
cgatggagttgggtggtcagggtttgctcagtgggggactttgagaggggcatgtgagatagagtgggctagatggggaggaggaagggggagaggagagggaaaggacaggtggcctccaagtgagacagaagacagtggggtgagatgtcaggcaggtggggcaatgcagcttccaagctcagagcaaggggcacagaggggaaggacagggccccgtggggttggggcctggctcccatctccatgcaccttccccatgccaggcaggcccccgcggcctgggcctctccttgcttcctgggggagctggacagacacaggctttcccctcagggaatctggaatactgattgcttttgtagttgagcttggcccctccttggtgtaggaagttaccagatccatttgtgctcagggcttttcttactctaggataagtaaaagtggttgttctgagtcacgtgagaagaactgggggctttgagtaaccagagggctccccagtgggccttkaggcatcttctctactttgtgggcacctgggtcagggtgcggtgtaataagaaatgtattcggtctttgtcccgggtccctgtcatagagctcc

SEQ ID NO: 549639 - DNA, 1106 bp, Homo sapiens
gcttcagctttgtacacagagatgattcaatgtcaggttttggagtgaaatctgtttaatcccagacaaaacatttaggattacatctcagttttgtaagcaagtagctctgtgatttttagtgagttatttaatgctctttggggctcaatttttctatctataaaatagggctaataatttgcaccttatagggtaagctttgaggacagattagatgatacggtgcctgtaaaacaccaggtgttagtaagtgtggcaatgatggtgacgctgaggctgatgtttgcttagcatagggttaggcagctggcaggcagtaaacagttggataatttaatggaaaatttgccaaactcagatgctgttcactgctgagcaggagccccttcctgctgaaatggtcctggggagtgcagcaggctctccgggaagaaatctaccatctctcgggcaggagctcaacctgtgtgcaggtacagggagggcttcctcacctggtgcccactcatgcattacgtcagttattcctcatccctgtccaaaggattcttttctccattgtacagctatgaagctagtgctcaaagaagtgaagtcatttaccccaggccccctgccagtaagtgacagggcctggtcacacttgggtttatttattgcccagttcaacaggttgtttgaccataggcgagattctcttccctgcaccctgccgggttgctcttggtcccttattttatgctcccgggtagaaatggtgtgagattaggcagggagtgrctcgcttccctgtccctggccccgcaaagagtgctcccacctgccccgatcccagaaatgtcaccatgaagccttcattcttttggtttaaagcttggcctcagtgtccgtacaccatggggtacttggccagatggcgactttctcctctccagtcgccctcccaggcactagcttttaggagtgcagggtgctgcctctgatagaagggccaggagagagcaggttttggagtcctgatgttataaggaacagcttgggaggcataatgaacccaacatgatgcttgagaccaatgtcacagcccaattctgacattcatc

SEQ ID NO: 549640 - DNA, 1106 bp, Homo sapiens
gcttcagctttgtacacagagatgattcaatgtcaggttttggagtgaaatctgtttaatcccagacaaaacatttaggattacatctcagttttgtaagcaagtagctctgtgatttttagtgagttatttaatgctctttggggctcaatttttctatctataaaatagggctaataatttgcaccttatagggtaagctttgaggacagattagatgatacggtgcctgtaaaacaccaggtgttagtaagtgtggcaatgatggtgacgctgaggctgatgtttgcttagcatagggttaggcagctggcaggcagtaaacagttggataatttaatggaaaatttgccaaactcagatgctgttcactgctgagcaggagccccttcctgctgaaatggtcctggggagtgcagcaggctctccgggaagaaatctaccatctctcgggcaggagctcaacctgtgtgcaggtacagggagggcttcctcacctggtgcccactcatgcattacgtcagttattcctcatccctgtccaaaggattcttttctccattgtacagctatgaagctagtgctcaaagaagtgaagtcatttaccccaggccccctgccagtaagtgacagggcctggtcacacttgggtttatttattgcccagttcaacaggttgtttgaccataggcgagattctcttccctgcaccctgccgggttgctcttggtcccttattttatgctcccgggtagaaatggtgtgagattaggcagggagtggctcgcttccctgtccctggccccgcaaagagtgctcccacctgccccgatcccagaaatgtcaccatgaagccttcattcttttggtttaaagcttggcctcagtgtccgtacaccatggggtmcttggccagatggcgactttctcctctccagtcgccctcccaggcactagcttttaggagtgcagggtgctgcctctgatagaagggccaggagagagcaggttttggagtcctgatgttataaggaacagcttgggaggcataatgaacccaacatgatgcttgagaccaatgtcacagcccaattctgacattcatc

SEQ ID NO: 549641 - DNA, 1106 bp, Homo sapiens
gcttcagctttgtacacagagatgattcaatgtcaggttttggagtgaaatctgtttaatcccagacaaaacatttaggattacatctcagttttgtaagcaagtagctctgtgatttttagtgagttatttaatgctctttggggctcaatttttctatctataaaatagggctaataatttgcaccttatagggtaagctttgaggacagattagatgatacggtgcctgtaaaacaccaggtgttagtaagtgtggcaatgatggtgacgctgaggctgatgtttgcttagcatagggttaggcagctggcaggcagtaaacagttggataatttaatggaaaatttgccaaactcagatgctgttcactgctgagcaggagccccttcctgctgaaatggtcctggggagtgcagcaggctctccgggaagaaatctaccatctctcgggcaggagctcaacctgtgtgcaggtacagggagggcttcctcacctggtgcccactcatgcattacgtcagttattcctcatccctgtccaaaggattcttttctccattgtacagctatgaagctagtgctcaaagaagtgaagtcatttaccccaggccccctgccagtaagtgacagggcctggtcacacttgggtttatttattgcccagttcaacaggttgtttgaccataggcgagattctcttccctgcaccctgccgggttgctcttggtcccttattttatgctcccgggtagaaatggtgtgagattaggcagggagtggctcgcttccctgtccctggccccgcaaagagtgctcccacctgccccgatcccagaaatgtcaccatgaagccttcattcttttggtttaaagcttggcctcagtgtccgtacaccatggggtacttggccagatggcgactttctcctctccagtcgccctcccaggcactagcttttaggagtgcagggtgctgcctctgatagaagggccaggagagagcaggttttggagwcctgatgttataaggaacagcttgggaggcataatgaacccaacatgatgcttgagaccaatgtcacagcccaattctgacattcatc

SEQ ID NO: 549642 - DNA, 533 bp, Homo sapiens
caataacctggagcattctttatttttctttttttctcaaggagcattgttattgaacttaaaagcaggctattgagggtaagatacaaaccacaaaaaagccgaaagtctcaaagtcgggggatcttttagtctctgtcttcttccaagtttctcctgtctccctggcacggatcccgaaggtgtgttctgtctgtgtaggggagacccagtctcttccaacatagattgatggctgtgattttaaaagctttgcttgagtccctaagaagtgggaaaacagtaatttgggtgcgtgcgttttagaagtttttttaaaaatgcaaattatccagaaggcattgtgtgggatttgaaggattaagctaagagtgacctttaaaaatggttttaacaacccaaattcctcttcctggttgatatgtttgtgttattgtctttsttttatttcttcaaggtcacatggctttccttggtgaatcttacactgttttgttacttcttggttaaggcaaagattctgaaacttggtt

SEQ ID NO: 549643 - DNA, 2034 bp, Homo sapiens
ctcaatttctggtagacctggaggctgggctcagcctcagtctccctccacctctccaccatgtgtgtcaggcaaagaggctgggcttccccgctattttcctgccctgagctgagcatcaagctgggcctcagagatccttcctttctccccatgctcccctctctccaggaggggagggactctcctccaatctccaatatatggtacatatacatatatatataccaaaacaaagatgtagctgctgtcactgctgaccagaacacccttccggtgtgccttcccacctgagctgtgcctgcactcaccagcccccttgggcagattgccactgtctttaggagccaggcttatacccacctctccccacatgcctacccaactctcaggtcccaacatgcccagcagttgagccaacacaagttgatctaagttcatcagaaggtgagtgtttgactgattctatactcgccacacaggcccaccctcgtctcatgcaagtgacagccccaactccactcctcatctcccagcctgtgaaccgaggcagccatggagcctggaaggagaacagactccagtatccacagacgcccattctaagatgttctcacgggggatcaaaagaagctgagatctacccatgttggccctgtcgggacacagtatcttttggggatccaagaagacactgtgggccccaggactcctggatcccagaactgtggctggccctggacacagagcggcctagaagatcttggctctgtgtctcactggggcctccttgacccatttccaagctgtcctctctcctccccgtgcctgctccctgctacgctgctccgctcctcctgactagggtcacgatgctgtgtggggccccatggcacccacacgaccttttggccatatttcccttctccaaggagcctccctcttctgtttatggtccaaacctgaatgggacatctgactggcccggctcatcttcggcaccagcctataggtctcccgccagcctatgygcgagctgccctcgggcctggtgtccgccggtgatccatgccgcgtgacaggccagggtttcaggggtttccttccccacagctctgctcattgtctctctccaccattgagacgcccatctgggtcccttatattttggtttttaaacctcccggtttcatgcagttttatttcatctttaaaggttgacacatggttgtcagcccagcggccctggtctggaagtccaggtttgggtggcaatggcggtgagagtgctttgggcctcggtgccagaggccagcctggtgatttagacacctcctccctgccaggagcctgtgttcactccagttctttcaaagtggctgcagaggggggaggtggggattaaacggaggctcctcactgcagcagaggaaagcaacccttgccaagcccctggtcttgtgccaactccctgctggtttggggaaagctgatgagggtggcccgccatgctctggttctcaggacaaagttcagaaggtgagcccagcgtcctggcaacaactacccctggctgctccgtggccaccgtgggagtggttaataaacacccgggctggaggtggtaacgcctatcttccaggaacttagttcagaagagctttatgacctggatggagtcacctgttaaagagtaacgtacaccccatattacactcgagtcccaggagtaactatccaggggaagtgtttatttccatgggtgaacaaagcatcctttgggggagaccctaccagcaccaggctctcctttgatgggaactgtctggcccaggcctggggaatatgcagccttgcagctaccagttagccactttgggggtgagtttatcctacacagtttatccttgctctccccagagtgagggattgagtgggctggcaggaaaccaaaaggaatctacctgtccctcccactccccccacaggcccacatggcggggaaggaaggcgggatccatctccacatgacgg

SEQ ID NO: 549644 - DNA, 593 bp, Homo sapiens
ttaaagttttcatttttaatttcctttctgtagtaggaaatgttttgcatggtggcaggctagcctgtgagtacattaatctttggattttacgatgaatatctactaattcatccttttatgtcacacttacaatgttttgtttttcaaaggtatgtgtatattacatgtatgaagtgagttctttcattataaaaaaaaagtttgatttacccatctgataatttttgggtaaagattatttcctgtastttcatcaagatgaagaacttgaatagttgggtttttttttttaatgttcataaactttagcactgttttgttcctgaactatctgagtagaaacttaagctttggagtcagacacacttgggttagattgtcatgtctgaagcatctcagtcacatggccttggacacgccagtctgtctgcagtgacaggatcatcatcctagcacctagcataggcctgttgagagttaaaaaaaaggagaggggcttatcctcaaacatagcaagcaaaaataattagctatttttattattaataaatggtaaaagtcctttaatgttgtgtcttattataaatttc

SEQ ID NO: 549645 - DNA, 541 bp, Homo sapiens
atatatacatatgtacacacgtgtgtatatatacatatgtacacacgtgtgtatatatacatatacacacgtgtgtatatatacatatacacacgtgtgtatatatacatatacacacgtgtgtatatatacatatacacacgtgtgtatatatacatatatacacgtgtgcctatatacatatatacatrtgtgcctatatacatatatacatatatgtgtatatatacatatatacatatgtgtatatatacatacacatatatacatatacgtacatatgtgtatatatacatatacatacatatatatgtgtatatatacatatatacacatacatatatgtatatatacatatatgtatatatacagctctttccatatatgtatctctctctatacttcatttatacgtagagagggtttgtgttagttttgctaaacatttttttttttttagacagggtctcgctctgttgcccaggctggagtgcagtggcacgatcatagctcactgtagccttgggctcctgggctcaag

SEQ ID NO: 549646 - DNA, 1007 bp, Homo sapiens
agactggagttaggggaaacccactgggatttgcaagacagaatatcattaggaggggactgtgtgggggggctggggggagtggtaatacctggtgctaccattctgtaccttgctctttttaacttaacaatgtatttatttattatttaaatgttatttgtagagtttccaatatgtgcccaccctgttctagatgttgtggatgcagcctgccttctgatgtattgtcatctcacaagcagtagttccagatttcagtccaactaggaagacacwgtgcgactgagtctagcactaagtttactctatagaggataaaacttttattgcacatgttactgtctcctagaacattagctttcaatattcaagaattgtagaaactcattaggtatgctgagctctggtcccaagtcagaacagaattttgaggtactattcttggcctgtcaattactcaggctgattctacttgcacatcaatagagtagtttcataatctactgtgattcaatctgttggaatcgtctatctatatggaaacctagctagaaggacatgtaaataaccatgcattttctcatcataaagccaggaccatgcttattgtagtttcagttgcagaactattttgcagccatgcccatagactatgagtcagtttgaacaaattatcatatttataagcttgctataattaatacttaggatacaatgaccttgggaaaattcgatatcatctgctacatgtgaagatatgaatatctaaagattcagcaattctatccctagatgtgtacccaacatatttatatgtgtgcatgtgcatttagagacatgtacaagaagttcatggctgcattattcataatagctcaaaacttaaaactacccaagtgtccatcagcaacaaatacataaatatattttggtaaatcatgtaatggaacagtacacagcagtgaaaatgaagaaactacgtgtatacataacttatgtgaatc

SEQ ID NO: 549647 - DNA, 1007 bp, Homo sapiens
agactggagttaggggaaacccactgggatttgcaagacagaatatcattaggaggggactgtgtgggggggctggggggagtggtaatacctggtgctaccattctgtaccttgctctttttaacttaacaatgtatttatttattatttaaatgttatttgtagagtttccaatatgtgcccaccctgttctagatgttgtggatgcagcctgccttctgatgtattgtcatctcacaagcagtagttccagatttcagtccaactaggaagacactgtgsgactgagtctagcactaagtttactctatagaggataaaacttttattgcacatgttactgtctcctagaacattagctttcaatattcaagaattgtagaaactcattaggtatgctgagctctggtcccaagtcagaacagaattttgaggtactattcttggcctgtcaattactcaggctgattctacttgcacatcaatagagtagtttcataatctactgtgattcaatctgttggaatcgtctatctatatggaaacctagctagaaggacatgtaaataaccatgcattttctcatcataaagccaggaccatgcttattgtagtttcagttgcagaactattttgcagccatgcccatagactatgagtcagtttgaacaaattatcatatttataagcttgctataattaatacttaggatacaatgaccttgggaaaattcgatatcatctgctacatgtgaagatatgaatatctaaagattcagcaattctatccctagatgtgtacccaacatatttatatgtgtgcatgtgcatttagagacatgtacaagaagttcatggctgcattattcataatagctcaaaacttaaaactacccaagtgtccatcagcaacaaatacataaatatattttggtaaatcatgtaatggaacagtacacagcagtgaaaatgaagaaactacgtgtatacataacttatgtgaatc

SEQ ID NO: 549648 - DNA, 1007 bp, Homo sapiens
agactggagttaggggaaacccactgggatttgcaagacagaatatcattaggaggggactgtgtgggggggctggggggagtggtaatacctggtgctaccattctgtaccttgctctttttaacttaacaatgtatttatttattatttaaatgttatttgtagagtttccaatatgtgcccaccctgttctagatgttgtggatgcagcctgccttctgatgtattgtcatctcacaagcagtagttccagatttcagtccaactaggaagacactgtgcgactgagtctagcactaagtttactctatagaggataaaacwtttattgcacatgttactgtctcctagaacattagctttcaatattcaagaattgtagaaactcattaggtatgctgagctctggtcccaagtcagaacagaattttgaggtactattcttggcctgtcaattactcaggctgattctacttgcacatcaatagagtagtttcataatctactgtgattcaatctgttggaatcgtctatctatatggaaacctagctagaaggacatgtaaataaccatgcattttctcatcataaagccaggaccatgcttattgtagtttcagttgcagaactattttgcagccatgcccatagactatgagtcagtttgaacaaattatcatatttataagcttgctataattaatacttaggatacaatgaccttgggaaaattcgatatcatctgctacatgtgaagatatgaatatctaaagattcagcaattctatccctagatgtgtacccaacatatttatatgtgtgcatgtgcatttagagacatgtacaagaagttcatggctgcattattcataatagctcaaaacttaaaactacccaagtgtccatcagcaacaaatacataaatatattttggtaaatcatgtaatggaacagtacacagcagtgaaaatgaagaaactacgtgtatacataacttatgtgaatc

SEQ ID NO: 549649 - DNA, 1233 bp, Homo sapiens
ggataggtgagagacagtcacttctttacctttcattttttcttcactatggatttgataaagaacttttgaaattttttttactacattggaggatgttatggacttcattcactttttcttcaagtaaaattttggtaaatattcagttttttaaattggtttgagaaactattgctttggggcaaagtctaaaataacaattgtagatctccttttagagctatgaaatttgaggttaataagttaatgtttcagaggatcataaaacagtaagctgagaagaaaactaagattttccaactttcagaagacactccatttagtaagccctatgttgtcagatgttgcctgtatttctgagtgagaaagaacttttaatattaccaacggtctttgaaatcttttggaaaaaaaagcagacaaattttttctaatttagctttattttgtaattcattttggtaaattattatttgcctccttttctagatttttcttttctagcatttgaattataatctcagaggatgtccttgatagtggaagtatggggttatttgtcatgtcagttgataattactttggatgatcttactgaaagctaaagttgattgtgttcatctgcaaagcaaacaattttgacaattaaggcataaaaattgtgagtgttacatatagctgttccaactataatgtgttgattagagctgtttcatgaatctttctcaggaacagtctgagtgctatatactgcttagaaagaaaatacagagtcagtgtatttgctctcacaatgtgctgattgcggcagcttgcccagagctaaactkgctgtaataaaaacttctggattggaacataatgatggcatttatgttatttgcctcctgcactttataaacccaagcaaacagctctcagtttgagaacctcagaaagatctgtcattaggtatggctgagtttccttatgtcgattctttgaagaatatgtcagctgaagtcttgcagtgagcagtagaatatgaatcttacgtagctgaaggtgctagattaaaacagcttccatcttctgactttgtccagatcattttattgaactcagtttgatagatgcctttctgtgagggtgttattatttttaaagactcatagtgagttcctggacctttggatgcatattgccccctaaaatagcatgaaatcaggcaaactggacttattattagca

SEQ ID NO: 549650 - DNA, 589 bp, Homo sapiens
aaggaaaagaaaggaaaaaaaatctcctcatgtgaatgaacacaggttgctgaaaagtttcgtggcagaaacttcttcctttggaaatgtgttccacacataagtcatccatggttgcccaatctcagacttttttcacaatctggactgattctttcttcgcacctcccgctctcgcatctgtcaggagggcgaggtgggtggggccacgccaagacccgctgcagtcatgtggttaagacacctgatacgagtcttattgaacatgcacctagactctccactgaacccaaagcagaggatgaacatgagaaaaatggatccttccattcaagaggtgcccaatcaagttagactcagccctgctaagtcaggaccaacattactagtatcactatactgaggatttccaatttttagacaaacaccagatacacctaatgaacaaagatcatcagtaaaacatgtcacaactgagaaaagcaagaaatgggagaagggatcatgaagcttttctcaagggctgagattctgaaaggtgtggctgaaaactgtcctgtccccawagcactagagcagcgctgcccag

SEQ ID NO: 549651 - DNA, 625 bp, Homo sapiens
gcaggagaattgcttgaacctaggaggcagaggttgcagtgagctgagatcgcgacattgcactccagcctgggcgacaagagcgaaactccgtctcaaaaaacaacaaaaagaatttctgaaagaaagaaagaaagagaaagaaaaagattagcagagtgacaatagataagcaaagtcaagtggaaaactgcaaattgggtaactgttcacactaaacaaggcaagtatctcatcttttgtagatacccataagaaaacattaaagtgtaattaaaaactgaacagagaacattaacaaacattctactgcagatraaatataattagacaaaggaaaataatgcaagttaaagcagtagattcttttttatacataccagattggcaaagtaaaataataatagtgataacaacaataatttatggcaaaagtgcactgacgtggataaagcacatattatcggtgagtaaaacatctgagaaatcaactcgacatttttcaagaacctgaaaaatgattacacaattttatgataagtccatctatggataggtattctaaactatgtttatactagtgaatatttgaaaacagactaactctctcacaaaaggagaatga

SEQ ID NO: 549652 - DNA, 871 bp, Homo sapiens
acagagggacagtttccaagtctagtttttttcttttcccccaaatgccatcagctgaacaactcaattggatttgttctgaaatcaaacctggttttatgtttgctgctacaaatgatacagagcagaatatgttattctataaatgcaagaaaatatgaccaagttattcaaataatgactaatattcttgcataaccattcaagtgagagaaaaactgactccagcagaaaagcagccatgacaaccgcataaataataggcactgctttgagatcttttgggtaaatggaagatgaacttgctctcagaaaacaaatggcacaaagaaataagtgttacatgcagcaaggactcagagagcacctggaaacatcaccattgagatcctttcattttttatttttctctctttatagatagggtctcaatctgttacccaggctggagtgcagtggtgtgatcatagctcactgtagcctcaaatttctgatctcaagtaatcctctcacctcagcctactgagtagctgggactacaggtgcgtgccatcatgcttggctaattaaattttttttttttttgtagagacgaggtctcattatgttgaccaggctggtctaaaacttctggcctcaagcaatcctcttgcctcagccttccaaaatgctgggattacaggcatgagccactgcgtctggcatcattgagatctttatgggagagttttagggataaaattcagtagaaagcatctgaacatttaaaaagtccttgatataggccgggcacggtggctcaygcctgtaatcccagcactttgggaggccgaggcggccgaatcacgaggtcaggagatcgagaccatcc

SEQ ID NO: 549653 - DNA, 2228 bp, Homo sapiens
cataaggaaggtactattattctctggtaggtggtattgttgttcctaactattaagttgcttttccagttaaggattacacatcatcgcccgttgccatgcgactgcagtgcatcctgtaggaggagcattctttccagcctcactgatgtcaggcttgattgtatgatcttcttttggcagggggtctttctgagcagtagtattaacagttattacgtatttcaaccagagaaatttttcctttcatgagaatagtctgtgtcagatggggctgctctttcagccttggtcctggaagaaaaaggggatgtgaagcagctcacatttgagatgtcacatgagtgacatataaacttttgctgttataagtcactgagatttaggattgttttttacacagccctacctaataaaatcatactactattaatatattaaaccattttacagatgaagacactgagattcagtgaggtttagttacttgcccatggccacatagaagcaaaagtagaacaactgggattcaaacttgggacagtgtgactctagaaacagtgttttaattgtcgaagggatgagaatgaaataagttgaggaggaaccagtcttccactgtattggacgaaacctgacctgagaggaagaaaagcaggagctgtaattactcccaatatttaatctggagacaaaactttgagtctaagggcacaggcttcggagtaatgtggactccttgttaggactgatgatcttagacaaattacttaacctatttttttgggttttttttgtttgtttgtttggttggttttttgaaatggagtcttgctctgtcgcccatcctagagtgcagtggcgcgatctcggctcactgcaacctctgccttccaggttcaagtgtttctcctgcctcatccccctgagtagctgggactagaggcgtgtgccatgatgcctggctaattttttgtatttttactagagacggggtttcaccatgttggccaggctagtctcaaactcctgacctcaagtaatctgcctgatcagccacccaaagtgctgaggttacaggcatgagccactgtgcccagcccttaacctgtttgagtcttactttcctcaacttgaagatgaagactaggggccatgttgtaggcttgtcattagggccaaattggcctgatcctgtgcacatagtgggtcctgagtatttgaattattgaatgtggattttagacttaattcagatattccaaaaaatggcaatgggcaggccccaaaaaagagtatttcaagaattcccacatataccccctaagaggtcagcatatagatgcctgccatgcatacattattggggccagggtggattagccagagaaacagcacaacagagagaggctacaaccttgcccaatgggtcagaaaatttgctcttttcttcccacctcctccctgccctaatgccaccagtggagctaaagcctagaaaagaaaggggaagaaggaagtctctagagctgtagggcaaccaagctagtctgctccagagatcaggggaaagaactttgaatagagcttaaggatgaagttttaaacaaatggggctatattgtgacttctggaatggcagagtaaggaattcagcaaattctcttccccaaaaaacaatgatgaaattggacacaattgtaaaaaacaaccatttcaaattcctggaaatccaccacaggtataacataaattaaaatgcatttattcaagaaaaactattaaaccttgggtaacaacagtgagagtctgtgacacgttaccatggggaaattcccaatccctctcctccagttccatgggaatagttctgtcagggctgcgtaaatgtgaaaaccagcagctttgctgccagagggggctgacttggtaaggagtggtgccagcaaaaccccatggccaaggagaaaggttgattgggaatgccaacatcacaattacctgggctgcaagactggttgagcaaacarctgattagaaagcctgctggaagtttagcagtgagatccagggaatcagatagccatagtgggctttggcgatgcgcttatggtctggaaggctgtgtcagttcaggagagtctggcaaaagccccagtcatctactcaaccctggcggaacatgaagccttgcacagaggcagaggagacacaggaaaacaaaagcc

SEQ ID NO: 549654 - DNA, 545 bp, Homo sapiens
tctatttatttatttatttttgagagggagtctcgctctgtcacccaggatggagtgcagtggtgtgatctcggctcactgcagcctccaccttccaggttcaagcgattctcctgcctcagcctcccaaatagctgggactataggagtgagccaccacgcctggctaatttttgtatttttaatagagacgaggtttcgccatgttggccaggctgatcttgaactcctgacctcagatgatccacccgccttggcctcccaaagttctgggattacaggcatgagccaccatgcccaatgggtttattttttaatgtatccttttttgtaagtaccctttgaactctgtaccatgagaatcttatttttgaaagtaaataacattaaaaaattattttaaactttgaataccccaggagatagaatgtattctctatgtcttcacagccctgcctctgtgaatccttataccccacatttaaagtatctgtycagcccctgcaggcttcctccagggactttgtgaccctcactagaagatt

SEQ ID NO: 549655 - DNA, 500 bp, Homo sapiens
cctgaaaattggccttctttatgataagatgcaaataattacatttctgacactaaaaaattttacaagtaaagcagatgaatatgatctttcagaatacacagmtcttttgtaccccaaatttttattattcaacaatttcaaaatgtttctgtaaaatagagatatagtggccagggttttccatcaaaaacatagttctcacctgtaatctcagcactttggaaggccaaggtggcagatcacatgaggtcagccatggccaacatggtgaaacatcctctctactaaaaatacaaaaattacctgggcagggtgtcagacacctgtaatcccaactgcttgggaggctgaggcaggagaattgcttgaatccaggaggcggaagttacaatgagccaaaatcacaccactgcactccaacctgggtgacagaactagactctgtctcaaacaagaacaagaacaagaacaacaacaaacatagttctaagttaagt

SEQ ID NO: 549656 - DNA, 1493 bp, Homo sapiens
ctgacacatgctactatatgaatgaactctgaagacactgccctgaatgaaataaacagtcgtaaaaggacaaatataataccacttacatgagataactaaaacacagtcaatttcatagagacaaagtagaagggtagttgctgagggtgggaggaagaggaaaatggggagttattgtttaaagggtatggagtttcagtttggaaagatgaaaaagttctgtagctagatggtgataatggttgcacaacatataaatttacttaatgccastgaactgtacatgtaaaaatggttaaaatggtaaattttatatgtattttccattaaaaaaacacaaaaaattctacccatgctttcgatctagaatttcagctatcagatactagttgtaataaacagaaaggaatttatattattagttagtgcagtatactataaaaacctggatcttttgatccagtctatgaacaagagaacccatcttattcccttttttttttttttgagatggagtcttgctctgttgcccaggctagagtgcagtggcgcaatctcggctcactgccacctccgacttccgggttcacgccattctcctgcctcagcctccccaggagctgggactacaagcgcccgccacgacacccagctaatttttttttttattttttagtagagatggggtttcaccatgttagccagcatggtctcgatctcctgacctcatgatccacctgcctcggcctcccaaagtgctgggattacaggcgtgagccactgcgcctggccccccactttttttttttttgagacggggtcttattctgtcacccagattggagtgcagtggctcaatcacagctcactacagccttgacctccttgggctcaggtgatcctcccaacctcagcctgttgagtagctgggaccataggtatgtggcaccatgactggctaatttttgtattttttgtagagatggggtttcaccatgttgcccaggctagtctcaaactcctgggctcaagagatttgcctgctttggcctcctaaagtactggattacaggcatgagccatcacacctggcctctttttttcatttgagactgggtctcactctgccacccaggctgcagtgaagtggcgccatcacgactcaccgcagccttgaactcctgggctcaagtaatcttgcctgggtctcccaaagtgttgtgattacaggcatgagccactgcgtccggccaacatatcttattctaacacagttgacaacagagtccaaaatgcacgctaatttctcatgattttttaaaaaaggtaaattaaaagtaagccacacaaacaagcaaaatgttaaatttagcaaattaatctttatgctaacaaacctttgtgtgtcttccatttccttcactagacgttctaaggtatttgtgtaagttccaggatgaacatgtccctaaaacaagaacatttagaaa

SEQ ID NO: 549657 - DNA, 1493 bp, Homo sapiens
ctgacacatgctactatatgaatgaactctgaagacactgccctgaatgaaataaacagtcgtaaaaggacaaatataataccacttacatgagataactaaaacacagtcaatttcatagagacaaagtagaagggtagttgctgagggtgggaggaagaggaaaatggggagttattgtttaaagggtatggagtttcagtttggaaagatgaaaaagttctgtagctagatggtgataatggttgcacaacatataaatttacttaatgccactgaactgtacatgtaaaaatggttaaaatggtaaattttatatgtattttccattaaaaaaacacaaaaaattctacccatgctttcgatctagaatttcagctatcagatactagttgtaataaacagaaaggaatttatattattagttagtgcagtatactataaaaacctggatcttttgatccagtctatgaacaagagaacccatcttattcccttttttttttttttgagatggagtcttgctctgttgcccaggctagagtgcagtggcgcaatctcggctcactgccacctccgacttccrggttcacgccattctcctgcctcagcctccccaggagctgggactacaagcgcccgccacgacacccagctaatttttttttttattttttagtagagatggggtttcaccatgttagccagcatggtctcgatctcctgacctcatgatccacctgcctcggcctcccaaagtgctgggattacaggcgtgagccactgcgcctggccccccactttttttttttttgagacggggtcttattctgtcacccagattggagtgcagtggctcaatcacagctcactacagccttgacctccttgggctcaggtgatcctcccaacctcagcctgttgagtagctgggaccataggtatgtggcaccatgactggctaatttttgtattttttgtagagatggggtttcaccatgttgcccaggctagtctcaaactcctgggctcaagagatttgcctgctttggcctcctaaagtactggattacaggcatgagccatcacacctggcctctttttttcatttgagactgggtctcactctgccacccaggctgcagtgaagtggcgccatcacgactcaccgcagccttgaactcctgggctcaagtaatcttgcctgggtctcccaaagtgttgtgattacaggcatgagccactgcgtccggccaacatatcttattctaacacagttgacaacagagtccaaaatgcacgctaatttctcatgattttttaaaaaaggtaaattaaaagtaagccacacaaacaagcaaaatgttaaatttagcaaattaatctttatgctaacaaacctttgtgtgtcttccatttccttcactagacgttctaaggtatttgtgtaagttccaggatgaacatgtccctaaaacaagaacatttagaaa

SEQ ID NO: 549658 - DNA, 1424 bp, Homo sapiens
gcagcttctacacacccagctcctgccacccagtggcctctttaggccaagctcatgcttcacaagggtctttccaggcccaatttttgtctcatggcaaccttccctggccagattcctgcctgtctcccagcagcctagacaggcccaggtcttgcctcacactggcctctctacatccagctcatgcctcacggtggcctctccaggctcaactcctgtcccaggacgtcatctccgggcccaaaacttaaagtcagactctctagtcccaactgctgcctcctggtggattatgaaggcccaaaatctcctcaagttgacctctacaggcccagctcctgcctcctgtcagcgtctacaggcccaacctctgccttatgggggcttctccaggcccacctcttcctcttggctgggtctacaggcacaactgctgcctcacaacagccttttttggcccagttcctgcccagctcccagcggccctggtagacccacaacttcccgaagccaagctccccaggcccaggtcaggcctcacggtggcctctccaagctcagctcctgccctccaatggcatctgcaggccccaaatggtctccagtcggtgggctcctccacgccaagcttgggcctcttggcgacctctgcaggcccaagttgtcctgaagtcggcctctcccggccctgcctcccagcaagtaagcaagctcttttggctcaactactgccgagctcccaaccgcctttctaggccccgaactttctccagccaagctcttcgggcctacttcctgcctcccggtggcctgtacaggcccagcactggttggagaacagcctctgcaggccccactcttgcctcccaggggcctctccaggcccagctcttgcccccacggcggcctcccggggccaagtccctgcctgcctcccagcagcccgcatgcggcccagctccttctcacagtggcctgttgatgcccaactcatgcctctggcaccctgcccagagacatgagcccctgcctctcactggctcctcccacgctgagacaggtcagcgtgagcccttgcctcacaccggcccctcccacgctgagaggtcagcatgagccccttgcctcacaccggcccctcccacrctgagagaggtcagcgtgagcccttgcctcacaccggccctctcccacgctgagagaggtcagcgtgagcccttgcctcacaccggcccctcccacgctgagagaggtcagcgtgagcccttgccttacaccggcccctcccacgctgacagaggtcagcctgagccccttgcctcacaccggcccctcccacgctgacagaggtcagcctgagccccttgcgtcacaccggcccctccctcgctgacagaggtcagcgtgagcccctagcctca

SEQ ID NO: 549659 - DNA, 686 bp, Homo sapiens
gtcttttttattttttgatataacaaacaatgttgtaatcattttgtatttacttcctagtccactcctgtaagtttctcttgagtacatactagcaatgaagatgctgagtcactgcatatacatactcacaactttattctataatgtaatattctataaagtagctgtatcagtttatactttaaccagtaatggacaagattttctgttacttcccatctttgttaattattacttttagactctaacttttatcaggctcatggatgtaaaaagcatctcagggtggttttaatttgmatttatctgctcatctatgaagatgagcttcttttcatataattatgagtcattatttttgttttgccttcttttgtttatgcattttgcttgttctatgtcttatttttcctgttgatttttgggagttcatatatattctaaatgtatatttattcactcatatatatgttgcaagtattacagtttatgatttgtcaccttatgatatcatccaaatagagaagctttatattttgatgtagtcatatgttcatttttcctccttaatgtttgtttttcttggttctatgacctaccaaaagtaacaaaaattctcatttatttttaatctaaatgttttaagtattttcctggaattcaccttgaattgatttctattg

SEQ ID NO: 549660 - DNA, 686 bp, Homo sapiens
gtcttttttattttttgatataacaaacaatgttgtaatcattttgtatttacttcctagtccactcctgtaagtttctcttgagtacatactagcaatgaagatgctgagtcactgcatatacatactcacaactttattctataatgtaatattctataaagtagctgtatcagtttatactttaaccagtaatggacaagattttctgttacttcccatctttgttaattattacttttagactctaacttttatcaggctcatggatgtaaaaagcatctcagggtggttttaatttgcatttatctgctcatctatgaagatgagcttcttttcatataattatgagtcattatttttgttttgccttcttttgtttatgcattttgcttgttctatgtcttatttttcctgttgatttttgrgagttcatatatattctaaatgtatatttattcactcatatatatgttgcaagtattacagtttatgatttgtcaccttatgatatcatccaaatagagaagctttatattttgatgtagtcatatgttcatttttcctccttaatgtttgtttttcttggttctatgacctaccaaaagtaacaaaaattctcatttatttttaatctaaatgttttaagtattttcctggaattcaccttgaattgatttctattg

SEQ ID NO: 549661 - DNA, 686 bp, Homo sapiens
gtcttttttattttttgatataacaaacaatgttgtaatcattttgtatttacttcctagtccactcctgtaagtttctcttgagtacatactagcaatgaagatgctgagtcactgcatatacatactcacaactttattctataatgtaatattctataaagtagctgtatcagtttatactttaaccagtaatggacaagattttctgttacttcccatctttgttaattattacttttagactctaacttttatcaggctcatggatgtaaaaagcatctcagggtggttttaatttgcatttatctgctcatctatgaagatgagcttcttttcatataattatgagtcattatttttgttttgccttcttttgtttatgcattttgcttgttctatgtcttatttttcctgttgatttttgggagttcatatatattctaaatgtatatttattcactcatatatatgttgcaagtattacagtttatgatttgtcaccttatgatatcatccaaatagagaagctttatattttgatgtagtcatrtgttcatttttcctccttaatgtttgtttttcttggttctatgacctaccaaaagtaacaaaaattctcatttatttttaatctaaatgttttaagtattttcctggaattcaccttgaattgatttctattg

SEQ ID NO: 549662 - DNA, 631 bp, Homo sapiens
aaagccaaaggtccagtgatgatcccatacccttttgtccagtctcatgttgaagatttttatgtagaaggccttcccaaaggaattttttttttttttttgagatggagttttcactcttatcgcccaggctggggtgcaatggcgcaaccttgctggtcactgcaacctctgcctcctgggttcaagaaattctcttgccttagcctcccaagttgctgggattacaggtgcccaccaccacaccaggctaatttttgtatttttagtggagatggggtttcaccatgttggccgggccagtctcgaactcctgacgtcaagtgatcttcccgcctcgactcctgacatcaagtgatcttcccacctcggcctccaagagtgctgagattacagatgtgaacccaygcctggccaggaattttgttttttaggaaggctttctactaatggaattcctggccttgagaggatgttactttcgaaggaaaggatttttttgttattaaaaggtaagattcctggattcttattggactgttatctctgttatgagtaatccatctttagtcattcaccactagggttgtatttaattaagtctgagttattttatggtggttttgttttg

SEQ ID NO: 549663 - DNA, 583 bp, Homo sapiens
tgaatgagtgaatgaatcaacccatgaatgggtggatgaaagaccagacaaataaacagtgaatggaagcagtagaaggaaggaaggaaggaaagaaaaaagaaaaagaaagaagggagaaagagagaaaaaagaaaagaaaaaagggaaggaagaaaataaaggaaaataaaaaaagaaagaaagggaaaatggaaagaaagaaaaataaaggaaggagggaaggaaggaaacaaagaaaggaaaaaaggaaagaaagaaaaataaagaaacraaggagggaaggaaggaaagaatgaaagaaagagaaggaagaaagaaggaaagaaagaaaaaggaaaaaaggaaagaaagaaaaataaatgaaggagggaaggaaggaaagaaagaagggaaaaaagaaaaataaatgaaggagggaaagaaggaagaaaaaataaaagaaagagaaagaaggaaggaagggagggaggaagaaagaaaaaaagaaagaaagaaaaaaggaaggaagaaagaaagaactctaccataagcaaagctgtcctggcatatgtggcatctggcaggcagcaagtctagactg

SEQ ID NO: 549664 - DNA, 583 bp, Homo sapiens
tgaatgagtgaatgaatcaacccatgaatgggtggatgaaagaccagacaaataaacagtgaatggaagcagtagaaggaaggaaggaaggaaagaaaaaagaaaaagaaagaagggagaaagagagaaaaaagaaaagaaaaaagggaaggaagaaaataaaggaaaataaaaaaagaaagaaagggaaaatggaaagaaagaaaaataaaggaaggagggaaggaaggaaacaaagaaaggaaaaaaggaaagaaagaaaaataaagaaacgaaggarggaaggaaggaaagaatgaaagaaagagaaggaagaaagaaggaaagaaagaaaaaggaaaaaaggaaagaaagaaaaataaatgaaggagggaaggaaggaaagaaagaagggaaaaaagaaaaataaatgaaggagggaaagaaggaagaaaaaataaaagaaagagaaagaaggaaggaagggagggaggaagaaagaaaaaaagaaagaaagaaaaaaggaaggaagaaagaaagaactctaccataagcaaagctgtcctggcatatgtggcatctggcaggcagcaagtctagactg

SEQ ID NO: 549665 - DNA, 583 bp, Homo sapiens
tgaatgagtgaatgaatcaacccatgaatgggtggatgaaagaccagacaaataaacagtgaatggaagcagtagaaggaaggaaggaaggaaagaaaaaagaaaaagaaagaagggagaaagagagaaaaaagaaaagaaaaaagggaaggaagaaaataaaggaaaataaaaaaagaaagaaagggaaaatggaaagaaagaaaaataaaggaaggagggaaggaaggaaacaaagaaaggaaaaaaggaaagaaagaaaaataaagaaacgaaggagggarggaaggaaagaatgaaagaaagagaaggaagaaagaaggaaagaaagaaaaaggaaaaaaggaaagaaagaaaaataaatgaaggagggaaggaaggaaagaaagaagggaaaaaagaaaaataaatgaaggagggaaagaaggaagaaaaaataaaagaaagagaaagaaggaaggaagggagggaggaagaaagaaaaaaagaaagaaagaaaaaaggaaggaagaaagaaagaactctaccataagcaaagctgtcctggcatatgtggcatctggcaggcagcaagtctagactg

SEQ ID NO: 549666 - DNA, 583 bp, Homo sapiens
tgaatgagtgaatgaatcaacccatgaatgggtggatgaaagaccagacaaataaacagtgaatggaagcagtagaaggaaggaaggaaggaaagaaaaaagaaaaagaaagaagggagaaagagagaaaaaagaaaagaaaaaagggaaggaagaaaataaaggaaaataaaaaaagaaagaaagggaaaatggaaagaaagaaaaataaaggaaggagggaaggaaggaaacaaagaaaggaaaaaaggaaagaaagaaaaataaagaaacgaaggagggaaggaaggaargaatgaaagaaagagaaggaagaaagaaggaaagaaagaaaaaggaaaaaaggaaagaaagaaaaataaatgaaggagggaaggaaggaaagaaagaagggaaaaaagaaaaataaatgaaggagggaaagaaggaagaaaaaataaaagaaagagaaagaaggaaggaagggagggaggaagaaagaaaaaaagaaagaaagaaaaaaggaaggaagaaagaaagaactctaccataagcaaagctgtcctggcatatgtggcatctggcaggcagcaagtctagactg

SEQ ID NO: 549667 - DNA, 583 bp, Homo sapiens
tgaatgagtgaatgaatcaacccatgaatgggtggatgaaagaccagacaaataaacagtgaatggaagcagtagaaggaaggaaggaaggaaagaaaaaagaaaaagaaagaagggagaaagagagaaaaaagaaaagaaaaaagggaaggaagaaaataaaggaaaataaaaaaagaaagaaagggaaaatggaaagaaagaaaaataaaggaaggagggaaggaaggaaacaaagaaaggaaaaaaggaaagaaagaaaaataaagaaacgaaggagggaaggaaggaaagaawgaaagaaagagaaggaagaaagaaggaaagaaagaaaaaggaaaaaaggaaagaaagaaaaataaatgaaggagggaaggaaggaaagaaagaagggaaaaaagaaaaataaatgaaggagggaaagaaggaagaaaaaataaaagaaagagaaagaaggaaggaagggagggaggaagaaagaaaaaaagaaagaaagaaaaaaggaaggaagaaagaaagaactctaccataagcaaagctgtcctggcatatgtggcatctggcaggcagcaagtctagactg

SEQ ID NO: 549668 - DNA, 583 bp, Homo sapiens
tgaatgagtgaatgaatcaacccatgaatgggtggatgaaagaccagacaaataaacagtgaatggaagcagtagaaggaaggaaggaaggaaagaaaaaagaaaaagaaagaagggagaaagagagaaaaaagaaaagaaaaaagggaaggaagaaaataaaggaaaataaaaaaagaaagaaagggaaaatggaaagaaagaaaaataaaggaaggagggaaggaaggaaacaaagaaaggaaaaaaggaaagaaagaaaaataaagaaacgaaggagggaaggaaggaaagaatgaaagaaagagaaggaagaaagaaggaaagaaagaaaaaggaaaaaaggaaagaaagaaaaataaatgaaggagggaaggaaggaaagaaagaagggaaaaaagaaaaataaatgaaggagggaaagaaggaagaaaaaataaaagaaagagaaagaaggaaggaagggagggaggaagraagaaaaaaagaaagaaagaaaaaaggaaggaagaaagaaagaactctaccataagcaaagctgtcctggcatatgtggcatctggcaggcagcaagtctagactg

SEQ ID NO: 549669 - DNA, 643 bp, Homo sapiens
tccacatagtgtctctgcacttgatgcatgactctgcatttgatgcaagaagggaaatagaatgtcataccgttgtcataccattgaaatgcatttttcaagaccatcccgaccaagatggtgaaactctgtctctattaaaaatacaaaaattggccgggcgcggtggctcacgcctgtaatcccagcactttgggaggctgaggcgggcggatcatgaggtcaggagatggagaccatcctggctaacacggtgaaaccctgtctctactaaaaatataaaaaattagccgggcgtggtggcgggcgcctgtagtcccagctactcagagtctgaggcaggagaatggcatgaacccgggaggcggagcttgcagtgattcgagatcgtgccactgcactcctgcctggggggcagagcgagactccatctcaaaaacaaaaacaaaaacaaaaacaaaaacaaaaacaaaaacaaaacaacaattagccaggcatggtggcrcaaactatagtccccgctgaggcaggagaatcgcttgaacctgggaggtggaggttgcagtgagccaagatcacaccactgcactccagcatgggtgacagagagactttgtcacaaaaaaaaagaaagaaattcatt

SEQ ID NO: 549670 - DNA, 372 bp, Homo sapiens
gaattcattgtgatctcattctatttctttctttttataattcccctttatgattaacctaaaatgtacatagactaaaactaaattttgttgtacaattttctgagtttcgacaaaacctatgtagcattgtagccataatcaaggcaaacattaatgtataaccacaaaaattttctttatgctccttgatagccattttcttttctccctgagactctggcaaccacttatctgttttctgttataataaccttgacttcttaaaatgtcatataaatggaatrgttccctttgcagaattctgagttgggtttcttttatttagcaaaatgccactgaggctcaagcatattgctacataatttgttc

SEQ ID NO: 549671 - DNA, 589 bp, Homo sapiens
gtaatctttgggtacctggctatatttttatcagtataaattctgatttttcaaatatttcgatgtagacagggaaatcattcaaaactgtggattccattccagcagatgtagctaaaatgggggggcaggagaaaactgtggaatagggaaggttttttctaaggcttcattattgtgccagtctcaagttgaaaagaggctacatgattgtacattcaagtcttatgttttcctatatttgaaaaataaaaacatttataaaatatatgcaatgtttactgggtgcttttcctcgtattagtgttttaaagcaattgaagaaaataaatatttcagtataaaaaggagcaaatgtatatgaataagtacttaagagaaaaaaattttagtgacagctttaatggttgataattcggtacccttcagttcacccatttaaagtatacaattcattgatttttattatagtcacaaatgtgtacaactgttaccaaagtgaatttgataatttttttttwtcacctcataaagaaccctgtacccttggccaggcacatttgctcatgcctgtaatcccagcactttg

SEQ ID NO: 549672 - DNA, 618 bp, Homo sapiens
tattcatttataattgtggctatacctttctagtactttatatttaaagtaactttctgtgtacatgctgtatggagaacacagtcaccagattgtaaggtctttatgaacagagagttttttctcttctttggtctgtttgttcattgttgtcractgctgattgctgttgtttagggatgggggagataggataggagggaagtgtggatatacttataaaaggatatgagggaaccttgtggtggcattttttggtattgactgttgtggatacatgaactaacacatgtagaagtgtatccaactaaatacgtacacagacaaacacaaatgagtgcaactaaaaatggaaaaataaggttggcaaattctgtcaatgtcaataccttgtgatattatcctatagtttttgcaaaatatcattagagaaaattgggtaaagtgtacaagagatttctgtattatttcttaatttatttatatatagcttaattatttcttaagctacattgtagcaaaaaactacaatgatctcaatccaaattttaataaaaaatatagacataccaaaatgtgtactactcttgagatttccataaaaacaaagctaagaaa

SEQ ID NO: 549673 - DNA, 541 bp, Homo sapiens
tggggccagcagggctggctggctgctccgagtgtggggcccaccaagcccacgcccacccggaactccagctggctcgcaagcgccgcacgcagcctccgttcccgctcctgcctctccctccacacctccctgcaagctgagggagtgggctccggccttggccagcccagaaaggggctcccacagtgcagtgsggggctgaagggctcctcaaatgccaccaaagtgggagcccaggcaggggaggtgccgagagcaagcgagggctctgaggactgccggcatgctgtcacctctcaactatatgctaaatgttggaatagaactttgagaaatgtcatctttcccaggcaaataaaaaattatagagtaggagagttattctttttggaggtggacaaagggactagctgatttctggaggtccctaccaatccaatgattctgagtttgatttaatatattccttgtgtggggaaatagtatcatttttttcttttttattaaaattccgaagaacattacattcttagtaatg

SEQ ID NO: 549674 - DNA, 583 bp, Homo sapiens
tcttaaaatcctcacatgcaagatgccacactctcctggtttctattgcctctcgcgatcctgctttgcagcctccgttgctacctcttttttctctgcctgtcttttaagtatcagtggtcctcaggattgtcctgagccctcttacctccttctccacagtctccctgagtgatctccttcaccttcagagtgaggacagcaaggattcaagaagtggagcgatctttccagggtcacattatgatagcaccagggtaagggtcagaattagttcattctgtttaatrtaagtctgttgtgaaagacgtggtgctgagccttggggatacagacgcaaataggatgctatccttctcccaccaacttttgcaacctgcaagccctccctctcttcttccatttcatctggcccccgcctgtttagcgcctacttatccttcacatgtcagtttagatgtcgcttcatctgggaaacttttctacctacttctaagacttccttctctcaggtccttcataccttttacctactctcttgcatttctcacattgtcttctaataacaattaaacatactttt

SEQ ID NO: 549675 - DNA, 583 bp, Homo sapiens
tcttaaaatcctcacatgcaagatgccacactctcctggtttctattgcctctcgcgatcctgctttgcagcctccgttgctacctcttttttctctgcctgtcttttaagtatcagtggtcctcaggattgtcctgagccctcttacctccttctccacagtctccctgagtgatctccttcaccttcagagtgaggacagcaaggattcaagaagtggagcgatctttccagggtcacattatgatagcaccagggtaagggtcagaattagttcattctgtttaatgtaagtctgttgtgmaagacgtggtgctgagccttggggatacagacgcaaataggatgctatccttctcccaccaacttttgcaacctgcaagccctccctctcttcttccatttcatctggcccccgcctgtttagcgcctacttatccttcacatgtcagtttagatgtcgcttcatctgggaaacttttctacctacttctaagacttccttctctcaggtccttcataccttttacctactctcttgcatttctcacattgtcttctaataacaattaaacatactttt

SEQ ID NO: 549676 - DNA, 583 bp, Homo sapiens
tcttaaaatcctcacatgcaagatgccacactctcctggtttctattgcctctcgcgatcctgctttgcagcctccgttgctacctcttttttctctgcctgtcttttaagtatcagtggtcctcaggattgtcctgagccctcttacctccttctccacagtctccctgagtgatctccttcaccttcagagtgaggacagcaaggattcaagaagtggagcgatctttccagggtcacattatgatagcaccagggtaagggtcagaattagttcattctgtttaatgtaagtctgttgtgawagacgtggtgctgagccttggggatacagacgcaaataggatgctatccttctcccaccaacttttgcaacctgcaagccctccctctcttcttccatttcatctggcccccgcctgtttagcgcctacttatccttcacatgtcagtttagatgtcgcttcatctgggaaacttttctacctacttctaagacttccttctctcaggtccttcataccttttacctactctcttgcatttctcacattgtcttctaataacaattaaacatactttt

SEQ ID NO: 549677 - DNA, 583 bp, Homo sapiens
tcttaaaatcctcacatgcaagatgccacactctcctggtttctattgcctctcgcgatcctgctttgcagcctccgttgctacctcttttttctctgcctgtcttttaagtatcagtggtcctcaggattgtcctgagccctcttacctccttctccacagtctccctgagtgatctccttcaccttcagagtgaggacagcaaggattcaagaagtggagcgatctttccagggtcacattatgatagcaccagggtaagggtcagaattagttcattctgtttaatgtaagtctgttgtgaaagacgtggtgctgagccttggggatacagacgcaaataggatgctatccttctcccaccaamttttgcaacctgcaagccctccctctcttcttccatttcatctggcccccgcctgtttagcgcctacttatccttcacatgtcagtttagatgtcgcttcatctgggaaacttttctacctacttctaagacttccttctctcaggtccttcataccttttacctactctcttgcatttctcacattgtcttctaataacaattaaacatactttt

SEQ ID NO: 549678 - DNA, 793 bp, Homo sapiens
catctgctaatcgttggttgtagaacactaaaaatctgactggaatttttaaccagatgaggggagcctgttgactgcaaagatctggtcatgttttccagagaagatgtaatgttttgcctcactacaaagcttctgaaacagaatggggggagaggactggaggtacaagtggggtctccactttccacagacatagcttggtttaactctcatcttttcagtgtggcaccctgccttcgatcatgcctgccaggctcctcctggtccacaagcctttttccctgtccagataataagcttagttgccttcctcagtaggaaaggagaggttttcctacaagtatggagtaggaaagaggaactaggaatcttaacacttcttaaccaactctcaacccttccttcttattggaaagcctcacttctggaaattcctgaaccgaataccctcctcccaattccagagtcttaaggattttctcatgtaaaccaggttggttcttccctttccccactgttgtttgataattgagcctttttgtgtctgccaagtcagttacttcctatccattcattttccagtttcagaaattgtgttcctttggactgtagttcttcccatcagtatcaactcagatctgggcaagagggggcctagctctgagctkctcccatcatatagaggcaaagatctcttgaagcaatgggtatgcccacctagagtctggaccatcccttttgggatcacattctgtttataaaagattcccaaattccctttccaagcagt

SEQ ID NO: 549679 - DNA, 616 bp, Homo sapiens
ttttataaaggaaggtagcacattccttctgttttatgcatctttaccatggaaaccaaagaaacagctaccagtcacattcatcccttcatcatttccacccctcrcttacctccaaccctggctaccctcccacccccaccccctatacacacacatagacacctaggagagggaaagggacagactgcctctaggggactggaaagaagggaaggcaaaggcctgggcctttcctcttacatcatttcctggattaacatttttcaaggcccacagacagtgctgttatgttctggagacacccaatctgaaaacattgactgagatattaagttatttccgaaggatcaaataggaaaacaattggaaaggagtgaaaagatactgaaaaccacagcgctctccatagatgtaagggattatcaaccttttccttatttattttctttctttctttttttttttgagacagagtctcactctgtcacccaggctggagtgcagtagcgtggcatgatctcagctcactgcaacctccgcctcccgggttcaagccattctcttgccccagcctcccaagtagctgggattacaggcaccaccatcatgccct

SEQ ID NO: 549680 - DNA, 616 bp, Homo sapiens
ttttataaaggaaggtagcacattccttctgttttatgcatctttaccatggaaaccaaagaaacagctaccagtcacattcatcccttcatcatttccacccctcacttacctccaaccctggctaccctcccacccccaccccctatacacacacatagacacctaggagagggaaagggacagacygcctctaggggactggaaagaagggaaggcaaaggcctgggcctttcctcttacatcatttcctggattaacatttttcaaggcccacagacagtgctgttatgttctggagacacccaatctgaaaacattgactgagatattaagttatttccgaaggatcaaataggaaaacaattggaaaggagtgaaaagatactgaaaaccacagcgctctccatagatgtaagggattatcaaccttttccttatttattttctttctttctttttttttttgagacagagtctcactctgtcacccaggctggagtgcagtagcgtggcatgatctcagctcactgcaacctccgcctcccgggttcaagccattctcttgccccagcctcccaagtagctgggattacaggcaccaccatcatgccct

SEQ ID NO: 549681 - DNA, 616 bp, Homo sapiens
ttttataaaggaaggtagcacattccttctgttttatgcatctttaccatggaaaccaaagaaacagctaccagtcacattcatcccttcatcatttccacccctcacttacctccaaccctggctaccctcccacccccaccccctatacacacacatagacacctaggagagggaaagggacagactgcctcyaggggactggaaagaagggaaggcaaaggcctgggcctttcctcttacatcatttcctggattaacatttttcaaggcccacagacagtgctgttatgttctggagacacccaatctgaaaacattgactgagatattaagttatttccgaaggatcaaataggaaaacaattggaaaggagtgaaaagatactgaaaaccacagcgctctccatagatgtaagggattatcaaccttttccttatttattttctttctttctttttttttttgagacagagtctcactctgtcacccaggctggagtgcagtagcgtggcatgatctcagctcactgcaacctccgcctcccgggttcaagccattctcttgccccagcctcccaagtagctgggattacaggcaccaccatcatgccct

SEQ ID NO: 549682 - DNA, 1470 bp, Homo sapiens
attttttaaagttgtgaatttccaagctctcaccatctccttrgatcttcacaagtcatgacatatataccaggttgaccaccattttacaaataagaaaattctgagagcagagaatttaaatcctgtctttattcagctcttaccataatcccccattttccatcttgagtatagtgtctttccatacctttgttgattattgagttttccttacatttagatgacaaatacgactccaaaatacacatttatcttgagtccttcgctgaccaacatttgaacctacagtatttagagaaatcctaaaacagacatttgcactaattccagaagctgaaggggctcaaaactccgggctctcagctctccagtggctagagatcatgtgactaacctcagccaatcccatgctctgtctggaggtgttcagtgtgcaaagaaacattgcagacttcagatacatttggtggcagcagccacagaattcagcgtccaatgccagcagtctgttattgcttgtaatagtgtccatgaatatgaatcaaaccagactttccctttggtataattttggccacagtttggctgcctaatttccctagatgcctgcttatttattcaggcctggttgtccagccttcttatcaattctacggactccccaatatccatcaacaaattccattgctgcataaccacgaaagacatctgttcttcataaacaagaaatgcggccatcgcaaccacatgataaataaaagaggcggtattcttcccagatgtttcagggcatcttctcttaaaccttcagagggtcctgagctgctcatttccgggacttgctgagccctgacagtaaacagacttttaacaaagactcgctaaatgttcagattttttttttttaaattaataagagaatggtccattttcttttcaaatcttaacacagagctggcaggatgtcccccatagagttcagagtcagaagttgtttttgatgcgccgacattccgtttgtgatagtcttgcctctatccggcacttcttaggcctcatctccttggcctggtttgtgcagtggttaaaaggggttgatttaatccagaccacctgagtttaaatctaactttccagctttctggctacacaaccttgggcaaattgctcagtatctctgtgtctgtttcttcatctataaaatatatagattttgataatacctacatcctaaggctatgaaaatggttaaatgagttaattcatataaagcatgtagaacagtgcctggctggtagtaaatacactgtaaatgtcgtctattaacatattatcctcacctctgatgcatacttgctcacttaccttttcttttctcaaaaccacctctcataaaataatctgaaattccttattgatctcattcaaaatctgtttctctcacaggcgtatcctcaaatgaagcct

SEQ ID NO: 549683 - DNA, 1470 bp, Homo sapiens
attttttaaagttgtgaatttccaagctctcaccatctccttagatcttcacaagtcatgasatatataccaggttgaccaccattttacaaataagaaaattctgagagcagagaatttaaatcctgtctttattcagctcttaccataatcccccattttccatcttgagtatagtgtctttccatacctttgttgattattgagttttccttacatttagatgacaaatacgactccaaaatacacatttatcttgagtccttcgctgaccaacatttgaacctacagtatttagagaaatcctaaaacagacatttgcactaattccagaagctgaaggggctcaaaactccgggctctcagctctccagtggctagagatcatgtgactaacctcagccaatcccatgctctgtctggaggtgttcagtgtgcaaagaaacattgcagacttcagatacatttggtggcagcagccacagaattcagcgtccaatgccagcagtctgttattgcttgtaatagtgtccatgaatatgaatcaaaccagactttccctttggtataattttggccacagtttggctgcctaatttccctagatgcctgcttatttattcaggcctggttgtccagccttcttatcaattctacggactccccaatatccatcaacaaattccattgctgcataaccacgaaagacatctgttcttcataaacaagaaatgcggccatcgcaaccacatgataaataaaagaggcggtattcttcccagatgtttcagggcatcttctcttaaaccttcagagggtcctgagctgctcatttccgggacttgctgagccctgacagtaaacagacttttaacaaagactcgctaaatgttcagattttttttttttaaattaataagagaatggtccattttcttttcaaatcttaacacagagctggcaggatgtcccccatagagttcagagtcagaagttgtttttgatgcgccgacattccgtttgtgatagtcttgcctctatccggcacttcttaggcctcatctccttggcctggtttgtgcagtggttaaaaggggttgatttaatccagaccacctgagtttaaatctaactttccagctttctggctacacaaccttgggcaaattgctcagtatctctgtgtctgtttcttcatctataaaatatatagattttgataatacctacatcctaaggctatgaaaatggttaaatgagttaattcatataaagcatgtagaacagtgcctggctggtagtaaatacactgtaaatgtcgtctattaacatattatcctcacctctgatgcatacttgctcacttaccttttcttttctcaaaaccacctctcataaaataatctgaaattccttattgatctcattcaaaatctgtttctctcacaggcgtatcctcaaatgaagcct

SEQ ID NO: 549684 - DNA, 1470 bp, Homo sapiens
attttttaaagttgtgaatttccaagctctcaccatctccttagatcttcacaagtcatgacatatataccaggttgaccaccattttacaaataagaaaattctgagagcagagaatttaaatcctgtctttattcagctcttaccataatcccccattttccatcttgagtatagtgtctttccatacctttgttgattattgagttttccttacatttagatgacaaatacgactccaaaatacacatttatcttgagtccttcgctgaccaacatttgaacctacagtatttagagaaatcctaaaacagacatttgcactaattccagaagctgaaggggctcaaaactccgggctctcagctctccagtggctagagatcatgtgactaacctcagccaatcccatgctctgtctggaggtgttcagtgtgcaaagaaacattgcagacttcagatacatttggtggcagcagccacagaattcagcgtccaatgccagcagtctgttattgcttgtaatagtgtccatgaatatgaatcaaaccagactttccctttggtataattttggccacagtttggctgcctaatttccctagatgcctgcttatttattcaggcctggttgtccagccttcttatcaattctacggactccccaatatccatcaacaaattccattgctgcataaccacgaaagacatctgttcttcataaacaagaaatgcggccatcgcaaccacatgataaataaaagaggcggtattcttcccagatgtttcagggcatcttctcttaaaccttcagagggtcctgagctgctcatttccgggacttgctgagccctgacagtaaacagacttttaacaaagactcgctaaatgttcagattttttttttttaaattaataagagaatggtccattttcttttcaaatcttaacacagagctggcaggatgtcccccatagagttcagagtcagaagttgtttttgatgcgccgacattccgtttgtgatagtcttgcctctatccggcacttcttaggcctcatctccttggcctggtttgtgcagtggttaaaaggggttgatttaatccagaccacctgagtttaaatctaactttccagctttctggctacacaaccttgggcaaattgctcagtatctctgtgtctgtttcttcatctataaaatatayagattttgataatacctacatcctaaggctatgaaaatggttaaatgagttaattcatataaagcatgtagaacagtgcctggctggtagtaaatacactgtaaatgtcgtctattaacatattatcctcacctctgatgcatacttgctcacttaccttttcttttctcaaaaccacctctcataaaataatctgaaattccttattgatctcattcaaaatctgtttctctcacaggcgtatcctcaaatgaagcct

SEQ ID NO: 549685 - DNA, 1470 bp, Homo sapiens
attttttaaagttgtgaatttccaagctctcaccatctccttagatcttcacaagtcatgacatatataccaggttgaccaccattttacaaataagaaaattctgagagcagagaatttaaatcctgtctttattcagctcttaccataatcccccattttccatcttgagtatagtgtctttccatacctttgttgattattgagttttccttacatttagatgacaaatacgactccaaaatacacatttatcttgagtccttcgctgaccaacatttgaacctacagtatttagagaaatcctaaaacagacatttgcactaattccagaagctgaaggggctcaaaactccgggctctcagctctccagtggctagagatcatgtgactaacctcagccaatcccatgctctgtctggaggtgttcagtgtgcaaagaaacattgcagacttcagatacatttggtggcagcagccacagaattcagcgtccaatgccagcagtctgttattgcttgtaatagtgtccatgaatatgaatcaaaccagactttccctttggtataattttggccacagtttggctgcctaatttccctagatgcctgcttatttattcaggcctggttgtccagccttcttatcaattctacggactccccaatatccatcaacaaattccattgctgcataaccacgaaagacatctgttcttcataaacaagaaatgcggccatcgcaaccacatgataaataaaagaggcggtattcttcccagatgtttcagggcatcttctcttaaaccttcagagggtcctgagctgctcatttccgggacttgctgagccctgacagtaaacagacttttaacaaagactcgctaaatgttcagattttttttttttaaattaataagagaatggtccattttcttttcaaatcttaacacagagctggcaggatgtcccccatagagttcagagtcagaagttgtttttgatgcgccgacattccgtttgtgatagtcttgcctctatccggcacttcttaggcctcatctccttggcctggtttgtgcagtggttaaaaggggttgatttaatccagaccacctgagtttaaatctaactttccagctttctggctacacaaccttgggcaaattgctcagtatctctgtgtctgtttcttcatctataaaatatatagattttgataatacctacrtcctaaggctatgaaaatggttaaatgagttaattcatataaagcatgtagaacagtgcctggctggtagtaaatacactgtaaatgtcgtctattaacatattatcctcacctctgatgcatacttgctcacttaccttttcttttctcaaaaccacctctcataaaataatctgaaattccttattgatctcattcaaaatctgtttctctcacaggcgtatcctcaaatgaagcct

SEQ ID NO: 549686 - DNA, 1470 bp, Homo sapiens
attttttaaagttgtgaatttccaagctctcaccatctccttagatcttcacaagtcatgacatatataccaggttgaccaccattttacaaataagaaaattctgagagcagagaatttaaatcctgtctttattcagctcttaccataatcccccattttccatcttgagtatagtgtctttccatacctttgttgattattgagttttccttacatttagatgacaaatacgactccaaaatacacatttatcttgagtccttcgctgaccaacatttgaacctacagtatttagagaaatcctaaaacagacatttgcactaattccagaagctgaaggggctcaaaactccgggctctcagctctccagtggctagagatcatgtgactaacctcagccaatcccatgctctgtctggaggtgttcagtgtgcaaagaaacattgcagacttcagatacatttggtggcagcagccacagaattcagcgtccaatgccagcagtctgttattgcttgtaatagtgtccatgaatatgaatcaaaccagactttccctttggtataattttggccacagtttggctgcctaatttccctagatgcctgcttatttattcaggcctggttgtccagccttcttatcaattctacggactccccaatatccatcaacaaattccattgctgcataaccacgaaagacatctgttcttcataaacaagaaatgcggccatcgcaaccacatgataaataaaagaggcggtattcttcccagatgtttcagggcatcttctcttaaaccttcagagggtcctgagctgctcatttccgggacttgctgagccctgacagtaaacagacttttaacaaagactcgctaaatgttcagattttttttttttaaattaataagagaatggtccattttcttttcaaatcttaacacagagctggcaggatgtcccccatagagttcagagtcagaagttgtttttgatgcgccgacattccgtttgtgatagtcttgcctctatccggcacttcttaggcctcatctccttggcctggtttgtgcagtggttaaaaggggttgatttaatccagaccacctgagtttaaatctaactttccagctttctggctacacaaccttgggcaaattgctcagtatctctgtgtctgtttcttcatctataaaatatatagattttgataatacctacatcctaaggctatgaaaatggttaaatgagttaattcatataaagcatgtagaacagtgcctggctggtagtaaatacactgtaaatgtcgtctattaacatattatcctcacctctgatgcatacttgctcacttaccttttcttttctcaaaaccasctctcataaaataatctgaaattccttattgatctcattcaaaatctgtttctctcacaggcgtatcctcaaatgaagcct

SEQ ID NO: 549687 - DNA, 1470 bp, Homo sapiens
attttttaaagttgtgaatttccaagctctcaccatctccttagatcttcacaagtcatgacatatataccaggttgaccaccattttacaaataagaaaattctgagagcagagaatttaaatcctgtctttattcagctcttaccataatcccccattttccatcttgagtatagtgtctttccatacctttgttgattattgagttttccttacatttagatgacaaatacgactccaaaatacacatttatcttgagtccttcgctgaccaacatttgaacctacagtatttagagaaatcctaaaacagacatttgcactaattccagaagctgaaggggctcaaaactccgggctctcagctctccagtggctagagatcatgtgactaacctcagccaatcccatgctctgtctggaggtgttcagtgtgcaaagaaacattgcagacttcagatacatttggtggcagcagccacagaattcagcgtccaatgccagcagtctgttattgcttgtaatagtgtccatgaatatgaatcaaaccagactttccctttggtataattttggccacagtttggctgcctaatttccctagatgcctgcttatttattcaggcctggttgtccagccttcttatcaattctacggactccccaatatccatcaacaaattccattgctgcataaccacgaaagacatctgttcttcataaacaagaaatgcggccatcgcaaccacatgataaataaaagaggcggtattcttcccagatgtttcagggcatcttctcttaaaccttcagagggtcctgagctgctcatttccgggacttgctgagccctgacagtaaacagacttttaacaaagactcgctaaatgttcagattttttttttttaaattaataagagaatggtccattttcttttcaaatcttaacacagagctggcaggatgtcccccatagagttcagagtcagaagttgtttttgatgcgccgacattccgtttgtgatagtcttgcctctatccggcacttcttaggcctcatctccttggcctggtttgtgcagtggttaaaaggggttgatttaatccagaccacctgagtttaaatctaactttccagctttctggctacacaaccttgggcaaattgctcagtatctctgtgtctgtttcttcatctataaaatatatagattttgataatacctacatcctaaggctatgaaaatggttaaatgagttaattcatataaagcatgtagaacagtgcctggctggtagtaaatacactgtaaatgtcgtctattaacatattatcctcacctctgatgcatacttgctcacttaccttttcttttctcaaaaccacctctcataaaataatstgaaattccttattgatctcattcaaaatctgtttctctcacaggcgtatcctcaaatgaagcct

SEQ ID NO: 549688 - DNA, 894 bp, Homo sapiens
taacccttatctttctggttacttgtccacaatttactactctttgtttaagttagtacagaagccttcagccctctgtgtaagctgcttctctatgccttcatttttcttgtgagggctcccatgcacctgtcaatctgcgttcttttctcctgtcactctgtgtgatgtcagtcccagctggagataccagaagtggggaggaaaaaccaaccttccctccagtattgatggaagacaatgactacctgaagctccccatcatgatacttatgggtcaaagcaatgccactttctgctgaccagaagatactatttccaaagggcaagaaccttagagattatctagttcttctctgtgattttatggataaaagacttgaatagcaaagtgaccatctaaagctacacagtaacttggtggcagtgaagtggtaggattgttagttagggattctctctctctttttttttttttttttagaggagtctttctctgtcacccaggctgcagtgaagtggtgcaatctcagctcactgtaaccactgcctcccagattcatgtaattctggtgtctcagcctccaaagtagctgggactacacgtgtgcaccaccactcctggataatttgtatatttttagtagagaagaggtttccccatgttggtcaggctggtctcaaactcctgacytcaagtgatctgcctgccttgggctcccaaagtgctgaaattacaggcatgagccaccgtgcccagctgttacttaaggattctttccacccaggcactttacctttcttgaagcctgtaagaaaaataaaggtggctgaagtgggaggattacatgagtcaaggagttcgaggcctgcctgggcaacatagggagacac

SEQ ID NO: 549689 - DNA, 894 bp, Homo sapiens
taacccttatctttctggttacttgtccacaatttactactctttgtttaagttagtacagaagccttcagccctctgtgtaagctgcttctctatgccttcatttttcttgtgagggctcccatgcacctgtcaatctgcgttcttttctcctgtcactctgtgtgatgtcagtcccagctggagataccagaagtggggaggaaaaaccaaccttccctccagtattgatggaagacaatgactacctgaagctccccatcatgatacttatgggtcaaagcaatgccactttctgctgaccagaagatactatttccaaagggcaagaaccttagagattatctagttcttctctgtgattttatggataaaagacttgaatagcaaagtgaccatctaaagctacacagtaacttggtggcagtgaagtggtaggattgttagttagggattctctctctctttttttttttttttttagaggagtctttctctgtcacccaggctgcagtgaagtggtgcaatctcagctcactgtaaccactgcctcccagattcatgtaattctggtgtctcagcctccaaagtagctgggactacacgtgtgcaccaccactcctggataatttgtatatttttagtagagaagaggtttccccatgttggtcaggctggtctcaaactcctgacttcaagtgatctgcctgccttgggctcccaaagtgctgaaattacaggcatgagccmccgtgcccagctgttacttaaggattctttccacccaggcactttacctttcttgaagcctgtaagaaaaataaaggtggctgaagtgggaggattacatgagtcaaggagttcgaggcctgcctgggcaacatagggagacac

SEQ ID NO: 549690 - DNA, 625 bp, Homo sapiens
tatagacaagttccagtttatatagaaggtaatgaaattaaaataagaatctgtatcaactcaaaatctgtgcccttggaggtacacctctggcctcaggctggtacgctcaatactgcagccccttccttcacccttcttcactgcagaactcagaaagcatgacgggattccacatctccccaaacccacaagacctatagttctggcctacaccatatagaaagcagctttccctttctgaaacgcagaaccactaaggggaaggtttaggctccccttcccctcccttgttccttccccctccctgccaccggractgctgaagccagctcagccatcttgtgaccatgaggaagaaggcgacgtgctgagaatggtggagccgcctccctgggatcatcgccccagtgccagaccagcccaggtctcacctgcctccagacctcctagcaggggagatgagctcctaggagataaaccatggtgaaccggggtttctgttatctgtagtcaaagcccttgtacatcttgttaatcattaaattttaaagagagaaattattttgccaggggaaaatagcacagttcatttcagaataaagcttcaaagaaaataattctt

SEQ ID NO: 549691 - DNA, 1554 bp, Homo sapiens
gtttatatttacagagagccatttctgttgagtccttgctcacagctgaaactgtgtttttaatctccyaggcctagcattgtctcttcctgctgcttgatctgactgaaatctgggagggggaactaggctttttatatggtttggggataaccaagagtcatttttaaagacaggaataatcatgtaatactcatctctagttagtttccaatttatttctatcttgctaagagatgtaataaacctaacctttaggatccttatgttaaattgactaaagaagatagatctccttagaattataaagattaagtagttatgaaggtttgcaaaggagtctatgttgcactgatggtgcatcccctaagagcactcatgtatgaaattaaaaacagttttgccctaagcctcgtgaataaaaagatgtgtggctgaggattgctaggtgtggtgtttattctaaacacacccagagaggttttctgcctgtgggagttgtcaaatatttctcagccttattctcccttctgaatggaagctgtcataacctggaatgtttgtcggtttgggggctctaatgacaaggttctccagcttgttcttttaaggaaaaacttagactgataattcaattagtgtgttaggctgttattgttagcccaggagaacacatttgtgaaacatcaccaggatctattagagtaacagaaagcctgtttgggaggtctcttctagaaagagaaggttactttgggacggacttgtgaacacttgagaccctgtggaggctctttcctctccccttgaggaaatgtcattagcaaatctcagccactctttttcagcacctctgggtgctgccccacataggctttgtaagtacctttcaatagaggtaggacttggccttcaaatgcttttctggaagctttgccacatttgtttggaactctgatcttttcaatatcttgacaaatttctgtcacattgaaaatggatctgtaggctgggcacggtggctcacacctgtaatcccagcactttgagaggccgaggcgggtggatcacgaggtcgggagatcgagaccatcctggctaacatggtgaaaccctgtctctactaaaaatacaaaaaattagctgggcatggtggcaggcgcctgtagtcccagctactcgggaggctgaggcaggagaatggcatgaatccaggaggtggagcttgcagtgagctgagatcgcgccactgcactccagcctgggcgacagagactctgtctcaaaaaaaaaaaggatctgtactttgaagagcaattgttgttcgcccttttctttgttttaggaaggagtggaaaatccccaatggaataataagaagaatacacacactctaatgtgtatttgtttccattcatctcacagatactttatcagtcacctaacgtgtgctagggaggaggtggccaagatgaaacaaagtccctgactcaagaagcatcccatctggtcaagcatggggggacatagctgatagcctagcttcctcgggga

SEQ ID NO: 549692 - DNA, 509 bp, Homo sapiens
gcccagctggttggactctttccaccttttyccccaaacccaactttgtattgttttgcttgggttcagaagtcctgattttcacacccttttcaggcctggggatttaccaaaatttaaggcttaacaaaaattaaggccccccaaaagataaaagtgctactgccagtggcacctgtctctgattcaccttcatggcacggatgctggtggtcccctagcagccattctcccctctgcttgagtgacagcgccctggtttccagcctgcacgcagctgcctggctgtgaaagcacactttcaagactcccatgcagctaggggtggccaggtatcaacgtgctccagcagctgcccaggctgtgaggacaaggccgtcctcggtgctgtggggcgaaatgcctgcgtgtgtgcagcctggcaccaactcctgaggtgctggcaacattcctgctgtggtgaaggggctgcaaccctgttctaccattcatgaatcccatgcagcgtg

SEQ ID NO: 549693 - DNA, 509 bp, Homo sapiens
gcccagctggttggactctttccacctttttccccaaacccaactttgtattgttttgcttgggttcagaagtcctgattttcacacccttttcaggcctggggatttaccaaaatttaaggcttaacaaaaattaaggccccccaaaagataaaagtgctactgccagyggcacctgtctctgattcaccttcatggcacggatgctggtggtcccctagcagccattctcccctctgcttgagtgacagcgccctggtttccagcctgcacgcagctgcctggctgtgaaagcacactttcaagactcccatgcagctaggggtggccaggtatcaacgtgctccagcagctgcccaggctgtgaggacaaggccgtcctcggtgctgtggggcgaaatgcctgcgtgtgtgcagcctggcaccaactcctgaggtgctggcaacattcctgctgtggtgaaggggctgcaaccctgttctaccattcatgaatcccatgcagcgtg

SEQ ID NO: 549694 - DNA, 509 bp, Homo sapiens
gcccagctggttggactctttccacctttttccccaaacccaactttgtattgttttgcttgggttcagaagtcctgattttcacacccttttcaggcctggggatttaccaaaatttaaggcttaacaaaaattaaggccccccaaaagataaaagtgctactgccagtggcacctgtctctgattcaccttcatggcacggatgctggtggtcccctagcagccattctcccctctgcttgagtgacagcgccctggtttccagcctgcacgcagctgcctggctgtgaaagcacactttcaagactcccatgcagctaggggtggccaggtatcaacgtgctccagcagctgcccaggctgtgaggacaaggccgtcctcggtgctgtggggcgaaaygcctgcgtgtgtgcagcctggcaccaactcctgaggtgctggcaacattcctgctgtggtgaaggggctgcaaccctgttctaccattcatgaatcccatgcagcgtg

SEQ ID NO: 549695 - DNA, 672 bp, Homo sapiens
atctaacaaaattttaaatgtgcactgttctttgactagaaattacgtttttcagaattcatctcacagataatctcacatatatacactaagaatttaaaaggatatacatactgcattgttcactaacaatcaaaacataacttaaatgtccagcaataatgtttggttaaagaaatgataccaaagagatatgatggtatactatacaaccttaaaaaatgagtcagatttataagtaaaaaaagtgaggtgcaaaagagtatgtatgatatgcaactaactgtgtacaagaaaaayagatatgcctacacatgcttgtttgtgcacagattatctttggaagtataattctgagactgataacagtggtaaagagggagctaggggattggaaatgtcatggcagagagacttttaaaaaacaaacaaaaaatgtacacgtattgcctactctactgattaaactggaaggcaaatgatgcattgaattttttctccatctatagttggcctctactggaaaggccaaaaagggtcaaaggtatgtgaccaaaaatgcaaagggacagaaacatcaggagactggtaaaccaattgtgaataaataaacagattatacttgaaagtcattctccaaaacctagtatacattaataaataagcccttgc

SEQ ID NO: 549696 - DNA, 672 bp, Homo sapiens
atctaacaaaattttaaatgtgcactgttctttgactagaaattacgtttttcagaattcatctcacagataatctcacatatatacactaagaatttaaaaggatatacatactgcattgttcactaacaatcaaaacataacttaaatgtccagcaataatgtttggttaaagaaatgataccaaagagatatgatggtatactatacaaccttaaaaaatgagtcagatttataagtaaaaaaagtgaggtgcaaaagagtatgtatgatatgcaactaactgtgtacaagaaaaacagatatgcctacacatgcttgtttgtgcacagattatctttggaagtataattctgagactgataacagtggtaaagagggagctaggggattggaaatgtcatggcagagagacttttaaaaaacaaacaaaaaatgtacaygtattgcctactctactgattaaactggaaggcaaatgatgcattgaattttttctccatctatagttggcctctactggaaaggccaaaaagggtcaaaggtatgtgaccaaaaatgcaaagggacagaaacatcaggagactggtaaaccaattgtgaataaataaacagattatacttgaaagtcattctccaaaacctagtatacattaataaataagcccttgc

SEQ ID NO: 549697 - DNA, 672 bp, Homo sapiens
atctaacaaaattttaaatgtgcactgttctttgactagaaattacgtttttcagaattcatctcacagataatctcacatatatacactaagaatttaaaaggatatacatactgcattgttcactaacaatcaaaacataacttaaatgtccagcaataatgtttggttaaagaaatgataccaaagagatatgatggtatactatacaaccttaaaaaatgagtcagatttataagtaaaaaaagtgaggtgcaaaagagtatgtatgatatgcaactaactgtgtacaagaaaaacagatatgcctacacatgcttgtttgtgcacagattatctttggaagtataattctgagactgataacagtggtaaagagggagctaggggattggaaatgtcatggcagagagacttttaaaaaacaaacaaaaaatgtacacgtattgcctactctactgattaaactggaaggcaaatgatgcattgaattttttctccatctatagttggcctctactggaaaggccaaaaagggtcaaaggtatgtgaccaaaaatgcaaagggacagaaacatcaggaractggtaaaccaattgtgaataaataaacagattatacttgaaagtcattctccaaaacctagtatacattaataaataagcccttgc

SEQ ID NO: 549698 - DNA, 322 bp, Homo sapiens
cactgcactccagcctgggtgagactccatctcaaagaaaraaagaaggaaagaaataagaaagaaagaaagaaagaaagaaagaaagaaagaaagaaagaaagaaagaaagaaagaaagaaagaagggagggatggagggagggagggtagggtaggggaggggaggggtgtggagaggagaggagaagagaagagaagagaaatattctaaaaacatgcagtggtacatgaacgcaactttccaatttattcggaaacacactttatttcatctcttctaagacacacctctccataattccatctgagctctatttcca

SEQ ID NO: 549699 - DNA, 566 bp, Homo sapiens
accctccccctgccagcctccccaacctagccccatcaatacattacccatactctggggtctctgctcaatattgcttcattaataaaatcttttctgatctttcatgactgtttgtgatcaccctctccttgcaatatccacagctctttatttttgcctcgaccgtggtacttttcactttttgatatatacttagactatcattttcttgaaagtagaaattgagtcttatttattaagcatgccaatgaactgaatatagtaatagttatagagaacacttacatatgacttaggtccaggcatttttytaagatctcctacacatatcaactcaacctaaacaacaaaaatatgagacagatgtggtaggcagcctctaaaataatctactgtgatccctgcctcttggtattcacgtctgtctgcaatcatctcttcttgagtgaggactgaacacaatggcttatgatatggcaaaataaatgagataccactttagaggttcaaagagactgtgagcacaggtgcagtgactcatgcctgtaattccagccctttgg

SEQ ID NO: 549700 - DNA, 566 bp, Homo sapiens
accctccccctgccagcctccccaacctagccccatcaatacattacccatactctggggtctctgctcaatattgcttcattaataaaatcttttctgatctttcatgactgtttgtgatcaccctctccttgcaatatccacagctctttatttttgcctcgaccgtggtacttttcactttttgatatatacttagactatcattttcttgaaagtagaaattgagtcttatttattaagcatgccaatgaactgaatatagtaatagttatagagaacacttacatatgacttaggtccaggcatttttctaagatctcctacacatatcaactcaacctaaacaacaaaaatatgagacagatgtggtaggcagcctctaaaataatctactgtgatccctgcctcttggtattcacgtctgtctgcaatcatctcttcttgagtgaggactgaacacaatggcttatgatatggcaaaataaatgagataccactttagaggttcaaagagactgtgagcacaggtgcagtgactcaygcctgtaattccagccctttgg

SEQ ID NO: 549701 - DNA, 1382 bp, Homo sapiens
  misc_feature 726: n = A,T,C or G
cctctaatactgagacaataagtcaacattttgttgccacatgtaatagcaaacttcaaaacaaacctagaaaggtgataaagtgtcacacattttctgattactcactctttacaaaagttttattctcttacaaatgttaaatgttattcaatttatttatggttaaaatttttcaataagattcttgctcaatatcattcatctttgtakttggagcagtgcatgcaaaagcacacagatgcatatataaatgcaaagtgtataccaaaatatatgcatgcataaaagtgtgtctcataaatatgtaagcatgcatgtatagcatgatgtacatagtatttctatgcgtgtgtgtataaatgcatgtgcatatatggatgtacacatgtataaaggtaatgcatgtatcacacagaaatatatgcattgtatatgtgaaatatataccatattcagttgatcattatttgcatattctgtggttgcattctggatcacctactcattaatatttctttgtcaccccaaaatcagtagttgcaacaccttcacagtcatttatggacattggcagagctttgaaaatttttgattgtctgacacacacattcccagctgaagtagaacaaggcatattctgccttctttattcagctctcgtcctgtgaaatagtgtcatttttgcagccacttaatgccacggtttttgcagcattttgtgcntttttggtgatgattttgctgtttaaaaaggccccccaatgtagggtgataatgctgggtattgttcctaagagcaagaaggctgtgatgtccctaaggagataaaatgtgttagagaagcttcactcaggcaagtgttatagtgctgttttctatgagttcagtgttaatgaatcaccaatatgtattaagtgaagtatcttttaacagaaacacacataaaacaaggttatttatttatcagttgatgaaaatgctgtgaccagacttgcaggaatctaaccctgtatttaccctgggagcaacagttcagtattcgttaatacagtgtttataagactttatagaatataactgccacgaataatgagaacagactgtacacacactgggtactataattatacatacacatacatacacaggcaataattttagtaagtgaacgttgtttaccataaccccaatttgttttaacagctataaatggaacagcagtggtcatggatgataaagatcaattatttcacccaattccaggtaagaacaaaatatttcaattgactgggtgcagtggctaatgcctataatcccagcactttgggaggctgaggcaggtggatcgcttgagtccaggagttcgagaccagcctggg

SEQ ID NO: 549702 - DNA, 1382 bp, Homo sapiens
  misc_feature 726: n = A,T,C or G
cctctaatactgagacaataagtcaacattttgttgccacatgtaatagcaaacttcaaaacaaacctagaaaggtgataaagtgtcacacattttctgattactcactctttacaaaagttttattctcttacaaatgttaaatgttattcaatttatttatggttaaaatttttcaataagattcttgctcaatatcattcatctttgtatttggagcagtgcatgcaaaagcacacagatgcatatataaatgcaaagtgtataccaaaatatatgcatgcataaaagtgtgtctcataaatatgtaagcatgcatgtatagcatgatgtacatagtatttctatgcgtgtgtgtataaatgcatgtgcatatatggatgtacacatgtataaaggtaatgcatgtatcacacagaaatatatgcattgtatatgtgaaatatataccatattcagttgatcattatttgcatattctgtggttgcattctggatcacctactcattaatatttctttgtcaccccaaaatcagtagttgcaacaccttcacagtcatttatggacattggcagagctttgaaaatttttgattgtctgacacacacattcccagctgaagtagaacaaggcatattctgccttctttattcagctctcgtcctgtgaaatagtgtcatttttgcagccacttaatgccacggtttttgcagcattttgtgcntttttggtgatgattttgctgtttaaaaaggccccccaatgtagggtgataatgctgggtattgttcctaagagcaagaaggctgtgatgtccctaaggagataaaatgtgttagagaagcttcactcaggcaagtgttatagtgctgttttctatgagttcagtgttaatgaatcaccaatatgtattaagtgaagtatcttttaacagaaacacacataaaacaaggttatttatttatcagttgatgaaaatgctgtgaccagacttgcaggaatctaaccctgtatttaccctgggagcaacagttcagtattcgttaatacagtgtttataagactttatagaatataactgccacgaataatgagaacagamtgtacacacactgggtactataattatacatacacatacatacacaggcaataattttagtaagtgaacgttgtttaccataaccccaatttgttttaacagctataaatggaacagcagtggtcatggatgataaagatcaattatttcacccaattccaggtaagaacaaaatatttcaattgactgggtgcagtggctaatgcctataatcccagcactttgggaggctgaggcaggtggatcgcttgagtccaggagttcgagaccagcctggg

SEQ ID NO: 549703 - DNA, 1382 bp, Homo sapiens
  misc_feature 726: n = A,T,C or G
cctctaatactgagacaataagtcaacattttgttgccacatgtaatagcaaacttcaaaacaaacctagaaaggtgataaagtgtcacacattttctgattactcactctttacaaaagttttattctcttacaaatgttaaatgttattcaatttatttatggttaaaatttttcaataagattcttgctcaatatcattcatctttgtatttggagcagtgcatgcaaaagcacacagatgcatatataaatgcaaagtgtataccaaaatatatgcatgcataaaagtgtgtctcataaatatgtaagcatgcatgtatagcatgatgtacatagtatttctatgcgtgtgtgtataaatgcatgtgcatatatggatgtacacatgtataaaggtaatgcatgtatcacacagaaatatatgcattgtatatgtgaaatatataccatattcagttgatcattatttgcatattctgtggttgcattctggatcacctactcattaatatttctttgtcaccccaaaatcagtagttgcaacaccttcacagtcatttatggacattggcagagctttgaaaatttttgattgtctgacacacacattcccagctgaagtagaacaaggcatattctgccttctttattcagctctcgtcctgtgaaatagtgtcatttttgcagccacttaatgccacggtttttgcagcattttgtgcntttttggtgatgattttgctgtttaaaaaggccccccaatgtagggtgataatgctgggtattgttcctaagagcaagaaggctgtgatgtccctaaggagataaaatgtgttagagaagcttcactcaggcaagtgttatagtgctgttttctatgagttcagtgttaatgaatcaccaatatgtattaagtgaagtatcttttaacagaaacacacataaaacaaggttatttatttatcagttgatgaaaatgctgtgaccagacttgcaggaatctaaccctgtatttaccctgggagcaacagttcagtattcgttaatacagtgtttataagactttatagaatataactgccacgaataatgagaacagactgtacacacactgggtactrtaattatacatacacatacatacacaggcaataattttagtaagtgaacgttgtttaccataaccccaatttgttttaacagctataaatggaacagcagtggtcatggatgataaagatcaattatttcacccaattccaggtaagaacaaaatatttcaattgactgggtgcagtggctaatgcctataatcccagcactttgggaggctgaggcaggtggatcgcttgagtccaggagttcgagaccagcctggg

SEQ ID NO: 549704 - DNA, 1076 bp, Homo sapiens
cctgcatgacagagcaagattccatcacacacacacaaaagaaagccattggatgtaaatgcatggattatatctgtgttctccattctgttccattttttatgtgcctttctttatgccaatgtcatgctgttttgcttactacagctctgtaacatatttctaagtcaggtagtgtgatgctcctgttttctctttataccttcaagtctcaagacagtgggcatcgcacacaaaaattatggagaaaaggatcccaagactcccagggtccaacattagataacagagtgttggccatgaaccaacctcaaagatttccattgagtagaggacaagcaccctcatttcctcacatctctcctgtcccgtgttctaggaaacccttcaagtagttggccttcacccacagaaccaagctccaaatctggtgagtaaaggacccctcttatctctgcttttggaaacctggggaggtggaagccttggatgcaagtgttggctcaaacctcccagctctgtgaatgagggcctgtcttccaccatctctgaactccagacactccaacagtgaaagggatctagggccaccaaagggctcagcgaagtctctttacctttaatttcctgcaggtgagacctcctacaagctagaagaataattgccaatctgacatccttctcaggaaaaatgcagtgttttttctgcctgcattcctaactggaggataaattcccgggggcttgagagagggaagggaagggaacatctgatgagggtgggtgttttagagaagttccacttgccaaggaatgaattactgttggtcatcaggcaaccctggctgactcagcagagcaagagccttgccgtaacagagaacagagctcatgcacgcacacttcgactcactgactcattcagccacrgccccatgctcaggctgtgcagtgtggaagcttttcctattgttgccataacaaatttccacaagattcgtgggtgaaaacaaaacggttatttaattatcttacagtgctgtagctcaaagcatgacgtgcatgtcactgggcta

SEQ ID NO: 549705 - DNA, 1650 bp, Homo sapiens
cacactcactcccttagtctcatagcctgggaagagattttatttttttagcgcctttgttagcggctagttgtgggaagacaactcactacattttaggctaaaagtagacatttgtttcattcaccagcagccttttccatctgtcactgtgagaaaacttagtaggacttgacagtcacatgagttccatggatttcaccatccccttagtaacttttttcagacttaaacactttaagccaccatttctttctccccatccccctactttttccgtctcctttaatcttggattaatattatacatgaaggaaccaagcattaatctctctttcaccataggtggtgagaacataatttctttttataaatttttcaaagtggaagataaggaaaaacactaacagtataattaaagataaaatagaagaagactgaaataaatttgaattcttcggagatggggcacctgygaagcttttcattatggtctaatttctgacagtcacagataagggaggcccactcctcttttccatttctgggatgtgactttagaaagagctgtaagatatttttttttttaattgagattcagggggtatatgtgcaggtttgttacatagatatattgcgtaatgctagagcttgggcttctattgaacccatcacccaagtactcaacaggtggtttttcaacccttgccctcctcccaacctcctcctttttgaagtgcccagtgtctgttgtttccatctgtaaaggatattttttctttttctgagacagagtctcactctgttgcccaggctggagtgcagtggcacaatctcggctcactgcaacctccatctcctgggttcaagcaattctcgtgcctcagcctcccgagtagttgagattacaggtgtgcaccaccacccctggctagtttttgtgtctttagtagagacggggtttcgccttattggccaggctggtcttggactcctgacctcaggggatccacccaccttggtcaccatgcctggcctccatctgtaaaggatttttaagagtgggagtctactaatctcaataggtatgagcagaacttgctgtcctggttcttttcccctgaaagaaaactgtggcttgtttttcaatttttaaaaaaataataatgagtctggtgtgtgaagaaagccaatatggggctggggtcttccctggatgacccttataagccaaaggtgggatacaagtggaagaggagacagggatcctagggttaggaggctgcggggaacagtggtgagaatggctaaagaacagaaagcaaaacgaaaaatcaaatagaaaaggtttcataagggcccaaagacctggatgtttacactaataaaattaattatgccattgtccatgtcagttgtttgaatatgggggctgaggggacagacacattttctgtaagattattctaagggtagcatgacctgaccacatacaatctattgtccaaactgttattattaataattatgcttacacaacagtcataaaccaagaatgtcccaagtaaactagaatgtaaagtttacttttacatttagaatttacctttagaatggctaggagttacttcagcagccaatccttttttt

SEQ ID NO: 549706 - DNA, 657 bp, Homo sapiens
ttgacatagtccccatctctccctgctatattacactcaggccacttaccgcatttacattattatctacctggcccttgtagacagttgattttacaatccttggagtggctggctgtttttgtgtttccagtggccaaagaaaccataaaaagcctaaaatataaacctacaccaagccctattcttcaccatccattgatggaagaaatagatgttcaaatatgaccactcatgcttttgtgtgccaaaagaaaccccaaagccacatgttgctaccttgtagtacttcttatttaaaatacaaatatagcacttcttatttaaatatatatatcctgctggttgaatcaattgcccctttatggaaaaggagctcctgaccaccaagccaaatttatggtctggaagcattactcggaggatctcccaaacctggagttgatcaagatgaaccaccatgcttgaacttggaataccttatcactttattttattttatttttgagacggagtctcactctgttgcccaggctggagtgcagtggcrcaatctcagctcactgcaagctctgcctcctaggtttaagcgatcgtcctgcctcagcctcccgagtagctgggactacaggcacctgccaccaagcccggataatt

SEQ ID NO: 549707 - DNA, 647 bp, Homo sapiens
agagatctgataaatatttagcatgttactggtcttattcaagtaccaataagtcaaatattttcacagtggaagcagggacactcagcttttgccctgtctcaaaaactacccattttcggttaaaaaacaaacaacttttgctatacccaagtcaaaacaaagtcagacatgtattcctcagctccagkttcttgagaggcctcgatcgataggtagagcacccaacactgtcctacagagcctagaaattaaactttctcagaagacaagggctgacgagagggtacatagtattaagaaattgaatatactctctgtatctcttgttagtacccaggtgaaacataggagacaaaacacatattacagaggtgtctcattttacacagtgggtatatttccaaaaagttgttgaagcaacctttttttaaatcaaattattttcccattgagtaaaactatgattcaggatatgaattttcttagttgctcgttagtcttcatttgccggaactcttaaatgggggtaaggtcctcagttcctgagggtctctaacaaagtgaatataaagtattgaaaacaaatactgaaaagatttctgtagatgatttttttggcaatgtgtctaacagtcttctctgat

SEQ ID NO: 549708 - DNA, 523 bp, Homo sapiens
ctgcagattgccagctttcatgttacttgccaaagacccatcttagcatcttgcatcttcttgcgttccttttcctagaggagaccctaagtggctggaggtgagagctcaaggggctgaaggtgtccaaggggaagaaccacagctctcctgctgtgctgagccagggtggtggttcagcgggacagaggcagccagacctggaagccagtagtggggytcccgctccagctggccacctgtgcaggggcccagctgcctgtggggacgtcactggccagctgaggcctttgtgagggtgtggagcttgagttggtaaggatggctgagctggtgtccctgtgggctcccatgtgagtccagggcccccaagggtgctcttgttgtcccaagaaacctcaccccttctctcctggttgcttttccttccccaccgcccactataggtttttcatcatcaaagagagctttctgctttactactctgagagcgaaaaaaagagctttgaaaccaataaatact

SEQ ID NO: 549709 - DNA, 528 bp, Homo sapiens
ccctgcactttgggaggccgaggcaggtgcattgcttgagctcaggagtttgagaccagcctgggcaacatggcaaaaccctgtctctacaaaaaatacaacaattagtcgggtgttgtggcatgaacctgtagtactagttacttgggagtctcaggtggaaggatggcttgagctcaggaggtagaagttgcagtgaaccaagatcacaccactgcactccagcctgggtgacaaagccagagcctatctctctctctcwcacacacacacacacacacatacatacacacacacttcatttgtgtcagagagtttggatggaatttaaatgtctttcttatatagcctgtcctgtatttatttttaagattgtcagtctgactgctattcttcatattggagaaaaaagaaaaataggaactgagaatcctacttttcttctgctgtttgttagcatagtttattgcctgcatgattaaataatacctgatgtccaagtagtggtcctaactcgtcactgctgtt

SEQ ID NO: 549710 - DNA, 528 bp, Homo sapiens
ccctgcactttgggaggccgaggcaggtgcattgcttgagctcaggagtttgagaccagcctgggcaacatggcaaaaccctgtctctacaaaaaatacaacaattagtcgggtgttgtggcatgaacctgtagtactagttacttgggagtctcaggtggaaggatggcttgagctcaggaggtagaagttgcagtgaaccaagatcacaccactgcactccagcctgggtgacaaagccagagcctatctctctctctcacacacacacacayacacacatacatacacacacacttcatttgtgtcagagagtttggatggaatttaaatgtctttcttatatagcctgtcctgtatttatttttaagattgtcagtctgactgctattcttcatattggagaaaaaagaaaaataggaactgagaatcctacttttcttctgctgtttgttagcatagtttattgcctgcatgattaaataatacctgatgtccaagtagtggtcctaactcgtcactgctgtt

SEQ ID NO: 549711 - DNA, 517 bp, Homo sapiens
gatacttagcaaatgatttgtttattacaaatagattatgttcaaaataagcayattgtattaaaatataaatattcctcaaaaaacttttttttcttggataaatttaaaagattgcagaatgtggcaggtgggtgttacatgtagtcttacagcctaagcaaagaaaacttaggaacagattttaaaaaatagattaagtgttttctaagctactgcttgcctacactagccagctgaaggctttaaataatttaatccctacaacaactgccagctccaactggaagccttaaacaaggactggattcaccgaggactccaacaggtgcagtctaatagtgattccctaaatctgctactgttctatgtttgtacatgtgtaggaccctatattcttaacttcaacagagcactaatcaaattaattcaagtgctttttgttttgtcccatcttccactatcatattatttaaggcattcttctatttttctctggaggaatacttagtgcaat

SEQ ID NO: 549712 - DNA, 668 bp, Homo sapiens
aagttatctttcaataatgacaactatactttcatatagataagaactaatacagctaaccaccagtaaacctttcactaaagcaagttttaaagaatgtaatttgaggaagggaaatgacagaaaaagttcttgattataaaagtgaaaaataataaaagaggttgctggtagattacatgtagattaatcaaatttttcaaataaaagaatgacaattttgtgatttattttaaagtttgttttgaagtggattgtttgttttataggtgttataagaattttgcatgattgaggcagaaagtcaagtttataatttgttaagaatgcatggtaaaacttcaagagtaaccattaaaataagagacatttcagtaatataaaaaggcaaggtatccaacagaatatattattggcacaaatatcaattaacaaaagctcaatgacaaaaaatatgtttttaaatatgcatttagaaattatgcatactctcctatgttactcataaatcaaagaatttataatgaaatattaaacatatatctgaacaagaatgatgatgtaagtaaaaatagatgggatgtaacagcggtagtatataragtaaaactactgactgtaaaggcttatataatagaacaagaatcagcaaatatttctgtaaagtg

SEQ ID NO: 549713 - DNA, 741 bp, Homo sapiens
ctgatgctggtgccacctgagatcacctggacccaagcctaggtcataccagggaaaagatgaacggagaaggggaggaggaaagctgaattcaactattttctcccaaagaaccgagttttaaactagaagtaattgagtaactttgacttgtcaaaattaaatttgctgtcaccaagagaaactgaggttcattttgagttcaattagagtttaaaaatagatgtgtttttgcacaagattagtgtgtgaaattcatccttgccacattacttatttacaaaacttacatactgattcatcatatcccccaaagtgatgtaaatacagcaattaattatttgtgtttttatcaaaaggcagcaaacaagaaatagaggagtccagactggttctaaacctttgctgcacawcatgagcatctggggagattttcaaaggtctagtaaccagatatacctcccagaccaactaaaccaagtgggatcaattaagtcaggatctggaggtaaaatcaggcatccataatttctaaaggcttccagatagttcccgtgtgcagccgggactgagaaccgtcacctgaaatgaaagactcatagctcatattttttttcccacaaaagatcaacctgagatatcaacctgaaagagattacctgggaactctcaaaagattgtgagcagaggggctttcagggtgatggagttaatctgtatggtactatcgtggtggataca

SEQ ID NO: 549714 - DNA, 741 bp, Homo sapiens
ctgatgctggtgccacctgagatcacctggacccaagcctaggtcataccagggaaaagatgaacggagaaggggaggaggaaagctgaattcaactattttctcccaaagaaccgagttttaaactagaagtaattgagtaactttgacttgtcaaaattaaatttgctgtcaccaagagaaactgaggttcattttgagttcaattagagtttaaaaatagatgtgtttttgcacaagattagtgtgtgaaattcatccttgccacattacttatttacaaaacttacatactgattcatcatatcccccaaagtgatgtaaatacagcaattaattatttgtgtttttatcaaaaggcagcaaacaagaaatagaggagtccagactggttctaaacctttgctgcacatcatgagcatctggggagattttcaaaggtctartaaccagatatacctcccagaccaactaaaccaagtgggatcaattaagtcaggatctggaggtaaaatcaggcatccataatttctaaaggcttccagatagttcccgtgtgcagccgggactgagaaccgtcacctgaaatgaaagactcatagctcatattttttttcccacaaaagatcaacctgagatatcaacctgaaagagattacctgggaactctcaaaagattgtgagcagaggggctttcagggtgatggagttaatctgtatggtactatcgtggtggataca

SEQ ID NO: 549715 - DNA, 741 bp, Homo sapiens
ctgatgctggtgccacctgagatcacctggacccaagcctaggtcataccagggaaaagatgaacggagaaggggaggaggaaagctgaattcaactattttctcccaaagaaccgagttttaaactagaagtaattgagtaactttgacttgtcaaaattaaatttgctgtcaccaagagaaactgaggttcattttgagttcaattagagtttaaaaatagatgtgtttttgcacaagattagtgtgtgaaattcatccttgccacattacttatttacaaaacttacatactgattcatcatatcccccaaagtgatgtaaatacagcaattaattatttgtgtttttatcaaaaggcagcaaacaagaaatagaggagtccagactggttctaaacctttgctgcacatcatgagcatctggggagattttcaaaggtctagtaaccagatatamctcccagaccaactaaaccaagtgggatcaattaagtcaggatctggaggtaaaatcaggcatccataatttctaaaggcttccagatagttcccgtgtgcagccgggactgagaaccgtcacctgaaatgaaagactcatagctcatattttttttcccacaaaagatcaacctgagatatcaacctgaaagagattacctgggaactctcaaaagattgtgagcagaggggctttcagggtgatggagttaatctgtatggtactatcgtggtggataca

SEQ ID NO: 549716 - DNA, 648 bp, Homo sapiens
ggaagtgaggagcccctctgcccggccaccaccccgtctgggaggtgtgcccaatagctcattgagaacgggccaggatgacaatggcggctttgtggaatagaaaggcgggaaaggtggggaaaagattgagagatcggatggttgccrtgtctgtgtggaaggaagtagacatgggagacttttcattttgttctgcactaagaaaaattcctctgccttgggatcctgttgatctgtgaccttacccccaaccctgtgctctctgaaacatgtgctgtgtccactcagagttaaatggattaagggcggtgcaagatgtgctttgttaaacagatgcttgaaggcagcatgctcgttaagagtcatcaccaatccctaatctcaagtaaccagggacacaaacactgcggaaggccgcagggtcctctgcctaggaaaaccagagacctttgttcacttgtttatctgctgaccttccctccactattgtcccatgaccctgccaaatccccctctgtgagaaacacccaagaattatcaataaataaataaataaataaataaataaataaataaataaaaaataaatgtaaaactagctgcaatatcaaattattacaatttatgtactgagatcaaacaatt

SEQ ID NO: 549717 - DNA, 648 bp, Homo sapiens
ggaagtgaggagcccctctgcccggccaccaccccgtctgggaggtgtgcccaatagctcattgagaacgggccaggatgacaatggcggctttgtggaatagaaaggcgggaaaggtggggaaaagattgagagatcggatggttgccgtgtctgtgtggaaggaagtagacatgggagacttttcattttgttctgcactaagaaaaattcctctgccttgggatcctgttgatctgtgaccttacccccaaccctgtgctctctgaaacatgtgctgtgtccactcagagttaaatggattaagggcggtgcaagatgtgctttgttaaacagatgcttgaaggcagcatgctcsttaagagtcatcaccaatccctaatctcaagtaaccagggacacaaacactgcggaaggccgcagggtcctctgcctaggaaaaccagagacctttgttcacttgtttatctgctgaccttccctccactattgtcccatgaccctgccaaatccccctctgtgagaaacacccaagaattatcaataaataaataaataaataaataaataaataaataaataaaaaataaatgtaaaactagctgcaatatcaaattattacaatttatgtactgagatcaaacaatt

SEQ ID NO: 549718 - DNA, 648 bp, Homo sapiens
ggaagtgaggagcccctctgcccggccaccaccccgtctgggaggtgtgcccaatagctcattgagaacgggccaggatgacaatggcggctttgtggaatagaaaggcgggaaaggtggggaaaagattgagagatcggatggttgccgtgtctgtgtggaaggaagtagacatgggagacttttcattttgttctgcactaagaaaaattcctctgccttgggatcctgttgatctgtgaccttacccccaaccctgtgctctctgaaacatgtgctgtgtccactcagagttaaatggattaagggcggtgcaagatgtgctttgttaaacagatgcttgaaggcagcatgctcgttaagagtcatcaccaatccctaatctcaagtaaccagggacacaaacactgcggaaggccgcagggtcctctgcctaggaaaaccagagacctttgttcacttgtttatctgctgaccttccctccactattgtcccatgaccctgccaaatccccstctgtgagaaacacccaagaattatcaataaataaataaataaataaataaataaataaataaataaaaaataaatgtaaaactagctgcaatatcaaattattacaatttatgtactgagatcaaacaatt

SEQ ID NO: 549719 - DNA, 1467 bp, Homo sapiens
ccatcataagttgtaacagtctaatgatatcttataagaattttcagtattgaggaaaaggatgcaaatgatttaccaatgataactgtctgggatatactgtgactttgagggaaactttctgttgctttttaatggctgattgtttaaaaatatggtacatttaagaactctgagagagtttaatatgttacccctccttaaaaatagaatctcagtatttaaaaccaatacatgatttttgggcaagaaattcagggtccacgtaaaaggctgactgttattgcaaaaacataatgttgcacagtgaaataaggtgactgaaagacattagagcatggcggactcacctcttagactaggctacatttgataaaggttgactgattttcttccctgctaaacgattgtctcatcactgaagcttcagcaaaacttaaaataaccatgttgagaaaacataaaaaatagaaccagtgtcacagtaaaatcaacagaggattcaatatgccatatgttcaatagctccaagggaatattttaattattatttcactttgtcttaaacacaacagttgattacaaatataaaataaacatttgtgaacaaaaaattaaccaagttaaatacatcattgttaacaagggtagatgccaccaaatggaaaatgtcttaattgccaacactcacccttatatttaatatgttcatgtggccatgtctctagtacttattttcatgcaattttatttctacttttttttttaacatttaaagggcttgaaatagaaatggagaacatctgtttcaaagaaataaattgttctttaaaatgtcatcaaaataatgtagaaagccaatccttttcctatttttaaagctgtaattttttttttaaaccactatgcatactggggtacttttatggaaagaaataaagaaaactgcatgtcttcattgtttaacaaggatatccatttccaagtaagttaactgatatacccatgccaaatgaacattcaaaatgtttagtttcattttataaactaatgtgtcttttctttagtcagtggaaccagargacatttataattaccaactaattatgatccattcactaatgtctgtcatcactgctgagctattgatcattcatattgaatggtaagtcaaattacagattgaaggcaaatttctgagactgtgatgttaataatcagctttggcttttaaaacctccaactgatattgactggatcatgtcttaccttgtatttatcactctgttctcctgttgagcctccaaaagaattaagccctaccaacatctttcttttcacccagtgggcctcagtttggacttacaaactcaagaaaaatgaaataatgaattttaattgttttatgcaactgtctgtagcaatttgttacagcagcagtaggaaactaacacactgataaaatat

SEQ ID NO: 549720 - DNA, 605 bp, Homo sapiens
aggcatgggttcagctgcctaaccagacggtaatttccaactgagctattataattgtcacagtaaaatgtctgtctgcatacracacaccaggatggggggaaaagccattgattttggtgttcagaaaagttctctgtggctcagagaagagacatttctggttggttttgctttatcatgtatatatatatatatatatatatatatatatatatatatatatatgcacaggggcagccatctcgcattgaaattgaacacgaaggcgaaaggctcaggggttcagttctcaatgtcctcagctctggggtccttcttttaaaaaaagagctcttcaaaactcccactcacaagctgcccccatgcccttggctttggacgttggtgggagtcacgctcatctatcagcctttgggaggtcagtaggaaatgatcggggagcttttgtgccaggtccgtgcacgtcggccatgaaaaggctccacggcccagatctctgcccacgcattctggtcatcaagggagtgggcggcactctcctttcccgtggaggagaaaaccaggccaggcctggggaggtggagaacttccccaggtacttg

SEQ ID NO: 549721 - DNA, 680 bp, Homo sapiens
ttatttctctctgcacctgcatccgaggcaggagcctgttcccggaacacccctcactcagctgcctctgcagtgctgctgyagaccccgcctgctggaacacccttccccccaccctcactgcactccccccacctcatccctgtttcacaccctttccttagtgctagcccctcccagcctttccctggaattccgctcctggctctgcccgccttcagtgcttgatctgggctgagctggggatatgaaacaccgtaataatgatgtgtgtgcatttcttgcttcccaactagcttgtatgtttcctgaaggcaagaactttgtcaggttcatctctgttcctcacagcaccctccacgtcgtaggggctaaagacaggtttgtgaaataatggtaacacaaggtcaggcaggtcaacagcttagtaatgtcagctcagcaatttgatcctgcagtgggcatcacctgcgtcagatgtggagcactgcggggaagtgctttatgttccataagcagcaagggacatctgagcacaggcctcagacttggccattttgatagcactaatggtgggttacatctcttgagcttggtaagagatttctaaatatcggagaaaagcatttagaaaccatcctgaggttggggccgggcgtggtggctcacacctctaatcc

SEQ ID NO: 549722 - DNA, 726 bp, Homo sapiens
atagtttatgctgaagagtacaggggaccaagagaccacccaaatgggttcatgagcccatcatgccacttctttgttggatcactttgggcacctcactaaatttttctgagctaggtcctctgcaccttgcttgtctatcatcaaagggtcactgtgagactataataatataagaggaaagaaatcgtgattattaaggcatatactgaaccacatacctccattggcaacattaaacttcactccaaactctccccctggtcctccagggcagtggctggctgttagaatgattccaccagctgccttgatcttcctgataatgcaggagaccgcaggtgtcaacaagatgccattctgtccaataatcagtcgtccaatctaaaccatccaaaaaaaaaaaaatcaatccagttgcttgggattaaaggcatttcaacaggaaagtgccccaggctctgttaacatacagccaatcacttgataaaagaaacagagtaggctttagattaggggaggcagggtagggggagcactgacattgtctctcctatctaatgtctctaagaccatttggtgcacctgcatctagtagycaattattaacctgtaaataggatatgcctcactgatcttcagtcgtttgaaacatctgcttctgataatcgaggggttagcttgaatcacacaagaagttcttagtttgctactgactcagaaact

SEQ ID NO: 549723 - DNA, 1517 bp, Homo sapiens
tttttggagtccaaggtgtccttgatttttcagtagtagaagtgcttctgtttctcatctgaacttgaccttctggattcattctaaatgctacttaggcagcaatctaaatgatggagattatagatattgataagtggtgacttttttttattccagaggaaaaaaaaaactagaagccatatttgtattggtaggttatttttatgattatccatcaaatagatggatcttatcaaatatatctactaatacttttctcttttattatgtatagaaaacctgcacttcatcaaattacttctgccagttttctatacatacagtaaacgatttcagaaattaactcactagaactctttgttaaaatttgtcatttatctattaaaattcttcagcttttgtcagacaatgtacttagctctgtaataagagtccctgaagatatgtgtgtgatttgtcaaaagagagacaaaaagtgtataaaactctaaaatgtcagcaatcaggagatttaacagactttagtaaatttacatagaatgaatagaaatctttgatattaataaacttagctccggggagtacaagaaaaggagcaaagaatgttaatttgaataccatttccacatcacttcttccaaaactaaaaattagtatggataaatgtgtgatagagtttaaataacataactgtaattatttatcaccaccccaaagtttcagagtgggaatgttttctctgaagtagaccaataaagtatatacattttatgtagtttattttctttaacacaaagactaatgttaaatgagacaaggcatataatgtattataagagtgtctggcaaagagtgaattttgccttttttcataaccattgaaatagaaagaggagaatcatgccatcagggagaagaatatttcctgactttaggaagcctgatcaatagccagtaacacacagcacagcaacaaccccaacaaatgatagtatttctgaagtaacacagatatacaaacacatgactttcttaagactcagatgttatgagagtaatcaattggaatggaataagtaggagacggtccctggagaaagtagatgttaagctacattttgaaggagagattggtggacataataagaactaatatgtacacataytggcaagactgagccaattgtgtgcaaggagaagccaataatttgattttactgaatcaaaaaaaaatacgttgtattagtttgctagagcccccataataaaataccacagactgggtggcttaaacaacaaaaaatgtattttttccacagttctggaggcagaagttcaaattcaaggtttggtttcctctgagggctctctccttggtttgtagatggctgcctccttgctgtctcctcgcatggtccttctcttgtgcgcctgcattcctgtatccctctctctctgtccgaatttcctcttcttacaaggacaccaatcagattgtattgattctcacccta

SEQ ID NO: 549724 - DNA, 579 bp, Homo sapiens
ccgcgggcgacaaaaccgtccctctggccacgggagagcatcgccttgccaaaatcaactcgcattttcatgtattcaaatgagaaagactgagaagggcgatttcccctgctgggcagtcgacagcgttggaaggaagaagtgccccctagggcctcgcggaaacgggaacaaacctccctcgaggcccccggaaccgatatggcgaccccgcccagacctgggtccccgcggccgcgcgcgtctcccgccgttgtggcccccgagttactgacttttgttcacaccggtcagcgcctgttggaggacgtgctcagccccagccggtccctcctcatccagccgatcccyctcctggggagcgcggtctctgctctgtgctgctgaaaggatcctcgggctttcccgctctactttaaaacccctagggctaggggcctaggggagggactggcaatgcacgcttcacacaaagaggtggaaaattagagggaaacgtgacacctcttaggtatccgttagagcagaaaggacctgagcagctgaggtcctactgcgtgccacagacttggcagggtg

SEQ ID NO: 549725 - DNA, 979 bp, Homo sapiens
cgtaggctaagtttaatttctaatgaaaatcaaaacagactctttaatctttttaaatagcagattttctctttcctraagtgcctcagattaatttcttaatttttgtgttcagaaaaaaaaaactagcatagctctattcaaactttatgcttctgttacaaaattgttcattattaagatcaccttgaagcaaagatatcttctcatgtcgtcttttaattacttgctactttgcctatctggttgtaatttatcttcaaaccataccccgattgctctgtagtaaattttggatttcttctcacatacagtcttttttttcttggtaaaattatcccattggccttcttaaacatagtaagcactttcaacctgttactatttacattggtttgatatctttcacttattttcttgctgtattgtaattaatgtcttctagatgttctaaataaaattgcacttgggtgatccagatccaatgcttatgttcatgaagaaatactatctttagagttgtttctaattctcacctaacctttccctatcttttgaccaggattcccaatactgagaccctcttacctaggacctagcctggattcacctgcccccttgtggtgttcctctctgagaagttaatttctgaaatttgggacagttaattaatttctgatatttggatttggcattacatagcctgagaagagaaacctcattacccttgtctagtaggctagagtcggaaaagttatcttcttttagccactggctaacatgaaaagatgaaaggtattttttcttattcagagcacaagaaggaacttgagcactataaagaaatgagaagtataaaataagtgacgatgcttaattttgtctagaatcaatattagtgacctgcagattgataaactaaagtgttacaaaaattctcatatagcaactaaatcaagtttattctttgtcagtgtct

SEQ ID NO: 549726 - DNA, 979 bp, Homo sapiens
cgtaggctaagtttaatttctaatgaaaatcaaaacagactctttaatctttttaaatagcagattttctctttcctaaagtgcctcagattaatttcttaattyttgtgttcagaaaaaaaaaactagcatagctctattcaaactttatgcttctgttacaaaattgttcattattaagatcaccttgaagcaaagatatcttctcatgtcgtcttttaattacttgctactttgcctatctggttgtaatttatcttcaaaccataccccgattgctctgtagtaaattttggatttcttctcacatacagtcttttttttcttggtaaaattatcccattggccttcttaaacatagtaagcactttcaacctgttactatttacattggtttgatatctttcacttattttcttgctgtattgtaattaatgtcttctagatgttctaaataaaattgcacttgggtgatccagatccaatgcttatgttcatgaagaaatactatctttagagttgtttctaattctcacctaacctttccctatcttttgaccaggattcccaatactgagaccctcttacctaggacctagcctggattcacctgcccccttgtggtgttcctctctgagaagttaatttctgaaatttgggacagttaattaatttctgatatttggatttggcattacatagcctgagaagagaaacctcattacccttgtctagtaggctagagtcggaaaagttatcttcttttagccactggctaacatgaaaagatgaaaggtattttttcttattcagagcacaagaaggaacttgagcactataaagaaatgagaagtataaaataagtgacgatgcttaattttgtctagaatcaatattagtgacctgcagattgataaactaaagtgttacaaaaattctcatatagcaactaaatcaagtttattctttgtcagtgtct

SEQ ID NO: 549727 - DNA, 497 bp, Homo sapiens
aatgctatgagagtagggcccaggaatttgtatttttgcaagctgctttagtaaaagaatatttgaggagtaatttatttgaagggttcctgaatctatgtatagttttaagctatattatttgtttgcaataataagtagcaggagtattattttctatttagagaaagaaaaagtgagagagagagatagatgatggagaagtagagagagaatgagagataaaggaagagacatttcctttttttgccctaaaaccacctgttttgaaattgaaaccatgtcatcctaaagtcctttaatttagtgagaaaagaagcagtgtggtagcaaggaacaaataaaatgcttatgctctttgacttaacaatctctctcttaagaatttgccttctgaaacaatyatagatgtccatccctgaaaactgcagactgtaaatggtcaagaataagactcattcaataaattacgttacggccatttagggaacattttg

SEQ ID NO: 549728 - DNA, 814 bp, Homo sapiens
ctctttcccgcatcacgtgtgtgtctcctacagactcttcggccaaggcttggtgtccgaatgcaactatgagcgctggcacaagcagcggagagtcatagacctggccttcagccggaggtgagtgtggccggaggctccgtggctcctgcctggccagaggcagtaggggctgccgaagtgtaggtgggccttggggagggaagtgtccacccaagggggcctccctcagctgaagggagagaggaaaaaggggaaagacagggtgttaatagtcaaaagggagagagagagagagacaggctgaccaagtggggatgaatgaggcccccacgcagtttgggaacatcaagggctgagtgcccacgatggccagaagcatgggggttcctgtcctccaagagctccccacatcagacctcatcactccttgtcagggcttcttcttttattcatttgagtttttatgttttggtgatatagttgtgctttgtataacgatgtttcggtcaacgatggaatgcatatgtgacagtggtcccgtaagattataatggagctgaaaattgctattgcctagtgatgctgtaaccatggtaatggcgtagtgcaatgtgttactcacatgtttgtggtggtgctggtgtaaacaaacctgctgcactgccagtcatgccaaagtctagcagatgcaattatggacagtacgtaatattgataaatgataattgactatgttactgatttatgtgtttactatacttttaaacattcttttagaatgggttccttctacttacagattttttmaaag

SEQ ID NO: 549729 - DNA, 631 bp, Homo sapiens
aaagtggtcagggtgggtctgagaagtggtggcttctggcagtggtggcagatgttgactgaatttctctcgctggaagaatttctatattggtgtgagtaggctggtcaccagaatcaggcacaagccctatgcctggcaataattcaaggaggaagatcctctagacatctccacacttcaccaagacactccactaagttacatgaggggaaggatgggaagtccacttaaatgggaaagaagagataggaggtaagaaaaaaaaaaatttcctgtttcttctcctctgtgtattctaaatcccttctctatctttccaaaatgtatttctagcatacctaggatatacatgtgtgtatgtaacctggtatgtgtttgtgtgcctgtgtatctgtgtgagttttaagcaacccccactgttggagctatgatgtatagagtcagttataaatgaaatatattagcaatgctttcagcacattataggaataagttagccaaagagtttgcaamagtctccggagggcatagaaaaatttaattgcctctccttgcctgtgcctggcttttggagaataacatcagctgctttttgagtaagaagcatgcctcacttcatgattctcca

SEQ ID NO: 549730 - DNA, 534 bp, Homo sapiens
tgcrgcgagactgaggaaattttcaatgcattgacttaataatttgggcattttccattgttatttccctccccattggtctccagttgctttccaaacccatcatcactgcattgcctttggaggatgttacagtgactaaaatgttttaattcccagatttgctatgtgtttgtatatgaccttaaagctaaggaattctcaggtgattctagtatctacatttgtaaatggcagtatctaggctgtaaatagcaggtaatggctattgcctgatgggtttttacaaagcaattattttgtaaatgatgtttggcttcttgggtcaaagaactacatcaattaaatcagaagtgaaaggttctgacataataccagttattactaggaaatagaagaacatgcctacaataagaaccatggagatcggagaacaaatacactcaattgagtgaaagtaacaaattattggaaaacacttttcaagtagaaaaaaatgacatgtatatgaacaacaatattcttactaatttt

SEQ ID NO: 549731 - DNA, 434 bp, Homo sapiens
aagtagctgggactacagacgcccgccaccacgcccggctaattttttgtatttttagtagagacggggtttcatcgtgttagccaggtggaatttgatgctttgtaacttaactaaggtttgaacggccactgcaggacgttagggatggaatccaggtgatctcccaggtcgtgcctgctcctcgggcctccctcactcacggtgccaccctgcagagatgctcacctgacagggtcatygccaggctgccactgccccctgggatgggctctgtccccttcaccctcgtggtccaggagtgctgcccttccctcacacttccgctgcaaccctgactctccagcaccccgcctctccagtgcacgccttcggtgttttcaggcacgcgagtcacggtctgcccggggctgctgtgaatgtcctggagctgg

SEQ ID NO: 549732 - DNA, 282 bp, Homo sapiens
ttgcaagttgtaatttatttcttttccatctataacctgggaatacaacaagactatcattataattatgtttataccaaatatctccagtaaaamctgctgaaaaaaaatttcttttttctagtttgttgatcttctgtctagtttttctagctattattaaaagtgggatagaagtcttcaactattatctctgaattgtctattgcacccttcaattctgttagtttttgcctcatgtattttgggactctgttctcaggtacaaatatgtttataatt

SEQ ID NO: 549733 - DNA, 609 bp, Homo sapiens
tcactttcccttttagaattattttactacatttcattatttacatgcttttcagttttcttcattccaatgcatctgtcttttgtaagatgtcataaatattcagaaaaaaatattaactgctttcacatctgggataaatacattactttgtttccyttctttccccacctccctgccccctcacaccaacatttaacactaaggcctatctgaaatttattggactatttggttatgacaaaaagtatattattctctttcttactgtttttacttcttagaactgctattctattggtcttgcaaacttcattaaataattgatcttttcttcaaagctctattgttcatttgtatgttttaaattaagttcactaaataatctaaatatggaatttctatttattttaatctgtctagttttcagtccaatatcatagaattttagtaacagtcacttgtaattgatattttaatttgttaaggccagtttaacttcatggcttctattcattaaaaaagcagtttttatattcttgattcttccttctagatcatttaactatcagattatagagtattttgtaaggacttttattcataatt

SEQ ID NO: 549734 - DNA, 566 bp, Homo sapiens
cagttgtagctaacatgcaattcccatgattgctctgagtcttcctccttccataagtgcatggggctatttgtacagactctttatctgggctgtttatatcagtttctttagatgtctgcgaatgcactgtggttgaggcactgggctattgctctgatggcagattccagagaggaggtccaatgcctggtggcctcagtggagtcatgactaccccaggaccactytgaccttgacccatgatttgatagtgatggcaatggcagtgaccatgatggtgatgatggaaaaacacaaaaaagcttatttgtgtctgtgtcaagcctgggctggggatgtgagtgctggtcgcattgttctataagggtcacaaggcacattccttgtccatgaggagcttgacatgtctctggtccgagtcactaaatactatcaaagctgccttctgagggtccccctactttcattccaggcttactccatgaaaacattcagatcgtgtgactcccttactttttaacccctctagcagcttcctttgcatttagatttgaggtctttat

SEQ ID NO: 549735 - DNA, 2819 bp, Homo sapiens
gggattacaggctcacgccaccgcacctggctaatttttgtagtttttagtagagatggagtttcaccatgttggccaggatggtcttcatcttttcacctcatgatccgcccgccttggtctctcaaagtgctgggattacaggaatgagccaccatgcctggcctgttctgaagttttataatgatgcatttgctggatcctaatgaaaaataaatgtgctggttgtgatttctttgaagcaatgaaatctgaagaataattaaaattataccacctgaaatattgtaatctaacaatatggattatgtagacctagtctgcctttaattataataatcaaccctacttgtttctaaatattagttttgtttgttccatgaggtccattaggagaaatgtatttaaaataatccaaaaatagagtgaaacttttcaacaataattatatactgtaattcgttaacattttaaaacaatatattatatcactaaatggtttgcattttgacaatatgctcctgtaggcttttgattcttttacaaaagctgtgaaagcaaatccagattttgcagaaagcttttatcagcgagggctttgtaaagtgaaactccacaaggatagctcgattctggattttaatcgtgcaattaccctcaatccaaaacattaccaggtatttaaacagatgtttttagtgagttggaaagtgttaagtttggtaaaactattaaatcttttatgtgccattgttattaattaccaacaatcagtttcttatacctacttttcacttaactttattttcataatccaaatagctgtatttcttcttaaactaaaagtattatttccatcagtgatattctgatatatataaacgtatctgtgaatgtgatatatgtaaatattaatgtggctattaataatttaaagtttatatactcattaattttacttactttttgttttgatgttacatagattcctgccttttaatagactatacaggcaacacaaaattcagtaggtgaagcttgattgcatcttgattttaggaatctgtgaaatttgaatctggtctaagtgttaaattattttaggaaatttctataagttatcttggatatataatggcagtgtggttatgtacgagaatgtctttttttcacaggagatgcatactggaggacttggggtaaagtattaccatatctacaacttgttttccaatagtgcagaaaaaaatagataaatatggcaaaatgttaataattattaactccaggtgataggtatttatcattctttcaattattctgtgtcctttgaaatttttttctaataaaagaaaaattttaaaaagactatattttaataccctttttgggaggcatagatttgttccaagtagcatatattttggtagaattggtgcttttactaaagcatccattcctgctttctctctctctctctgaataggcatatttaagccgagtagcattctatggtttaaaaggcaggtattccaaagcaatcttgaattgtaacaaggctattaaaatttaccctgaaagcgtacgtgcctatctctacagaggagttctgaaatactacaacaaggtagggccatttcctgcctggtttaccgaaattttagggtgggcagattctcttatgctaggcaggggactcacttactttttttctatgtggttgggaatcactatgatatgaagggcagaactacatagaaaactttacactttcccaattcatatttttttcacaaaataatggtatttatttttgacatttacattttaaataacatttattatttatttttattaagaatgtagcatatattcattgtagacagtttggaaaaatatggaagggaataaaggattattatctcaccatcaatgataattcctgggtgcatttagcatatttgtattcagtcttttattttcctcataatatatgatatatattttccaaaatttggactatggtatttatataacttgtgtggtgccctgctttttacacttaatctttgaagataatattttgctgactgcataatattccatgacaatttattttaaattactttattgttgaactttttgattgtttttaaaatttttactattatactatttaatatagttatatacaactgagaacaaaattgctgcttgggtttatgattggttcttaaacagaagttactgggttaaaaggtgtgactggcaccattgatatgtgatactgcactgaatactttatttctctctacttttcttttctgatctttctttgtagctattttatatgaaatattttgcaaataataccttaaagcaaaggtaagaccttgcattatgtgttaattctatgaaaattactatctayagaaatgggtgatataaggtatcagagaagaatcaaagaggaagcaaaagagaacgtgggtagaaaacatgacgattatgtgatatggtagtcagagtgacagaagcaagcaagcactggtgaatgtttgctgcattaatatgggtggctttattttattttacctagaagtatgattttctccttgccatataccaacattggtaataagatatttgcctaaattaaagttgttgatatatttaattttgtttgcaggtaagagaaactataatgataatttctaccaggagattttcttaattaactctgtgaaagattagcttcaatgtcttaatttcacagatgatacaaagaatggttaaatgagtgtttcaaaaactctgat

SEQ ID NO: 549736 - DNA, 2939 bp, Homo sapiens
caggaggctgaggtgggaggatcacttgagcctggaagttcaaggctgcaatgagctgtgttgtgccactgcatcctagcctgggtgacagaggggaaccctgtcaaaataaataaatgaataaatacaggaaatcttcaaaacctatttaagccactatggttgagttattaagcaaaattaccaaatacatcattgttctatgatatagtttctcaaccttggcactactgacattttgggacagacaattatttgtggcaagggctgtcctgtgcattgtaggatgcgcggcaacatgcctggcctctactcagggatgccagtggcacccccttctcagatgtaacaagcaaaactgtctccaggcattacgaaatgtctcctgtggaacacaattacctctggttaagaaacactggtgtatggggaaaaatgttccgaatgccaactagggaccctagaaatatatattctgtccctcaatgtcctcacccaagagtctcagagggcttcttttcctccttgttcttatgttttctgtctaaccttagccctgcatcagatacttcattttcctcctcccgtcagcttcctgggggagaaagggcaggaaaagcagcttcagggaagctgctttccaactggagcaagtcaaccccaaagacaggagaagtgggggacctgagtggtgttgccatcacaggcaaagtttgcctcttgattcattttgctaaggatccacacccccccagtcacactccacacagagccctgcggcgacatttactcatgcagtcatgggttcatgtgccccatcgcaggccatgaagaacgtggtttgtatcagcttactttctgctcttctggatgattgagggcagccacatgggatcctctggaggtgcccagcacttgcttcttggtcctatatcgaggcctgcttactgttaagagcaaaagagaccaagatgttggctgagcacggtggctcacaccagcaattccagcattttggaargttgaggggggtggatcacctgaagctgggagtttgagaccagcctgatcaacatggagaaaccccctctctactaaaaatacaaaattagctgggcatagtggcacatgcctgtaatcccagctgcttgggaggctgaggcaggagaatcgcttgaacccaggaggcggaggttgtggtgagctgagatcgagccactgcactccagcctgggccacagagcaagactccaccttcaaaagaaagagaccaagatgtgagctgagtggtgaagataaaatctggatgtggaactgtagtgatgcaaaggcagaggggagcaggggagaggctggaggtgaccactcaagacctttaggagacagaaaactgcacagaagactgtctgcccaaggcctagggcccagctttgcccagggaatcgaaacttagagtatgaagcaatgttataaagcaatttttttttagttgtgcaagtgtcaaatgctgtaaatgaaacaaaatcaggcaatgtgatagtgcctgtttgctgggaggatttccgggagaaggtggctatcactttacaatgaaaggtcagagaaggtatctccgaagaggtggcattgaggttgaaacaaaatgacaggaaggagccttccacacaaagactctggggagaggcagaggaaataatgagttcaaaggcatgaaggctaaatgagcgtggggcatgcaaggcagagaaacagcaggtaaacagtggggtaagagaaaaaggcaggccttggatcaagtagggagagacacattatagaaagagcaaatgatccttaccctgatgggctgtctcggctctttgcagtccctctcagtagcagacacccacctgtgcttgatagttttcaccctgtttcataacattgcacctactcagaaaccactgtctctttgtatctgtgatcacttagagtccatcagcttggtgctgactttcttctcttcatgtagacagctgtgttataaaagacccaaagggagagggacaaaacctaaaaaggctactttggggtatatatgagctttggaattacccatctccctgccaggaggtgaggagggaagagttcacagttggcgtgtcccttgagcaagagaagataactcgctcctgctggttctgcaaggtttcagcagtgatggttgttttgtagtagctctgaacttgccaagaaaaacacattgtttaaaacaagccattcattttgagaaaggctattgtgtaataatttctttttcttcaccccttcatccacaaccacgcagagaccatggtcatcaaaataataggtcttttttatttttacttaggggatcccaatttttctcctgtggctatgaacaagggaaaatatagcaaagggaatgctgattggtttattatgcaagtctgtagttgggatgactataaaacaatgaacattattttcataaactacatgaaaaccagtgtcttatattaagcttacataattacagctatgtcattctttatgttcccatgtcaatgttctctgcttcagatgcccctccaagaggacaggaattggacccactttgggtagccttgtacaatgcaacccagcacccagcaacgtcctgaagaggctgctgactgctctggtcgaagtggagcagggcccttcctccctccactggaaagggtgggcaagaagcatcagtgcttctggtatttgactcagtgagacctagatattgcagatctgccatcaaaaatatttgtaaagccgtttgcaccactattatccttctgctccttttaaaacctaacaggcaggcccaacttggaaacttccaagaatgaaacaccaccttcagaaaacgtggtaattgatagaagagtctggtgctactgcat

SEQ ID NO: 549737 - DNA, 2939 bp, Homo sapiens
caggaggctgaggtgggaggatcacttgagcctggaagttcaaggctgcaatgagctgtgttgtgccactgcatcctagcctgggtgacagaggggaaccctgtcaaaataaataaatgaataaatacaggaaatcttcaaaacctatttaagccactatggttgagttattaagcaaaattaccaaatacatcattgttctatgatatagtttctcaaccttggcactactgacattttgggacagacaattatttgtggcaagggctgtcctgtgcattgtaggatgcgcggcaacatgcctggcctctactcagggatgccagtggcacccccttctcagatgtaacaagcaaaactgtctccaggcattacgaaatgtctcctgtggaacacaattacctctggttaagaaacactggtgtatggggaaaaatgttccgaatgccaactagggaccctagaaatatatattctgtccctcaatgtcctcacccaagagtctcagagggcttcttttcctccttgttcttatgttttctgtctaaccttagccctgcatcagatacttcattttcctcctcccgtcagcttcctgggggagaaagggcaggaaaagcagcttcagggaagctgctttccaactggagcaagtcaaccccaaagacaggagaagtgggggacctgagtggtgttgccatcacaggcaaagtttgcctcttgattcattttgctaaggatccacacccccccagtcacactccacacagagccctgcggcgacatttactcatgcagtcatgggttcatgtgccccatcgcaggccatgaagaacgtggtttgtatcagcttactttctgctcttctggatgattgagggcagccacatgggatcctctggaggtgcccagcacttgcttcttggtcctatatcgaggcctgcttactgttaagagcaaaagagaccaagatgttggctgagcacggtggctcacaccagcaattccagcattttggaaagytgaggggggtggatcacctgaagctgggagtttgagaccagcctgatcaacatggagaaaccccctctctactaaaaatacaaaattagctgggcatagtggcacatgcctgtaatcccagctgcttgggaggctgaggcaggagaatcgcttgaacccaggaggcggaggttgtggtgagctgagatcgagccactgcactccagcctgggccacagagcaagactccaccttcaaaagaaagagaccaagatgtgagctgagtggtgaagataaaatctggatgtggaactgtagtgatgcaaaggcagaggggagcaggggagaggctggaggtgaccactcaagacctttaggagacagaaaactgcacagaagactgtctgcccaaggcctagggcccagctttgcccagggaatcgaaacttagagtatgaagcaatgttataaagcaatttttttttagttgtgcaagtgtcaaatgctgtaaatgaaacaaaatcaggcaatgtgatagtgcctgtttgctgggaggatttccgggagaaggtggctatcactttacaatgaaaggtcagagaaggtatctccgaagaggtggcattgaggttgaaacaaaatgacaggaaggagccttccacacaaagactctggggagaggcagaggaaataatgagttcaaaggcatgaaggctaaatgagcgtggggcatgcaaggcagagaaacagcaggtaaacagtggggtaagagaaaaaggcaggccttggatcaagtagggagagacacattatagaaagagcaaatgatccttaccctgatgggctgtctcggctctttgcagtccctctcagtagcagacacccacctgtgcttgatagttttcaccctgtttcataacattgcacctactcagaaaccactgtctctttgtatctgtgatcacttagagtccatcagcttggtgctgactttcttctcttcatgtagacagctgtgttataaaagacccaaagggagagggacaaaacctaaaaaggctactttggggtatatatgagctttggaattacccatctccctgccaggaggtgaggagggaagagttcacagttggcgtgtcccttgagcaagagaagataactcgctcctgctggttctgcaaggtttcagcagtgatggttgttttgtagtagctctgaacttgccaagaaaaacacattgtttaaaacaagccattcattttgagaaaggctattgtgtaataatttctttttcttcaccccttcatccacaaccacgcagagaccatggtcatcaaaataataggtcttttttatttttacttaggggatcccaatttttctcctgtggctatgaacaagggaaaatatagcaaagggaatgctgattggtttattatgcaagtctgtagttgggatgactataaaacaatgaacattattttcataaactacatgaaaaccagtgtcttatattaagcttacataattacagctatgtcattctttatgttcccatgtcaatgttctctgcttcagatgcccctccaagaggacaggaattggacccactttgggtagccttgtacaatgcaacccagcacccagcaacgtcctgaagaggctgctgactgctctggtcgaagtggagcagggcccttcctccctccactggaaagggtgggcaagaagcatcagtgcttctggtatttgactcagtgagacctagatattgcagatctgccatcaaaaatatttgtaaagccgtttgcaccactattatccttctgctccttttaaaacctaacaggcaggcccaacttggaaacttccaagaatgaaacaccaccttcagaaaacgtggtaattgatagaagagtctggtgctactgcat

SEQ ID NO: 549738 - DNA, 566 bp, Homo sapiens
gcactaaatgtgcttgttgctgctgaggtattgttgcttctaggcactctcagctgactaagcaaggaaatacgttaaatatatatgtgtatatacacatttccatcagtagcttgctatgtaaccgtctatatctgtattaagttaaacaagagttcatatggatgtctccaactctaacccatcacacacattctagtcycctccccttgcctcactgctgtgtaacctcccactccaatagtgggaaatctggctcctgccacctgccagccatttacttaattgttcagttacagtacatgtgtatagtgatttcagaatcattaacctgttccactatgggaaacaactttttggctgagtaaagtgcttccgtgcagttcctcttgcctttagtcttatagactccacttagttcaaagtcacttcggtcagcaccttttcccctcacccccttcagtgaggttgtttcgtacacttgtaagataattagactcttttgtcatattctgcattctgtcttgggattctttgacctcctaaatgatttttaaaaatttgca

SEQ ID NO: 549739 - DNA, 1317 bp, Homo sapiens
tacttggttatactaatttatttgagggtaccttcccctgtatcatttttacctccacttttgaaagaagcaaacaatactccttctgaaaaataaattttaattctacagctttctatgacaacttttttgttattcataccaaagatgaagctatkcccataccttattgattatatatgcaaagagttctctatcaggaaagtttcaacatgaaagatttcttcccactgaggagtctctccattacagaaggtcaactggtaaatgttattctgtttccactaataaccatttgatcctcttttagattttcattcactctagtgttaaatgaatctttgctgaaaattattaaatcaaaactataataccttaatagagaaaaatgaatgttatgaggcagtatctcaccatcaaagttgcagggacatgtcttttcaaagtgaaatatatagcttatctagttaacaaaagggcagcaaattcctttgcaggtctaaaattgagccagcaaagtggtggtttacaaacagatgccagtttcaattttcatgttagatgatcaaatatatattgagtctgcataggaaatgctgttatcacaggattcaacacacaatgtcgaattcctgcatagagaaatttcattttttcattacgttctgtacatgcaaacttcctagctagtgtggagaaaacctaggaaaaaaaaaagtttaaggtgaaccttgaaggatgagaatgaatgaagtacagacgattatgtaaggtttgaaggcatgacactgtatacaattactgagtaaggatggaacacatccacactagtgatgagaacaaatttatattttgagtgcagtacatccattcattcttgattccttcttagacattatttcctaaaattgagccacaggatggtcagaatggtcagatctgctaccacagggaactgggacttttgtttaataatacatactccacaaacatgcacaacctcttctcctcttttcccccagagtagctgattctactacagtgattcatatgacctggatgggtaaaggggtatatgcaatcaactgagttcattagaataagttttaaagtgttaaagaaatgatgaggctgggcgtggtggctcacgcctgtaataccagcagttcgggaggctgaggcgggcggatcaggaggtcaggagatcgagaccatcctggccaacatggtgaaaccctgtctctactaaaaatacaaaaaaaattagccaggcgtggtggcaggtgcctgtaatcccagctactccggaggctgagg

SEQ ID NO: 549740 - DNA, 549 bp, Homo sapiens
cctattgcacttaatctaattagggatttttggagaaatggtggttacatagttctcattaactgactaaaaaactgtaccatctccagaggtatagatattaaaaagcgggggagrgggatgattccttttaaagctccagaaatgaatgtaagtgttcatattctggtacattaacagtttgttccagtacattgatattttatgtggaagccctactctgcaattaatatgcctgatgcaaattgaaaaacccataatccatccttctctgttggaatgtaagagtatattattattgagaagctacaggataccagaaccattttttaaacttgactgctcactaccttaaatctgcatataaaacagttttgcattcagacgaggtaatacataccggaatatattgtggcgcatattaaaaaaagtgctccaaataaaaacgacctgtgggcttcctttgtagaagaaatttatgcagttccaggcattagggattaatgatagctaagagcaaaagagaaggaatgagcattaaaacattgt

SEQ ID NO: 549741 - DNA, 549 bp, Homo sapiens
cctattgcacttaatctaattagggatttttggagaaatggtggttacatagttctcattaactgactaaaaaactgtaccatctccagaggtatagatattaaaaagcgggggagggggatgattccttttaaagctccagaaatgaatgtaagtgttcatattctggtacattaacagtttgttccagtacattgayattttatgtggaagccctactctgcaattaatatgcctgatgcaaattgaaaaacccataatccatccttctctgttggaatgtaagagtatattattattgagaagctacaggataccagaaccattttttaaacttgactgctcactaccttaaatctgcatataaaacagttttgcattcagacgaggtaatacataccggaatatattgtggcgcatattaaaaaaagtgctccaaataaaaacgacctgtgggcttcctttgtagaagaaatttatgcagttccaggcattagggattaatgatagctaagagcaaaagagaaggaatgagcattaaaacattgt

SEQ ID NO: 549742 - DNA, 549 bp, Homo sapiens
cctattgcacttaatctaattagggatttttggagaaatggtggttacatagttctcattaactgactaaaaaactgtaccatctccagaggtatagatattaaaaagcgggggagggggatgattccttttaaagctccagaaatgaatgtaagtgttcatattctggtacattaacagtttgttccagtacattgatattttatgtggaagccctactctgcaattaatatgcctgatgcaaattgaaaaacccataatccatccttctctgttggaatgtaagagtatattattattgagaagctacaggataccagaaccattttttaaacttgactgctcaytaccttaaatctgcatataaaacagttttgcattcagacgaggtaatacataccggaatatattgtggcgcatattaaaaaaagtgctccaaataaaaacgacctgtgggcttcctttgtagaagaaatttatgcagttccaggcattagggattaatgatagctaagagcaaaagagaaggaatgagcattaaaacattgt

SEQ ID NO: 549743 - DNA, 549 bp, Homo sapiens
cctattgcacttaatctaattagggatttttggagaaatggtggttacatagttctcattaactgactaaaaaactgtaccatctccagaggtatagatattaaaaagcgggggagggggatgattccttttaaagctccagaaatgaatgtaagtgttcatattctggtacattaacagtttgttccagtacattgatattttatgtggaagccctactctgcaattaatatgcctgatgcaaattgaaaaacccataatccatccttctctgttggaatgtaagagtatattattattgagaagctacaggataccagaaccattttttaaacttgactgctcactaccttaaatctgcatataaaacagttttgcattcagacgaggtaatacataccggaatatattgtggcgcmtattaaaaaaagtgctccaaataaaaacgacctgtgggcttcctttgtagaagaaatttatgcagttccaggcattagggattaatgatagctaagagcaaaagagaaggaatgagcattaaaacattgt

SEQ ID NO: 549744 - DNA, 656 bp, Homo sapiens
tttttttttgctaactttctgaacttacttctctggagttacacttttaatttttcttcagcatacctaagcagaaaattgaaattcatctttcttagttataagtcaatgtatacccaagcattctccaggtaacagcctatgggtyaaatctctgatcatatttactctctcccatgtaattttcagccttttgaatacatttcctatctcatggtctaaaatattagccacaaagttcagtgccaatctgtctcctctacaaaacaatctagtgcaatggttataccccacataattttctcctgacaattttctgtgtattactcatccttcaactgtttcggaagcttatgccatgactccattaaaccgtcaactccatcaagaaaaagattttgtcttctggacacccttattcccagtgtcatgctcaatatttggtacatactggcattcagtaaataccaagtgaaggaattaatgagaagaaatgttaggatccatggaggtcacaaaccatgactcatttctctctgtgctgggcacatagtggctgtctatttgttaactggcatacaacattctctgtaatgcacaaaactataccaactgcttcagcagcctcatcatcatcataaatgaataaccaactt

SEQ ID NO: 549745 - DNA, 646 bp, Homo sapiens
aaaattaaataagtaaaaataaaaaataagaaattaataaaaatcttgattgattagttttaaataaccatatgaattattttttatttttaatatctcttcaattttatgtttaaaaattgcacacctggctggtctcagattttattgttcctcatatgtcctgttacaatatattgggtaacttgtttttttaaaagctttcctaaattgttcratacatttcaaagtcagaagtgagcataaaattcataaccagatttggtcaaataatctatggttgtgtagagacttattgctatttaaacaaagggaaaaaatggaaactctttaaagagcaaacagtaggttaaaataagtgtggcttttctcccagtaagaaatttctgaaaattcctgttgttggccaggttgtgctgcagatgttccgacttaccacagagatttcttaagacagatgccaaaaatttggtatgaaaataaaagtgagatttacactcaaacagcccaaggattcctcatcatccaggattctgtgtggttgtattatttcattactcacatctcctgaaaatttattcaaaaacaattcttagaagatagtagatgtctcattcagtgcttgccattaaattactaaaaaaaa

SEQ ID NO: 549746 - DNA, 646 bp, Homo sapiens
aaaattaaataagtaaaaataaaaaataagaaattaataaaaatcttgattgattagttttaaataaccatatgaattattttttatttttaatatctcttcaattttatgtttaaaaattgcacacctggctggtctcagattttattgttcctcatatgtcctgttacaatatattgggtaacttgtttttttaaaagctttcctaaattgttcaatacatttcaaagtcagaagtgagcataaaattcataaccagatttggtcaaataatctatggttgtgtagagacttattgctatttaaacaaagggaaaaaatggaaactctttaaagagcaaacagtaggttaaaataagtgtggcttttctcccagtaagaaatttctgaaaattcctgttgttggccaggttgtgctgcagatgttccgacttaccacagagatttcttaagacagatgccaaaaatttggtrtgaaaataaaagtgagatttacactcaaacagcccaaggattcctcatcatccaggattctgtgtggttgtattatttcattactcacatctcctgaaaatttattcaaaaacaattcttagaagatagtagatgtctcattcagtgcttgccattaaattactaaaaaaaa

SEQ ID NO: 549747 - DNA, 982 bp, Homo sapiens
gcccagctaattttagaaacgagattctccctatgttgcccagattggtcttgatctccaggactcaaggaatgctcctgccacagccttccaaagagctggaattataggtgtgaagccaccatacctgcctataaacatcatctttgacacattggttaacctgtaaaaaaaagtcctctgtaatactagctaaacttctattaacttcccaccttccaaatctgaacatttatcattgtttcttaatttatatttgtattagtctgttctcacgctgctaataaagacatattcaagactgggtaatttataaaggaaagaagtttaatggactcacagttccacatggctggggaggcctcacaatcacggtcaaaggcaaaggagaagcaaaggcacgtcttacatggcagcaggcaagagagcatgtccaggggaccccctgtttataaaaccatcagatctcatgagactttttcactattacaagaacagcatgggaaagacccgcccctgttattcaattacctcccaccaggtccttcccatgccacatgggaattatgggagctacaaagatgagatttggccaaaccatatcaatattctatyttattcaaaagcagacttctaaaatactctaaaagtatagtgtagtgaataaatacatgagaaaggccatatatgaagctaatattcccccaggaaaaaaatatatatatctactaaaatcccatatgtttgttacaaataaaacagaaatgcaaagtggataacataacaattacacagttaattttatcttttttttttttttttttgagatggagtctcactctgttgcccaggctggagtgcagtggcacgatctcagctcactgcaagctccatctcccgggttcacgccattctcctgcctcagcctcccaagtagctgggactacaggcacccgccaccacgcccggctaatttgttgta

SEQ ID NO: 549748 - DNA, 1391 bp, Homo sapiens
ttgcctgagcttcttacaccaggaataatggaatattttttgaagcactggcgttcttgagacaaaggtgtaaattcagagcaaggcagtaagacaaaaatataagaggcaatttattagagcagagaggagcgaatttggagaggagcggtaggcatttgaatttatggcagaaaaggaagcgactcagaaggaaagaggttacagtccaggaaagaaaaagaccagctgtactagcgctcacagggaaagaagaataggtgaataccacctacaattccttattacttttctggccatgtgtttatttgaaagagtagtgtgtgaggaggccccaggcttaacttcctggtaccctgctaacccactaacagttaagtaggaggcccaagcttcagaaacgagagctgggaagtaaaatctcagcactatctactttggaattatcttcgagaaggagtgtacaaatacgtagaaaatcaaaatcccagctaatttttaacagaaggcttaatgccttccaaatgtgtgctattttggctttttttatattgcatgaatttttacaaagcaagtgggaaggtaaaggaagcgtgtttggaggtcagtaaggacacctcaaaggtcatctcatgggacactggatcctcagttttatcagcattgacacagtggggtgttctttgagagcatgttagcccttctgggaggtggggctgaggctagagacaggaaatgatgggtggggatgcggacatcagtatattcatttgtgagatatcggcaaaggttggctcataaccagttacatgtggcagatccgtcaagtctaagttcctttggttgattgtgttaatatgtaagttattatttattctaaatagggatttctaaagaacttgaaagacagtgttttcagtaggtttaatgtcttctttaaagtcttattyaagtataaatttgcccattaaatctatgttcttcagtttctttaaaaataaatttaagcttagcttctctgtcatctaaaaaaatgaacccaagttcagtgtcttcctctgggtttgctataaagctggcaacatgaaataaatggaatgttgggcggggggaggggggcattttacagggcaagttttccttttgtcgtgttactgctttttaatgcttttctttgtaaaaggataggagccattccttctttccttatcctgaaaaacgttaagagggtaggtcagagagatggtggagtcagatcttgcaggtctttgtaagctattggaaacaattaggcttttatttcaagtgagatggggagccatagcagggttcaagcacagggtgatttgtctgtcttgtgcttttaaatgatcaccctgatgactgttttc

SEQ ID NO: 549749 - DNA, 994 bp, Homo sapiens
tactggagaagtagtgggagtgaagctgggaatatgagctgggaaggggcagtcatgggttgaattctgactctgcctcttactagctttcggattggagagttattcaagatatttaacctcaatttctttatctattatttgatgagaatacctagttccctgggtaactgtaatcattataataaataattaatggggggaatgggacattttgttgtttttactattactaatattgctaccaattaatactaacataattataaaacagtaataataaggaggattgctgtctttcagaagagaaagggaagtcatttctggatctttccatacatcttctttctcactaagattcatagccttatctaagaagaaaatcaatctttgaaaccaaaaaaatgaatgtaatgtataggaataaggggtggcggaatttttgtcctgcaaacttatgatgatttacaaacctcataaactcttatctaaataatccacaaagtgagcactcaaaattcaaaagtttttgaattaaaaatggactctgtttagaaagatgcaaccaaaaaacttatggaaactaaaatatacgttctttgttcatctatttccttcagaaaactttcataacagaaagagcccagagtccatttactcaagtgtacatagatattttatttgaaaaatatcccaacttttcaaatcaataagaaaaacagaagaaaaatttattctaagacttctaaggaaaaccattaatctagcatagggtgagtgggatagggaagatctttatcataagtcaacaatgaagaccatgatacctattcttgaacagttggattcctaagtatggctcttgacttgcttaatcctctctttaaggacattttatttkccctatgtagcctttgtggactgcacaataaacacatccaatttcaaggtctcctacataagcagcatagagcaagagaaaacaaaaaatgag

SEQ ID NO: 549750 - DNA, 1114 bp, Homo sapiens
ctgtagaaatatctggagttttaatgatcttctctgtctattaaaggatctgatagacatgaagttttataaggtaaggacccaaaatggatcaggtttttaatgccagaattcattaggcctccaataatgatagagtcaatctatttagcagacatattttttaggtggtgaaaactaagtaaagtaataagaccttttaaatttaatgtttattccagaggctgatgattcaaaagaaaatctttcttagtatgatggtaatttgtttttctgctgtatttttcttcagagacctggttacttttctctcttccctgagggcaatagtgcactttttgctcttatattatgttgctttatgggaaataggtgggaagcccttgctggcactttttctagactgaattctctttaattctgttaccagggcctgggggatgaagcgaatccctcagacagcccttcacatctggttcagccctatctgcttagtaatggtcccaccctctctcattaaaagcatttgatttgtcctgagtatattattagcaatcataggacttggttcaagattggattgagataaggggttgaacatatagttctaccatccttctagtccttgaagtgatttttaaaaggttgctaagaaagactaagtcctttgatacaagattccttcaccagggagcagaaatgttgatatactcttgcaacagaaaagagtatagggtttggttttctacagggtagagaatgtggggcactgtgtgtccctgtaatcccagccactggggaggctgcggtgggaggatcgcttgagcccagaagtttgaatccagcttgggtaacacagcaagaccttgtctttaagaaaaaaaaattacatgtaatttaaaaaataaaaatagggacgggcgaggtggctcacgcctgtaatcccagtactttgggaggccgaggcgggcgcatcacgaggtcaggagatcgagaccatcctggctaacacagtgaaacccygtctctactaaaaatacaaaaaaattagccgggcatggtggtgggcacatgtagtcccagctactcgggaggctgaggcaggagaatggca

SEQ ID NO: 549751 - DNA, 587 bp, Homo sapiens
gggtggccacgtccatacctgagacccaatcctggccacaggaccataaagaggaggaaagaaatgaagtcacagataaggaaaacatggggaagaaacactgctacatcctactgggagggagggttcgagagtggcaggcccaggtgactagggaagggaagccaggctaatgacaagtggagccaggccagcatgatgggaccatggctgactgagaaagtggtgccatctgtggggccggagctactgctcagctccattctacagctgccatgcaggaacgcatgccacgctgtcaaatctcccttttcttagagcaagacaagtgtctagtataaaccaaaacatacctgtgggccagatgccatctagaagccccagagtgtaacccctggtataaccaatccataagaggtgaagatttttaaaacccttatgyttcagagcctagacaagacccaaccatgcgggaagacaggtgagaacttgttattcgccccacccccttctaccaatttcattcttttattgaccaatatttgtggagcacccggcattgggactatagttagtgacactgaaat

SEQ ID NO: 549752 - DNA, 587 bp, Homo sapiens
gggtggccacgtccatacctgagacccaatcctggccacaggaccataaagaggaggaaagaaatgaagtcacagataaggaaaacatggggaagaaacactgctacatcctactgggagggagggttcgagagtggcaggcccaggtgactagggaagggaagccaggctaatgacaagtggagccaggccagcatgatgggaccatggctgactgagaaagtggtgccatctgtggggccggagctactgctcagctccattctacagctgccatgcaggaacgcatgccacgctgtcaaatctcccttttcttagagcaagacaagtgtctagtataaaccaaaacatacctgtgggccagatgccatctagaagccccagagtgtaacccctggtataaccaatccataagaggtgaagatttttaaaacccttatgcttcagagcctagacaagacccaaccatgcgggaagacaggtgagaacttgttattcgccccacccscttctaccaatttcattcttttattgaccaatatttgtggagcacccggcattgggactatagttagtgacactgaaat

SEQ ID NO: 549753 - DNA, 1091 bp, Homo sapiens
gaaaaccctcccaccacatgagattgggaggacaacgctgcagtgagctgtgattatgccattgtacttcagcctgggcagcagaataaaaccctgtttcaaaagaagaaaagcaagaaagcaaaagaaagaggaaagaaagaaaggaagaagaaagaaagaaagaaaaagaaaggaagaaagaaagaaagaagaaagaataaaagaaagaaagaaagaagagagagaaggaaggaagggaggaaggaaggaaggaaaagaaagaagagagagaaggaaggaaggaacgaaaagaaagagagaaagaaaaagaaaaagagaaagaaaagaaaagaaaggaagcaggcaaagatagaaaaaagatatctcaacccctgtaaaccttatttccccatgttttctcataataaatttcctttcattgaaatattctgagaatgcttttaattccttgaaaattgagagtccacctaatacataaaatatttttctagtattttttttccagtagactggcttaaaaacaatgagtagaataaatacagaatagttttagtctatcattgccatagtcaatattaaacttggtcttaatttgaaaacctaatccattaaaagtaccacaagcctttgagaagaaactgaaatagtaaaccactgctttagtttagaagtttagctgataagaaacacaatcaaaatgctcaaccttgacacctaagataggaaaggtgagaggaaagtccctgaagtaccacaggtttgcttccttctaagtatattctccgataactatcaagcttaggggttagaggggtaaaaagagagctgagaaatatttgaatcttcaattacaaatcctagaaataggaaataatgcactgagagggattttttggtaggagaaagtaaatcaataggaaaaaattaactctgtgcaactactttttcatttktgagtattaacttttgtttttataggtttttcctctgaaaaagaagaacgcccttggggcactataatttgtgcaagttaactggattttttaaatatagtattcagaggacagtatcttgaaaataaatttgta

SEQ ID NO: 549754 - DNA, 629 bp, Homo sapiens
agaaagtcagacactcttggtctgtaaagcgtaggtttagtgtggagctaaatgtagctctggcctcattctgcttttctgtctcccaaaggtcatgccatttttcttgatctgttttcctatttccttgttccacagtccatcattggatgctctgctgcctaggcaacagcgttcagggcagctctcagcaacgtgttacaggagaatgttttgagctccacgcatgtagtatttcctgcaatccagggtgtgttcttagtcttcttattgtcagtttacacccttgtgttgctcagtgaaactgtctgggcccactgtgcatcttcttgggtatgggatctgagagtaaagagttgtctgtatttcagagwtgtcattgtcaccatcttcaggtgaccatactgatgccggcagcatctcactgcatccccactcctgtaagtgtctgatcaatattcttttgaactgtgctatgttgtcggctgggcactcaggaccacagcattgactttcacttgcatggcaaccacaggaaaaatgcagggaacaacattcgcttgtctgcacaggatttaccagctatgctaaaacaggatttgtagaatcaaactatgaaagcactacca

SEQ ID NO: 549755 - DNA, 962 bp, Homo sapiens
gaattactaagtcaaaatattttctcctttttaagcttcccaacacaaattgccaaaatatcagctagaacacttatgccacttaacatccccaccagcatgtcctgttctctttttatgctcccttcattctgcagtgttcttcaacagtagggcacttcactttttttcttttttctttttttttttttgagatggagtcttactctgtcgcccaggctggtgtgcagtggtgtgatctcggctcaccacaacctccrcctcccgagttcaagcaattctcctgcctcagccacccaagtagctgagactacaggtgctcgccaccatgctcagctaatttttgtatttttagtaaagacagggtttcaccatattggccaggctggtctcaaactcctgatcttgtgatccacctgcctcagcctcccaaagtgctgggattacaggcatgagccaccttgcctgggcaatgagacagagtttcgctcttgtcacccaggctggagtgcaattgcatgatcttggctcactgcaacctctgcctcctgggttcaagcgattctcctgcctcagcctcccaagtagctggaattacaggcactcgcaccacacccaactgatttttgtatttttagtagagatggggtttcaccatgttagccaggctggtcttgaactcctgacctcaggtgatccacccacctcggcctcccaaagtgctgggattacaggcgtgagccactgcgcctggctcgcttcacatttcatggtgggaaacctgaagcacattttgctacaaagtcccaataggaactcagaaatcacaaagaagtctttaactctagttataattctctaatgggatattttgatgaacgcattatctttgatgtgcacaatatgttaaagataatagaaaattctacacctagacttcactaccttccattatctccctg

SEQ ID NO: 549756 - DNA, 962 bp, Homo sapiens
gaattactaagtcaaaatattttctcctttttaagcttcccaacacaaattgccaaaatatcagctagaacacttatgccacttaacatccccaccagcatgtcctgttctctttttatgctcccttcattctgcagtgttcttcaacagtagggcacttcactttttttcttttttctttttttttttttgagatggagtcttactctgtcgcccaggctggtgtgcagtggtgtgatctcggctcaccacaacctccacctcccgagttcaarcaattctcctgcctcagccacccaagtagctgagactacaggtgctcgccaccatgctcagctaatttttgtatttttagtaaagacagggtttcaccatattggccaggctggtctcaaactcctgatcttgtgatccacctgcctcagcctcccaaagtgctgggattacaggcatgagccaccttgcctgggcaatgagacagagtttcgctcttgtcacccaggctggagtgcaattgcatgatcttggctcactgcaacctctgcctcctgggttcaagcgattctcctgcctcagcctcccaagtagctggaattacaggcactcgcaccacacccaactgatttttgtatttttagtagagatggggtttcaccatgttagccaggctggtcttgaactcctgacctcaggtgatccacccacctcggcctcccaaagtgctgggattacaggcgtgagccactgcgcctggctcgcttcacatttcatggtgggaaacctgaagcacattttgctacaaagtcccaataggaactcagaaatcacaaagaagtctttaactctagttataattctctaatgggatattttgatgaacgcattatctttgatgtgcacaatatgttaaagataatagaaaattctacacctagacttcactaccttccattatctccctg

SEQ ID NO: 549757 - DNA, 962 bp, Homo sapiens
gaattactaagtcaaaatattttctcctttttaagcttcccaacacaaattgccaaaatatcagctagaacacttatgccacttaacatccccaccagcatgtcctgttctctttttatgctcccttcattctgcagtgttcttcaacagtagggcacttcactttttttcttttttctttttttttttttgagatggagtcttactctgtcgcccaggctggtgtgcagtggtgtgatctcggctcaccacaacctccacctcccgagttcaagcaattctcctgcctcagccacccaagtagctgagactacaggtgctcgccaccatgctcagctaatttttgtatttttagtaaagacagggtttcaccatattggccaggctggtctcaaactcctgatcttgtgatccacctgcctcagcctcccaaagtgctgggattacaggcatgagccaccttgcctgggcaatgagacagagtttcgctcttgtcacccaggctggagtgcaattgcatgatcttggctcactgcaacctctgcctcctgggttcaagcgattctcctgcctcagcctcccaagtagctggaattacaggcactcgcaccacacccaactgatttttgtatttttagtagagatggggtttcaccatgttagccaggctggtcttgaactcctgacctcaggtgatccacccacctcggcctcccaaagtgctgggattacaggcgtgagccactgcgcctggctcgcttcacatttcrtggtgggaaacctgaagcacattttgctacaaagtcccaataggaactcagaaatcacaaagaagtctttaactctagttataattctctaatgggatattttgatgaacgcattatctttgatgtgcacaatatgttaaagataatagaaaattctacacctagacttcactaccttccattatctccctg

SEQ ID NO: 549758 - DNA, 1336 bp, Homo sapiens
tggcctcccaaagtgctgggattacaggtgtgagccactgtgcccggccacaagtttatgtaatcaaagttttacgtgacacagagccttcagcaaggaagttctaagaccagggaatactgttttgatgcttaaattcaatgaagagtgaacagccatgcagaaatgggagtggacgaaagggtgtgatctaacggcgagagactgcgtgcggaacccagcagggtctgtcttccagatacttctcggcctctctgtgcaacattccttcctcctgggtgtgggcagaacctctctggaatgagggtcttccagagagaagggagagcgatctttctagcttccacggcttgctttttatttttaggagaggagctctagtttctatggctgccttggggaagaggaactctggtttctagggcttgtctgggggtgatgggggcgggtggcaggtcaggaaggcaggagaaggtcagagagacgttgcttctgaggcttcttctgaggccttccaatctgctttagctcacggttctcggcctgccaaagcgccatactttggcgcatcgttttctgagccccaacaccaatatcatttaggatttacattaggatttgaagtcgtatccattaaaaccaaaattatgccatccagttcggtgaggagggagccctgctctatgtagagtttcggggtttggggacgatttctcccctatatcctgaccgcagggatagccgggggctgggacgcacttctgcgatgcttaggaaactttgctgttaattcagaggcctcgcccagcatgctgaatgccagaattaggtggggctccccctaggagtgcctggtcctccttctccaatcttgttcttccagacagaaagctgcgaatttgctgtctctggagggccgtgggttctgggatagatgatgggagaaagagaaggggaaaaaaatgtcctgccttcgaactggcctccaggtcaaaatcgctgcataccataagcaggtgaatagctcagcaagtcagttctttgggataactgagcaaatatcaaagccatcagactctcagaaaacgctatttgaaaggttttgttttgtttttttttgttttaaaagaaaaaaagggctgcartacattgcatacactaagggcgtctctggagaatgttctatttgggctcgacaggaacctagaaggtccttctctcctgcagggcacccacactgccatcatcactatggatgcacactagtgcgtattttgtgtacatctgtaacatgctcaggctattcttttattattattattattttatttattta

SEQ ID NO: 549759 - DNA, 826 bp, Homo sapiens
atacaaaaatttgtcaggtgtggtggcaggcacctgcctgtagtcccagctacttgggaggctgaggcaggagaatcacttgatcccgggaggcagaggttgcagtgagcccagattgcaccgctgcactccagcctaggtgacagagcaagaatctgtctcaacaaaacaagggaaaaagcacagaacagggccctacatgccacactacacactccagatcaacatcrccacgaaggcaccgcctccccaacccagaatcccaggcgactgcgaacacacaggcggctgacttaggggggtttattgcccctagcatcttatgattagttggtaattcaacatcagtcctcagatatgtttcttataaattgctgtcaaggcaggtttcctctaatctatactcaaatttataaatatatatacatagttatatatatttttgtagagaccgggtcttgctatgttgcccaggctggtctcgaacttctgggctcaagcgatcctgctgcctcttggcttctcacagtgttgggattacagatgtgagccactgcactgcgccacttcattgatttaaagtcagcattccaaaccactgaagacaggccctgctaactactcaaatggccatggtgtgccccctgaacacctggtaagtgagctctgtggtcctccaccagagaccctcaggacagaactgagcagtcagcacaaattcatctccagctgaagaactgtgtagtgttgcttttttttaagaaaaaccagaaagccaggtttccctgacattttgaaaggaaacccaggtggtgctaagagggct

SEQ ID NO: 549760 - DNA, 784 bp, Homo sapiens
ggccatgcctggaagaatggatgtaaacagtagatgtcagcatgaatgagtctctggtgcctgccttctataccggaatgtcctgaacagctctggagcagacctgggctataagatttgggagaagagcatgaacaggtttgtggggggcacattttgggtgtaaagccattatttcaacatgtcccaaagtactatttgatgcagcttggcagcacaaaaatgcctgtgcacccgtagggagtgtgatcctgaggactttggcgagaacatygtggcctcacaaatgggaactcagggttaacatagaaaaaccaggttttgactgcagctttccacgggtacatttagtgattctgaataaggatttctgcttgctcagggttgtgaaaaacggatcaacattgtaggggaggattagataactcgaaaactgtcccatcgcaagatatctcagaatgccagcacacagcagggcaaggaaggcagaatggcatctgccaaatactgtgacgggacaaagctaggaggtgggtgcacagatatttgctctatagaccttattctttctttatgcttaaaatgtttttaaaaatgttttaaaatttaaaagcctaattgaagttagctgtgtgtggtggtgcacacctgtagtttcagctgttggggaggctgaggcaggaagattgcctgagcccaggagtttgaggttacagtaaactatgatcataccctgcaaatagccactgcactccagcctgggcaatatagcaagaccctgtgt

SEQ ID NO: 549761 - DNA, 602 bp, Homo sapiens
aatatattcatcttttagtcttttttctaccattctctcaatgtttccatatttaaataccatttcactaacctccccccgtccccgatacacagaaacacctagcaataaagctttatcctgaggcacattctacagaaatttatgagtctgaggataatttgattcacttgtctcaacctatcactaaatacycacattgacattaatcaaattttgagtagaccgatcagacacaaataaccaatgaaatagctatcccagttaaatctcaaattgtattggtcaattaatattgacttcagagaattcatcacctcaaacttcccatatcccaaagctctcaatttgcttttcgtaaaaatgtagtatgtggaatggaaagtacacagcaccatcttagatttgtttctaattaaaataaatagaaatgtcttatattcttatatagtaaaatctattaattagtagttgtacctaaaatggtgtacataatttgatgccagataaatgagctggataattgatatcactaaaaattttaaattactctaaatttagcttacatttaaaaattaagtatggaatttttatttaacaga

SEQ ID NO: 549762 - DNA, 1046 bp, Homo sapiens
gcagcaacagttcttctgttggggactagtgagtgtgtgctggggaaggctcacctctgcttcctcggtggttccaactctgcttctaagaaaaattactcattctaggactgggacagagaaaatacaagattagtttagaacatcttgtgccagaaagtaaaaaggtgctgacaagagtaacagagacaaataaaaaagacataaagtcagacacaaagaaatgtctaccactggcctgatcttggggaattggagcaccagaatcatgagctttcccttctcctttatttattggttttatttctccatgtagaacaaagaagagaatatgaaaataatcatctggcaaccatcacagtaatacttgttcaaagacaagatatcaatgaaatgctaaatctagtgggtttttaggagtaaccagatatttacagagcctcaaagtatctccacacaaaatacggttaacctacaaaaagaaattcataacattagtatggacaaacctggcaggtactccttaagtatcctactatatatagtaataaaacctgcaaaatgcaaagaagccttcgacgacctttactaaagtatcaaggatgacttggttgtttggcttattaaacagctgacattcgggcaatttgagtatgtcaaactccataatactggtgttcatttgcaagatccacttaaaacttaaggaggctaaaaaacrtcatttaaaataccatataaattttcatcatacatatgatatgaaaatattctactttagtaaagattgtgatgttatatattttataagaaataattaaaacttcatgtaaatagcccagtaataaagttttatgaccttttaaatcacacaacttttccttaagattttatggttaaatattctctttattagatgtggcttaccagtggattctagagaagaaagtagacaggagcaagtgcccaacacagcaaaagctggaaagaaaaagaaaggattatgttctctacccaaaacatttcagttaactaagtgtgagttt

SEQ ID NO: 549763 - DNA, 1165 bp, Homo sapiens
tcaccatgactgtcacccacaattttcccaggagggagacaccagtaggaaagagaacagcccctgtgatgtcagggccaacctgtctccagcctccgttctgctaagtaactctagaagttcctctcctgtctctggcccaactgaccatgtgtcagatgcctgggaaaaaggaacacagacttgatgatgattcctggttctgagctcatgtcgctgtgctcccaggctgttgacacaggcaggacccctgggcttcttggattcaagcacacagttaataacacaaaccctgacagcctaggcttgagctggggttcgttrggggtgggtggcagtggtaggggaataacttaggaaagttatttaagctgcctgggtctgaatttccttgtcataaaataggggaaatagttgtacttacatggcacatctgtgatgtgaattaaatatctggcacctacaacagtgcctggcccccaggatttggtgtgtgaagagtccaggtattggtacgagtccatgtccactgtcttccctgatccccaaacccaggtgcacccattagtaactaaaatgaggcagacaaaagggatgagtgatgagcggcagtggttgccagaggtaggtccagggactatatttcttaagacattctgggtcaggaataattacatagaatggagccaataattccaaatccatgtatttagttaataagcttttatttagggcatgcaggtgccaaattttgtcccaggcacttacatatatttaatcatttagtctcctcacaacccatgagaaataaacatactgtactatcattatctacaaagaaacatggaataagaccctagagagagcctccagcaaaagggtgtctgtgatcattgtacatttttcaaaacatgttcaatgacaaaaaaaccagctttataaagtgcatgttgaactgtgatataactagcagtgcatctaagagtgaaacaatgaacattaaaaatgaaaggatccttgggaaacaatccagcccaccttttgtctctgttttggtacaattgtgttttttgtaaggcatgtttttgttccttcacaatgtactatttacagcaaacagcaatatttttacctttccatctttctgtcctccctgaaagctaac

SEQ ID NO: 549764 - DNA, 1165 bp, Homo sapiens
tcaccatgactgtcacccacaattttcccaggagggagacaccagtaggaaagagaacagcccctgtgatgtcagggccaacctgtctccagcctccgttctgctaagtaactctagaagttcctctcctgtctctggcccaactgaccatgtgtcagatgcctgggaaaaaggaacacagacttgatgatgattcctggttctgagctcatgtcgctgtgctcccaggctgttgacacaggcaggacccctgggcttcttggattcaagcacacagttaataacacaaaccctgacagcctaggcttgagctggggttcgttgggggtgggtggcagtggtaggggaataacttaggaaagttatttaagctgcctgggtctgaatttccttgtcataaaataggggaaatagttgtacttacatggcacatctgtgatgtgaattaaatatctggcacctacaacagtgcctggcccccaggatttggtgtgtgaagagtccaggtattggtacgagtccatgtccactgtcttccctgatccccaaacccaggtgcacccattagtaactaaaatgaggcagacaaaagggatgagtgatgagcggcagtggttgccagaggtaggtccagggactatatttcttaagacattctgggtcaggaataattacatagaatggagccaataattccaaatccatgtatttagttaataagcttttatttagggcatgcaggtgccaaattttgtcccaggcacttacatatatttaatcatttagtctcctcacaacccatgagaaataaacatactgtactatcattatctacaaagaaacatggaataagaccctagagagagcctccagcaaaagggtgtctgtgatcattgtacatttttcaaaacatgttcaatgacaaaaaaaccagctttataaagtgcatgttgaactgtgatataactagcagtgcrtctaagagtgaaacaatgaacattaaaaatgaaaggatccttgggaaacaatccagcccaccttttgtctctgttttggtacaattgtgttttttgtaaggcatgtttttgttccttcacaatgtactatttacagcaaacagcaatatttttacctttccatctttctgtcctccctgaaagctaac

SEQ ID NO: 549765 - DNA, 578 bp, Homo sapiens
gcagatgccatcagcatatgcccttagaaactttggttgttttgtggcctggagaagagcccagaattatggagcctaagaggcagcacctctgctttctgaagaggaagccgtagtgccgtggacttcaccacgtgcacagtggctgcatccagacctgaatgcccctctcattactcaccggaagtgagctttgaacacttcacacaggaagatgactcgctcctccaacaagatgcagaaagtctttccaagcaaatgacttgaagtgtttaaatattctgtttcttagtctgctttttttctgttaaatccttcagcttgaatgagcacctttatctgcaaattgatctggttgtagcatcccttgaccatgtaggtggatttttaatttgtacttaasgccagttacaatatgccatctgcaactctgctccctttatgctcctgtagcactgctatagagaggaagggtttgtcgtagcaatgggaaataaaacaatgagcatacaacttttacaattggaaatgaagaagcataaaaaaaaataacggctgatatttgttatcggtcaggc

SEQ ID NO: 549766 - DNA, 1613 bp, Homo sapiens
ctataggataacatggaatggatattaaatctcaacccaagccttcaacttccctgcctcttctcccttcagttttcttctcgtatctttcttccgagcttctctaagcagccttcaggtccctaaacacaagacgttttctcatacttctctgcctttgcatgcacgtttctttccaatcttttctgcctggtaaggcccactggatcagctcaaatgtcacctctcccataaagcattttctaataatgtctccttctgctcccatctggcacctttttcttatagcatatatcttgtgcctttagaatagtttctatttcatctccacattccactctaccagaatgtgagttccttgagaatagggattatattttgctcatcattgaatccccacagacaagcagagggcctcaaagagactcaggaccagaggaatgccctgctttatgatgttcaaaagtccaaaaccaaacaactcaagttaggttccagagttaggaaagaatagttttacattctggggccatcccagctgctaaccctcttcccctcttctatgagatcctacttgaccaccatagaggtgggtggaggaggcaagggacaatcaaaccagaagtcatggcctctttccttggttcatgaatgcacttctctagtaatgaaatgacatggaggaatagatggattagcatgattcctgtctcagcaagcaaacattgggtactaacttctggacccctgaaatatgtctaattttactaacagaaagtcccctctctcattaccaataaagctggttgttttaaatgaagacacatctggaactgtttttgtgcctgcccaaggacacacataggctccatttccaccttcaaaactaatgtttcaggcagacccatttaatgtaagaagatgctcacctgcattagtggaggcaggaagggacactgtgtgtggctggatgtatgaatgtgctaacagcttaattcttttaagaacactcactaagtactgggctttagaacttgagggttggccaggttgactttgagggttgatccatcacgagttatgcacctggaaatgaatgaagtatatttactagaagaaactaagacttggaattatgttggaggagggtttgagctcacttgttcgttcagtcatcaaacatttattttatgaacatctactatatgccaggcgctacattaaaagtttgggagtccattgatgaagaagatagggttctgaccaggagacacagaggttcataatacatttttgtatgtgctatcataggatttttgataaaatgttatcatgctcattagggaattattcattccttttgaagatggagttactaagggaagctttacagagaaggtgtcacttacgccaagacttgaagaatgggtaggatttatcagttgaactagaaggaaaggtattccaggcaaatacatgcaagcagaarcatgaaggggtgaaagagcatgggatttagatccatacaatgatatgtttctgatagtgggcatgtagctggtcagttcatggtttattaacccttttttttgagtcatggaactctgggaggg

SEQ ID NO: 549767 - DNA, 1667 bp, Homo sapiens
gtttttatcaataaattatagttaggctcataaacctgcatattttgtgctttaaaattataatattttgtcttttgctttcataaagaaatcttacaaagggaaactagaatctagccttccttgttctttgaggttctatgtgcctcactgatgatagtttattatctctggacttctgcctgttatttaaaactgagaacaagacaggcgtggtggctcacgtctgtaataccagcaccttgggaggccgaggtgggtggctcacgaggtcaggagttaaagaccagcctggccaagatggtgaaactccgtctctactaaaaatacaaaaattagccaggcgtggtggtgggcacctgtaatcccagctacttgggaggctgaggcagagaattgcttgagcccaggaggtggaggttgcaatgagctgagactgcgccactgcactccagcctggtgacagagtgagattccatctcaaaaaaaaaaaaaaatcaatatgtattaggaacaaatattaaaatctaaaagtgggatggatatatatatatgcatgtcacatataacaatatataatatatattgctaataatatgtaatttaatatttcaagaaaagcctgaccatataaaagtgttaaaatattggactataatactgagactcctaaataatatgtaactactatttccaagatgatataaataggagtcttttatcttctggaataattcttcttttcgtcattttactactaattatttgataacccttatttgtgttttagctgcatattaaaatgagtggcaaattaatatagatataatgatttggcagtgttgaataaggctttttcttttcttcacccaaagtgattgtatttaaaatgcatgttaatcaaaattcagtgactcatctttgaggtttgtttattacctagattcattggtgtcaaaactgtttgcttaagatttgatccacacccaatttgtacagtgtcttttgaaatacaggaatttggaaattttattagattagaagaaacacttctgttttatagcctactttccttctactttagttatttttactccatgagaatttttcattaaaaaataattgcagtccttgacacatcaaagacaacataattactgaatgaatctccataattatgtctcttttgtaacttacttttgcttatttatttttattgttcaaaagagcacactacttagaagggaggcagaacctctaaatcagaagtaaacaagaatataagamgaaaagaagtgctataataatgtaggtattctacagactacctagttgcagaaagcaatggattcttagttcttgaggagctaatggaagagatctaaaggaggtagaaattctcaaacatctgggcatttgttagaacttcctttaaacaagggtagtactttgggagaccaaggtgggtggatcacttgaggtcaggagtttgagaccagcctgaccaacatagtgaaaccccgtctctattaaaaatacaaaattacccggatgtggtggcacatgcctgtaatccagctacttgggagactgaggcaggagaatcacttaaacccatgaggtggaggttgcagtgagctgagatcgtgtcattgcactccagcctg

SEQ ID NO: 549768 - DNA, 1667 bp, Homo sapiens
gtttttatcaataaattatagttaggctcataaacctgcatattttgtgctttaaaattataatattttgtcttttgctttcataaagaaatcttacaaagggaaactagaatctagccttccttgttctttgaggttctatgtgcctcactgatgatagtttattatctctggacttctgcctgttatttaaaactgagaacaagacaggcgtggtggctcacgtctgtaataccagcaccttgggaggccgaggtgggtggctcacgaggtcaggagttaaagaccagcctggccaagatggtgaaactccgtctctactaaaaatacaaaaattagccaggcgtggtggtgggcacctgtaatcccagctacttgggaggctgaggcagagaattgcttgagcccaggaggtggaggttgcaatgagctgagactgcgccactgcactccagcctggtgacagagtgagattccatctcaaaaaaaaaaaaaaatcaatatgtattaggaacaaatattaaaatctaaaagtgggatggatatatatatatgcatgtcacatataacaatatataatatatattgctaataatatgtaatttaatatttcaagaaaagcctgaccatataaaagtgttaaaatattggactataatactgagactcctaaataatatgtaactactatttccaagatgatataaataggagtcttttatcttctggaataattcttcttttcgtcattttactactaattatttgataacccttatttgtgttttagctgcatattaaaatgagtggcaaattaatatagatataatgatttggcagtgttgaataaggctttttcttttcttcacccaaagtgattgtatttaaaatgcatgttaatcaaaattcagtgactcatctttgaggtttgtttattacctagattcattggtgtcaaaactgtttgcttaagatttgatccacacccaatttgtacagtgtcttttgaaatacaggaatttggaaattttattagattagaagaaacacttctgttttatagcctactttccttctactttagttatttttactccatgagaatttttcattaaaaaataattgcagtccttgacacatcaaagacaacataattactgaatgaatctccataattatgtctcttttgtaacttacttttgcttatttatttttattgttcaaaagagcacactacttagaagggaggcagaacctctaaatcagaagtaaacaagaatataagaagaaaagaagtgctataataatgtaggtattctacagactacctagttgcagaaagcaatggattcttagttcttgaggagctaatggaagagatctaaaggaggtagaaattctcaaacatctgggcatttgttagaacttcctttaaacaagggtagtactttgggagaccaaggtgggtggatcacttgaggtcaggagtttgagaccagcctgaccaacatagtgaaaccccgtctctattaaaaatacaaaattacccggaygtggtggcacatgcctgtaatccagctacttgggagactgaggcaggagaatcacttaaacccatgaggtggaggttgcagtgagctgagatcgtgtcattgcactccagcctg

SEQ ID NO: 549769 - DNA, 689 bp, Homo sapiens
gtcatcagtattgacttgaaacatttcatgggtccttttctcattattcctgacgagtgtactgggcagcttttgttgctgaatgataattttttatctaaggagaataccagcaacaaagggaaattccatgggcgctgaaaatggaacctgctggagtaggttcagtatgtaatttagtaataccttttcttttctttttttttttttttgagacggagtcttgctctgtcacccaggctggagtccagtggcgcaatctcggatcattgcaagctccgcctcccggttcatgccattctcctgcctcagcctcccaagtagctgggacgacaggctcccgccactacgcccggctaatttttttttttttttttttttttttttttttttggatttttagtaragacggggtttcaccatgttagccaggatggtctcgacctcttgacctcgtgatccgcccgcctcggcctcccaaagtgctgggattataggcgtgagccaccgcgcccagcctagtaatacctttttaaattttatcagtgagctctgctgtagttcctggaaattctggtgtcatattcctttgtgcctgtagctgttcatcttcccttgggccacaagcctgtataataactcatttcactctgatctttggaaacactgtgtgaatctctattttagca

SEQ ID NO: 549770 - DNA, 516 bp, Homo sapiens
gaggtccttcacatcccttgtaagttggattcctaggtattttattctctttgaagcaattgtgaatgggagttcactcatgatttttttaaataaaataaaaaatgaatgttgtttaatgccttttcatcatccaagaatatgatgatataattattctcttttgttctatcaacatggtgagcagcagtaatagatttcctgatgtagaaccatcattcaatacattttggaaagttttatcatcccaaactgatgagatttttttaaaaaaacggccagacacgctggctctcacctgtaatcccagcactttgggaggccgaggcgggtggatcacttgatgtcaggggttcaaaaccagcctggccaacrtggtgaaaccccgtctctactaaaaatacaaaaattagctgggcatggtggcatgtggctgtaattccagttactggggaggctgaggcaggaaaatcactcgaacccaggaggcagaggttgcagtgagccgtgatcatg

SEQ ID NO: 549771 - DNA, 1431 bp, Homo sapiens
agcagctgcagtgcagtttcactgctcatcctcccggaggggatcatacacagcgtcttgctgcgctcttcagctctggagcaygtggcttctttgttctggctcacacctcctggcacacagtacataagcttctcctgggctcaactgcctagaaatgaaattcctgtgtcatgcatggatgcatgttcagcttactgtcagtgccagattatttccaaagtggcttgtccatgtctgctcccaccagtaattttgaagtttctgttgctccatgttctgtacttcgctggtattggcctactaatgtttgccaatgcagtggggacagagcagcaccttcctgtgatcctggttccatttgcctgtgctactgactgtgcctcttcttggctgtggattggggtttctagcaggggagcccagcatggggaaatggagaccaggtgcgactcatggttgctaatcttttcgccagatttcaaaaagcacataacgacatgttttactgctttttcaggtttgaattagtcattgtttggaggatacaaatagatgaagatgggaaggtttttccaaagctggatcttctcaccaaagtcccacagcgaggtagggccctgggtgtggctgctctaggtgacttctcaacatgcccagcaaagccgcctgcctgtttcctctgggtttcaaagggcaagaatcaaaaattggaaatctcattaatgtactttgtctatcaatttttaaatatttttatcaataatcactcaaaaagaacatgaaaagggattgctgccccaaggccctcccaggctgaatgcacagggaatatgcctccagccgtaggtgaggcctccactcactccatctcctcgcccgccactagcatgtcccatcccatgcagctagtcgggaggagtgcggggtcttggtgaggtccatgccagcagaaaacaaaagaccaaaagctgccaccttgaagtttcttacccggtttaatgttttctttatagccctggagctggacaagaacagagccatagaaactgctcctctcagcttccgaaccctggtaggactgcttggaatcgaagctgctctggaaagcctgataaaatcgctttgtgcagaggagaacaactagttccaaaacagtgaacgtggaggatgaagatgctgcgtggaggaacatgcaattttattcaatataaacatttgctattttctgcttagaaaccacaccctgaagacgtgctgtctatgcagttatggcacattatatggaaactctcatgacatgaaaaataaatacaactagttaagtataaaatgccaaataaaagtgacacgtacaatgtggtttataaaaataagcttaacatctgagaaaatgtaccaagtggttgtgtgtcctcagatgtgtgggga

SEQ ID NO: 549772 - DNA, 1414 bp, Homo sapiens
ggcctggtgtgtagacctgtgtccgtccttcctgaggtcttgctgaggttggcccccgagccccattgtctgtggcctggtgtgtagacctgtgtccgtccttcctgaggtcttgctgaggttggcccccgagccccattgtctgtggcctggtgtgtagacctgtgtccgtccttcctgaggtcttgctgaggttggcccccgagccccattgtctgtggcctggtgtgtaggcctgtgtccgtccttcctgaggtcttgctgaggttggccccccgagccccattgtctgtggcctggtgtgtaggcctgtgtccgtccttcctgaggtcttgctgaggttggccccccgagccccattgtctgtggcctggtgtgtagacctgtgtccgtccttcctgaggtcttgctgaggttggcccccgagccccattgtctgtggcctggtgtgtagacctgtgtccgtccttcctgaggtcttgctgaggttggcccccgagccccattgtctgtggcctggtgtgtagacctgtgtccgtccttcctgaggtcttgctgaggttggccccccgagccccattgtctgtggcctggtgtgtagacctgtgtccgtccttcctgaggtcttgctgaggttggccccccgagccccattgtctgtggcctggtgtgtagacctgtgtccgtccttcctgaggtcttgctgaggttggcccccgagccccattgtctgtggcctggtgtgtaggcctgtgtccgtccttcctgaggtcttgctgaggttggccccccgagccccattgtctgtggcctggtgtgtagacctgtgtccgtccttcctgaggtcttgctgaggttggcccccgagccccattgtctgtggcctggtgtgtagacctgtgtccgtccttcctgaggtcttgctgaggttggcccccgagccccattgtctgtggcctggtgtgtaggcctgtgtccgtccttcctgaggtcttgctgaggttggccccccgagccccattgtctgtggcctggtgtgtagacctgtgtccgtccttcctgaggtcttgctgaggttggcccccgagccccattgtctgtggcctggtgtgtagacctgtgtccgtccttcctgaggtcttgctgaggttggccccccgagccccattgtctgtggcctggtgtgtaggcctgtgtccgtccttcctgaggtcttgctgaggttggccccccgagccccattgtctgtggcctggtgtgtaggcctgtgtccgtccttcctgaggtcttgctgaggttggccccccgagccccattgtctgtggcctggtgtgtagrcctgtgtccgtccttcctgaggtcttgctgggccctttgtgtcccccactgggcatcactggaaagcgccgatgtg

SEQ ID NO: 549773 - DNA, 584 bp, Homo sapiens
tgattttataaaataataagctgaaaggactccttatattgtcaaccgttatttagtgaatttctgtactgagtagtgttaaaaccaaaactttagacaaattaaatttaacagtttaattgagcaaagaatgatttgctaattgggcaggacccggaaccagaagaggttcagaacgactttgcagctgctacgtggtcagagaggattatgggtagaaaaagtaaagttaaagaaaacagaaatgaggcccrgaaacatcctgattggttagagcttagcgtttgccttatttgaacatggtttgaagagctggccgcctatgactggccaaaactccgtgactagtacaaaaaataggttacattctgtttacatatccagttgggttgcagttcaccctgtaaggggaaacttttaggccaaacttaaaatatgtaagcaggtggttttcggctaaacttaatttaccagtagctattcactaaaatattaaaatctaaaattaagcaggtctgaaagttgtgaatcattacatcttatgtttttcatactttttcctacttccaaaggtaataaataca

SEQ ID NO: 549774 - DNA, 1198 bp, Homo sapiens
aaaattaccacttttaaaaccatcagatctcgtgagaactcactcactatcaygagaacagcatggcggagaccacccccatgatacatcacctttctcccttgaaacgtggggattacaggtccctctcttgacatgtgggaattacaattccagatgagatttgggtggggacacagagccaaacagtatcagggactattttgcttgtttgcttccacggacagttttcacagcaaactcaggggtactttaataaaaagggaattctaaagaaagggtgttatcaccagcaatgtcctcataaataaagtggttttgccaatagatggctgttgcctggttctcccaaaagcactgccctgtagcacagaatcgctgatcagaaatgttcagagacaaaaggaggagaggaaggagagaaagaggatggcatatactgaaggcttataggcagcaccagctgttttccatgaatgtctacatttcatacaggaggtggctacgtattatagcctttttttttttttttttgagtttcactctgttgcccaggctggagtgcagtggcgcaatctcggctcactgaaacctccgccccctgggttcaagtgattctcctgcctcagcctcccgagttgctgggattacaggtgcgcaccacaacacccggctaatttttgtatttttagtagagacggggtttctccgtgttggccaggctggtctcaaactcctgacctcaagtgatccgcccgcctcagcctcccaaagtgctgggattaaaagtgtgagccactgtgcccggttattaaatgatgaagaaactgagtctcacagagagcaaatactttgtccaaggtcatgtgatgaagacctgatttgtctgtctccagagcccaggctttgtgcaaaatcattttgtccctcaacctacaaaaccacgaaagtgacagccaatgttccagaacgctaaagtaggcagaatttttctaccctcttttgagtgtttgactgcaatacaaccaggttggaaaagtgacctccaatgtattcccagagctgagatccacctgccgccctggaatgctgtagaaatgggccacaggttgccaagacccggagtaccccccagccattggggtggccagggtgcagcctgggacactggagtccctgggcccatgccccttggagt

SEQ ID NO: 549775 - DNA, 477 bp, Homo sapiens
acttgtaattttttttaccccaatcacttccaaataatacttgaatgagattagttaaatgtaagcccagtcctattcccaaaatagtacatgtgtttccaggataagcagattctactgaaaatttatcctccctcattctctcaaagactttctcaaggtcacaaacagaaggaagaagatgttttggggaactaaaggaatggaaagaaactatctacctgtcggattcaggaaccttttagagacagtatgaaaaagaaaaatgagccagctcttttcctagcttttccattctctgcagatgaaatcrcaatatcatttcttttcatagaaaaaataatagaaaaggtaactgcacctatgaaggtgaaaatggtaacctattgtgtttagtattccctcatatgtaggggtaagaattgctaaacatggaaaagttatttttcctgaagtatacagtctgtgacaaaaatg

SEQ ID NO: 549776 - DNA, 631 bp, Homo sapiens
agagactacatttttcactgtcagttattacataacatggttattgaacctaaccactttcaacatgattggaaacttcctaaaactgttactgataaaaagaaaaatccacccaacaaatgccactataaagaaagggctctacttaacaaagatatttccgtacgatcctcagcaggagggtccactgttatttcagcttttaraaattccgcatgcagcacgtgttttctttcctcactgtcattttaaccaataatcctccagattaaatacatctgatcatactcccttaactgtgtatgagccgaaagaagagcatagggaatatgaagaatggaaagaagaagagagtctgagactgatttaaccacagatcctttgtttttcctctaggtaatgacatcagaagtccctgagtttaagtccagggtgtactttctttcttgaaaaggttatttagtacctttgaactatagtttcttcttctacaaaatagggtgcatgaatagatttctcatgggattgttgtgaagattaaatgtacatgaattgccagtcacatcctgggtgctgaagaagtaacaaaacagcaagaagaaaatatgatactcagatagaaaacaagcta

SEQ ID NO: 549777 - DNA, 1632 bp, Homo sapiens
tcatagacagatacaatcagcctgttttccagatttggtgattttggagagtaaggggaaagggagaaaaatacacaatataattaaacattaaaacattatggaactaaaaacaagttagacttttgactttattcagaaagtacatttatacatttgttccaaatgtgctaacatggataatttgcgtaacagaaaactcacattaaaattttaaggaaaaaaagagattaaacwcaaggtttattcttaagtccaattcatattattactggcccacatgtagtcagagttcagcgtaattgaaccagatgtttttcctctttgcaaaaaactgcatattttaatactgaagttaaagataaaaactatgtttatgcatgtttcttttagtagataagtaccataaccttgtccatgaaaaagaaaattatcatttacatggaaacagcagcccttttcaaaataattaatgagcctaatttatttggcaacccaagttgctgactttggtatttgatgctctgataataggatcctacaagggaatatgtttttaccaattatatgtgaaacaacaggaacctatttaaatgtctcattttccttttaaatgcaaagtttataactgtggatgtgaaatcaaattaaaggcagttgtgagcttaagttatccacctcttaattaactatagggccatgctgtgaatcaaaagggtacaaactggaaggctgttactcacagtgatgctcagaatgtgttttggatatagttagtgcaatatagttacaaaatagtacttaagaaaaggcagaaaaggcaaattcatttcatatccaaaaaattaaaaccagatcctttgaaaatttttcttataatttatatgagctaatagtgttaaatatgcagatataaaatttaattctggtgagttgagagtaattctattttaatatcaattatcaattcacatctttagaagtattaagcaaattcccctccccttttaaaaacaaaaatatccaaatagtcaaaattccagtaagtaggacttcttaaaaaacacagcaccaaaaaaacacagtattgtccaaggattgtataattagacattttctcaaagaactttaagaaaaacaaacagtttgtgatttatctttaattgtaaaattctgagaaaatagcaaatagaaacttaatggaaagcaaaatagttttagatactgagaaaattacaattttctacaaatctggacttttatgcagtgattaggtaaggtaatgttttaacaaaagctaataagtgccattttctgtgtatttatgtaatttcaagaaaacaaatttccgattctgtttcggccatcactttcgagtaaaggaactttttttttttcttgacagaatcaaaaacatgagtaaacttggctgttatttaaataattacaaggttagagtatgccaaaaaccagtgccttaaaatactattgtgttattgttgctgcattcagtgcaacagaaagtaattatagagtgattcacttacaaagagtatattggtggaaattaaaaattactataattctttataacttttcctctctctcccataaataatttgatccagttaa

SEQ ID NO: 549778 - DNA, 578 bp, Homo sapiens
tacacaggtaattttttttttaaatctcagccaaatggctgcatccctgcatgcacatggacaattaagcttaatgtcagaaacagtactatttaaagataacacaaccaagaaaatatttgcttacatttctttattcatgytgctgtatatacatgtttaaaacatatatcagctatggtcagaagtgataatataaattactgtattttatgtttctaagacatatatatatatgtgttttacattttaatgaaattgggatgcatcttagaatctgtgacatctttaaatggctagccaggtggcagtcatcacataattgtgattgcctgtgcagattgggcataactgctcatattgtcatcacttcagttaagacaggttgagtgtaattgccctgtaaactgccttcaaaaagattatgttgttcagtatatataaaggcatagtaacagagcaacatcatatataagtctaattctaaaagaactcttagtaaatgtaaaagcatgtgtttaaaaagtgtgtcgtggtttaattggtagtctctttacttttttttaaattatatttta

SEQ ID NO: 549779 - DNA, 1566 bp, Homo sapiens
gccatcctggacacctaccctggcctcccttgccatcctggacacctaccctggcctcccttaccctcttctgctcagggttctccactgggtggcaaatcccaccccggaagagaccctggaggcctttcccctggcttcaggccatcataaaacttactaaattttgctaaagaaaatcaccttctaaataaaattatttggcaatttaaaaatcagaattgcaagataccttagaaactgcctagttgagtctctttaagatgaggaaactcatgcttgcaggtatagacagctctggtgccagtatgtttcatacaagtgatgwgattacagtcagcccattcgcttcctagggtccaacctccttttctataatatgggcaaaataatagtttccaccctccttgtttggagggcatttaccagttcctaagtctgtaggggcgcagcagtgaaaaattgcacaccagtcaagccctcctgacctcacagtctagcatggaagaaagactttgaacaactaaccacaagtgtcctgtcagttacaaaataaaaaacaggatccaatgcaagcttgggaatgagatgccaatgtaatatgggggatcagaacaacttcctgcggggagatgacactctaaaggaaggtgctgtgagaatcaaatcccagcgtgtattgatctaagagatattccttcccacctatgctgggccagaaagtgtgccagtggctggggatttccaatgaacaggactgacggggctcctgccctaacggaacttacagccaacaataaagaacatcatggattacacaaataatgaattaattacaacggcgataaatgtcataaaaggaaatgaaataatgtacataacagtgcttcatgagctttcgcctgccttataaatgctcctctgtgctaagaataatagaagtggcaatgggagaataaagttagaaagaaagcttcctttcttcctgctttcctctctccctcttcctccttttctccatccatcctgcccgtctgtctggggagctggtaagatatctcttgtgaacacaccaggcacatggtaaataattagatagtcatttatggtgttatttttcttctccaatcttacttagaatgtcagatttaaatgttatcagtgtttgttttgatttgtgttttttttttttcctgcatgctttgatccatcagaatgcactggcataattagtaatatctaactttattactaggagaaaatgtaagaccgtggtccccacgcgtcctggctaaggggactaaagtgagtagcagttacaatgcttgatatggcaaagtggaataaaggtgacccatggaactttttaaggagtagactccgttcaagagagaagaccttcgtcaagaaagcctggtgctatagctgcaatgaaccaagagagaaagccggtgggccattccaggagattatggaagaaagtagtagttttaataagttcactataaaaaatattacatttcaaagccaaaaaacaatctcctaaggcttcagtggaaacttagc

SEQ ID NO: 549780 - DNA, 969 bp, Homo sapiens
agtagagttgagtagctgtgacgcagaccatatggaccatgaagcctacaatttttacactctggctctttacagaaaaactttattgacccttgggctcatccctagatatggagtggtgggtgacarctgtagtaaagattttctcatgaggtagcttctcctagttacaaaatattcctggttctgcagcatccaagcttagttgtctggtcgttcaataaatgctgtaagttacttaataccatgcaatccccttttctgctgaaaatagctagagtggtttccattgctgcaactaaaaaccctgaatgtgacacagtaacaaaagacaaataattaggatataaagttaaaaaaatacttacattgtgtatcatctcaaagtatttttgacaggctacctggtaatgtgtcccctttactaaatccaaaatctaaaatgaatgaggaaaaagacaaataaaaattagaaattaagttttcttctaaaccactgtagctcacagctgttggccttttcataatcttcattccagacaggaaatgcaataaatcatgtagcatgttgtacttctgcagcctggacactgtgataattctgacattatacagtagtggtttaggtcagcattaaaccacagatgacaagagatagtgatctttctgacctaccaactgtacatttttgtaactttacctcaacagcaagatgaaaatggatcctggtatgatgactttgacagttattgtcagaacatcatattgcaacatctctccaaaaactgtagatagaaatctagtaatctaatggttggtgcatgaagcaatcaagtatactgtttagatatttattttccacgttaatggtttatacagatacagcataaaatactgctgtgtgcccatcaggaaaatttaatgtaaacccttttggacaagtatctgtgaagagggaatgcttttacc

SEQ ID NO: 549781 - DNA, 969 bp, Homo sapiens
agtagagttgagtagctgtgacgcagaccatatggaccatgaagcctacaatttttacactctggctctttacagaaaaactttattgacccttgggctcatccctagatatggagtggtgggtgacagctgtagtaaagattttctcatgakgtagcttctcctagttacaaaatattcctggttctgcagcatccaagcttagttgtctggtcgttcaataaatgctgtaagttacttaataccatgcaatccccttttctgctgaaaatagctagagtggtttccattgctgcaactaaaaaccctgaatgtgacacagtaacaaaagacaaataattaggatataaagttaaaaaaatacttacattgtgtatcatctcaaagtatttttgacaggctacctggtaatgtgtcccctttactaaatccaaaatctaaaatgaatgaggaaaaagacaaataaaaattagaaattaagttttcttctaaaccactgtagctcacagctgttggccttttcataatcttcattccagacaggaaatgcaataaatcatgtagcatgttgtacttctgcagcctggacactgtgataattctgacattatacagtagtggtttaggtcagcattaaaccacagatgacaagagatagtgatctttctgacctaccaactgtacatttttgtaactttacctcaacagcaagatgaaaatggatcctggtatgatgactttgacagttattgtcagaacatcatattgcaacatctctccaaaaactgtagatagaaatctagtaatctaatggttggtgcatgaagcaatcaagtatactgtttagatatttattttccacgttaatggtttatacagatacagcataaaatactgctgtgtgcccatcaggaaaatttaatgtaaacccttttggacaagtatctgtgaagagggaatgcttttacc

SEQ ID NO: 549782 - DNA, 969 bp, Homo sapiens
agtagagttgagtagctgtgacgcagaccatatggaccatgaagcctacaatttttacactctggctctttacagaaaaactttattgacccttgggctcatccctagatatggagtggtgggtgacagctgtagtaaagattttctcatgaggtagcttctcctagttacaaaatattcctggttctgcagcatccaagcttagttgtctggtcgttcaataaatgctgtaagttacttaataccatgcaatccccttttctgctgaaaatagctagagtggtttccattgctgcaactaaaaaccctgaatgtgacacagtaacaaaagacaaataattaggatataaagttaaaaaaatacttacattgtgtatcatctcaaagtatttttgacaggctacctggtaatgtgtcccctttactaaatccaaaatctaaaatgaatgaggaaaaagasaaataaaaattagaaattaagttttcttctaaaccactgtagctcacagctgttggccttttcataatcttcattccagacaggaaatgcaataaatcatgtagcatgttgtacttctgcagcctggacactgtgataattctgacattatacagtagtggtttaggtcagcattaaaccacagatgacaagagatagtgatctttctgacctaccaactgtacatttttgtaactttacctcaacagcaagatgaaaatggatcctggtatgatgactttgacagttattgtcagaacatcatattgcaacatctctccaaaaactgtagatagaaatctagtaatctaatggttggtgcatgaagcaatcaagtatactgtttagatatttattttccacgttaatggtttatacagatacagcataaaatactgctgtgtgcccatcaggaaaatttaatgtaaacccttttggacaagtatctgtgaagagggaatgcttttacc

SEQ ID NO: 549783 - DNA, 969 bp, Homo sapiens
agtagagttgagtagctgtgacgcagaccatatggaccatgaagcctacaatttttacactctggctctttacagaaaaactttattgacccttgggctcatccctagatatggagtggtgggtgacagctgtagtaaagattttctcatgaggtagcttctcctagttacaaaatattcctggttctgcagcatccaagcttagttgtctggtcgttcaataaatgctgtaagttacttaataccatgcaatccccttttctgctgaaaatagctagagtggtttccattgctgcaactaaaaaccctgaatgtgacacagtaacaaaagacaaataattaggatataaagttaaaaaaatacttacattgtgtatcatctcaaagtatttttgacaggctacctggtaatgtgtcccctttactaaatccaaaatctaaaatgaatgaggaaaaagacaaataaaaattagaaattaagttttcttctaaaccactgtagctcacagytgttggccttttcataatcttcattccagacaggaaatgcaataaatcatgtagcatgttgtacttctgcagcctggacactgtgataattctgacattatacagtagtggtttaggtcagcattaaaccacagatgacaagagatagtgatctttctgacctaccaactgtacatttttgtaactttacctcaacagcaagatgaaaatggatcctggtatgatgactttgacagttattgtcagaacatcatattgcaacatctctccaaaaactgtagatagaaatctagtaatctaatggttggtgcatgaagcaatcaagtatactgtttagatatttattttccacgttaatggtttatacagatacagcataaaatactgctgtgtgcccatcaggaaaatttaatgtaaacccttttggacaagtatctgtgaagagggaatgcttttacc

SEQ ID NO: 549784 - DNA, 969 bp, Homo sapiens
agtagagttgagtagctgtgacgcagaccatatggaccatgaagcctacaatttttacactctggctctttacagaaaaactttattgacccttgggctcatccctagatatggagtggtgggtgacagctgtagtaaagattttctcatgaggtagcttctcctagttacaaaatattcctggttctgcagcatccaagcttagttgtctggtcgttcaataaatgctgtaagttacttaataccatgcaatccccttttctgctgaaaatagctagagtggtttccattgctgcaactaaaaaccctgaatgtgacacagtaacaaaagacaaataattaggatataaagttaaaaaaatacttacattgtgtatcatctcaaagtatttttgacaggctacctggtaatgtgtcccctttactaaatccaaaatctaaaatgaatgaggaaaaagacaaataaaaattagaaattaagttttcttctaaaccactgtagctcacagctgttggccttttcataatcttcattccagacaggaaatgcaataaatcatgtagcatgttgtacttctgcagcctggacactgtgataattctgacattatacagtagtggtttaggtcagcattaaaccacagatgacaagagayagtgatctttctgacctaccaactgtacatttttgtaactttacctcaacagcaagatgaaaatggatcctggtatgatgactttgacagttattgtcagaacatcatattgcaacatctctccaaaaactgtagatagaaatctagtaatctaatggttggtgcatgaagcaatcaagtatactgtttagatatttattttccacgttaatggtttatacagatacagcataaaatactgctgtgtgcccatcaggaaaatttaatgtaaacccttttggacaagtatctgtgaagagggaatgcttttacc

SEQ ID NO: 549785 - DNA, 525 bp, Homo sapiens
cttgttgaaatgaatgttgagattcctaaatgtaatttttatttctagttggaccttatctttttctcagagaattcaacaaaatctaatcatgtaatttggttagttaacattttaaaacgattcaaaacaaaaatacctagaaaataaaatttacaaataaaatataacatatcaaacaagaaaaaaagtcagtgttgaatatttttaaataccagaggctgttctttgcattaatttactatttacaaaaacactatggggttggtgaagttactattttcatagtacggatttttcggaaagtcaaaacaaaaacaaagtggacatagaacttactcartgtcacctaaaagagttcaacaaagagagtctggttttccattctgtgtttaaaccactgtgctgtacttaatcgctggtagggataaatgcttatatttgtttttataatttttttttgcataactaggaaaattaaagaaacagccttttttgattttcactaaaacctcggatttgtgc

SEQ ID NO: 549786 - DNA, 536 bp, Homo sapiens
ataaacaaaacaatttaagtaatcttgtagcagttagcaattgcatttagaaaaaaaaaatccatagtggtgactactcttttaagatctctgctataaacagacaaattgaatacagcatgcagggactctgagtgcaatcacattccagctttccarattgagcactacagggaaactctgaagccccgcccaccatgaattctgaatgtctcgtgagggatttactaatatggaggcattcactgatattttcccaaataaacattaaagtttgtggtttgtcaatttgcaaaagtggacatgaattctttaataaacgccagacttcaaatcttctaaatatcaacatgttggaaaatctcatgttggataaacaggtttatccatttactaggctgacatctgtggatgaagaggtaggatggtgccaggctatagttggaaatgcattcatttacgtggcctaggaagatggtccttactatttgtatattccttcctcattatttattttcttatttttaagttgtata

SEQ ID NO: 549787 - DNA, 552 bp, Homo sapiens
aaagaagaatttgatgtatgatagctgaagccaccttctaactttaagatttaggatttaacaatatttgtcaaccttgtattaaaagtatagaaaaaatttataaaattagtgtaatgagacatattgcaaagattgtttattttagttacaaaaatgtgagttgttttggacaatgctatttattttatagtttaaaaccattaattaaatggagatcgactggtggatatcttcccttagattaaaaaacrtatcagaataattgggtgaatagaatctactgctattaatataacatccatcagttatgctgggataggaaaaacaattcaatatgattatatgaaacaacttcaaaataagaattttcatctaatcatgaagttagagtgattcaaatagtatcatgagtcactacagagttctattaattatattgcttggcaatataatttgatatttcttgaagttgtgtgttctaactatattgttattcattgagataaagctggccatttccttgttttgggtagtagcattctgaaaatt

SEQ ID NO: 549788 - DNA, 552 bp, Homo sapiens
aaagaagaatttgatgtatgatagctgaagccaccttctaactttaagatttaggatttaacaatatttgtcaaccttgtattaaaagtatagaaaaaatttataaaattagtgtaatgagacatattgcaaagattgtttattttagttacaaaaatgtgagttgttttggacaatgctatttattttatagtttaaaaccattaattaaatggagatcgactggtggatatcttcccttagattaaaaaacatatcagaataattgggtgaatagaatctactgctattaatataacatccatcagttatgctgggataggaaaaacaattcaatatgattatrtgaaacaacttcaaaataagaattttcatctaatcatgaagttagagtgattcaaatagtatcatgagtcactacagagttctattaattatattgcttggcaatataatttgatatttcttgaagttgtgtgttctaactatattgttattcattgagataaagctggccatttccttgttttgggtagtagcattctgaaaatt

SEQ ID NO: 549789 - DNA, 745 bp, Homo sapiens
gtcctcaaaatggtaaatccttgttagtgcctttatgtgaaatcttagagaaagctcttgagtggaaacatttgtttagcttagttaggaaaccaattatgtcatagctataacagccaattggcaaattagatttttgcactctaacgctatttgcatctgtacaaacaagcttatgctgaagaagtgtgcatgcactgtttcttggctgcttaacatgacactcttcagagagctaggattaagaatgtgtactttattatgcctaatgacattatacataccttggtcacaatgtcatactttaaggtaacataggaattacatttttgttcatttctgcaacttattgagaatgatctgttttggtgtttccacataagaaaatgaggaaaaaaatgtatcattttctttgacatggartaacattttattaagcaatgtttggactacagattagcataaacatgaaaaaggtaattttttgcatttcaatttattgccatagtaataagatgaggtctttttataacatatataatgaaataaatttgtaaaaatgtttgtgcaaagcattcagcaatgtagatttctttatgagtataaactttcaaggatttcatactagctgcctggattagccaaaaatatacattttattgacatatttatttattttcatcataaaaggggaatgagtatatcagttgcttctcttgaatttgaaaatcttcattcatccatt

SEQ ID NO: 549790 - DNA, 614 bp, Homo sapiens
aaagagagtatattttaagtaaatctattaaatagatattttaatattcataaaggcatattcataaagaaggtctggaggaatataactcaaattgttaacagtagttatgttgaagaaggtagagagattatggcaaactttactttctaacttatacatttttaatgattttgaatgaagcattaatttttttttctctattttctttttttttgagacagggtctcatgctgtcacctaggttggagtgcaatggcatgatcacggcttactacagcttcgacttcttgggcacaagtgaccctctggcctcccaactagctgcgactacaggtgcgtgccacygcacccagctaaactattgattttctaatcagaaataacaataaagattttcatgtcagatgtaaataaaaataaggaaactgggtaaatttattttaaattgaaatgggaaattaaaccttcctttttctttttaaattactggtttactaagagagttgaagatagggtcaacgataaccacattgagtgcctatcagcctaccagaaatgaccatgagcccttcaagccttccttcatgggcacataaaatctcttgaatcca

SEQ ID NO: 549791 - DNA, 399 bp, Homo sapiens
  misc_feature 381: n = A,T,C or G
agttcacatatctaaatacaatttttaaatttaaccctttatggaaataactgtagaaaataaaatgtcattgactctgaatgtcttatggttagagtttttgaagtcttgttaaaaatttaagcttcacaataataaaagggttaccaaagtagaaccattaataatagaagttctttggatggattttgcataagctaataataataataataataatagaagttcttcaagcacttttgttagctagattactttggcaaggagtcatatatatatatagtatatataatatacactatatattgtatatataatatatmaactatatatactatagtgtatattacatatttatatataaactatactatatgtagngtatatcatatatttata

SEQ ID NO: 549792 - DNA, 1289 bp, Homo sapiens
aaagtgtccaggctcaaggccaaccaagcctctccaaatcccacagactgcagagagcctgggccatgtctcccctcatcccccaccagctgcagggacatagtcaagatgacaaaagttgtgagcaagggagagctgcaccctgaaacacaactggcatttacagagaaatatagtgggttcacggtggtgctacagatccaccacccagcgctggtggaggttgatttgggaacctgcctcagtattaacattgcagtaatgactttggccccctgcccctgccaccaccagccaagcaaggccttgactagtcaaccaatgagtaccttcaaagccatcactgcagaactaggaacagacagaacagggttatctcrgcaagacccacggaagaaattcccatcagcctcataaacccctctcatgctgatctgtactgtgttcctcctaccaagccagatccccttcatccaaaacatgggagaaatcattaaaatcaaaaggacaatgtttttcctcccacttcttgccattttggcatttcagtgaacgcttgttgtctattcacacttaataattcacctttgtttatgactccatttgttttctcttctcctaaaagattaaatcaaaacaacagatcgatctgggggtagtaatagacatatctcataagggtggggaaggttgagtgagcatctgacaatagcaaatgctcaacaaatcttagctaataatggttcattaaatgtctattgaacacctgctgtgaaagacatgataaagtagtagttatgaacattagctttgcaatgagaactctctggttccaccatctggaaaagattcttaagctctctggacttccaatccctcctcaataaaatgaaaatcataatagtatcacccagggttgttataagtttgaaatgagatactctatgtgaagcccttaccaagcacttggcatttagtaagtgctccgtaaatatcagctgatagtggaggagaaaaagagatggatctttccagtaaggtaggcccagtgttgtgataccaaggaactcacaggtgctctctatggggctcataaggggtctaacccagagggtcagttcagagaaggcttcctgaagaggtcttgtgagaggtccgctgggtagaagtggagagtggggagtctgtgcaaaggtcctgaggcagaagaaagccttgcctcaatggaaccatttgacctaagggaagggaaaaagttgggaagcagaaagagataagactggagatct

SEQ ID NO: 549793 - DNA, 737 bp, Homo sapiens
cggctgtcagccatagcgtgcggtttgctgtgcrgaacactgcaggaggcctcggctcgtgggtctccaccctcagcaggcaaatctgcctgttgccccgagtccgtggcgacttcaggctcagccaatcagcaccaccccctcgtcccgccccctcgggaggactgccttctgattggctgctcggcgctaggcaggccaagattggaagcccaatgggctcggagcagggctctccgaaggaggcctgaagaccggagatacccaggagggtgcggaaaggaagggtcccgctctggcccagcaattggagagcctcgccccgccggcccggggtgcccgggatagccgaacccagggcggggctcccggttatcagcatccttcaggccgccctgggacgcggccgttggtggcctgccagttttgcagacggaatacttagaccctgctgggtggggccttgcgctccatagctatgctttctcagctcttaaaaagtcagcaatcctgggttaaattactctgtacaaaattaaattttgccatacgctaatgtaagtattatttgcaaccaaaggatggatggatgcttttctttttctttcttagctcttcttaacttattcgtggattatcacttactagactagtatactaattatttaatataaaaacactctgaaacgtttatctccgtacagatgggtgttgatttcctcctttaccagagaaaa

SEQ ID NO: 549794 - DNA, 1071 bp, Homo sapiens
gctcagtttaatctgatttaaacaataaattgattcattggcttattcagtcttgtgtttctccctcaaatgataatggaattcctactgtgtgtcagacactatgataggtactgggtagttacaaagtcaaataagatatcgtcaggccaggcgctgtggctcatacctgtaatcctaacactttgggaggctgaggtgagagaatcacttgagcccaggagttcaagaccagcttgggcaacaaaacaagactcttcctctactaaaagttaaaagaataaaaaattagccaggcatggtggcacatgcctgtagtcctagctactccggaggctgaggcgggaggatcgcttgagcccaggagttggaggatcgcttgagcccaggagtttgaggttgcactaagctgtgatcatgccactgcactccagcctggatgacagagtgagaccctgcctctccaaaaaaaaaaaaaatatatatatatagtcattatcctcaaggagcttaagatctaaataaactttataaaaaacataagtaaaaacttatgatagctctacctcatcaaaataaaacaaatgcagaagcaaaagctattttctgaacaggagaagcagcctgttatggctcaaccccactctaatcccagctctgccctgggttcgatggtgggacctctggggagaatggccaaagctgctcagtcccagatggaaggtattttcattactgtcactgtatttatgaaaggaactcatgtctggaatctccttttcacccaaagaattctctttttgtaatttattacaaaattcaaggccatttcattagggggmaatgcgccatgtcattattacaacaactccccctgtttttgttcaattttgaaactgacaatctaaagactatttttagctcagtcaagtgagattatttgtttccttattatgaaaagtttttccttcagactctagttaacatgaattttattctcacttattatgtcacatgctccaattcaatttattttaaagcggattctttggggaaaactgtaaagctaat

SEQ ID NO: 549795 - DNA, 1326 bp, Homo sapiens
tttttttttttgagacggagtctccttctgttgcccaggctggagtgcagtggtgcgatcttggctcactgcaatctctgcctcttgggttcaagtgattctcctgcctcagccttctgagtagctaggattacaggtgcccactaccttgcccagctaattttttgtatttttagtagagatggggtttcactatgttggccaggctggtctcgaactcctgacctcaggtgatctgcccacctcagcctcccaaagtgctgggattacaggcgtgagccaccgcgtctgaccaatattttaaaaattattaataagttattttactttttaaaaatcataccctttgaaatccagtttagacttacaacacatcccaattcagactagccacatttcaagtgcttagtaggtacatattaataatggctattgtatttgatagtgctctacatatttgggaattgctttactgtctaaaaggcagttctagcaggagggatgtctgccaggctattttcactctcattgaaagtgctggctaagagtggcagactaggagtcaggagatgggttcctcacctaggctcagctagcttcatctcacgggtgtgacctttctggagcttgatttcttcatcttcagaatacaaaactttgaataggccatatttgaggccgagctctaggccaggtggcatatctgttactctagggaggagcttttcaggtgttttggatacctttgctttgatcagtgccagcaggtgatgaacgtgccttccttggtcagctgtttagacttcccttgagtgtgaggggaaaaaaaagaaactgttcttcatgcttaccagtggcattatatatgaagaaaaataaccagcacagcaaaaaggaagtgttgcactttcagccactgattctgcagtaccaaataagtaagaaccagaaagtggaatcttcttagtattgacgtttctctctctcagtgactgactcagcatttctctatttttttagactatatttttaggayagttttaggtttataaaaaacttgagcagagtacagagagttcccatatgacctcctcttggtcacttgtgatgtgaacagtcctccacctttttttattaatccgctcattacgatgttgtctttgttaagagttcaggacagttgtcttatagaccatcctatttttctggatttatctgattgttttcctcatggtgtcatttaacatcttctagcctttgcatttcttgtaaagtggaagttaggcctagagagaggcttgattaaattcaggttaaatgttttgg

SEQ ID NO: 549796 - DNA, 1678 bp, Homo sapiens
ccttggctccaagcctccaattttgatgacctgggtgtcctataggaggtacagatgcatttggcccagaagtcagacaagctgatggagcatctggtaggagctagagtagctgcgtgcccagcactgcctgccacacaccaacgaggtgagccagcacataagcgataatatgtgagagctgcatcagtgcttggttcaccaactaccacgtgtaaaaggatatgactcctgcttctgccttccaaatgtcatgcaaaatatatcgtatggcccatgctacagggaactatccagagaaggtgatagtgggaaatatagttcatcgtcactgagttggaataatacaaatccaccagaatatgtaacctttgagggaatatgaygaactgaaacagatctcactaatgagatagcagtctttcagatagccgtggtgtgccagtttcaactttttctgtcgtaagtgttgtgaacactttttctgtcttatagatattcagtgaagtataccgggtatcctgattatttttagaattgttgttgctagcagtcaaaacccacattaaataacccaatctctgcagtttatagtatattatgttgaatagacagagagagtatgctgttttgaacagaacatggaggtataattggactgtggccagatggctatctaaatatagttcaatgcagataggatccgtttcttgttaaaagtttttacatctgctctctaaacagactttttttctctgttttcaaagggaatgtgtttgtgtatttacctttccaaattcacttttccattgtgaagatcgagcatcagtaaaggggtaaaagtgatgcctacttgaggacaatgttgattcctatgttatagatattgctagaagttgagcggggatagtggggcatgaagaaacatccttattccttcccagattctaacaaaatagagaacaggctcacaaactatcagcttcattagttgttaatcacccctggacttagaggcttctgtaaactatggtggtcatatagcttagactaagccaatgggaccttcttccccctgattcttggggattggctgtgaacaccaaatatacagtgcagctatcagtgtatcacttgtctattctaacctcctgcaagatgagcatgctggcctcatgtacccagtcactgttgaaaaccataatgttctgagtcagggtccctgttttgtcagagaactcatgtttgacctggccaagctcctcattaagggtggtggtacgagcctgtgctggtatgttctttgcttcataaaacatcttccaggacagggagagagtgaccaagaataggcctatccatgatgggggaacagatgggcttctggtaagagagtagcaggaagttaaaatgagggcttgaatgaataaccatgcccctcatctgatttcatggaggttcatgggggcaaaagggcctgccacgcatgaaccatgtaccctacccaccaaaaacctgggacattctgcttcctgggggcaggaagtataagaggtcagaataggtctccctgatcttcaccccttgtggatagaggaacagaagtctttagttatgcgaatgttagatggaaggaaaaataactaacagatactgattagtatagatctacagttac

SEQ ID NO: 549797 - DNA, 1522 bp, Homo sapiens
gtttgtttgttgttgttgttgttttgcctcatataaccaaagacccaggcgggcagccacggtgggcatggtgacctctgcatgggaggatgaaaaaggccctgtgcagggacaaaacctcactcaccatgggctggatggaggtcacctagccagtgctagctgcacaggggtctgggaaggaccatttttacctgagttgattgccacccaatcaaaaccaggcttctgctagtgatgataacagcagggatggatgcaggagaaaccatagaaacatccttcttggaaaggaacagggaagccaaacccagcaggtacaatgacagtaagattagctctgcaggagccagaggtcaagagaggggtgagggagattttaaaataattaatttaaaatttccagggaccacagaaggagcagaggacccaagagagtgtacaaaaaatattagctggcaggtttgtcacaggctaaatggtacttgcagaaactgatactcgtagaaaggactcagtcgacagatttagtgagtaggaagatgagaggagatggccaagaagcagcctggagagacagtcacaaaactgccaggagacaaggagggagaatgaatgcttccacgtatatctaaaaggcattccagaaggagagacacaaactatggagaggaagcttgtgaggaaaaaaaatggctgccaatttttccaaagtgaagagagtactcagactgaagaaactcaaaaaatcccacataaaatcaataaaacaaatgcacatatgggcactttatagtaaaacgcttgaacctcatagcatgaaagaaaatcctaaaaccctcagaactgcacgaaggggaaatcttaaactctactcaaagaaagcgattaagaaaatagaagagaaaaatcataagacagaaagtagtcatctcactagtataaaatgacagaattcaagagaataattgtaaataatgaagaaacaacctttcttaattgaaatgctatgttcaattaaactaccttcagataattttagatgcagactgagtttactattgactgttcagtaatcctctttgaaagaaatattaaaggatacatttcaacaagtaggaaattaaaccccaaagaaagatataggaaccaagaaaacctatgtaaataaagttgtgaacacatcagtgactctaaataaacaatgatgtcccccccacccactgacaggagagcattaggacaaatacctaatgcatgcggggcttaaaacctagatgacgggttgataggtgcagcaaaccatcatgacgcacgtatacctatgtaacaaacctgcacattctgcacgtgcatcacagaacttaaagtaaaataaataaatacattttgttaaaaaatgatgtctaaatatatatatattttttaaatactggggtatttaaaaacaaagtgatactgaaatactagtcaacaaaaagrtgagactgggaatggggaaagcttgaattgcatcttctaa

SEQ ID NO: 549798 - DNA, 638 bp, Homo sapiens
aaataatgaagggctaaagagtggttgttagatttgatgtacttcatttcatattgtaagtaattgctatccataaaaattctatggcttctgtataagaaaaagagacattttgacaggcaacacgartatgaagcgacagcaagtacaaatccttggcaactgtcatttcattatcctgctgttgaattcacatccaaattgtgtgataacttatacctgcatgtttgtttttgagccagggtctgtcaaagtagccgcgtttcctgcttaagaatagaattattagccacatgcaaatttatgccatagaaatctaaaaatagcaaggatgttttgtgtttcataaagagggaaaataaaaactccatgtcattttatgcttatactgaaatttccagtgaaacgttcctgattaaataaaagtagaatttttagaaaatagcagataatttatattttaccttattttgaaattaattcaacattagtaaaggtgtttaataaaactaaaaataaagcaaaagtaattcggattgtcagttacattatactacatgtccattacatttaatgcagtagtggaaagctgattatatgttaggccactatcagtggaaagtaacaaaattcaactg

SEQ ID NO: 549799 - DNA, 555 bp, Homo sapiens
aagagaaggaaaagggaaatatgaagctaacactgacattcagaatgtgtctgaccaagacaggtgacattccatgatcagggacaggaaatcagaagggaaaatggtgactttgatactggatataaatttgaggttggagcaaaacattcaggaggttggaaattatcaaatacatatcaagtggcagttaacaatagaagcatttatgtaaattcaataacagagttgaagtacacttggcccacatgggtttgaactgtgtgagttcacatatatgtggattttttccaataaaagttataccaagtgtgcctgcctctcctgcctacccttccacctccccttcctcctgcacctcctcttcargctactcagtgtaaagatgaagatgaagaaccctatcatgatctacttccaggttaaaaaaaaaaaaaaaaaaaaaaaagcaaatatattttttcttccacacgatagttttaagaagcattttattttgtttaggttactttattgtaagaatatatactacatagactatacaaaatatgtgtt

SEQ ID NO: 549800 - DNA, 1472 bp, Homo sapiens
atccccgtgccttcccccaccaccttaaaaatgttgaagcatcttggcatgttgccctcaaaaattttgatcatttgatactttaattcttattctgagaatgtatttcttcactttcaatgccaagaattattcaaaacaatctttccagtgtgatagtctattggattaataacatgaggcatcaaaatttatgtctttggttactaatgaggttgagcttttctgtgctgtgactgtgtaattgtgaatkgcctgcccaatcatttgtccaatttttttattagtgcaaaaacagttttgtgccttgtctctctctctttttttttttctttttcttgagacagtctcattctgtcacccaggctagagtgcagtggcatgatcttgactcactgcagcctcagcctcccgagtagctgggattacaggcgtgcaccaccatgcccagttaatttttgtatttttagtagagatggagttttgccatgttgaccaggctggccttgagctcctggcctcaaatgatccgcccacttcggccttccagggtgttgggattacaggcgtgagccatggcacccagctgccttttctctttttttaattgcttttttttttttttttgagatgcagtattgctctgtcgccaggctggagtgcagtggcacaatttcggctcactgcaacctccagctccctggttcatttggttcccctgcctcagcctcccgagtagctgggactacaagtgtgcaccaccatgcccggctaatttttttatttcagtagagacggggtttcaccatgttggccaggatgatcgtgatctcttaaccttgtgatctgcccgccttggcctcccaaagtgctgggattacaggcatgagccactgcgcctggcctcttaatttcttttttttttaatttttatttgtcctttttttctgtttgagttgcatgtttagcctgttaatttttcttctttattgaataaacatttttagtgtttagtctacaattacttctttagccaaatcatataggtatcttgtgttgagctcccattgttatgttcttaatattctgtgtttgttttgttttgtttttgagacagaatcttgctcttgtcatccaggctggagtgcaatggtatgatcttggctcactgcaacctctgcctcctgggattcaagcagttctcctgcctcagcctccgaagtagctgggattacaggtgccagccaccatgcccggctaatttttgtatttttagtagagatggggtttcaccatgttggccaggctggtctcgaatccaaccttaggtgatccgtctgccttggcctcccaaagtatgggattacaggcgtgaaccactgtgcccagccttaatattttttaatcaattttgatttctttgaagcaaaagttatttagtagtaaattactaaagggcctttttttttttt

SEQ ID NO: 549801 - DNA, 1472 bp, Homo sapiens
atccccgtgccttcccccaccaccttaaaaatgttgaagcatcttggcatgttgccctcaaaaattttgatcatttgatactttaattcttattctgagaatgtatttcttcactttcaatgccaagaattattcaaaacaatctttccagtgtgatagtctattggattaataacatgaggcatcaaaatttatgtctttggttactaatgaggttgagcttttctgtgctgtgactgtgtaattgtgaattgcctgcccaatcatttgtccaatttttttattagtgcaaaaacagttttgtgccttgtctctctctctttttttttttctttttcttgagacagtctcattctgtcacccaggctagagtgcagtggcatgatcttgactcactgcagcctcagcctcccgagtagctgggattacaggcgtgcrccaccatgcccagttaatttttgtatttttagtagagatggagttttgccatgttgaccaggctggccttgagctcctggcctcaaatgatccgcccacttcggccttccagggtgttgggattacaggcgtgagccatggcacccagctgccttttctctttttttaattgcttttttttttttttttgagatgcagtattgctctgtcgccaggctggagtgcagtggcacaatttcggctcactgcaacctccagctccctggttcatttggttcccctgcctcagcctcccgagtagctgggactacaagtgtgcaccaccatgcccggctaatttttttatttcagtagagacggggtttcaccatgttggccaggatgatcgtgatctcttaaccttgtgatctgcccgccttggcctcccaaagtgctgggattacaggcatgagccactgcgcctggcctcttaatttcttttttttttaatttttatttgtcctttttttctgtttgagttgcatgtttagcctgttaatttttcttctttattgaataaacatttttagtgtttagtctacaattacttctttagccaaatcatataggtatcttgtgttgagctcccattgttatgttcttaatattctgtgtttgttttgttttgtttttgagacagaatcttgctcttgtcatccaggctggagtgcaatggtatgatcttggctcactgcaacctctgcctcctgggattcaagcagttctcctgcctcagcctccgaagtagctgggattacaggtgccagccaccatgcccggctaatttttgtatttttagtagagatggggtttcaccatgttggccaggctggtctcgaatccaaccttaggtgatccgtctgccttggcctcccaaagtatgggattacaggcgtgaaccactgtgcccagccttaatattttttaatcaattttgatttctttgaagcaaaagttatttagtagtaaattactaaagggcctttttttttttt

SEQ ID NO: 549802 - DNA, 810 bp, Homo sapiens
gagtagtctagtaaaggctttgcaaacttgtcaccatctgtggacattctggccagctcttgttttcaccctactgacttcttcagacactaggcttttgctttagaccattcatggtttttcttcctcttcaaatcagtaatcaataaatttccactcctttaggaaactctgatcttctggtcatgccaaggtttatttaactggtttgattgtttttctgttttcttggtttctttttccttcttcctgggggtttctagtaattttagtttgatgtctcactttctccattttttatttcttagttttcttctgtgattattttcactgcagctgcagggcctaatcctgggttggcagagaacaagcacttactctgccctaattggaatccaggagagataggaggtgccctagtatgaaaatgtgtttgctcctttctgcttctggtagtctctctgtaggagtwctttacgtattctgtatgttcacttcttatgagatacatgatgtgcaactatagattgaatgtctctgatccaaaaatctgaaatcccaaatgctccaaagtctgaaactttttgagtgccaacatgacactcaaaggaaatgcttattggagcatctcagactcaggtgtttgaattcgagatgctaaaccagtaagaataatgcaaatattacaaaatctgaaacacatcccaagcatttcaaataagggacactcaactggtattttcttttattctacagtttgccttttaccctgtttgttgtgacctttgaggtacagaagtttttaagttt

SEQ ID NO: 549803 - DNA, 810 bp, Homo sapiens
gagtagtctagtaaaggctttgcaaacttgtcaccatctgtggacattctggccagctcttgttttcaccctactgacttcttcagacactaggcttttgctttagaccattcatggtttttcttcctcttcaaatcagtaatcaataaatttccactcctttaggaaactctgatcttctggtcatgccaaggtttatttaactggtttgattgtttttctgttttcttggtttctttttccttcttcctgggggtttctagtaattttagtttgatgtctcactttctccattttttatttcttagttttcttctgtgattattttcactgcagctgcagggcctaatcctgggttggcagagaacaagcacttactctgccctaattggaatccaggagagataggaggtgccctagtatgaaaatgtgtttgctcctttctgcttctggtagtctctctgtaggagttctttacgtattctgtatgttcacttcttatgagwtacatgatgtgcaactatagattgaatgtctctgatccaaaaatctgaaatcccaaatgctccaaagtctgaaactttttgagtgccaacatgacactcaaaggaaatgcttattggagcatctcagactcaggtgtttgaattcgagatgctaaaccagtaagaataatgcaaatattacaaaatctgaaacacatcccaagcatttcaaataagggacactcaactggtattttcttttattctacagtttgccttttaccctgtttgttgtgacctttgaggtacagaagtttttaagttt

SEQ ID NO: 549804 - DNA, 810 bp, Homo sapiens
gagtagtctagtaaaggctttgcaaacttgtcaccatctgtggacattctggccagctcttgttttcaccctactgacttcttcagacactaggcttttgctttagaccattcatggtttttcttcctcttcaaatcagtaatcaataaatttccactcctttaggaaactctgatcttctggtcatgccaaggtttatttaactggtttgattgtttttctgttttcttggtttctttttccttcttcctgggggtttctagtaattttagtttgatgtctcactttctccattttttatttcttagttttcttctgtgattattttcactgcagctgcagggcctaatcctgggttggcagagaacaagcacttactctgccctaattggaatccaggagagataggaggtgccctagtatgaaaatgtgtttgctcctttctgcttctggtagtctctctgtaggagttctttacgtattctgtatgttcacttcttatgagatacatgatgtgcaactatagattgaatgtctctgatccaaaaatctgaaatcccaaatgctccaaagtctgaaactttttgagtgccaacatgacactcaaaggaaatgcttattggagcatctcagactcaggtgtttgaattcgakatgctaaaccagtaagaataatgcaaatattacaaaatctgaaacacatcccaagcatttcaaataagggacactcaactggtattttcttttattctacagtttgccttttaccctgtttgttgtgacctttgaggtacagaagtttttaagttt

SEQ ID NO: 549805 - DNA, 903 bp, Homo sapiens
tattcattgataccttttaaaagtcgtgatgatatattgaaataacattttggatctgttatgttaaataaaagatatttaaataaattaatgctacctgtttcttttttactttaaaaaaatggctgctagaaaatttaaaattgcatatgtgactcttttcttggctaccctgtgctatgtggaatcactttcaaaggagttccrtcaaatagccaaaagtaattcaacaacaaaaagtgagcaacacccaggaattccaatccttaacttgtatctcttttaaaataataaacaaaatccgaagcatcatgaaagcttcttatatcacctttcctcttccaattttctggcacccagtgctgttttgaagcctttaatgtgctactccctgcccctgctgccaagtacatgcaaacgatctctctacctccagctcatgccacatttctctcctctccacctgttccaccagttccactgctgtatccccctttctagagtcttcctgtcctctttgctttttcccatctattctctgaattaggatctccaaggaactggtctctagatttggcagttcctctcaaaagttgagtgaggcagagcagattaccattaaccaaaggcataaaagactgatgaataaaccagattgccaaagggttcgtttaaaacagagagagtccttttcagggactgtgtgctccttctgcagtccaaggaaccctgaccctaggtccacattgtaggtcatgcagggtgtacattgtgcaatgccagggacagcatctataccaagcctactgtgatgtgacatgtgcaacatggtggttctcagtattagagtcgccgagcaggtgaattaacgagtttagtgagttcaaaattagaaacaaaaag

SEQ ID NO: 549806 - DNA, 558 bp, Homo sapiens
gcctttcctaacttgattgtaagcttttggaaggcagcacaccagccacttctttttctgtagtgtcagcacatattggtgctatacacctctgaggtttacagggtgttctgtggatttgtaaccccacagcttgacacagctcagggatttgggcagtagctgcccatctttattagtgtgttttcacgctgctgataaagacatacctgagactgggtaattcataaagaaaaagatatttagtggacttacagtttcatatggctggggaggcctcacastcatggtggaaggggaaaggcacgtcttacatggtggtggcaagagagaatgggaaccaagcaaaaggggtttccacttataaaaccatcagatctcgtgagacttgttcattaccacgataacagtgtgggagaaactgcccccatgattcaatttatctcccacagggttcctcccacaacacatgggattatgggagctacaattcaagatgagatttgggtggggacacagcaaaaccatatcaccatcctagggaggaggatgtggtga
